United States Patent Application Publication US 2005/0228172 A9 - sequence listing, part 44

SEQ ID NO: 169296 - DNA, 581 bp, Homo sapiens
tgtgttttcccaggcgtcagcctctgcagccaccattcccctctctgctgctccgagttcaattgttttaattccacaagtaagtgaggatatgctgtgcttgtctttctgcgtttggcttatttcactcagcataatgttctacaattccatccatgttgtcacaaataacagaatttcttttctttttaggggctggataatactccattgtgtgtataaactacagtttccttatccatttgtcccttaatggacacttagactgatttcataacttggctattgtgaatcatgctgcaatgaacttaggagtgcagatatctcttggacccattgatttcaaatctttaacacccagaagtgggrttgatggatctcttacttaatgtttttgttccatttaacatggatgtccctctaactcttctaaagaatgtcacagatgatctcagttgggctagagtttttcttgacttcatactttgcattcttctggccttaatgccattttggaaaggagccagttgtttagaaatgtgctcctgcttttctaacctatgttcaaaaaagagtaagct

SEQ ID NO: 169297 - DNA, 342 bp, Homo sapiens
agagaaaatgctgtgttctatgggctggttccacgtttaatttttccatcatcctttgtctgttttctttaaatgcatcttttgaaggatataaaaaatagataaaattatgtatacaatgtccgtaatagtagtgctatatatcttattaaagggttatgaaagccrtgttatttgtgacatacacatgctcattaacagtaacatataagcatgcatcaacacacacatgtataaacatacacattcacatacaatgtacacccttacatacacacattcacacactcacacaggcacacacatgcatgaatgcacacacatgcacgaatccacacgtgc

SEQ ID NO: 169298 - DNA, 530 bp, Homo sapiens
ttggtcttctcctgctgaacttattttctttgttatgacggaattagcaagaattaaagggagggggtgttgaagatcattagcacctacttgtaactttcttcctgacataattctaagattgaaaagtatcagccagaccactacggagaaaaaaagtgttatttkctacaacattgcgtgtgaagacaaatacctcatgatttcatctgttgcagaaatctcaaaagtttatcacagcaaatgagaaagccattctggtctttatttataaactccaacgggtttatctctccttcctgaacattaaaatctgaaaggcagtttgcctcttaaccaagcatctgtctctgggagtcatcagcagaagtctgcacaggggaaaaaggcggtctcgccttcgtcagtgcatgggccccgtccagccactgtcagtgatggcgtcctctgtgtcaaatagctatgcccaatttaaaagaaaacaacagcaacaggcttctgttgtcttcaagtagctgcaaaaatccctt

SEQ ID NO: 169299 - DNA, 571 bp, Homo sapiens
cgggatccgatcagctgttctcttcccatgtctctcaycattctttcgtcctacaaactgatagggaactcctccaagacatatgtccctgaagagaaggaagaagccctcattacacacgatgagatttggttcctctcaggttatcttgaccacctggggatgttcagccccatagctaattgcctcaaggaaggcattgaagggcaagaggagacttttgagggtctcctaaaaggcacaataaaacccttgacggtagcccaggaacctgggttatcgcgggccttcattttgacagtacaggcacacacgggaccacagacatgtctgtgagtcctctggctttggaatgacttcatttcgttcatctaaccacctcgctcatggacatctacctgactgaggactccttaatctgcttaaatcctggcaagcacaggacctctgcgataattttttccggtcatggacataacttacaagcactgctgaatgtggacctacttggctccacacaataataaatgtaagtcataaaatccaaaacatttgccagtacaggactcaa

SEQ ID NO: 169300 - DNA, 328 bp, Homo sapiens
gagccataaaaccacccaaatatcttaagtaacagcattttagaaactaatgaaataaagtgagacttgagaaaaaaaaaaaaaaagctkatatgagctctgagagaacttgctctatcactattagcacagtgccacctaatggaaacgtgacataaatgtacagccttgaaaatttagaagattacaaaacaccctatcaagttatacagaaggcacttttcctccacgtgtgtaccctttttcaagaaaataatgatctgtatgttttaaatgattataattttagttggacaaaaatatgcacaggccagacattcacagaatt

SEQ ID NO: 169301 - DNA, 510 bp, Homo sapiens
cagcagaaaataagtacatctgtcaaaaatcatatttatgtgagatgtgtcaatattggtcttgtgtcatttgggctacttaaaaaaamataaaataaaatcctgtttgactccaaaaaggaaaagtcagcccctcctgcatgagtgggagttgcagccttttaaaactgataatcacaaacccctcagacccaaagtaaaattaaaaacacatgtaacattaggcattgatggaaaaggactagatcctagtgtaagcatcctaatagaaggagaggttcaaaaacgctctccagaaccagtatatcagactttctatgataaactaaatgtgccagtacctgagattccaagaaaaactaaaaatttgtttttgcaattagctgaacacgtagcccagtctctacaagtcacctcatgttatgtttgtagagggaccgtaacaggagatcaatggccataggaagcccgagaataggttcctacagacccagttcctgatgaattccc

SEQ ID NO: 169302 - DNA, 510 bp, Homo sapiens
cagcagaaaataagtacatctgtcaaaaatcatatttatgtgagatgtgtcaatattggtcttgtgtcatttgggctacttaaaaaaacataaaataaaatcctgtttgactccaaaaaggaaaagtcagcccctcctgcatgagtgggagttgcagccttttaaaactgataatcacaaacccctcagacccaaagtaaaattaaaaacacatgtaacattaggcattgatggaaaaggactagatcctagtgtaagcatcctaatagaaggagaggttcaaaaacgctctccagaaccagtatatcagactttctatgataaactaaatgtgccagtacctgagattccaagaaaaactaaaaatttgtttttgcaattagcygaacacgtagcccagtctctacaagtcacctcatgttatgtttgtagagggaccgtaacaggagatcaatggccataggaagcccgagaataggttcctacagacccagttcctgatgaattccc

SEQ ID NO: 169303 - DNA, 565 bp, Homo sapiens
tattactcccaaaatggaatgggctggacacctcccatgacatattgttcctaatatccagcgggggaaagggtgatattactcccaatgttgcagcgggtgtgtaatctgcctgtgctattgtttctaatatccagggggagtgacgatgatattactcccattatcgcagatggtgtacaccgcccttgtgatatcgttctcaacatccatgggggtagaaaataatattactcccaatatcgcaggccgtgtacacccctcccatgatattatttctaatatccaggtgaggggaggattctattactctcaatatcrcaagtgatgtacaccccttctttgatatttttcctactacttacggggagagaggatgatgttactcccagtatcgaaggaagtgtacacgccccctgtgatattgctcctaatatccaggttaaaagaggatgatactacccgcaatatcgcagggggtggggtgtaaactccgcctgtgatattctttctaatatccaggggaagagagaataatattactcctaatagcgcaggggttgta

SEQ ID NO: 169304 - DNA, 631 bp, Homo sapiens
ggctctctcagaaaacacaaagatattaaaagtacattcagaaattgataaagatcaaaacatgaaataggcagtgaaacttttgatgtaacctcaaagattttaattgactgagtcctcatataagatattcattaggtgacttttatttttattttatttatttatttatttatttattttgagatggagtcttggtctgtcgcccagrctggagtgcagtggcacgatctcagctcactgcaacctctgtctcctgggttcaagtgattctcctgcctcagcctcccaagtagttgggattacaggcgtgagtcaccatgtctggctaatttttgtatttttagtagaggcagggtttcatgatgttggccaggccggtcttgaactcctgggctcaagtgatccacctacctcggccttctaaagtgctaggtttacaggcatgagccatcgcgctctgcctaggtggctattttttattacttcaagtgaacatagttacaattaaacagataacctttcaatttcaagatggcttattcagactatttgcaattatgcctgaaaaggtcacctttactcatccactaaatgaaagatgctcgtacatcatccctgccactgtttc

SEQ ID NO: 169305 - DNA, 631 bp, Homo sapiens
ggctctctcagaaaacacaaagatattaaaagtacattcagaaattgataaagatcaaaacatgaaataggcagtgaaacttttgatgtaacctcaaagattttaattgactgagtcctcatataagatattcattaggtgacttttatttttattttatttatttatttatttatttattttgagatggagtcttggtctgtcgcccaggctggagtgcagtggcacgatctcagctcactgcaacctctgtctcctgggttcaagtgattctcctgcctcagcctcccaagtagttgggattacaggcgtgagtcaccatgtctggctaatttttrtatttttagtagaggcagggtttcatgatgttggccaggccggtcttgaactcctgggctcaagtgatccacctacctcggccttctaaagtgctaggtttacaggcatgagccatcgcgctctgcctaggtggctattttttattacttcaagtgaacatagttacaattaaacagataacctttcaatttcaagatggcttattcagactatttgcaattatgcctgaaaaggtcacctttactcatccactaaatgaaagatgctcgtacatcatccctgccactgtttc

SEQ ID NO: 169306 - DNA, 538 bp, Homo sapiens
aataataagtacagccatgatcttgtgatgttgatgatggttatgatggtaagaaaatcttcatattctgccttacagacagggagtctcataaattcatgacgattatagtaaatataacttttcattgtgtggttttattaaatgttcagaatatggtctcctcctctactttatttatcagtaaggttgagatcggtttagcgattgttcttactttggatgtgatgacctgatttctcatggaaaattgctttgaattttcttaaggtaatagccattctagcataaacatacactgtaatttgttttttgttyttgctttgctaggagagtttgcacatgctttcagaaagcatcttttaccttccactgcttatttttcctaagagatcagattggcagcgttattttatgggttactttacgctttgtgatttttctatgattgacttcttgcacttaagctaagaggatttactgatgttaactgagtttgtttcattcctttgagagctaagactttaaccaagcaaat

SEQ ID NO: 169307 - DNA, 558 bp, Homo sapiens
atgatggcaaacgtgtatcctgaggctaactaatatagcatgactaggtccttacttactcagagacaaggtggggctgagtctgcaagttgcttctcttaaatgagacattaaaaagtagatgaatattaaagctgagccaagatttattgtgctatgttcctttaatctccacccctgcatgccataagagtaggaatttactatccctaaattgtaataattgtttattaaaaatattagccaataccaatttatagtattttccatgccccaaggactatgttaagtactttatggattttatctcatttaatacttactcactttgtctctaggaggtcaataatatttttttctattttctaatttagagatctgattgaggtttggagacattaattcactacatacagacacacagaagtagcaaagmagagatgaactcaagactaatgtgtttttgtttttttgagatgaagtctctctctgtcacccaggctggagtgcagtggagcgatctcagctaactgcaatcgccacctcccgggttcaagt

SEQ ID NO: 169308 - DNA, 612 bp, Homo sapiens
acaaagctcagcaggagaggagagccagagaagtaacagggaagctacaggttacaacagatttgtgaactcagccaagcacagtggtggcagggcctagctgctacaaagaagacatgttttagacaaatactcatgtgtatgggcaaaaaactcgaggactgtatttgtgactaattgtataacaggttattttagtttctgttctgtggaaagtgtaaagcattccaacaaagggttttaatgtagatttttttttgcacccatgctgttgattgctaaatgtaatagtctgatcgtgacrctgaataaatgtctttttttttaatgtgctgtgtaaagttagtctactctgaagccatcttggtaaatttccccaacagtgtgaagttagaattccttcagggtgatgccaggttctatttggaatttatatacaacctgcttgggtgaagaagccattgtcttcggaaaccttggtgtagttgaactgatagttactgttgtgacctgaagttcaccattaaaagggattatccaagcaaaatcatggaattattggttataaaagtgattgttggtacatcctatgcaatatatctaaattgaata

SEQ ID NO: 169309 - DNA, 626 bp, Homo sapiens
gccagagaagtaacagggaagctacaggttacaacagatttgtgaactcagccaagcacagtggtggcagggcctagctgctacaaagaagacatgttttagacaaatactcatgtgtatgggcaaaaaactcgaggactgtatttgtgactaattgtataacaggttattttagtttctgttctgtggaaagtgtaaagcattccaacaaagggttttaatgtagatttttttttgcacccatgctgttgattgctaaatgtaatagtctgatcgtgacactgaataaatgtctttttttttaatgtgctgtgtaaagttagtctactctgaagccatcttggtaaatttccccaacagtgtgaagttagaattccttcagggtgatgccaggttctatttggaatttatatacaacctgcttgggtgragaagccattgtcttcggaaaccttggtgtagttgaactgatagttactgttgtgacctgaagttcaccattaaaagggattatccaagcaaaatcatggaattattggttataaaagtgattgttggtacatcctatgcaatatatctaaattgaataatggtaccagataaaattatagatgggaatgaagctt

SEQ ID NO: 169310 - DNA, 626 bp, Homo sapiens
gccagagaagtaacagggaagctacaggttacaacagatttgtgaactcagccaagcacagtggtggcagggcctagctgctacaaagaagacatgttttagacaaatactcatgtgtatgggcaaaaaactcgaggactgtatttgtgactaattgtataacaggttattttagtttctgttctgtggaaagtgtaaagcattccaacaaagggttttaatgtagatttttttttgcacccatgctgttgattgctaaatgtaatagtctgatcgtgacactgaataaatgtctttttttttaatgtgctgtgtaaagttagtctactctgaagccatcttggtaaatttccccaacagtgtgaagttagaattccttcagggtgatgccaggttctatttggaatttatatacaacctgcttgggtgaagaagccattgtcttcggaaaccttggtgtagttgaactgatagttactgttgtgacctgaagttcaccattaaaagggattayccaagcaaaatcatggaattattggttataaaagtgattgttggtacatcctatgcaatatatctaaattgaataatggtaccagataaaattatagatgggaatgaagctt

SEQ ID NO: 169311 - DNA, 626 bp, Homo sapiens
gccagagaagtaacagggaagctacaggttacaacagatttgtgaactcagccaagcacagtggtggcagggcctagctgctacaaagaagacatgttttagacaaatactcatgtgtatgggcaaaaaactcgaggactgtatttgtgactaattgtataacaggttattttagtttctgttctgtggaaagtgtaaagcattccaacaaagggttttaatgtagatttttttttgcacccatgctgttgattgctaaatgtaatagtctgatcgtgacactgaataaatgtctttttttttaatgtgctgtgtaaagttagtctactctgaagccatcttggtaaatttccccaacagtgtgaagttagaattccttcagggtgatgccaggttctatttggaatttatatacaacctgcttgggtgaagaagccattgtcttcggaaaccttggtgtagttgaactgatagttactgttgtgacctgaagttcaccattaaaagggattatccaagcaaaatcatggaattattggttataaaagtgattgttggyacatcctatgcaatatatctaaattgaataatggtaccagataaaattatagatgggaatgaagctt

SEQ ID NO: 169312 - DNA, 616 bp, Homo sapiens
acatttagtagaggaataactcagaattatactttaaaatggattccattgtaattgacagagctaattttaccaattctggataaaaaactgattgacactgaacataactatatcaaagacmacatattgagaatcaatcaattgatgagtttccctaagttctagaaattaatgttacctcttagtagatgcactgattgttctcattatattgtagtaatacttgttctttcccccaaaccttttatcttcttgcacatattaaatatgaactgatatgcaaagataaatatgcaaattcagtgatattctttgcccaaaacttgctgcaaatttagattaaaagtgagtcatctatgtattgtttttagccttcgatgttaataaagacactgaatatattaatcatttgaaataaaaactctctcctgaaacctccatggaaacaggtgtaagtaatttcacttcaaaagattaatggtatagaaatatatccaaagaaactttgaccaatttgacatcctctttttaaatattcaggaaaaagtgaggttaacccagcctcaggcagagtgccttctctgagcatatataaaccggtgaaatgtgcaag

SEQ ID NO: 169313 - DNA, 616 bp, Homo sapiens
acatttagtagaggaataactcagaattatactttaaaatggattccattgtaattgacagagctaattttaccaattctggataaaaaactgattgacactgaacataactatatcaaagaccacatattgagaatcaaycaattgatgagtttccctaagttctagaaattaatgttacctcttagtagatgcactgattgttctcattatattgtagtaatacttgttctttcccccaaaccttttatcttcttgcacatattaaatatgaactgatatgcaaagataaatatgcaaattcagtgatattctttgcccaaaacttgctgcaaatttagattaaaagtgagtcatctatgtattgtttttagccttcgatgttaataaagacactgaatatattaatcatttgaaataaaaactctctcctgaaacctccatggaaacaggtgtaagtaatttcacttcaaaagattaatggtatagaaatatatccaaagaaactttgaccaatttgacatcctctttttaaatattcaggaaaaagtgaggttaacccagcctcaggcagagtgccttctctgagcatatataaaccggtgaaatgtgcaag

SEQ ID NO: 169314 - DNA, 616 bp, Homo sapiens
acatttagtagaggaataactcagaattatactttaaaatggattccattgtaattgacagagctaattttaccaattctggataaaaaactgattgacactgaacataactatatcaaagaccacatattgagaatcaatcaattgatgagtttccctaagttctagaaattaatgttacctcttagtagatgcactgattgttctcattatattgtagtaatacttgttctttcccccaaaccttttatcttcttgcacatattaaatatgaactgatatgcaaagataaatatgcaaattcagtsatattctttgcccaaaacttgctgcaaatttagattaaaagtgagtcatctatgtattgtttttagccttcgatgttaataaagacactgaatatattaatcatttgaaataaaaactctctcctgaaacctccatggaaacaggtgtaagtaatttcacttcaaaagattaatggtatagaaatatatccaaagaaactttgaccaatttgacatcctctttttaaatattcaggaaaaagtgaggttaacccagcctcaggcagagtgccttctctgagcatatataaaccggtgaaatgtgcaag

SEQ ID NO: 169315 - DNA, 517 bp, Homo sapiens
tgccactgggtgtcctgcataccaatgcagctaaggcatagagaagtcacatgtcagttctattacctgcatgttgtttgtccttctcttcttcatggaatgtctttatacccccagcttctcatctataaaatattgactttaacagtttctaaaaagatctattataagaaattagaaacatagactataagcactcaaaaattactttcttccctcccctcactgaaaacttgtctgctaatatagaaatttcaggcaatagtgtcctatcccaaatcatgaaatacgtccccatttgctcccactattttctgtttttattaaaattaattttctccatgtaggtttgctaactcctaggtttttaatggattttgtggttataacaaattttgcyttattgttattttgacattattatatttttgtattgttgaatgctgaagtagataaatcttgttatttttataatggctgttttttaatacttctatatgatcttaaggcagtactg

SEQ ID NO: 169316 - DNA, 517 bp, Homo sapiens
tgccactgggtgtcctgcataccaatgcagctaaggcatagagaagtcacatgtcagttctattacctgcatgttgtttgtccttctcttcttcatggaatgtctttatacccccagcttctcatctataaaatattgactttaacagtttctaaaaagatctattataagaaattagaaacatagactataagcactcaaaaattactttcttccctcccctcactgaaaacttgtctgctaatatagaaatttcaggcaatagtgtcctatcccaaatcatgaaatacgtccccatttgctcccactattttctgtttttattaaaattaattttctccatgtaggtttgctaactcctaggtttttaatggattttgtggttataacaaattttgccttattgttattttgrcattattatatttttgtattgttgaatgctgaagtagataaatcttgttatttttataatggctgttttttaatacttctatatgatcttaaggcagtactg

SEQ ID NO: 169317 - DNA, 592 bp, Homo sapiens
tcctttccaaaatatccattattatagtcctctccttgttctcattatcaatgacaaattcctgtctttgggcatttataaagaagcaaataatttctgaaaaatacttttagatccaaggtttaaatttttcagcattaaatacagctttttaaagatattaattatggtaaataggactgttggggatataatgtcttcacacaaagaaaaaaatatatatccaatttgggggcccatggtagaatatcagaaagagaaataaagttcccaacacatttagagatttatataggcttataagaaatgtgtgcatttaacatagaaatactttctatagagcttggaggcttccttttgtgggagagggacagagctaaagattaattttattaaatatttttaagcatatgaatgataacaccaatgattaaaatgattcaaaatttaagtagcaatatccccatgtgactcttgctctaggtacaagaacttcacaragcacatattttcaaaattttaagaactccagaccttttttaaattataaagactactttaaattctttccgaattcaatctcatcactgtt

SEQ ID NO: 169318 - DNA, 445 bp, Homo sapiens
cctctgagatacagtgaaagcagtgctaagaggaaaggttatagcaccaaattcttacatcagaaagtctgaaagttcacaaattgacaatctaatgtcacacctcaaggaactagagaaacaagagcaaatcaaacccaaagctagcagacaaaaagaaataacaaaggtcaaagaagaactaaatgaaattgaaacaaaaaaatatacaaaagatcaatgaaacaaaaagttggttctttgaaaagataaagaaaataaataaaacattagctagatcaaccaagaaaagmagagcaaatattcaaatgcgctcaattagaaatggaaatggacacattacaactaaaatcacagaaatataagagattattagagactactatgaacacttcgatatacacaagctagaaaatatagaagaaatggataaattcctggagac

SEQ ID NO: 169319 - DNA, 500 bp, Homo sapiens
gctttgtaattgttaatcattcataactactgtcaggcagcttgctgctagaactgatatgtttttcttccttaccacccactgctacaaaggagtccataaacattgtttgtgagtctgaccatgtttcagattcaaagctggtataattttgaagaccaccattggtaggaatacaaacttcgacattgatgcctgactaatgtcttaaaaagggccagtgcatatagcagaggctggggatgcagtgcagtgggtggagtgaaaccacgggagggaggacaaatacaaaaggcacagtatcatggttagtgggaggccagagacctaggctaatcatccaggacaagagtaggtggcagggagaaaatggctgaaagtgaatgtcggggggcactctgaagaygtaattgtatcattgtgtcctgctcattttaccccctcgctgtacttatcgtcttgggtttaatgtgctggtttttactgtcagtgccccaggt

SEQ ID NO: 169320 - DNA, 566 bp, Homo sapiens
aactctcgacctcaggtgatccgccctcctcggcctcccaaagtgcttggattacaggcgtgagccaccgcgtctggccagttacccagatttttaaaagctgggactttaagaagcaatgtgaagacaagctacacacacaccacaccacacacacacacacacacacacacacacacacagacacacacacttaattcttttttcttctagaaaaattgggatcaatcagacytataagtcattgtgtacaacaggtagatctgagctttatttctatttaaatgaccttaagaagtgtagttgcctgggagtgaaagttgttcaatggtggcatttcagcaggagctcccagaatattgaagctcttctctttgcagcaactgaggtctaagtcctaccgacgttagagggatagacgaattgacctttccaggtcctctgctcgccaccagcctacggagcggcgccaccccctcctggcgagaccgggcgcggaagacgcggagacggccctccctcaggagggcgcgggcgtggagggcgtgggcagggggcggggcgag

SEQ ID NO: 169321 - DNA, 566 bp, Homo sapiens
aactctcgacctcaggtgatccgccctcctcggcctcccaaagtgcttggattacaggcgtgagccaccgcgtctggccagttacccagatttttaaaagctgggactttaagaagcaatgtgaagacaagctacacacacaccacaccacacacacacacacacacacacacacacacacagacacacacacttaattcttttttcttctagaaaaattgggatcaatcagacctataagtcattgtgtacaacaggtagatctgagctttatttctatttaaatgaccttaagaagtgtagttgcctgggagtgaaagttgttcaatggtggcatttcagcaggagctcccagaatattgaagctcttctctttgcagcaactgaggtctaagtcctaccgacgktagagggatagacgaattgacctttccaggtcctctgctcgccaccagcctacggagcggcgccaccccctcctggcgagaccgggcgcggaagacgcggagacggccctccctcaggagggcgcgggcgtggagggcgtgggcagggggcggggcgag

SEQ ID NO: 169322 - DNA, 566 bp, Homo sapiens
aactctcgacctcaggtgatccgccctcctcggcctcccaaagtgcttggattacaggcgtgagccaccgcgtctggccagttacccagatttttaaaagctgggactttaagaagcaatgtgaagacaagctacacacacaccacaccacacacacacacacacacacacacacacacacagacacacacacttaattcttttttcttctagaaaaattgggatcaatcagacctataagtcattgtgtacaacaggtagatctgagctttatttctatttaaatgaccttaagaagtgtagttgcctgggagtgaaagttgttcaatggtggcatttcagcaggagctcccagaatattgaagctcttctctttgcagcaactgaggtctaagtcctaccgacgtyagagggatagacgaattgacctttccaggtcctctgctcgccaccagcctacggagcggcgccaccccctcctggcgagaccgggcgcggaagacgcggagacggccctccctcaggagggcgcgggcgtggagggcgtgggcagggggcggggcgag

SEQ ID NO: 169323 - DNA, 554 bp, Homo sapiens
tgcatctgtttcaaaatctgtttcaaacaaatatattccttcattactttattctccctacacttgaaacaaagattgataacagtagctaaaatatattgagcactttaccaggcattgcattttaaaayactttcacaggtgttaacttatttaaacatcacaaaaatcttatgaggcagatattgtttgtaatcctgttttacagatgaggaaactaagacacaaaggtgtcaagtaacttttgctcagctactaagttgagcaaggcagcatttgaatcaaggcctgactccaggccaggagttttaacctctctcttccgtactatgaaacaattacactggttaattttcatatattgaataccaagctcttctcttatctcattttaattcttatattaatcctatgaagtagacattattatccatattttccaaataattaaatgagttaaatgacatactcaacatcatttaataaatggcagaggtaggattcaaatgagatctctccaaagactctaaaactaggacccatccattttggct

SEQ ID NO: 169324 - DNA, 554 bp, Homo sapiens
tgcatctgtttcaaaatctgtttcaaacaaatatattccttcattactttattctccctacacttgaaacaaagattgataacagtagctaaaatatattgagcactttaccaggcattgcattttaaaatactttcacaggtgttaacttatttaaacatcacaaaaatcttatgaggcagatattgtttgtaatcctgttttacagatgaggaaactaagacacaaaggtgtcaagtaacttttgctcagctactaagttgagcaaggcagcatttgaatcaaggcctgactccaggccaggagttttaacctctctcttccgtactatraaacaattacactggttaattttcatatattgaataccaagctcttctcttatctcattttaattcttatattaatcctatgaagtagacattattatccatattttccaaataattaaatgagttaaatgacatactcaacatcatttaataaatggcagaggtaggattcaaatgagatctctccaaagactctaaaactaggacccatccattttggct

SEQ ID NO: 169325 - DNA, 609 bp, Homo sapiens
ttaaaatgagcctgagtgcaggggatgaccctgagactctgtctcagaaccaacttgtggaatgtcagttggtgggtttggatgatggaaaaggaagcaggccctgtggggaatgtgtgttttgacacaatgttcccttttaaaacgaccgtgcgtctactgtttcaccatctgcccgttagtatcaatatagcaagaggttgtgggaattggtgtgtattttgtggaagaaagaataacaacaacaamaaaaaaaaccttctctgccggcttccttgaaaagtgtgactttgttcactttcagaaggtataggttacagctgatttggaaagaggatcctccctctttgaatgccttcaggctcagaggaaaatgagaatctatttgggtaagttaaaaatgccaaactaaatctcccaatgcaaatatggaccacccagggacactgtaaaaggccagatttggggttttgaatatttacacattttcttgcctcctattttaagctttttaatatttgtcaaatgctgctgaaaagtaattggcatatcaagcaagggtgaaatcccatatcttatgccagagaatttaaagccaggggaactgtg

SEQ ID NO: 169326 - DNA, 391 bp, Homo sapiens
actattatgataaggatgagaagaggtggactcatcacccacaccacccaaaataacccaggtgactgtatttgtgctaagcaaagaagggaaataaaatctttcccgtagaatctgtatttgtaaactagtcattgtgaaggtgtgcagtcctattcacatcacctaagtagttccaaaaatattaagccatgaatgtagtttaattttagtctaaattggtcataggctggtaatgcctctagcttctgtcattaatataaatacaaatgmtttctgaaagaaggtatctctatttgaggcctcaaagattctccacaaataatgtttcaaggacaatttccagcacacagtcaaaaatgacaaaacacacaagaaaacaagctaccat

SEQ ID NO: 169327 - DNA, 528 bp, Homo sapiens
ttagtattcccaacaccgtgaattgaagagactatcatttttccrttttgtattcttgtctgtattatggaaaattagttgactgtagatgtgtgagttaatttctggaatctccattctgtcccactgacctatatgcctgtttttgttacagttccatactgttttgattaatatagttttgtagtataatttgaaatcaagcagtgtgatacctcttgagaatacctttctaaagattgctttggttattcaaggtcttttggggttccatatgaattttaagatttttttcctatttctatgaaaaatatcatttaagttttggtagagattttattgaatctgtagactgctctaggcagtatggacattttaataatattgttttgtgtaatccatgaacatacaatgtcttttcatttctttgtcttcaattttttttcataaatgcttcatagttcttttatgtagagatttttcaccttggttaaatctaagtttttttctttctgatgctattattag

SEQ ID NO: 169328 - DNA, 528 bp, Homo sapiens
ttagtattcccaacaccgtgaattgaagagactatcatttttccattttgtattcttgtctgtattatggaaaattagttgactgtagatgtgtgagttaatttctggaatctccattctgtcccactgacctatatgcctgtttttgttacagttccatactgttttgattaatatagttttgtagtataatttgaaatcaagcagtgtgatacctcttgagaatacctttctaaagattgctttggttattcaaggtcttttggggttccatatgaattttaagatttttttcctatttctatgaaaaatatcatttaagttttggtagagattttattgaatctgtagactgctctaggcagtatggacattttaataatattgttttgtgtaatccatgaacatamaatgtcttttcatttctttgtcttcaattttttttcataaatgcttcatagttcttttatgtagagatttttcaccttggttaaatctaagtttttttctttctgatgctattattag

SEQ ID NO: 169329 - DNA, 535 bp, Homo sapiens
ttcagcactgctgcaatctgcctaaaaatctgttaatttaagtgcatggggtagtctctgccagttctttcccctgcctgtttttttaacacaatataattttgaagaactgcattctgaagttcccctgaactataacttaccatacattctctgctttatttaagccatatctcttggttatttaaataatacaaattgaaatataacataaatgaactatataactaaatagccaagaatttagtraggttaaaaaagaaatagtgcatcggttacctaaatgttaggatatttccttggcttagtattgtcatgaatcagctaagaatttttgcatatgcaaagggtcacaggcagatggcatttaacctaacatgcaaatagcccttcaacctccttttatacctacagtaggcattgaaactgacagaacctcagagatatatgcccaggaatctcaggaattcaaaatgaataataagtaaataaatgcctggtttgggatatgttggtttatatttagaaagaaaag

SEQ ID NO: 169330 - DNA, 474 bp, Homo sapiens
agctccttccttgggctgtatttctttagcatctcatttcctattgatgcaggtttggggttgtctctgacattgagcaatcacaggaacattttggcggcaaggttggtattccgtaagtgacacaattcacttaaaatttattagccaaactgtgatagggtagatattatcatccacaatttacaagggtagaaactatagcttttaataaacataagtgcctttgcctaaagctacccagacagtaaattataggaacaggatttgtatccagctgtatctgatggtaaatctatgatgatggtcaaaacacttgtccaacaactccaatagaaaaccaatcattacacctctatccatacgccacctccacctctctgaaaaataaaaataaaaaaagaaacataagwttcttactgtgccctgtaggtgccactcttgccacgggataactcttttcagcactgcagc

SEQ ID NO: 169331 - DNA, 488 bp, Homo sapiens
cataaagctggtttattttagcaaatcgcttttgtgatttggggcagcacatgtcttctctcatcttttgctttgaacacttcaaaaggtctttggcaggaggaagtaatagcaacacagttgtgtaagatctaacatttattcaagagctggcacaatataatcacatttsttggggggggtccattggcctatcattaagttaatgtatttgaccatttctgtaccatgatggtgcgtgtcattactgcttagcttcaagggtgcagttggcagcattcaattctattactgacttcacagttgaggagccctttggaaaactttctaaagaaagctgacctatgctgttagtactctggggacaacagcaattatttcttctcagagaatattactctttatttctttctccttcttaggtgattttttttaactttatgaatcactttggaagaggtgcagcttactcctacccaacacaatag

SEQ ID NO: 169332 - DNA, 462 bp, Homo sapiens
atcttgcttcctgctttactgagaaaggtgaagccatcagaagagaatcccccaagcgcccaccactgccccactggctttggtgcccacttattctactttctctgggctcctgaagatgaactgtctgggctcccagyagaagctggctctcagccatgcagcagatcgcagtcaaggctgggctgcagtcaaggctgtcactcctgcaacttcctctcctacatccttaattctgtcccctctactggatctttccaatcatctcacagatatgctgtatttcttctatcataaaaaacagcactgccacactctctctccttcgcttgaaaactcctttaaagcattgcctccacctctcttggaccagctccaaccaggctttggcccctactgctccacccaaccagctctcatcaaggccaccaatgacttccctgttgctaaatctggagaata

SEQ ID NO: 169333 - DNA, 608 bp, Homo sapiens
tgtgaggtgatatctccttgtggttttgattcgcatttccctgatgattagtgatgttgaacaccttttcatacacgtattgaccattttaatgtcttctttgaagaaatgtcttttcagtcctttgcgcattttttaattgggttatttgttttcttgctattgtttcttgctattgaattgtttgagtttcttatatattttggatatcagatgtacggtttgcaaacattttctcccattttgtatgctgccttttccttttactgactgtttcccctgctgtraagaagctctttggtttgatgtagtcccatttatttatttttgcttttatagcctgagctttttgtgtgatatccagaaaattattaccaaggccaaagtcaaggagcttttcctctgtgttttcttttagaaattttatggttttggttcttatatttaggtcctttgtccattttgagttgatttttttctgtataatataagagtccagtttccacattttttggcatgtggaaatctagtttttcagcaccatctattgaagaggctgtcttttccccattatgtcttcttggtacccttgtcaaaaattagttgac

SEQ ID NO: 169334 - DNA, 596 bp, Homo sapiens
gcagtaatattaaaaaatgactcatacggtttagtaatagactgggcaccaaagggctatttaaaaaacaattgctcctctggtggaaaggaatgcctggaggctacttattttatttcttgtcaggagaatgagaatcatcattccactttgcataggaggttcagctcattctttcccctaaaatgggaagataaaggcaccttttctaaccttgtttatgacacagagacatttgttcacatgttttcctgctgaccctctccccactattaccctattgtcctgccacatccccctctccgagatgtcagagataatgatcaataaatactaagggaactcagagaccggtgctggtgcaggtcctcctggtgcaggtcctccatatgctgagcgccagtcccctargcccacttttctttctctatactttgtctctgtgtctctttcttttctcagtctctcgtcccacctgacgagaaacacctacaggtgtggaagggcaggccactccttcagaaacacattctagacaaaatacacatggacatatttaggtgtaaagtggctttatgtctgcaacttactctcca

SEQ ID NO: 169335 - DNA, 632 bp, Homo sapiens
ctattctcaaataatacgcatatgtatgtttaaagaggtatgtacaagaatgttcactgtcaacactcttggtaatagcaaaaaaactggaaacaatcatcatttccatgaaaaaaagaatagctaaataaactatgcccacactatgctattctacataacagttaataatgaggatatgtatattgatatgaaaagatcaagatgtagttaaataaaaaaatgcaaccgggtgcagtggctcccacctataattccagcacttagggaggccaaggcaggaggctcacttgaggccaggagtttgagaccagcctgggcaacagagcatraccccatctctacaaaaaattttaaaaaattagccaggtgtggtggtacatacctgtaggcggtggtaggattgcttgaagtaaggagttcaagattacagtgagctgtgatcacatatctctaaaaaaaatttttttttaagatggagtctcgctctgtcacccaggctgtagtgcaatggtgcaatcacagctcactgcagcctcaacttccctggctcaggtgatcctgccacctcagcctcctgagtaactgggactacaggtgagcaacaacacacccagctaatttatttattt

SEQ ID NO: 169336 - DNA, 632 bp, Homo sapiens
ctattctcaaataatacgcatatgtatgtttaaagaggtatgtacaagaatgttcactgtcaacactcttggtaatagcaaaaaaactggaaacaatcatcatttccatgaaaaaaagaatagctaaataaactatgcccacactatgctattctacataacagttaataatgaggatatgtatattgatatgaaaagatcaagatgtagttaaataaaaaaatgcaaccgggtgcagtggctcccacctataattccagcacttagggaggccaaggcaggaggctcacttgaggccaggagtttgagaccagcctgggcaacagagcatgaccccatctctacaaaaaattttwaaaaattagccaggtgtggtggtacatacctgtaggcggtggtaggattgcttgaagtaaggagttcaagattacagtgagctgtgatcacatatctctaaaaaaaatttttttttaagatggagtctcgctctgtcacccaggctgtagtgcaatggtgcaatcacagctcactgcagcctcaacttccctggctcaggtgatcctgccacctcagcctcctgagtaactgggactacaggtgagcaacaacacacccagctaatttatttattt

SEQ ID NO: 169337 - DNA, 632 bp, Homo sapiens
ctattctcaaataatacgcatatgtatgtttaaagaggtatgtacaagaatgttcactgtcaacactcttggtaatagcaaaaaaactggaaacaatcatcatttccatgaaaaaaagaatagctaaataaactatgcccacactatgctattctacataacagttaataatgaggatatgtatattgatatgaaaagatcaagatgtagttaaataaaaaaatgcaaccgggtgcagtggctcccacctataattccagcacttagggaggccaaggcaggaggctcacttgaggccaggagtttgagaccagcctgggcaacagagcatgaccccatctctacaaaaaattttaaaaaattagccaggtgtggtggtacatacctgtaggcggtggtaggattgcttgaagtaaggagttcaagattacagtgagctgtgatcacatatctctaaaaaaawtttttttttaagatggagtctcgctctgtcacccaggctgtagtgcaatggtgcaatcacagctcactgcagcctcaacttccctggctcaggtgatcctgccacctcagcctcctgagtaactgggactacaggtgagcaacaacacacccagctaatttatttattt

SEQ ID NO: 169338 - DNA, 632 bp, Homo sapiens
ctattctcaaataatacgcatatgtatgtttaaagaggtatgtacaagaatgttcactgtcaacactcttggtaatagcaaaaaaactggaaacaatcatcatttccatgaaaaaaagaatagctaaataaactatgcccacactatgctattctacataacagttaataatgaggatatgtatattgatatgaaaagatcaagatgtagttaaataaaaaaatgcaaccgggtgcagtggctcccacctataattccagcacttagggaggccaaggcaggaggctcacttgaggccaggagtttgagaccagcctgggcaacagagcatgaccccatctctacaaaaaattttaaaaaattagccaggtgtggtggtacatacctgtaggcggtggtaggattgcttgaagtaaggagttcaagattacagtgagctgtgatcacatatctctaaaaaaaatttttttttaagatggagtctcgctctgtcrcccaggctgtagtgcaatggtgcaatcacagctcactgcagcctcaacttccctggctcaggtgatcctgccacctcagcctcctgagtaactgggactacaggtgagcaacaacacacccagctaatttatttattt

SEQ ID NO: 169339 - DNA, 606 bp, Homo sapiens
actgttattgtagaatctaaaagggacactttggagcctgtttaggcctatagtgaaaaaaccgcatatccagcaaaaaaactagaaaggagctgtgtgtgaaaatgctttgcaatgtgggcatctcaatgagttaaatttttctttagattgaggaggttggaaacactctttttgtagaatctatgaagggacatcttggagctctttgaggcctgtagtgaaaaccagaatatcctgtgataaaaactagaaacaagctatctacaaaaatgctttgtgatatgttcattcattttacwgagttaaaactttgttttgattcaacagtttggaaacactctttttgtggaatctatgaagggtcatttttaaacccattgaggcatatagtgaaaaactggatatccctctataaaaactagaaacaagctatctgtgaaaatgctttgtaatgtgtggattcatctcatagagttaaaccttagttgtaattcaaaggttggaaacacttttttttttttttttttttttgtctaagaggggacatttcaaagcccattgaggcctatggtgaaaaactaaatattccctgataaaaatgag

SEQ ID NO: 169340 - DNA, 606 bp, Homo sapiens
actgttattgtagaatctaaaagggacactttggagcctgtttaggcctatagtgaaaaaaccgcatatccagcaaaaaaactagaaaggagctgtgtgtgaaaatgctttgcaatgtgggcatctcaatgagttaaatttttctttagattgaggaggttggaaacactctttttgtagaatctatgaagggacatcttggagctctttgaggcctgtagtgaaaaccagaatatcctgtgataaaaactagaaacaagctatctacaaaaatgctttgtgatatgttcattcattttactgagttaaaactttgttttgattcaacagtttggaaacactctttttgtggaatctatgaagggtcatttttaaacccattgaggcatatagtgaaaaactggatatccctctataaaaactagaaacaagctatctgtgaaaatgctttgtaatgtgtggattcatctcatagagttaaaccttagttgtaatycaaaggttggaaacacttttttttttttttttttttttgtctaagaggggacatttcaaagcccattgaggcctatggtgaaaaactaaatattccctgataaaaatgag

SEQ ID NO: 169341 - DNA, 542 bp, Homo sapiens
aggtttgcaatgtgtggattcatttcacagagttaaacttttgtttctatacagtaggttggaaatattcttttagtagaatctaataggggacaattttgaggctagcagtgaaaaattcaaaatttcataataaaaactaatacaaactactgtaaaaatgctttttgatgtgaaaattcatctcacagtgttaaacatttgttttgattcagtatgttggaaaaaaatkttgtagaatctacaaagggacattttggagcccattgagaccaatattgaaaaaaaatcctgctataaaactagaaacaagctgtcagtgaaaatgctttgtgttgtgtggattcacctcacagacgtaaacctttgtttttattcagccagttggaaacactctttgtatagagtttactatgggacattccagagcccattgaagtctctagttaaatactgaatatcccatgataaaaaaaagaaacaagctatctgtgaaaatgctttgcaatgtgtggattcatctcacagtgtaaaacctttat

SEQ ID NO: 169342 - DNA, 542 bp, Homo sapiens
aggtttgcaatgtgtggattcatttcacagagttaaacttttgtttctatacagtaggttggaaatattcttttagtagaatctaataggggacaattttgaggctagcagtgaaaaattcaaaatttcataataaaaactaatacaaactactgtaaaaatgctttttgatgtgaaaattcatctcacagtgttaaacatttgttttgattcagtatgttggaaaaaaattttgtagaatctacaaagggacattttggagcccattgagaccaatattgaaaaaaaatcctgctataaaactagaaacaagctgtcagtgaaaatgctttgtgttgtgtggattcacctcacagacgtaaacctttgtttttattcagccagttggaaacactctttgtatagagtttactatgggacattccagagcccattgaagtctctagttaaatactgaatatcccatgataaraaaaagaaacaagctatctgtgaaaatgctttgcaatgtgtggattcatctcacagtgtaaaacctttat

SEQ ID NO: 169343 - DNA, 520 bp, Homo sapiens
aacaactctatttttagaatctatgaagaaacattttggagcccattgaggcttgtactgaaaaactgaatatctcataataaaaattagaaacaagctgcttgtgaaaatgtttgtgatgtgtggactcatctcatggagttaaacatttgttttgattcagcaggttgaaaacacttttattgtagaatataaaagtttacatttcagagccaattgaggcctatagtaaaaaatcaaatctcccatgataaaaactagaaacaagctatatgtgaaaatgctttgtgatgtgtggcttcatctcacrtaatttaacctttgctttgattaagcaagtttgaagcactcttttcgtagaatctacgaggggacattttaaagcccattgaggcctatagtcaaaaacagattgtcccaagataaaaagtagaaacaatctatcagtgaaaatgtgctgtgatgtgtggattcatctcccagagttaaagctttgttttaactcagcaggttggagaca

SEQ ID NO: 169344 - DNA, 217 bp, Homo sapiens
gaatgaataaagtacattgatatattatttcccaaataaatgaaatagagttgaaaagcacacagcaagctgcaggcctggcaaagcttcaagaatattacagtaaacatctgatatgcaagytactatttacaacaaaagcttaataaataggcacttccccctcaccactttctttcttgttttttttctcttgtttcattttttttgtttttgt

SEQ ID NO: 169345 - DNA, 409 bp, Homo sapiens
ttacacatggtgaatccctkcacaccagttcccagtataaagtaaccccttgcttgtagaaaacattattattattatttttgagatggaatttgtctctgtagtccaggctggagtgcaatggcatgatctcatctcactgcaacctctgcctcccaggttcaaaggattctcctgcctcagcctcccaagaagctgggattaccagcatgcaccaccatggcttgctaattttttgtaattttgtagagacggggattcaccatgttggccaggctgatctcgaactcctgacctcaggtgatccacttgcctggatcttccaaagtgttgggattacaggcaggtgccaccacacccagactagaaaacattattcaatagcaaacaatagcagtatgcttggggg

SEQ ID NO: 169346 - DNA, 487 bp, Homo sapiens
ctactaaaaaaatgcaaaaattagccaggcaccatggcaggtgcctgtgatcctagctacctgggaggctgaggcaagagaattgcttgaacccaggaggcaaagkttgcagtgagctgagatctcaccactgcactccagcctgggcaatagagtgagaatctatctcaaaaaaaaaaaaaacatggagaaactccatctctactaaaaatacaaaattatccaggcttggtggcacatgcctgtaatcccagctacttgggaggctgaggcaagagaatcgcttgaacctgggaagcagaggtttcggggaggcggaggttgaggtgagccaagatcatggcattgcactacagcctgggcaacaagagtaaaactctgtctaaaaaacaaacaaacaaacaaaacaaaacaaagaaaattacgcacaacttatttcctggtttgtgataatctgtgaaatacattttgaaatgaattggaattc

SEQ ID NO: 169347 - DNA, 487 bp, Homo sapiens
ctactaaaaaaatgcaaaaattagccaggcaccatggcaggtgcctgtgatcctagctacctgggaggctgaggcaagagaattgcttgaacccaggaggcaaagtttgcagtgagctgagatctcaccactgcactccagcctgggcaatagagtgagaatctatctcaaaaaraaaaaaaacatggagaaactccatctctactaaaaatacaaaattatccaggcttggtggcacatgcctgtaatcccagctacttgggaggctgaggcaagagaatcgcttgaacctgggaagcagaggtttcggggaggcggaggttgaggtgagccaagatcatggcattgcactacagcctgggcaacaagagtaaaactctgtctaaaaaacaaacaaacaaacaaaacaaaacaaagaaaattacgcacaacttatttcctggtttgtgataatctgtgaaatacattttgaaatgaattggaattc

SEQ ID NO: 169348 - DNA, 581 bp, Homo sapiens
tgtaagtgatgctggtcctttaagattttaagtttcttttaagttttcaaactttaagtgtcttttaaattttcaaattaagttaagacacttaaggtgtcttttaarttttcaaacttgacatagttttaatgtaaaacacttttctggtgctatatttcttcgaatattggtaatctgttacttagctggaatatttggtcggttggattaccacacctttaaccatctatatataactttcttgatttttttttttttttgagattgagtcttttgctgtttcccaggctggagtgcaatagtgtgatcatagctcactgcagcctcaaacttctgggttcaagtggtcctcttacttcagcctcctaagtcgctgagactgctacaagcatatgccaccacaccaagctaacttttttattttttattttttagagacaagggtctctctctgttgcccaggccagtctcaaacttttggcttcaagtgatcctcctgcctcagcctcccaaagtgctggaattatagtcatgagccatcgtgctggtccataacttcctttatcccccaaaatgag

SEQ ID NO: 169349 - DNA, 581 bp, Homo sapiens
tgtaagtgatgctggtcctttaagattttaagtttcttttaagttttcaaactttaagtgtcttttaaattttcaaattaagttaagacacttaaggtgtcttttaagttttcaaacttgacayagttttaatgtaaaacacttttctggtgctatatttcttcgaatattggtaatctgttacttagctggaatatttggtcggttggattaccacacctttaaccatctatatataactttcttgatttttttttttttttgagattgagtcttttgctgtttcccaggctggagtgcaatagtgtgatcatagctcactgcagcctcaaacttctgggttcaagtggtcctcttacttcagcctcctaagtcgctgagactgctacaagcatatgccaccacaccaagctaacttttttattttttattttttagagacaagggtctctctctgttgcccaggccagtctcaaacttttggcttcaagtgatcctcctgcctcagcctcccaaagtgctggaattatagtcatgagccatcgtgctggtccataacttcctttatcccccaaaatgag

SEQ ID NO: 169350 - DNA, 440 bp, Homo sapiens
aaacctttaaaatgcaaatttccaaacaccagcgaagggccagttttgcatgtaggcatttctaagaatgacagtcttatgactgttatatgaattattttcttcacagcagttacagccccaacttaattttagtgtcttaaaaattctatttaatagtgaataacatggtgatataacatagcatggtgcttatttcatttgcgtcagttgcaacttaatatgaaatactaagtttctgtgctgttagattttgraattttggtgaatatttaacaggtttctatacagaagttactatggtaatattaggtaattataatctgttcttattcaattaacctttcagtaaaatagataaaataagtaatgatttctgatttaaaattaaaataaaaaatttgtttcattttaattatataggtttcagttttgtttta

SEQ ID NO: 169351 - DNA, 440 bp, Homo sapiens
aaacctttaaaatgcaaatttccaaacaccagcgaagggccagttttgcatgtaggcatttctaagaatgacagtcttatgactgttatatgaattattttcttcacagcagttacagccccaacttaattttagtgtcttaaaaattctatttaatagtgaataacatggtgatataacatagcatggtgcttatttcatttgcgtcagttgcaacttaatatgaaatactaagtttctgtgctgttagattttggaattttggtgaatatttaacaggtttctatacagaagttactatggtaatattaggtaattataatctgttcttattcaattaacctttcagtaaaatagataaaataartaatgatttctgatttaaaattaaaataaaaaatttgtttcattttaattatataggtttcagttttgtttta

SEQ ID NO: 169352 - DNA, 440 bp, Homo sapiens
aaacctttaaaatgcaaatttccaaacaccagcgaagggccagttttgcatgtaggcatttctaagaatgacagtcttatgactgttatatgaattattttcttcacagcagttacagccccaacttaattttagtgtcttaaaaattctatttaatagtgaataacatggtgatataacatagcatggtgcttatttcatttgcgtcagttgcaacttaatatgaaatactaagtttctgtgctgttagattttggaattttggtgaatatttaacaggtttctatacagaagttactatggtaatattaggtaattataatctgttcttattcaattaacctttcagtaaaatagataaaataagtaatgatttctgrtttaaaattaaaataaaaaatttgtttcattttaattatataggtttcagttttgtttta

SEQ ID NO: 169353 - DNA, 492 bp, Homo sapiens
tgggacaggtaattttgcaatacacatttaatgtcatgttcactcaggatagaagagaacttctcttccctgaataaatcgcagggggctcattgaatctgcacawtctgattcagcaggcctgagattctgcttttgtaataagttctcgggtgacactgatgttactgttccttggccatgatctgagtagtaagattatattcttccccacagtgaaattggcaagaacgattggagagcagtgcaagatataacaggctaagggacagcatattcttgctttaattctacagcctgtttccattgtaaagggaaggagaaagagattaagtaataaaaattataggcatcagatcatattgttaaaaccacatggaagaagtgattggaataacccataaacaatgtagaaagagaactaaggagacgtctgatgtggtaattattttactcaaggaagagggattgagaggcaagaaggagggaaaa

SEQ ID NO: 169354 - DNA, 492 bp, Homo sapiens
tgggacaggtaattttgcaatacacatttaatgtcatgttcactcaggatagaagagaacttctcttccctgaataaatcgcagggggctcattgaatctgcacaatctgattcagcaggcctgagattctgcttttgtaataagttctcrggtgacactgatgttactgttccttggccatgatctgagtagtaagattatattcttccccacagtgaaattggcaagaacgattggagagcagtgcaagatataacaggctaagggacagcatattcttgctttaattctacagcctgtttccattgtaaagggaaggagaaagagattaagtaataaaaattataggcatcagatcatattgttaaaaccacatggaagaagtgattggaataacccataaacaatgtagaaagagaactaaggagacgtctgatgtggtaattattttactcaaggaagagggattgagaggcaagaaggagggaaaa

SEQ ID NO: 169355 - DNA, 492 bp, Homo sapiens
tgggacaggtaattttgcaatacacatttaatgtcatgttcactcaggatagaagagaacttctcttccctgaataaatcgcagggggctcattgaatctgcacaatctgattcagcaggcctgagattctgcttttgtaataagttctcgggtgacactgatgttactgttccttggccatgatctgagtagtaagattatattcttccccacagtgaaattggcaagaaygattggagagcagtgcaagatataacaggctaagggacagcatattcttgctttaattctacagcctgtttccattgtaaagggaaggagaaagagattaagtaataaaaattataggcatcagatcatattgttaaaaccacatggaagaagtgattggaataacccataaacaatgtagaaagagaactaaggagacgtctgatgtggtaattattttactcaaggaagagggattgagaggcaagaaggagggaaaa

SEQ ID NO: 169356 - DNA, 492 bp, Homo sapiens
tgggacaggtaattttgcaatacacatttaatgtcatgttcactcaggatagaagagaacttctcttccctgaataaatcgcagggggctcattgaatctgcacaatctgattcagcaggcctgagattctgcttttgtaataagttctcgggtgacactgatgttactgttccttggccatgatctgagtagtaagattatattcttccccacagtgaaattggcaagaacgattggagagcagtgcaagatataayaggctaagggacagcatattcttgctttaattctacagcctgtttccattgtaaagggaaggagaaagagattaagtaataaaaattataggcatcagatcatattgttaaaaccacatggaagaagtgattggaataacccataaacaatgtagaaagagaactaaggagacgtctgatgtggtaattattttactcaaggaagagggattgagaggcaagaaggagggaaaa

SEQ ID NO: 169357 - DNA, 591 bp, Homo sapiens
gggtgactatatttaacattctgttttacatttaaaaacrgccaggagagaataacttgaatatttctagtttaaataaaacatacatatttaaggtaatgtgtctctctgttaccctcattagattatatagatggatcaaatcatcacacgtacactgaaaatatatgcatctatttattaatttaaaaattctaaatggaaagaaaatttaatcctcactttttaaaatttcagtaaagtggtgtctcatattttatctagtgaatgccgtgttcatagataatgcaaagtaaaatgtgttttaggctatatcagattttgaatgaatcattaatttttgactcttgttaaaagttttttaaagtaatatttggtatattcctaagttgcttaactaatttatttcacttttacataatcttggcagctgttttagcctttttttgataataagagagaaaataaataagtaattaaataataaaaaataataaaaattaattaatacataaattaataaaaattaaaatttctggttaatttttttttttttgagagggagtctcgctctgtcgcccaggctggagg

SEQ ID NO: 169358 - DNA, 591 bp, Homo sapiens
gggtgactatatttaacattctgttttacatttaaaaacagccaggagagaataacttgaatatttctagtttaaataaaacatacatatttaaggtaatgtgtctctctgttaccctcattagattatatagatggatcaaatcatcacacgtacactgaaaatatatgcatctatttattaatttaaaaattctaaatggaaagaaaatttaatcctcactttttaaaatttcagtaaagtggtgtctcatattttatctagtgaatgccgtgttcatagataatgcaaagtaaaatgtgttttaggctatatcagattttgaatgaatcattaatttttgactcttgttaaaagttttttaaagtaatatttggtatattcctaagttgcttaactaatttatttcacttttacataatcttggcagctgttttagcctttttttgataataagagagaaaataaataagtaattaaataataaaaaataataaaaattaattaatacataaattaataaaaattaaaatttctggttaatttttttttttttgagagggagtctcrctctgtcgcccaggctggagg

SEQ ID NO: 169359 - DNA, 437 bp, Homo sapiens
aacaaatatcccaactcaaaactgataaatgataggaatagatgtgtttcccaagaagatacacgaacggtcaataatcccataaaaagatactcaatagcatcactcatcaggcaactacaaatcaaaaccacaattagatactctatggctaaaactggccactttggaaaatagtttgttggcttctaaatatattaaacatagaattgtcatatgacccagaaatttattcctaggtatacacccagattattggaaagaggtgttcaaacacaaattgtacacaaktatttttagcagcagtatttaaaatagccaaaggtgaacacaactcgaatgtcaataaaatattattggataaacaaaatgttatatccatgaaattgaatgttatacagttataaaaagaaataaagtaccaatacgcatatgaa

SEQ ID NO: 169360 - DNA, 688 bp, Homo sapiens
acagtgaagtggccaggaccactggtaagatcaagggtgaagatataaaagaattttggcggttaacatgcggcaaatcatgatgggcttgcagaccattgtaagaattgtggcttttagtgtaaatgaaatggggagacaaatcattatcccattatcratattttaataaattggatccatgaaccaaatccaatgagattaaatcaattagtaataatatgtaaatttgtattaaaattacaagaattactttcacatttgagaacagaagagtcatgattgttcatcagcaataatcaacattattaattttaattgtgatcagctaattgagattaattgcaatacatcatgctttataatgtgaccgtcaaaaggaaaatatgattgtaatcttatactacatctatcaatgtctctgattcataagactatagagtaagcccctagttttcaaagccaacttatgaggcagtgacatcttatgcaagtttgctgctttctgccacagtggtccttggtcagctggcacaaattgttttacaaatgccactaggtctaaaaaaagtttggatcacaatgaacacagaaaaaccttcatcccttcagaaatacctatcaattacttccaatacagaatgaaaaattgacaaaggaaatatgttgattgtaaaaatgccagtta

SEQ ID NO: 169361 - DNA, 688 bp, Homo sapiens
acagtgaagtggccaggaccactggtaagatcaagggtgaagatataaaagaattttggcggttaacatgcggcaaatcatgatgggcttgcagaccattgtaagaattgtggcttttagtgtaaatgaaatggggagacaaatcattatcccattatcgatattttaataaattggatccatgaaccaaatccaatgagaktaaatcaattagtaataatatgtaaatttgtattaaaattacaagaattactttcacatttgagaacagaagagtcatgattgttcatcagcaataatcaacattattaattttaattgtgatcagctaattgagattaattgcaatacatcatgctttataatgtgaccgtcaaaaggaaaatatgattgtaatcttatactacatctatcaatgtctctgattcataagactatagagtaagcccctagttttcaaagccaacttatgaggcagtgacatcttatgcaagtttgctgctttctgccacagtggtccttggtcagctggcacaaattgttttacaaatgccactaggtctaaaaaaagtttggatcacaatgaacacagaaaaaccttcatcccttcagaaatacctatcaattacttccaatacagaatgaaaaattgacaaaggaaatatgttgattgtaaaaatgccagtta

SEQ ID NO: 169362 - DNA, 468 bp, Homo sapiens
caggccatggcaaggccaggccaggatagaacagggcacaggcagggcagggccagggccacggctggggcaggacaaggacgaggaccgggtccaggccagggcaagggtatggccagggcagaggtagggccagarccagggtctgggcaggaccaaggcaggtccattgcagggccagggttcagaccagggccagaccagggctgggatagggccagggccaggaccaggaaagggcaatgtcaggacaaggaccatggcaggaccagcaacggggctagggccaggacagggacagggacagggtcagggctaggaccagaatagcatgccagggtagagccaggccaaattagggccaggacagggtcaggaccagggctgggccagggtatggccttaagtagcgaagggccagggccagggggtccatgccagtgccagcgctggtccagggcagaggca

SEQ ID NO: 169363 - DNA, 468 bp, Homo sapiens
caggccatggcaaggccaggccaggatagaacagggcacaggcagggcagggccagggccacggctggggcaggacaaggacgaggaccgggtccaggccagggcaagggtatggccagggcagaggtagggccagaaccagggtctgggcaggaccaaggcaggtcyattgcagggccagggttcagaccagggccagaccagggctgggatagggccagggccaggaccaggaaagggcaatgtcaggacaaggaccatggcaggaccagcaacggggctagggccaggacagggacagggacagggtcagggctaggaccagaatagcatgccagggtagagccaggccaaattagggccaggacagggtcaggaccagggctgggccagggtatggccttaagtagcgaagggccagggccagggggtccatgccagtgccagcgctggtccagggcagaggca

SEQ ID NO: 169364 - DNA, 468 bp, Homo sapiens
caggccatggcaaggccaggccaggatagaacagggcacaggcagggcagggccagggccacggctggggcaggacaaggacgaggaccgggtccaggccagggcaagggtatggccagggcagaggtagggccagaaccagggtctgggcaggaccaaggcaggtccattgcagggccagggttcagaccagggccagascagggctgggatagggccagggccaggaccaggaaagggcaatgtcaggacaaggaccatggcaggaccagcaacggggctagggccaggacagggacagggacagggtcagggctaggaccagaatagcatgccagggtagagccaggccaaattagggccaggacagggtcaggaccagggctgggccagggtatggccttaagtagcgaagggccagggccagggggtccatgccagtgccagcgctggtccagggcagaggca

SEQ ID NO: 169365 - DNA, 479 bp, Homo sapiens
caagaccaggccatggcaaggccaggccaggatagaacagggcacaggcagggcagggccagggccacggctggggcaggacaaggacgaggaccgggtccaggccagggcaagggtatggccagggcagaggtagggccagaaccagggtctgggcaggaccaaggcaggtccattgcagggccagggttcagaccagggccagaccagggctgggatagggccagggccaggaccaggaaagggcaatgtcaggacaaggaccatggsaggaccagcaacggggctagggccaggacagggacagggacagggtcagggctaggaccagaatagcatgccagggtagagccaggccaaattagggccaggacagggtcaggaccagggctgggccagggtatggccttaagtagcgaagggccagggccagggggtccatgccagtgccagcgctggtccagggcagaggcagggcc

SEQ ID NO: 169366 - DNA, 479 bp, Homo sapiens
caagaccaggccatggcaaggccaggccaggatagaacagggcacaggcagggcagggccagggccacggctggggcaggacaaggacgaggaccgggtccaggccagggcaagggtatggccagggcagaggtagggccagaaccagggtctgggcaggaccaaggcaggtccattgcagggccagggttcagaccagggccagaccagggctgggatagggccagggccaggaccaggaaagggcaatgtcaggacaaggaccatggcaggaccagcaacggggctagggccaggacagggacagggacagggtcagggctaggrccagaatagcatgccagggtagagccaggccaaattagggccaggacagggtcaggaccagggctgggccagggtatggccttaagtagcgaagggccagggccagggggtccatgccagtgccagcgctggtccagggcagaggcagggcc

SEQ ID NO: 169367 - DNA, 374 bp, Homo sapiens
ctcaaaatagccaaaataatcttgaaaaaagaaaacatgttaggataattcacacccccattctccaaactttactgcaaagcatcagtaatcaagacaacacaataccratgaaggaaaaatatatagattgatgattctacacataaatgagatcacacaacatttgtctttcttcgtctggcttattccacttagaataatgttctctatgtgttgttgcaaatgtaagaatttccttgtttttaaaggctgaataatttcacttttatgtaggtataagccacattttatctgttcattcatagatggatatggacttctttcccaagtctaggctattaggaataatctcacaatgaacatatagttga

SEQ ID NO: 169368 - DNA, 420 bp, Homo sapiens
ttgctttttgttttgagacagggtctcgctctcattgccctggcacgatcttggctcactgtggcctttactcttgggcttaagtgatccccccacctccrcttcctgagtagctaggactacagtcatgcaacaccatactcagctaatttttcatatttttttgtagagatggggcttcaccgtgttgccctagctgttctctaacttctaagctcaagaaatccacctaccttgcctcccaaagtgctgggattacaggcatgagccagcatgcccggccaaataatttcttttgttgttgttttttgttttgttttgtttgttttgagacagggtctcactcagttgcccaggctggagggcaatagtgcaatcatagttcactacagcctcgagttctagggctcaaaagatcct

SEQ ID NO: 169369 - DNA, 420 bp, Homo sapiens
ttgctttttgttttgagacagggtctcgctctcattgccctggcacgatcttggctcactgtggcctttactcttgggcttaagtgatccccccacctccacttcctgagtagctaggactacagkcatgcaacaccatactcagctaatttttcatatttttttgtagagatggggcttcaccgtgttgccctagctgttctctaacttctaagctcaagaaatccacctaccttgcctcccaaagtgctgggattacaggcatgagccagcatgcccggccaaataatttcttttgttgttgttttttgttttgttttgtttgttttgagacagggtctcactcagttgcccaggctggagggcaatagtgcaatcatagttcactacagcctcgagttctagggctcaaaagatcct

SEQ ID NO: 169370 - DNA, 427 bp, Homo sapiens
ctggtcaacatggtgaaaccctgggtgtggwggtggtgggtgcctgtaatcccagctacttgggcagccaaggcaggagaattgtttgaacccaggaggcagaggttgcagtgagccgagatcatgccactgcactccagcctgggcaagagagggagactccatctcaaaaaaaaaaaaaaaaaaaaagatcctcccaagtagctgggactacaggtgtgcaccactatacccagctaatttttaattttttttgcagtgacagtctcattttgttgcccagcctggtcccagactcctgggcttaagcaatcttcctgcctccgcctcccaaagtgttaggattacaggaatgagccagtgcaccaggccaaaagtaatttccttttgtcttttatttaactaattttgtagtgatggggtctaa

SEQ ID NO: 169371 - DNA, 427 bp, Homo sapiens
ctggtcaacatggtgaaaccctgggtgtggaggtggtgggtgcctgtaatcccagctacttgggcagccaaggcaggagaattgtttgaacccaggaggcagaggttgcagtgagccgagatcatgccactgcactccagcctgggcaagagagggagactccatctcaaaaaaaaaaaaaaaaaaaaagatcctcccaagtwgctgggactacaggtgtgcaccactatacccagctaatttttaattttttttgcagtgacagtctcattttgttgcccagcctggtcccagactcctgggcttaagcaatcttcctgcctccgcctcccaaagtgttaggattacaggaatgagccagtgcaccaggccaaaagtaatttccttttgtcttttatttaactaattttgtagtgatggggtctaa

SEQ ID NO: 169372 - DNA, 427 bp, Homo sapiens
ctggtcaacatggtgaaaccctgggtgtggaggtggtgggtgcctgtaatcccagctacttgggcagccaaggcaggagaattgtttgaacccaggaggcagaggttgcagtgagccgagatcatgccactgcactccagcctgggcaagagagggagactccatctcaaaaaaaaaaaaaaaaaaaaagatcctcccaagtagctgggactacaggtgtgcaccactatacccagctaatttttaattttttttgcagtgacagtctcattttgttgcccagcctggtcccagactcctgggcttaagcaatcttcctgcctccgcctcccaaagtgttagkattacaggaatgagccagtgcaccaggccaaaagtaatttccttttgtcttttatttaactaattttgtagtgatggggtctaa

SEQ ID NO: 169373 - DNA, 599 bp, Homo sapiens
cacatgctgcaacttgtttgagggaccactgagatttcaagttgaggaaaagccttctggtacatgaggtcgattgtacaatgaatatgaatattgaacattcctgccagcagtctgcagacttctgatttcaggcccctgcaaactgttatttcctgggcttgtttttaaaagcagagcccaaayttatttctgagaaaggacagaattaaaattcagcagataattgttcatgctgtataaataaattcctcttcagagagtgaaggaatcctttttctcagggaccacaggaccgcttataatgactgttttcctcacatcaagagctcagtctttgtggcaccttgactttttttggagggggcaaccagtaactgttgtgtaaatgtatgtcatatacattaatttttaccatgaaatctgaatgcttggggatatacaagtaaatgtttcttgacatatgatttccctaaagtgaatgtaaaaatgccctgatcttgaattgaaaaacagaacatgtggttaaactagcaaagacagaaaacactatagtaaatattgtcattcaatgatcagctaaactaaagctgattatt

SEQ ID NO: 169374 - DNA, 599 bp, Homo sapiens
cacatgctgcaacttgtttgagggaccactgagatttcaagttgaggaaaagccttctggtacatgaggtcgattgtacaatgaatatgaatattgaacattcctgccagcagtctgcagacttctgatttcaggcccctgcaaactgttatttcctgggcttgtttttaaaagcagagcccaaatttatttctgagaaaggacagaattaaaattcagcagatarttgttcatgctgtataaataaattcctcttcagagagtgaaggaatcctttttctcagggaccacaggaccgcttataatgactgttttcctcacatcaagagctcagtctttgtggcaccttgactttttttggagggggcaaccagtaactgttgtgtaaatgtatgtcatatacattaatttttaccatgaaatctgaatgcttggggatatacaagtaaatgtttcttgacatatgatttccctaaagtgaatgtaaaaatgccctgatcttgaattgaaaaacagaacatgtggttaaactagcaaagacagaaaacactatagtaaatattgtcattcaatgatcagctaaactaaagctgattatt

SEQ ID NO: 169375 - DNA, 599 bp, Homo sapiens
cacatgctgcaacttgtttgagggaccactgagatttcaagttgaggaaaagccttctggtacatgaggtcgattgtacaatgaatatgaatattgaacattcctgccagcagtctgcagacttctgatttcaggcccctgcaaactgttatttcctgggcttgtttttaaaagcagagcccaaatttatttctgagaaaggacagaattaaaattcagcagataattgttcatgctgtataaataaattcctcttcagagagtgaaggaatcctytttctcagggaccacaggaccgcttataatgactgttttcctcacatcaagagctcagtctttgtggcaccttgactttttttggagggggcaaccagtaactgttgtgtaaatgtatgtcatatacattaatttttaccatgaaatctgaatgcttggggatatacaagtaaatgtttcttgacatatgatttccctaaagtgaatgtaaaaatgccctgatcttgaattgaaaaacagaacatgtggttaaactagcaaagacagaaaacactatagtaaatattgtcattcaatgatcagctaaactaaagctgattatt

SEQ ID NO: 169376 - DNA, 599 bp, Homo sapiens
cacatgctgcaacttgtttgagggaccactgagatttcaagttgaggaaaagccttctggtacatgaggtcgattgtacaatgaatatgaatattgaacattcctgccagcagtctgcagacttctgatttcaggcccctgcaaactgttatttcctgggcttgtttttaaaagcagagcccaaatttatttctgagaaaggacagaattaaaattcagcagataattgttcatgctgtataaataaattcctcttcagagagtgaaggaatcctttttctcagggaccacaggaccgcttataatgactgttttcctcacatcaagagctcagtctttgtggcaccttgactttttttggagggggcaaccagtaactgttgtgtaaatgtatgtcatatacattaatttttaccatgaaatctgaatgcttggggatatacaagtaaatgtttcttgacatatgatttccctaaagtgaatgtaaaaatgccctgatcttgaattgaaaaacagaacatgtggttaaactagcaaagacagaaaacwctatagtaaatattgtcattcaatgatcagctaaactaaagctgattatt

SEQ ID NO: 169377 - DNA, 568 bp, Homo sapiens
tggctgtgacaagggatgacrgtggtcagtagaggtgctgaaaagtggttgggcatggatacactctatgtggatattcatattgtccttttagttaaagatgacaattttctaaaggaagattttcttttgtggatggggttgagggaactcacaccagttaaaatgaattgaattgctgttgtctaacttagcctgcctcaaattcactcaggagacttatttaaaaaggaagatttcccagagagatttatttaagggaaagcagaattggcattcttctttcgacctagagcaccttgacaagctgttgccaggacacgcaagtgggatggtgtctcttgtgcaactgataaaaggaagtgacccttggattgaaggaagtagaaagattaaatcagaaagaatcaaggttcagagtctgcaaagccacaagccctctgtatgggccagcaaacccctgggcctgagaggcatcagtaattgtcacccgagttggattgaactgaaataaagaagtaaagatcctatataatctattgaaatctttaaaagggttgcaagatat

SEQ ID NO: 169378 - DNA, 568 bp, Homo sapiens
tggctgtgacaagggatgacggtggtcagtagaggtgctgaaaagtggttgggcatggatacactctwtgtggatattcatattgtccttttagttaaagatgacaattttctaaaggaagattttcttttgtggatggggttgagggaactcacaccagttaaaatgaattgaattgctgttgtctaacttagcctgcctcaaattcactcaggagacttatttaaaaaggaagatttcccagagagatttatttaagggaaagcagaattggcattcttctttcgacctagagcaccttgacaagctgttgccaggacacgcaagtgggatggtgtctcttgtgcaactgataaaaggaagtgacccttggattgaaggaagtagaaagattaaatcagaaagaatcaaggttcagagtctgcaaagccacaagccctctgtatgggccagcaaacccctgggcctgagaggcatcagtaattgtcacccgagttggattgaactgaaataaagaagtaaagatcctatataatctattgaaatctttaaaagggttgcaagatat

SEQ ID NO: 169379 - DNA, 568 bp, Homo sapiens
tggctgtgacaagggatgacggtggtcagtagaggtgctgaaaagtggttgggcatggatacactctatgtggatattcatattgtcmttttagttaaagatgacaattttctaaaggaagattttcttttgtggatggggttgagggaactcacaccagttaaaatgaattgaattgctgttgtctaacttagcctgcctcaaattcactcaggagacttatttaaaaaggaagatttcccagagagatttatttaagggaaagcagaattggcattcttctttcgacctagagcaccttgacaagctgttgccaggacacgcaagtgggatggtgtctcttgtgcaactgataaaaggaagtgacccttggattgaaggaagtagaaagattaaatcagaaagaatcaaggttcagagtctgcaaagccacaagccctctgtatgggccagcaaacccctgggcctgagaggcatcagtaattgtcacccgagttggattgaactgaaataaagaagtaaagatcctatataatctattgaaatctttaaaagggttgcaagatat

SEQ ID NO: 169380 - DNA, 410 bp, Homo sapiens
agatatcttattttaaaataccaaaataggaatagaatatgaagggctggttatgagtaatatgatacacttttttgagaggatgagattacaataacaatacctcctctcatagaatagccagcaagtctccactaaataagagtgccttgattttatagatgtttaatcatggatattgagataatgygaacgatttgtagacacaggagtttattaaagaattatataatacctttcaagtgttgaaattaagcctgcatccccacaattttcagaggtgctgatgcctaataaactcaaccccttgcatgccaaaattggcttaaagcccacccattacccaagctacacttcaagcatcaaggttcaaaaatgtaattttaaatatgcaagagtttgaggaattc

SEQ ID NO: 169381 - DNA, 410 bp, Homo sapiens
agatatcttattttaaaataccaaaataggaatagaatatgaagggctggttatgagtaatatgatacacttttttgagaggatgagattacaataacaatacctcctctcatagaatagccagcaagtctccactaaataagagtgccttgattttatagatgtttaatcatggatattgagataatgcgaacsatttgtagacacaggagtttattaaagaattatataatacctttcaagtgttgaaattaagcctgcatccccacaattttcagaggtgctgatgcctaataaactcaaccccttgcatgccaaaattggcttaaagcccacccattacccaagctacacttcaagcatcaaggttcaaaaatgtaattttaaatatgcaagagtttgaggaattc

SEQ ID NO: 169382 - DNA, 410 bp, Homo sapiens
agatatcttattttaaaataccaaaataggaatagaatatgaagggctggttatgagtaatatgatacacttttttgagaggatgagattacaataacaatacctcctctcatagaatagccagcaagtctccactaaataagagtgccttgattttatagatgtttaatcatggatattgagataatgcgaacgatttgtagacacaggagtttattaaagaattatataatacctttcaagtgttgaaattaagcctgcatccccacrattttcagaggtgctgatgcctaataaactcaaccccttgcatgccaaaattggcttaaagcccacccattacccaagctacacttcaagcatcaaggttcaaaaatgtaattttaaatatgcaagagtttgaggaattc

SEQ ID NO: 169383 - DNA, 193 bp, Homo sapiens
cttggctgggagatggaaacgatgcaagggagagggagaggctgacacagccagctggamgggcaggcaggagaggggagccgtgggagccggctgggagcctgccacactcccctcctcctgaagccttttggggttgctgccctgcctgtggccacgggtttaaggacccccctggtcatttttctttgtc

SEQ ID NO: 169384 - DNA, 193 bp, Homo sapiens
cttggctgggagatggaaacgatgcaagggagagggagaggctgacacagccagctggaagggcrggcaggagaggggagccgtgggagccggctgggagcctgccacactcccctcctcctgaagccttttggggttgctgccctgcctgtggccacgggtttaaggacccccctggtcatttttctttgtc

SEQ ID NO: 169385 - DNA, 193 bp, Homo sapiens
cttggctgggagatggaaacgatgcaagggagagggagaggctgacacagccagctggaagggcaggcaggrgaggggagccgtgggagccggctgggagcctgccacactcccctcctcctgaagccttttggggttgctgccctgcctgtggccacgggtttaaggacccccctggtcatttttctttgtc

SEQ ID NO: 169386 - DNA, 503 bp, Homo sapiens
tagttgggatagttctaaactgtcagagatattcaaataatgttgtagaaagagatcacagttttttctttattgctaccagatctgtaccctgagactttttaaataaacagtgtaagagcttttctcaggyagtggaagcttctatgccatccttccttagagtaggaggcatcaacttgtggttggctcctcaagtgatttgttttctataataatgaagatctcccaagctgcttgcatcactatctcaagtttgtaaaatattttcagattctaccttacaggaagccattcgtcggaattatctaagtctcaagttggttagttagatttaacagagctaaccctcatccatgacttatcagcatttatatgtaaaagtaaggctttgtacttgctttggcagcacaaatactaaaattggaacaatacagagaaaattagcatcgtgagacatttcatattttgcagtcaggggaaggtcatttgactgtttgctg

SEQ ID NO: 169387 - DNA, 503 bp, Homo sapiens
tagttgggatagttctaaactgtcagagatattcaaataatgttgtagaaagagatcacagttttttctttattgctaccagatctgtaccctgagactttttaaataaacagtgtaagagcttttctcaggcagtggaagcttctatgccatccttccttagagtaggaggcatcaacttgtggttggcycctcaagtgatttgttttctataataatgaagatctcccaagctgcttgcatcactatctcaagtttgtaaaatattttcagattctaccttacaggaagccattcgtcggaattatctaagtctcaagttggttagttagatttaacagagctaaccctcatccatgacttatcagcatttatatgtaaaagtaaggctttgtacttgctttggcagcacaaatactaaaattggaacaatacagagaaaattagcatcgtgagacatttcatattttgcagtcaggggaaggtcatttgactgtttgctg

SEQ ID NO: 169388 - DNA, 503 bp, Homo sapiens
tagttgggatagttctaaactgtcagagatattcaaataatgttgtagaaagagatcacagttttttctttattgctaccagatctgtaccctgagactttttaaataaacagtgtaagagcttttctcaggcagtggaagcttctatgccatccttccttagagtaggaggcatcaacttgtggttggctcctcaagtgatttgttttctataataatgaagatctcccaagctgcttgcatcactatctcaagtttgtaaaatattttcagattctaccttacaggaagccattcrtcggaattatctaagtctcaagttggttagttagatttaacagagctaaccctcatccatgacttatcagcatttatatgtaaaagtaaggctttgtacttgctttggcagcacaaatactaaaattggaacaatacagagaaaattagcatcgtgagacatttcatattttgcagtcaggggaaggtcatttgactgtttgctg

SEQ ID NO: 169389 - DNA, 565 bp, Homo sapiens
tgcttgcatcactatctcaagtttgtaaaatattttcagattctaccttacaggaagccattcgtcggaattatctaagtctcaagttggttagttagatttaacagagctaaccctcatccatgacttatcagcatttatatgtaaaagtaaggctttgtayttgctttggcagcacaaatactaaaattggaacaatacagagaaaattagcatcgtgagacatttcatattttgcagtcaggggaaggtcatttgactgtttgctggctagctaagtcacagtttgaattgaaacaaaatgggtggccccttatatttgaattgtgatttttcactacaaaaacatttgtgtaaggtgatctataaactgagaatggagataagtaacacatggggtgttgtgtaaatattttgttagtatgtatcttggaaatgagaaaatgtcaactttcatctacttcatggaacttaaaaaaaatgaaagtagggttttgtcttccatgtcagttggagataacatcactgatggagattaaccatcattctggcaaacatctgctgg

SEQ ID NO: 169390 - DNA, 604 bp, Homo sapiens
atcactatctcaagtttgtaaaatattttcagattctaccttacaggaagccattcgtcggaattatctaagtctcaagttggttagttagatttaacagagctaaccctcatccatgacttatcagcatttatatgtaaaagtaaggctttgtacttgctttggcagcacaaatactaaaattggaacaatacagagaaaattagcatcgtgagacatttcatattttgcagtcaggggaaggtcatttgactgtttgctggctagctaagtcacagtttgaatygaaacaaaatgggtggccccttatatttgaattgtgatttttcactacaaaaacatttgtgtaaggtgatctataaactgagaatggagataagtaacacatggggtgttgtgtaaatattttgttagtatgtatcttggaaatgagaaaatgtcaactttcatctacttcatggaacttaaaaaaaatgaaagtagggttttgtcttccatgtcagttggagataacatcactgatggagattaaccatcattctggcaaacatctgctggttcagttagagtctgcagagaagtaatagtggtagcccaagccaga

SEQ ID NO: 169391 - DNA, 604 bp, Homo sapiens
atcactatctcaagtttgtaaaatattttcagattctaccttacaggaagccattcgtcggaattatctaagtctcaagttggttagttagatttaacagagctaaccctcatccatgacttatcagcatttatatgtaaaagtaaggctttgtacttgctttggcagcacaaatactaaaattggaacaatacagagaaaattagcatcgtgagacatttcatattttgcagtcaggggaaggtcatttgactgtttgctggctagctaagtcacagtttgaattgaaacaaaatgggtggccccttatatttgaattgtgatttttcactacaaaaacatttgtgtaaggtgatctataaactgagaatggagataagtaacacatggggtgttgtgtaaatattttgttagtatgtatcttggaaatgagaaaatgtcaactttcatctacttcatggaacttaaaaaaaatgaaagtagggttttgtcttccatgtcagttggagataacatcactgatggagattaaccatcattctrgcaaacatctgctggttcagttagagtctgcagagaagtaatagtggtagcccaagccaga

SEQ ID NO: 169392 - DNA, 488 bp, Homo sapiens
agcaacttgtttaagagcaaatacctgttggctatagagccaggaccttccagtaagagccaggaaggtgactttccattatgtcaagctgatgtgagatagtttgctgagctatactgccttcacttcatgagtacttcacctgtttttattatttaattagaaaggtactaagaagtttgtagagcttacagaagagaagtgtataggataattaacatcctgatattgttcaagatactctaataatttagtatatttggtaaatgtttttgataatggtattaaaatattaatttcatttatttttatacatagcattgccgractaatttctgaatacaaaagaaagaaatatgaagagctttctataaatagcaatccaggtaagatttatgatagtgaattactcttgatggtactaccatagataaaaaagaataaagatgttttgattacaaaaaaacagtttaaaaaaatcagtttaa

SEQ ID NO: 169393 - DNA, 272 bp, Homo sapiens
gaattcagattttaaaaagtcttcactctctgaagatgatcatttgyccttaaggacaaaaatgaactgaagtttcacatgagctatttccattccagaatatctgggattctactttaagcactacataaactgactttatcctcagactagctgaatgattttgtgctgtttcaggatgtttgcactgaagaaaaacagaaagcttatctgaaatttataaaactttttgttttgctacatagaaaacagaaggtatttgaataataagc

SEQ ID NO: 169394 - DNA, 533 bp, Homo sapiens
agtggatgtgttctcagaggaggctgagggcagcgccaagaggaggaggggctgaaaggccactccaagatatttataagatctgacattccataggcctatatgtcatttcttccatccctctattttcctttttaacttatgaaatatttgacattcaaaaagatataaaaataatataatgagtacccacgtgyttactatccgcattaagaaataattcattacaaatagttttccttcccaccctctcttctgcttctttttcttccccttcctctcttgcccctccccgttttctgctctgtactgtctggaacgtggcatatatcattgtcacttatttctttataattttctacatacatatgtatctttaaacattatgtggcatttttttgtatgtttttcaaggtaacagatacagatgaggtaaaactatatagaaaggaaaccatggaaatgatgaacataggatttaggatggaggatgccttggagttgtaactttgggattggtggcagattcacca

SEQ ID NO: 169395 - DNA, 473 bp, Homo sapiens
aaataaaacatctatattcatttacagatgattattaaatacataagatcaattagtgtaaaaaagctgyttatgtttctttcagataaatattatgtatatcaactgaggatacttaaatatgaatccagtgaaattgggaatgacaatgccttggagcaattcattgttcaagaatctttggactgaattcaaaattagggatttctgcttgaattgttatttgcaattttatacatatacacatatttggagagaggcagtttccaagacaatgtcttcttccctgatctcttgctctctcccatttctatagtagttagctgcagacaggcttgtcagtgattgcaactgatagagtaagaagttatctgggcttcatttttaacatcagcacagttattaggcaatctaagtggaattttggccacaagagagggagcacaagtcaaagtattttaaatcagagattt

SEQ ID NO: 169396 - DNA, 600 bp, Homo sapiens
gaaaccccagtgatagaagaaacagcctgaatgcaaaatgttccctgaacagaagtccactccagcatcatcatagtctgatactcccttgcttctgtttggttttttgatcccttcacagtacctaaaacacagtaaaagcaataggaatactgagcagttttgtcacagggcacaacagagcatgtccagactggcatgactgaggacagaggatgctgaaaaaaggttatttggggcaactgcagggctgaaggaacatttgataatgattggctgaaggagaggagaaaggagctcattcccttcctcaatggaaagtaaaagaggggaaaaaaccctgaaacctcccaactctaccacatcaaataaaattaaaaattcatcaacatcagtatcatcagaaaaaaaamaatacaaacacatctatcgtaataatgacaaggcagtgaatcactcacaggggagtaaagagattatcttaacaagaaaagcaatgaatagaaatgtcaacttctgaaagcaaagggaagggggacagggtaaaaatggaaaacttttaagacggaatcacatgtttggaagtcattggtacctctt

SEQ ID NO: 169397 - DNA, 560 bp, Homo sapiens
catgtctgtaatctagccagcaagtaaagaaatttccctttgtttctttctcctgctcttttgcactggcagccagccataatcagcaagggtctggccaggtatggaagggaccagcaccgaccacctggagcacttgtgctattttgtacctggagagtaattctcttgagtgactcctcacaatatactcatacttgtaagaggaccagttggattacagagttaaccaccagaaccaaagcttctgacgctgcaggatgacttcagtgttcctcttttcatgatggaccctgggtgctctgccatcatcagtccatagattacagrcaggtctgggcagtagcttcttgaggttccttccttccttcattccactgtccagagttgcatattgaactgtgcttccagaggttacagcattgagtagtttctaactcctcagcactttactctggcatcctcacctccaggaaaggctacataatttgcagggtccagtgcaaaatgaaaatgtggagccatttgttcaaaaactaagaacttaatgaaagcacagt

SEQ ID NO: 169398 - DNA, 358 bp, Homo sapiens
gaaatcccatctttactaaaaatacaaaattagccagtcgtagtggcgtatgcctgtaatcccagccactcaggaggctgaggcaggagaatcgcttgaacccgggaggcagaggtttcagtgagccaagatcrcgccattgcactccagcctgggcaacaagagtgaaactccacctcaaaaataaaataaaataaaataaaagagtttaattgagcaaagaatgagtcttgaatctgggatcacctccacttccacagcccctacacccccaatccccaggccagagtacattcagagagactccagtacagccacatgttggaagatttatggacagaaaaaggaaagtgacatt

SEQ ID NO: 169399 - DNA, 358 bp, Homo sapiens
gaaatcccatctttactaaaaatacaaaattagccagtcgtagtggcgtatgcctgtaatcccagccactcaggaggctgaggcaggagaatcgcttgaacccgggaggcagaggtttcagtgagccaagatcaygccattgcactccagcctgggcaacaagagtgaaactccacctcaaaaataaaataaaataaaataaaagagtttaattgagcaaagaatgagtcttgaatctgggatcacctccacttccacagcccctacacccccaatccccaggccagagtacattcagagagactccagtacagccacatgttggaagatttatggacagaaaaaggaaagtgacatt

SEQ ID NO: 169400 - DNA, 543 bp, Homo sapiens
cccttttgccacatccttgccaacagttagcatatagtgtctttgtagttttagctaatgcaataggtgcttagcactatagtttaaaacatgtatctttatttatttatttatttatttatttatttatttattttttgagatggagtctcactctgtcacccaggctggagtgcagtggcgcgatctcggctcactgcaaactctgcctcctgggttcaagagattctcctgcctcagcctcccaagtakttgggattacaggtgcccgccaccaggcccagctaatttttttttgtatttttagtacagacggggtttcaccatatcgaacaggctggtcttgaactcctgacctcaagtgacccacctgcctcagcatccctaagtgctgggattacaggcttaaaacatgcatctttcttaataactagttttgcagaacatttttttgtgtgcttatttaccatttgtatatctactttgtgaaatgttcatttcttttctcagtttttaattagattatttacttatattaagttg

SEQ ID NO: 169401 - DNA, 574 bp, Homo sapiens
ccccttggagtattttggagaaagggagatgcctccctgagcctatctattagctctttacaccagagccttgcacccacctgccgagttttgtgtcattattaggaaatagtttggtttctggccatcttagaaaaaaggaaaattccttgtctcatggttctttgaactgtagtttaaaattgtatgtgtgcctgttactgcctttgtatctgatttatttccaacattactagtttatgtgtttgtccagaattgtaggcaacytgtgggagagttaacattgttttctcactacccagaatactgccatctgccagtgagatctaataagtcctgggatttgggtaaaacaagataaagaaacttattccatcttcgaagtaaatctgaattgccctgtaaaatatctaaaggtctttaactttccttctcattatgtacttcctaataatctttttcctctttatttttttctttctcacgttttgattctctatattccactattctcctttcccttcttttcttgttcctaatttcttttctcttttttgataataagtaagaaatg

SEQ ID NO: 169402 - DNA, 383 bp, Homo sapiens
actgctgattaatctcagaacagaagggtatcaaagacagtggtatacctagaatatataacctggactggatcattctttaacactccctcttcatataacattactatttttgcaaatagtcatttaatatcagtactaatcattattgtcttgatrttttagttttagttttagtttaattaaaacaacaataaatttcaattgtaaagatactcatattcagtaaaatatttcctgtgcaaaataaaatttgcacttctcaagcaaaaatactgcgccttacattttgcaatatttcactgttttaaatgcaaataaaaatgtcaaatggtcacataaatggcaggaatgaagtaactgaaattttatttcttcctatc

SEQ ID NO: 169403 - DNA, 383 bp, Homo sapiens
actgctgattaatctcagaacagaagggtatcaaagacagtggtatacctagaatatataacctggactggatcattctttaacactccctcttcatataacattactatttttgcaaatagtcatttaatatcagtactaatcattattgtcttgataytttagttttagttttagtttaattaaaacaacaataaatttcaattgtaaagatactcatattcagtaaaatatttcctgtgcaaaataaaatttgcacttctcaagcaaaaatactgcgccttacattttgcaatatttcactgttttaaatgcaaataaaaatgtcaaatggtcacataaatggcaggaatgaagtaactgaaattttatttcttcctatc

SEQ ID NO: 169404 - DNA, 567 bp, Homo sapiens
tgcatttggttgagatatttcttaattctcttttaatccataaacattgcctctcttttttttcttaacatttgttgaagaaacatggttatttgtcctgtagaatttcttatgttgtctttccctacttttggtagaggaagagttgcttttcattcctgtaaagtctaggaggggatagtagaacaattgtgggctctaatatccctaagtggarccgctggccactgggaagcagagagagacaaaaaccagcttgagaatcccagtgcactatgtgaggacctttttctgtgatgctgagtgtatatttaatgatatgctttaattttttgaaaacataagtttacaggtgttcaaaaaattaatctcctttaaccagaatatcatttaattagaaatatccaacgttatgttcattctaaaaagctaggtttggggaatggatactttcatagtaaagaagatgttgtgtgatactttgggaccatgtgactatctttgtccccatgtaaaaatcactttcacccagtgacttttgcatccactgatgattcttgcctaaat

SEQ ID NO: 169405 - DNA, 589 bp, Homo sapiens
tttctctgtaattaaccaattattatattattttatttcacatgtccttgaaagcatgtagaatatagttgtgatgtaattaacacaaaagcaatggaagaaaaatgacatatgggaaaaagggaggtattttttgaaagtctgaaggatgtaaggtaacaatatttgaactccaggcaggaaaaacaggttcaaatwatatagctcaggatggacaccaagaaagaagaggaacaataaaaaaaggagttttaaaaaaacagaatgaaaaaactatgtggttctcctttctcttttcttccaataactggaacctccttcgagatttaacaaacctaagaaattcagtaaattgctccttcatctatacattcaacctggttcatcctactctgacctctcccacaaacaatccattttacatactgaagaaagaataacttttctgatcatgctttccacacacatgctcatgtgcatgcatgaacacatgtatgcacacacacatatacatacataaagtccaagtttctgacattcaagaatttctactacaaccaggctccaatcaatcttcaatgttcaagag

SEQ ID NO: 169406 - DNA, 589 bp, Homo sapiens
tttctctgtaattaaccaattattatattattttatttcacatgtccttgaaagcatgtagaatatagttgtgatgtaattaacacaaaagcaatggaagaaaaatgacatatgggaaaaagggaggtattttttgaaagtctgaaggatgtaaggtaacaatatttgaactccaggcaggaaaaacaggttcaaataatatagctcaggatggacaccaagaaagaagaggaacaataaaaaaaggagttttaaaaaaacagaatgaaaaaactatgtggttctcctttctcttttcttccaataactggaacctccttcgagatttaacaaacctaagaaattcagtaaattgctccttcatctatacattyaacctggttcatcctactctgacctctcccacaaacaatccattttacatactgaagaaagaataacttttctgatcatgctttccacacacatgctcatgtgcatgcatgaacacatgtatgcacacacacatatacatacataaagtccaagtttctgacattcaagaatttctactacaaccaggctccaatcaatcttcaatgttcaagag

SEQ ID NO: 169407 - DNA, 476 bp, Homo sapiens
atcaagttctacttttcttcctacgttacaggctaactctttttggtctcctctatcaggtcttgccatctccttgatctctaaatattggtaagctcctgatccaaggcctcagttctcttcttcaactatgtacagattttggtgacttaatcatgtctagcctyatagctttttattgttgctatctgcttatttttccatgatttttatctataggctccatctgtcccttaaaccccagttttgcaattccaatggcctcctcagtattttggatatatctcatatatatttcaaagctcacatggcaataagtgaatatctgaccttctccctaccaaacctttcctcatatttttttcttcatttcagcaaatggaaacgccatctttccaacagctaatactataccgataacgtacagtctcacctttatagcctccttatccatgctagagtttcctttctgttta

SEQ ID NO: 169408 - DNA, 476 bp, Homo sapiens
atcaagttctacttttcttcctacgttacaggctaactctttttggtctcctctatcaggtcttgccatctccttgatctctaaatattggtaagctcctgatccaaggcctcagttctcttcttcaactatgtacagattttggtgacttaatcatgtctagccttatagctttttattgttgctatctgcttatttttccatgatttttatctataggctccatctgtcccttaaaccccagttttgcaattccaatggcctcctcagtattttggatatatctcatatatatttcaaagctcacatggcaataagtgaatatctgaccttctccctaccaaacctttcctcatatttttttcttcatttcagcaaatggaaacgccatctttccaacagctaatactayaccgataacgtacagtctcacctttatagcctccttatccatgctagagtttcctttctgttta

SEQ ID NO: 169409 - DNA, 476 bp, Homo sapiens
atcaagttctacttttcttcctacgttacaggctaactctttttggtctcctctatcaggtcttgccatctccttgatctctaaatattggtaagctcctgatccaaggcctcagttctcttcttcaactatgtacagattttggtgacttaatcatgtctagccttatagctttttattgttgctatctgcttatttttccatgatttttatctataggctccatctgtcccttaaaccccagttttgcaattccaatggcctcctcagtattttggatatatctcatatatatttcaaagctcacatggcaataagtgaatatctgaccttctccctaccaaacctttcctcatatttttttcttcatttcagcaaatggaaacgccatctttccaacagctaatactataycgataacgtacagtctcacctttatagcctccttatccatgctagagtttcctttctgttta

SEQ ID NO: 169410 - DNA, 347 bp, Homo sapiens
tttggagtagatacatgaaattcataagcctagtcatgctatcataattatctttccttttcattcttgtctcaattaaagtctggaatttttattcactaatagtgcttacacaaattcttaagaacagaggcaaaaataattcagccaaaaaagttacatttatttcatatgtatttttctgaatcaagaaattgaaggcatgccaacttcagattcaaaattcaaccacatcttaaagaaatgaggatctaagtyattcttagtcaatattcgatatgattccaactaatgctttttggctgaataaactaccttttttatagcatttgcatttcttagactgt

SEQ ID NO: 169411 - DNA, 591 bp, Homo sapiens
ttcacaattgtccctgctggatcaggatacagtttcaaggcatctcagagtgtatgagttgctccagctaacgaaatacacacatgggagacatatggtttaatgaagcattcatttctgacagttcaattcaaatgattcaataaaggttagcaagtttatgtatataaagatacagttctagttatttaaaagtatggccaaactgcctttttcaaacatcctcatataaacattttaattaaatcaggggagagctacatgaatctcagagacacatggaccagttcagtaaggcgcttaacttaagttgtgctttaccaaagagatgggagcagagactttcatgctttctttcagaaggaagggcttaccaataatctggatgatttctgcyaggagtactccatctgcaatgtcttgttgcaagtccttgatcagccgcttgtggcctgattttgctaggtagtggttggcccagtcagtgtaaatctgttgaacagagagaaggaaaaagtgagatggggtgagggaaaagagagacaataaaatgctgaagacaaatgttggattcaaagggaagctattctg

SEQ ID NO: 169412 - DNA, 561 bp, Homo sapiens
agtcctactggcatcataagactagtacatatctggtggtgattaagtttcttgaaagatgtaaacaactggaagcatcccattgcataagaaaaayatatgtgagagcaaaattgcatctccttttattaatatccatgatctctatgttgaagatattgaagggtaagaaaaattacttgcataactgtctcctgaattagcacacaaatacatgatttttaggtggatgcttttatttggtaataatttttctcagttaagatttgattatatttgtatgatcatacattttttggaaggattttatactgtttagaatttaaaacattgagcacactccccttcttaacacttcatttaaatgatagaattgttttggccttctagtagaaacttcaggttaagtcagacttgagttgtgccgatctgtccataggcaaagactggggccatgggttgaaaaaggattcacaagggtgaggagaatgagttctggagtcagacagatctgacttgagaccacttactaccagtggaaccctggacaagttacttaac

SEQ ID NO: 169413 - DNA, 561 bp, Homo sapiens
agtcctactggcatcataagactagtacatatctggtggtgattaagtttcttgaaagatgtaaacaactggaagcatcccattgcataagaaaaacatatgtgagagcaaaattgcatctccttttattaatatccatgatctctatgttgaagatattgaagggtaagaaaaattacttgcataactgtctcctgaattagcacacaaatacatgatttttaggtggatgcttttatttggtaataatttttctcagttaagatttgattatatttgtatgatcatacattttttggaaggattttatactgtttagaatttaaaacattgagcacactccccttcttaacacttcatttaaatgatagaattgttttggccttctagtagaaacttcaggttaagtcagacttgagttgtgccratctgtccataggcaaagactggggccatgggttgaaaaaggattcacaagggtgaggagaatgagttctggagtcagacagatctgacttgagaccacttactaccagtggaaccctggacaagttacttaac

SEQ ID NO: 169414 - DNA, 551 bp, Homo sapiens
cccttggctctctctcttcctctggctcccaccacgtaagatgatcttgcttctccttcaccttccaccatgactgtaagtttcctgaggcctccccagccatgctacctttggagcctgcagaactgtgagtctattaaacctcttttccttacaagttacccagtctcagggatgtctttatagcagtgtgaaaacagactaatacctcaaccaatggaattattgtgaggatttaatgaatttctaytttggaatatggactttcactatgttaaatattgttattagtagctcactgctttaatatgaaatacatttccattaaccatgagaaatattgtaaaccattattattgttaaactcttaaatcatatatattcatccaaatatagtttacctaactaattaaggaaaattgcaggaagttgtaatgaccttgtagcttcatcatttgcctctatgatatttctcttacagtgctcattattcactataaatatgaggatgaaatagaaggcaacatatatgataccatatttcttttgag

SEQ ID NO: 169415 - DNA, 578 bp, Homo sapiens
gtagggagaagtgataggggaaagactgcctcttcattgaarttaaaagtctgtttgaataaaaacacactgatctgtaacctgattagaagatattatgaatataatcagaggatttaaaaatattagctgagctaattttaaccctgtacttatttaaaacattattgttttccttcaacattcaagcagtagcattacatttctataagcactgctccctggtatgttcaaattactggctttgtaaagttaaatgggttcttctaagacataacaggaattgtgttgaagaccaagggtttctatgataataactggacttctacatcttaaaaagcagcaaaagactaagcatataaagtgcaaccagaaatcatatcttagggaaaggtgatcagtgaagtaagtgtttttcccacaaaaagaaaaactagtatagggaagagaattggaaggaaaaggagccctagaacagatttaagaggttacctctctggactgagtttcaaagtagcatttggacctgagaatggaatcacaaaaggacaacattgaccacaacagtataggaaagc

SEQ ID NO: 169416 - DNA, 510 bp, Homo sapiens
tgcaatcctggttctggtaattcatacctttataatcttgggtaaatttgataattaagtcacagataataatactatatgtgccatttagttataaggaaggttaaagtactaatgcaggcaaacctcttccacagcatctggtttggaatagaccaacaatagattttagttatattattagcttttatgtaytgaaatacaagttacataaactttataatatgtcagatttttacattgctagttttctttttcattatgatttttatataataatgctatgtttataagactagtttataagactagttaatttaacactaaattaacagtaaatatcctattgatgtgatattgccagagaagaaactgaattttgttttttatgtctcctggtattgaattctatcttctatgtatttggtatttttttaatatttcacattaaaaacttcatcagtctgaaaagatattttttaacactaattgtaatcataaaacagtggt

SEQ ID NO: 169417 - DNA, 414 bp, Homo sapiens
acttagttattctaaagctaatgttgggttgaaatggcacagcactgccttaagggtattcattcttccattcatacacgatctctatagtaaacacagtacttcccaggtagagtaccatcctggccggttgaggtataaaaagatagccattcacttctctctcaaatacaaaagtttaaaaagttttccctctgcatgtccattgttgtttgtctctactgataagtgtcyatactacttcagtatctcacagtatcttcatgttttaggttactgtttcacctcttttctttcatgcttcagctttcaagcaaaatgactttggtggcacaccaccaacctattagggtgtaccttatttctctgtctctaggggaatctcctgaacacagaatataaggtgaagcctgt

SEQ ID NO: 169418 - DNA, 615 bp, Homo sapiens
cagctacttgggaggctgaggtagaaagactgcttgagctgtggagcggagtttgcagtgatcaactgagaactaagacttgattcaatttgaattatagtttgtttataagaataatttataaaataaagctttatgagactaacataagatataattcgagaattcagttcagcttcttaggtttccctcacctactggtttttgtgttatttccctcacctactggttttggtgtcagttttgactggttattccagttggacttcagatagctataggccaagaatgataactactgtatgtacttatacagagttcaaacttataatggctkatctatgtataccctgaaaaatataccagatgcataagaacatcataaccattggacatattttcttatgctaaaatatgctagtcttcaactagtatcttctttcacactatacatataaattgtacttcagagtgatattgagaaaaacctaaagttattaattaatttacatctctactaacaactgtttcaactatttaataccattaatcctaaacagaaaagtcatgaatatgaatgataaagtactttattttatgttcaacataacaact

SEQ ID NO: 169419 - DNA, 573 bp, Homo sapiens
gaacgtagaaaagacacaataaaaataaagtacagtattataatcttatggtaccacartcatatatgcggcatatctttgatggaaatatcactgtgcagtactttactgcaattataatatctctggtcataattggcagagtaggtggaaacagcatcaatgaaccacataactccagaaggcgtcactcacttttcattatctcctgatggtgtccagtgattagtctgagcaatacaacattgaggctctggatggagtagttcaaaggatttctgcttacttgcaggttttatccatcttctaccccaaatagagcctctatgaagttactgtatgctaacaaaattgtccattttcctgaaaatcacattttatatgatgtgatttcactaaaagacagctatttgccaaagaaaggttttcttcctcaggcttcctgctggtatcttccccaaatgaaaaataaaataagagaaacagaattgtgcgactcatgacttctttattacttgaaaatggaggttcagatatatttttatcacatgccatttggaagctgagaaggct

SEQ ID NO: 169420 - DNA, 573 bp, Homo sapiens
gaacgtagaaaagacacaataaaaataaagtacagtattataatcttatggtaccacagtcatatatgcggcatatctttgatggaaatatcactgtgcagtacyttactgcaattataatatctctggtcataattggcagagtaggtggaaacagcatcaatgaaccacataactccagaaggcgtcactcacttttcattatctcctgatggtgtccagtgattagtctgagcaatacaacattgaggctctggatggagtagttcaaaggatttctgcttacttgcaggttttatccatcttctaccccaaatagagcctctatgaagttactgtatgctaacaaaattgtccattttcctgaaaatcacattttatatgatgtgatttcactaaaagacagctatttgccaaagaaaggttttcttcctcaggcttcctgctggtatcttccccaaatgaaaaataaaataagagaaacagaattgtgcgactcatgacttctttattacttgaaaatggaggttcagatatatttttatcacatgccatttggaagctgagaaggct

SEQ ID NO: 169421 - DNA, 573 bp, Homo sapiens
gaacgtagaaaagacacaataaaaataaagtacagtattataatcttatggtaccacagtcatatatgcggcatatctttgatggaaatatcactgtgcagtactttactgcaattataatatctctggtcataattggcagagtaggtggaaacagcatcaatgaaccacataactccagaaggcgtcactcacttttcattatctcctgatggygtccagtgattagtctgagcaatacaacattgaggctctggatggagtagttcaaaggatttctgcttacttgcaggttttatccatcttctaccccaaatagagcctctatgaagttactgtatgctaacaaaattgtccattttcctgaaaatcacattttatatgatgtgatttcactaaaagacagctatttgccaaagaaaggttttcttcctcaggcttcctgctggtatcttccccaaatgaaaaataaaataagagaaacagaattgtgcgactcatgacttctttattacttgaaaatggaggttcagatatatttttatcacatgccatttggaagctgagaaggct

SEQ ID NO: 169422 - DNA, 595 bp, Homo sapiens
ggtttttcccccaagggacatttggcaatatctggaaacatttttcgttatcacaactgtgggtgtggtggtgacatctaaggggaagtggccagtgatgttgctaaacatcctacaatgataaaccacccccatgcaaaaaagaattctgcatttcacaacgtccacagtgcygaagttgggaaatcctgaattagattgttatattgcatttacaaatggtttagaaacttcagtggcattcaatacaaagatgtattttgctgacattaatgtccactctgtttgttacagctctctctcaggtattctttattctaacaaccatgctacaagagcaatcctagtctgggacatgttgattttatgaccaaaggaaaagagaggtgagagatccaagcaatggctcttaagtttctgctcaggaacatcccatgtcatttttccacttgtatttcatttgtcagattaaatcacatggttcttcctgattcaatgagacaggaaatttaatccttctggaggggtgaaccctggaaaggatgggctcagtccaatggagccagcaaggaggggattgtagagaaggcttatc

SEQ ID NO: 169423 - DNA, 288 bp, Homo sapiens
aagtactctgtactctctcaccctttaggggcaatatattttgctaggaggttacttgattcctcaygaatatagatctatatgtaatgaaattaaactaaatgccttccatatatgcttaggcttacctggaccctagagaaaacattgtgctcaagctgagcatcccatttgatacacaccaaaaacatgataactgtgtctgggatatgtattttttttcttacatcatctatatataataaaatattttccttttcagagttttttagaatggtcatttgaagc

SEQ ID NO: 169424 - DNA, 644 bp, Homo sapiens
ttaaccatgaaaatagaaagaaatagcagttatagtcactagtcactcatcaaagtggaagttctacargaaatattaattacaaattttccatcaaggtaagtatttctttatgactggaatgttccagagctgtctatgtataggagaactgtgttatttttcatacacaacctaagtgggagtgagatgtggaattagatttcttaggcttgtctaaatttggaagcttataactaccaatagttgattataatttgggagcaaaatattttaaaagatccaacttcttttgctattttagaggaaatatggccaaattacattttttgtgagaatagtgaaagtattaaaatcacacctaaaattcttttttaaaacaaaaattctataaaatatattttaaaatatgtgtaaaaataaaaaataattttgttctagactttatacatcattatgatgacttaattaccaaagatttcagagcaattaaagtcaaccagaaacaaattctcattcttacaattacctttcatatcatctgtttcacatttgtctatgtatgtacatgggtatgtatttgtgtgtgtggttaacttgtaaagagtgtgtctaattaaaagaaaagcactcaacaaaggtcc

SEQ ID NO: 169425 - DNA, 422 bp, Homo sapiens
tcacactgtagtttaattttttttttgagaccgtgtcttgctctgtcacccaggctggagtgcagtgatgtgatcttggttcactgcaacctccgcctcccatgttcaagtgattctcgtgcctcagcttcctgagtagctgggattacagctgcgcaccatcatgcccacctaatttttgtatttttagtagagacggaattttgccatcatggccaggctggtctccaacatctggactcaagttatccacccaccttgtcctcccaaaatgtcaggattactggtgtgagccaccatgcctggtctagtttaataattttaaaaaggaaaataaaatcattagttgatgcagtggttasacttttctaatacaaatttaaaaatcttcacataacacggcaaaaaaggggcttcattct

SEQ ID NO: 169426 - DNA, 548 bp, Homo sapiens
actaactgtacttgttattacaaatggtcatctttccctacaactttaagatctgtggaactatgccttttcttttctgtttattttcatacttacatttttaagttcaatactaggtgttgtgccctaagaaattaattttagttttctactgataagccacacatgcatagagagtttcctgctctcataatttagtattccttttctttacaaatgaaatgtccactgtggtctttcctttgcagccccatcatrcatgtgatgagtcaaagaatagttctgaggtgaatgatatcacttaaaatatatttaagataaaatggtcagaaactaaagggcaatgagtattacagtgggttgaatgatgcctccccaattatctccataattgaatcccagaacccgtgaatgtgattttacttagaaaaaagggtctttgcatatgtaattaagttaaggatctcaaggtgagattgatacagacaggaggcagggaaatgctgggtagaagagggcagttacccggcaaaagccccatcctcaag

SEQ ID NO: 169427 - DNA, 628 bp, Homo sapiens
ggtttcagaaggccaaacacctttggagtgacttgagaactaggcttgcaccattgtgggtttctaaatgttgcaacgaggcagcaatttataaatgccattataaaagagaagacagtctgctgggattaatttattattttatccaaagtatgacaattgtccatacctgaaataacatacrttgtacatagaggattttcagacagctaagagaatatataatgaaagggataggggacagaccttgccagtgctgaggaggtctccagatcctgcaggacaggataaattaagggccaccatctcccctaaaggttaggagtccaattttaaacaaaaagcttacaaaaggaagttgctttccttgattcttttcagaaaaagaattttgagatttaactacaggtgatttaaacacagaaatattttggcatttaaatcttgtatctctaagataaacctgtggtagatttttatacactggtatcaaggcactctgatatgttcatcctcacagaaaaaattctagtccttctgcctttgagagatattctgaatgaatgtataacccagtacatcttacatgttttacgatggtaacagttgaggagtagagaaaagacta

SEQ ID NO: 169428 - DNA, 541 bp, Homo sapiens
tttgtctttccatctctttttttgtccccccatccacaatttgcatttatttctgatgcacgacactcattttacctatgcctttgtttcaattctcaaagtccttccaaacatgatttataacagattataaaggaaagttattttcaaaagaactagctrttaaataatcatcgtttatacttgttccaaataaaaaactggataaatgaacccgaataaaaaattttaaatacaaaatacaaatgggactttcatgtaaaaaatgctataagatgagttagtcttcacacttacaaataggaatttttctctcaaatgcagttagtaggaagcatggactggactgatagaagctctgtttaaaattacaaaccaattgaggccatgtaaaaccttaaggccactatattcccttcattaatttattcattaatccatccaacatacatttagatttattgagtcctaatcatgtgctagggaaaaatgtagggagcccgaaagggtagctaatggacagatttagccttcagatatg

SEQ ID NO: 169429 - DNA, 537 bp, Homo sapiens
actggtttgaaggcttggctctcacagtttctcaatccatattttctgcatcctctccccatacaatttcacattttccatagaattttcttctccactcctcacacttattccgatcagttcatttcctgtctatyacatgtacatttctgtccactttctcccaagaatttcttgtctcgggccagaagagtcttgagtggcaaatagttgacttttaaacagacttttggctaaatcatgtgatggtacattccaattcgtggcaccacaaatgctcaaaacaatgaagtgtttgtcacttcttgacttctctagaatttcctaatttctcacaagggaagttggcatatgtgttcatgatcttcaggctcagacttaccaggtccctcacaaaaagcaaatcgggctcctaaaccccacctgttggtgatggctgcagttgatctttgttcctgatatacatggtgtctctctcatagaagggagaaatccaaacatcatgtaccccttgagtgattgtattctctacttatt

SEQ ID NO: 169430 - DNA, 475 bp, Homo sapiens
gtggcccaggcctaggtgcgcatgtgtgcgtgtgttggggtggggctgcaacgccctcccctccactggtccttcytccctctcctgctatccagagaacccactccataagcagagaggactagagagataagagaaagggaaggaatggaaggattcggtgttgcctttccctccccatgcagatttggactctaggatctgtgatggggaggggctgtgggcaggaggctcagctgctggtgaactcaggagcactggaatgagccaggaaggctgtaaaaggactcaggcactacggaatgtgtggaagtctgttggtgagcctagggcttgcctcctacctgctagagacttcacattttcctatgactacctcttacgacagctgcttaatagtctctgttgcccttgaacccctgtagctttttgtttctgcttctcatttgccccttaggttttattgccttgtcat

SEQ ID NO: 169431 - DNA, 526 bp, Homo sapiens
aatgaattcaacatttttcagattctacatataaatgtgattgtgtggtgtttgtctttctrtgcctagtttatttcacttagcataatatattctagattcatccatgttatcccaaatgatagaattttgtttaggcaacaatatagattattagaaaaaataaaaatatattttctttttttctattttatttttcgagacaagatctttctctgtcacctaggctgcagtgcagtggcaccatctggactcaccgcaacctttgcctcctgggctcaaagcaatcctccctcctcagcctcctgagtagctgagactacaggcgtatgccatcatgcctggctaatttttgtattttttatagagatggggtttcatgatgttgcctaggctggcctcgagctcctgagcttaagggatccacctgcctcagcctcccaaagtgtaaaatatattttcataatcaatcaaaagccataatttccaattatcaaggaagtaataaaattatttaaaaatataa

SEQ ID NO: 169432 - DNA, 667 bp, Homo sapiens
tattgcccctgaatgaactttggtagtctgtatcattcaaaatgcttgtctttaagctagtagtagaatttattgccataaagttgttcataacattactttattatccttttaatgttagttggaacttcaatgatgtaccttttttcattcctaatactaataattcctgcctttatttatcttactttagattgactggaggtctgtcaatttgtttttccttttattaattatttcacatggtattcataaataataacatcactttgtaccacatacatatatagaactataattggtcaatgtacaatataaaaataaaaattaaaacagattctggcaataatgatttctctatatttctatttgttttcaatttcagtggtttcagttttttttttaatatttgcatggaatattcttttccatcctttattttttaaaatcactttattgagatataattcacatrtcataaaatccaaccatttaagataagtagttttttagaatattcacagagctctgcattcatcactgcaatatgattttagaacattttcatcatacccccaagacccatccattaacttttaatggtatttttacttttaaatgatagttacattgttatatttaaagtgggtttctgtagacagcatat

SEQ ID NO: 169433 - DNA, 598 bp, Homo sapiens
ctggtatgccattttgtataagtagagtgtttcatacttataataataataataataataataataataataataaacttctcacataaagaacaaattagctgcactgggaagacttggaagataagtgatctataactgcagatgtagctgcctctccagttctaactcttggtaacttagaagctgcacttggaagatattacactttgccagagtaagtcctcctccgttttaatgagctgaaatgtacttctgcgtctgtgcgaytggataaattcctatctggacaagaaagggctattaaagttaaagaggccagagtatagcaaaaacttgaataatgttaaatactaaagtcttcatgcacataatgattcttcctaacattaatggattttaatgaaatgtatggaattgatgtatctgtaattattatccttatttttaagaataggtgcatccattaagtatgaatttttatttttttatgttagaaaccttgaatattaaaaatgtaataatcaaacattgcttttgttcctacagtaagatcaaatcaaacaaacaacataagaacttggcaccagtaagttat

SEQ ID NO: 169434 - DNA, 383 bp, Homo sapiens
accatattgatagtgtttttctttacttatattgttaatattttgtacacttccaatattgcaaggaagaccagacattctgatcatatcagcctgtttctaatagcactgcttatatcacacggggaaccatcaatcccttccctctctgtactgaatggtgcttytgaaataaataggtgaaatgtcatcctttcttttagaatatggcctagctataatgactcaacttttttgggtttgtttttttttttctggtaaaacatggcagaagtcactttatagaatgcctgtaatttcatagaatgcctttaattttatatgatgctttcattgtttgtaaagtacatcatgaaaccagtagtggtcagtgggatgaattc

SEQ ID NO: 169435 - DNA, 411 bp, Homo sapiens
tgaattcaaaaatttgattttgatttatttattaattacatggaataccatattgatagtgtttttctttacttatattgttaatattttgtacacttccaatattgcaaggaagaccagacattctgatcatatcagcctgtttctaatagcactgcttatatcacacggggaaccatcaatcccttccctctctgtactgaatggtgcttctgaaataaataggtgaaatgtcatcctttcttttagaatatggcctarctataatgactcaacttttttgggtttgtttttttttttctggtaaaacatggcagaagtcactttatagaatgcctgtaatttcatagaatgcctttaattttatatgatgctttcattgtttgtaaagtacatcatgaaaccagtagt

SEQ ID NO: 169436 - DNA, 601 bp, Homo sapiens
gatagttaccttgtatactgcaatgagctactacttgttggaacgtagaaaactcccttaaggaaatttaagttttattctgtatatgaaaggctctgaaaatcaatttaactaccaatgatggctcccagctatcacataggatttatacacaaaagcataaaatagaatacaaagtgaatgtttatatttgtgaatagctttgaagaaacatatcatgaatgtcactagtctaatatgattagatcatgtaaaatatcattaaggtaataaatgtttatggtgattagctatgtaaaaagagcaatgtaagkattaccagaaatccttatcaattaaaaatcaattctacgtaacgcataacatgtaaaacatatatgcagccgaaaatcttaatgaaactttgacacattcttgggctactgtttagtgtgtggtcttaagatcatccgtttttctgtctctataaatatgccatactctattttaagttttcaatgtcatttgaatagagcattattgctttgagacagcaaatcagatattctcataaagggtgcatttctaaaaaacaggcttattccaggttactacaagtcaa

SEQ ID NO: 169437 - DNA, 530 bp, Homo sapiens
aaatgtaatatgccatttaaattgtaatttaattcaaggtaaattctctcataacgttaatagtgaccctgtaagctacacagtcttccaaggtgtttttttggatttagtcttaggttaaagacttcaggctaagtttagcaactgttagaaataatgyggttgagaggaaggctgtggaagtaggtaaattcaggacattctgaaacaagcacttagaaaaattaccatttgtgaaacactgacctacttcaaagctaggcataggtaccactatcattatgttgaaacacagaaacatttccaccacacaaacaaaagacttttatttaaaaacagtagcctttcttagatatcatcagattaatttaaattgaaagaataacagatattatctgttaagtcatattccttactctgattgtcccattgagctttattctttctttctttcattcatccattcaaaaatccttataggatttattctgtttccaggcacttagagaaacagctgtgaattagacaaa

SEQ ID NO: 169438 - DNA, 614 bp, Homo sapiens
tatattcctatcttgctagatattacacccaattgggacaagaactatatttattccactcagtgtctcagaggaataaattaatctttcccattgttgactctgcaattcaaatcagcatttattttctgagttgtaaattgtaagtcttcatctccccatacgaaggactataaaacaaaatatgctaaaccagggtagaagaccaagaacaagagatgttctgatacgcatataagctagacctgaatctaaaaccaagatgttggaggggaaaaatcccgtttctaatactcaatctagagaaaacaggctaattgttaaataacagattggtggcacaagaaacagtgttaggtgtcacaaacatagagctcatctatggatttctcccatctctataaattgtgctaccaagagaagtaactaaacaccttctgatctacaaatwctgaaccatcttaaaagttttacatataaaacttgaattccgttttgtaaatcaacacaatggaagcaaatattttgaaacattgaggagtgaccttttccacacctctcacttccatcccgcgcccatgtgcaatcacttctcaccattagtttttttttta

SEQ ID NO: 169439 - DNA, 576 bp, Homo sapiens
aagcctttggctaacagacagccggctccttaaatatcaggctctgctgttagcagggtcagcagttcagctaagaacttgctctcacccaaatccagccattttcctccccaaggaaactggggaatctgaacatgacggtgaacacattgtggtacagacctatgcagccagggaggatctcaaggagactgccccagaaaatccggactggaccctcttcatggatgagagtttctttgtagaacaaggagtgagtaggcaggatacacagtagtcactctgaataatgttatggaaagtgcacctctctccaggcacaagcgctcaactagctgagctgacagctcttacaagagcacttgaattaagcaagggaaacgtaactaacatttacactgattctaagtatcctttcttagttctccatgctsatgctgccatctggaaggagaggcactttctaactgctaataggtaccctataaaataccatcaggaagttaacaggttattatcctcggttttcctttcttgagaggtagcagtgatgcattgtaaaggccattagaagga

SEQ ID NO: 169440 - DNA, 444 bp, Homo sapiens
atacacacacacacgaacaaaaataattcaaggttaactcagtgataacacttttctattcatccaattataattttctcaaaattccataataaggacacttgtggtagcagtttcataattaaactacacattttcaagggtttcacttatgtatacaccactgggttaaaacttcataacatttttggacctattaattagttggaaactggattgttgtttattagcattaactcaatatcartcaaaaactgatgatgtgtcatcagattgccatattgtgtcagttttaggaatttatttagaataagtttagcaagaacttagacttctaaaatctgttgaattgaatgcatctgttgcatctttattggtttattaaatcaattttgcttcaagaggcaatttagtgtcatgatgatattagtatacatgataatt

SEQ ID NO: 169441 - DNA, 555 bp, Homo sapiens
tctggcctcctactaatggtttgatgtctcaatttttcttcttgtctccctttgctcctgcatctacacatatagagttgaacgtgatcggagaaaacccaacactcatgctgtctggtatcacttgagattcataactaccaaacctaaaagggagccttaaagctgcaatatttttttcctagtccattcacttgtcactcaccaaggtgacaatttcataactctcctctacaaccttcaagccttctgttccctgatttcactatccctcctcagtagcagttttgttttcctctttgtactgagaaaatggaaacagttttattgggtggacatagagctgtatcatccacatccctcttcacaaaaagagccttataccccagctgctggggttagcagatatcttccagcattcagcaactrtaaagtccatctcacttatggagagccctaagtgcacctttctagggggagccaaatccaatgtccatttccagaaggagtggttgagggcagcataaaggctggaggaacaaatccagagctctc

SEQ ID NO: 169442 - DNA, 617 bp, Homo sapiens
gatttcagatactatgacttttcagaaagcccaaataagttatttccttacttacatcgctgttgatatatgcaaattatgttgcatgcaggaagaaaaaaaaawtttcttaatttccacactctagcaagctaaatggtttgaaatatacttgacaatgttctgcaatattgaaagtagtatctatttctgatgtttcaattcctgtatgtcaaacattatcaaagagggcaatatcgcccccaaggggataaaacttcattattggaaggtggaaagttcttatctttttaatgtacaatattaagcacagacatacatacagtaattacagatacagcatatctggggtattataatttcatagtgggggattagggaaaaaatatctaaaaaggctccttggcaagcagggtggaggggataaccaaaaaagcttaagaaacactattgtacattgtgctttccatttattaaaaaaatcttattctccccaggttcaggctaatggaacaaataatagagaactaatagtcctatgggaaccatttttttaaaatagtcgagcaatgtaggactctcaggtaaaagcttctttacagactgtgcttagatct

SEQ ID NO: 169443 - DNA, 523 bp, Homo sapiens
aaataggtgaagcacagaggatttttagggcagtgaaaatactctgtatgatactataaaggtggacatgtgttattatacatttgttcaaacccatttcttaktctgtttgggctgctgtaacaccactatcataaacaggatgaattatgaaaaacagatatttgtttctcatagttctagaggctgggaagtccaagatgaaggcactggcagcttcagtgtctagtgagggcgctgtgggcttcatagatgtcactttctttctgcatcctcacatgatggaaaggatacacatgccttcaggcctcttttataagggcactaattccatttatgagagctccacccccaggacctaactacctcccagatgtcccacttcccaataccactacagagggaattgagtttcaacatatgaattttgaagggacacaaacattcagaccatagcaccaatagaacgtccaataccaaaagagcaccccaatgcaaattacacactttgagtaatacaaac

SEQ ID NO: 169444 - DNA, 495 bp, Homo sapiens
tttatcttattttatttttaagttttagcactttaattttcttttctttttttctatttaaaaatatgtttttcttttatagagatggggtctccctatgttgaccaggctggcctcaaactcctgagctcaaatgatcctcccatctcrgcctctcaaagtgctaagattataggcatgagccactgcgcctgggcagttctctgactttttaaagtggcaaagtcgtaagccagaaatgtaatatgccctagataataatctcagctctaaatttgacttcaacatagaatcatctcacctatgtcagtggaagccctcatctagctggctactgacggagggaaaaggaatgtggtcttccttttcttttgccctgttgtttccttcttttccatcatgttatcattctggggttttcagtccttcctgtgtgcaggggagatggcagagaaagaggtaagggggattgagggtagatgtgcaggtcaccac

SEQ ID NO: 169445 - DNA, 618 bp, Homo sapiens
ttcctatattacagagtactagtgtgtccggaattggtaggttcttggtctcactgacttcaagaatgaagccgcagaccttcgcggtgagtgttacagctcttaaggtggtgygtctggagtttgttccttctgatgttcagatgtgttcggagtttcttccttctggtgggttcgtggtcttgctggctcaggagtgaagctgcagaccttcgcggtgagtgttacagctcttaaggcggcatgtctggagttgtttgttcctcccagtgggctcgtggtctcgctggcttcaggagtgaagctgcagatcttcgcggtgagtgttatggctcataaaagcagtgtggacccaaagagtgagcagtagcaagatttattgcaaagagcgaaagaacaaagcttccacggtgtggaaggggacccgagcgggttgccaatgctggctggggcagcctgcttttattctcttatctggccccacccacatcctgctgattggtagagccgagtggcctgttttgtcagggcgctgattggtgggtttacaatccctgagctagatacaaaggttctccatgtccccatcagattagttagatacagagttttgacaca

SEQ ID NO: 169446 - DNA, 618 bp, Homo sapiens
ttcctatattacagagtactagtgtgtccggaattggtaggttcttggtctcactgacttcaagaatgaagccgcagaccttcgcggtgagtgttacagctcttaaggtggtgcgtctggagtttgttccttctgatgttcagatgtgttcggagtttcttccttctggtgggttcgtggtcttgctggctcaggagtgaagctgcagaccttcgcggtgagtgttacagctcttaaggcggcatgtctggagttgttygttcctcccagtgggctcgtggtctcgctggcttcaggagtgaagctgcagatcttcgcggtgagtgttatggctcataaaagcagtgtggacccaaagagtgagcagtagcaagatttattgcaaagagcgaaagaacaaagcttccacggtgtggaaggggacccgagcgggttgccaatgctggctggggcagcctgcttttattctcttatctggccccacccacatcctgctgattggtagagccgagtggcctgttttgtcagggcgctgattggtgggtttacaatccctgagctagatacaaaggttctccatgtccccatcagattagttagatacagagttttgacaca

SEQ ID NO: 169447 - DNA, 618 bp, Homo sapiens
ttcctatattacagagtactagtgtgtccggaattggtaggttcttggtctcactgacttcaagaatgaagccgcagaccttcgcggtgagtgttacagctcttaaggtggtgcgtctggagtttgttccttctgatgttcagatgtgttcggagtttcttccttctggtgggttcgtggtcttgctggctcaggagtgaagctgcagaccttcgcggtgagtgttacagctcttaaggcggcatgtctggagttgtttgttcctcccagtgggctcgtggtctcgctggcttcaggagtgaagctgcagatcttcgcggtgagtgttayggctcataaaagcagtgtggacccaaagagtgagcagtagcaagatttattgcaaagagcgaaagaacaaagcttccacggtgtggaaggggacccgagcgggttgccaatgctggctggggcagcctgcttttattctcttatctggccccacccacatcctgctgattggtagagccgagtggcctgttttgtcagggcgctgattggtgggtttacaatccctgagctagatacaaaggttctccatgtccccatcagattagttagatacagagttttgacaca

SEQ ID NO: 169448 - DNA, 653 bp, Homo sapiens
tgtgagaaaatcaatttctgttgtttaggctacccagtctgtggtgttttgttatggcagccccagcctactaacataactgttattaccacatctattggacctggcattggagttcctaaacaatacaatgacagatagatgacagatagatagctagatagactataagaataggaaagaaagaaatacaattgtaattataatgattttattattgtatacataaaaattcaaaggaatctaccactggaatataaaaattactaagataattagaaaayttgcagaatacaaaatcagtgtattgcatttgaccttttctacacagccatgaataattagaaaaaaatacttttaataagcatactaattatataacaaaaaataagatcgtataattttaaataatatgtaacaccattatgaataaaattatatttaaagaattgaatgacatgaaagaaaatcatattacatgtggaaatactgtgaaaggaaaataaattatgggaccctccttgaccctccccctaaatcactaagccaagggaaaagtcaagctgggaactgcctcctgttttattcctaaataagacggctacaaagatggaaagctacatacctccctcacaatttgcccacatggaaat

SEQ ID NO: 169449 - DNA, 653 bp, Homo sapiens
tgtgagaaaatcaatttctgttgtttaggctacccagtctgtggtgttttgttatggcagccccagcctactaacataactgttattaccacatctattggacctggcattggagttcctaaacaatacaatgacagatagatgacagatagatagctagatagactataagaataggaaagaaagaaatacaattgtaattataatgattttattattgtatacataaaaattcaaaggaatctaccactggaatataaaaattactaagataattagaaaacttgcagaatacaaaatcagtgtattgcatttgaccttttctacacagccatgaataattagaaaaaaatacttttaataagcatactaattatataacaaaaaataagatcgtataattttaaataatatgtaacaccattatgaataaaattatatttaaagaattgaatgacatgaaagaaaatcatattacatgtggaaatactgtgaaaggaaaataaattatgggaccctccttgaccctccccctaaatcactaagccaagggaaaagtcaagctgggaactgcctcctgttttattcctaaataagacrgctacaaagatggaaagctacatacctccctcacaatttgcccacatggaaat

SEQ ID NO: 169450 - DNA, 572 bp, Homo sapiens
ttgcctaccattttgcaaaattgggtactattatttttatttgtttatttataccaaatccagatgtaggctaattcaatctcaaacatgaaaggtgggcagattttatcattaaggtataaagtcatgctgaagattacatataataaatggacttcatgtacttccagaattccaatgtcagaagtaatgcatctttggtatcaagtcagtctggacacttctaaaaacaaaatgaatatactgtgatgtggggtgtgtgccacgtgggcatcagcaaggaagagatagattatctttcaggtagggcagagagcatggatggaaagctagctagagcagagtcagagtcatattytagagatgtaagatgggggaagtggtgactagcatcaggtagaaaaatacttagatttctagaagctctgtgtttgtttgaggaggtagggcaaaccttttttaaaaatctggtatcaggtcaactcttcccagaaaatagcacatacatgcacactgctatacataacttcataggcttcatagactacttgcgatctttaaggatcaatgag

SEQ ID NO: 169451 - DNA, 572 bp, Homo sapiens
ttgcctaccattttgcaaaattgggtactattatttttatttgtttatttataccaaatccagatgtaggctaattcaatctcaaacatgaaaggtgggcagattttatcattaaggtataaagtcatgctgaagattacatataataaatggacttcatgtacttccagaattccaatgtcagaagtaatgcatctttggtatcaagtcagtctggacacttctaaaaacaaaatgaatatactgtgatgtggggtgtgtgccacgtgggcatcagcaaggaagagatagattatctttcaggtagggcagagagcatggatggaaagctagctagagcagagtcagagtcatattttagagatgtaagatgggggaagtggtgactagcatcaggtagaaaaatacttagatttctagaagctctgtgtttgtttgaggaggtagggcaaaccttttttaaaaatctgrtatcaggtcaactcttcccagaaaatagcacatacatgcacactgctatacataacttcataggcttcatagactacttgcgatctttaaggatcaatgag

SEQ ID NO: 169452 - DNA, 555 bp, Homo sapiens
actttgcaagaacatgttattctaatattggtctcatacttatatccaaagctgtgaaaggaaaattggtaagtttattcagtagtagattttctttaaataatatgcttacacttttagtacttaacaaaaccagaattttttaaaaataataaattgatgagtagaaccacattgttgagagcaraggaatacagctctcctttgtttaattttttcaaatgaggataaagacaatatcccataatagatagcattagtgaaaaagtatcctgtgtaatcaagttatttctatgtttaatcctgatctttagtaaaaatgctttgctgatctggttatagtgaatatttagcacaaccaattttattttgtttatgatatttttgtgtgttcatttatgcttaaataatagctttctggtttcctttttaaactgttaaataattgtcctgtttatttgtccttgtttgcaaacaagtagcctctccaatttcactcaacatttaacaacttaaaaaatctccattagtctgtaactggccacacttaagcca

SEQ ID NO: 169453 - DNA, 395 bp, Homo sapiens
tacaaagagaaatgtatttaaattcaatgcctgaggtgkggtatattctctaggtagtcaatgtttgtttatttccatgaactttgggtctttctatgtccttaacatggaatttccaactccttttaattcctttttcatgccatgtaattgcctagctgattcctactaatgtttcaagagtcagcctgataacattctcaaaagtgattttgagctgattttctcagaatttccccttgctttaacgaaaacaaaagaaggaagctcaggaaaaaataaacaaacaaacaaaacaactttttgctatctaagaattttcctttaaaatgaatttggatttcttggatgtcttataagataaatagtttcctactatcagaattagtcttaga

SEQ ID NO: 169454 - DNA, 576 bp, Homo sapiens
cagtttactgtgaaatttatcatgtgacctctattttcagcgggttcttaataaaatattttatatctttaatgctttatacacaaaatgatagaaaggaaatttttttttttttttttttgagatggagtctcgctctgtcgcccaggctggagtgcagtggcgggatctcggctcactgcaagctccgccttccaggttcacgtcattctcctgcctcagcctcccaagtagctgggactacaggcgcccgccactacgcccggctaattttttgtatttttagtagagacggggtttcaccgttttagccgggatggtctcgatctcctgacctcgtgatccgcccgcctcggcctcccaaagtgctgggattacaggcgtgagccaccgcgcccggcctaraaaggaaaatttttataatattgtttaattcaaatatcactcactttaagagattttctctgatatttttcaactggatatgatcactttctctttcaaaagtgacaactttagtttgtatttattgcagcattttccatggtttatcttaaagtactcacttgagtaata

SEQ ID NO: 169455 - DNA, 427 bp, Homo sapiens
actttatttgacttgagatagcatctgtcttccaggaaacactatcctatgcaaaaaataacttcacttgtcatacttatagcatttgatctgagcctaatgcattttcctcatttcctatgttttggaggagaaggkgtagaaaatagcgaaagaaagtaaatttttagaatggggaaaggaatataattcacattttaaaaatctagttaaggattttgtgtattatacctgtataatcatgcataataatcagatttctgtctaatgttcaagaaataatatagtttttttcaaagaaaggaaaacaatgcagtctgaaataaaaagacttggaaaaatattttataattaatgtgtagataaaaatcaaaattagataattatttagatgtttttctaccttaggaaaaaaatatggttaata

SEQ ID NO: 169456 - DNA, 500 bp, Homo sapiens
gaattaaactactgggagtaataatatgggctgatgcactcaatatagcagtaatgccctctgagaaggataggaaataattcagttcctccaggctgcatggaagctaaatacagtatgacaagaaatagtagcagtactcattatgtctgattgctaattacctctttgaatgattcagttatgcctgctactagataattagtttagtaatttatggctgcggcacaaactagtattttaatttttgcagcaccattttcacaatacctacagttcagataatacctttttaattcaatgttaaattgcttttttgaagacctataaaagagcaaatattcttgcatttttttctacttgtatttcatgaaaaagttaggcactttatggaattttatttaactttaaactccagaaaaataacatcttcttaagtcatgtcttattatgsttaattttgccaattttgtgggcaaaggggtgaaattttcaaaaag

SEQ ID NO: 169457 - DNA, 380 bp, Homo sapiens
attcaaatgtatgctagcttgggaatcaaaggtccttcataccctatttcttcattttcctttctttcaagtagaactttaaccattatttaatyttaaagccaagggccactgcaagtatcctgctcagagtaccaactgcagcaattataaaaggtcagaccactgaaaatactcctgagactccacaaggtttacttatatcagcctttaataaagaaaaagaatataatacaggaggagctagaaagcacaaacaacagacagaatggagatttctaggcacaattctagactcttttctcagtcacatagcacaggcttcatctgtggatcatgaaccaccaagatatatgtgagaaatcatgatttgacagagc

SEQ ID NO: 169458 - DNA, 520 bp, Homo sapiens
gtagttaaattaatatgcccgwcataaaacgcatcctggacaaaactgctgaaatttatagaaagatgtaaagatataccatgtggccactagagggcatgcaacatctgccacatttttcttcaagaccaaggacttttgcctgtagacgaaagtagttatggttcagtctaagaaataagaaaatggagctccatttatatttcaatcattataattgaaacatatacaagtagctgttaatacaacaccattaaataagaaaatggggctccatttatatttcaatcataatagaagtatgtacaattacatgttaatacatcattaattcattacatcaatataattgaaatatacatataaacaatttaaaatcagtacattcacttaaagtcatttttttaaacccattttcaatatttaggtattatttcccaagaccaaatttttagtttttatttttttagttgtatacaataccatatttttaattgtgggaatgcatttgaccaagtca

SEQ ID NO: 169459 - DNA, 523 bp, Homo sapiens
gatagcctaatcatgttgactttatttccaaatgkttccatctaaaactttttagtcttatctagaaaaggcaaatgtcaccatctgtgttatttactacacaataatatattaaatatatgctctaaatagttttataggccataaatgaaaataagatgcccaggtcaggcacagtagctcatgcctgtaatcctagcactttgggaggccaaatcgggtggatcacttgaggtcaggagttcaagaccagcttggccaacatgatgaaacactgtctctaccaaaaacacaaaaatcagccaggcagatggcaagtccctgtagtcccagctactcgggagggtgaggcaagagaatagcttgaacctgggaggcagaggttgcagtgagccgagattgtgccactgcaatccagcctgggtgacagagcgagaccctctcacaaaataaaataaaatgcccaaagtttgaataaagtaatacatatgcagcactatatgggaaattacactcagtttga

SEQ ID NO: 169460 - DNA, 615 bp, Homo sapiens
cttcatgtgctgcaacatggaaakttcttctagtcagaagtttgggtaaattatagggcttgctttggttgcttctttctatcagagatgttcttgtgctgctttgttgtttgtttaggtttgtttgtttgtttgtcttttggtactttgtctaagaacagttttattctgtattttttcaaatttgtacatatttatagctaattccagcatcaattacctcaccatagccagaaatggagtttgcatgctctcacattgcagtatttaccatacttaagatattcactctcatcttatgacccatacgattttgttgctcacttttcatttatgtttgtaatacacgtgcagaataatcatcccccaaatttttcatatttaatttccttagattgttctgaagtcaaaataacaataattactccaaaactgtgtttccatctgctatatttggccctgccaagtatgatgctgaagtttgatcccgaatgttggatgtaggatctgttggaaagagtctgggtcatgggggcatatctctcatgaatagctggatgctgtcctcatgataataagtaagctctcactctattagttcccaaaagagctact

SEQ ID NO: 169461 - DNA, 615 bp, Homo sapiens
cttcatgtgctgcaacatggaaagttcttctagtcagaagtttgggtaaattayagggcttgctttggttgcttctttctatcagagatgttcttgtgctgctttgttgtttgtttaggtttgtttgtttgtttgtcttttggtactttgtctaagaacagttttattctgtattttttcaaatttgtacatatttatagctaattccagcatcaattacctcaccatagccagaaatggagtttgcatgctctcacattgcagtatttaccatacttaagatattcactctcatcttatgacccatacgattttgttgctcacttttcatttatgtttgtaatacacgtgcagaataatcatcccccaaatttttcatatttaatttccttagattgttctgaagtcaaaataacaataattactccaaaactgtgtttccatctgctatatttggccctgccaagtatgatgctgaagtttgatcccgaatgttggatgtaggatctgttggaaagagtctgggtcatgggggcatatctctcatgaatagctggatgctgtcctcatgataataagtaagctctcactctattagttcccaaaagagctact

SEQ ID NO: 169462 - DNA, 447 bp, Homo sapiens
gttacaattaaaactaacagaaarcaataacatcaacatcaacaaatagaacccccacacaaaaaccccatccaaaggtcattagcatcaaaaatcaaaggtagaaaaatccacgaagatgaggaaaaaactgtaaaaaggctgaaaattctcaaaaccaaaatgcctcttctcctccaaataatcgtagctcctctccagcaagggcacaaaactggatggggaataagtttgatgaattgacagaagtaggcttcagaaggtggataataacaaactcctctgagctaaaggagcatgctctaacccaatgcaaggaagttaagaaccttgataaaaggttacaggtactgctaattagaataatcagtttagagaagaacataaatgacctgatgtagctgaaaaacacagcacgagaacttcatgaaccatacacaagtatca

SEQ ID NO: 169463 - DNA, 512 bp, Homo sapiens
gtgttttgttataaatatacataaatggtaccatatgtttttgtagtgtcttatcattttataaattgtttatcattttgttttgagctttattttttgatacattaagtttatttattttgttgtaactgatattctacatcacatcttataaatataacatatcttatctaccctctattaatgagcattttcttttgtttctgctagtaatacagaaatgaacacttgtacatatctttttgtgcacatgtgtgagaattttctggaaatgtaaattctaagttgcaaagtacgtacattttttcttgtgctaggtaattgcaaattacttttccttctgcatagattttaaaaataagaatcctcaaagacaaatttcatttttcttgttactgtaatttttagacataaaaagttcttttcacatcacaaagacamatctttctaacacgtttaaatataagctaaattttttttcagtattgcaggtttgtgtaatcattttattt

SEQ ID NO: 169464 - DNA, 516 bp, Homo sapiens
ataaggattagggtcatttattagatgagaaaagtctgaaagaactgggaaagagaaaactctcaaaactttggggctgccatccaaacagagaagcacctctccttctacataggttcaagaattcttagtgagcctggtctgcccaagaagggtgctgacataatgaaggagggccaatcaagagcaaagaattcctcattttgaaacctttatctggaataaaggcctctcctggacwtgccatattttagctcctatgtttcattgtaagagatttctcctgtgattcagccatgaagggaggcgggtcaaattaaaggcattaaaaagaactcctggaaaagcagtgcaggagcctggctgttgccctggatggtgcctgtgtacctacccacgcatgacctcctgcctacttgtgttaacatggaaattatacatttttaaatggaattttgtttgccatctattttcaaagtctcatgagtctagtccattattttgagccaagtttaa

SEQ ID NO: 169465 - DNA, 637 bp, Homo sapiens
gagaaagaaacaagattaaaaaggaacaagtaactaggagagaaaaatatgaagaaggttatggatatgaagatgcatttttggtaaggaaggttaaaaagaaaagagaataattttgtatgagaaagaatctcatatgataaagttttgtcctaatgtaaaatgactggttatttaagaaagaggaaatacaggacaaagcagaaagtccaagcgtgttttcaatggtctgcctatgtcatgataaggttcgtgaaaagagaatttatgaaaacaattttgtgtgtgattaagttggctataattctaaagaaattatttctaagttttctaaagattaagctttgacattgaaaatatgctagaacaaaactaaaaaaatgtggtcccctgtattataacaaggtttttgtaaagtattcattttcttttaataaaattgcaaaagatttttattttaaaattctaaaatccatttctttttgaaacttccttttatcaagataatttctgtgttgtccttacttggttttggtttctttaaaasgattaagggttttacatccatgtaactttctttattgcttttgaagtcttttgattaccactctggttaaatgaataagtattaattaac

SEQ ID NO: 169466 - DNA, 409 bp, Homo sapiens
aaaaaaaaaaaaagaacaggccttgggctagatttggtcttataagccttagtttgctggcccatgctttacagcgaaataaaaaaaaaattctctaagcaccatggcacttaccaaaggttaagctaagtgggaccatggcagttaagtttgtggctctyaacacatttatataggtcaagcgagtttgagaggagctgacaactcaaaagttcttctcattccgtctaacaggaagaacatgaaatcctaccagagatacttgtttctgcaggttgaggcttacacatccaggggttcctagttaaaagatcaatagtctgtggagattacagttcaattctctacatgggtttcccacatgaagaggtgagttaaaacagagtgaattgcaagactcgtaggttga

SEQ ID NO: 169467 - DNA, 409 bp, Homo sapiens
aaaaaaaaaaaaagaacaggccttgggctagatttggtcttataagccttagtttgctggcccatgctttacagcgaaataaaaaaaaaattctctaagcaccatggcacttaccaaaggttaagctaagtgggaccatggcagttaagtttgtggctcttaacacatttatataggtcaagcgagtttgagaggagctgacaactcaaaagttcttctcattccgtctaacaggaagaacatgaaatcctaccagagatacttgtttctgcaggttgaggcttacayatccaggggttcctagttaaaagatcaatagtctgtggagattacagttcaattctctacatgggtttcccacatgaagaggtgagttaaaacagagtgaattgcaagactcgtaggttga

SEQ ID NO: 169468 - DNA, 407 bp, Homo sapiens
cagcctttccacctgtgtctgaaggggttagcccttccttgcccgaggaaacagtaatggcgtcccaaggcagtttccaagacaaggctgattctcctcaggacccaccctcacctcccctctttgtttctagccctataaccagactcaagtcccagcaggcccctaaaggtgaggtagaaaacgtgactcatgaggaggtatgctacattccaaaagaactrcttgagttttctaatttatacaagcagaaatctgggaaacatgtgtgagatggatattaagggtgtgagataatggtggaaggaacacaaagttggatcaggctgaatttattcatatgggaccactaagcagagattctgtgcttaatgttgcagctccaggagttaggaaaggtgctaacc

SEQ ID NO: 169469 - DNA, 597 bp, Homo sapiens
gcatcctgctaaatgctgaaggaaaggaaatgaaatatgagttccctgccctcttgtagctcatggtccagtgagagaagcatgcagtttaacccactattcaaatattctgtgacaaatgctctgatgaaatacacatatgrtattatgtaaacattgacaaagctcatttcagtagggcctggggcatcaggccacccttttggagatgaggaatgtgctctgatcctgtgaaatcaggatgagttagccggataccaggggaaggaccttcagaaaaacaaatgacatgtggggaaaacccccacaacatggtataagtgtgtgttttagccctgggatagagtggccatgggggaaaaggcagcaatagacaagttctgaattttatcctgcacaacctgaaggagaaaatgaaggattaaaagcaggagaatggcacgctcatatttgcactgcaagaaaatcagtttttgcaacagagtggaaaattagttggagcagtgaattcttatgagcctattcagctactttaaataaatgcaattaaaggtctaaactaagatcacactgaagggaatggaaagaaagggaaag

SEQ ID NO: 169470 - DNA, 645 bp, Homo sapiens
  misc_feature (1)...(645): n = A,T,C or G
nnnnnnnnnnnnnnnnnnnnnnnnnnntctttgacgtgtttttgaccaacactgaacatagtactctatactcagaccataatctgactaagcagaatctaaaggaatgattgcctctcatcttcatatttcttcatatgtcctggtattacatggggtttttcataatattctttgatttacatccatgmcaggtcactgttacctgtgttcagacatcattccagatctcttgctaatgagattgttcagagatttcacatcaaaataatttgcccaatggaagtctctgttttgagggatagggaagtttgcacaaacgtaaaagatgtttttaaaaaaagaaaaaagacagccattttaaaactaaagcagatgtttaaaatgttgaaaagggaaatttagtaaaaggccaacatttttgaaaagcaaattttagcaaattagatattttaaacaagaagtttcatgggatactaaattaaaactccaagtgtgtcccagatccatgccctgtcctcccatcaccctcccatgtccacccctacaggatccaggttggaactaacacaaggagaaagtgtgatgctaatttgggggagctaaaattggtaataaaacaatttaaaagtaaaatttaaaaca

SEQ ID NO: 169471 - DNA, 575 bp, Homo sapiens
gtcctaggcaagtctacgagactggggtgatctacgttaggtcctcttttccctgcccattgcgatacttacgaaaatgaagccaggacagttttaatgggatagggtgggcacagaagggtggtgtgaaatatgagggaaatgtgtgtgaggggagaaagctttgctcgatagtatatataagacaggaatatgtgtgataatgttctagcgctgcctttgccaaccctgtctttctcaggctgcctccaacaggagcttagtcctgtggagtactggagccaatactgcccagagtgtcagccacattgttcttcccaatggtgaggtctagaatttgctgtcatggatcaggtrtctgatatgagctatgagcagccatataccccatgaagtccttgccctcttttgacccctgcagcagtgggttcatatgactgagtttctatttggagccccatcctgaatatcagaccatttgtctgggatcctgatgctgcatctaggccctactagctcatcccctgatggagtggctgggttttgctttctgtagactcaggtactggttgaga

SEQ ID NO: 169472 - DNA, 622 bp, Homo sapiens
gcttggcacagttcctccggagtcctttggtgatggagaacagggctgacaggattcaaatggccagattccacagaggccaaggagggccacagtctgcaaaccaggggagattgaggcctgagaagggcatcagctgatggaaatattcactctaggaaaacgaggtgtagccaaagagagtcatttaggagaagcagattgaaagcagctgtgaaaaatcctgaaatgaggatatggaatagtgctggccacctccgcatatgcccacatggaaacacacttaatcagcagagctgggcctatgtggagatgctgagccggaggctcctaggtgttaagcacttttctatgtgtaatgtggtggaaaccaccctagacttttcagcrcacccaaagcaatagaattttaactgggagggaattatccagccagggactagtttctggcttcttttggaactcagtgtggttgtatggctaagctctcaccaacagaatgtgagtggaagtgatgtgagccactctcagacctgaccatgaaacttggctcataggctcctccataccaccccacctccgccccaccttcctgcttggctggaatacaaaccttgcagta

SEQ ID NO: 169473 - DNA, 410 bp, Homo sapiens
atgtgtaatgtggtggaaaccaccctagacttttcagcgcacccaaagcaatagaattttaactgggagggaattatccagccagggactagtttctggcttcttttggaactcagtgtggttgtatggctaagctctcaccaacagaatgtgagtggaagtgatgtgagccactctcagacctgaccatgaaacttggctcataggctcctccataccaccccacctccgccccacyttcctgcttggctggaatacaaaccttgcagtaaccttgtgagcaacgtgctgaaaataatagaactagcatctcctgggttccttgaaggatgcttggagtagaaggcccaccacctggcctgttctagactatttacatgaaagagaaaaaaccttttactcttctcaag

SEQ ID NO: 169474 - DNA, 410 bp, Homo sapiens
atgtgtaatgtggtggaaaccaccctagacttttcagcgcacccaaagcaatagaattttaactgggagggaattatccagccagggactagtttctggcttcttttggaactcagtgtggttgtatggctaagctctcaccaacagaatgtgagtggaagtgatgtgagccactctcagacctgaccatgaaacttggctcataggctcctccataccaccccacctccgccccaccttcctgcttggctggaatacaaaccttgcagtaacyttgtgagcaacgtgctgaaaataatagaactagcatctcctgggttccttgaaggatgcttggagtagaaggcccaccacctggcctgttctagactatttacatgaaagagaaaaaaccttttactcttctcaag

SEQ ID NO: 169475 - DNA, 405 bp, Homo sapiens
ttataagctcttcccttctctgcacccagctcactttttggggatgttggggagagtgagtgtgaataagtcttggagayttcttgtgagtccagtaatacaatatgaagtgttttgtgtctagttcctagttgtttggtagcagaagggagctttcagtgtatctaaacaggcatattgcagaaaattgggttttacatgtatgtgtctccccttcctagactgtgagctctttgagaaacaaaatatgcctatctccagtacctagcatagtgcctggatagtaatagaccctcaaaaaatatttgttaaaagaatatatgatataataatgctttcctccctcaaaacactaccagagtacccttcgcatattcatagcatatactccttagtctgattgtt

SEQ ID NO: 169476 - DNA, 405 bp, Homo sapiens
ttataagctcttcccttctctgcacccagctcactttttggggatgttggggagagtgagtgtgaataagtcttggagacttcttgtgagtccagtaatacaatatgaagtgttttgtgtctagttcctagttgtttggtagcagaagggagctttcagtgtatctaaacaggcatattgcagaaaattgggttttacatgtatgtgtctccccttcctagactgtgagctctttgagaaacaaaatatgcctatctccagtacctagcatagtgcctggatagtaatagaccctcaaaaaatatttgttaaaagaatatatgatataataatgctttcctccctcaaaacactaccagagtacccttcgcatrttcatagcatatactccttagtctgattgtt

SEQ ID NO: 169477 - DNA, 561 bp, Homo sapiens
catagcatatactccttagtctgattgtttttctttgatatttattttctgaatttctacttttatgagagaaattgagggccaatcattggartttgtttcaggtccaaactacaattccttgtctatcacccagcttcccaccccttggagtagtggttgatggttattactatgaagtttggaggataagtttacttcatgataaagttcagtctgcctaggtacttcagaatccttgggaatgtaattggtttatagattttaaatatctgtattccacacatacatcactgttggtatcctgagtctcctgaagttttctggttcagacactctgatctgtcctgcattccctgtttcccagtaaaataagaaataagaattccctgtaactaagtcctagggattggcagaattccaaggtggtattattgccaggctaatagtgcttaataattaattaggcatattcattagtattattaagtctctccccccagcaccacctgcaatcattatgtgatggcagacagatgtttttcaggtgctcacatggcc

SEQ ID NO: 169478 - DNA, 561 bp, Homo sapiens
catagcatatactccttagtctgattgtttttctttgatatttattttctgaatttctacttttatgagagaaattgagggccaatcattggagtttgtttcaggtccaaactacaattccttgtctatcacccagcttcccaccccttggagyagtggttgatggttattactatgaagtttggaggataagtttacttcatgataaagttcagtctgcctaggtacttcagaatccttgggaatgtaattggtttatagattttaaatatctgtattccacacatacatcactgttggtatcctgagtctcctgaagttttctggttcagacactctgatctgtcctgcattccctgtttcccagtaaaataagaaataagaattccctgtaactaagtcctagggattggcagaattccaaggtggtattattgccaggctaatagtgcttaataattaattaggcatattcattagtattattaagtctctccccccagcaccacctgcaatcattatgtgatggcagacagatgtttttcaggtgctcacatggcc

SEQ ID NO: 169479 - DNA, 532 bp, Homo sapiens
caaggagacaagaatgtcaagttcaaatctgtctccctgggctggcttcaaagcagtatttttattaggaaakttggatccaccaggtggtggattctgaaattagcaggtgattggtggaaggaaagaggaggtttggaaagcccttgggcatgcgtagttatctcttcatgctatctcatgggtcccatgtgcaaattaaggggagttagcaggaaacatgctgtggaaattctggctgtgacttcagcaaacttgttctgtggagactgcagtaggccatattggttccaacctatttcagccagtttttttattttttattttttttttgtctcagaagcagagggagtttcaatgtttcaacaagttgtttcttctgttcaaatctgccatcctgcaaactcaagaattcctattcatcattggcttctctagctctttgggggcatggtttcaaaggtgcaactgtgtctagggtggagctgggaatctcaatggaaaagggacactaaagagcaagggtttgaca

SEQ ID NO: 169480 - DNA, 387 bp, Homo sapiens
catcttgcaatattgtctccagtagacccatggtccatgccattggaagctcactgtctaggagagaccacaggcrtgtgagtaaatcattacagtactgtgggacagggattcaaatataagaatgtcctgaggccgagcggtggaatgaagaagcagcttgatgttgccaagatgtttcaactgaaccttaaagaatggggagaaattcccagcaaacaataggtgatggttaattttatgtgtcagtgtggctgggccacagtgcccagatattcggtcaaacaatcttctggatgtttctgtaagggtgttttcagatgagattgacatttaaatagatggactttgagtaaagcaaattgccctccttaatgtgggtgggcc

SEQ ID NO: 169481 - DNA, 452 bp, Homo sapiens
gacatttggggcatatttcccccttctgtacaaaagccagagcaattgagggtgaagatatgtctttatatttatatagctattaaagtggttagttaaaattatttgaataattcaaaaaattaagcaggaaagcatgaaatatctgcaaactgagaaagatacaatcacttatttatggaacaccaattttaattttatattttgaaaagatggcaataaatatttatatgtttctcatttttttaaacacaaaagccagggaggaaaatgcagactacagtgaaagcttgtggtttaaattccctttttagattttataataacctttatcttcctgaattttcttcctttattagtattatggaacagccagacttaattatctccttttaatttgtgtttcttatttcttttgtttggctcatrcacttgtttattcctttagatgt

SEQ ID NO: 169482 - DNA, 574 bp, Homo sapiens
ttaacaggaatgggtgtaatgagggggcagatagttcccatttgtccttcagggcccatgcaatgtaaaattgtggagcttgcatatacttctgaagcgtcaccaacaccaactaatgctgtggacatatgctcctttagccagtgttggggccattgatgtaaagcaataatagaaacatcagcacccgtatcaatcattccctcaaacttcctcccttgaatatgcacagagcacacaggatgagtgtcagaaattttgctggcccaataagccactttgccttgataatctgtgctaccaaaatctctgtttctcatacaagaactggatcctaaaggaatgtaagggagtatcagaagttgagcaatgcsgtccccagctgccacattccaagggactgcagagctaatgacaatatgaatttcacctgaatagtcagaatcaattacaccagtatgtacttgagcaccttttaaatttagacttgaatgaccaagtagcaaactgacactgccagtcagtaagggaccaaaaacacctctaggaacagcaataggcagctatccaagca

SEQ ID NO: 169483 - DNA, 582 bp, Homo sapiens
taacaggaatgggtgtaatgagggggcagatagttcccatttgtccttcagggcccatgcaatgtaaaattgtggagcttgcatatacttctgaagcgtcaccaacaccaactaatgctgtggacatatgctcctttagccagtgttggggccattgatgtaaagcaataatagaaacatcagcacccgtatcaatcattccctcaaacttcctcccttgaatatgcacagagcacacaggatgagtgtcagaaattttgctggcccaataagccactttgccttgataatctgtgctaccaaaatctctgtttctcatacaagaactggatcctaaaggaatgtaagggagtatcagaagttgagcaatgccgtccccagctgccacattccaagggacygcagagctaatgacaatatgaatttcacctgaatagtcagaatcaattacaccagtatgtacttgagcaccttttaaatttagacttgaatgaccaagtagcaaactgacactgccagtcagtaagggaccaaaaacacctctaggaacagcaataggcagctatccaagcaacagagaaa

SEQ ID NO: 169484 - DNA, 583 bp, Homo sapiens
gcaaatatatgcctttctgttattaaacccaactctgccaatttagtttcaacaaaagacactgtctattgcattaaaccaatattagtactttttttttttttttttgaaataaagtcttgctcttttcgtccaggctggagtgcagtgatgtgatttcagctcactgaaacctccgtctcctgagttcaagcgattctcctgcctcagcctcctgcatagcaccagtcaccatggccagctaatttttgtattttttttttttagtagaaatggcgtttcgccatgttggccaggctggtctcaaactcctgacctcaggggatcggcctgtcttggccttccaaagtgctgggattacaggcgtgagccaccaaacccagccaatgttagtacttttaatgttactggttttataattctgtatgtaacagaaaaagcatatttgtgggttttctgcaaattaattgagatctttagctataaataaactaaaagattatgaagtttatacttygctctatttttgtacacaaatgaagttaacatcaaaacaattaaacactgggggttaatgtcaata

SEQ ID NO: 169485 - DNA, 493 bp, Homo sapiens
ggagccgcgctggagaggcagcagcatggccgttcctgatggctcgggtactccgaggctcggagggctctgggctaatggcctctagtgactggcgcctgggcaacccccaaagtatcattccttaactgcatgtagctgggagggaggtgaagattccaatttcagaggggtgtgctgggggcacagcaggtttgaggccaatgacgctttcagtatggggcaggtcgcagtggtctgggttggaggtgtggaagcccctggggtgagggtgactgcagctgtgtgtgggtgggaggggctcagggagragaagggtgactggcaggagagaagcagccaggctggtggggtgggcagtagaggggactgtggggaggagggcagggcccaggggagagaggtgtcaagacgtagggcaggagtgagtctgagggtgtgggggcttcagaagtgccacggcccggggccagggccaagcgcgtgagccttt

SEQ ID NO: 169486 - DNA, 493 bp, Homo sapiens
ggagccgcgctggagaggcagcagcatggccgttcctgatggctcgggtactccgaggctcggagggctctgggctaatggcctctagtgactggcgcctgggcaacccccaaagtatcattccttaactgcatgtagctgggagggaggtgaagattccaatttcagaggggtgtgctgggggcacagcaggtttgaggccaatgacgctttcagtatggggcaggtcgcagtggtctgggttggaggtgtggaagcccctggggtgagggtgactgcagctgtgtgtgggtgggaggggctcagggaggagaagggtgactggcaggagagaagcagccaggctggtggggtgggcagtagaggggactgtggggaggagggcagggcccaggggagagaggtgtcaagacgtagggcaggagtgagtctgagggtgtgggggcttcagaagtgccacggcccggggccrgggccaagcgcgtgagccttt

SEQ ID NO: 169487 - DNA, 388 bp, Homo sapiens
aggctgaggcaggagacagcgactcatcaaatagagaatatcaagaaaaagacagaaattataaaaaagaaccaaacagaaaatctggagttaaaaagtacaataactgaataaaacaatcagcaaggctgagaacagattaacagatatttccaatctgaaaaactcaaaggaaaaaacaatatggaaaaatgaacagactcagctgtgcgacaycatcaagcatagaccattaagtgcacacaatgggagtctcagagaagagaaagagaaagggacagaatgaatattttaagaaatgatggttgacaactccccaaatttggtgaaaaacatttatttatatatccaaaaagatcaataaactccaggcaggataaacacagag

SEQ ID NO: 169488 - DNA, 638 bp, Homo sapiens
gtaatttaatctctaatgatttaacttatcattaaactcagaatttgtcatgtaaagatttctgagttaatatacattaccctattgttgctcagttaaccttctgttctttttcagttgttggagaatgggcttgtagatttgttctgaaaaattatagcttaccatgaaggaagatatagcaaatgcaatacagtaaactaagacatgttcagcactcagacactaagtttaaaagtaatatttatttaattccacatagggcacattggtatattataaatgtgtataaggcgtaagtctgcccacaaagtccagaatatkgtttggtaaaattgtattggttaacataaaattttatttgatcattgtacacaatatatcaaaaaatgaaaatagccacatattttagaaatagacattttgaaatctgaatttgtcattcactacaatcttgattttcatataagttataaatttgatccataacagaataccataaatgtcagtgatacataacattaggtaattattaattttttgtcaattgatttggcagtcctgatagtatcagctggtgcatcttggttaatattatctagtctaacgggtctaacgggaactcatagacctacata

SEQ ID NO: 169489 - DNA, 465 bp, Homo sapiens
ataatgtaacacaattacattcagacttcatgtaaattgcataacattgtatgccacatycaagcattgcctctgtgagccagtactcacattgccatttcatgttatgaaattatataaataggcattataaaatttgtttcacactcaaaagctcctacctaaagggcatagagtctgaaaccacaccagagatcctccaaataccagaaaggggtggggataaggagtcccttttactaagaatactaataattgctgatactaatactaataatttactgagtactgctcatgtaccagatactattctaaatacaattatgaacacattttatcttcataaaactggttgacattagtactgttatttcccctttcaaaataaggttatagaggcacagcaggtgtaactcacccacagtcacacatagaatccctgatagagacaggtcaagtgtggct

SEQ ID NO: 169490 - DNA, 608 bp, Homo sapiens
aaaatagcagtaggcatagaaagaacaccattccacacagcattctgtaaaaattctatgctttatcattaggtgaaattaagcactctatagtttacactgagttgttacaatgtttagtctccaagagaatatactgcacgcacttatattttgcagaaaacataagtgcatgcagtgtatatatatatatatatatatatatatatatatgattatatatagagaaaattatataggttttatataggttagggttagggttacatataaaagtattttatgtacaacttacatatccatgcagtttctttctttaattgctcctttaaattcacttcatttgacacctgtgatttgaccgtctacatttgttgttattttctaaacttatgttttagtttgacacaaaactcattgagtgcaaatttcctaactgaacatactttttcaagcattttccaatatctgtattctttcctaaggatgttctaacaaactctgagcagactgggcctgaaaagaaaatcatttccatcaaagatatgtattttataatatatattcgacttattgttacccaaacatcttttctatgtgtggyactt

SEQ ID NO: 169491 - DNA, 619 bp, Homo sapiens
caaggagaaaatgtaagttcttatacttaatctcaaccagccatttggttaaggcaatcaaattatttcaattatttgaaaacttctctaaaaccaattagagccatgggttatctgttttctgcagtaaagttatctggcattatcaaggaagaatgtgtttaaagatgtaaatgtttcaatcaattttgaacccagtttttcatttctccctgtacccatcactcttgacttgtaatcttgcagttctacaagaaatagataactttctcaactcttgctttggggcttggacgtgattttctctgactcataaaatgttaacaggtgagacccaaacaggaacgttaagtatgcttttatttttggaatactctattgtggctctgctttcaacaaagactatcagccaaagrgtccaaagaagatgacatacatacaggtctctagttccaaaggtagctgatctagttaccccattcttgacacccaaatggtcgaactgatatcaacagagctaccccagtcaagtcacttatttgaaaggattgcttactgttagatatcactgagtttatgaatatttcttttatcaatacataactaatgcttgaataat

SEQ ID NO: 169492 - DNA, 553 bp, Homo sapiens
gtggctctgctttcaacaaagactatcagccaaagagtccaaagaagatgacatacatacaggtctctagttccaaaggtagctgatctagttaccccattcttgacacccaaatggtcgaactgatatcaacagagctaccccagtcaagtcacttatttgaaaggattgcttactgttagatatcactgagtttatgaatatttcttttatcaatacataactaatgcttgaataatgtatgtgtattatctcaatatcattatcctggttgttatattgtactatcttagggggaaactggttaaaagataattggaattcctctatattatttcttacaaaggaaaatgaatagaaaattatctcaataaaatttttaataaataaataacatgcacaatcatattggcatcagtggcagaactagggtgatgggcatttatttgcaaaaatatttaccatcttcttattatcatgcataaagaaaaatataatttataataccaagtataacttaactwtaccagattctggacttcgtaaggaagat

SEQ ID NO: 169493 - DNA, 419 bp, Homo sapiens
  misc_feature (1)...(419): n = A,T,C or G
tgaattaggagcctggggaccatgctttgcatggcattcccggggagagccctttgtaaggggtcggatcatcccagcccagagttccatgggatatggacttggtccaagcagccttcagtggcaatcagctccgagcagaaacccagcggatccgcaggcctaacggcagctccaaattcttcattcctraaagctttggggtgaggagtgggggttatgatcttggcaaaagcagctcagtgtcagcaagcattgccctgcagaaaaacatgaattcctacaaaaggggcattgtgtgagccacgggaagcctctatggaggcatcaatcttgtgtcacccagagatgtttattatgaagacagtgtcatgcagcaaagaggtgggggccgcaggcaggcatgtccaccnctggag

SEQ ID NO: 169494 - DNA, 596 bp, Homo sapiens
ctcagacaagtgtgaacaagtctgagagataaaaatccaggggaactgaatcatagagaggtccccacacttttgtgggttttacctccaggagcactaccaggtctcacagtgaatattagggaaaaaaatcccctcctgcttccagcagtgggaggggaaaaggagccattttgaaatatgctagagcattatgttcttaacaaggtctgtcctcaggagaaactatgtaaccagagcctgacctgctggggttaaatatccaactcaagtccattccagccatcctgtcccacctaaggtgaggtgggggaagggacctagaggyacatgaagttcacaatccagagtaatgggctcactgaaagactgaggagaacacttcctctccccacagatcttaccaccacctaactaaaggcctgttgacagcagttccttttacccaggacacgtatcattcctgctatccaaaaaagaaaaacaaaaacaaaaacaagacatacaaaaaagaaaaaaaaacccacagtttgaagagacagaacaagtatcagaaccagattcagatatggcaaagatgttgaaattatcaaacc

SEQ ID NO: 169495 - DNA, 579 bp, Homo sapiens
aagctttgtttaggttatcaatcttgaatagcaaactacyctgaaacttagtggcataaaacacttcatagttattttataataatttcataatcattttattatgctcttggattcttaggtcaggaattaggaaagggcatggcaatcatgatttttctctgcttctccgtgtctgggaactcatctggagataaatgacagggctataatcagctgggggcttctccactcacatgtctggtgtctgagcagcagctgaggcctcaggaacagggtgctcagatgggtgagtccacagaaggtggggctcctgagaactcacaacaggaaccaaggagaggcatggccatcacaatgggcagactttgaggatgtggtctgagaagcctctgcgggctggctggggtacatacatgtgacctctgtgtgcagcctgggcttcctcacagcatggtggcttcagagtggctttttacatggtagttcatggctccaagagcaggtgttccagtgagcaaggtggaagatgcgtagccttttaggacctaccttcagaagtcacatagcatcacctct

SEQ ID NO: 169496 - DNA, 584 bp, Homo sapiens
aaaaaaattacgccccgccctgccactcatcgcagtactgttgtaattcattaagcattctgccgacatggaagccatcacaaacggcatgatgaacctgaatcgccagcggcatcagcaccttgtcgccttgcgtataatatttgcccatggtgaaaacgggggcgaagaagttgtccatattggccacgtttaaatcaaaactggkgaaactcacccagggattggctgagacgaaaaacatattctcaataaaccctttagggaaataggccaggttttcaccgtaacacgccacatcttgcgaatatatgtgtagaaactgccggaaatcgtcgtggtattcactccagagcgatgaaaacgtttcagtttgctcatggaaaacggtgtaacaagggtgaacactatcccatatcaccagctcaccgtctttcattgccatacggaactccggatgagcattcatcaggcgggcaagaatgtgaataaaggccggataaaacttgtgcttatttttctttacggtctttaaaaaggccgtaatatccagctgaacggtctggttataggtacattgagca

SEQ ID NO: 169497 - DNA, 457 bp, Homo sapiens
tgctcatgactatgatgtcatagttattgacagcgcgcctaacctgggtatcggcacgattaatgtcgtatgtgctgctgatgtgctgattgttcccacgcctgctgagttgtttgactacacctccgcactgcagtttttcgatatgcttcgtgatctgctcaagaacgttgatcttaaagggttcsagcctgatgtacgtattttgcttaccaaatacagcaatagtaatggctctcagtccccgtggatggaggagcaaattcgggatgcctggggaagcatggttctaaaaaatgttgtacgtgaaacggatgaagttggtaaaggtcagatccggatgagaactgtttttgaacaggccattgatcaacgctcttcaactggtgcctggagaaatgctctttctatttgggaacctgtctgcaatgaaattttcgatcgtctgattaaacca

SEQ ID NO: 169498 - DNA, 457 bp, Homo sapiens
tgctcatgactatgatgtcatagttattgacagcgcgcctaacctgggtatcggcacgattaatgtcgtatgtgctgctgatgtgctgattgttcccacgcctgctgagttgtttgactacacctccgcactgcagtttttcgatatgcttcgtgatctgctcaagaacgttgatcttaaagggttcgagcctgatgtacgtattttgcttaccaaatacagcaatagtaatggctctcagtccccgtggatggaggagcaaattcgggatgcctggggaagcatggttctaaaaaatgttgtacgtgaaacggatgaagttggtaaaggtcakatccggatgagaactgtttttgaacaggccattgatcaacgctcttcaactggtgcctggagaaatgctctttctatttgggaacctgtctgcaatgaaattttcgatcgtctgattaaacca

SEQ ID NO: 169499 - DNA, 485 bp, Homo sapiens
aaactgttcccttctttatgaaacagggaacagtgtaccctactttctggcttgttgtgagggatgaggtaatacatgtaacagttacttctaaatcatgcagctctttgtaaatgtaagattaaatgtataaatgtaagttgtaatttaccctgcagctccataagggtgagaaatgaaatacaattttgctgatatcaccattcaaaaattgtcagcaattaaaattgtctatatgttcaaaggatgagtatactgtgtttcttgaatcatgtttgcgaactcraagaatgggcaggggaaaaacaagggacattctccaaggtcaaagcattctctcccagattattagttatgtgggaagtgatggtcagcctcattggttattagataaatgcaaattaaagcaatattcctatgccgtttcaatggattataaactccttgagtttagcccacttctgcttctctgtgaggagtcaggc

SEQ ID NO: 169500 - DNA, 534 bp, Homo sapiens
agatcttaaaggccataatagattgaaataaaatggaaagtcgatctgcccaggtttaactcctcttaaagaagcatcagaagaaaagagggttctcttagctcttaagaggtttgaaacagtcgacagagctcaagagaatttcagaggaagggagataaattattggagcatattgaagtttctccacgacagagtatcaggatccaagttcctaagaagaggtgtcttcaaaaacatgctgatggaagaatcatagcaacagccactaggaacctctgcttaaagattgggacagccctttagctacagaaaatctaggcagacttaaaaggacaagatctggaagactagcacaaaacaaaaacacatttaaaaagtaagttttaaagtgacatggccattggaagtagagataaagtattgcctgtacttttaggtgtaatgatacctacaaatgcctcygcataccagacaaaagcaatctgtgggtccccattgacatttttgcaaccctgggattaagtcagaaat

SEQ ID NO: 169501 - DNA, 526 bp, Homo sapiens
cagttaatttttctatattgatcttattgatcctgcaaccttactatatacacttattcattttagtagctttttagtagatcctgtaggaatttgtacataggtaatcatgtctccaaataaaaataattttactgcttcccttcttgtggtttttcattgcctcacaagctagagcctccagtaaaatgctgaagaaaagtagtgaaagragacatttttcctttgttctttctcctggaaagaaagcatttagtcttctaccatgaaaaagatattagctactagcacattgaggattaagtaaaataaaacaaaagatgttagcgataggctttttgtagatgccctttatcaagttatggacttttccttctcttcctggtttaatgagagtttttatctggaacgtattatagattttgctaaatgctttttctctctctattgagatgaccatgtgtttgttagtttcttaatatagtgaatagtgattggtttattactgctcaactaatcttcctgt

SEQ ID NO: 169502 - DNA, 569 bp, Homo sapiens
ttccaacccctttatgagtaaagaaatagattattggtcttacattccaccaaggaacaacgtggcccttgattgggctctttagaggcagatcctgagacagattcagacacaaatgatttattgagggaaagttctcaaatctgtaagaaagggaaggaagaagaataaygcagtggggacaggggtgtcagtggaggtggagtgtgggggaaggagctgagtacggttatggtctcagaacagtctaaatctaacctgttctgcaggggaattatataaattacactgcagaggtatccctacaagagcaagagggttggtcttttgcacaaccatattagccagtcaatggttatggtggctccagaagagatgcataatctcctgttcagtggtccctgtctacagagaagagatagctacactaagagaagctgggggaatggaagtagaaaagggaagctgactgggcaccaacagtgtctactatagccatcctggcaacttgatcattccttggctttctatccataaaacagcaaacattactgactcaacaaaaatac

SEQ ID NO: 169503 - DNA, 485 bp, Homo sapiens
tgctaactttcctgttagcaccacttttgctgtatctcagagattttgataggttgtgttattgttattgttcacttcaaagaatttttacatttctatcttaatttcattattgacccaacaatcaatcagaaggagkttatttaatttccatgtattgcatggtttgagtatcccttttggagttgattttcaattttattccactgtggtctgagggagtacttgatataatttcaattttcttaaatttattgagacttgttttgtggcctatcattctatcttgaagaatgttccatgtgtgatgaatagaaagaatattctgcagttgttgggtggaatgttctgtaactgcctgttaagttcatttgttctagggtatagtttaagtccattgtttctttgttgactttgtgtcttgatgacttatctagtgctgtcagtggagtattgaattcccccactagtattgtgctgctgtc

SEQ ID NO: 169504 - DNA, 485 bp, Homo sapiens
tgctaactttcctgttagcaccacttttgctgtatctcagagattttgataggttgtgttattgttattgttcacttcaaagaatttttacatttctatcttaatttcattattgacccaacaatcaatcagaaggaggttatttaatttccatgtattgcatggtttgagtatcccttttggagttgattttcaattttattccactgtggtctgagggagtacttgatataatttcaattttcttaaatttattgagacttgttttgtggcctatcattctrtcttgaagaatgttccatgtgtgatgaatagaaagaatattctgcagttgttgggtggaatgttctgtaactgcctgttaagttcatttgttctagggtatagtttaagtccattgtttctttgttgactttgtgtcttgatgacttatctagtgctgtcagtggagtattgaattcccccactagtattgtgctgctgtc

SEQ ID NO: 169505 - DNA, 419 bp, Homo sapiens
catacattttcattgaggtggccacacrtgagctgccatgtaattttctgtttcattttccttcacttggatgtttaaaaagcttcctttggcaacatgtcttgggcacagcatcttctcttggcaggatcagttggtgtcacctgttgtaggcatttattgtccccaatctttgatataggcccaactctagtgactaaaccaagggctggagaaagagcatgtcagcagaaagtcaaagagttctctactcttcatttttaagatgaatgttcattccatgggtgtcatttccataatgagtttttctttttcctggagaaccaggaaagaccaggcatcacaaggtcacccttctttctcatgcaatcttttcctctgacattattaaagctttacaaatcagagcattcatcgcc

SEQ ID NO: 169506 - DNA, 424 bp, Homo sapiens
tttcttcttaatttcctatcttcttgttattattttgtgatatttgttctctctttcatttttacctatattttatattatttargactcatttttatactgagtggcagaaaatacaaggcttcagataaggtactagagaataagacaaaaatcacttggagggcactggggactatttttcttttcaatttttcttaaagctcctcctgtatcaccttgttttatattcaacctttatttttaaagttttaaaaaaattcctcaacatgaaaaacttgtgaggccactcgttaacaaacctaaaaaacattccaaatggaatcttcagagtaccttaagaagatacaatctccacctgtcaagtcaaagtaggctactatgaaaatgattaatgaccacaggcattaaagtcaaacaaaca

SEQ ID NO: 169507 - DNA, 515 bp, Homo sapiens
agtgattgtttagggaaattattgaagctaacccccgtaggggcagaaaatttaaacaagttcattaktataaacaaatgcagaaagctgtcaaagattacctccctataaaggtatggattgtttcagaattttaaggaaaaaataattccgatggtatttaagttatttaaatatcatggcataaaaaattaaggaaagtttccaaattatttttataaagcaggtatacattgtttaaaaagtctgctgaagatggcctaatagaataaaaacaacaaaccaaactcagttataaatatcaatgcaaatgtcttaaagtacagcatatctattccagtgtgcttgccttgcttgatgcttcaggagatgtagtgattgacaagttgctgtgcctgccctcatgtagctaaatttagaaaaagggatcaaactataaccatgactttgctatatagtagagtaatataagaactatcacagatgacccatgtattgctgtgggggctcaaagg

SEQ ID NO: 169508 - DNA, 515 bp, Homo sapiens
agtgattgtttagggaaattattgaagctaacccccgtaggggcagaaaatttaaacaagttcattagtataaacaaatgcagaaagctgtcaaagattacctccctataaaggtatggattgtttcagawttttaaggaaaaaataattccgatggtatttaagttatttaaatatcatggcataaaaaattaaggaaagtttccaaattatttttataaagcaggtatacattgtttaaaaagtctgctgaagatggcctaatagaataaaaacaacaaaccaaactcagttataaatatcaatgcaaatgtcttaaagtacagcatatctattccagtgtgcttgccttgcttgatgcttcaggagatgtagtgattgacaagttgctgtgcctgccctcatgtagctaaatttagaaaaagggatcaaactataaccatgactttgctatatagtagagtaatataagaactatcacagatgacccatgtattgctgtgggggctcaaagg

SEQ ID NO: 169509 - DNA, 645 bp, Homo sapiens
tttaagcaacatttatacagcaaccattttaataatgatgataatgttattttatcgaaatcttgaaataggttttaatcaaagtttgactgaccttgacttgatattttgagtcctttttcatttttgtgactaggaagtaaaaacaagttctgccttttatattcttcatgagttatgaatttaattttcttgacatcttacttcaaaatcaagggcaatatgtatttttctttttaattccaaatggaaactggctgaattcacaataaagacaactgaaaattggaattgtttaaaaattwaaaaaaaaaatacaccgttgtagcagattttaaatgaagtaggttatcaagtggactgctaatttttgcctttccaaaatgttggatatttaaccctcagaataattaaatatttgtaataaagcagttaattcaagcagtttattgctgtaatttgcaaaagtacattgagctgctttcttttcagctcattgatggaggaacaaacatttctttaataagactacagcacattctaattttgttgcaaaagcttagataaggatcaggccccctctgaatcactgcattgacctatgacattgaaagtgctgaagctctttggcaaaagaagagttag

SEQ ID NO: 169510 - DNA, 645 bp, Homo sapiens
tttaagcaacatttatacagcaaccattttaataatgatgataatgttattttatcgaaatcttgaaataggttttaatcaaagtttgactgaccttgacttgatattttgagtcctttttcatttttgtgactaggaagtaaaaacaagttctgccttttatattcttcatgagttatgaatttaattttcttgacatcttacttcaaaatcaagggcaatatgtatttttctttttaattccaaatggaaactggctgaattcacaataaagacaactgaaaattggaattgtttaaaaattawaaaaaaaaatacaccgttgtagcagattttaaatgaagtaggttatcaagtggactgctaatttttgcctttccaaaatgttggatatttaaccctcagaataattaaatatttgtaataaagcagttaattcaagcagtttattgctgtaatttgcaaaagtacattgagctgctttcttttcagctcattgatggaggaacaaacatttctttaataagactacagcacattctaattttgttgcaaaagcttagataaggatcaggccccctctgaatcactgcattgacctatgacattgaaagtgctgaagctctttggcaaaagaagagttag

SEQ ID NO: 169511 - DNA, 510 bp, Homo sapiens
aattacattatttctctttactgaattttgcttgaagcactgaatgtgacaattttagtatttcagaggataaaaacagcccatgtctgactgaagaaattcaaagaaattagtgctccttaacaacaaaaaaagtggggttatagagagtgaaaataaactttaaaaattctaaaaggcagaatcactaagagaactttgatttaacagaaaaaagtgtgatttagaaaagagcacttttgaaggtatgaatggtctaagcactgagttgtgttcctctaggtaattawagaggattataaattttttttaacaagagcaactcaaggggagcagagattgggtcttttaattttgtgccaccggtgctaaatacaactaagctcagtgggaaaggaagaagacagtgggcctctggcccaggcatcatactcacccagggcctccaatgggccaacacattgaatcacagagatattccgagaggtcagagagaagacatagtgttcc

SEQ ID NO: 169512 - DNA, 517 bp, Homo sapiens
tgaattcctaaatcattgtttgaaagagtattttgaccaatgcccagtttataagggttctggggcatttttgcttcttgtatgagttcagtggagtgttagttggctaactaattacaagggactaaaaataaaccatggtttattattttccaattttgaattacaaaattatttaaatgtctgtaatcgaagtgctacattactatgtaatgaaattacaatacagcttaatgatattaggaaactgcatgcaaaaaaatatttgtacacaaggtggtgatgttagcaaccaactacagtacttttattctgctaaaaaacacamtaaataacaacagattactttccccaagtgatccccaaagggcatctttagttgttcatataatgatagcatgtaagggcacagagccacatggaaaacctgtcagcatatgtcattagagtagcagagaaaaaagagaaaaaggacaaatcacaaaatagagaataactgctaaagagtaaaattatg

SEQ ID NO: 169513 - DNA, 463 bp, Homo sapiens
agtattataatctgattagagctgtgcattaggacgtttaatctggtatggtatgaaagacaaccctcattttccatggttgtagtatctcccttactcctgtggtcactgtgccattatcctctaacctctcatctgcagtatttaatctttcactgggttgactgatggagaagccataactcttttcattaaggatcacaacttgattagcataccaaatcaaattacgtatttctggcttttttcatatgccatttttacacacacacacacagagagagagagagagagagagagagagagaraaagagacttctcaaggcttggctttctctttctctctctactttccattcccgggatatgtctcaggcgtcttctcagagtcacatggccgtggggagaatgaccagttcgggttctgctgagttctctgccacacacttgccatgcttccttg

SEQ ID NO: 169514 - DNA, 548 bp, Homo sapiens
tgggtgaggacacagccaaaccatatcactgccagacctattaactccaaagtattggatttatgtagtgatttctacttctgcycattctctgttttgtaaagaaaagaaagtacactagtctgttattgcctgattttgtcaccaacttgttcaaaattccaaagcttctggtcatactctctagttattgacagaaagaaagcctcctgtttcttaccatcagattcaattcatagcttttgacagatggcccccaacatgaaattggccaaatagtgatatttgaaaatatatttacaaataagatctacttgcatctttacaacaacctaaaaggtgggcgagataactattgttccccccatttgacagatggggaaactaaggcacacttaaggatcttttttctttgcacatcacatatggaaagttataggagaagacaagactaacaacccaaactcttaataaacattcataatcctctataaaaccttcaaagccagatgtacttcaaagttcaaaaaatgttttattattttaga

SEQ ID NO: 169515 - DNA, 548 bp, Homo sapiens
tgggtgaggacacagccaaaccatatcactgccagacctattaactccaaagtattggatttatgtagtgatttctacttctgcccattctctgttttgtaaagaaaagaaagtacactagtctgttattgcctgattttgtcaccaacttgttcaaaattccaaagcttctggtcatactctctagttattgacagaaagaaagcctcctgtttcttaccatcagattcaattcatagcttttgacagatggcccccaacatgaaattggccaaatagtgatatttgaaaatatatttacaaataagatctacttgcatctttacaacaacctaaaaggtgggygagataactattgttccccccatttgacagatggggaaactaaggcacacttaaggatcttttttctttgcacatcacatatggaaagttataggagaagacaagactaacaacccaaactcttaataaacattcataatcctctataaaaccttcaaagccagatgtacttcaaagttcaaaaaatgttttattattttaga

SEQ ID NO: 169516 - DNA, 452 bp, Homo sapiens
atttttctctaccttccttgctgcacattgggacacagcaaggccaggacacccttcttaggtgactgggtaaccaggttcattaaggcagtcagcrcagagaagaagcagaaaatggggaggagttgtgtaaatgaaattgccgataataccaaaggaaccccaagagaggttcagtctcccaacaattgcagctttgctgcaacatggcagggtggggcaggggtaggtttggatctgggctgctttgccatggaagtggggttacagggcagggagaggcttaccatcactgagcatctttaattgactttgtcattttactgagaacttacaaattgagctattcttcattgagttatatttggaagcaggttcaatacataatacagtcctccctctagaatttctgctttatgtccacgtgatgcagcttgttcatttctgaattc

SEQ ID NO: 169517 - DNA, 452 bp, Homo sapiens
atttttctctaccttccttgctgcacattgggacacagcaaggccaggacacccttcttaggtgactgggtaaccaggttcattaaggcagtcagcacagagaagaagcagaaaatggggaggagttgtgtaaatgaaattgccgataataccaaaggaaccccaagagaggttcagtctcccaacaattgcagctttgctgcaacatggcagggtgggrcaggggtaggtttggatctgggctgctttgccatggaagtggggttacagggcagggagaggcttaccatcactgagcatctttaattgactttgtcattttactgagaacttacaaattgagctattcttcattgagttatatttggaagcaggttcaatacataatacagtcctccctctagaatttctgctttatgtccacgtgatgcagcttgttcatttctgaattc

SEQ ID NO: 169518 - DNA, 581 bp, Homo sapiens
atgataccctgctagaatgtgtccttgttccttggttactctcagctctttgtatttccatgtaagatacaagtagctagaactgatctatgaataattaggcaatatagagttttaaataactgagacataaaagctttcaccaaaaactgttggaaagaatttcagcctgcattttccggaagctgtgattggctttatgtctgcctcatggtgggatccctcatttcttcaactcctttttgatgtttgcaaagtgtttagttttctttctctctacctaatctattgcgaccatttcatgtagaagaggagggaaagggtaattgggtttgataaacagattgctcttgcttctcagtatgaaatagtatagatggatgcaacattgttaagatcatgcctttcttttcttacaggaaccagtttttacatcctgaaagtttttttgcggaagggcacctttacttgatccaaacccatgtaaaaaygaaatgatgccatagtcatagttgaggacttaataaatataagaatatttagatgaaaaaaatctaaccttttaatttacaggattgtag

SEQ ID NO: 169519 - DNA, 383 bp, Homo sapiens
atttgtctgtttatataatgtcatttcaatgggactacaggaaggaagagagatgaatttatgtgttcacatgtttacatatgtttattcatttaaaaaataattattagataagtaccctgastgagacactcctatagacacttggtaatcaccaaaaaattacttatcaatgtgtgcaaaaaattgtaattgttattttaaaattacattactaattgtgatttgttggaagcataccaggtaaggaattgctagaataaagtcatgtgcccaagcatctgagagagaagagatctctaaaaaaagttaaatatatgagatctcattaagagtatcagattaggagccagaaaatctagatacaaggagagatttaggtt

SEQ ID NO: 169520 - DNA, 383 bp, Homo sapiens
atttgtctgtttatataatgtcatttcaatgggactacaggaaggaagagagatgaatttatgtgttcacatgtttacatatgtttattcatttaaaaaataattattagataagtaccctgagtgagacactcctatagacacttggtaatcaccaaaaaattasttatcaatgtgtgcaaaaaattgtaattgttattttaaaattacattactaattgtgatttgttggaagcataccaggtaaggaattgctagaataaagtcatgtgcccaagcatctgagagagaagagatctctaaaaaaagttaaatatatgagatctcattaagagtatcagattaggagccagaaaatctagatacaaggagagatttaggtt

SEQ ID NO: 169521 - DNA, 306 bp, Homo sapiens
gtagaggatgaagcagaagctcagcagacccactaatatgttcagtcttccagtaagggagttacaggcagaggcaatcccarggctaagattaggtctcctaaccttacagcaagaaatctctggcttggactggcattttccacattagtggaaaatatggaactatcacaaagctatgcagagaatgtttggaatagaaaaaatgaactttattaataaaggaatgttttctgaactgtagaacacatcaatccaatgcagttatcaatttgtctcattttcataaacttttaccttgacatg

SEQ ID NO: 169522 - DNA, 482 bp, Homo sapiens
tgcacaagctgactctagagatcatgactcccctccgtactctcctcacattgtagaggatgaagcagaagctcagcagacccactaatatgttcagtcttccagtaagggagttacaggcagaggcaatcccagggctaagattaggtctcctaaccttacagcaagaaatctctggcttggactggcattttccacattagtggaaaatatggaactatcacaaagctatgcagagaatgtttggaatagaaaaaatgaactttattaataaaggaatgttttctgaactgtagaacacatcaatccaatgcagttatcaatttgtctcattttcataaacttttaccttgacatgactcaggtaactttttgactttattatttctgttctaaattattcatgtcattgttagtatgctatgtaaatattgrcatcctcagcattttagactaatggtcttgggagacaagtttattcc

SEQ ID NO: 169523 - DNA, 482 bp, Homo sapiens
tgcacaagctgactctagagatcatgactcccctccgtactctcctcacattgtagaggatgaagcagaagctcagcagacccactaatatgttcagtcttccagtaagggagttacaggcagaggcaatcccagggctaagattaggtctcctaaccttacagcaagaaatctctggcttggactggcattttccacattagtggaaaatatggaactatcacaaagctatgcagagaatgtttggaatagaaaaaatgaactttattaataaaggaatgttttctgaactgtagaacacatcaatccaatgcagttatcaatttgtctcattttcataaacttttaccttgacatgactcaggtaactttttgactttattatttctgttctaaattattcatgtcattgttagtatgctatgtaaatattggcatcctcarcattttagactaatggtcttgggagacaagtttattcc

SEQ ID NO: 169524 - DNA, 536 bp, Homo sapiens
ttaataaatatatcatagtggcataaatgacatttcagtacaaatgaaaattttttattgtaatgtaatcatgagtgttaggcagaatacaaatattaagtatgaaggaaataaatatgtcatatgcttccaaattgtttgtgttattcctttaaaatagctttcattctctttctgccactcaaaaaaactttgttcaatttttaataatggtacctctccatcatgattgctgattctgagccctctctctcactttgaacctaccaggatttatgcatttgcatcattgatgtagaatcatatcagctttatctttgtttctaaaytcattcattcagcaccatttattgagtatctttgtgaaccaaggtctgtattaggtattatcactttactttggtcttgagggatgaagaaaatttttcagatagaaatgtggaaatggaacgttatgaagttggaacagcatttgcaaaaacatgagatggtgaaatgacatgatatcttcagaaaaatgtcaatgcttggagcat

SEQ ID NO: 169525 - DNA, 536 bp, Homo sapiens
ttaataaatatatcatagtggcataaatgacatttcagtacaaatgaaaattttttattgtaatgtaatcatgagtgttaggcagaatacaaatattaagtatgaaggaaataaatatgtcatatgcttccaaattgtttgtgttattcctttaaaatagctttcattctctttctgccactcaaaaaaactttgttcaatttttaataatggtacctctccatcatgattgctgattctgagccctctctctcactttgaacctaccaggatttatgcatttgcatcattgatgtagaatcatatcagctttatctttgtttctaaattcattcattcagcaccatttattgagtatctttgtgaaccaaggtctgtattaggtattatcactttactttggtcttgagggatgaagaaaattttkcagatagaaatgtggaaatggaacgttatgaagttggaacagcatttgcaaaaacatgagatggtgaaatgacatgatatcttcagaaaaatgtcaatgcttggagcat

SEQ ID NO: 169526 - DNA, 403 bp, Homo sapiens
tacctataatactttgccttgttatatcagaaagtggaatgacaggaccaaatgaaataactactcaatctaggtggcttacctacttcctgtttgtaaggcatcaagtttgggtataaagcagtgttttcccgaatttataatacttacatcactggcacaactcttatatttctaaatattrtttgccttattttgagaaatgagatataacaaactgtggttctgatgtgctggttatatatttttaatacatgtaaaaatgagtgcataacaacaaatttattggacatcaagcaaaaatataaaacatactttagagaaaaactggcataaacaaataagatcattttttcatagagctcaaccatgcaccaaaagtatcccttgggtggacagacac

SEQ ID NO: 169527 - DNA, 403 bp, Homo sapiens
tacctataatactttgccttgttatatcagaaagtggaatgacaggaccaaatgaaataactactcaatctaggtggcttacctacttcctgtttgtaaggcatcaagtttgggtataaagcagtgttttcccgaatttataatacttacatcactggcacaactcttatatttctaaatattgtttgcyttattttgagaaatgagatataacaaactgtggttctgatgtgctggttatatatttttaatacatgtaaaaatgagtgcataacaacaaatttattggacatcaagcaaaaatataaaacatactttagagaaaaactggcataaacaaataagatcattttttcatagagctcaaccatgcaccaaaagtatcccttgggtggacagacac

SEQ ID NO: 169528 - DNA, 444 bp, Homo sapiens
ctgtctgtaacttttggacatcaatgtcatcaagacattaaggtaatgttcctggaatgatattttgtttatagtttactactgtcccattgaaactaaatgcaaaacaaaatcttgcttgatatgtatttgaaataggaaataataggaaggtagtcacttcctaccttcctaggaagatagcaatgatgataaaataggacttcctatgaacctagcagcttttataactcatattcattatcttatttgacctcacaataacctatgcataatgcaagagtgaatcagagaggttcaggaactttccaagaaaaagagaaccagtaatgatcaaagctaggrcaaggacccagattctgtctccacattcctttcataaaactacaaaaaaacctctgtgatacaaacttaatcatgaaatttaagtcctgccaggattgt

SEQ ID NO: 169529 - DNA, 444 bp, Homo sapiens
ctgtctgtaacttttggacatcaatgtcatcaagacattaaggtaatgttcctggaatgatattttgtttatagtttactactgtcccattgaaactaaatgcaaaacaaaatcttgcttgatatgtatttgaaataggaaataataggaaggtagtcacttcctaccttcctaggaagatagcaatgatgataaaataggacttcctatgaacctagcagcttttataactcatattcattatcttatttgacctcacaataacctatgcataatgcaagagtgaatcagagaggttcaggaactttccaagaaaaagagaaccagtaatgatcaaagctaggacaaggacccagattctgtctccacattcctttcataaaactacaaaaaaacctctgtgatacaaacytaatcatgaaatttaagtcctgccaggattgt

SEQ ID NO: 169530 - DNA, 213 bp, Homo sapiens
tgtcaaaggtagttgggacaactcttgccccacttgtaattgactaataccattgtgatagatgtatcttattattttactagctctatttcagccatgtttccttaactgaaaaacacattcaccacaaagatgatattatcccaatgtggcataaattttttctgaggggaaccaaaaaagmccctacacatttaatgtataaagcacata

SEQ ID NO: 169531 - DNA, 595 bp, Homo sapiens
actctgagagtgcacacatatacacccatccacatacttatatatgtactgccaaatttcaaattacattttacttaactactttggtgccattccaagcacataaacaatatttgtaagtccgtttattttagattgatgaagtttctaattctgcacttggaggaaggtacgcctctccaagaatgagaaattaacttttctttaataatttgacctattcttgacaccactgttaacactctgagctcttaacataaaatgccatttaccaagagtaacagtatttacagmaggattgagtttgctctttttatttattttcaagttatccagttagcatgttattgccataaagcctaattataaattaacccaatttaattttgtggagttgtgatttgatccagatcatttgagtctagatattttgcaatacatcttatcctttaaaaaaagttacattagccctactgaagctccaaaaaattcaatattccatttaaaatatctgaattcttttaggatcccttcaatgctgaaaatccatcattcagatggactgtataaatgaacatttagtactttgagtggc

SEQ ID NO: 169532 - DNA, 595 bp, Homo sapiens
actctgagagtgcacacatatacacccatccacatacttatatatgtactgccaaatttcaaattacattttacttaactactttggtgccattccaagcacataaacaatatttgtaagtccgtttattttagattgatgaagtttctaattctgcacttggaggaaggtacgcctctccaagaatgagaaattaacttttctttaataatttgacctattcttgacaccactgttaacactctgagctcttaacataaaatgccatttaccaagagtaacagtatttacagcaggattgagtttgctctttttatttattttcaagttatccagytagcatgttattgccataaagcctaattataaattaacccaatttaattttgtggagttgtgatttgatccagatcatttgagtctagatattttgcaatacatcttatcctttaaaaaaagttacattagccctactgaagctccaaaaaattcaatattccatttaaaatatctgaattcttttaggatcccttcaatgctgaaaatccatcattcagatggactgtataaatgaacatttagtactttgagtggc

SEQ ID NO: 169533 - DNA, 595 bp, Homo sapiens
actctgagagtgcacacatatacacccatccacatacttatatatgtactgccaaatttcaaattacattttacttaactactttggtgccattccaagcacataaacaatatttgtaagtccgtttattttagattgatgaagtttctaattctgcacttggaggaaggtacgcctctccaagaatgagaaattaacttttctttaataatttgacctattcttgacaccactgttaacactctgagctcttaacataaaatgccatttaccaagagtaacagtatttacagcaggattgagtttgctctttttatttattttcaagttatccagttagcrtgttattgccataaagcctaattataaattaacccaatttaattttgtggagttgtgatttgatccagatcatttgagtctagatattttgcaatacatcttatcctttaaaaaaagttacattagccctactgaagctccaaaaaattcaatattccatttaaaatatctgaattcttttaggatcccttcaatgctgaaaatccatcattcagatggactgtataaatgaacatttagtactttgagtggc

SEQ ID NO: 169534 - DNA, 500 bp, Homo sapiens
cctttaaaaaaagttacattagccctactgaagctccaaaaaattcaatattccatttwaaatatctgaattcttttaggatcccttcaatgctgaaaatccatcattcagatggactgtataaatgaacatttagtactttgagtggcatccttacatcctgagttgaactggcttctttcagcccctattatcaatggggagaacactgccacctcatgtgttagctctgtctgtaggcattcatcatgagcagagggtgatggtgatggggtggtttgaagccaagcaatcaaaggaagaagatgacatatacataaagacacttaggctgaaatgtgtgaattctgtcctctgattaagtttttcaatcatatgtcaaatactgaccctattaattcccatgtttatgtgctatttttatggtcatcatttcttctctgtaacattggggcagacccagagaacttcctggattgttgcaaatagaccctgcagag

SEQ ID NO: 169535 - DNA, 500 bp, Homo sapiens
tcctttaaaaaaagttacattagccctactgaagctccaaaaaattcaatattccatttaaaatatctgaattcttttaggatcccttcaatgctgaaaatccatcattcagatggactgtataaatgaacatttagtactttgagtggcatccttacatcctgagttgaactggcttctttcagcccctattatcaayggggagaacactgccacctcatgtgttagctctgtctgtaggcattcatcatgagcagagggtgatggtgatggggtggtttgaagccaagcaatcaaaggaagaagatgacatatacataaagacacttaggctgaaatgtgtgaattctgtcctctgattaagtttttcaatcatatgtcaaatactgaccctattaattcccatgtttatgtgctatttttatggtcatcatttcttctctgtaacattggggcagacccagagaacttcctggattgttgcaaatagaccctgcaga

SEQ ID NO: 169536 - DNA, 528 bp, Homo sapiens
gtggcttaggcctgccaggacaagaagctcttatcttagttttgcatctgacttgtttcatcccaccttccttctttgtgctcatttgtaaaatgtaaattgaagaattaatttacctctcaaggtaatattgatggaatcaagaaaaatggttgcataacattttgaaagtataaagacctatgtaaatgtcaaattataatgataaactcagtagcccaattatccatgacaacacttcccactgtttgattaaccagatgaaaaaaattagacatttttcttaaacagcacccttcaaaaaatgtacagcttactctagaaggcagkctttttttttttttttttaacacaattcttaatgtctcactgaaattttagcggaaaaggtggcacattttgacatctcaaggatgtgcaaccttatataagttgtataattaaattataaaaagccatttaatttaaattatatcacctgggtcaagattttatttttattaaaggctgaagtctatagactactct

SEQ ID NO: 169537 - DNA, 630 bp, Homo sapiens
aatgtgagcccagtctgtgtgacaccaaagcttgtgctttgctttatccattcagctgtactacstcccaattctctacctgccttgaatcagtgtggaagactgagtgatggggaaaaaagccgaaggtattattttccactaataagaatatgctaaatgtacacataatataattgtagaatgaaaaccttaaattacacattaaactgataagtcataatttatctctaatggtgaaattgctaagggttttctttcctttatagttttctgtacatttctgttgagtgctttgaggttatattttttatgtttaaaaaatacacaacaaatgatatattaaaaatataagccatagttaatacattcaaaacattccaccattcctgtgaacaacagcacaaaagtcacgtttgtagctactctaatattgtttaagaaaaattttctattatataatgttgatagctagaattaaatgataaactttgcttcatgagaataatattttaatatttagatgcagcaacgttatacatacttaaaacttttaaaaaatattttctggcatataaatagagggaattattttaataataataccatgtcactcattccaccgtttct

SEQ ID NO: 169538 - DNA, 589 bp, Homo sapiens
tataaataattttatattgtgtaaataattttcttctgataatgttaatttttttcctctaggtacaagtgacattatgcatctactgtcttctcttgcctatatcctaacatggttcaattaattacaattcaattaccagcacaaaaaacctccagtttcatgtgttctataaacgttttgtcttctcccagcactgcttgtcaaggggacaaattcttccatttgcatgggatcactatwggatcaattttagctcctctttatattgatttattttaacctaccatttttctgctgctattaatcttgccatttttgtttgtttaatgtcctttaaaatatccaatttttgcaaaatgttggtttgatctagctttcattatttctcatctagacttttgtaaatccatatatgttcatttctttagttctaccttttagtcttatttagcatttgagaactacagagataaatttatttagactattcctcacagatctcatttgtaggccatttattgaaaggatgatattagattctaccaaaacttttccctaccttacgcgtaactgttatagtgaccag

SEQ ID NO: 169539 - DNA, 565 bp, Homo sapiens
aattgaaaaccctgggcatgtggaaattgattgccttacctgcccatgcatttttctggggaatgagatcttctctctttactttaatagcctttcagtatacctgccatcgcttgctcccaaaaacagacgcaactaaatactaaacaagaagccaataaaattaagtttggtttaatatgatgtatgtggcaacctgccaacctatttttaaaaataaatttcttwagacctgaacattttttcagcatttttagatgtcacagtattgttttttccctctgccactgagcagcatccctgctgatattcacagctgtcttcttcaaccccttacctgacatcgcaccatcaatctctattcaacacggggaagacagcgcacgctttcaacttttatagataatgcaaaagaaaaatgatgaatggtgaaaagaaaatggtgaactaaataaaaggtgaatttccttcaggttgaaaacttactaactgtgagcacatacaatcttaactaaaaaaatgtaaaaataaactaaaaatatcttctgaaaggccttaagctgat

SEQ ID NO: 169540 - DNA, 565 bp, Homo sapiens
aattgaaaaccctgggcatgtggaaattgattgccttacctgcccatgcatttttctggggaatgagatcttctctctttactttaatagcctttcagtatacctgccatcgcttgctcccaaaaacagacgcaactaaatactaaacaagaagccaataaaattaagtttggtttaatatgatgtatgtggcaacctgccaacctatttttaaaaataaatttcttaagacctgaacattttttcagcatttttagatgtcacagtattgttttttccctctgccactgagcagcatccctgctgatattcacagctgtcttcttcaaccccttacctgacatcgcaccatcaatctctattcaacacggggaagacagcgcacgctttcaacttttatagataatgcaaaagaaaaatgatgaatggtgaaaagaaaayggtgaactaaataaaaggtgaatttccttcaggttgaaaacttactaactgtgagcacatacaatcttaactaaaaaaatgtaaaaataaactaaaaatatcttctgaaaggccttaagctgat

SEQ ID NO: 169541 - DNA, 582 bp, Homo sapiens
tatatgtgactatattaactattattagtttctagaaaaaatttttacatgttccaagcccaaaccctgttcataatttttttataacttgaatttgaaataataaaggtaaaaatttcartgttgggaaatgttaaacaaaactccagagcatgggcttctcttgaaaaattagactcagggctatcattcttatatgggatccatattttgacgctaaacagtggtgttctcattaatgtagcacgaagtctccacctgactccagatacttattcagctcacctgcccaatctctgcaggcctggggcttgtagctcctatacaacatctttgaatgtcatctttgttacacacttcatgaactataattactttcagtgttgcaaccgttttttggctacagatatttttaagtttagagaaaaagtcatgataaagcaatagaaatagagcagaaataactatctattgtaacttcacagaggatatttactcagggagtagacaagtaagcaagggaactgtcagtaaaatctaaatgtgaacatttaactcgattctattaagtgatttgatggt

SEQ ID NO: 169542 - DNA, 582 bp, Homo sapiens
tatatgtgactatattaactattattagtttctagaaaaaatttttacatgttccaagcccaaaccctgttcataatttttttataacttgaatttgaaataataaaggtaaaaatttcaatgttgggaaatgttaaacaaaactccagagcatgggcttctcttgaaaaattagactcagggctatcattcttatatgggatccatattttgacgctaaacagtggtgttctcattaatgtagcacgaagtctccacctgactccagatacttattcagctcacctgcccaatctctgcaggcctggggcttgtagctcctayacaacatctttgaatgtcatctttgttacacacttcatgaactataattactttcagtgttgcaaccgttttttggctacagatatttttaagtttagagaaaaagtcatgataaagcaatagaaatagagcagaaataactatctattgtaacttcacagaggatatttactcagggagtagacaagtaagcaagggaactgtcagtaaaatctaaatgtgaacatttaactcgattctattaagtgatttgatggt

SEQ ID NO: 169543 - DNA, 516 bp, Homo sapiens
atattcaataataactgctaacttatgtagcagttatgtgccatacgttattctaaaattttaatatgtcttagctcattttatcttcctgaaaaccctatgagataagtactgttatttatctgtcacttgcctaagattacacagcaggtggcagaactgggatttaagcccagtgatctaattccagacttagtgccttcattatcttaggrgctttgaagctttcctgtaatcactctgtaccttggtttcctcaactctaaaataggaataaataaatcaaggtcaataaagcacttagcatttggcatatagcaagcattcaagaaatagctactattatgacaatagtaatgatcattaaatatatattatataacaggtgtgagtctaaatatcctttagtgtatcttacaatctaggagatggattatattaaataaaaagttacaggagtgatcagtgcttccaagacgaataaggtacgttgggaaaacatgaggaggacttaac

SEQ ID NO: 169544 - DNA, 516 bp, Homo sapiens
atattcaataataactgctaacttatgtagcagttatgtgccatacgttattctaaaattttaatatgtcttagctcattttatcttcctgaaaaccctatgagataagtactgttatttatctgtcacttgcctaagattacacagcaggtggcagaactgggatttaagcccagtgatctaattccagacttagtgccttcattatcttaggggctttgaagctttcctgtaatcactctgtacctyggtttcctcaactctaaaataggaataaataaatcaaggtcaataaagcacttagcatttggcatatagcaagcattcaagaaatagctactattatgacaatagtaatgatcattaaatatatattatataacaggtgtgagtctaaatatcctttagtgtatcttacaatctaggagatggattatattaaataaaaagttacaggagtgatcagtgcttccaagacgaataaggtacgttgggaaaacatgaggaggacttaac

SEQ ID NO: 169545 - DNA, 516 bp, Homo sapiens
atattcaataataactgctaacttatgtagcagttatgtgccatacgttattctaaaattttaatatgtcttagctcattttatcttcctgaaaaccctatgagataagtactgttatttatctgtcacttgcctaagattacacagcaggtggcagaactgggatttaagcccagtgatctaattccagacttagtgccttcattatcttaggggctttgaagctttcctgtaatcactctgtaccttggtttcctcaactctaaaataggaataaataaatcaaggtcaataaagcacttagcatttggcatatagcaagcattcaagaaatagctactattatgacaayagtaatgatcattaaatatatattatataacaggtgtgagtctaaatatcctttagtgtatcttacaatctaggagatggattatattaaataaaaagttacaggagtgatcagtgcttccaagacgaataaggtacgttgggaaaacatgaggaggacttaac

SEQ ID NO: 169546 - DNA, 576 bp, Homo sapiens
acagactagatcaagcagatgaaacaatctcagaacttgaagacaagtcttttgaaatagtccaatcagacaaagataaagaaaaaagaatttaaaaaatgattgaagcctccatgacatttggaacaacataaagtgaccagatactcaaattatcagtgctcccaagagtgaagagagaagaaaagagttagaaaatctatttaacaaaataacaagtgaaaatttcccaagtagaacagggatgagatatccaaatacaggaggcccagagatttccaaacagatacaatgaaaaaaggtattcttcagggcagattatagtcaaacagtctaaagtaaacaaagaaaaaaaaatttctaaaaatagcaacaggaactatcaaggaacctccatcagactaatagcaagtttctcagcaaaagccttacaagccagcaaaagatggaatgacatttttaaagagctgaaacaataaaaatgccacccaagaatactatatccagcaaaattatccttcagaaataaaaaagaattaaagttccmgacaagcaaataatgagagaattcatcag

SEQ ID NO: 169547 - DNA, 613 bp, Homo sapiens
attatagaagacataattaataaaattgcatcctggttaccctcaaatctgtccatggtccagttttaccctttgacttgtgtccaaatgacaccaattttgttaaggcgcagctctggattcagaggtaaacacattcatcttctcattaggtctgatgaaatctatctgcaggaaggttatgtgccaagacactgatatttgccaagaggatgcactgctataaacttcatctctgaaagtcttccagttggaaaaaagttasaaggcttcctccagagaaaatgaactaagaggaaagatttgagtcttttggtttaggaattttacctagagttagttcctcttgagggaaattcagtgtatctgttcttagcagttctacaaagacttgagatctttcaagacaaacattatggtcttatataaattcaagtaaactttctttgggaatatagccaagggaagtaaatttgcaaagaagttataagagttcactagaacttgactcttaaaagaataaaatatgcatatttactcttgcttaacatcagatgaaatctaactaggaatataaaagatatgtaaaataaaatacagaaaaaaactggaa

SEQ ID NO: 169548 - DNA, 613 bp, Homo sapiens
attatagaagacataattaataaaattgcatcctggttaccctcaaatctgtccatggtccagttttaccctttgacttgtgtccaaatgacaccaattttgttaaggcgcagctctggattcagaggtaaacacattcatcttctcattaggtctgatgaaatctatctgcaggaaggttatgtgccaagacactgatatttgccaagaggatgcactgctataaacttcatctctgaaagtcttccagttggaaaaaagttagaaggcttcctccagagaaaatgaactaagaggaaagayttgagtcttttggtttaggaattttacctagagttagttcctcttgagggaaattcagtgtatctgttcttagcagttctacaaagacttgagatctttcaagacaaacattatggtcttatataaattcaagtaaactttctttgggaatatagccaagggaagtaaatttgcaaagaagttataagagttcactagaacttgactcttaaaagaataaaatatgcatatttactcttgcttaacatcagatgaaatctaactaggaatataaaagatatgtaaaataaaatacagaaaaaaactggaa

SEQ ID NO: 169549 - DNA, 613 bp, Homo sapiens
attatagaagacataattaataaaattgcatcctggttaccctcaaatctgtccatggtccagttttaccctttgacttgtgtccaaatgacaccaattttgttaaggcgcagctctggattcagaggtaaacacattcatcttctcattaggtctgatgaaatctatctgcaggaaggttatgtgccaagacactgatatttgccaagaggatgcactgctataaacttcatctctgaaagtcttccagttggaaaaaagttagaaggcttcctccagagaaaatgaactaagaggaaagatttgagtcttttggtttaggaattttacctagagttagttcctcttgagggaaattcagtgtatctgttcttagcarttctacaaagacttgagatctttcaagacaaacattatggtcttatataaattcaagtaaactttctttgggaatatagccaagggaagtaaatttgcaaagaagttataagagttcactagaacttgactcttaaaagaataaaatatgcatatttactcttgcttaacatcagatgaaatctaactaggaatataaaagatatgtaaaataaaatacagaaaaaaactggaa

SEQ ID NO: 169550 - DNA, 613 bp, Homo sapiens
attatagaagacataattaataaaattgcatcctggttaccctcaaatctgtccatggtccagttttaccctttgacttgtgtccaaatgacaccaattttgttaaggcgcagctctggattcagaggtaaacacattcatcttctcattaggtctgatgaaatctatctgcaggaaggttatgtgccaagacactgatatttgccaagaggatgcactgctataaacttcatctctgaaagtcttccagttggaaaaaagttagaaggcttcctccagagaaaatgaactaagaggaaagatttgagtcttttggtttaggaattttacctagagttagttcctcttgagggaaattcagtgtatctgttcttagcagttctacaaagacttgagatctttcaagacaaacattatggtcttatataaattcaagtaaactttctttgggaatatagccaagggaagtaaatttgcaaagaagttataagagttcactagaacttgactcttaaaagaayaaaatatgcatatttactcttgcttaacatcagatgaaatctaactaggaatataaaagatatgtaaaataaaatacagaaaaaaactggaa

SEQ ID NO: 169551 - DNA, 544 bp, Homo sapiens
ataatcattaaggaaattaaattcacaattttaaaatttccatgaaagaaatctctaggcccagatgttcagagaattctaccaaatgtttaaagaaaaattaacaccaattctacgtaatatctttcagaaagtagagtaagaggaaacactttccaatccattttatgaaactgttattaccctgataccaaaaaaaagacacagaaagaaaatatcaaaagagaaaaccaaagaccaatattcttcatgaatatatatgcaaaaatcatcaataaratattagcatatgaaactcagcgatacataaaaagaatcatacctcatgaataagttttgttccatggatgcaaggctgattcaatatttgaaagttaataaatgtaatctaccataataataggctacaaagaaaaattaaacaaccatatcaattcatgcaaaaagaacatttgacaaattgctaggtattagaaaagattacctagtagagcaatggcatctcagtttcaattcctacacattatatcagaacaaatatgca

SEQ ID NO: 169552 - DNA, 544 bp, Homo sapiens
ataatcattaaggaaattaaattcacaattttaaaatttccatgaaagaaatctctaggcccagatgttcagagaattctaccaaatgtttaaagaaaaattaacaccaattctacgtaatatctttcagaaagtagagtaagaggaaacactttccaatccattttatgaaactgttattaccctgataccaaaaaaaagacacagaaagaaaatatcaaaagagaaaaccaaagaccaatattcttcatgaatatatatgcaaaaatcatcaataaaatattagcatatraaactcagcgatacataaaaagaatcatacctcatgaataagttttgttccatggatgcaaggctgattcaatatttgaaagttaataaatgtaatctaccataataataggctacaaagaaaaattaaacaaccatatcaattcatgcaaaaagaacatttgacaaattgctaggtattagaaaagattacctagtagagcaatggcatctcagtttcaattcctacacattatatcagaacaaatatgca

SEQ ID NO: 169553 - DNA, 544 bp, Homo sapiens
ataatcattaaggaaattaaattcacaattttaaaatttccatgaaagaaatctctaggcccagatgttcagagaattctaccaaatgtttaaagaaaaattaacaccaattctacgtaatatctttcagaaagtagagtaagaggaaacactttccaatccattttatgaaactgttattaccctgataccaaaaaaaagacacagaaagaaaatatcaaaagagaaaaccaaagaccaatattcttcatgaatatatatgcaaaaatcatcaataaaatattagcatatgaaactcagcgatacataaaaagaatcatacctcatgaataagttttgttccatggatgcaaggctgattcaatatttgaaagttaataaatgtaatctaccataataataggctacaaagaaaaattaaacaaccatatcaattcatgcaaaaagaacatttgacaaattgctaggtattagaaaagattacstagtagagcaatggcatctcagtttcaattcctacacattatatcagaacaaatatgca

SEQ ID NO: 169554 - DNA, 565 bp, Homo sapiens
agatctcttgtcatccttttctctgtaaaactacctcatttttttmtccctgaaaaggaaatccataaggtctgaatttgcatattctctgttcctataaccaaggtttagtcctgcaagcctaaccacaaatatacaggagaaagaattccactcagtctggtacaggtgcccattcctggtccaatcaattaacaccagaaaggtgagggcctctggcacatacatagctgaaggaggtgagagatgggcattgttgggccccacagatactccaaaaactacccacaaaacatatttgaaaattccaatatatcttcactgttaagaggagcaagaaagttgtaaagttagaacttatttgtttttgactagctcttcccatattttcagattccactcattcttcaatacttagtacaatcccacctcctccatgaatccctatctctatattctagttcccaaaattcctatgcactaggtcatttaggatgtaatgatgcattaccagatatatttcactactattttacatttattagtgttggctcaaaaatcataa

SEQ ID NO: 169555 - DNA, 565 bp, Homo sapiens
agatctcttgtcatccttttctctgtaaaactacctcatttttttatccctgaaaaggaaatycataaggtctgaatttgcatattctctgttcctataaccaaggtttagtcctgcaagcctaaccacaaatatacaggagaaagaattccactcagtctggtacaggtgcccattcctggtccaatcaattaacaccagaaaggtgagggcctctggcacatacatagctgaaggaggtgagagatgggcattgttgggccccacagatactccaaaaactacccacaaaacatatttgaaaattccaatatatcttcactgttaagaggagcaagaaagttgtaaagttagaacttatttgtttttgactagctcttcccatattttcagattccactcattcttcaatacttagtacaatcccacctcctccatgaatccctatctctatattctagttcccaaaattcctatgcactaggtcatttaggatgtaatgatgcattaccagatatatttcactactattttacatttattagtgttggctcaaaaatcataa

SEQ ID NO: 169556 - DNA, 565 bp, Homo sapiens
agatctcttgtcatccttttctctgtaaaactacctcatttttttatccctgaaaaggaaatccataaggtctgaatttgcatattctctgttcctataaccaaggtttagtcctgcaagcctaaccacaaatatacaggagaaagaattccactcagtctggtacaggtgcccattcytggtccaatcaattaacaccagaaaggtgagggcctctggcacatacatagctgaaggaggtgagagatgggcattgttgggccccacagatactccaaaaactacccacaaaacatatttgaaaattccaatatatcttcactgttaagaggagcaagaaagttgtaaagttagaacttatttgtttttgactagctcttcccatattttcagattccactcattcttcaatacttagtacaatcccacctcctccatgaatccctatctctatattctagttcccaaaattcctatgcactaggtcatttaggatgtaatgatgcattaccagatatatttcactactattttacatttattagtgttggctcaaaaatcataa

SEQ ID NO: 169557 - DNA, 565 bp, Homo sapiens
agatctcttgtcatccttttctctgtaaaactacctcatttttttatccctgaaaaggaaatccataaggtctgaatttgcatattctctgttcctataaccaaggtttagtcctgcaagcctaaccacaaatatacaggagaaagaattccactcagtctggtacaggtgcccattcctggtccaatcaattaacaccagaaaggtgagggcctctggcacatacatagctgaaggaggtgagagatgggcattgttgggccccacagatactccaaaaactacccacaaaacatatttgaaaattccaatatatcttcactgttaagaggagcaagaaagttgtaaagttagaacttatttgtttttgactagctcttcccatattttcagattccactcattcttcaatacttagtacaatcccacctcctccatgaatccctatctctatattctagttcccaaaattcctatgcactaggtcatttaggatgtaatgatgyattaccagatatatttcactactattttacatttattagtgttggctcaaaaatcataa

SEQ ID NO: 169558 - DNA, 523 bp, Homo sapiens
ccccaaaaaacaaagtcagccaaacatctacaaccaaaactgactttggtagggtgtgcagaaggagatgacacctaatgagacagagaaagatgcaatttaaaatctgtctctcaacacaaatacttaatttttagctttggtagcccatttatactatgtcacaccaatacagttagagaaattgaagctgaaattaatctatttcctctcagctctgagcctgtccctttctaatcttgtataagtaatcgttgattcagatatcctgttatttatgatgctgtatcctagaaaatacactctttgcttaaagcaaatgagttataaacagttttgcgggtcaaatcaaaccactcactaaagatgagattcattagaagtggaaaaggactgcatatattgaaacctcctgcatgtcaggctctaacttagacttgttatcttatttaacatacataaatacacacacacacacacacacacatacacasagagagagagagagatggtttggctgtct

SEQ ID NO: 169559 - DNA, 427 bp, Homo sapiens
ataagcaccctggtgaagaaaaatcaaacctccctaagtacaactttttccaggaaagctataatataaatattgaacaaatttggattcaagactacgtttttaacatagttaactgtattgctttcaattaaaatatggttcatattttattggtatattaggaatttaaagtgattgtccaatttagaaaaaatgcagatacattacaracatttctttttttaatgctgtctcctacttttatattaaactgttcaactgctgtctaatatctgtcctccatccccccagtttctggcctctaaacagcagcaaaccgacttatgtgacattcagtgtcttctcttctctctgctcaacccctagtaagccacaactagtcagttcaagtgagaaaatacaagtaaaaggcaaataaagtgta

SEQ ID NO: 169560 - DNA, 427 bp, Homo sapiens
ataagcaccctggtgaagaaaaatcaaacctccctaagtacaactttttccaggaaagctataatataaatattgaacaaatttggattcaagactacgtttttaacatagttaactgtattgctttcaattaaaatatggttcatattttattggtatattaggaatttaaagtgattgtccaatttagaaaaaatgcagatacattacagacatttctttttttaatgctgtctcctacttttatattaaactgtycaactgctgtctaatatctgtcctccatccccccagtttctggcctctaaacagcagcaaaccgacttatgtgacattcagtgtcttctcttctctctgctcaacccctagtaagccacaactagtcagttcaagtgagaaaatacaagtaaaaggcaaataaagtgta

SEQ ID NO: 169561 - DNA, 433 bp, Homo sapiens
acttgtaggctgaagaattataccttcaactacggaaaattttcattctgtactaaatatttctttttcattctctcttaccataagaaagtaatacttcttaccttctgtttcatactttttgtctctatacagctttctgttctactttgagacttgatttgatctcctattgtagtaagttactctttagcatctctacagttttagttattattttatttcaaatactttgttttatatgtaayttttattcttttctgatttgtttctgtgtctgcctgtcgttctttcatagcatcttctttttatggatttcatttttgccctcttgaaacgtatttattttaaaaaattccttgtgaattgtactgtggtctggttctttgtaaattccctagtttattgattctgtggacactattttatggaa

SEQ ID NO: 169562 - DNA, 607 bp, Homo sapiens
ttttctaaaattaaggctaaagtagattaaataattttagaagaaccaattgccacttatgaaatccttcaaggaatataatgactattcttctaataattggattcagtttgacttatttatttaatattcactctgttctctttttcaggcactgtgctaagttggacttacagagatgaataagatttggccacatcttcaaggagctcagaccttcatggacrtaccaaatatatacagaactaactctactgcttatcataatgagagctgtgctatggatatttgaaagttagagagatttattttcaacagaataataaagtcaactttcacaaactggtgacagatgatctgggccttgcagacaggggaggactgacagattgagaagagtatttggttaaaaacggatcataaactggtataaatatctaaacaaactcatgagaatgagcagagtcagacacaataaaataattcaaagatatatcagataaacctggacccaaaagtcatgactttttcttttcagttaactctgaacaatttacaataacttcctcaattattgtttgtctcattttaacattttgtaataaca

SEQ ID NO: 169563 - DNA, 607 bp, Homo sapiens
ttttctaaaattaaggctaaagtagattaaataattttagaagaaccaattgccacttatgaaatccttcaaggaatataatgactattcttctaataattggattcagtttgacttatttatttaatattcactctgttctctttttcaggcactgtgctaagttggacttacagagatgaataagatttggccacatcttcaaggagctcagaccttcatggacgtaccaaatatatacagaactaactctactgcttatcataatgagagctgtgctatggatatttgaaagttagagagatttattttcaacagaataataaagtcaactttcacaaactggtgacagatgatctgggccttgcagacaggggaggactgacagattgagaagagtatttggttaaaaacggatcataaactggtataaatatctaaacaaactcatgagaatgagcagagtcagacacaataaaataattcaaagatatatcagataaacctggacccaaaagtcatgactttttcttttcagttractctgaacaatttacaataacttcctcaattattgtttgtctcattttaacattttgtaataaca

SEQ ID NO: 169564 - DNA, 600 bp, Homo sapiens
actatttacaattattcttctttccacatgcttttcttcccactcaggttaatttcttacatccccaaggcataagtaatgttcacatatttttttttcaatttgatacactctgtcctcaattttcaggtaaaaatgtggacaacattagataattcaaccttcggagatactcttcacaaatgcaaaaccccacaatatctgggggaatcattttgccagttggttggatttgaaattcatggttgctgacacctctttaaaaccctgcagtctggtgatgcacatttgctcagccatttttggcttgatgtatttcaaagctagagctctgaggcaagtccagcatatattgttgaagaattgaagcgtgagcaagatgcctaagaaagtcatagattgccttgaaggagaataagctgtccagcaagaaattgttttcagagcaacttcaaattgtttccgctggtagaatgtggttgatcttcaatttattttcattcaaggcagatgtgtctatttcaaagcacacctactccagaaagacttcaaagcaactgaatttagcmtttgaaaaacatttaatctcaaccaacagtg

SEQ ID NO: 169565 - DNA, 523 bp, Homo sapiens
tttcctctttttggcccttcctcactttgtgaactgaaaagatagtccagcttatcttgtattttgcatgtcccagatctttaatgtcttttccacaaggaacccttggttaccttttattggagaatggtattcagaaaccaacatctgagcattaggtgtgctcattgcaaatagagtgtcactccttctgggctctcacagaagacagagttagaaaatatatgtatgtacactaaytcatgcatacattcatactatatttacttgcttaactttctatttgtatatatagtaaaataaacataagccaatattacatatctaattctaatctagcaccatatggttcattttaatattttttccttgtttgtttgtaaattttctgtcagtgagtgacccaactctcattaactatatttatttaattttaacccaaatattatgaagtagcttcaaaattgctaatatatcctatgaaggacacatttaccaacaatagtacagtgtttgtcagtgt

SEQ ID NO: 169566 - DNA, 595 bp, Homo sapiens
tgactttaaaatatacaataaattactattgattgtaataaccctattgtgctattaaatactagatctcattcattgtaactgtatttttgtatccattaatcactctcagccttccccctgacccccttcctctacccttcccagcctctggtaaccatcatctattttccatcttcatgagttcaattgttttaatttttagtgcctttccacaaataatgagaacatttgaagtttgtctttttgtgcctggcttattttgcttaacataacatcctccagttccatccatgtttttgcagatgacaggatctcattcttttttatggctgaatattactccactgtatacattactatattttctttatcctttcatctgttgacagacacttaggttgcttccagattgtggctattgtgaataatgctacaataaacatgtgagtgcatgtatctctttgrtatactgatttcctttcttttgggtatgtaactagcagtgggatttctggatcatatggtatctctacttttagttttttgaggaacatttaaactgttctccataatggttgcattattttatatt

SEQ ID NO: 169567 - DNA, 311 bp, Homo sapiens
ctttaatccattttgatttaatttttgtatgtggtgagtgatatgagtctaatttcattattttgcwtatggatatccagttttcccagcaccattaattgaagagaccctcctttttccaatgtatgttcttggaactgggggaggaataacagtaggaccctgtggccacctccactgggactatgctgggtcatacctgatgcccacataggctgaatcttgcccaagacccacagtgaccactgcctggctacagttcatcttcactcaaggctcaatagctctacaatcagaggtggcaaatccag

SEQ ID NO: 169568 - DNA, 584 bp, Homo sapiens
gttttctctcccctagttctcagattctctctctgtgtcacactgctgctgccagattatgggacagaggcggtgtrggcaaattgaaactgcctttcctaccctcttcagtgactgtttccttgatataatgttaaaaccaggtattgtgattgcacatgtggttttgttttctttgaagatgtttttgatgtgaatagttgctcaatttggtgctcctgtgaggagaacaattgctagaggcttccattagaccatcttgctctgcctctctcctttcaaattctagtatcatactgttttaagtatcgtagcattgtaacatattttgaaatcagaaattgtgaaaccaccagttttgttctttgttctcaatattgttttggtgattctgggtcttttaagattccatatgaattttaggataaatttttctatttgcatggggaaaaatcattgagattttgataaaggttgcattatagatgctttgggtattgacatcttagcaatactaagttttctagttcattaacatgagatgtatttttccatttcttcatgtgtttaatttttttcagcaa

SEQ ID NO: 169569 - DNA, 584 bp, Homo sapiens
gttttctctcccctagttctcagattctctctctgtgtcacactgctgctgccagattatgggacagaggcggtgtgggcaaattgaaactgcctttcctaccctcttcagtgactgtttccttgatataatgttaaaaccaggtattgtgattgcacatgtggttttgttttctttgaagatgtttttgatgtgaatagttgctcaatttggtgctccygtgaggagaacaattgctagaggcttccattagaccatcttgctctgcctctctcctttcaaattctagtatcatactgttttaagtatcgtagcattgtaacatattttgaaatcagaaattgtgaaaccaccagttttgttctttgttctcaatattgttttggtgattctgggtcttttaagattccatatgaattttaggataaatttttctatttgcatggggaaaaatcattgagattttgataaaggttgcattatagatgctttgggtattgacatcttagcaatactaagttttctagttcattaacatgagatgtatttttccatttcttcatgtgtttaatttttttcagcaa

SEQ ID NO: 169570 - DNA, 584 bp, Homo sapiens
gttttctctcccctagttctcagattctctctctgtgtcacactgctgctgccagattatgggacagaggcggtgtgggcaaattgaaactgcctttcctaccctcttcagtgactgtttccttgatataatgttaaaaccaggtattgtgattgcacatgtggttttgttttctttgaagatgtttttgatgtgaatagttgctcaatttggtgctcctgtgaggagaacaattgctagaggcttccattagaccatcttgctctgcctctctcctttcaaattctagtatcatactgttttaagtatcgtagcattgtaacatattttgaaatcagaaattgtgaaaccaccagttttgttctttgttctyaatattgttttggtgattctgggtcttttaagattccatatgaattttaggataaatttttctatttgcatggggaaaaatcattgagattttgataaaggttgcattatagatgctttgggtattgacatcttagcaatactaagttttctagttcattaacatgagatgtatttttccatttcttcatgtgtttaatttttttcagcaa

SEQ ID NO: 169571 - DNA, 648 bp, Homo sapiens
ttgtcaaattctaatataattaattctgttatactgctgaaacattgtatcaaattataccttctagtaaatattataattttgttagcagtcgtcataatttctgagagaaacatatattgatattaagttgaacttcaaaaagctcagtaaatttcaactaacaaaaatattactaaagcgaaaacacrgtgataaaaaaatatgagaaagtaatgtgcactttgcatattcatgatgattgatagtggacaaatatctatcaatatatggagttatgtgagttcataaaataagaacattttctactttagaaaaagtgaggctatggagttcttcctgctctctctctctttttaatttgaaactattctatttctttaaaatcataagctttattagtggtagtacgttacaacacatttttcatctctagggagaagttacacaagtttaaatctggaaatgaaagaaaaacagaaaatatgagtatattattttacttacagacataagtaagtgagataagatagccttagataagctttttagatgaattcaataactgagtttcctcagttctttccacagccgtacaaaaaaaaccaacaaacaaagttttaaaagagtcatcaatttttaccaatt

SEQ ID NO: 169572 - DNA, 648 bp, Homo sapiens
ttgtcaaattctaatataattaattctgttatactgctgaaacattgtatcaaattataccttctagtaaatattataattttgttagcagtcgtcataatttctgagagaaacatatattgatattaagttgaacttcaaaaagctcagtaaatttcaactaacaaaaatattactaaagcgaaaacacggtgataaaaaaatatgagaaagtaatgtgcactttgcatattcatgatgattgatagtggacaaatatctatcaatatayggagttatgtgagttcataaaataagaacattttctactttagaaaaagtgaggctatggagttcttcctgctctctctctctttttaatttgaaactattctatttctttaaaatcataagctttattagtggtagtacgttacaacacatttttcatctctagggagaagttacacaagtttaaatctggaaatgaaagaaaaacagaaaatatgagtatattattttacttacagacataagtaagtgagataagatagccttagataagctttttagatgaattcaataactgagtttcctcagttctttccacagccgtacaaaaaaaaccaacaaacaaagttttaaaagagtcatcaatttttaccaatt

SEQ ID NO: 169573 - DNA, 519 bp, Homo sapiens
atttattccttcaccaattgatggacatttggagtgtttctagattttggctattattataatgctactttgaacatacatgtgctcataattgtgtagacatatgtttttatttatcttgactggataattaggagtagaattcatgggtcactggtgagcttatgtttaactttgtaaggttttaatggaactgacaaactatagttgacttttgtgtctgcaggttttgtatctgcagattgaaccaatctgggatcaaaaatatttggaaaaaaaaaaaacttcttgtytatggaaagtaacaatataccagtaaaagtaatacacatttaaaaagatagtataagaactgcttgcatagcctttatgttgtattaggtattataagtaatccagagataatttaaagtataggatatagataaagtatatctagagatgatataaaatatatattttgcaacttttaatggcaaaaagcacaattacttttgtcccaacctaatatttgtaggg

SEQ ID NO: 169574 - DNA, 530 bp, Homo sapiens
aatttctccaattgtgtcctgttacaaatgaagacagattcttatggcacttatgcaaataactgtagtgccataagttaagaatactcatgaatagtttccaattctggagaaatcaggtagaaaaaaaaatgctccaaattttgttcataggaatatgctaaattgttaaaagctgtcaatagctcaaaagaaaasttttaagactctgaaaaacaaaactaaggatcagcaaacatattaagtaaaaagtcaaaaagattgtttcagtccatgaagttaactcctgttcaccttgatactcatgagcattttagctctccatgagtcctgaaaatttttcctctattctgatgtcacagtctccaaagttatctccaaagttatcagaaacctgcattcaagagcaactgctggagttttatagctgattataaaaccgccttctaaagaggaccaaaagaagacataattgtccatggatgaaaacaaagtttaaaggcagccatggttaaaacacacgattgacc

SEQ ID NO: 169575 - DNA, 613 bp, Homo sapiens
tctattaccgcatgagcataatatttgactaaaagttgaaatgacttaagcacaaraaattctgaataaagactgaaacttttagaggagttccaagttatttagcaaatcttttttctcaataaaattgttatattccaaagcctcatttcccagttacctttttttaaagacaatttttagagcagttttagttcacagcaaaattgagaggaaacgataaggatttcccatagaccctctgctcctccacacacacagcctccccccgttatcaaaatcccccaacagaaggtacacttgttacgattgatgaacctacattgacatgttgtaatcacccaaagtccatagtgtatattagggttcactcttggtgttgtacagtctgtgggtttggacaaatgtataatgagagtatccaccactatagtatcatacagactattttcactgtcctaaaaattccctatgctctgcctatttaaccctctcccctactaccctcaacccctggcaacaactgatctttttactgtcactggctcaaaattgtttaagcaaatcatttctctcaattaaattgttacattccaaaacctcatacttggag

SEQ ID NO: 169576 - DNA, 624 bp, Homo sapiens
aaaaagagagggattttatagggatgtatataccaggaggtggggttcatttgaggccattttgaagtttgtctgcacaaaagtataacataagggttgaggatgtatactttcagagccaactcagtgtgtcraagtcttggctgcttcattcaataagtatgtgatatttttcatattggtaaaaatttgtctttttaaaaaatttacttatttttatttattttaattgacaaataattgtatatatttatggtgtacaatgtgatttttttaatctatgtatacattggagaaaggtcaaataaaactaaggaacatatccatcatttcactaatttatcattttgtgtggtaaggatgttaaaatctattttttagcagtttaaaaatatacactacattataactaattgtggtcaccatacagtatagtagatcactaaaactcatttctagagtctaacttaaactatgtactttttgatcaacatctttcttttctctattcctctcttccccctactccaacctcctagcccctagtaattacctttctactgtctatttatatgagagcaactaagattccacctataagtgagattacacagtatttgtttt

SEQ ID NO: 169577 - DNA, 588 bp, Homo sapiens
cattctgtagttcatccatcacaagacacatgaacattctaaaggagagtttatgtcccatctgaaagcttttgtgagaacctgtgttgtgccaagcactgtgcttggagccatgtatccaaaagagaaaaagacacagtatctatccttaaagagctctgggtccaccagtgggagaaacgggagaacaaacagttacaaagtcatgacatttgttctcttaaataaagccacagaaactgctgtttttctatgtcaaaaacagttgactatcagcaattttaatatttcagccttatatatatgaggtatatactagggtctatggagcagattgttataaattatgactagaattattgttcttctggcacatatttatagaaagcactgtggggaacmacagaagtgagcttgagttaatcaaatatgagaaaagcaagctgttgaactgaattctattctaacttcataatgcagttgcaaagaattcatcaccaataggcctactcagccaacttccctggacacatggaaagacaggagaaggtaaatatgagtgtatgtgtgtatatggaagggactgag

SEQ ID NO: 169578 - DNA, 588 bp, Homo sapiens
cattctgtagttcatccatcacaagacacatgaacattctaaaggagagtttatgtcccatctgaaagcttttgtgagaacctgtgttgtgccaagcactgtgcttggagccatgtatccaaaagagaaaaagacacagtatctatccttaaagagctctgggtccaccagtgggagaaacgggagaacaaacagttacaaagtcatgacatttgttctcttaaataaagccacagaaactgctgtttttctatgtcaaaaacagttgactatcagcaattttaatatttcagccttatatatatgaggtatatactagggtctatggagcagattgttataaattatgactagaattattgttcttctggcacatatttatagaaagcactgtggggaaccacagaagtgagcttgagttaatcaaatatgagaaaagcaagctgttgaactgaattctattctaacttcataatgcagttgcaaagaattcatcaycaataggcctactcagccaacttccctggacacatggaaagacaggagaaggtaaatatgagtgtatgtgtgtatatggaagggactgag

SEQ ID NO: 169579 - DNA, 588 bp, Homo sapiens
cattctgtagttcatccatcacaagacacatgaacattctaaaggagagtttatgtcccatctgaaagcttttgtgagaacctgtgttgtgccaagcactgtgcttggagccatgtatccaaaagagaaaaagacacagtatctatccttaaagagctctgggtccaccagtgggagaaacgggagaacaaacagttacaaagtcatgacatttgttctcttaaataaagccacagaaactgctgtttttctatgtcaaaaacagttgactatcagcaattttaatatttcagccttatatatatgaggtatatactagggtctatggagcagattgttataaattatgactagaattattgttcttctggcacatatttatagaaagcactgtggggaaccacagaagtgagcttgagttaatcaaatatgagaaaagcaagctgttgaactgaattctattctaacttcataatgcagttgcaaagaattcatcaccaataggcctactcagccaacttccytggacacatggaaagacaggagaaggtaaatatgagtgtatgtgtgtatatggaagggactgag

SEQ ID NO: 169580 - DNA, 403 bp, Homo sapiens
gttataagacaacaagaagataatgtacttatttgaatgtcagtatgaccaataccatctttgtctacattttcttctgaagtatcctgagtatgtgagctttgaaaaataaaggaaaggtactaggtgcaatrgatttcacagtagcaaaggacataatcaaggtagcgctgtcacttgtcattatcaactgcattcacagaacaatatattttagtccaaagtgatttcaatgcaatatttcctatacatggcctctgacattcatattattgtttgcttataacatatttcagtaggcttttctgcatctattcatcaccatccccttttctcctattttttattatttttttttcaggatgactttatattaaatatgtatgaccctaagaaatatgta

SEQ ID NO: 169581 - DNA, 404 bp, Homo sapiens
gtgttacgtggtttgggtgctttatttaaagtgtctcatttaatgcccaggaaattgtatgaaaagcttaaaagaggattaatacctagcgtaagttcaaataactactccatgggagcactaggagtgaccatcattctaattatttaatagacatacactacttattgtacacatgccttcctttgagaaaatagttcctcatccatttgtagcaataacatagattcagagaggtgcaggtgaatctaattctaactccttagatccagatgaaatgttttagtatcccagtattgaagtatatggaatgcacaaagttactgatgtctgtaataccaaygctttagaaggccagggcgggagatcacttgaggctggaggttcaagaccaacttgggcaa

SEQ ID NO: 169582 - DNA, 631 bp, Homo sapiens
tatatatatatgtcatacatgcaactaaattaacattgatgttattgtcatttgttaattgaacagtggtagggtcaatgactattttcccarttttatatcttactgattcataatgacatatattttttctttttaaaaaattgttgtgggtacgtattggtgtatatatttatggggtacatgagatgttttgatacaggcattcaatgtgaaataagcacatcatggagaatgaggcatccatcccctcaagcattcatcctttgagttaaaacaatccaattacaccctgagttattttaaaatgtacactgaagttataatcacctataatcaccccattgggctacacaatagtaggtcatattcattatttcaagctattttttttgtacccattaaaaatcctcatctcccccctatcccccaactacccttcccagcctctggtaaccattcttctactctctatgtccataagtttaattcctttgatttttagattacacaaataagtgagaacatgtcacattttactttctgggcctggcttctttcacttaacataataatctctggttccatccatgttattacaaatgactggatctcattcttttttatggct

SEQ ID NO: 169583 - DNA, 539 bp, Homo sapiens
tgcaatactagtaaccaaaatggtacattttaaataaaaatgtattatatttcaaacctatatccatattgtaaaataaatccacacatatctaagaatataaagccaaaagtaaaagatctcttcacacataccctcagaacaaaaggagttagtactcttggtaaaagtagtccccgtttgaagctagatgtgcattcttccagatactttatacacttacatattttatagatactctcttttgagggataataataataatttgtggaatactattcatatggttcaaaatttttgccatttgaatgtaactggttatgttggaaatcgtaacattgcagcttatgtataaatatatatgattgcttttaacatctaaatacagaaatgagatatgactttcatggacattagcaatttttttcttcataagcctcttaagatactaataatattctttattactttttggtataaatgagtataattaaggatgaactaatcrtataataattgctataataattattatattc

SEQ ID NO: 169584 - DNA, 433 bp, Homo sapiens
tttttaaaattttaataaatactctcaaattgccttctcagaaaactagcaatttatagtctttataacagtgtttattcattgacacacaaagtgtgtttgttcaattgacacacaaaaatcaacagcattgtagtatgccaacagcaaattcawtgaaggaaatccaaaaagcaatgccatttgcaggatctacaaagaaaatacctaagaataaatttaaacaaggaggtgaaagacctctacaagtagaactataaaacactgaggaaataaaaagattacaaaaaatgaaagatatcctatgtccctggactggaagaattaattttgtgaaaattactgtactaccaaaactaatctacagattcaatgcaatcttgcagtgtcatataccaatgtcattctttataaaaaagcctaaaattaatat

SEQ ID NO: 169585 - DNA, 433 bp, Homo sapiens
tttttaaaattttaataaatactctcaaattgccttctcagaaaactagcaatttatagtctttataacagtgtttattcattgacacacaaagtgtgtttgttcaattgacacacaaaaatcaacagcattgtagtatgccaacagcaaattcattgaaggaaatccaaaaagcaatgccatttgcaggatctacaaagaaaatacctaagaataaatttaaacaaggaggtgaaagacctctacaagtagaactataaaacactgaggaaataaaaagattacaaaaaatgaaagatatcctatgtccctggactggaagaattaattttgtgaaaattactgtactaccaaaactaatctacagattcaatgcaatcttgcagtgtcatataccartgtcattctttataaaaaagcctaaaattaatat

SEQ ID NO: 169586 - DNA, 577 bp, Homo sapiens
aaccctcctggtggatatatagacaaaagaaatgaaatcggtatatagaatagatatctgcattaccatattcattaaagcactattaatagtagtgctttattaatagtaggcaaaatatgtaatcaacctaagagtccatcgacagatgagtggataaagaaaatggggtgtgtatatatataatggaatatgtatttgtccattttcatactgccatgaataaatacccaagactgggtaatttgtaaagaaaaagaggtttaatggactcatagttccacatggctagggaggcctcacaatcatggcgggaggtgaaggagaagcaaaggcacatcttacatggcagcaggcaagagagtgtgtgcagaactgccctttataaaatcatcagatttaatgaaacatgttcaatatcacgagaacagcctgggaaaatgtgccctcatgtttcaattacctcccaccygatccctcccatgacatgtggggattatgacagctacaattcaagatgagatttgggtggggacacagccaaacgatatcagaatatgataaagaataagtacct

SEQ ID NO: 169587 - DNA, 577 bp, Homo sapiens
aaccctcctggtggatatatagacaaaagaaatgaaatcggtatatagaatagatatctgcattaccatattcattaaagcactattaatagtagtgctttattaatagtaggcaaaatatgtaatcaacctaagagtccatcgacagatgagtggataaagaaaatggggtgtgtatatatataatggaatatgtatttgtccattttcatactgccatgaataaatacccaagactgggtaatttgtaaagaaaaagaggtttaatggactcatagttccacatggctagggaggcctcacaatcatggcgggaggtgaaggagaagcaaaggcacatcttacatggcagcaggcaagagagtgtgtgcagaactgccctttataaaatcatcagatttaatgaaacatgttcaatatcacgagaacagcctgggaaaatgtgccctcatgtttcaattacctcccacctgatccctcccatgacatgtggggattatgacagctacaattcaagatgagatttgggtggggacacagccaaacratatcagaatatgataaagaataagtacct

SEQ ID NO: 169588 - DNA, 375 bp, Homo sapiens
catcagtgcactccagcctggatgacagagccagactccatctaaaaaaaaaaaaaaaaaaaaaaaaaaaaaaaaatcattttaggatgaaacagagttattaaggagacattgctgattaaattcactggaagcccatgatagggagtgccattgaggttgatagctctgaatactctgaagaaggctgcactcatacattaatgtattcagcatagtcaggggttacatctcagactgctgacagaatctgccgatttgataactgagcagccatcattgtacactgagaaatcctggargaaggaaaaagtgccaggaactataaaggtgagaacgtgtcctgattttttagagaggaaaaaatcaggaatg

SEQ ID NO: 169589 - DNA, 486 bp, Homo sapiens
acaagccttgcctcccctttgccttccaccatggttgtaaattttctgtggcctctccagccaggtggaactgtgagttaattaaaccttcttcataaattacccagtctcaggtwgcattcttatagcagtgtgagactggacttgtacagctatgaaataaagtgtttaacgtacatgcacacttttaggtggttagtcatataagtacttgggacaagtaagtgttcattaaattttagttcaagattaacatttctagaaacaaatttacctattcattaaatatacaatgcaactttgaatcttattgcattccagccttaatatgataatgaacaccagcccctttgttcctagaaaggggtcctgatccagaccccaagagagggttcttggatctctctcaagaaagaattcagggcaagtctgcaatacaaagtaaaagcaagttgattaagaaagtaaagtggtgaaaggatgact

SEQ ID NO: 169590 - DNA, 486 bp, Homo sapiens
acaagccttgcctcccctttgccttccaccatggttgtaaattttctgtggcctctccagccaggtggaactgtgagttaattaaaccttcttcataaattacccagtctcaggttgyattcttatagcagtgtgagactggacttgtacagctatgaaataaagtgtttaacgtacatgcacacttttaggtggttagtcatataagtacttgggacaagtaagtgttcattaaattttagttcaagattaacatttctagaaacaaatttacctattcattaaatatacaatgcaactttgaatcttattgcattccagccttaatatgataatgaacaccagcccctttgttcctagaaaggggtcctgatccagaccccaagagagggttcttggatctctctcaagaaagaattcagggcaagtctgcaatacaaagtaaaagcaagttgattaagaaagtaaagtggtgaaaggatgact

SEQ ID NO: 169591 - DNA, 583 bp, Homo sapiens
atattttgtgccagacttcaccctagatgacaggttatggctgggagcaaagtagagaggaaggtctttcttctcacagagcttatgttagtgtaggcaagacaggcagtaaataagtaataaataaccatactgcaattctgactcaggccaacttcaaccagcttcctcagcttttattttgtggtagttgcaaaatacctgcaattgtcctggggaatttattttagacatcgatttcagttcactcagtgattttatatatccttttctttgaatagccatgtctctggagaaggcctgcattgcccatatcttccttctaataaataattaaaagcactcagcataggacaatgatcaggctgcttttcctgggcctggcctcctgccctccacagaacacatgagcttcttttgacaaacgtcattggtccccaaagcatgtttattcctggtagcaagtttaatgatctgaaaattgcagatcatgtccscttgtaatgttaagcatttatagaaagtacctcctacatcctgcaattaaagcaccttctgtaaaataattagtcacaaagataga

SEQ ID NO: 169592 - DNA, 366 bp, Homo sapiens
gtgtctggtgagcgacagcgcctggtggaaacccacgccacccgcgtcatcgcccttatcaacgaccagcgccgggctgccttggagggcttcctggcagccctgcaggcagatccgcctcaggtgcggggaccgtgggggcagagagcagagggtgagaagggtcagggcgggcttgggcatcctgtgtcccttccacaggcggagcgtgtcctgttggccctgcggcgctacctgcgtgcggagcagaaggaacagaggcacacgytgcgccactaccagcatgtggccgccgtggatcccgagaaggcacagcagatgcgcttccaggtgctcacatcctttcagctcccaaatgcgccgcta

SEQ ID NO: 169593 - DNA, 490 bp, Homo sapiens
taaaactatcacgtggctcattacagttgaccctcgaatgatgtgcaggttaggagtgccaacctcccacacagttgtgtaacttttaattccccaacatcttaactactaatggcctactgcagactggaagacttactgataacataaagagtcaattgacacacattttttatgatatgtatatataccatayatatatcattacatatattgtatatatatcattttgtatgatataatcatatctttctccagcttaccataaagtaagctagagaaaaataaaaattattatgaatatcataaggaaactatatttactattcattaaatggacgtggatcatatatattatacatatatatcattttattatatatatatttttctccagattaccataaagcaagctagagaaaaataatggttattaagaagatcataaggaagagaaaatatatttactattcattaaatggaagtggat

SEQ ID NO: 169594 - DNA, 348 bp, Homo sapiens
tgttatattttactaatggtgatattaaccttgatcagctggttaaattggtrtcttctgaatttctccactataaagttactgtttgtttttgttttgttttgttgttattttttaagttggtaactatcatggagagatactttgggatgatgaaaattctatttctattcaaactttcacccaagaattttactacccattggtagagttttctacaacatttgttagagatgtttacctaatgctgattatcttcccttctttccttttttctgcatttttaataagaattctattgtgaagaaaagctgagtaggacaataatgttatcttataaaataataa

SEQ ID NO: 169595 - DNA, 450 bp, Homo sapiens
aataaatttagtaagttaaataagaattagtaataaatgaataaagttattttcctccttccagtcttgctttttttctaatttattgtttctaatgtctgctgaaatgatctctcaaacttatactacattttctttcaaaaatttcatttctttttcaagaccttcaaggtgaagtcacrgcatccaaccaactaggatcatcatgatctgtcccttgaatcaatttttttatctttgttcagttcttcaaacattatgctccagctataatgaaatattttcatttttaggagtgttttcagaaattaacgctttcttctcactctggtactttacaaatgctcctacttctaacttagtcatactgctaccatatgccaaaatttgtctggatataacttcatcctttaggtcttggcctaggtgttacctcctccaagaaagctt

SEQ ID NO: 169596 - DNA, 581 bp, Homo sapiens
agtcctagatcattttttatatggctctgtattgctcatacagttgagtttggtgcttttgtatattttatgtcattgattagtggccttttgtttcagcttaaataattccttttagcaagtcctgtaaagtaggcytagtggaaatgaactcccttagcttttgtttgtcacttacatgtgaaatcaaaaacaaactcatagatgcagagagtagaagagtggcaaccagaggttggagattgcagggaatggggacatgttggtcaacaggtaaaaaaaatctcagacagaagaaatatatatattttttctgagatctattgcacagtatagtgaatatagtcaataacactgtattgtacatttcaaaatttctaagagtaaatttcagtgttctcaccacaaaaagtgataaatatttgaggtgctagatatgttaattagcttgatttaattatctcacattgtagtcataaatcataacatcacttgtactgcataaacatatacaatgataatttatcaatttataatcaaattcttttaaaagtacatttattttcaggattataaatatt

SEQ ID NO: 169597 - DNA, 505 bp, Homo sapiens
aaatttgcctaatgcctgtgcttttagatagccacttgaaaccattaccatgctttttctttttttttctgtttgtaccaagagagaaatttcctaaatgagacactgatgttgcaaactctatttgatcatattccagcagtaaattctgtagcaagcttcatatgactttttcttataatgtccttctatgcaatcaaagcaaagtaagccacttgtcacacagctcagattggatgagagggaacttgaatccagctctcctaagtacaaatcctttaccactaccttctcatgtaagagcattcctacatatgtgacttcaaacgtcctgatggagtctcaatttgctmtgcacaataatcttttagacatgctaattattttcctaggaacctaactacagggagaagaggcaacataaatcacacacttttttaaaggacatattaaaaagcttgaaacggaaatttctccccagggctcctttcaccaatttgagaaa

SEQ ID NO: 169598 - DNA, 579 bp, Homo sapiens
ttttaaaccttttatatcatatttttactgtatcttttctatgcttagatatatttagatgcacaaatacttactattgtgttayaactgcctaaactatttggtacagtaacatgctatacagatttttaaccaggagccataggctatgtgataccacatagcctaggtgtgtagctggctataccatctgtgtttgtgtcagtacactttatgatgtttgcacaacagtgaaatggcccaatgcagcatttctcagaatgtattcccatcattaagtaatgcatgactgtattttcatacatgcacatatttatagacactggcatcaaacagtacatcatcacaacaattattattatttcagttttacaggtcctctcaccaacgtgtcactttaagcaatttgtcaaagtcacatagtttagaataagtggcagatctagaatctggaccccaatattttcgctataaagccgtgatcttctgctttaccatgctgcctcttattacacaactgatttgagtatttagtgcagtaatatacaaaatatctagtatgaggtccagcatatgata

SEQ ID NO: 169599 - DNA, 579 bp, Homo sapiens
ttttaaaccttttatatcatatttttactgtatcttttctatgcttagatatatttagatgcacaaatacttactattgtgttacaactgcctaaactatttggtacagtaacatgctatacagatttttaaccaggagccataggctatgtgataccacatagcctaggtgtgtagctggctataccatctktgtttgtgtcagtacactttatgatgtttgcacaacagtgaaatggcccaatgcagcatttctcagaatgtattcccatcattaagtaatgcatgactgtattttcatacatgcacatatttatagacactggcatcaaacagtacatcatcacaacaattattattatttcagttttacaggtcctctcaccaacgtgtcactttaagcaatttgtcaaagtcacatagtttagaataagtggcagatctagaatctggaccccaatattttcgctataaagccgtgatcttctgctttaccatgctgcctcttattacacaactgatttgagtatttagtgcagtaatatacaaaatatctagtatgaggtccagcatatgata

SEQ ID NO: 169600 - DNA, 545 bp, Homo sapiens
ccaaaaactcaatacattgatgatgcaagtttatgcatagaggatgatttattcaagacacaaggcaactacrtcatcaacataaaaaaattgtaaaaatgtataactagcagaaggaactgaagatatttaatctatccccttttggaggtctttcatgagtcatgaaacagagcttattattttcctacccaaactcacctgtcctcttatgttctatacttcagtaaatgattcctgtggctccaaccaaaaatgttgatgccatactcgattcccacctctctgttgccatctttctaaacagttttcatgagctcagacctccctcagatttatttacttttctttattcttgccatcatgctccttgtcttggccttcattttttcccacatgtactactgcagcagaatgtgtattgaacattaccccttccagtccatttgacatcctataactaataggatcttaattttaaaataagcacatcttatcaattcaatttccttctttgaaatcttcagtgattcctctgtccctgt

SEQ ID NO: 169601 - DNA, 545 bp, Homo sapiens
ccaaaaactcaatacattgatgatgcaagtttatgcatagaggatgatttattcaagacacaaggcaactacatcatcaacataaaaaaattgtaaaaatgtataactagcagaaggaactgaagatatttaatctatccccttttggaggtctttcatgagtcatgaaacagagcttattattttcctacccaaactcacctgtcctcttatgttctatacttcagtaaatgattcctgtggctccaaccaaaaatgttgatgccatactcgattcccacctctctsttgccatctttctaaacagttttcatgagctcagacctccctcagatttatttacttttctttattcttgccatcatgctccttgtcttggccttcattttttcccacatgtactactgcagcagaatgtgtattgaacattaccccttccagtccatttgacatcctataactaataggatcttaattttaaaataagcacatcttatcaattcaatttccttctttgaaatcttcagtgattcctctgtccctgt

SEQ ID NO: 169602 - DNA, 545 bp, Homo sapiens
ccaaaaactcaatacattgatgatgcaagtttatgcatagaggatgatttattcaagacacaaggcaactacatcatcaacataaaaaaattgtaaaaatgtataactagcagaaggaactgaagatatttaatctatccccttttggaggtctttcatgagtcatgaaacagagcttattattttcctacccaaactcacctgtcctcttatgttctatacttcagtaaatgattcctgtggctccaaccaaaaatgttgatgccatactcgattcccacctctctgttgccatctttctaaacagttttcatgagctcagacctccctcagatttatttacttttctttattcttgccaycatgctccttgtcttggccttcattttttcccacatgtactactgcagcagaatgtgtattgaacattaccccttccagtccatttgacatcctataactaataggatcttaattttaaaataagcacatcttatcaattcaatttccttctttgaaatcttcagtgattcctctgtccctgt

SEQ ID NO: 169603 - DNA, 371 bp, Homo sapiens
acatcctataactaataggatcttaattttaaaataagcacatcttatcaattcaatttccttctttgaaatcttcartgattcctctgtccctgtaataatgtcaaattttctaatatgttacatggtctacccttttcctacatctcaaaccatctgaaacttctttctttaccttacttacttctcccttaaaacacaacgtgagcttctcccttaaaacataacatgagcacacaatgagcttccttcacttcttcaacagtgccaaagttttctttcctcatctgaatctttaaacttccctctgtctagggaagttttctcctcatctttctttacctaggtaatggctactcaacctcagatag

SEQ ID NO: 169604 - DNA, 646 bp, Homo sapiens
tgaaaaaatcaaatcagaagagaaatgattcataaataaaaacaagtcagtgtaaaggggttaaatagggaacaattttagataaggtagtaagagaagaaaactttaaggtattatttgagcaaaaagactttaaagggaaaaatgagccaagtggatactaaggaacagagcctttcaggcagaaagaattaggcagagtttttgaggttcaagggaatgataaggaggctagtgtagctggagaacattgagcagagggaagagtggtagtagtcaggtttagatcacayaataatttgtaggccaaaatagacttgagttttattctgagtgtacccaaaatgattgaagggttttaagaatacctgtacagaacctaacatttatttcttaactattaatcataacaaaggatattgaaaaactattctgagacttttaagatgattcacctggaggaatgaagtttagagacattaaagatgtaaagtcacagactgttttacagatacagaatttaatcccaggtaggctgattactttgctaaaaattatgctgaaaatatatggccagcagagatgagaagccatgacttttgactccctgcctggtttacttttataaggatgaagaaatacatgt

SEQ ID NO: 169605 - DNA, 646 bp, Homo sapiens
tgaaaaaatcaaatcagaagagaaatgattcataaataaaaacaagtcagtgtaaaggggttaaatagggaacaattttagataaggtagtaagagaagaaaactttaaggtattatttgagcaaaaagactttaaagggaaaaatgagccaagtggatactaaggaacagagcctttcaggcagaaagaattaggcagagtttttgaggttcaagggaatgataaggaggctagtgtagctggagaacattgagcagagggaagagtggtagtagtcaggtttagatcacacaataatttgtaggccaaaatagacttgagttttattctgagtgtacmcaaaatgattgaagggttttaagaatacctgtacagaacctaacatttatttcttaactattaatcataacaaaggatattgaaaaactattctgagacttttaagatgattcacctggaggaatgaagtttagagacattaaagatgtaaagtcacagactgttttacagatacagaatttaatcccaggtaggctgattactttgctaaaaattatgctgaaaatatatggccagcagagatgagaagccatgacttttgactccctgcctggtttacttttataaggatgaagaaatacatgt

SEQ ID NO: 169606 - DNA, 539 bp, Homo sapiens
caggttgtagcattctgatgcctgtacatttgttataatttccctgagagtttatttttttaggattagaatgtctctcttgttcagttttgcattctttattagtacctggcacagtgcctctatcaggcaacagtgagaattaaaaaataaaataaaataaaagtaacattttaaagcacaattgtttggtttcagagagactttagtttcatcctcaactttattccactaagcgttygtccaattccttaaaatccctttatcttagttgcctcccagagttagtgtgtgaattagataatgtgcacaaaatagtaatgtggctggcacataataggttttcaataaatattaactcttattatgatgggctattatttgtgaaacataagcaaaatgaaattcttttcattagcattaatagaagtagcaaaatgagaaaaaaaaacaactaatagtttgccctcttattgaatgactcatacagagcaatctttttctctccttttcctcatttttcacaggagaaaaagtca

SEQ ID NO: 169607 - DNA, 487 bp, Homo sapiens
tcatctgtttgcaaacctcttttatgaaatacctgtcatagtscattttattggacgttattcactccacatttttttggcctcaaggtcattccattatcagttcctacttcaccttcagtattggaaatggactgggggagatggaaaggaaaacacacacacaaatatacaacacacacaccagatggacagctcagataataaaggtgatttcaatccattgcaggcggaactcagatctgtccctactacagatgaaaccagcactagtgacacttactgatagatctggaaagacagcttgctagcctgctatcaaaggtgcctgaagccaggagcagctttcaatctgatcactaggtcttacatgagataacaaaaatatgttttatgtgctgtttctttttgttaacccatttgttcacttcctttaaaaaaagagagagagaaatcaaacaacagtaaccacaaaaatactcaaata

SEQ ID NO: 169608 - DNA, 483 bp, Homo sapiens
acaacatattaaaaactaaagaaagctgcgtttatggaatatagcccatgtgtacacactgtgcacagcactttgcagacctctgtcattctgtcttggcaacaagcctataagcaagtatttattatgccccttttcgtaaacaaggacactgtcaattgtacacttaagyaatagttacatggtagaggtgggattgaaacctaggtgtgcctgatgctttccagcatactgtgctgtctcttccttcctacatttttaaactggtaaccttgtggggattaatgagctccttgactttataacctgctaggtgaagcagcacattcatttaactaccctcaatccactgctttggtgtgatatttagaattctctctttgaagcaaaaagggagtatttatttcatctatttacttcatgcatttattaatttcaacctgcaaatatctgtagtaccttgatttgaacttcaaagaaaca

SEQ ID NO: 169609 - DNA, 610 bp, Homo sapiens
gtttcatatgccatatataaaatagctcatttgtggtagagcccgtctcacttgactgcatttcttttccgggtgaaaggtgctgatgagagtaaggtatgaaacaaaaggtatggcccaaacttgacactcatacaacctaaataagaagcaactcatagaataaaaaatcatataattataccaatatcaatgggaattaatgctaggcttggcactacagaaagagactgtgtgaaaagaaaggaagctgatgctttaagtgatcaatttatactgtttttgattccatgtactaaacattaaactgtagtattatttctaagtaataagtgcataccaccaaattgagataattttgtctaaatcattcactgtggacaaattggtcactgagaggagcaacaaaaataccygggactgtgaggtggaaaatataatcaccaatcccagtttacaaaagaggacatcagggaacaaagaaaatggacttgcccaataccatgaaattcctaagagaagtatgttaatagtgtcaaacctccccaaaaaatgggatttggaattagttttccatactatgatcaatatagaaatctgagataagctt

SEQ ID NO: 169610 - DNA, 582 bp, Homo sapiens
caatgggcagaacttcaggcagtgcacctgttttgaatttgcttggaaggagaaatggccagatgtgtgattatatatcaattcatgggctgtagccaatgatttggctggctattctgggacttggaaggaacatgattggaaaattggtgacaaagaaatttggggaggaagtatgtggactgacctctcagaatgaaaaataataatatttgagtcccatgtgaatacttatcaaagggtgacctagctagtggagaattttaataatcaagtggatagtatgacctattatatagataccagtcagtctctttccccaggcactcctatcgtcatccaataggtttatgaacaaagtggccacggaggcagggatggaagttaggcatggtatgagcaacacagacttccactcatcaaggctgaccaggctatgaccactgttgtatacgcaatctgccagcagcagagacccacactgagtccctgatgtggcaccattccccagagtgatcagccagctacctggtggcaagttgattgcatcggactgttyccatcatggaaggggcagtgttt

SEQ ID NO: 169611 - DNA, 474 bp, Homo sapiens
aactaaatgacagggaaaatatattagaaacatttcttttttttttctttttttttttttttcagacattgcaggccatactgaaaagtcactgattttgtatttcagtgtaatatctaaaattgaattttaattcgcatgcattcgttgcagagagacagagagagagagagagagaaagagagagagagagagagaaattgagagatttaagttgattcactgggtcagacagaagtatttgcagctgcaataaagaagctttccccaaactgcattgccagatcttctcagctctgacccacagtcactgtgccaaaagctgccaggaatgccaagtgcatggtgattttgtgacgtagagaaatagggttctgggtgagaatacttaattgtcttgaactacaatatttgsttggtatccgagccaaagtttccagacataaaaaacagtggtaaaaatccacagacaca

SEQ ID NO: 169612 - DNA, 508 bp, Homo sapiens
aatggcatatataatataaaacacatatatttagtgcataatgtgcataatcctcaaataaaattagctacttttagaatattgtttttcttttaataccgttttacacaaaatgggctatcagaacagtagatcacatatttatttaaaaactaaaggagtragttgagagagatacatgaaagaaaagaaagtgccacatgtggtatgccacctttatagagatttaatcttatataaaaagctctaagaattcctgttttaaagaaccttagacatttacttcaaacataaagctactaagattatttttgattgaatcatttttagatgtatttatcaacattctactgaagaaatgttccactgagcaaactattaaatggtaatgttagaatgcatgaaaaattaacgtaaaatcataggtcaaacagaaatgtaacactatagatctagtttggaaacaattaacagctaaagcccaggatatgactaaagagaaaggatc

SEQ ID NO: 169613 - DNA, 594 bp, Homo sapiens
cgctctgtctcccaggctggagtgcagtgtggcgcgatctcggctcactacaacctccgcctcccaggttcaagcgattctcctgcctcagcctcatgagtagctggaactayaggcgccctccaccacgcccggctaatttttgtatttttagtaaagacggggtttcaccatgttggccaggatggtctcgatctcctaacctcgtgatccacccgcctcagcctcccaaagtgctgggattacagacgtgagccacccgccgggcctgatctgggaattttgtagggcttatatttatttgtgtatttgtgattctcctgaggtccgggaaatatgtaggcggaggattacctaggtgcccaggcaagagactgaaggcacaaactgtttcagtataataaacaaaatagttagaataagaatagtcataatacaaattagatgtagagatgatcatggacaattatcaatcattattataaacattattaatcattagcttttaatattactctttgctgcattactaatgtaagctaggaataaccggcaggtatagggtcaggtgctgaagggacatggtgagaagtg

SEQ ID NO: 169614 - DNA, 433 bp, Homo sapiens
tcacttcccaccaagtccctccctagacacatggggattatggagattacaattcgagatgagatttgggtggggacacagagcgaaaccgtatcagtgaagaatctaaagtagtcaaactcasagaagcagagagtagagtggtggctgccagaggttgtggggagggcaagtggggagttgttcagtgggtacagtttcagtcaagcaagataaaaaagttctagaggacaaaaagatggcaacaatagacattggagagtggtagaatggggtggggggcaaaggttgaaaaactacctattggatactatgctcaccacctggatgatgggatcaattgtaccccaaacctcagcatcccacaatatacccatgtaacaaacctgcacatgtaccctgaatctgaaataaagttgaaattttagaaaaa

SEQ ID NO: 169615 - DNA, 433 bp, Homo sapiens
tcacttcccaccaagtccctccctagacacatggggattatggagattacaattcgagatgagatttgggtggggacacagagcgaaaccgtatcagtgaagaatctaaagtagtcaaactcacagaagcagagagtagagtggtggctgccagaggttgtggggagggcaagtggggagttgttcagtgggtacagtttcagtcaagcaagataaaaaagttctagaggacaaaaagatggcaacaatagacattggagagtggtagaatggggwggggggcaaaggttgaaaaactacctattggatactatgctcaccacctggatgatgggatcaattgtaccccaaacctcagcatcccacaatatacccatgtaacaaacctgcacatgtaccctgaatctgaaataaagttgaaattttagaaaaa

SEQ ID NO: 169616 - DNA, 433 bp, Homo sapiens
tcacttcccaccaagtccctccctagacacatggggattatggagattacaattcgagatgagatttgggtggggacacagagcgaaaccgtatcagtgaagaatctaaagtagtcaaactcacagaagcagagagtagagtggtggctgccagaggttgtggggagggcaagtggggagttgttcagtgggtacagtttcagtcaagcaagataaaaaagttctagaggacaaaaagatggcaacaatagacattggagagtggtagaatggggtggggggcaaaggttgaaaaactacctattggatactatgctcaccaccyggatgatgggatcaattgtaccccaaacctcagcatcccacaatatacccatgtaacaaacctgcacatgtaccctgaatctgaaataaagttgaaattttagaaaaa

SEQ ID NO: 169617 - DNA, 433 bp, Homo sapiens
tcacttcccaccaagtccctccctagacacatggggattatggagattacaattcgagatgagatttgggtggggacacagagcgaaaccgtatcagtgaagaatctaaagtagtcaaactcacagaagcagagagtagagtggtggctgccagaggttgtggggagggcaagtggggagttgttcagtgggtacagtttcagtcaagcaagataaaaaagttctagaggacaaaaagatggcaacaatagacattggagagtggtagaatggggtggggggcaaaggttgaaaaactacctattggatactatgctcaccacctgratgatgggatcaattgtaccccaaacctcagcatcccacaatatacccatgtaacaaacctgcacatgtaccctgaatctgaaataaagttgaaattttagaaaaa

SEQ ID NO: 169618 - DNA, 460 bp, Homo sapiens
aagtcatgctaggaaagagaatcacaactatataggactatatgaataaggactcgtattatagcattattcrtaacaaagaaaactataaccttgctggcattagtaagacaatatttgaatattccagggcacatccctcctgtggaaggccatgcagctcttaaaatgagttctctttgtatgtattgacctggaaggatgcccatgttacatgaaataaaaagtgaaggtgcagcatactgtgtagaacatagtcctgtttatatttaaacatatataaatgaagcctatacattttatgattaacaaaaaatatacacactgttaccagtgatttccttgcagggtgagtactgaaggaggagaaagattagtatttttcttgacacatctccattttgctaccagtatacctaaatattacttcataattaggagaaaatccaatacattaatt

SEQ ID NO: 169619 - DNA, 460 bp, Homo sapiens
aagtcatgctaggaaagagaatcacaactatataggactatatgaataaggactcgtattatagcattattcgtaacaaagaaaactataaccttgctggcattagtaagacaatatttgaatattccagggcacrtccctcctgtggaaggccatgcagctcttaaaatgagttctctttgtatgtattgacctggaaggatgcccatgttacatgaaataaaaagtgaaggtgcagcatactgtgtagaacatagtcctgtttatatttaaacatatataaatgaagcctatacattttatgattaacaaaaaatatacacactgttaccagtgatttccttgcagggtgagtactgaaggaggagaaagattagtatttttcttgacacatctccattttgctaccagtatacctaaatattacttcataattaggagaaaatccaatacattaatt

SEQ ID NO: 169620 - DNA, 460 bp, Homo sapiens
aagtcatgctaggaaagagaatcacaactatataggactatatgaataaggactcgtattatagcattattcgtaacaaagaaaactataaccttgctggcattagtaagacaatatttgaatattccagggcacatccctcctgtggaaggccatgcagctcttaaaatgagttctctttgtatgtattgacctggaaggatgcccatgttacatgaaataaaaagtgaaggtgcagcatactgtgtagaacatagtcctgtttatatttaaacatatataaatgaarcctatacattttatgattaacaaaaaatatacacactgttaccagtgatttccttgcagggtgagtactgaaggaggagaaagattagtatttttcttgacacatctccattttgctaccagtatacctaaatattacttcataattaggagaaaatccaatacattaatt

SEQ ID NO: 169621 - DNA, 433 bp, Homo sapiens
cagccaccgcgcccagcccagacatttattttttctaggctctgctttctctgatctaaaataaggtggttgggattttattaatctatcaagtacaaacattttctttcttcccttgagtccacttccaggcagcaacaggacttgattctgcagcagatcctgtcctcatgaaaagkgctggctgagagcccggtggctcatgcctataatcccagcactttgggaggccaaggcaggaggattgcttaagcccaggagttggagtcccagctacttgggaggctgaggcagcgagctgagattgtgccagtgtactctagcttggcgacagagtaagactctgtctgaaaaacaaaacaaaacaagaaaaacgagaaactcttgggagctttatggccttgcccatcaccaagaatccaaaatacttacc

SEQ ID NO: 169622 - DNA, 470 bp, Homo sapiens
aagaattccagctaacaaagaaagaagaaataacagaataaaaccatttcacaaacacctgatgaaattataaaagtatgccagagtttctcaacctcagggctactgacattttaggcctattaatactttgctgtagggggctgtgctgtgctgactcttacccctgaaggtacctatagcattccctcccccaagctgtgacaatcagtgtgtctccagacattgccaaattaccctggtagtgaaatgctgacacaggcaatgatcagtgaccactaacatcactaaacacacacacacacacacacacacacacacacacacaaactacacattatgcctcctgatcaaagcatatgcaatacygagagttcaatctgaatcagatcaaccacctaaatttaactaccagtttttggaaattcagggaacagatgaacatgggcaatgacacctatggggataat

SEQ ID NO: 169623 - DNA, 508 bp, Homo sapiens
attagattcttcttggctgtgacagtttctcagacttatccttgtttttgatcaacttatcagttttgaggagcattggtgaggtattttgtagaatattgctcaattagaatttgcctgatattttcttaagagtagactgggatatgggtttttgagaggaagaccacagagataaaatactgttctcatcacatcacattgagggcacatgctctcaacgtgacttatcactatagatgccatccctgatcacatagctaaggtrgtgtttatcagatttctccaccataaagttacttttttttatcctttccatactctatactttggaaaaaagtcattatacactgtctacatttaaggattggagagttatgctctacctccttgtgggctaagtatttacatagactattttgtattctacacagaattgtccatccttccccatttactcatttattcaatcatttgctaatattttcttaaggattgttacaacata

SEQ ID NO: 169624 - DNA, 575 bp, Homo sapiens
ttgtgggctaagtatttacatagactattttgtattctacacagaattgtccatccttccccatttactcatttattcaatcatttgctaatattttcttaaggattgttacaacatagatgtctgagttttctggtaatgtctttgtctggttttggtattaggataatgttggctttcttggtatatttgtgctgctataacaaaataccttagactgggtgatttataaaggacggaaatttatttctcacagttctggaggttgggagtctaagatcaaggtgccaacaggtttggtgtctggtaagagcctgtttaccacactctgtaagagtctaagtccttgtttccaagatggtgccttattgytccaccctatattggggaggaacactgtgtcttccgtggcaaaagggggaccttcaacctcaaaaccttttataggggtgctaatctgatgtatgagacagagccctcatgacctaatcacctcccaaaggccacacctcttaatactgctacactgaggattaagtttcagcatgaattttggagggaacactgtcattcag

SEQ ID NO: 169625 - DNA, 548 bp, Homo sapiens
ttagttaatctagtcaggaattgagcttggaatggattttattgttatagttaccttaagtatactataggtttcaaattcctctactgggagactaccattgtcctgtgcttaggagccagagagtttctctctctttttttttcctttcctctgagttttcaaccactccagcataccaataccacaggatatccctctgtgctcttgacctttcccaaacagtagaaagttcatggttgaggcagctaggattctccattgttctggtccagcctcagtcttaggtaggccctctggctcttcttcctgtggcagtcaaaatctgccttgtatttgtattggtcttargtagaagtttcctactcttcccctagtagtaaaagacctctccttggtatcagtgtagaatcctgaggcctaaaatgatttctgcgcctctttcagaagtaaagggttttctcttctaccctttccccggcatcaatgagtctctgcctgcatcctggggacaggagggttcctcctctaagcagcacaggggtttg

SEQ ID NO: 169626 - DNA, 548 bp, Homo sapiens
ttagttaatctagtcaggaattgagcttggaatggattttattgttatagttaccttaagtatactataggtttcaaattcctctactgggagactaccattgtcctgtgcttaggagccagagagtttctctctctttttttttcctttcctctgagttttcaaccactccagcataccaataccacaggatatccctctgtgctcttgacctttcccaaacagtagaaagttcatggttgaggcagctaggattctccattgttctggtccagcctcagtcttaggtaggccctctggctcttcttcctgtggcagtcaaaatctgccttgtatttgtattggtcttaggyagaagtttcctactcttcccctagtagtaaaagacctctccttggtatcagtgtagaatcctgaggcctaaaatgatttctgcgcctctttcagaagtaaagggttttctcttctaccctttccccggcatcaatgagtctctgcctgcatcctggggacaggagggttcctcctctaagcagcacaggggtttg

SEQ ID NO: 169627 - DNA, 619 bp, Homo sapiens
gaatcaaaaacacccacaggagaaatcagtgacttagtgactgtatgttgggcaaatacaagtaaagtccaagacttagttaaaaggctttgaaacattaagggatttccccggagatattatgtttctttgcagaaaagatccagacagactggcagaaggactattcccttgggtcaaaggtaggcctggcagcaattccacaggaaaagggggctgaacactataactggaactcacaattatctgattttttagaaagacatagtaaggaaaattccaatcatctataaaagtagacagactagtatagtatacccacaattcaacagctatcaccttgtggccaatttatttcatccatcctcctttttcccaaagtatttctaaagcatatcccagatatcatattattttatctgtaaatattttaatacatatctatgaaacatcaagttagcattcartcttctaaatgtgtcataaatgtcacatttttaaaaatcttattttgtttaaaccaggatctaaataagatacatccattattattggtttacatgtcttaaagtctatagatccctacactatcttttttttgtttattccttgcagtgaa

SEQ ID NO: 169628 - DNA, 545 bp, Homo sapiens
gtgctgttctcgtggtagtgaataagtctcatgagatctaatggttttataagggatttcgcttttcacttgactctctctcaattctctcttgcctgcaccatgtaagacgtgcctttcaccttccgccatgattgtgaagccttcccagccgtgtggatctgtgagtccattaaacctctttttctttataaattatccagtcttgggtatgtctttatcagcagtgtgaaaacaaaccaatacagaggaattgaagagaaggaaattgagagcacagacmgtggatacaggagaggtggtacttgtgaatgtccagtgggagacttactgggcaaggatggcacacactggttactcgaggcaagaatgaagaaagtgatttttggcctcagtgtgcagaggaggccaggaagtgttcttcaaaatctaagtatttcagagcttttgattttttctctgcaggacttgatccacgaaagctgaataaggtgatgtgagatctctaatcccctcaaagaaaatacagtgagagaaatgagtta

SEQ ID NO: 169629 - DNA, 595 bp, Homo sapiens
tcaaatttacgtactcaccctcacctcatctgtctctccattttttgagatacacaaacatgagaaacctatatgataaacatgaccacacaaaatatctgattagagcagycatagaaaagtaagtataataaaatattgtttagggagttgagcctcttggaatctaccactatcacattttagcaactttcccatgacttccagggcataggccttggaatgggcagagtgagaaagtattaaaagatagtgataaactaatctaaagggtaccatttaagacattagatatttaaaggtgctgtccacctgtggcactgtatcagtataatatggataataacaaatacagatgaggggtatttagagtcttcagaatcactttggtttccaccacagacaggacactaaaattgtcaacatgcttcacaaacagttaccaactgccacattcaagatggatggcttattttactttcatggcaaattatgccatttcatcacattatgttacaatagaatatcctgaaccacctcctcagtgtgaaaaattgaacatctgctcatatcagacactgtttaatgatgtgtg

SEQ ID NO: 169630 - DNA, 577 bp, Homo sapiens
ttgagggcatgaagctaaccttgcttattttatgagtgaagacatagaggttcagagaagctgggctcggcttgaggccctctggctgagaagtggtgaagcaactactggcccccaggccttgggctctrgtgccagagctcagacaactttccttctcctgctcttccacatctcacctttgagaacccaattctggatgatcacttgtgctgaacaggctgatgcctggagcttccgttttctctaaaaatggtaagggaataagtgatggagagttaaagtctctaggaactcctgtatcattctggggcttaggagtgtgcctccaaaatctaggcaaaatgtggctcttccctagcctcaggtgcagagctaagatgactttcaaagctgtggatacatacaccctaaggaagaagcttaggctgcatttgcagagattgagatgttttgcacaactggatagaattccacttttgtgagagtggggttttgtttgtgaatgatgctttgtttgctggtgcttttcaacctggagggcctgtcaatactgagattcctggaccccacctcc

SEQ ID NO: 169631 - DNA, 570 bp, Homo sapiens
ggagagggagggagggaaggagagagagagagygcgagagagcgagagagagcgctgtgtgtgtgtggcaaagaagacatgaaaaagccacactctggcattgtgttggtgaaattaatttgtaacacattttgaaggacaagctgatgtttatagcaaaagtcttaaaatgttccagcacatagtaaagagtaaaaaaaactccctgattttcgcaatacccatactcttaaccacttctttctactgcctcagaaaatgattgcaagtaaaaatgtaaagtaactgccctaaagacagttcagtgtttccctccatccccctctctccctgtcttttcccttcaccttctactctcctcctcaccatagcacaatgaccgactttgttccgtttaagaatcctgtttaatgaatgtatggtactctatttaactagggacactgtattttgtactgctgttaccaactcttgcctcttatggaatactttagagacaatcactccactagtcttagttagcagagctccttagagcgaaatttaaaagcagggttgcggggggtggtc

SEQ ID NO: 169632 - DNA, 545 bp, Homo sapiens
caaaaaaacatcaagaaaggcacatcataaaaatcttaaaaagaccagcctgggcaacatggtgaaaccttctttctacaaaatatacaaaaattagctgggtgtggtggtgcatgcatgtagtctcagctactatagaggctgaggtaggaggcttgcttgagcccaggaggtggaggttgcaatgagccaaggtcacgccactgcactccatcctgggcaacagggcaagaccctgtctcaaaacaaaaacaaaaacaaaacaaaaaccttaaaaaggaatcagagaaaaaagatatcacaaataggaacaaagataagaatgacagaaaatttctcattggaaatgatacaaacaagaaggtggtagaacatctttaaagtactgaaagaaagaaaaataaactgccaatctaaaattcttgacccagcaaaaatactttcaaaaatgaatggaaaataaagactttttcaaacttacaaagtctgaaagaattaatcacyagcagacttatactacaggaaatattagtcttgaagatctt

SEQ ID NO: 169633 - DNA, 525 bp, Homo sapiens
tttaagcttttcttcctgcactttagactgaccctgctcattccaacgagtgattcctgcagttcagaagaaacaagagggatgggtaatataaaaatctggatcaatattctaattctgggctcattggaatcaggtagtgaccccatatcagcatggtttcaacaattgccaggttcatggaaagccttctaatttagtttgcttgggataattttgcttatttttctttactgttgtggaacatattgccgttttactctttgtgtargaatacacaaagggttgtgcaggataagcttaccaaatgttttcttaaattaaactcttattaatctttcagatatcactttttgtcagaactcagagttatgaatggccctcaccatactgatgctttctgactgagctcctctctaccctgaatacaagagaccctaatacttaatcagaaatatcatcacccttaatcagaatgaaaaagttacagaagatggatctttgtctctctgcaaccattaagat

SEQ ID NO: 169634 - DNA, 525 bp, Homo sapiens
tttaagcttttcttcctgcactttagactgaccctgctcattccaacgagtgattcctgcagttcagaagaaacaagagggatgggtaatataaaaatctggatcaatattctaattctgggctcattggaatcaggtagtgaccccatatcagcatggtttcaacaattgccaggttcatggaaagccttctaatttagtttgcttgggataattttgcttatttttctttactgttgtggaacatattgccgttttactctttgtgtaggaatacacaaarggttgtgcaggataagcttaccaaatgttttcttaaattaaactcttattaatctttcagatatcactttttgtcagaactcagagttatgaatggccctcaccatactgatgctttctgactgagctcctctctaccctgaatacaagagaccctaatacttaatcagaaatatcatcacccttaatcagaatgaaaaagttacagaagatggatctttgtctctctgcaaccattaagat

SEQ ID NO: 169635 - DNA, 467 bp, Homo sapiens
ttttacttccatcacctggcttccctaagctgtttctatggacctgtttgtgctgttccacaacaatctcccctgtagccattgggtaatccctgtcttgcaattcaattttctgttctcaccatggcctctgtattttaccccagcctgtaagtgtgagaggtgaactgctgggcctggctggacctttacgtgttctcaccttcccttacactgtgttttgaaggtaagatatcctttgtctgcacttgtggtggttccagccaatgaacaaatgtctcacccaccctcgtcattctaaggaaaatgcactcacytaatgaatgtggggtacagctcagcattgaccaggcagactatctcataggccattgtgatccccattcttcccaagcatgagataataatttttagccattgtagatctaagagggaaaagaacagtacttatccgtacacagatgatt

SEQ ID NO: 169636 - DNA, 491 bp, Homo sapiens
accaccagtgcaccatgtcggtttactattgccatggcaacatggcaatctccagccccttttaatggcaatgactctacaacccagaagttaccacccttttcctagaaatttctgcataagccaccccttaatttgcatataattaaacgtgggttgcatataatcaaatttataatttaaattaatttgcatataattaaaaataaatatgagtacagaacagactcctctgagctgctattccaggcacactgcctatggaatatccctgctccacaaggaacagaggtgctgctgctatacattgcagcttcaataaaaatggctatttaacaacaccagcttgcccttgaattctttcctgggcaaagccaagaamcctcccaggctaagccccaattttggtgcttgcctgtcctgcatcaaaagcagaactaaagtcccagtgggttgcagtcatacttacccaactatatgggatcttccaa

SEQ ID NO: 169637 - DNA, 554 bp, Homo sapiens
tattagtatattgttttacaatttttttaaaatgtacaagaaagttcttatttctactatattggtctgcttctttgtattttttctggcccaacccgaatcagtcttttcaaagtttatctacattggttagagatggagccttatagaacatttaattaaaggtagtcacccaagcagttattgtatggaaaagatctgtgtactaaatatgaacgtgtgtattgtgtgggggcttatagtattaacaatatgcattttgtctttttgttctttatgtgtattgtttgtgtacctgtgaatttcagtattcgtgagctatgcattaatgtataccacagttaaataaatgaattagttrcagaaaaaggaagatcaaaattggaaggccttatctatctgattttaagatgtactaaaaagccacagaaataaataaataaataaataaatggactagaataggtaggaattagtcaactttatcattaaagggccagatactaaatatttcaggccttgtgggccacatatgaggtgtctgtcactttttg

SEQ ID NO: 169638 - DNA, 549 bp, Homo sapiens
caggttttctgagtaaaatggaaacaggaggcctcctgaagatacaataagatggttatatttattttcaaacctttaaggaaagctcctgcaagttaggctaagatgtaaattttagtgaggattctattagaagttccaaggcracagtcactttcaaaaatgatagacccactgtgagcaaaagagagaagataatgactctgaccgagctggcattgttgaataagggccccgatttgctgctcaacagttgactctgcaggtttcaattataggaatagctggaatatactgctctacaatattactggcagaatttgcaaagaattgatagagtttaagtgtgtgtctgtgtgtgtgtgtttgtgggtgtgcatgtgcagcacacagacatgcattatgaagagggagttactcaagtaaaaagcacctgccattaccataacaggtatgatctaggccgacccacgatgcttgggtgggtggtgggacattcataatagaacatttaactacaggcatgcttatattccagttatgtagagg

SEQ ID NO: 169639 - DNA, 549 bp, Homo sapiens
caggttttctgagtaaaatggaaacaggaggcctcctgaagatacaataagatggttatatttattttcaaacctttaaggaaagctcctgcaagttaggctaagatgtaaattttagtgaggattctattagaagttccaaggcaacagtcactttcaaaaatgatagacccactgtgagcaaaagagagaagataatgactctgaccgagctggcattgttgaataagggccccgatttgctgctcaacagttgactctgcaggtttcaattataggaatagctggaatatactgctctacaatattactggcagaatttgcaaagaattgatagagtttaagtgtgtgtctgtgtgtgtgtgtttgtgggtgtgcatgtgcagcacacagacatgcattatgaagagggagttactcaagtaaaaagcacctgccattaccataacaggtatgatctaggccgacccacgatgcttgggtgggtggtgggacawtcataatagaacatttaactacaggcatgcttatattccagttatgtagagg

SEQ ID NO: 169640 - DNA, 568 bp, Homo sapiens
ctacaatcaatctgtgaaaatgctttgcaatgtgtggattcatctcaatgagttaaatgtttgttttgattcagcaggttagaaatactctcttcgtagaatctatgaaggaacatttcggagccctttgaggcttatagtgaaaagctgaatatcctgtgataaaaactagaaacaaactgtctgtgaaaatgctttgtgatgtgtggattcatcycacagagttaaacctttgcttttatagagcagtttggaaacaattttttagtacaatctaaggggacattattgagcccattcattcctatagtgaaaaacaaaatatcctgtcataaaaactaaaacaaactatctgtaaaaatgttttgcaatgtgtggattcatctcaaagagttaaacctctgttttgattcagcaggttggaaacactctttttgtagaatctgcaaagcaacatttcagaccccattcaggcctatagtgaaaaatcaaatatcccgcaataaaaactagaagcaagctatccatgaaaatgctttgtgatgtgtggatttatctcactgagtta

SEQ ID NO: 169641 - DNA, 568 bp, Homo sapiens
ctacaatcaatctgtgaaaatgctttgcaatgtgtggattcatctcaatgagttaaatgtttgttttgattcagcaggttagaaatactctcttcgtagaatctatgaaggaacatttcggagccctttgaggcttatagtgaaaagctgaatatcctgtgataaaaactagaaacaaactgtctgtgaaaatgctttgtgatgtgtggattcatctcacagagttaaacctttgyttttatagagcagtttggaaacaattttttagtacaatctaaggggacattattgagcccattcattcctatagtgaaaaacaaaatatcctgtcataaaaactaaaacaaactatctgtaaaaatgttttgcaatgtgtggattcatctcaaagagttaaacctctgttttgattcagcaggttggaaacactctttttgtagaatctgcaaagcaacatttcagaccccattcaggcctatagtgaaaaatcaaatatcccgcaataaaaactagaagcaagctatccatgaaaatgctttgtgatgtgtggatttatctcactgagtta

SEQ ID NO: 169642 - DNA, 568 bp, Homo sapiens
ctacaatcaatctgtgaaaatgctttgcaatgtgtggattcatctcaatgagttaaatgtttgttttgattcagcaggttagaaatactctcttcgtagaatctatgaaggaacatttcggagccctttgaggcttatagtgaaaagctgaatatcctgtgataaaaactagaaacaaactgtctgtgaaaatgctttgtgatgtgtggattcatctcacagagttaaacctttgcttttatagagcagtttggaaacaattttttagtacaatctaaggggacattattgagcccattcattcctatagtgaaaaacaaaatatcctgtcataaaaactaaaacaaactatctgtaaaaatgttttgcaatgtgtggattcatctcaaagagttaaacctctgttttgattcagcaggttggaaacactctttttgtagaatctgcaaagcaacatttcagaccccattsaggcctatagtgaaaaatcaaatatcccgcaataaaaactagaagcaagctatccatgaaaatgctttgtgatgtgtggatttatctcactgagtta

SEQ ID NO: 169643 - DNA, 556 bp, Homo sapiens
gtcaacccaaacacaaagccttctttagctaagggagagtggactcagaaatgcacggtgaggtctcctgatttagcctcttgatgaactcatgactgcatgttcagcaagagaggtggggaggtagatggtttagtgccataaataataaccaaaagtaccattttcactagcaagtctacaagactttggggcaaagtggctctgggttgaagccatactgactaaaagttatttaaaagggaaawtttttttttctactgactcacaacacaggaaaagagcaacaggacaagaaacaaacagaggctgcttcatggtaactgaacatgactcactgagcgcatgtgaaacattccctggatacacctcaacaagctgggagttgaagcacattttaggtattatcaggggaggtatgaaaaaaccaaactcaggttacttaaagagacttatccaccagtgtgaagtatcaaaacatgaaataagcgacctagagaatacactctcggggttaggaggaacatgtcttcatatctagcccagcactcccata

SEQ ID NO: 169644 - DNA, 523 bp, Homo sapiens
gagctgggcccaagcctctctgctgtattcagcctaggatcttgctgtcctgcatcccagccactctagccatggctgaaagaggccaagatatggcttgagcagtggcttcagaggatgcaagccccaagccttggcagctttcatgtgatgttgatcctgaggatgcacataagaactgaggtttagaacctcagctttgatttcagaggatgtatggaaatgcctggatgtccaggcagaagtttgctgcaggggcagagccctcgtggagaacctttgctagggcagtgttgaagggaaatgtagagttgaagtccccacacatagttcccactggggcactgcctagtggagctttggatcaccatccacaaraccccagaatggtagatctactcacagcctgcaccatgtgcctggaaaagcctcactcaatgccagcccatgaaagcagccaggagggaagatgtaccttcaaagccatagggatggagctgcccaagaccatgggaacccatct

SEQ ID NO: 169645 - DNA, 428 bp, Homo sapiens
ctgcttatcctgggactatactcagtaattccataatgtctgctatatctgagtctggttttggtgcttaccttgtttttttcttgccttttgacatgygttgtaattttttgttgaaaactggacatgatttattgaataataggaactgaagtaaataggcctttaatgtgagtttatatgtttatctgcctagcagttaggctgaatttaatgtgtggtacagctataggtgtcagaggcttcaatcaccaccggcgaccttgtttttgtctcccatgttgtctttgggtttccctagaaactcattcttagatacagtttttgtctttcagtgatccaagttgtaattcactgttattacgtaggagacctattggtgtagtgtgatggtattgaggagggaagcattctataatattatgatt

SEQ ID NO: 169646 - DNA, 438 bp, Homo sapiens
acacaaagactttatatgaaacaaggaatgaaacgctttattagtctctaaataaagaattgtaagacagrtgaggagagtgtccattcttaatctgtttgatgataggaagaaaagcaaagactgctatacagaagaaaaatgccatcaacaatgagtgataagttcccaaagacctgtgaaggtcagagtaacagtaagaggggccacagcagcagggatggccactaccaggtgataacagagaatttaagcttccaaacaaaatatataggccactctaaaaaattaaagttgtgtttctttatcctctactatgcatttgaaagtcatctgcttctatttcttgaaagtccacacttttcaacccaggttaagaccttctgtcacttctccatgggcccctgctccctccatacaacaacctccaagccttac

SEQ ID NO: 169647 - DNA, 556 bp, Homo sapiens
tcccttcaaaagatcataccagctcactggtaatggatccaaaccaagacaaaatctctgaattgccagaaaaagaattcagaagtcaattattaagctaatcaggaggtaccagagaaaggtgaaatccaacttaaagaaatcaaaaacacgatacaggatatgaaaggaaaattcttcagtgaaataaatagcataaacaaaaagcaatcacaatttctggaaatcaaggacacacttagagaaatgcaaaatgcactggaatgtctcagcaatagaattaaacaagaggaagaaaagaccttagagcttgaaggcaaggctgttgaattaacccaatccatcatagacaaagaraaaaagaattttaaaaaataaaccaagcttccaaaaagtttaggactatgttaaacatccaaacctaacaataaatggtgttcccaaagaagaagagaaatctaaaagtttggaaaatatatttcagggaataatcaaggaaaacttccctggccttgccggagatctagacatccaaatacaagaagttcaaagaata

SEQ ID NO: 169648 - DNA, 664 bp, Homo sapiens
acatgagaaagaatcagcacaacaactcacaactccaaaagccagtgtgcctccttacctacaaatataaacactagtctcccaaatacagttcttagccagagtaagatgactgaaatgatgggcatagaattcagaatctgtatgccaaaatagctcaatggctcaatgggatcaaaaagaaagttgaaatcgaatgcaaggaatccaataagacaatccaagggytgaaagattaaatagtcatataaagaaagaaccaaattgaacttcagaaactaaaaaatttacttcaataattctacaacacaatcagaagaatcaaaagcagaatagatcaagctgaagaaaaaatctcagagctttaatgccagctctttgaatcaactcagacagacatttaaaaaaaattataaaaatgaacaaaggcttcaagaaatatgagattacataaagagacaaaatttgtaactcactggcattccaaaaagagaaggatagagggtaagtaacttggaaaatatatttgaatatatagcccatgaaagtttccccaaacttggtagggaagaggacatacacattcaaaaaatacagagaacctctgcaagagactatataagataaccatccccaaggtatatagtcaacagattcaccaagg

SEQ ID NO: 169649 - DNA, 664 bp, Homo sapiens
acatgagaaagaatcagcacaacaactcacaactccaaaagccagtgtgcctccttacctacaaatataaacactagtctcccaaatacagttcttagccagagtaagatgactgaaatgatgggcatagaattcagaatctgtatgccaaaatagctcaatggctcaatgggatcaaaaagaaagttgaaatcgaatgcaaggaatccaataagacaatccaagggctgaaagattaaatagtcatataaagaaagaaccaaattgaacttcagaaactaaaaaatttacttcaataattctacaacacaatcagaagaatcaaaagcagaatagatcaagctgaagaaaaaatctcagagctttaatgccagctctttgaatcaactcagacagacatttaaaaaaaattataaaaatgaacaaaggcttcaagaaatatgagattacrtaaagagacaaaatttgtaactcactggcattccaaaaagagaaggatagagggtaagtaacttggaaaatatatttgaatatatagcccatgaaagtttccccaaacttggtagggaagaggacatacacattcaaaaaatacagagaacctctgcaagagactatataagataaccatccccaaggtatatagtcaacagattcaccaagg

SEQ ID NO: 169650 - DNA, 609 bp, Homo sapiens
aaacagaaacaaaaaagagcaggagcctctattcttatatcaaataaaacagattttaaaccaataacaatcaggaaggataaacaatggcagtaaacactgatttaggggtccattcaacaagaagatgtaattatcctaaagatacatgcacccaacataggaccatccagattcataaacaagttcttcttgacttataaaaaaaactgtggatggccacacaataataatgggggattttaacaccaccctcacagcattagacagaccattaaggtagaaaactaacagagaaattctgaacttaaacttgacacttgaccaattcaacktaatagacatttacagagtactccactgaaaaaccacataatatacatttttctcatattctaagattgaccaaattaacaccaagaagatcactcaaaaactacacagcaacatggaaactaaacaacttgcttctgattaactcttgggtaaacaataaaattaagacagaaatcaaaaaattttttgaaataaatgaaaatagtgatacaacataccaatacctttgggatgcagctaaagatgtgtaaaaaggaaaatttatagcactga

SEQ ID NO: 169651 - DNA, 609 bp, Homo sapiens
aaacagaaacaaaaaagagcaggagcctctattcttatatcaaataaaacagattttaaaccaataacaatcaggaaggataaacaatggcagtaaacactgatttaggggtccattcaacaagaagatgtaattatcctaaagatacatgcacccaacataggaccatccagattcataaacaagttcttcttgacttataaaaaaaactgtggatggccacacaataataatgggggattttaacaccaccctcacagcattagacagaccattaaggtagaaaactaacagagaaattctgaacttaaacttgacacttgaccaattcaacgtaatagacatttacagagtactccactgaaaaaccacataatatacatttttctcatattctaagattgaccaaattaacaccaagragatcactcaaaaactacacagcaacatggaaactaaacaacttgcttctgattaactcttgggtaaacaataaaattaagacagaaatcaaaaaattttttgaaataaatgaaaatagtgatacaacataccaatacctttgggatgcagctaaagatgtgtaaaaaggaaaatttatagcactga

SEQ ID NO: 169652 - DNA, 502 bp, Homo sapiens
atttcttaaaaacttctgacaaacatagtttgagtaaaaactaaaaataattaaaaggaaaagctcaagaaaggagctttggaatgaagaaactggaaatgtccacaagactgaaggaattacaattgtagaacaaaatgcaaatattttttaaagagatagattaytgagagggaaagtggtagagaagtgtgaatgtgtgaattgccacaaaatttcagactgagaattcaacacaatccatctaaagtcaagaaattgacttaagtacatatgcaaatttagatttataaccactaaaggcttaaacatgtattataagtcttcctaattgtaaaatgtaaaacaaaaacagaccatttagcaagagaaaaaaaaatagattggattttaaaatctaactgcttgactgtatgacagataaattgaggaaaaaaatgactcaacatatttttaaaaagggataagcaaagtcatatcaaactaatctaaatgaaaataa

SEQ ID NO: 169653 - DNA, 586 bp, Homo sapiens
gacaatgctgaatcttagtttatatagtgtgtagaattagtcttacttttcctaagtttgacagtgcatttgttcctctgtatgcatgagggattgagtccagaacactcacatctgccaaaaccctcaccagcataaacaaaaagcatgccctctgtattcgtgagtttccacatcctgcgaatactgtatgttcgatctgccgttggttgaggaaattccatataagtggacttcacagttcaaacctgtgttgttcaaggatcagtcatattctagcagtgggttggaatggtaagtwtttggagccgtattgttgagacactggcaatagcctggctaacggtttgtgttgtggttatttttattctcttcttgaacttctaattcagtgattgctttaatcactctcacaattacagagaaaatgttaatgaatcttcaaatactcacttataatggaagtattttaccttcctcaatgtccaagggagtaactggacaatgctgaggtcccttcaagttccaatagtctacgattctgcaaaaccttaaaggatgatgtgaagagggttgctatttggtg

SEQ ID NO: 169654 - DNA, 586 bp, Homo sapiens
gacaatgctgaatcttagtttatatagtgtgtagaattagtcttacttttcctaagtttgacagtgcatttgttcctctgtatgcatgagggattgagtccagaacactcacatctgccaaaaccctcaccagcataaacaaaaagcatgccctctgtattcgtgagtttccacatcctgcgaatactgtatgttcgatctgccgttggttgaggaaattccatataagtggacttcacagttcaaacctgtgttgttcaaggatcagtcatattctagcagtgggttggaatggtaagtttttggagccgtattgttgagacactggcaatagcctggctaacggtttgtgttgtggttatttttattctcttcttgaacttcyaattcagtgattgctttaatcactctcacaattacagagaaaatgttaatgaatcttcaaatactcacttataatggaagtattttaccttcctcaatgtccaagggagtaactggacaatgctgaggtcccttcaagttccaatagtctacgattctgcaaaaccttaaaggatgatgtgaagagggttgctatttggtg

SEQ ID NO: 169655 - DNA, 526 bp, Homo sapiens
tatgaagcagagcagagaatctgatccattagtctgattggtacggtattcttaaataagagaagtgggaaattaaatgatcaaaaaattatacgtgttaatattgaccagaacaaaggaagacagagaatcatgaaaagtgtcctccaacaaaggtaatgtgaggtgctgactcacatcaggggatctcatctatagtacaacacaaagcacaattccagagggscatcactcacatatgagtacacaatccacttggccattcatcataaccctggtagcatactaaatacactatgtgccttgtttttcatattcataatatatgttggagactcttccatatcaattctaaagaataatattctttttatggtttcatagcattccttgctttataccacttaaattatttaaatttccaattcaggaggccaggagacttttaatccaattttcccttgttttctatgcaatctaggtcattaatctttctctcctatattttgtttccccactccactgc

SEQ ID NO: 169656 - DNA, 581 bp, Homo sapiens
agaactgacattttaacaatagtgaatcttatgatcaatgaatatgaactatatctctatgtgcttagatatttgatttcagtaatcarcatttggtttatttctgcatatagattctgaatatatttatatttttaagatttctacctaagtactttgggtttggggtgcttttaaaaatagtattattcctattaaactactattgacattcttcacagaactagagaaaactattttaaaattcatatagagccaaaaataaaaagagcccgaatagtcaaggcaatcctaagcaaaaagaacaaacctggaggcatcacactacctgaccacaaactatactacagtaacctaaacaccatgaactagtataaaaacagacacatagaccaatggaacagaatagagaactcagtagtaagaccatgcacttacaactatttgatctttggcaggattccctattcaataaatggtgctgggagaaactggctagccatatgcagaaggttgaaactggatcccttccttacaccatatacaaaaattaacttcagatggattaagtacgtaaatgt

SEQ ID NO: 169657 - DNA, 284 bp, Homo sapiens
cataaaaaagtgtgcaaaggacatgaacagacacttcaaaagatgacatacatgyggccaacaagcatatgaaaaaaagctcaacgtcactgatcattacagaaatacaagttaaaaccacaatgagtcaccatctcatgccagtcagaatggctattatttgaaaggtcagaaaataacggatactgacaaggttatggaggaaaaggaatgcttatacactgttggtgggagtgtaagttagttcagctattgtggaaggcagtgtggcgattcttgaaaga

SEQ ID NO: 169658 - DNA, 284 bp, Homo sapiens
cataaaaaagtgtgcaaaggacatgaacagacacttcaaaagatgacatacatgtggccarcaagcatatgaaaaaaagctcaacgtcactgatcattacagaaatacaagttaaaaccacaatgagtcaccatctcatgccagtcagaatggctattatttgaaaggtcagaaaataacggatactgacaaggttatggaggaaaaggaatgcttatacactgttggtgggagtgtaagttagttcagctattgtggaaggcagtgtggcgattcttgaaaga

SEQ ID NO: 169659 - DNA, 594 bp, Homo sapiens
ttatgttgagaaataaagtttatactttttatctttttattccattttccgtgaacattttgaagtctttttgtactatacatataagatgatcaagtttacaattatatattgaagatcttctcttcttaagagatttttctctgcttcttcaaccactgttgaggaagtgggttaatctctatgattgtgaatttgtctattttcaaattttccccatatatgttaaagttatgtttgcagataaatacagtagacccagtttatccacatgggatatgttccaaaagccccagtgggtgcctgaattggggaaagtatggacccctgtatatactatgttttttccctgtatgtatgattgttttaatttataagttatcacactracagattaacaataacaactaataataaaatagaacattttaacaatatgctgcaataaaaattatgtgactgtggtctctttccctctctctcacaaaatatcttcttacaatgtactcatctttcttcacttggttaacggtgggtaactgaaatcacagaaagcaaaaccacagaaagtgaaactggatgagggggaatgat

SEQ ID NO: 169660 - DNA, 582 bp, Homo sapiens
cactgcactccagcctgggtgacagagcgagacaaaaacaaacaaacgaacaaacagaaacaaaggaaggcattacataatggcaaagtgctcaattcaacaagaggtaactatcctaaatatatatgcaccctacataggagcactgagattaataaagtaagttcttagagacttatgaagagacatagataaccacataatagtaggagacttcaacattccatagacagtattaatattagacaaatcattgaggcagaaaactcacaaagatattcaggaacctgaactcaacttttgaccaaatggatctgtagtacatctacagaacagtacaccccaaaataacagaatatacattcttctcacctgcacatgccacgtgtgctaaaacgaaccacacaatcagacatagagcaatcctcaaaatattcaaaaaacccaaaatcatascaaccacactcttgggaaacagcacaataaaaatcgaaatcactactaaaaaatggcacaaaactacagagttacacagaaattttaagacttgctcctgatggacttttgattaaataatgaaat

SEQ ID NO: 169661 - DNA, 520 bp, Homo sapiens
tccccttcacagctgggttgttttgtccttattttttaatcacaagctgacctgccaaaggcttacatttgtatttatcattcgttattctatgcccagagcttcatatagtgttaaaaaattgtggaataaataaatgaaggagtgaaaggtaaatgggaatatgaaggcaaaaatagacaatgtctcttaggattatagtttaatattcaataataaatttgaaggaaagaaaataaaattttttgtgcctatgtaccaaactcttttttttggtgcttaaaatacattatttaagttaatcttctgaagtcattttgagatagatattacttaaattttaaatagaaaactacatccgaggaacccaggtgaatatgtgaaaagtacacgtaattatgtggaagagccaaggttcattctaatgctcaacttcattaytgactgttttctttacaacatttatcatagtatttacagactacaaagtaacataatggaaaatattgaggaagaaatt

SEQ ID NO: 169662 - DNA, 570 bp, Homo sapiens
aaacagaatttgaaaaatatataattgggtgaacacatatcaagtatttggtgacttgtgaacccatggtttttgtaatattgtctggaatcattgagcagctcttacatgtttaatctttcaaagaccaagttattcaatattcatctaaattcaagtatttggcacagtgttttcggtactgggattatatttgtgaacaagaaacaaatgtgctcttctctcataatgctggtaatacagtacagtacagatattagatgattaaacaactacatacttttactgttaaatagttgaaaatggaaaaacataaaataacactaagtgtgtgggttttagagacaacagcattgattcaaggcccctcttaacaacttttaataacaatagaatttgctatctttaaaaacttaatttcatatttccaaatgtacaaaagttcctacttactgcaactattttgaagattgattaagctaatttatattarctccttagcatataataaatgttaaaagtactagctcattttgagggggacaaaattcttattttaaagagagaaaa

SEQ ID NO: 169663 - DNA, 537 bp, Homo sapiens
ttttctagatttatttttgtaactgatctcttaacttaggaatcatagtcagagaatatattcaatccggttttaatcccttgaaattttatgggatcagtttggggtaaaaaaatagggtcatttcaaagaatttcastagcaccttaaaagaccatgtattctgtagttattggatgctttactctatatacttcaaataggttaattttgcaaatcttattattcaattttacatatctctactatatttttgtttgttttctaagttaaaaagaaaaattcgtgcttttaaaaaatttcccatcaggactatggattatgtttctttttaattctcgcagtgtttgcttcatgtatcttgagtctacgcttttccatgcatacttacaatggtcatatcttcctgttcttttttaactttttattattgcgtctttacttccagtaatgctttttacttcatagcatacttgtctgatattaataaaaacaacagctttaagatatgcattgtagagccatcttcaaatttta

SEQ ID NO: 169664 - DNA, 597 bp, Homo sapiens
aattaattatatgacaatattatagttgaacttttcaaagaaacaacttttattttacttattttcttctattttttaactcttttctatttcattgatttttttactctaatctttattatttcctttcttctgtgtgcctagggcataatttgctcttacttctcaagtttcttgaggcaaaagtttatattattgatttggaatctttattatgggccgggctcagtggtggctcaagcctttaatcccagcactttgggaggctgaggtaggtgatcacctggggtgaggagtttgagaccagcctggccaacatggtgaaaccctgtctctaccaaaaatacaaaaattagcctggcgtggtggcatgcatctgcagtcccagctactygggaggctgaggcaggagaatcgcttgaatctgggaggcagaggttgcagtgagctgagaccacaccactgcactccagtctgggcaacaagagtgaaataccatctcaaaaaaaaatctttattatgttctaatataagcatttgaagcttcatatttctccctaagaactgctttagcttcatcccatattttttgagatt

SEQ ID NO: 169665 - DNA, 596 bp, Homo sapiens
tagcttcatcccatattttttgagattttgtatcatcatttttgtttagttcaaaataatctctaaatttccttgtaatttcttcttgatccacttgttatttagaaatgatatttattgctttctatcagattggtgagtaaacaaataaatgttatttaaatatagaaacatttgagaagtttccaaaattccttctgttgttcagtttcaacttaattctgtttgaattggacaatatacttcagatggtttcaattattattaatttatttagacttgttggatcctgtttttattttaaatcaaatctgacagcctctgtgttttgattccacttgcatttaatgaacatattgatatggtaggacttaaatttgytatttaactatttcttttctatatgtcatctttcttcgttcttttattcctattcccttcttttgagctgaatatatattttccagtgtactatgtacattcatttccacaatatatttagcttcattttagagattgttgtaatgtttacaatatgcatcttaaaacaatctacctcaaattaataacttaattcatgttatatatagaagctt

SEQ ID NO: 169666 - DNA, 574 bp, Homo sapiens
gccaaaacttttcaaagtagttattgaagaccaaaactatttcctgtggaacaaacaaagcattaaattaaattaagttccttttttaatgccatattggaaactttggcaaaaatataaaggatcaaatttaagacagtacaaatgttacttaaaaggtaagagcaagcacctctaaacagtaaaatttgtttcctgaatatgaatttagaccatgttagatacgagtgagaatagtctgtgagagatttgcactcttactagatcagatrttttgcacatgctgttgtagtgggcgtctagtccaagaaactcgctgaaggacgcgttaaaatttttcatgagaattgtagcctatctcccttaagtacatgtaagactgagaataagaagttttcacaagggtgtgctgagggagcacagagttgaggagtgaagatacaggggagcattgacttgagattaagtatttctttctttagttaaaaaatttgcatgctaactcttaaaatttgtttgaatacaagtgagattacttggttctccctgcaatttctagtaactctctttagaa

SEQ ID NO: 169667 - DNA, 499 bp, Homo sapiens
tgttttctttttttttttttttgtaggggctgrtaatgttttctgtggtggttgttgttgtttttcttccatatttagtacctccttcaggaactcttgcaaggcttccttcaggaactttgaagtacttccttcaggaacttagggttaaggtacgtgttaatagtcaacagtaccatgtatttatatgtattcatttgaaagttgaatgtatcattcttgagtgcagaaattattgctcaaataggtttttgatgtgttggagatactggggtaacaattcagaagaagtctttataattatggtacatatataaaatgtttataatttcttgagtatagtgtattatctcagaataattcagaatgtttctaatttaacaaaataatttgaaatatttatcattgtttcctttcatttcagtttgcttttttctgtaacctgtctattcatcatcatcataagtaatataaacataaaacagataaccacaaatgt

SEQ ID NO: 169668 - DNA, 597 bp, Homo sapiens
cctgggctgcaggcagagctgcccgccagtcccacgccctacgcctgcactcctcagcccttgggcggtcaatgggacagggcaccgcggagcagggggcagcactcactggggaggctctggccatgaaggagcccacagtggtggagggggaggctgaggcatggcaggctgcaggtcctgagccctgcaccatggggaggcagctgacgcctggtgagaattccagtgcagtgccagcgggccggcactgccggaggacccggtgcaccctccgcagctgctgaccctggtgctaagcccctcactgcctgggaccactggcgccagccggctgctccaggtgcggggcscaccaagcccacgcccacctggaactcgcgccagccctcaagcgccacatgcagccctggttcccacccgcacctctccctccacacctccccgcaagctgagggagctggctccggcctcggccagcccagaaaggggctcccacagtgcagcggcaggctgaagggctcctcaagcgtggccagagtgggtgcctaggctgaggaggccccgagagctagtgagggctgccagcacgctgtc

SEQ ID NO: 169669 - DNA, 510 bp, Homo sapiens
ctctcatgggctaacattgaatgcttgccacttttctaggtgcacggtgcaaactgttggtgtatcattctggggtctggaaggtggtggccctcttctcacagctccactagacaatgcaccagtggggactctgtgtgggggctcttaacccacatattgtctctgcagtgccctagtagaggttctccatgagggctctgcctctgcaggagtcttctacctggacatccaggattttccrtacatcttctgaaatctaggcagagggtcccaagcctcaacaattgcactctgcatagccacatggaagctaccaaggcttatgacttgcaccttctgaagcaggagtttgagtacctggacccctttaagggacagctggagagctggaacagccaagatccaagaagcagtgtcctgaggctgcacagggcagggggggccctgggtctggcccatgaaaccattgttccctcctatgtctccaggcctaggatgggaggggcc

SEQ ID NO: 169670 - DNA, 573 bp, Homo sapiens
tagtgaaaaaatgaaaagccttatttttccttaacctcttgagttcaaactataatcttactctatttataaatacggaaaacttttaccaataattttcatggaggattttatgaaataaccaaaakctattaaaaatgcttatgctgaaaaatataaaatattcagttttctattaaaaaatttaactatcttatgataaaactttcctaagtacttaagtaattggtaaatcagataatatcatttgtaaaatcattttaaaaactttgatagtaaatagtgcagttctatctcaactaaataactacacacttgtgattataacctcaagtgtaatcagaaaataatttaaaatgccaattacttcaaatgttacaatgtactcaaaatgtcaaaagtgctaaattatttcttaacagaaattatgggattgatttgttataatatttcaatctagaatttcttggcaataaatgtatttacccctaagaaatatattatactatctaaaaatttggatgtttccctgcccaaatgatttctttggttttgttttcttaatcagatggc

SEQ ID NO: 169671 - DNA, 530 bp, Homo sapiens
agccctttgtgaaccaccagcagatatctgctacaccattaatgatctagagtctggatgttgagtcttttggaatgaacaccagaaaaagactgcccttggaaccccttggaagtacaacttcggtgccttgattcttggattcatgtctcaacttaagagagccattccagactcctgggattgtacagtcattggagacctcatggtcaaactggccagggaggtttcttcagagaagcagatgacatcctaggtgtagacaaccttcccaagatcacaggtgaagttacctgcmtgaaacttttgtcctcctgacttttttctctgtgtttcttttctttctatacatgacaagataatgcagtaattaagatgtcatatttgatagcatcctcaggtgttgcgggaagtcagggaccctgaatggagggaccagctgaagccatggcagaagaacataaattgtgaagatttcatgaacatttattagttccccaaaattaatacttttataatttcttatgcct

SEQ ID NO: 169672 - DNA, 425 bp, Homo sapiens
cttcttttttctttgggagctgtatatcccatgaggttccctgaccagctgctcctccttgagccattgtgtttttgtttgtgtggtgtaggtttttttttttttttttaagagggagttgccrccctgccccgacctgcccccgttcaagcgattctcctgcctcagccccctaagtagctgggattacagatgtccaccaccacggccagctaatttttgaatttttagtagagacatggttttgccatcttggccaggctggtcttgaactcctgacttcaggtgatctgcccacctcggcctcccaaagtgctgggattacaagtgtgagccaccgcacctggcctgttgggttttttagaaacaggatttcactctgtcaccgaggctgggtgcagtggtgtgatcatagctcactgcca

SEQ ID NO: 169673 - DNA, 425 bp, Homo sapiens
cttcttttttctttgggagctgtatatcccatgaggttccctgaccagctgctcctccttgagccattgtgtttttgtttgtgtggtgtaggtttttttttttttttttaagagggagttgccgccctgccccgacctgcccccgttcaagcgattctcctgcctcagccccctaagtagctgggattacagatgtccaccaccacggccrgctaatttttgaatttttagtagagacatggttttgccatcttggccaggctggtcttgaactcctgacttcaggtgatctgcccacctcggcctcccaaagtgctgggattacaagtgtgagccaccgcacctggcctgttgggttttttagaaacaggatttcactctgtcaccgaggctgggtgcagtggtgtgatcatagctcactgcca

SEQ ID NO: 169674 - DNA, 405 bp, Homo sapiens
gaattcgagacctgcctggccaacgtggtgaaaccttgcctctactaaaaatacaaaaattagctggacatggtggctcacgcctgtaatcccaactactcaggaggctgaggcaggakaattgcttgaacccgggaagtagaggttgcagtgagctgagatcgtgccactgcactccagcctagccgacagagtgagactcatctcaaaagaaaaaaaagactgtgatggtgaattttatgtgtcagcttggctaggccacagtccccagatatgtggtcaaacatgtctgggtatcaatgggaaagtgtttttcagttgagattagcatttaaatctgtagactttaaaatcctacataatgtcagcggggctcatccaatcagttgaaggcatttaagagaa

SEQ ID NO: 169675 - DNA, 574 bp, Homo sapiens
ttctttctgtagatctgagtttccatttgataccatctccttatagcttgaaaagtattctttacgctgttttttacagttcaggttcattgctgataaagtctctcagcctttwtctgaaaatgtcctaatttcaccctcatattttaaaggacattttgtgttggtgatagaattcagagttgacaggtgtttttttttgaattggagtctcacctatcacccaggctggagtggagtggcgcgatctcggctcactgcaacctctgcctcccaggttcaagtgattttcctgcctgagcctccggagtggctggaattacaggtgcccaccactgtgcccgggctatttttgtatttttagtagaggcggggtctcaccatgttggccaggctggtctcgaagtcctgggctcgagtgatctgcccgcctcaaccacccaaagtgctgggaatacaggcatgagccaccgcacctggccagttatttttgtctgtctttcagcactgtaaatattgttctgttgtcttcttgttttcattgtttctggtgtgtcagcttctgcttgttttt

SEQ ID NO: 169676 - DNA, 574 bp, Homo sapiens
ttctttctgtagatctgagtttccatttgataccatctccttatagcttgaaaagtattctttacgctgttttttacagttcaggttcattgctgataaagtctctcagcctttttctgaaaatgtcctaatttcaccctcatattttaaaggacattttgtgttggtgatagaattcagagttgacaggtgtttttttttgaattggagtctcacctatcacccaggctggagtggagtggcgcgatctcggctyactgcaacctctgcctcccaggttcaagtgattttcctgcctgagcctccggagtggctggaattacaggtgcccaccactgtgcccgggctatttttgtatttttagtagaggcggggtctcaccatgttggccaggctggtctcgaagtcctgggctcgagtgatctgcccgcctcaaccacccaaagtgctgggaatacaggcatgagccaccgcacctggccagttatttttgtctgtctttcagcactgtaaatattgttctgttgtcttcttgttttcattgtttctggtgtgtcagcttctgcttgttttt

SEQ ID NO: 169677 - DNA, 574 bp, Homo sapiens
ttctttctgtagatctgagtttccatttgataccatctccttatagcttgaaaagtattctttacgctgttttttacagttcaggttcattgctgataaagtctctcagcctttttctgaaaatgtcctaatttcaccctcatattttaaaggacattttgtgttggtgatagaattcagagttgacaggtgtttttttttgaattggagtctcacctatcacccaggctggagtggagtggcgcgatctcggctcactgcaacctctgcctcccaggttcaagtgattttcctgccygagcctccggagtggctggaattacaggtgcccaccactgtgcccgggctatttttgtatttttagtagaggcggggtctcaccatgttggccaggctggtctcgaagtcctgggctcgagtgatctgcccgcctcaaccacccaaagtgctgggaatacaggcatgagccaccgcacctggccagttatttttgtctgtctttcagcactgtaaatattgttctgttgtcttcttgttttcattgtttctggtgtgtcagcttctgcttgttttt

SEQ ID NO: 169678 - DNA, 529 bp, Homo sapiens
tcacagggtgcagacaggatgattaactcacttcctgtgacaaccataaaaggaggaaygtttgctccaaaatatattaactattaaatgctatctggggaaatgtctagacataaagcaccatatttatgcggtaaagccaaaacaacatgatgaattctgtgtcccactgtcacactgtgaatacttgattttaacttgcacttctatttcaataaattcatagtgtaagtaacttccagtaaatgagacctaggaaaaaaattagagggattttagcagaaatactagtcataaaagtcacctaatcagagaggccttctgacctaactatctaaaatagcaaccttagccactctctattttgttagctttgttaatttctcttcctagtgcaaggcccatgagaaaatgagcctcacgatgtcagagacttgtctattttcatatctgttcaacagggataggactagggtaaggcaaacaaggcattcaccaaaaattcagttatcaaaacaaataatatttc

SEQ ID NO: 169679 - DNA, 529 bp, Homo sapiens
tcacagggtgcagacaggatgattaactcacttcctgtgacaaccataaaaggaggaacgtttgctccaaaatatattaactattaaatgctatctggggaaatgtctagacataaagcaccatatttatgcggtaaagccaaaacaacatgatgaattctgtgtcccactgtcacactgtgaatacttgattttaacttgcacttctatttcaataaattcatagtgtaagtaacttccagtaaatgagacctaggaaaaaaattagagggattttagcagaaatactagtcataaaagtcacctaatcagagaggccttctgacctaactatctaaaatagcaaccttagccactctctattttgttagctttgttaatttctcttcctagtgcaaggcccatgagaaaatgagcctcaygatgtcagagacttgtctattttcatatctgttcaacagggataggactagggtaaggcaaacaaggcattcaccaaaaattcagttatcaaaacaaataatatttc

SEQ ID NO: 169680 - DNA, 529 bp, Homo sapiens
tcacagggtgcagacaggatgattaactcacttcctgtgacaaccataaaaggaggaacgtttgctccaaaatatattaactattaaatgctatctggggaaatgtctagacataaagcaccatatttatgcggtaaagccaaaacaacatgatgaattctgtgtcccactgtcacactgtgaatacttgattttaacttgcacttctatttcaataaattcatagtgtaagtaacttccagtaaatgagacctaggaaaaaaattagagggattttagcagaaatactagtcataaaagtcacctaatcagagaggccttctgacctaactatctaaaatagcaaccttagccactctctattttgttagctttgttaatttctcttcctagtgcaaggcccatgagaaaatgagcctcacgatgtcagagacttgtctattttcatayctgttcaacagggataggactagggtaaggcaaacaaggcattcaccaaaaattcagttatcaaaacaaataatatttc

SEQ ID NO: 169681 - DNA, 529 bp, Homo sapiens
tcacagggtgcagacaggatgattaactcacttcctgtgacaaccataaaaggaggaacgtttgctccaaaatatattaactattaaatgctatctggggaaatgtctagacataaagcaccatatttatgcggtaaagccaaaacaacatgatgaattctgtgtcccactgtcacactgtgaatacttgattttaacttgcacttctatttcaataaattcatagtgtaagtaacttccagtaaatgagacctaggaaaaaaattagagggattttagcagaaatactagtcataaaagtcacctaatcagagaggccttctgacctaactatctaaaatagcaaccttagccactctctattttgttagctttgttaatttctcttcctagtgcaaggcccatgagaaaatgagcctcacgatgtcagagacttgtctattttcatatctgttcaayagggataggactagggtaaggcaaacaaggcattcaccaaaaattcagttatcaaaacaaataatatttc

SEQ ID NO: 169682 - DNA, 417 bp, Homo sapiens
atctttttctgattttttttctagatgccatatayatcttttactgcagttcatggtttgttacaaatccaggtatctggtaatctgtaaactcttatgaaataatgatttttaccctttttgggggtcatagatgactttgaaaatatgatgaaagttattgacagatacatataaaatggtatttaaaaccttgagggagtatgtttaataaccccttaaagtcttatgctggttaagaactcctactttaaaagtgcagaacagcatgtatagtatgctaccttttattaaggcagaaattacgaacatatataatttaattatatttgcataaagaaaccctggaaggataaacgaaaactaataaatatggttacctgtgggaggatagggtggggacggaatatagaattc

SEQ ID NO: 169683 - DNA, 417 bp, Homo sapiens
atctttttctgattttttttctagatgccatatatatcttttactgcagttcatggtttgttacaaatccaggtatctggtaatctgtaaactcttaygaaataatgatttttaccctttttgggggtcatagatgactttgaaaatatgatgaaagttattgacagatacatataaaatggtatttaaaaccttgagggagtatgtttaataaccccttaaagtcttatgctggttaagaactcctactttaaaagtgcagaacagcatgtatagtatgctaccttttattaaggcagaaattacgaacatatataatttaattatatttgcataaagaaaccctggaaggataaacgaaaactaataaatatggttacctgtgggaggatagggtggggacggaatatagaattc

SEQ ID NO: 169684 - DNA, 296 bp, Homo sapiens
aaattttgcttatattgatttgtgtcattgagatggaaatttaatatayatttttctttttcctctttctgtgtccaagtatactgtgatttggttcaacataatctagtggcatctttagaatattttgtagttggaaggtctattgggaaggattacccattccaacccatcacagagtcagggatcaccacccttcatctctttagcatcccagatgggaaaatctcagcttttgcttttatatctccaggaagctgccactcttggcgggttctctttacttgaacaatttt

SEQ ID NO: 169685 - DNA, 587 bp, Homo sapiens
ttttggaggaaaatacgtagatatcttccttactttatggactgtactaattctggcttcagtaattgtacatgtaaaatgtttctttgagttttgaatcaaaaaatgaaccatacattttaacatcattttccaatgtaattatcttaatatatagcttaacagaccaatcaactttgttcagtatatatcattgaatcataaagccatattttttcaaagaccatctagttcaaaatttaagctgatgcttagatattgtctctaatatcactgctaattaatcataaatggtgacaytaccaacagctgtaaagtagccattccaccttcagacaacagttttgttgttttgttgatttggtttggtcttgagattaactacttctggttgtagcattcacatgttacttccatctctgtttgactttagtagagcactatatagtaactgctcttgctctcatgcatgttatgaataactgctttgccgacagacctgatggcttataaagataaaatgtgagaagcttgtcatctcactgtctgtcctcatcctcctcacacaacttttggctctttacacc

SEQ ID NO: 169686 - DNA, 505 bp, Homo sapiens
tgtaataattcaaactgtaaaggaatctttagggtgaatatctcatgaagtaagtgactatctcatgaagtgagtaaatatctaaagtttggtcagcctttaatgttcactttaattttgttatcttctgcttcattaagtgtacttttaaattaaaaatagcatctacaggatgatgacacttagcatatctgtgccatttcacatacctgtccatcaggatgtctgttttctacaatatmtggaatgatgatggtccccttatgttaacaatggttattatttctggatagtgtgattctggggatgattttctacatctttgtatttttctactgtttgaattatttataacaaacatgattaacagctacacagacatacacacacacaattccagtttctaacatgctttgtggttatatcaacacttcgtctacttgttttgtgttagaggttttagctgaagcctaaggccaggctaagagacttgaatgtgacaagg

SEQ ID NO: 169687 - DNA, 627 bp, Homo sapiens
tttcagccctactcagaatatttcagcagaacattaggacaaatggattttcttagatccacgtatggaagctctcagattatgaattatttggaacatcagaaacttggcaacagtttacttattacaacaatttacatatttatttttgttttctatcttgtcaaatgtaacttttcacattttcatgtgagaaataaaatgttgaagaactcctgtcagttttgtgtcttcctttaagtgatttttctaaacataaaattaggttgacaataaccagctgtatctttattaggttataaatggaaaaaatagcccacacaatttctctttcttatgtgaaattcctatgcctctggggccatttgggagttactaaaaaatgtgacttgtcatttttttaaaatcacatttgatggctactttcatgaaacattaatcagacagataattacttgcattttatatccatgtatatgaacagttttgcatgaaacaaaattattgtttayactagctgcagacacttgcgtgttcaatgtttcaaagaaatacttgccagcacctcttctcatttataatttaaatagttaatatatctccacatattatgtttctgtgatgaag

SEQ ID NO: 169688 - DNA, 548 bp, Homo sapiens
ttaacacaaaacactataagggtgggattaaatagacctaggtaaatataaagaaaccaatattgatttgctgaaacaatctggacccaaatagcattaaaagctgaaggcccaatgaaataacactttcacacttaaactctgtggataaattttgcctgtgggtataaacagatggtcaaattaaaaatgctttactataattaacttttctgatttgaatgaagggaaatgtatttattgaaacaaagctgtttgctgctttatgcaggtgcagtgttcagtcagcaagraagtgggaagagtggacatggtattgtgtctacacccaagttcttaactaagcttctcgctctaatactgcattctgtttctccttttgtgccctgattgtaatccaaaatttatgaactagaaaagaatgtccaatttaataagttgcatttttttttctttaagcactttattcagaacaatacatgttcttctggtagtgtttggataatatgattttaacacatgctaataaaagccaagaaaaatcatgg

SEQ ID NO: 169689 - DNA, 572 bp, Homo sapiens
gagaacagtatgggggaaagcgcccccaagattcagttatatccagttatgtccctcccacaacacgtaggaattatgggagctacaattcaagatgaaatttaagtggggacacagcaaaaccatgtcacatgccaacatataagaccccaagtcaaaggtcaaacaaacagctctcaagtgtaytttacttccttttgttcctgctctaaagtttttaaataaactttcactcctgttctaaaacttgcctcagtctctctctctgccttatgcctcttggttgaattctttcttctgaggaggcaagaatggaggttgctgcagacccatagggattcatcacccctaacaattccacaagtacagtatgtatagtattacaggctaagtgcttaggattcactggtaacaatagtagacactctcccaatgaccttagagttcacaaagcagcacataaaattaaaccaaaaattcaagtatgatgtgtgctatgactggggtcagagatactagggaaacaaggcagaagaaaaatgctttacatagattgggaaagtgatcaaagt

SEQ ID NO: 169690 - DNA, 558 bp, Homo sapiens
tgctcatttctctcaacctgcatctccctgagtggccacagccatgtgaatgaggtggatttggcaggccatgccatggcctggggttaagatgacagccctgtggcagattgagagactacaaagcagacaggagttgagcccacactcccataacttcagaatagttgtgcttctgtcctatgaatggtgcgtagtttaatggtttcaagtgtagatgacttctctcagtttaaaactaaactacacatatgcatatacgtatcatggatatgtatagctaccaaaatacatatgctgcaatgcatcactggaatagccccatgctgraaagtacccacagggccagcaagtcaaatagataagtaaattgtggtctattcacaaaatggaatattatgcagcaacgaaatgaagtatctacaaccccatgcaacagtatgaataaaccttcaaaaaaattattgagttaaataaccaaaagccagaaaagcacatgatgcatgatcccatttaaatcaaatacttaaacagcactaatctatacagttaaaagtc

SEQ ID NO: 169691 - DNA, 647 bp, Homo sapiens
gtgtgaactttgaactcattctgttctagatggcaataaatagcatttgaaacaggatacagatatttgctcttgatgcatctttgaaggagtgctgtcttgccttttcccctcaggttatagaagtgaaagttaagctgaacaaaactaatggtagtgtggcttgttttatcccttaccttttatcagttgtaatttaaataaggctccactttacacaaaaggttgggattattttggaaatgtttatccccctaaatgctctactgttttgctgtcgtattttgtgtctacttaatagttgtgtgtctaattagaattagttttgaagatcattttctaccactacattacatatttcttgagagtctgagatagggcttactcatatttgcctttccatatcaagtttcaagccacttttaatgtggtagggagtcagctatagctgttgagctacaattgtaatggatttaaaattcttccawttatttttaaaataattcttaatttttaatttttaaacattaaccacaatcctaattattttcaaacatcagcaatgtatctgtagtttaaccacaaagataaaatacatacaaaatataacttattcactgtgtcttttaggaaaaacctgtgcctgg

SEQ ID NO: 169692 - DNA, 515 bp, Homo sapiens
ttgactcttgctattgaaagtgagtatcttgtagacaacatagatattgtttttcttttaatccactctgacaatgtgaggcttttaattgctatatttagatgagtcamatttaaatgattattgatacatttgggctaatatctaccatgctttcaggtgttttctgtttattccacttgttctttctttttcacctctttttatgccttctctggttttatgtgagcattttatattattccattttattatctctcagcatataaattatacctctttttaaaaaattagtacttgtgctaaagtttgcaatacatattttaacaaatatgtctgccttcaaataatactataacactatatgcaaagcaggaaacttacaacagagtattttcagtttctttcatcatgtcttttatgatattagtaccatttgttttatttaaccatatgctataataatgcattgttactgatcctactttaattaaatgaattaaatgctagaaata

SEQ ID NO: 169693 - DNA, 515 bp, Homo sapiens
ttgactcttgctattgaaagtgagtatcttgtagacaacatagatattgtttttcttttaatccactctgacaatgtgaggcttttaattgctatatttagatgagtcacatttaaatgattattgatacatttgggctaatatctaccatgctttcaggtgttttctgtttattccacttgttctttctttttcacctctttttatgccttctctggttttatgtgagcattttatattattccattttattatctctcagcatataaattatacctctttttaaaaaattagtacttgtgctaaagtttgcaatacatattttaacaaatatgtctgccttcaaataatactataacactatatgcaaagcaggaaacttacaacagagtattttcagtttctttcatcatgtcttttatgatattagtaccatttgttttatttaaccatatgctataataatgcattgttactgmtcctactttaattaaatgaattaaatgctagaaata

SEQ ID NO: 169694 - DNA, 544 bp, Homo sapiens
taccaacaaaaccaaattgagcagacccatctattaaataaaaattattgtcagagtggctcataagacaaaacccatgtttatgctgaaatcaagggatataacttttgttcccttgttttgtttgtttgtttgtttgcttgtttttgagacgcagtctcgttctatcgcccaggctggagtgcagtggcgggatctcgactcactgcctcctgggttcaggcaattctcctgcctcagcctcccgagtagctgggactacaggcatgtgtcaccacacctggctaattttttgtattttttagtagagacggggtttcmccatgttagctaggatggtcttgatccctgacctcgtgatccacccgcctcagcctcccaaagtgctgggatgacaggagtaagacaccgtgcccggccaagggatataactttcaaaaagtaattcaaaaagtctaatataaagtgataagaaaaagtatgtctggagactacaaacaataaaaaactagtgattgcaatcttgatattaaataaggagaat

SEQ ID NO: 169695 - DNA, 479 bp, Homo sapiens
tcagtgaaagaacataaaaaaacggacaataaatgaagacaaaaataaacccagtacaatcagaacaagcagaaaatgaaaaccatgtgttaaaattatttaatgtatcagcaattactataaatgcaaaagatctgaagtctctgtaaaatagacagacatgggtatatagacagggatatagaaatatggatatgcagacataggtaatatagatctctctctctctctctgtctacctctctctctatatatatatatatatttctctatataacatttcacattgcgtgcctatatcaaaacatctcatgtaccctataaatatatacacctactatgtactatatatatatatatakagagagagagagagagatacttccatattttttaatttctaaaaatttacttccttatgttttaagtgtgtatcttagcctctcaattattataaggtaaatatgaagacagaagga

SEQ ID NO: 169696 - DNA, 479 bp, Homo sapiens
tcagtgaaagaacataaaaaaacggacaataaatgaagacaaaaataaacccagtacaatcagaacaagcagaaaatgaaaaccatgtgttaaaattatttaatgtatcagcaattactataaatgcaaaagatctgaagtctctgtaaaatagacagacatgggtatatagacagggatatagaaatatggatatgcagacataggtaatatagatctctctctctctctctgtctacctctctctctatatatatatatatatttctctatataacatttcacattgcgtgcctatatcaaaacatctcatgtaccctataaatatatacacctactatgtactatatatatatatatatagagagagagagagagatacttccatattttttaatttctaaaaatttacttccttatgttttaagtgtgtatcttagcctctcaattattataargtaaatatgaagacagaagga

SEQ ID NO: 169697 - DNA, 662 bp, Homo sapiens
cagcgactatattctgtaacagaaggacaatttagcaatcaaaaataaaaagattattgaaaaaccttatatagtttaggagtttaaaaatgaaagtttatgggttggagaaatcaaaaggaaaattagtaaattcctcggaaatgaattacgacaaaaccactgcatataaaattgtttaacagtacttagaagaaaatcaaagcacaggaaagatgattgaatgctaattatttatgtatccaatatatgaagtaaaataaaaatgagataaagaacatctgaaatgtattagaaactgagtgggcacaactaaagataaaatagatttaaagaaaatatcataagcaactctacgccaatgtgtgaaaacacaaatttacaatttccacacatatattttccacacatatatacagagacacacagtttatttaatactacctaaaacatatagcatacataattacaagccaatatggaaaaataaaaatatttttataattttmtgtgcactataagattttgaatatttcttcagtttttaaagtcatcagttctttaaaaagtccaagtgacccagacatgaagctaatgtgttatttactcacaatggaattcctgttattcttgtatcaatattggaattaccacaaccattt

SEQ ID NO: 169698 - DNA, 373 bp, Homo sapiens
aaacccgttgtgcttttattttaatgctcaattcatagaaaaactagatgatactctttaactttagccaatgtgtttacacayagaatttcctttacaatcaaccttccataagttgcttatagcttcatctttattttatccaacctaaaacaatcctttaaccttttaatctaggcaaaaatctacattcttgtgcctccttataatctttttaccataagtatatttgactttccttacacaccttgcacattaacagtttcttcaatagtcttaaatacatgtcacactgttaactcttagcaacttttacttttggtgaaaaccttgggaagtttgggattttaattatgtactaggtgtggagcct

SEQ ID NO: 169699 - DNA, 373 bp, Homo sapiens
aaacccgttgtgcttttattttaatgctcaattcatagaaaaactagatgatactctttaactttagccaatgtgtttacacatagaatttcctttacaatcaaccttccataagttgcttatagcttcatctttattttatccaacctaaaacaatcctttaaccttttaatctaggcaaaaatctacattcttgtgcctccttataatctttttaccataagtatatttgactttccttacacaccttgcacattaacagtttcttcaatagtcttaaatacatgtcacactgttaactcttagcaacttttacttttggtgaaaaccttggkaagtttgggattttaattatgtactaggtgtggagcct

SEQ ID NO: 169700 - DNA, 554 bp, Homo sapiens
tttgcccatgggactactctctggagaatccccaggaaaatctcacctgcagctgctggcatcckcctgaagactgtctcattgcaagccactggccactgaacgcagcactgtcctggtctctcctgactggcttgccaaattttgttcctggaccaacctgagggccgagctgctatttctcatggcccagtaacaagaagcagatgaactggggaggaagagagtttttatttctgcagccagttacagggagaaggcctggaaattatcgccagactaactcaaaattacaaagttttccagagcttatataccttctaagttatatatcaacgtggaagtgtgcattcatctaaagacataagtgattaacttcttttaatctataactaaggtctgagtcctgaagaccttcctctggagcctcagtaaactgacttaatctaaatgagtccagctgctggggtgattacccttatcttgtctcctactaaatcacagaggtttggggagttccttcagacgcccagtaaacttgtttgtggaggcct

SEQ ID NO: 169701 - DNA, 578 bp, Homo sapiens
agggcactggcttttaatattcaacttaaccactcggtcagtactgaaacagttgttacggaggcctgtgttagtgagacctagcttgccacattaggatgcatctatcttatgttgtgcgatatgatgtaattgtctttttttgcattggcaaatgcaaaatcaagccaactacctttatttacatgcaaaggaacgatctgtatttcattgaaaattctgtagacttgggttatgtatatgtacatatattttaaaaataaatagtgtggtgttgtatatgtttatatacttattacatgaatattgatgatgaagatatagagcatgtaaaatcgctcaatttctctctgcacaaaatcgtttcggaagttgaccttcagaatttattagcatcattactaattggctcaagtattgacttatgtgacctttatcaacagccttaattcaaatactaaatctagcagaagtagaacaggctctgaagtagttcattttatgctcaatttttgttatgaaaaaacttaaaatatatgggggtagagagaatagtacarcaaaccaccatgtgccta

SEQ ID NO: 169702 - DNA, 390 bp, Homo sapiens
gtccagcctgggcgacagagcaaggccctgactctaaaaactgaaaataaaaaactgaaaaaaaaatgtgttgtgaactttgatgagatgcattcatataaatcatcccaagtataaaatttcccccactgatctatgttgaagagatagtgtagctttctttcactttgcagacatagacggagcacatgtttcagctaggcaactcaatgtggtcatcctccacctgactgttcatcctgtgactcttactgctatagttgccaccagagaatgtgaaaaagctcagaggagaaagaagagaggaagaatgggcaatgtgtctgtgttgagtgtgtgtgtctatgcctgtggatgagartgtgtgtctattcttttccaaggaattca

SEQ ID NO: 169703 - DNA, 475 bp, Homo sapiens
  misc_feature (1)...(475): n = A,T,C or G
gcccgtcttggcctcccaaagtgctgggattacaggcgtgagccactgcgtctggcctattttattaaaatannttattgaaaattctaatttgtcacaatttttacctcggagattacagaagggacgcacaaagaacaaatctatgtatatacttaagcaaaaggcacatgtatataaaatgctgacatttggaatatttgctttcatgtagtgctcaagaaggtgttsattttggcagtttattgatcagaaatcacttcctcccaacgtcagtcactatagcattctgcattgtttcaataatgtgatgatgagacaacatatactgctcagatatttggcagaaaacaaaataatgtagattagattcctacatataaataaatttaattttagtaaaaggtaactaaaaatgacatattgaatataggtctccatttgtaaccaggatggaatagcagagctggattca

SEQ ID NO: 169704 - DNA, 619 bp, Homo sapiens
tttccattacttggtcatctgattatgataattggagtttatttctgaagttaaaaatagtccacttatctttcttcccaaaaaagtatatatggaagaaaaaaaacccagaatgcaccacttttgtgagttttctaaggctatcccattatatctattgattttatattgaatgtaaagtaatttattctaagcacttctgtcaatagctaccttgtgtcaatggaaactgaagttccagaatctgttcatcacacaagtattaatggaggaataagggtaatgaatacctatggctcgctgcttaagagaaacagtttctcttgttcaggaatataaaagctttgtctgtagtctacctgagcaatagatacagatgtttggatgacctaggaayttgccagtggcttcagatccacagactttaagattgatcatataattatactctctgtttaatattaaaaagatgaatattaaattgtccctatgtcagtataaaaatcattaacttacaagcgctcccagccttcctttgccctaccctcatacaggatcttctaagttgtcccatttggttctcttttctacccactctgctttatggaggacctttctt

SEQ ID NO: 169705 - DNA, 502 bp, Homo sapiens
aagtgtaacatttggttcttgcccagtttcctttggttaagcccactagttgacyacctcttgctccagtacacagagatttttaactggctttgtagtgcctaatgaataaagaaagtaactcttaaggaaaaaaaggtaattcatggaaaagaaagcatcaaagaagtgataatatcttccaagagaagaaaaaatctaggcacccacaaaacaaccactagatgctttttcctggaaaacagacaaagaaagatctcataagtgtcgcccctcccccttattcctatgaatgtagaaaaaaatcaagttggtgaaattttttagaaagaacaggcaaatatataaaaactgcagaaaaaaagacaagacaattagaggatcattgcaggagagtccaacatccaaacaatagaagttccaggaaaagaaaacagaatttttctcagaaaaattcagaaccttctatacctatcagaaccttcatcagagccttctatac

SEQ ID NO: 169706 - DNA, 586 bp, Homo sapiens
tagtgggattccagttatggtagctgggtacagtcaacagtgtggtgttgtgttgctattcctccacatccacttctctcctcaatctggccatcttccatctgaacatacagttgtttcaggtctytttatctctttcaacacaggttaatatgagcaacacctcccctacttttctatgctctgtgactatgctgttagacctacccctgtgtcctaatatttacatatctccgggtcttagggtttttaggactttgtaactcttccctaaattctaggaattccaggtctatattatagtacatattgtcttaatattctcatatgctctttcctagacactaaagtacatttcattcataaaattaatggtgctattaatatctgtgaatgatgtaacaaacataaatatataattatttgaaaaatatttaagaccagattcaaaatattacatttaaaaatttacaaatcttcctgattatgaagatgatttttccaattcttcctttcatttgaattttaataatagcaataatattctgattctgaaaacctcccctcctgatgccaaccctgggag

SEQ ID NO: 169707 - DNA, 552 bp, Homo sapiens
ttcttttttgcattctttttctctctcctttccttttccacttagactcattgatcatttttctcttcccatctgagcagctataataagatccagggtaactggataacaaaataaacaatgtcaactgttactagcaaaaaacatacatttatttaatgtaagttaattatacagccatgtaaaacagtgaaaaatgtgtcactacaaaatatgcaggcaagccatcagtaacacaaagktcctaccaaagctcccagttgtcaattttgtcatctgacagcactagaaataccttcaggctctttatgtaactagcacattcttttctgttattcactaacaaaatagtagtatctttcaatttttattttctgcatttttatatcattcatgaaaatctgcatctgtgggtaggcaaaaggtagtttagacttttgcagctgtaataccatttgtctaaagcaaagttctaagaaaatgttcaaaatattttaaatgtaagcatgattgcagaatcctagtagcatctgataatgtaataacctgttg

SEQ ID NO: 169708 - DNA, 602 bp, Homo sapiens
aatatcacttttttatttttattttttgagatggagtctcattctgtcacccaggctggagtgcagtggtgcagtcttggctaactgaaacctctgccttccggttcgagtgattctcccacctcagcctccgaagtagctgagattacacgcatgcaccaccatgaccaattaattttcatatttttagtacagacaggtttcaccatgttggccaggctggcctcaaattcctgacctcaagagatccgcctgcctcagcctgccaaagtactgtgattacaggcatgagtcaccttgcccagccaatattaccacttttaatagccaagattatctcaatctatccaggtataaagtgcagggaaggaaaagcactttaaagtcttattataaaagaagaggcccaaagygtcccatgtcaactgggcctcaacagtacgcaatcagcctcttttctatccctaaaaactctctttctgaatgtccagtggaccgatttcaagtatttaatctaatacaacaatctcagcatacctgcaggactctgcagtaatattgctcctgcacagaggaagtcaggcagaaaccactgtattgaa

SEQ ID NO: 169709 - DNA, 627 bp, Homo sapiens
gaaatcagaacacaaagatatcattagctggaataatatctggaactataattttcatatgcactctgaaccagaagcttaagtggagtctttacttcccactaaaacccacatataattcttgggatattattaaaagcctctgattggccacatctaataaagacatcaagggagagagaaagagagtcgatccactgaccaggctatcacaagacyaagccactttggctgaccggctacttaggtgagataaaaaaagaactataggcattatctgcactgatatcttaatccacatagacactggaataggcaacataagtgatattgtcgatgactgtaatccctttggaatcagagagcagagggagagcaatcaagtaggcagtgctagtggcagatagagacactatctcctataggaaaatgtcttaatacaaagctgtcaaggaaaacaattatcatcattcctctagcttcaccttttttttccattagcccctaggctcagttggctatcacagcaaaagtatctcaattttactcttattcaaggctttatcaatataaataaggctatgttaatgtcaccttttttttttcagcataatgctaataatgagt

SEQ ID NO: 169710 - DNA, 616 bp, Homo sapiens
tcgatcaaatataaattcttctcacatgggtcttttgacatatttaagagctctcagtcaatcagaaataaacaatttgggctaatgtaaattttagatcatttacattaacctagtagtactggctattaaatataaaaatctacttacgtatctaactgaacattttatcttccagttaaaatcataggaagttaaacctctagttggatggttaaattttgagatttacctggatgtttgcattataataataagcaaatgcagcaaagrctatgaaagttcatatacaaggaaatactgttaagagggttaattagttgtttgccaaagcctaataatttcttctgtaacttttatagaactttataatggaaaaacacaatatgttacattaaatcctactgtaaaatagaatagtaaaatagaaaataatagcttaaagttaaagcactgaaaacaacatataagcaattcatagaggtctaagtaattaagtttaattgcaactctgactaaaggcattgccatttttctattgctcgtatatgtgagcttcttgaaatgttatgatctatccattttggtagaaggaaaggtgcattttgtagaaaat

SEQ ID NO: 169711 - DNA, 616 bp, Homo sapiens
tcgatcaaatataaattcttctcacatgggtcttttgacatatttaagagctctcagtcaatcagaaataaacaatttgggctaatgtaaattttagatcatttacattaacctagtagtactggctattaaatataaaaatctacttacgtatctaactgaacattttatcttccagttaaaatcataggaagttaaacctctagttggatggttaaattttgagatttacctggatgtttgcattataataataagcaaatgcagcaaagactatgaaagttcatatacaaggaaatactgttaagagggttaattagttgtttgccaaagcctaataatttcttctgtaacttttatagaactttataatggaaaaacacaatatrttacattaaatcctactgtaaaatagaatagtaaaatagaaaataatagcttaaagttaaagcactgaaaacaacatataagcaattcatagaggtctaagtaattaagtttaattgcaactctgactaaaggcattgccatttttctattgctcgtatatgtgagcttcttgaaatgttatgatctatccattttggtagaaggaaaggtgcattttgtagaaaat

SEQ ID NO: 169712 - DNA, 616 bp, Homo sapiens
tcgatcaaatataaattcttctcacatgggtcttttgacatatttaagagctctcagtcaatcagaaataaacaatttgggctaatgtaaattttagatcatttacattaacctagtagtactggctattaaatataaaaatctacttacgtatctaactgaacattttatcttccagttaaaatcataggaagttaaacctctagttggatggttaaattttgagatttacctggatgtttgcattataataataagcaaatgcagcaaagactatgaaagttcatatacaaggaaatactgttaagagggttaattagttgtttgccaaagcctaataatttcttctgtaacttttatagaactttataatggaaaaacacaatatgttacattaaatcctactgtaaaatagaatagtaaaatagaaaataatagcttaaagttaaagcactgaaaacaacatataagcaattcatagaggtctaagtaattaagtttaattgcaactctgactaaaggcattgccatttttctattgctcgtatatgtgagcttcttgwaatgttatgatctatccattttggtagaaggaaaggtgcattttgtagaaaat

SEQ ID NO: 169713 - DNA, 575 bp, Homo sapiens
gcattttgttttagtattataatttgttttagtgtctaaatttttcaagatccacttgtaaagagtgacatcgaaatttaaagctgagaaagaccctagagattatcagcaacaacatagccaacatgctaatgaggaaataagacctagcttggcccaataaattgttcaagatcccatatttagctaaaaccaaacttacgctggaactgcatctcctgtctcaatctagtgaggggaagtaggagataaaggaactgaaagaggaactacaaggtggaaaaaagggagctaaatgaaaaataaacctaatttcacagtcccagtgattggtttttattagaccatcatagaacagactgtagagtactgtactattaataawaagaatacagtaaacagtaaaataaatgtaatccaaaatgtgtggttaatctatgtgagcgactaaaaacacatctcaaaatatcgttgatcctgattattcgtggattctgtatttgcaaatttgcctattggctgaaatttactcgtacccaattttaataatgccactttcctggtcatttgcagac

SEQ ID NO: 169714 - DNA, 580 bp, Homo sapiens
aaaagttgctaatcatagaaacttaagggttgcaaaaacatggtgtaaaataagaaaatggtgaaaagatatgggagaaacacagctatttcatttgctaaaaattgttttgagctgaataaatgaattcaaatggtaattatkaaaatatcttagataattcattatttaaaattgggttattattctaatatatagctatttcttaaagtattattttacacagctggtgcttgatcaaatcaaaatctttattatacaattctacttgtttcctaaagcgtgtgtgactatttgtattacttattgtagttcttgaccacaatacagcatggtcatttgaatgtgcttgtctgttaatgtgaacagaatcaagatttgcaaatactgctagtacaatcttactttatatcatgcattactacattaatggtcatttacaagaaaatgaatgagaacataaaatatagtgaccaacatgaaatataatatagttttcaattatatttcttaggtatccatgattagaaaacaataaaattccctattactttctaatttgtgatgctttgcccaatgg

SEQ ID NO: 169715 - DNA, 580 bp, Homo sapiens
aaaagttgctaatcatagaaacttaagggttgcaaaaacatggtgtaaaataagaaaatggtgaaaagatatgggagaaacacagctatttcatttgctaaaaattgttttgagctgaataaatgaattcaaatggtaattattaaaatatcttagataattcattatttaaaattgggttattattctaatatatagctatttcttaaagtattattttacacagctggtgcttgatcaaatcaaaatctttattatacaattctacttgtttcctaaagcgtgtgtgactatttgtattacttatygtagttcttgaccacaatacagcatggtcatttgaatgtgcttgtctgttaatgtgaacagaatcaagatttgcaaatactgctagtacaatcttactttatatcatgcattactacattaatggtcatttacaagaaaatgaatgagaacataaaatatagtgaccaacatgaaatataatatagttttcaattatatttcttaggtatccatgattagaaaacaataaaattccctattactttctaatttgtgatgctttgcccaatgg

SEQ ID NO: 169716 - DNA, 448 bp, Homo sapiens
ttcccacatcactactatgtatyctgtgcaatgagcttttgattattatatctttaacatttttaatatcttgcctatgttggtttgctcttccccaaaagacttacaatttttttctggccaagagaccttttattcttctatccgtcctcagagtgcagactgcacagtgtagctgaaaacttcacctgacttagcccagaaataaccccaagcctacaaggtcaactaattttcaacaaaggcaccaagatcacacaatgtggaaaggatagtctcttcaataaatggtgctgggaaaactggataactacatgcaaaagactacaatgtgaccccaagccatacaaaacacacagagaaagtcaactgaaaatggattaaatacttaaatgtaagacctgaaacaataaaaatcctagaggaaaatagcttcttgagactggcc

SEQ ID NO: 169717 - DNA, 558 bp, Homo sapiens
atttgacatgctttcatttaggttagtttatgctacccaatcctgtaagaatttatctgcataactagatagaatttatccagcaattgactgaatatcttatttgttggatttatgtgcattctaataacatttggttcttagttccaatagtgtgtataaatactaaatataatatttcataccaggaccagttattagagaatatcatcagataactataatttgtactcttttatctacttttatggctgactcayattgttttctcccccctctttgccatttgtttactatattccaaattgtttttaaacagttacacaagggattatgtcccttgggaatggtccgttacattttgaatatcagtgctattccaagttatttcaaccatgtcattaatctcacttaaagcaataaaaagcaaatagtggtgagaagcaagatgcataaagcattactttaaacagttaaaaaaaaaaaagatgttaaatgttccctctctaggagctcctgcagctctcaatacatttgtgtgcaactgagcaagagaaa

SEQ ID NO: 169718 - DNA, 558 bp, Homo sapiens
atttgacatgctttcatttaggttagtttatgctacccaatcctgtaagaatttatctgcataactagatagaatttatccagcaattgactgaatatcttatttgttggatttatgtgcattctaataacatttggttcttagttccaatagtgtgtataaatactaaatataatatttcataccaggaccagttattagagaatatcatcagataactataatttgtactcttttatctacttttatggctgactcatattgttttctcccccctctttgccatttgtttactatattccaaattgtttttaaacagttacacaagggattatgtcccttgggaatggtccgttacattttgaatatcagtgcyattccaagttatttcaaccatgtcattaatctcacttaaagcaataaaaagcaaatagtggtgagaagcaagatgcataaagcattactttaaacagttaaaaaaaaaaaagatgttaaatgttccctctctaggagctcctgcagctctcaatacatttgtgtgcaactgagcaagagaaa

SEQ ID NO: 169719 - DNA, 477 bp, Homo sapiens
gctggcaaggatgtggaggaattggaaacttgtatatcgctgatgggactgtgcaatgctcctgtcactgtgaaaaataatatggtggttcctcaaaaaattaatgatagaattactatataacctggtaattttacttttggtcatacacaaaaaagaattgaaagcaggatctcaaaaagatatctgtacacccatgttcacagcagaattattcacaacagcccaaaggtagaaayaattcaaatgtccactgatggatgaatggataaacaaactgtgctatatacacacaatgaattattattcagccttagaaagaaatgaaattctggcacatggtacaacatggataaaccttaaaggtattatgctatgctaagcaaataagccactcaccaaataacaaatatagtatgattccatttatatgaattacctagagaaattaaattcatagagacagaaagcagaatg

SEQ ID NO: 169720 - DNA, 537 bp, Homo sapiens
ttcctactggctcatgttataactgttctcatcacacattattgttgacacgagtattcctcgcattcttcctcttttcaagaatagttagaaaagcttactctgtggaatttctatgagtgggttttcatgtgatattgtgggttaaaggkcttccaatatgacattcttcttggtaaatatatggaaactgtatttatacagtatatttataggacattttggaaataaaaagtaagattagatagagagttaatctaaaatgaaaaattcaaaagctaaattagagatcttaaagggaaaggagaataaagattaaaagagaaggaaggaaaatgtaaaaaggaatggtgtggcactatttggattaattcaaggcaatttttgaaattaaaaagtgaatgtgaagtatagttgatatttcagaagccaaactattctttatttgttttcaaatatatgtgtgtgcttgcgtgtataatttacagcatcgaggcattaattcaacaaagtcggaaaacaaggaaaatattaaga

SEQ ID NO: 169721 - DNA, 418 bp, Homo sapiens
acacggcaagtgccttccacctatgagcctgtaaaatcaaaaacaacttagttatttccaagataaagtggggatataggcattggataaatgttaccattacaaatgggagaaattggccaaaacaaaggagctataggccccatgcaagtctgaaagcctacagggtggtcattaaatcttaaagctccaaaatctcctttgactccatgtcttacatccacggcatgctaatgtgaaggatgagctcctgtattactatgttctcatgctgctaatacccaagactgagtaatttatagaggaaagaggtttaattgactaacagttccacatrgctggggaggcctcacaatcatgactgaatagcaagaaatgtcttacctggtggtagacaagagacagcttgtataaggaa

SEQ ID NO: 169722 - DNA, 476 bp, Homo sapiens
tatttattatttatttattcttatttccttaggtttcttgggaataggtggtctttggttacatgagtaagttctttagtgttgatttgtgagattttggttcattcatcacccaagcagtatacaatgaacccaatttgtagttttttattcctcacctccttcycatcctttgcccctgaattcccaaagtccattgtatcattcttacacttttgcatcctcatagcttagctcccacttatgagtgataacatacgatgtttgattttccattcctgagtttcttcacttgaaaaaatagtctccagttccacccacgttcctgcaaatgccattaattcatttgtttttatggttaagtagttttccatcatatatatatatatatcacaatttctttatccacttattgattgatgggcatttgggctggttccacatttttgcgattgtgaattgtgctgccataaaca

SEQ ID NO: 169723 - DNA, 476 bp, Homo sapiens
tatttattatttatttattcttatttccttaggtttcttgggaataggtggtctttggttacatgagtaagttctttagtgttgatttgtgagattttggttcattcatcacccaagcagtatacaatgaacccaatttgtagttttttattcctcacctccttcccatcctttgcccctgaattcccaaagtccattgtatcattcttacacttttgcatcctcatagcttagctcccacttatgagtgataacatacgatgtttgattttccattcctgagtttcttcacttgaaaaaatagtctccagttccacccacgttcctgsaaatgccattaattcatttgtttttatggttaagtagttttccatcatatatatatatatatcacaatttctttatccacttattgattgatgggcatttgggctggttccacatttttgcgattgtgaattgtgctgccataaaca

SEQ ID NO: 169724 - DNA, 376 bp, Homo sapiens
gtgagtggccactgcaaagtagttgacataatacagaggaaagctttttattgaaaaaaagagtaaaaacgtctttatgagagcatttacttcacattgggaaaccaattactcctaacctagaactcttatattttaggaaagaaagaaaaccaaagcaaagcaaacaaacatgaatttgttsaaatcatattatgtgccagaaactaacatagggagttgcaatatatttcagtattctaaaacatttcattgatttccaactacctctctgagaaatagggaatatccttctcatttcacatatgagatacaaagaaatttaatagaagaaaacctgcttggacaagtagtagaatttacaagtcaagtggtc

SEQ ID NO: 169725 - DNA, 564 bp, Homo sapiens
ttgttcaaggaaagtttattgctaattaacttatttatttgtagtcaacaaaatggccttaactcttccctcagtttaaataaactttagatagatttctttctgattataggctactggtctccttatgtttagagtattttacattagaaaagtttctattttaaattctttctcttyccctttgagacacaaatcttttctcccagtctgtttgctggtttactactcaggaatgtctttctcaagttattcctttgaaatgtaaatcaagaaacagagagacttcatcttccagtctctgtgtaaggtcaggggcctaacttcaccaattagcaaacacagattgacaactacatgaactaaattatggactgaatgtttatgtccccaccaaaattcatatattgaaaccctaaccgctgtcgaagttaccaaaaaaaaaagtatcaatatcaaaatgaagtcacttacgtcaaactcaacaaaatggagctgtcaggccataaagaaggaaccgtcatgccagtatgcctgtaacaggacttatcaaaataaattaat

SEQ ID NO: 169726 - DNA, 587 bp, Homo sapiens
acaaaaaaagatctaaaagtgagaatagaaaaggggcagagsaagatggctccactaatcatcccctgcccaaataagaacaccaatttaacaactatcagccaggtaccatggctcatgcctgtaatcccagcactttgggaggccgaggcgggcagatcacttgaggtcaggagttcaagacctacctggccaacatggggaaaccctgtgtctactaaaaatacagacgttagccaagcatggtagtgcatgcccgtaatcccagctactcaagaggctgaggcaggagaattgcttgaacctggaaagtagaggttgcaatgagctgagactgtgaaactgcactccagcctgagtgatgaagtgaaactctgtctcgaaaaaaaaaaagacatataaatttactacatttaaaaaaatgtctgttgatctgttgcctacaagaaatacttcacctataaagatatacgtaaactgaaaaactgaaactaaagggatggaaaatgatattccatgccaatggaaaccaaaaaagagcaggagtagctatacttatatcacaaaaaatagattttaagacgaaa

SEQ ID NO: 169727 - DNA, 587 bp, Homo sapiens
acaaaaaaagatctaaaagtgagaatagaaaaggggcagagcaagatggctccactaatcatcccctgcccaaataagaacaccaatttaacaactatcagccaggtaccatggctcatgcctgtaatcccagcactttgggaggccgaggcgggcagatcacttgaggtcaggagttcaagacctacctggccaacatggggaaaccctgtgtctactaaaaatacagacgttagccaagcatggtagtgcatgcccgtaatcccagctactcaagaggctgaggcaggagaattgcttgaacctggaaagtagaggttgcaatgagctgagactgtgaaactgcactccagcctgagtgatgaagtgaaactctgtctcgaaaaaaaaaaagacatataaatttactacatttaaaaaaatgtctgttgatctgttgcctacaagaaatacttcacctataaagatatacgtaaactgaaaaacygaaactaaagggatggaaaatgatattccatgccaatggaaaccaaaaaagagcaggagtagctatacttatatcacaaaaaatagattttaagacgaaa

SEQ ID NO: 169728 - DNA, 600 bp, Homo sapiens
aagatcatcagcaacttgtcaatttttgtaatcaccacagtacaataagataattatgactgtaatatctaataattaaaaattttcaatcgctaatattttcaacaggcttattttaaaatccaatatttgccttctgtagagtcagaattctggaacataaaaggatgtttaycatctttttagtctatttccaatatgaaaaacctttaaaaaataccaaggtaatacatatttaatatagaacatttagataagcaaaagaaggaaaaaattcacctttaatcctattctaaactgtcatgaatattttgtaactaaattcttgcaaatgctcatgattatttccttgaactagattaggataaactccaagatgagaatgcaaatttaaagaaaatgattattttaagggctttgactaatgttaacaaagacggaaagattgtgttcatatttgaaagcctaagctctggagtagattgccgagtttttgttgctactgtccaccattactaattctcgccatttggcagatcctgtatctttctagaagcttttgcttctttattgaccagtggagaatctcagctttggctc

SEQ ID NO: 169729 - DNA, 595 bp, Homo sapiens
gcgcccagtttctgaggttgagttttggaaatggtcaggtggagcagatgagggcctttggacttcttcggcacatgctgcaagtgctgctccttaaacaggctgggctgggcagagagggaacagctggtgaatcctgaaccctttttgctgagattatgggaggtggggtgtggaaggagggcagacaaactgtaagaaacactgtcacggctattagaaacttttttagaatagagagaaaagtacctaccagacaattagaaaacagagctattacacacattacaggagggaggagtgaaagcaaaatggatgcatcacaaagttttgtgacatccacaactcacaaaaattaatgggcatctgtgggttaaacaccgagaagaaattcagatatccaaacaaaattaagactatgaatcttgggctggaaagtaagaatatggaaagaaagcagaatgtatatgtatatggaggactatctccaaaatgtcaactgtctaaccctaaaaagttatttcacagttgcagaagaaatcattttgcttaactggaaacatttattasctgcaaaatgcacaagcccctgtga

SEQ ID NO: 169730 - DNA, 576 bp, Homo sapiens
cccttctctgaggcaattaaggcagaacctcatgaagtgataaacagaatgcagtaaatggacagaagtgtctgttaatactttagaatttcacctgccatttaactagcagccaatattgtcaaatacttgtcttttaggagtttcttcagtcaataaatcagcctggtttgtcatggtgcagtggacaggtcactggcttgtgatttggaaggtttgtgttctactcctagtttactcgtcgtttttggaagcagaccctctatgtcaatagcaaagggcaattccaagtggtagtgttcgtctgtttttatctgtggactttgattctgctgattgtgtgacattgggaaattgacctagatttcatgcttcagtttttactgtatatttccatagcatgctctatctcagactcagggaacttatgtgaagtgataataatggttaatatttaaatagaatctctaaagaaaaagtattgtttctagtactttatgtgtatgaattcatttgtgactcattcataaggtagatcatgaggtatamtctaaagtagggctaggatttaagctt

SEQ ID NO: 169731 - DNA, 621 bp, Homo sapiens
cttttaaaaaaactttattagcaaatgcttatttgggcttaattatttggctctttgttgtagcaaaagtctcaatcaattttacaagaaaagataaaaagaaaagcatgatttctaaccaagttttactactgcatttatttttatgaaatattgctttttagtcacctgtattctggggcaaaggtaagttttacattatttttatttacttacacattttattacatagaaaaccaaaattcaagtaagaaawcgtattgcttgagacaggacaaaatgttggggacaatgacatgcaacatatcttgtactttttccaaagaaaatcttttacttaatagtcaaactctacagaaaacatcaagaatagaacaatcacacacccaaatagtgacaaaaggatgctagctatgttctgttattttagttttcagctgtttcttttttgaaaacatggggctttgtgctctttagggaaaggggatctgtgaaaggaacatttgccttctctgtgtccagtcctggggaaggggagagttgctgtctgcaaatgcactcaccaccattgactcaaacagttgagagagagaagaggatatatagtagaaattaaaactc

SEQ ID NO: 169732 - DNA, 621 bp, Homo sapiens
cttttaaaaaaactttattagcaaatgcttatttgggcttaattatttggctctttgttgtagcaaaagtctcaatcaattttacaagaaaagataaaaagaaaagcatgatttctaaccaagttttactactgcatttatttttatgaaatattgctttttagtcacctgtattctggggcaaaggtaagttttacattatttttatttacttacacattttattacatagaaaaccaaaattcaagtaagaaatcrtattgcttgagacaggacaaaatgttggggacaatgacatgcaacatatcttgtactttttccaaagaaaatcttttacttaatagtcaaactctacagaaaacatcaagaatagaacaatcacacacccaaatagtgacaaaaggatgctagctatgttctgttattttagttttcagctgtttcttttttgaaaacatggggctttgtgctctttagggaaaggggatctgtgaaaggaacatttgccttctctgtgtccagtcctggggaaggggagagttgctgtctgcaaatgcactcaccaccattgactcaaacagttgagagagagaagaggatatatagtagaaattaaaactc

SEQ ID NO: 169733 - DNA, 595 bp, Homo sapiens
gttcctttccataaagttcaaaaacagccaaaactcactaatagygttagaagtcaaattagggctttctgtgtataggggagacatgactgccaagagtcacggggcttctgaaattttgataacgttttgtttcttgatcttctgggtgcaggttaacagaatgtgctcactttttgaaaatgcaagccttacacttttgagttgtgcacttttatgaatgtattttatgcttctagaaagttaacattaaaaacaagaagaaagaaaaaatcagtatacaaaactcagttctgaaactgctacatatattttaggactgaataagtaagtaaatgagtcgtcaatagtgaaagccaagattttcactgtcagagaaagaaattacaaattagtaaaggaagaagaccagaatgaaccctataatcgtggattagagattagtgtaaccacgtgaactcttgtttattttaagaactcgtatttacttatactgataagtagaaatacagaagtgattatagctatgtgtctatgcacatgtacatacagatatttcctagctctgtctgctgagaaggtctggaagcagtga

SEQ ID NO: 169734 - DNA, 595 bp, Homo sapiens
gttcctttccataaagttcaaaaacagccaaaactcactaatagtgttagaagtcaaattagggctttctgtgtataggggagacatgactgccaagagtcacggggcttctgaaattttgataacgttttgtttcttgatcttctgggtgcaggttaacagaatgtgctcactttttgaaaatgcaagccttacacttttgagttgtgcacttttatgaatgtattttatgcttctagaaagttaacattaaaaacaagaagaaagaaaaaatcagtatacaaaactcagttctgaaactgctacatatattttaggactgaataagtaagtaaatgagtcgtcaatagtgaaagccaagattttcactgtcagagaaagaaattacaaattagtraaggaagaagaccagaatgaaccctataatcgtggattagagattagtgtaaccacgtgaactcttgtttattttaagaactcgtatttacttatactgataagtagaaatacagaagtgattatagctatgtgtctatgcacatgtacatacagatatttcctagctctgtctgctgagaaggtctggaagcagtga

SEQ ID NO: 169735 - DNA, 595 bp, Homo sapiens
gttcctttccataaagttcaaaaacagccaaaactcactaatagtgttagaagtcaaattagggctttctgtgtataggggagacatgactgccaagagtcacggggcttctgaaattttgataacgttttgtttcttgatcttctgggtgcaggttaacagaatgtgctcactttttgaaaatgcaagccttacacttttgagttgtgcacttttatgaatgtattttatgcttctagaaagttaacattaaaaacaagaagaaagaaaaaatcagtatacaaaactcagttctgaaactgctacatatattttaggactgaataagtaagtaaatgagtcgtcaatagtgaaagccaagattttcactgtcagagaaagaaattacaaattagtaaaggaagaagacyagaatgaaccctataatcgtggattagagattagtgtaaccacgtgaactcttgtttattttaagaactcgtatttacttatactgataagtagaaatacagaagtgattatagctatgtgtctatgcacatgtacatacagatatttcctagctctgtctgctgagaaggtctggaagcagtga

SEQ ID NO: 169736 - DNA, 595 bp, Homo sapiens
gttcctttccataaagttcaaaaacagccaaaactcactaatagtgttagaagtcaaattagggctttctgtgtataggggagacatgactgccaagagtcacggggcttctgaaattttgataacgttttgtttcttgatcttctgggtgcaggttaacagaatgtgctcactttttgaaaatgcaagccttacacttttgagttgtgcacttttatgaatgtattttatgcttctagaaagttaacattaaaaacaagaagaaagaaaaaatcagtatacaaaactcagttctgaaactgctacatatattttaggactgaataagtaagtaaatgagtcgtcaatagtgaaagccaagattttcactgtcagagaaagaaattacaaattagtaaaggaagaagaccagaatgaaccctataatcgtggattagagattagtgtaaccacgtgaaytcttgtttattttaagaactcgtatttacttatactgataagtagaaatacagaagtgattatagctatgtgtctatgcacatgtacatacagatatttcctagctctgtctgctgagaaggtctggaagcagtga

SEQ ID NO: 169737 - DNA, 607 bp, Homo sapiens
tctcgggagtctgcattattagttggacctcttcattggaagcactaatgaatcttgtctgattaagctcagcaggcagaattgctcctagtacagtaggtttttggaaagcaaagaaggaggcggaatgacatcctagtgagggtcatctggtcgatctgagtgctaagctccagctccctatggggccttatggtggcactcacacactctgcgccccttcagaaggatttctccttacacctcttccttgaatatccatgccaccacccttacaattttggcctttctaggtccttgactaaggagtgaaaatattgacaactttctattattttatagaggctcttatttcagattatctcccttttaagaaaaatggatagccacttttccatggctagaggtgacaattttcaatcattttaattatacctaacacatacacagtgttaccatgtactattatacattcatcccttgtaataacgctggaaaactggtgtcctmttatgattcccatgttacagataagctggaacccagagaggttaagtaacttgcccaagttatatggcaagtcatgaattacctgggattgaagctt

SEQ ID NO: 169738 - DNA, 618 bp, Homo sapiens
gcccatactgggatctgatcctgctgactccctaatcgtggacttccggtctccagaactattgtttaagccacccagtctctaatattgtgttatgaaagctcaagtagacaaatgcaaagagcccagatatcatcctctagccttccttcccaaactcacctgtcttagattctattccattagttccagtgtaacaaactgattcatactgatctaataatcaggaacaaatttcatcatcccctcagagacatggtgggaaatgaggcttttkatgcccagccaataaaacaacctagcagccacttacttgtccctccatttctttgcggcattggctggtgttcaggctggctcgaattaccaaataaggagagggaatggaagaggagacaatgggaaatgaaaggcagtagacagattttgaaaatgttcacttttatgcatgtattatgagcctatactttgctgctagtagggaaataaaaatgagtaagatatttcttctacccctaagcccaacgtttaaagaaatcaaacctagtgaaagtgaaaaacactaagtcattgtcacattttatttttttctaggatctaaaaaactgggcttacgac

SEQ ID NO: 169739 - DNA, 597 bp, Homo sapiens
aggtgccatagaaccctggggtggagcagaggggagggaggaggtgccttctggtctcagtgggaacaatgggagatatgatggacaagccagccatcacacaccaagcctggtatagccatgcctggcgtttgcactcctgtccctagacaacgagacctcaccaaggcaccaggcagggctcacaggaggggctcggaccctgttggcagaacagtaagctggaggacaagcacaaagctgtgggagagtccaggggagctgtatatgaggagcaaaacctcggtattgttggtgggaatagaaacaacttgatctccataaaggagagccaaggcaggtaagagtttcctcctcttagaagcaagggaggcttgaagaccaagagaacatgataggcttcccaacaatctgactaggaaggctgggtattcagccttctcctatgaatayatttccggctcccagtggctcctccaaacagccaagaagagagctgtgcatgaccctcagcatctatattaccgaggaggagatagcttcagagaccgaacctaccaggcccacccaggtcagtagaggtggagtcaggaagag

SEQ ID NO: 169740 - DNA, 567 bp, Homo sapiens
ctgttttctctcccatctatggatctcattgttctaatgatgacacgaataggccaggaacaggggtagcagcctgtggaggaggtaagaaaggtccatatcctcaggcaacctcaacaaggctggttcagttttccaaaataggaggagctgggagccagggsagggaagtggctctgctgaacagggtatgcattgacagaggttggaaaagacaagaacaaaagacaggggagggggtctcctcggctggcagaaaggacactaaagccaggtctcctggggcagtgtgtgggggtggggattacaaaccctctgacagagagccaatctgcccctttgcctaacagctttacctcccagcaggggcccagcaaccctgcagagactgtactccctttttcctggcatcattagcctacatcaattgacttcttcctctaagactaggattgggaaactccctgaacaaagacacttgtgcagcatctcaggttctgccagttacagttggcccccctggtgctttatccactcccttccccagccctctccccacacgcagcc

SEQ ID NO: 169741 - DNA, 484 bp, Homo sapiens
ctcttgcgactgcccagcatgcctgacagggccaggggttgtggaaaggtgcgaggagaaaagggggggtggagctgagatcgctcatgctgggtagttggcaaagacacacttccaaggctggacagcactcctagatcagcagagacgatgagcaaggcaggggacaaagtctgccttttgccaggactggtccacatttcatcatttggtttggttggtaccagttgtccaaaaatcatgagcctggtgtctggcaggagacccttgatgagcaaagataaaagttgccgcgagattttggccatatgccttagcttcttgtggacagttctagagaaaatgaacaagaaaggccgaggaagggtaaaaggaacattgggaaggaatctctctactcttttgcctgcytatctggacacttctctctctctcacttccctaaagaaatgagagatttgtctgctcccatgcagacaggaaa

SEQ ID NO: 169742 - DNA, 582 bp, Homo sapiens
aagcttctcatttcacctgtaacagtggggagacacgcagtggctgataaggatcctccagggaattttctggctgttagaccaggcccaagcccttcatgaacaggccattcccagggcctcggatttcaggatgaggtgattagcaagggggtttcagacccggcagagccctctcctggctgtgcatctgcagaactaaggagctgctrtgtctgcagctgctgggagctgcagcttgctctgtctctgagggtcagcgagggcgtgacagagggtaacaggcagaactgttagcagactggcattgcttctcagtctcagtctgtagtgaaactgaagagaaagctcttctgtgctggcttcaaagatgacaagcagaagaattccacctctctttagtattctgaaattttttccatgctctcttcttcccacacacaaaatcctagaattggagaattgcaatacactaatatactttaaaagcctttggagtacagttctcctcattttacatatagggaaacagtcatgaaaagagggagagtggcttgccacagaccacacattaaagagtgt

SEQ ID NO: 169743 - DNA, 351 bp, Homo sapiens
tgatggcagccatattcctgctaatttctagcatgggacagatgatcacacctgtagttggttggctaatatcaacattagctgctattaggttggtgcaacagtaattgccattaaaaggaacgataagaaccacaattacttttgcaccaaactaataayagctgactctatagatttacaagtcctaatcagtcatttggattaccatgaaaattcgtttactaataataatatttattgagtatacatagcattgtaagactatgtattttgcttgcattatctcatttagttctcacaatatctttataaggtaggcactaatatcatgtctgtttcctaactgag

SEQ ID NO: 169744 - DNA, 543 bp, Homo sapiens
actacctgtggcttgtctttttttttctttcggtttctaatgctgaatttataatcttctgtaacttcgtgtgaccacacatattcaaaattcctgtatcaatttgactcactgccacatttccttctgtggggaagaggaaactacagacctcaaatggcttttacattgccggcatgacaagttccctgtacatatggaatagcagatgcctcctttcaaggctgctcttgacattgtggttgttaatgattcttccacttgggaatatttccgttctgtaccaaaaacctatctaaggggcaaaggaaagtggtgaaaacgggcasaatacagatgccagcaagtttcccagttggtcatgatcaacacatcattccagaaggaataactgcgggggggcggggggattagggaggggaataaaaacaaattttggcagacccaagcttagaagaaaaacaatactttcaccgaatttagcctctgctctctgtcatagaaaattataataagtacacgagaattgcattcaattttggt

SEQ ID NO: 169745 - DNA, 411 bp, Homo sapiens
tttttcacccaatatttaggcctcatattagctaccaccattgcaataagaaggcttgagctttcatagccccagcagacatccttggatgtagttctcagaagcttctggaggtctgcactctataagaacactacagatacgactggaagtgaaaaaaaaaaggtgctcttttccaaaatatcttgcatattcctgtcaaagtaactgaaatttcaccattagagattttgttccctgggttgttttcttttcttttttttttttttttttttaraaaaaaaacctttgttctctagtgagtaaatatttactgaacacttactgaattttatgcttaggtttgtggtatatgttctgagagttataggacaatgtaggatccagttgctgccatcaaggagaaacatt

SEQ ID NO: 169746 - DNA, 333 bp, Homo sapiens
cacaaaataccaagcaaaattcatgactcatggctatttctcaataaatatcaatttgctttctttttttcattctcttctactcattactcctcccctacactaataaattaaaatacagggatcagtcagtttaatactgttttaaggaggactacatgttatttggagagaagggcaataagtccaccaaattcacatgaccccaagaggctacaagaaaggaaccacaggsagattgtatactttttaagaaagagaagggaattgacaaagatgaggtctggggggaaagaaagcttacggaaagaaaagaaaatgcatgggctcatt

SEQ ID NO: 169747 - DNA, 587 bp, Homo sapiens
agataattacattggttctgcatttgacatatcagaggactaaaagttgtggttctgctgcagaccaaatgccctttggaaagtgacttttctccccatatgaactgaatagtggcarttcagcctcaaccacagctgaatgtgacccctctgctctcccactagctagcaagttcaaacttagcctctgggcctcataaatccaggcatgtatcagttcatctccaaacacttggtatgtctgccccatcaattaaaaagcacaaggcaagtgagccactagaaagttcaagcatgattaggcagctaccgtgcattttcaaatccactttcaacatctccattattttaactaagacctctagttattagtcttattaaaagagaagaaagaagaagaaaaagaagacacaaacttgctttccagacaggttaatacaagcccttcctcagtgttctattcttgatttaaggaacattctcagagtgagagaagagttttgtgttgtatggaaaatttgactcaacccaaaaacccagccaacaccacaaagtggattggagtcaaatcagataaatagtaaaag

SEQ ID NO: 169748 - DNA, 587 bp, Homo sapiens
agataattacattggttctgcatttgacatatcagaggactaaaagttgtggttctgctgcagaccaaatgccctttggaaagtgacttttctccccatatgaactgaatagtggcaattcagcctcaaccacagctgaatgtgacccctctgctctcccactagctagcaagttcaaacttagcctctgggcctcataaatccagrcatgtatcagttcatctccaaacacttggtatgtctgccccatcaattaaaaagcacaaggcaagtgagccactagaaagttcaagcatgattaggcagctaccgtgcattttcaaatccactttcaacatctccattattttaactaagacctctagttattagtcttattaaaagagaagaaagaagaagaaaaagaagacacaaacttgctttccagacaggttaatacaagcccttcctcagtgttctattcttgatttaaggaacattctcagagtgagagaagagttttgtgttgtatggaaaatttgactcaacccaaaaacccagccaacaccacaaagtggattggagtcaaatcagataaatagtaaaag

SEQ ID NO: 169749 - DNA, 620 bp, Homo sapiens
ttattgattaagtgattttttcattcctgtgcacacaaacatgtaattaaatgttcacaaacatatacattcctctcggttttggtttctgtaactaccaaaaataatgtttgagaaatctcccaaacctcccagtgtattattcatgtaacctggatatctcatgaaaacaaaatgtacaagactgtagtgccagttagcatgtgaaaatatccggcaacagtgtgtttttacttctgtgataaactgtattgtctttttgttataatgrgaaaggattagtaaagcttaccaaataaacagcagcttccttagagacattgacccttgtattttacaaaaccaagaaaccaatactgaatagaatatggggctctctggcagactaacggagggcaaccttcaaggatctgagtcagatgaggatttgggctagtgatacattttgatactttctattttaagcaccccaaaagctagatgcttatacacagctaatccaattttttctaaaaatctgtagtctgcaaaattgtgttcctttagaactttttgcctgtttttggcctggaaatgataatatttaaataatacatcttgaaatgcagaggtccacccaa

SEQ ID NO: 169750 - DNA, 620 bp, Homo sapiens
ttattgattaagtgattttttcattcctgtgcacacaaacatgtaattaaatgttcacaaacatatacattcctctcggttttggtttctgtaactaccaaaaataatgtttgagaaatctcccaaacctcccagtgtattattcatgtaacctggatatctcatgaaaacaaaatgtacaagactgtagtgccagttagcatgtgaaaatatccggcaacagtgtgtttttacttctgtgataaactgtattgtctttttgttataatgggaaaggattagtaargcttaccaaataaacagcagcttccttagagacattgacccttgtattttacaaaaccaagaaaccaatactgaatagaatatggggctctctggcagactaacggagggcaaccttcaaggatctgagtcagatgaggatttgggctagtgatacattttgatactttctattttaagcaccccaaaagctagatgcttatacacagctaatccaattttttctaaaaatctgtagtctgcaaaattgtgttcctttagaactttttgcctgtttttggcctggaaatgataatatttaaataatacatcttgaaatgcagaggtccacccaa

SEQ ID NO: 169751 - DNA, 528 bp, Homo sapiens
aaccagtgggaaggaaagagctggcagttggaaggctccagctcatggtcccagttctaccactcactaggttgtgaccttggtgggaacatgaacattcttgggcctcatgggcttcaactgtataaaaggaaggggtcagagacagtgatttctatacttccttcccggtttaaaacatatgattcagttwtgatcagaaatagacagaaaccacggagtatctcttcacatttttcagagttgtgctgagaaaataaatctagaagtcgcagcctgggaaataaaaggcagctgcttttacctgagtattctctctctctctctctctctctctcctctctctctctctctcacacacacacacacacacgccccattaagaaaataataatattgaaacagcaagctgtaagagtaaaaacaaacaaaggctgaaggagaagtgagcagtgtagcctgtctaggaaaccatctgattcacagactgaactttaacattttagactactggctaccaagaacata

SEQ ID NO: 169752 - DNA, 496 bp, Homo sapiens
aatactttttgtacttgttttattttttattttatttatttattttgcgacagagtctctctttgttgcctaggctggagtgcagtagcatgatctcagctcactgtagcctccacctcctgcctcagcctcccaagtagctgggcgcacccagtgcgcactattatgcccagctaatttttgtatttttagtagagacagggttttgccatgttggccaggttggtctcgaattcctggcctcaattaatctgccagcctcggcctcccaaagtgctgggattataggcmtgagccaccatggctgacctgatattattttattttaaaaatgaataatgtagtcaacggccacaaaagagcatacagtaaatacaagtctctctcattgccttgtccgtcaaacacaacaggcacaactggtagcaatttgttgttattcttccagaaagatggtatgcctgtaaaagcataaatgtataaaacaaataatagg

SEQ ID NO: 169753 - DNA, 404 bp, Homo sapiens
gccagtgaatttgtatttatctcatgactaaagttctgaagtaaaagctaaaggatctttgtgtgtttgcatatgtgtgtgtgtatatatttaaaaggcctttataatttctataattttatgtttaatgggcaattaaattcattttaatttccttctatcacactagactttttctctccgtaacctgtaakgtgaatttctctagttgattttcacctgagttgtttcctttaataagcacatttaagactatttagctgacaactgcctatggttatcaataattgatacaggttacctattgaaataggttatcaagaatttgaaagtctaagatgggaaacaaaatgtctttatgaatttataaaatgtacttctaagggcacacctcatatgtctat

SEQ ID NO: 169754 - DNA, 404 bp, Homo sapiens
gccagtgaatttgtatttatctcatgactaaagttctgaagtaaaagctaaaggatctttgtgtgtttgcatatgtgtgtgtgtatatatttaaaaggcctttataatttctataattttatgtttaatgggcaattaaattcattttaatttccttctatcacactagactttttctctccgtaacctgtaatgtgaatttctcyagttgattttcacctgagttgtttcctttaataagcacatttaagactatttagctgacaactgcctatggttatcaataattgatacaggttacctattgaaataggttatcaagaatttgaaagtctaagatgggaaacaaaatgtctttatgaatttataaaatgtacttctaagggcacacctcatatgtctat

SEQ ID NO: 169755 - DNA, 519 bp, Homo sapiens
gaaaaaagtcttaaaagaaaccagagaaaaatattacatacagaaaaacaaaggtaagtataacagatttctctaacataacaacaataaaaacaatggaagtgagaagacagtggaacaacatctttcaatactgaaagaacaaaatactttcaaactataattctatacccaggaaatatctttcaaaaagcaaggtgaaatgaagactttgtttaacatatccaagatgaaataaatcatgtcaagcagatgtgcaatacaagaaatattaaaggcagtgcttcaaacagaaggaaattgataccagatggaaacatgaatcaatgcaatgaaagaaaagcatggggaatagtaacttcatggataaatctatatgccttttatttcttatttaaagctttaaataatataattgactttaaaaataayagcaatgtattgtaggctttataatatgtaaaagtaaaatgtgtgacaaagtattgcaaggttcttatgttacaggtaaaaggaatt

SEQ ID NO: 169756 - DNA, 400 bp, Homo sapiens
atcatttgctactgtcctcttgtagacttaaaaagatttttactgaatgccaaatattaagaactcacaaggtaagagtcctggatgtcattatcttcctcaaagaagatttaattatttgggccagtagttagagtacagacagattcccttggtctaactggggatggatatggtacgagaataggatccagacattttaagrgctgtaatatttttaccttgcccttattcctgtaactgtggaatgtcaccataacctctcttccttggcaggctctgatttccaacttgtgtttctccagcctttttaacctgctttcttcttagtttctcagcatcttatgccctggcagtttaatgtttgtcaaatgccttaagacaagaactttggcctcat

SEQ ID NO: 169757 - DNA, 613 bp, Homo sapiens
gacaacaacctggccactgcctgttttctcaagttcctggggctttacagtcagcaggtggcaaagccagccaggcttgcgtccttcccttcaaggcagcaagtttccctagggtggagtcagaggtgccgtccaggagccagaaactgaagtcaaaatccttagaagtctacctgattctattgtactgcagcagagctggcactcaaaccatgagtcacagtccttcccacgctttcctcccttttcccstggcagagaggcctcaccccatggttaccacccccacagacccaacagaatactgccaggctactgcagatgttccattaaggcctaggggctttttagtcagcgtatggtgaatgctgcctggcccagaactcaacattcagagcagtgggatcccctctggcctaggataggtccagaaaagccaagggctggaattgaggatcccaggagcccacttggtgctttacacccctgtggctgaactggtacctaaggtgcaagacaaagtcctctttactttttcttctgcttttctcacgcaaaaaagtttcatgtgaagccagcaagtctcagattctctctcagggcccacagtgtc

SEQ ID NO: 169758 - DNA, 613 bp, Homo sapiens
gacaacaacctggccactgcctgttttctcaagttcctggggctttacagtcagcaggtggcaaagccagccaggcttgcgtccttcccttcaaggcagcaagtttccctagggtggagtcagaggtgccgtccaggagccagaaactgaagtcaaaatccttagaagtctacctgattctattgtactgcagcagagctggcactcaaaccatgagtcacagtccttcccacgctttcctcccttttcccctggcagagaggcctcaccccatggttaccacccccacagacccaacagaatactgccaggctactgcagatgttccwttaaggcctaggggctttttagtcagcgtatggtgaatgctgcctggcccagaactcaacattcagagcagtgggatcccctctggcctaggataggtccagaaaagccaagggctggaattgaggatcccaggagcccacttggtgctttacacccctgtggctgaactggtacctaaggtgcaagacaaagtcctctttactttttcttctgcttttctcacgcaaaaaagtttcatgtgaagccagcaagtctcagattctctctcagggcccacagtgtc

SEQ ID NO: 169759 - DNA, 537 bp, Homo sapiens
gctaaatcagccaacactaaaattgtttaaatgtacaatttgaatgaactccatggtctaagtcaaattacctatgataacccattagttatcagtkctatgcacctaaattggaaaacaactggtattccagaggacatatgttaagcatggtctcattaagaaccaggacagctgccttgtccttcctgaatccttaaagcttttgttattaaaggtttttcattccatgactggtcatggaaaagataaaataatccaaattgaatatattaatgtggtgacttataaattaaggaaatagtttaaaaccaatgtttggttccatattcccaggaagacaatcaaagcttcaggtacatttggctacctgatgggccatttaaacatttataaaggaatttcactcaattgtcattttcaatgcatgttttctggtgtataaaagcttttccatgcaagagggctgatcttatagcagtagattattatgctacagtgtattttaaccaggtaaagaaagctttttatggttca

SEQ ID NO: 169760 - DNA, 537 bp, Homo sapiens
gctaaatcagccaacactaaaattgtttaaatgtacaatttgaatgaactccatggtctaagtcaaattacctatgataacccattagttatcagtgctatgcacctaaattggaaaacaactggtattccagaggacatatgttaagcatggtctcaytaagaaccaggacagctgccttgtccttcctgaatccttaaagcttttgttattaaaggtttttcattccatgactggtcatggaaaagataaaataatccaaattgaatatattaatgtggtgacttataaattaaggaaatagtttaaaaccaatgtttggttccatattcccaggaagacaatcaaagcttcaggtacatttggctacctgatgggccatttaaacatttataaaggaatttcactcaattgtcattttcaatgcatgttttctggtgtataaaagcttttccatgcaagagggctgatcttatagcagtagattattatgctacagtgtattttaaccaggtaaagaaagctttttatggttca

SEQ ID NO: 169761 - DNA, 486 bp, Homo sapiens
gaaaggccgtctttgccatccacactacagaaaaactttggagcctcgaaccttgggtttataatctcacaactgagaagggtccctccacactcctgcaactgtacacctgttggaacccttaaggtaaaactaatcaggaaagtttctccccagaagaagatggcatccttgatgtgaacagcttttccacaagatcacggatcaaaacttctactatcatgagactcttatmtttgaatatttttttcttgtttatgcctctatgaacaatagaaatgaaaagggggtctattatgtgctcttacagggtatgcttttccttgtgaaggattttgcagccagccttatacatgaataaacttacactttaatagataaaagatgaaggcccaatgtaggtgagaaactttagtgatacatacattgcctcaaaatcagtcaaaactcctcttaacccatatcatggattaaagagaacattga

SEQ ID NO: 169762 - DNA, 486 bp, Homo sapiens
gaaaggccgtctttgccatccacactacagaaaaactttggagcctcgaaccttgggtttataatctcacaactgagaagggtccctccacactcctgcaactgtacacctgttggaacccttaaggtaaaactaatcaggaaagtttctccccagaagaagatggcatccttgatgtgaacagcttttccacaagatcacggatcaaaacttctactatcatgagactcttatctttgaatatttttttcttgtttatgcctctatgaacaatagaaatgaaaagggggtctattatgtgctcttacagggtatgcttttcyttgtgaaggattttgcagccagccttatacatgaataaacttacactttaatagataaaagatgaaggcccaatgtaggtgagaaactttagtgatacatacattgcctcaaaatcagtcaaaactcctcttaacccatatcatggattaaagagaacattga

SEQ ID NO: 169763 - DNA, 555 bp, Homo sapiens
gcagccagctaatctcccacacccacggctgcatacctgcactttcaggtagygtcaggctgcttcctcggaccagcctcaggttgcttaccttcttgctgacagcctctttggttttcctgctgctgcttcttttttttttttatcacctcaaaactttaattatgtagttacccctcaactcctgctttcccctgttgggggctacacctgtgctgccccatgtaatctggacgttgacctcccgtgcccccttttgctttccgttaggctacagtggtaaccacagtactgtctttttgccactaggggtcactgtcacatgtccaaagaagtgagcttggccgctgtagattagaaccacaggggtggtagactgcagatctatcaggagaccctagggggccatctcaaccccacctcttcctccaccctgaaataattttggatggataggtgtttttggaactaagacatctccagttaaggcgatgtttgcttcacgcctgcacctgtgtcccatcctcttcccatctgtatatgccaccagtaagc

SEQ ID NO: 169764 - DNA, 555 bp, Homo sapiens
gcagccagctaatctcccacacccacggctgcatacctgcactttcaggtagtgtcaggctgcttcctcggaccagcctcaggttgcttmccttcttgctgacagcctctttggttttcctgctgctgcttcttttttttttttatcacctcaaaactttaattatgtagttacccctcaactcctgctttcccctgttgggggctacacctgtgctgccccatgtaatctggacgttgacctcccgtgcccccttttgctttccgttaggctacagtggtaaccacagtactgtctttttgccactaggggtcactgtcacatgtccaaagaagtgagcttggccgctgtagattagaaccacaggggtggtagactgcagatctatcaggagaccctagggggccatctcaaccccacctcttcctccaccctgaaataattttggatggataggtgtttttggaactaagacatctccagttaaggcgatgtttgcttcacgcctgcacctgtgtcccatcctcttcccatctgtatatgccaccagtaagc

SEQ ID NO: 169765 - DNA, 548 bp, Homo sapiens
aatctggggaagagcattccaggctgagaaaatagaaagtgcaaaggccctaaggtggaagcaaacttagtgcaacaaaccagctttggggagaagcaaagagggcttttaggcctcttttgctggaagagaaatgggatctcaggaaagtaaagacctttgccctctagtaaggggtgggttgggaatatagtcttctaactccttagacaagtctcttcctggggccccccacagttggcctaaaggggagacacacccaaggctcgggtttccctctggcctgytccagccccagatgaacaaaggccccctttctccctctggccctgctggtccagttgaagcacccattgtgtggctggacagctctggccatagcccagatgcctcccatgccctctgccatttgcccactccagcctttctggttcttctctgtttgcccagcctgcccgtctctccacccaggccttgcacctgtgtctgctgtgttggtctggtagcttcggctgctgtaagtgaccagttgtagttgcctgttgagt

SEQ ID NO: 169766 - DNA, 523 bp, Homo sapiens
attcaactggaaaccaaaaaagagtaggagtagctatacttagataaaatagactacaaatcaatgactataaaaagagacaaagaaggtcactatataatgataaaggggtcaattcagcaagaagatataataattataaatatctgtacaccccacaccaaagctcccaagtatataaagcaaacgaatagatttaaacagagatatagactgcagtacagtagtagggcactttaacatcctattctcagtaatggacagatgaaccagacacaaaaatcacgaagaaacatcagagttaarttgcacattagaccaatgaggcctgacatgtgcagaacatttcacccaattgctgcagaatatacattcttttcatcagcacgtggaacattttcctgaatagactctctcttaagccacaaaacaaatatcaaaaaagtaaaaattatgtcaagtacttttgtgaccacattggaataaaaccagaaatcaattcttggaacttaggaaaatacac

SEQ ID NO: 169767 - DNA, 527 bp, Homo sapiens
caaagctcccaagtatataaagcaaacgaatagatttaaacagagatatagactgcagtacagtagtagggcactttaacatcctattctcagtaatggacagatgaaccagacacaaaaatcacgaagaaacatcagagttaagttgcacattagaccaatgaggcctgacatgtgcagaacatttcacccaattgctgcagaatatacattcttttcatcagcacgtggaacattttcctgaatagactctctcttaagccacaaaacaaatatcaaaaaagtaaaaattatgtcaagtacttttgtgaccacattggaataaaaccagaaatcaattmttggaacttaggaaaatacacaaacacatggaaattaagaaacacagttccaagcaaccaatggatcagtgaggaaactgagaagaaaatttaaaaatgtcttgaaacaaatggaaatggaaacacaacataccaaaatctctgggacacaaaaaaaagcagtactaaaagggaagtttatggcaa

SEQ ID NO: 169768 - DNA, 480 bp, Homo sapiens
tagctatacacaatggaatattattcagccttaagaaagaacatggaggtacctggaggacattatgctgagtgaaataagtcagacacagaaagaaaaatgttgcatgatctcacttatatgtggaatttttgaaaaggtcaaacatacagagaaagagaataaaactggttcacagggatgggagcaggggaggaaataggcagatgtaggtcaaaggatataaagtagcagagatttgtaggatgaagtctagggatctagtgtacaatataaggactatagttaatgaaattgtgttggggatttttgttaagtagattttagctgctcttgtcataaaaaagtaactacgtgagacaataaataccttaatttgctccaccatagtaaccattttactatatatatatatatatatatatatatatatrtatatctcataacagcatgttgtaaacctcaaatatacatagccaa

SEQ ID NO: 169769 - DNA, 614 bp, Homo sapiens
aagcttcccaaagtgactccaaaactaccatgcagcagtagtgacatggctccttattttcacagtgattaatatttactgagaacctgctatttacrgttactttacatacattatccttcttcatgtgcataacaaccctgtgaaggaggtagccatatcccagtttaaaaggacaaactgaaatgcagaagggttcagaaagtctgaaacacatacagctgctacatgtcacggctgggtttgaagcaggccccagctcttttccttgtgctgtgatgttgctgtatcgctcagatctaatgttctgtggcccattttaccatggtatcactgaattagcacattatcaattccctaatcacatggctgcttcttagccacacataattctactctatgttagcgagctgggctcagcagttactttgatctttttttaaaggctgcagtgaacatccagtaataatgtatgagcaacgtaacctttcaaagtggaaatatgtctaatggtcacaaccacctctcctttcaactcccttaccctcacatctccattgcaattattccttaattattgaaacctctagtccattgatgctgtcactctttca

SEQ ID NO: 169770 - DNA, 614 bp, Homo sapiens
aagcttcccaaagtgactccaaaactaccatgcagcagtagtgacatggctccttattttcacagtgattaatatttactgagaacctgctatttacagttactttacatacattatccttcttcatgtgcataacaaccctgtgaaggaggtagccatatcccagtttaaaaggacaaactgaaatgcagaagggttcagaaagtctgaaacacatacagctgctacatgtcacggctgggtttgaagcaggccccagctcttttccttgtgctgtgatgttgctgtatcgctcagatctaatgttmtgtggcccattttaccatggtatcactgaattagcacattatcaattccctaatcacatggctgcttcttagccacacataattctactctatgttagcgagctgggctcagcagttactttgatctttttttaaaggctgcagtgaacatccagtaataatgtatgagcaacgtaacctttcaaagtggaaatatgtctaatggtcacaaccacctctcctttcaactcccttaccctcacatctccattgcaattattccttaattattgaaacctctagtccattgatgctgtcactctttca

SEQ ID NO: 169771 - DNA, 597 bp, Homo sapiens
actcctcccttcttctttgccatcagaaccttgattttatgcagttcccagggggccatggtcttcagggtgactggtcatccaagtgacactcgattagtcatggccccatcatggcagctcaattcctgttgtcagcaatcggtttaaaaattggaatgcacatgtggcacaattctggctaatgagttgaaaggaaaatctgctacagaacttcctgggatattttccttgctattaaaaaggaatatgtaagtctcttccttgtttatcctatattctattgtctataaagccctctatcatccggcccttgttaacctttttcatctcatgtcattctttctttgcttactcagcacactggcctcctctctatttttcaaacccaccaggtgtcggggtctctggccttgctggatgcttcccctgaatacctttcttaaagttctttgcatgycttgctccttcttgtcatgcaggattcaactcaactgtcatctgtttagaaaggcttcccctgctcatcccactataatcataaatgataatgtaagttttatttatatttctgtcatgacttgctgtatgactctt

SEQ ID NO: 169772 - DNA, 604 bp, Homo sapiens
aatcaacatcctaactattatcctcagtcttacccccttctaaacattctccactttgcttccagagcaatctttgtacaatccaaacctatttctgcttgccttgtggaaatccttcaatatcttaccatttccttctatagaaaacacaaaaatcacagcactcaaacaaagccctaccttatctgtcaacttctttaacccctttttccttacttcctaccttatgctgaaactgcaaccakaaagaattccttgcaagagcatgattcatgctgctgcaggcttcactcaccatgcacacacatactatttcctcttcttgtttcccatgtccttataaacacttcaaattttcagccttcttattattttcctatcataggtacaaaatggaatctcattgtatttaaatttgtttttccctgattatagtgcagttgcacaagctgcttattggctactcagttttcctctttgatgaactgcatgttcatatcatttcattcacttttctgaatttacatttttataatttatttatggtattcgtagcatagtatttaattatatgcacatattttctgcaagaagagactttaaa

SEQ ID NO: 169773 - DNA, 312 bp, Homo sapiens
atgtgtgtgagagtgtatttcatataaggagctaattttcctagttaattagattgtccatcatctccctgctgatttgtaatgtcaccttagtcaaacagccrgtttctgaatattgtaaggcttcctagctgttccgttgatctagctgttcatcctgtgtgtatgccaaatggttttaatttatattgttttagatgaagtcttgattttggttggacaagtcccctctcattttcttttccaatattgtgttaactctttttagactttaaccctttgtggtaagcaaaatagctgtccaaagatgtc

SEQ ID NO: 169774 - DNA, 523 bp, Homo sapiens
ctataacaaattaccaccaacttcatgccttaaaacaacagacatttattctcttaaaggttttggatgtcagaagtccaaaacaagtgtctcactgggttgaaatcaaggtgtcttcagggctgcacttcctccagagcttccaggggacaatccctttttctgcattctcctatattctggaatctgtcctcgttccatggctcatgacattgctctttctcctgctgctgccatcatcccattgccttcttcctcttmtagcagatctccctctgtctgcctataagaacacttgagactacatcacaggacccactcagataatgcaggagatcaccttacctcaagatccttaatctattcacatctgaaagtcacttttgccatataaggtaactttcacaggttccagaaattaagacctagatgtctttggggccattattcaacctatcacatatggtagcctttaaactctatacacgggggacatttaaaaatatatatatatataaagtca

SEQ ID NO: 169775 - DNA, 599 bp, Homo sapiens
aaagaagtctagaaaaagggacagagatggtccaaagcctaaaagtgtaaaatccacagtgaattccatccaggctgtgagtagtggttcagtgttgttgacagtgggagcgcgtgtgtgtgtgtgtgtgtgtgtgtgtgtgtgtgtgtgtgagggaccttagagactcagatagaactggttaattgtaggaaatgatatacttttttccagattgttcattcatttgttttaacaagaagcatttgagttaatctaaaaaaatttaattttgctatctctccatctaaagccacagtatttttcttatttctttagttggcagtgaaaagccctctacttcactgaacacacacaaaaacctttgaataggtacaattatgttaaaggctaagatggtaaaacaagcttaataagcactctatccctggatggaaattttttgctgttccatgaagaaaatactccaayggatagaagtttactcttaaattccaccacacagaataaagagaaagcacccaaagaggaaatgttatggatcagaactggcaagcaaaggaaatccaagtgtataaagaaccatttaaatcagactg

SEQ ID NO: 169776 - DNA, 561 bp, Homo sapiens
ttacagagcacattttcctcccctgccacctccaccagaacaggtgctggcatccatggctgagagatccacagatggtttacatcacaggactctctgcagacaacccccagtaccagcctggagccttgtagataatgctggggtggctagatccagaagagagataacartcactacagatcagctctcaggaagccatatccctaagaaaaggggagagtactatattaagggaccatcccatgggacaaaaaaatctgaacagccttgagccctaggccttcccaaagacacagcctacccaaatgagaaggaaccagaaaaccaactctggtaatacgacaaaatgaggttctttaacaccacctaaaaattactctagctcaccagcaatgggtccaaaccaagaagaaatccctgatttacctggaaaagaattcagaaggttaattattaagttaatcagggaggcaccagagaaagtcaaagcccaatctaaggaaattaaaaaaaaaaaaaagaaagatacaagaagtgaagggagaaatatttgattaa

SEQ ID NO: 169777 - DNA, 561 bp, Homo sapiens
ttacagagcacattttcctcccctgccacctccaccagaacaggtgctggcatccatggctgagagatccacagatggtttacatcacaggactctctgcagacaacccccagtaccagcctggagccttgtagataatgctggggtggctagatccagaagagagataacagtcactacagatcagctctcaggaagccatatccctaagaaaaggggagagtactatattaagggaccatcccatgggacaaaaaaatytgaacagccttgagccctaggccttcccaaagacacagcctacccaaatgagaaggaaccagaaaaccaactctggtaatacgacaaaatgaggttctttaacaccacctaaaaattactctagctcaccagcaatgggtccaaaccaagaagaaatccctgatttacctggaaaagaattcagaaggttaattattaagttaatcagggaggcaccagagaaagtcaaagcccaatctaaggaaattaaaaaaaaaaaaaagaaagatacaagaagtgaagggagaaatatttgattaa

SEQ ID NO: 169778 - DNA, 403 bp, Homo sapiens
tgtagcatacaactacttccacaactactgttttakaaggttctagtccttgagaagtataaaaatccacctggacagatctccatagtataagacctagctgagattccagccaaagttccgttttttttttttttttttttcagacagagtgcagtggcgcgatcttggctcactgtaagctccgcctcccggtttcacgccattctcttgcctcagcctctcggagtagctaggactacaggcgcccgccaccacgcccggctaattttttgtatttttagtagagacgaggtttcaccgtggtcttgatctcctgacctcgtgatctgcccgcgtcggcctcccaaagtgctgggattacaagcgtgagccaccgcgcctggcctccaaagttcccatt

SEQ ID NO: 169779 - DNA, 403 bp, Homo sapiens
tgtagcatacaactacttccacaactactgttttagaaggttctagtccttgagaagtataaaaatccacctggacagatctccatagtataagacctagctgagattccagccaaagttccgttttttttttttttttttttcagacagagtgcagtggcgcgatcttggctcactgtaagctccgcctcccggtttcacgccattctcttgcctcagcctctcggagtagctaggactacaggcgcccgccaccacrcccggctaattttttgtatttttagtagagacgaggtttcaccgtggtcttgatctcctgacctcgtgatctgcccgcgtcggcctcccaaagtgctgggattacaagcgtgagccaccgcgcctggcctccaaagttcccatt

SEQ ID NO: 169780 - DNA, 403 bp, Homo sapiens
tgtagcatacaactacttccacaactactgttttagaaggttctagtccttgagaagtataaaaatccacctggacagatctccatagtataagacctagctgagattccagccaaagttccgttttttttttttttttttttcagacagagtgcagtggcgcgatcttggctcactgtaagctccgcctcccggtttcacgccattctcttgcctcagcctctcggagtagctaggactacaggcgcccgccaccacgcccggctaattttttgtatttttagtagagacgaggtttcaccgkggtcttgatctcctgacctcgtgatctgcccgcgtcggcctcccaaagtgctgggattacaagcgtgagccaccgcgcctggcctccaaagttcccatt

SEQ ID NO: 169781 - DNA, 551 bp, Homo sapiens
tagggagtactgccatcttaacaatgttatgtcttcttatctatcaacatgcaatgtgttccatttatttaggtcttctttaattttcttaatattttataatttccagagcacaagttttacatttctttttttaaatttagtcctaagtactttattcgttttggtgccattgtaaatggaattattttcttaattttgattttggattgctcattgaaattgatataaatacaattattttttgtatattaatcttttatsctatcattttgctgagctcatttattctaataggcttttagtaagttgtttagtattttctacatacaggatcatgttatttgcaaatagataaactactacttctttcttttcaatatggatgttatttattttattttcttgcctaattttccctgactagaacttctggtctgatattgaatagatgtgatgagagtggacatccttgtcttgttcttgatcttagagggaaaacattctgtctttcaccgttaagtatgttagctgtgagtttttttgtagat

SEQ ID NO: 169782 - DNA, 551 bp, Homo sapiens
tagggagtactgccatcttaacaatgttatgtcttcttatctatcaacatgcaatgtgttccatttatttaggtcttctttaattttcttaatattttataatttccagagcacaagttttacatttctttttttaaatttagtcctaagtactttattcgttttggtgccattgtaaatggaattattttcttaattttgattttggattgctcattgaaattgatataaatacaattattttttgtatattaatcttttatcctatcattttgctgarctcatttattctaataggcttttagtaagttgtttagtattttctacatacaggatcatgttatttgcaaatagataaactactacttctttcttttcaatatggatgttatttattttattttcttgcctaattttccctgactagaacttctggtctgatattgaatagatgtgatgagagtggacatccttgtcttgttcttgatcttagagggaaaacattctgtctttcaccgttaagtatgttagctgtgagtttttttgtagat

SEQ ID NO: 169783 - DNA, 623 bp, Homo sapiens
taggtgaattaactgtgtgtgacatgtgaggatctctctcccaaaatattttcactgattcgagtttacaaagcgtgatcccttccagcacttttctctaggattgttttatcccccagcacctgaaggacattcagggcatgctaacatttctcttgtgacataaaatgacccatgagaagaactgattaacgactgagcacagtactttggggaaaaaagtcatcatgaaagttggaacagttccctttaacaatgtctgcgcttagagtttttcaaagctatttcmctgaaaaaagaaaaaagaactgaaagaaaaaaagaacaaacctccctccatggatgcctttcagaggctcatcctcatcactgaataagaagatgaacaataagttattgtgagttataaacaatagttacagagaaagaatctggcccttgaaagggctagaatacgctgccagatttgacctaaccctcttgttagcgtgtacaattacctttgtggtatcagctcagagagttgggagaaaaaggtagcatgatggtgttttctgggtgcagaactagtttctgtggaatagatccttttttattgtagaatgttctttgtctgacttact

SEQ ID NO: 169784 - DNA, 589 bp, Homo sapiens
tgcccgggctggagtgcagtggtgcaatctcagctcactgcagcctccaccttccgggttcaagcatttctcttgcctcagcctctcgagtagctgggactacaggaatgtgcaacaatgcccagctaatttttgtatttttagtagagatggggtttcaaccatgctgaccaggctgsctttgaactcctgacctcaagtaatccacctgcctaggcctcccaaagtgctgggtttacaggtgtgagccactgtgcccagccatgagatcgaactttcattgcttgtttgtctctgtaattggcattctgttaaattagcaattttagaagtagaacctaaatctttcttgcagtttggaacagtggtagcccactcctccttttgtgaatgaaaatgtttcttctggtcctgcttctaaatgtgtggtgtttctttctttcagacaaatttgagtggggaaaaaagacaaagacaatcttaaaggttaattagcagagtggtgtggaagagcaatggcatcatgttgagattctagtcttaactttgctacttactatctaagtgactttgggcaagtcacttaatc

SEQ ID NO: 169785 - DNA, 569 bp, Homo sapiens
ccttactctcatctacttaagcaggaattgaaagtcactttgtttaaatataatttccagatatgaagcaagtgtatcaaactaaaatagtgttgaattgaatgataccaagtacaaattacttctagaccaaagatgagtgttatttttattcctgtaaaacaaaagagaagaaaacgaaataatatcctaggtgtagacgataatgagctcctttggaaaaaaacaaaayaaaacaggaaaatatcctcagtcatacctaagcctttctttttccatgcaagctcagaagaattatcaagttaaattgctggtattttattacagagaaacaatatccaaagctggaagtgaaaatgtgatctacaaggaagattaacaaaaatgaagagtgtttctgattatcacggtaattttcttagccacaaataggattctgaatctaaagaatcaggatgctgtttggcacatcacagtataaacttgctaaatagtaagttatgaacctagaatataaataggcttctaagatattttccttactataagcagtggcttagatataagaa

SEQ ID NO: 169786 - DNA, 466 bp, Homo sapiens
gctacgagattaagggcaagggctgtgctttattcatcctatttccagggactggcataatatcctcatatagttgtacccttatatgtttgataaaatgaacaaaatatagacagtctttatagtaattctttctaaaacagaattacttttatctaaataattgtgaaatttgcctgatctataccaaaattatcatcaacctgtttaacgatcaaagctacactatggatttggtaagttcagaggtcagatatagtaacctctagtttgggtaatttcatgacttttccttctttgaacctgggtgggaaaatcctggactttgaaatcagacaaaccggaaattgaattgagagcaatmtcttaaacctatgagactttggtaagctgtttaacctctctgagatctatttcttccttttcaaaatggggaaatggatacctcccttaccgggttgttaag

SEQ ID NO: 169787 - DNA, 561 bp, Homo sapiens
tgggcttagacagtgataagaaatgagtgagaggcgaaggagaggccagagcctcagggtcttatcagtacagggggaggactttggctttcctctgagagagaaggaaaatcacaagccagggaaccttgagccaatgagtgtcatgatctggcttgtgtctttaaaggactactttggcttctgtgttgaaattaagagaataagaagcagagagaccagagaagatgagactgcttccatcatccagggagagcctatggcaccaacctccagaatggtggcaatggaggtgatgagatgtgttcrgactctggatatagtttgaaagcaaagctggcagaatttgctggcagattagataggaagtgtaagaggaaaagagaagacaagatgactccagggatttagacctgagcaatgagaggaattgagctgccaatttatatatatcaataatatatgtgatgaatatatatgatgtatacaatatatttatgatttttctcacttaaagcacaattgaaacaatcaaaaattaactttgaggtaggctaagtg

SEQ ID NO: 169788 - DNA, 522 bp, Homo sapiens
actgctcagtgtaaccactgaacctgtactctttaagctatggcacatcagctcctacacatacctttmgtttttggtcagcaaaagtcctatatgatgttttgactttcgagaattgacttctaatgcacggattttatatgcctgaggacattttatagacctaatcaggtatgcagaatccaggttgccagctctagtccagaactccagaactccaggtctcccatcttgcaaatgtgactacatgtaatgctttgacaaatagtaaagaaacgcattttaacatctggtttgacatctgcaaagaatgattccttttaaaatacaactaacagggttaaaacttatttggagacttaaggaacataaaatcatagcttcaaagtcgattatatcatgatggtattatttgcatttgttttcttttggccacgtggaaaattttcatcatagactggggtctaatacttattcagtaaggagtgtttttccatggctgaaaaatacaaatttggtcct

SEQ ID NO: 169789 - DNA, 518 bp, Homo sapiens
ataaaagttaattactgattatactaaatggaaaatgttcaggaataaggtaccaataaaacaaaaataaatctgctactatagcaactaactagaaatttaatcaaatctcctgactcatctggaattaacatggagagatttgtaaatttgggtaaaatgggagacgtaagtggaattcgatgagtactagtttgttttaagtttatttaaatttcaactcagataatcccatgtaaatctgagttataggccaagctgtagggytaaaataagatagaccacaaattctggacacttcaagatgagctatgaaatcatgctttcacaagtataatattgatgtaaagaagtaaaagccaaaagtataaaaataacatacagttcaaaatagaccacattaaactatattgttcagggatgcatacatagtaaaactatcaaaaaagcaaagaattgattgtcaaaaaaaaatcaaggtaatgattccttctagagcaaaagatgggattgaatta

SEQ ID NO: 169790 - DNA, 361 bp, Homo sapiens
aacagtggcaggtgctatttccttcctactctctataagtcatacactaggcaagtgctgtaggttcttcaagcatcttagagacagatacattttcaataatttagttgcttgtttgaacatgaaaaaaatgcataacaataatttacacaagccaatgtaatgagtgttcttgttttacccatttatcaatgaggaaaataagatttagaaaacataattatgttrcccattatcagcaaatatccacaaagaagccgagagcagctgagactcaagctcatgtttctctgactccaaagccggagttcttaaagactgagatacactacctaaatgtcacttgaggactgccatttag

SEQ ID NO: 169791 - DNA, 412 bp, Homo sapiens
gaatggaatggactcgaatggaatggactcaaaaggaatgtaattgaatgcagaggaattgaatggacttgaatagactggactggaatggaatggactcgaaaggaatggactgtaattgaacggtctcaaatggaatggaatcgaatggaatggacttgaatggaatggaattgaatggcatggaattaaatggaatggaatggactggaatgcaggggaatgggcttgaatgtaatggactggaacagaaygaacttgaatgaaatggacccaaatgaaatggaatcaaatggaatggaatcaaatggattgaaatttaatggaatggaagtgaatggaatggaatcgaatggaatggaatggtatggaattgaatgaaatggaatggaaaggaatggaaaggaatggt

SEQ ID NO: 169792 - DNA, 360 bp, Homo sapiens
aatattgtgaaaagagttacgatgctggaaagctaacactgatgacaacgaygatgatgatgatgatgaataactgatatttattcatgacttggcaagcatcaggcatcattccaagtgcctcatatgtctgagcgcattcattcccttagtacctctatgaggcagggactattatccccattttacagaccaagaagctgaggcagtgagaccgaatcttgcccacagctgcagagctggaatgcagcagagctgggggtggaaatcaggctttgaaccttcagcactgcactcccagctcccttgttaaagacgagatgtttgcaactcaagtatcaccctgaggtctgggagtgt

SEQ ID NO: 169793 - DNA, 513 bp, Homo sapiens
ccacaaaaacccccaggctatcagttatgtccccttcaagctgtaaggcgaggggaatttgscccaacctggctacatgtccccttctccctctctgatttaaagcagatcaaggcagacctggggtagttttcagatgatcctgatatatatataggtgtcctacagggtctagggcacaccttctatctcacctggagagatgtcatgctgttgttagatcaaaccctggcctttaatgaaaagaatgcggctttagctgcagcctgagagtttggagatacctggtgtcttagccaagtaaatgacagaatgacagcagaagaaagggacaaattccctgctggtcagcaagccatccccagtatggatccccactgggacctagactcagatcatggggactggagtcgcaaacatctgttgacctgtgttctagaaggactaagtagaattaggaaaaagcccatgaattattcaatgatgtccaccataactcagggaaaggaagaa

SEQ ID NO: 169794 - DNA, 571 bp, Homo sapiens
aagataagtttatcacccagtcagtcacagatatcaggagaaagctccaaaagtgagccctggcccttaacaaaatctggaggcattattaaacctggcaaacttggtgttctataacagggaccaagaggaacaggcagaaaaggaaaagtgagatcagagaaaggccacagccttagtcatggccctcagacaaacaaaccttggtggttcagaaaggacagaaaatggagcaggcctatcacccagtagggcttgttaccggtgtggtttgcagggacaccttacaaaatattgtccaacaagaaacaagctgccccctcacccatgtccactatgctgaagcaatcactggaaggcrcactgccccagaggataaaggttctctgggccagaagcccccaaccagatgatccaacaacaggactgagggtgcccaaggcaagcgccagctcatgtcatcaccctcactgagcccgggtaagtttaaccattaagggccaggaaactgacttcctcctggacactggtgtgggcttctcagtgttaatctcctgtcctggacgactgt

SEQ ID NO: 169795 - DNA, 549 bp, Homo sapiens
atagaatcatttctactgcattctactaattagaagcaattgcctaaagctgacrtattcaaaaagtgggagaattagactccacttttttgggaaacatttgtaaatatgtttttaaaccaacaccatctgtccactggctacaaattatccacattccttccacatgcaaaatacactaaaaccctccaaagattcccccaaagtttgattcatgccagcatcaggctcaggctcatcattcctccttaccaggtgtaggtgtggatgaagctcctcagggacagtttctctcagggtgaacacctctgaactgaaaagacaattttctaccccaactcatccaacataaaatggtgaatgaggcagaagataatcacttttgcactaatagggaaaacagaggtacacaggagtcactggttcatagcaattttgaaatctagccaagcacatgttcccagttctttaattagttctcagtcttgtgaatttcttgaagtgaatgaccttagctttgttccgtagctctatgctcatgtcatcttc

SEQ ID NO: 169796 - DNA, 585 bp, Homo sapiens
aagaattaagtagatatgtcaaaaaaataaaatgacttagtggttcagtttgagaagttatggcaggatttasaggtaaaggataaagagattaagatgattaataaacctgttttagaaattcccttgccatttcatacccactaggatggctacaatcaaaatgacagattacaataaagtcagtgaggatgtagaaaatctacagcccacatacactgctgatggaaatgtaaaatggcacagccagtttggaagatagtctgacaattccttataaggttaaataaagttatgacctagtaattccattccaagggatattaaaaagagagaaaaacacgtccacacaaaaatatagtacatgaatgtttatagcagcattttaaaaagtagccagaaaagtggaaatgatccaaatgtccctcaactgaagagtgaatgtgttatattcatacaatggaatattatttggccataagaaggaagtactaatatataccacgatatggataaatcttgaaaatattattctaagcagaagaagacagtcacaacagatcacatgttgtatgattctatgca

SEQ ID NO: 169797 - DNA, 585 bp, Homo sapiens
aagaattaagtagatatgtcaaaaaaataaaatgacttagtggttcagtttgagaagttatggcaggatttagaggtaaaggataaagagattaagatgattaataaacctgttttagaaattcccttgccatttcatacccactaggatggctacaatcaaaatgacagattacaataaagtcagtgaggatgtagaaaatctacagcccacatacactgctgatggaaatgtaaaatggcacagccagtttggaagatagtctgacaattccttataaggttaaataaagttatgacctagtaattccattccaagggatattaaaaagagagaaaaacacgtccacacaaaaatatagtacatgaatgtttatagcagcrttttaaaaagtagccagaaaagtggaaatgatccaaatgtccctcaactgaagagtgaatgtgttatattcatacaatggaatattatttggccataagaaggaagtactaatatataccacgatatggataaatcttgaaaatattattctaagcagaagaagacagtcacaacagatcacatgttgtatgattctatgca

SEQ ID NO: 169798 - DNA, 656 bp, Homo sapiens
ctggccattaaagttagttttagaaaccaagatggcatctctctccttagtgcccaactggcatcaggtgaggaagatacagagagcgtggggctactccagactagggaacccaagtagtgactagygacccaggcccctgaccctcattccccagtcaccacgcagggactgaagtgctctgggcaccctgggctgcctctaagctgcaggagtagaggcagaagctgctctttcaacaccactgacatcttccccttttactttctaactgtatggctacaattttggccacagggactgtttctgcatctttcccaagccaagatggagagaaagggacctggcagtgtcacctgtaacaaggcacataacttttgtgttgggacacagaatttattctctcatttttcttaaacatgtcttaccacaatatcttgcagaaaatgtgctcatttagtttttttttcccccaatttagcacaacttgaaggaagcaatacaaacaaggaggaggttgtgcctgacacatggtgcactctggtattttgaaacttaagtatcttcctaagagctctgtgaaacagctattagtacagtagccccccattatccaccagggatactttccaagaccccccagtggatgccagaaa

SEQ ID NO: 169799 - DNA, 550 bp, Homo sapiens
tgagttgaactcacagagctgagcattccttgcgatgtagcagtttagaaacacactttctgcagaatctgcaagtgcatatttggacctctstgaggaattcgttggaaacgggataatttcagctgactaaacagaagcagtctcagaatcttctttgtgatgtttgcattcaaatccccgagttgaactttcctttcaaagttcacgtttgaaacactctttttgcaggatctacaagtggatatttggaccactctgtgtccttcgttcgaaacgggtatatcttcacatgacatctagacagaagcatcctcagaagcttctctgtgatgactgcattcaactcacggagttgaacactccttttgagagcgcagttttgaaactctctttctgtggcatctgcaaggggacatgtagacctctttgaagatttcgttggaaacggaatcatcttcacataaaaactacacagatgcattctcaggaactttttggtgatgtttgtattcaactcccagagttgaactttcctttggaaagagca

SEQ ID NO: 169800 - DNA, 545 bp, Homo sapiens
tttggagggctttgtggtttgtggtggaaaaggaaatatcttcacctaaatactagatagaagcattctcagaaactgctttgtgatgattgcattcacctcacagagttgaacattcctattgatagagcagtttggaaacactcttgttgtggaatgtgcaagtggagatttggagcgctttgaggcctatggtagtaaagggaatagcttcatagaaaaactagacagaagcattctcagaaaatactttgtgatgattgagtttaactcacagagctgaacattcctttggatggagcaggtttgagacacacyttttgtagaatctacaagtggatatttggacctctctgaggatttcgttggaaacgggataactgcacctaactaaacggaagcattctcagaaacttcttggtgatgtttgcattcaaatcccagagttgaaccttcctttgatagttcaggtttgaaacactctttttgtaggatctgcaagtggatatttggaccactctgtggccttcgttcgaaacgggtat

SEQ ID NO: 169801 - DNA, 525 bp, Homo sapiens
gaaactctctttttgtggaatctgcaagtggataygtggacctctccgaagatgtctttggaaacgggaatatcttcacataaaaactaaacagaagcattctcagaaacttctctgtgatgtttgtgttcaactcccagagtttcacattgcttttcatagagtagttctgaaacatgcttttcgtagtgtctacaagtggacatttggagcgctttcaggcctgtggtggaaaacgaattatggtcacataaaaactggagagaagcattgtcagaaacttctttgtgatgattgcattcaactcacagagttgaaggttccttttcaaagagcagtttccaatcactctttgtgtggaatctgcaagtggatatttggacctattttgaagatttcgttggaaacgggagaatcttcacaggaaagctaaacagaagcattctcagaaacttctttgtgatgcttgcattcaactcacagagttgaactttcctttcgagagagaagctttgaaacactctt

SEQ ID NO: 169802 - DNA, 525 bp, Homo sapiens
gaaactctctttttgtggaatctgcaagtggatatgtggacctctccgaagatgtctttggaaacgggaatatcttcacataaaaactaaacagaagcattctcagaaacttctctgtgatgtttgtgttcaactcccagagtttcacattgcttttcatagagtagttctgaaacatgcttttcgtagtgtctacaagtggacatttggagcgctttcaggcctgtggtggaaaacgaattatggtcacataaaaactggagagaagcattgtcagaaacttctttgtgatgattgcattcaactcacagagttgaaggttccttttcaaagagcagtttccaatcactctttstgtggaatctgcaagtggatatttggacctattttgaagatttcgttggaaacgggagaatcttcacaggaaagctaaacagaagcattctcagaaacttctttgtgatgcttgcattcaactcacagagttgaactttcctttcgagagagaagctttgaaacactctt

SEQ ID NO: 169803 - DNA, 221 bp, Homo sapiens
gtttcatagctgctctttccaaaggaaagttcaactctgggagttgaatacaaacatcaccaaaaasttcctgagaatgcatctgtatagtttttatgtgaagatgattccgtttccaacgaaatcttcaaagaggtctacatgtccccttgcagatgccacagaaagagagtttcaaaactgcgctctcaaaaggagtgttcaactccgtgagttgaatg

SEQ ID NO: 169804 - DNA, 355 bp, Homo sapiens
tcaactctgtgagttgaatgcaatcatcacaaagaagtttctgacaatgcttctctccagtttttatgtgaccataattcgttttccaccacaggcctgaaagcgctccaaatgtccacttggagacactacgaaaagcatgtttcagaactactctatgaaaagcaaygtgaaactctgggagttgaacacaaacatcacagagaagtttctgagaatgcttctgtttagtttttatgtgaagatattcccgtttccaaagacatcttcggagaggtccacatatccacttgcagattccacaaaaagagagtttcaacactgctctatccataggagggttcaactctgtgag

SEQ ID NO: 169805 - DNA, 220 bp, Homo sapiens
ttccaaaggaaagttcaactctgggagttgaatacaaacatcaccaaaaagttcctgagaatgcatctgtatagtttttatgtgaagatgwttccgtttccaacgaaatcttcaaagaggtctacatgtccccttgcagatgccacagaaagagagtttcaaaactgcgctctcaaaaggagtgttcaactccgtgagttgaatgcagtcatcacagaga

SEQ ID NO: 169806 - DNA, 469 bp, Homo sapiens
aagctattccctttactaccataggcctcaaagcgctccaaatctccacttgcacattccacaacaagagtgtttccaaactgctctatcaataggaatgttcaactctgtgaggtgaatgcaatcatcacaaagcagtttctgagaatgcttctmtctagtatttaggtgaagatatttccttttccaccacaaaccacaaagccctccaaacgtccacttgcagattctagaaaaagagtgtttcatagctgctctttccaaaggaaagttcaactctgggagttgaatacaaacatcaccaaaaagttcctgagaatgcatctgtatagtttttatgtgaagatgattccgtttccaacgaaatcttcaaagaggtctacatgtccccttgcagatgccacagaaagagagtttcaaaactgcgctctcaaaaggagtgttcaactccgtgagttgaatgcagtca

SEQ ID NO: 169807 - DNA, 469 bp, Homo sapiens
aagctattccctttactaccataggcctcaaagcgctccaaatctccacttgcacattccacaacaagagtgtttccaaactgctctatcaataggaatgttcaactctgtgaggtgaatgcaatcatcacaaagcagtttctgagaatgcttctatctagtatttaggtgaagatatttccttttccaccacaaaccacaaagccctccaaacgtccacttgcagattmtagaaaaagagtgtttcatagctgctctttccaaaggaaagttcaactctgggagttgaatacaaacatcaccaaaaagttcctgagaatgcatctgtatagtttttatgtgaagatgattccgtttccaacgaaatcttcaaagaggtctacatgtccccttgcagatgccacagaaagagagtttcaaaactgcgctctcaaaaggagtgttcaactccgtgagttgaatgcagtca

SEQ ID NO: 169808 - DNA, 498 bp, Homo sapiens
gtgaagattctcccgtttccaacgaaatcttcaaaataggtccaaatatccacttgcagattccacacaaagagtgattggaaactgctctttgaaaaggaaccttcaactctgtgagttgaatgcaatcatcmcaaagaagtttctgacaatgcttctctccagtttttatgtgaccataattcgttttccaccacaggcctgaaagcgctccaaatgtccacttgtagacactacgaaaagcatgtttcagaactactctatgaaaagcaatgtgaaactctgggagttgaacacaaacatcacagagaagtttctgagaatgcttctgtttagtttttatgtgaagatattcccgtttccaaagacatcttcggagaggtccacatatccacttgcagattccacaaaaagagagtttcaacactgctctatccataggagggttcaactctgtgagttgaatgcaatcatcacagagaagtttctgagaaggct

SEQ ID NO: 169809 - DNA, 467 bp, Homo sapiens
cctccaaacgtccacttgcagattctagaaaaagagtgtttcatagctgctctttccaaaggaaagttcaactctgggagttgaatacaaacatcaccaaaaagttcctgagaatgcatctgtgtagtttttatgtgaagatgattccgtttccaacgaaatcttcaaagaggtctacatgtccccttgcagatgccacagaaagagagtttcaaaactgcgctctcaaaaggagtgttcaactccgtgagttgaatgcagtcatcacagagaagcttctgaggatgcttctgtctagatgtcatgtgaagatatacccgtttcaaacgaaggacacagagtggtccaaatatccacttgtagatcctgcaaaaagagtgtttcaaacgtgaactttgaaaggaaagttcaactckgggatttgaatgcaaacatcacaaagaagattctgagactgcttctgttta

SEQ ID NO: 169810 - DNA, 451 bp, Homo sapiens
ggaattcgttggaaacgggataatttcagctgactaaacagaagcagtctcagaatcttctttgtgatgtttgcattcaaatcccmgagttgaactttcctttcaaagttcacgtttgaaacactctttttgcaggatctacaagtggatatttggaccactctgtgtccttcgttcgaaacgggtatatcttcacatgacatctagacagaagcatcctcagaagcttctctgtgatgactgcattcaactcacggagttgaacactccttttgagagcgcagttttaaactctctttttgtggcatctgcaaggggacatgtagacctctttgaagatttcgttggaaacggaatcatcttcacataaaaactatacagatgcattctcaggaactttttggtgatgtttgtattcaactcccagagttgaactttcctttggaaagag

SEQ ID NO: 169811 - DNA, 543 bp, Homo sapiens
tttggagggctttgtggtttgtggtggaaaaggaaatatcttcacctaaatactagatagaagcattctcagaaactgctttgtgatgattgcattcacctcacagagttgaacattcctattgatagagcagtttggaaacactcttgttgtggaatgtgcaagtggagatttggagcgctttgaggcctatggtagtaaagggaatagcttcatagaaaaactagacagaagcattctcagaaaatactttgtgatgattgagtttaactcacagagctgaacattcctttggatggagcaggtttgagacacactttttgtagaatctacaagtggatatttggacctctctgaggatttcgttggaaacgggataactgcacctaactaaacggaagcattctcagaaacttcttggtgatgtttgcrttcaaatcccagagttgaaccttcctttgatagttcaggtttgaaacactctttttgtaggatctgcaagtggatatttggaccactctgtggccttcgttcgaaacgggt

SEQ ID NO: 169812 - DNA, 584 bp, Homo sapiens
ggatgggcctttggtgtaggttggaaagaacaatgtttaaaaataccctgtctcctccctgagaggtatgataccatgattctctctctttatctaaaggtattagtctaaggaattaaaagccatttttctatgagaagaaaaatgaacaagatatgggaaggtgaactagcagagcaacatatagaaataataataaaaggccttattcagaatgtaaaatacactatactaaaaggtttaccttgattatagcactcaatcattccaagactctgagattgtagctattatcatatccatatcttayagaagtttatagagttacatgaacttcctcaatgtcttgcagctagtgtgaaggagtcaggactcacaccatagcacccatattccagaacccacagctaaccactggattctatgcctatgaggatacataatacttactgtttcaaataactttataatagttttcagttaaaatcttgtctctaggcttttgggcaaagaactttaaaaactctgagcctccattcctccagcttaaaaatggagacagtaggtaactcttaccactgaga

SEQ ID NO: 169813 - DNA, 584 bp, Homo sapiens
ggatgggcctttggtgtaggttggaaagaacaatgtttaaaaataccctgtctcctccctgagaggtatgataccatgattctctctctttatctaaaggtattagtctaaggaattaaaagccatttttctatgagaagaaaaatgaacaagatatgggaaggtgaactagcagagcaacatatagaaataataataaaaggccttattcagaatgtaaaatacactatactaaaaggtttaccttgattatagcactcaatcattccaagactctgagattgtagctattatcatatccatatcttatagaagtttatagagttacatgaacttcctcaatgtcytgcagctagtgtgaaggagtcaggactcacaccatagcacccatattccagaacccacagctaaccactggattctatgcctatgaggatacataatacttactgtttcaaataactttataatagttttcagttaaaatcttgtctctaggcttttgggcaaagaactttaaaaactctgagcctccattcctccagcttaaaaatggagacagtaggtaactcttaccactgaga

SEQ ID NO: 169814 - DNA, 498 bp, Homo sapiens
cttcaaagcagtgtttctcagtgcattatcagaagaattaaacatacttacaggtacttgttaaaaatttaacttaaaaatttcagttcaagaagtctaccacagaccttgaagttcactcatttgatcattacataatttcttttttatttttaaagagatggggtctcactatgttgccccagctggtctccaactcctgagctcaagtcattctcctgccttagcctcccaaagtgctaggattacaggcatgagccactgcactggcctgattattacataattttaagcagctattctgtgacagttttaggtcttagcgtaaaaccaaacaaaacctgtgccctataaaggtcacaccagttactgctaattgccaataaygtgagtaatctcaatgaaggataacatatgctttgacaaaggcattatagggagcccagagaaggagcctagaatgatgtgtcatcagaaaagacttctaagaaggaattc

SEQ ID NO: 169815 - DNA, 411 bp, Homo sapiens
gaattctaattaattgaatttttaagaggcagaacctgaaagtataattttttgcaagtgatttattagatgagtttttagaaagaacccaaaggaaaagagggaagtggggcagggaagaratagtagccaagcttggtatactgtcaagcaaagttccacagaaggtaaatttgattcaatcctatagctctggagagaatacaggtcatacctagagttgtctcacaactaggagcacgggagctggagaagttataccctagaagccagtcatttattggttaatggctgctcctgggggtatgtaaattcctaggtactttcagttctctctttgtgaagataaattagctataacagcttgaggacagtgtccaaaaagagataacatgtactggctcttaaggg

SEQ ID NO: 169816 - DNA, 593 bp, Homo sapiens
gaattctaattaattgaatttttaagaggcagaacctgaaagtataattttttgcaagtgatttattagatgagtttttagaaagaacccaaaggaaaagagggaagtggggcagggaagagatagtagccaagctyggtatactgtcaagcaaagttccacagaaggtaaatttgattcaatcctatagctctggagagaatacaggtcatacctagagttgtctcacaactaggagcacgggagctggagaagttataccctagaagccagtcatttattggttaatggctgctcctgggggtatgtaaattcctaggtactttcagttctctctttgtgaagataaattagctataacagcttgaggacagtgtccaaaaagagataacatgtactggctcttaagggtacaaagtacataggaatctggggcggaagagggattagaagggacgtgagtccagcactgacattttctgctacattactcgtctaagaaaggtgtatctaaataggagactccatttcttgtatcaaagggaaaaaatgcttgtccagtaagactttaatgttgtcactgagttattttt

SEQ ID NO: 169817 - DNA, 567 bp, Homo sapiens
gaattctaattaattgaatttttaagaggcagaacctgaaagtataattttttgcaagtgatttattagatgagtttttagaaagaacccaaaggaaaagagggaagtggggcagggaagagatagtagccaagcttggtatactgtcaagcaaagttccacagaaggtaaatttgattcaatcctatagctctggagagaatacaggtcatacctagagttgtctcacaactaggagcacgggagctggagaagttataccctakaagccagtcatttattggttaatggctgctcctgggggtatgtaaattcctaggtactttcagttctctctttgtgaagataaattagctataacagcttgaggacagtgtccaaaaagagataacatgtactggctcttaagggtacaaagtacataggaatctggggcggaagagggattagaagggacgtgagtccagcactgacattttctgctacattactcgtctaagaaaggtgtatctaaataggagactccatttcttgtatcaaagggaaaaaatgcttgtccagtaagac

SEQ ID NO: 169818 - DNA, 453 bp, Homo sapiens
ttcagccaggtaatcaaggccagcatcatctgtcataaatcattatgataaagttaaccttgatatgtaatgaaaattgttccttacctttatgttcttcctctccaaaacttgtaaccccagtctaattatgacaaatacagacayattctaacagaggggcagcctacaataaactgaccaccacccctcaaaactgtcagggacatcaaacacaagaaatgtctgagattctgctacagacaagagaagactaatgagacaagaaaactcgatgtaatatggtattatggatggaatcttggaatacaagggcataaataccaaataaatttgaataaaatatggactttataataatcagacatcagtattggctggttaattgtaacaaatgcatcataataacgtaagatgttagtaacaagggaaattgtgtgtgtggggggggtt

SEQ ID NO: 169819 - DNA, 453 bp, Homo sapiens
ttcagccaggtaatcaaggccagcatcatctgtcataaatcattatgataaagttaaccttgatatgtaatgaaaattgttccttacctttatgttcttcctctccaaaacttgtaaccccagtctaattatgacaaatacagacatattctaacagaggggcagcctacaataaactgaccaccacccctcaaaactgtcagggacatcaaacacaagaaatgtctgagattctgctacagacaagagaagactaatgagacaagaaaactcgatgtaatatggtattmtggatggaatcttggaatacaagggcataaataccaaataaatttgaataaaatatggactttataataatcagacatcagtattggctggttaattgtaacaaatgcatcataataacgtaagatgttagtaacaagggaaattgtgtgtgtggggggggtt

SEQ ID NO: 169820 - DNA, 540 bp, Homo sapiens
tgacagtgaccctctccagtctctatttgataaagggcagcgtgggaaaaagataatcagtaaagctcccaaagtgaggatccttgactcttccttcactgaaagtctggaaggaaagagctgatcccaagagaatgtgtgattgcacattgttacatcaatcttattttcattagcctgcaacctccccggggcctttatgtaatcttctttatctcccagggccaagtgtctgtcctttggagaatccctcctgactgactacctaaatgaagaaatgaaggaattaatgatggaatgaggtattcaatacatatttgctaagtgaatgaataatttgtgctcaatttgtcaaatgagtgagtgaggaaaygtcagtaactcttagaaagattgaacagaattaaaaatgataaatctattcttctggggaagtcccttaacacaaaaatataatacagaaaccacttcgctccttcttacatgttcctttttacctcctcagtcaaagcagctttgacaattcccaggattaataaa

SEQ ID NO: 169821 - DNA, 540 bp, Homo sapiens
tgacagtgaccctctccagtctctatttgataaagggcagcgtgggaaaaagataatcagtaaagctcccaaagtgaggatccttgactcttccttcactgaaagtctggaaggaaagagctgatcccaagagaatgtgtgattgcacattgttacatcaatcttattttcattagcctgcaacctccccggggcctttatgtaatcttctttatctcccagggccaagtgtctgtcctttggagaatccctcctgactgactacctaaatgaagaaatgaaggaattaatgatggaatgaggtattcaatacatatttgctaagtgaatgaataatttgtgctcaatttgtcaaatgagtgagtgaggaaatgtcagtaactcttagaaagattgaacagaattwaaaatgataaatctattcttctggggaagtcccttaacacaaaaatataatacagaaaccacttcgctccttcttacatgttcctttttacctcctcagtcaaagcagctttgacaattcccaggattaataaa

SEQ ID NO: 169822 - DNA, 473 bp, Homo sapiens
ctggtattggaggagctccattttatcatttgtcggggagatagggggccattttggaaaaagaaaaccaaaaggtaggtgtaagttgatggggaattgggaacttgagggtcagctcactttgagaatctcatgaaattgagaccctgatgactttcacmctggacagatggctcaagatgttgcataacaaagtcctgagtggtggcttatatttataatcccagcactttgggaggccaaggcaggaggatcacttgagcccaggagtttgagatcagtctgggcagcataatgagaccccgtcttttagcagggggaaaaaagattttgcataacatatggaggtgggcagtgactgaagagtgaggaatcattttctagcacatacttcaagaccagtaggctggtgtgatttggatgccacaggccctccataaagacccagccctgctgcccatggccctgagctg

SEQ ID NO: 169823 - DNA, 603 bp, Homo sapiens
tcctgggctctagtgatccccccacctcagcctcctgagtagctggggctgcaggtgcatgccaccactcctggcaaaagagcctaatattaacagtgttcaattcaagttgttcatataagtggacttgggcacctgggacaattctttttctctgcctcagatttctccaacttggagcacacatgtttatctgagtkgatttaacaactgtatcagtagatcatgtggtctttaaggtggctgaaacaatgcctcaaatttcactacattcaatttatttcagtcccttggttagatcttacaataaattcctgtgattttattgaagagttaacctaaacgtctaaattaagcatcacgcctaaagatgattcagccaatcacaaggaaaaaagaattttatgatgtgactagatgttatgagccacccataaaaccacagaagtgatcaaatacagcttgtaggaagaactataaaagacacgtttttattatatgatattttaaattattaaatatttctatcatatggaaaaaatcataaattgataccctacataatcaaaagccagacataataggtaagaacattgtacagat

SEQ ID NO: 169824 - DNA, 603 bp, Homo sapiens
gggaattcctcttttgtgtatttttgctctcagaactagaataagcccaaactttagacagcctacttcagtcttagtgatgagacttcctgagcctcaaaagccttctgaagaccaatgagcattctttgtatgtgttctcattgcaggtttgtatatatttttktctatcatagattcaagctacatcctgtgattgatgattcaatccaggggtcttccttgctccactttttgtgaacattcacccatttcagaatatgtctcctgtgaattatacaggatctttctccactacatgcccccagatgcagatataataacgacatagattttgtgagcaaatcaacaaatgcttgcatttggagaggatgcactttctcagaaagagataattgctgaagttggtaaactgcaccacagagatgggaataaatttagcctccttgaaaccaagatcaactgagaatgtatcaagcataaatttctgcgctcattcacagagagttttaaatgtcttcacgcctcttgctgcacgtaaacatatggagcagccattttcttctttctttcaaatgctgccaatgtgaacagaatcaatag

SEQ ID NO: 169825 - DNA, 614 bp, Homo sapiens
agcccaaactttagacagcctacttcagtcttagtgatgagacttcctgagcctcaaaagccttctgaagaccaatgagcattctttgtatgtgttctcattgcaggtttgtatatatttttgtctatcatagattcaagctacatcctgtgattgatgattcaatccaggggtcttccttgctccactttttgtgaacattcacccatttcagaatatgtctcctgtgaattatacaggatctttctccactacatgcccccagatgcagatataataacgacatagattttgtgagsaaatcaacaaatgcttgcatttggagaggatgcactttctcagaaagagataattgctgaagttggtaaactgcaccacagagatgggaataaatttagcctccttgaaaccaagatcaactgagaatgtatcaagcataaatttctgcgctcattcacagagagttttaaatgtcttcacgcctcttgctgcacgtaaacatatggagcagccattttcttctttctttcaaatgctgccaatgtgaacagaatcaatagcacatggtaaagcatatgacctatgtgaaatttcatattagttgaatagaattc

SEQ ID NO: 169826 - DNA, 511 bp, Homo sapiens
ataaaagtatagctttgaaagcatggctgtagctgcagaaaatgggccaagaccttgagataaggcataggttacttatgctatttatttatttatttatttatgagaygagtttcgctctcgttgcccaggctggagtgcaatggtgtaatctcggctcactgcaacctctgcctcccaggttcaagcgattctcttgcctcagcctcctgagtagctgggattacaggcgtccacaaccatgcctggctaatttttgtatttttagtagggacggggtctcaccatgttggccaggctgatctcgaactcctgacctcgggtgatccgcccaccctggcttcccaaagtgctggggttacaggtgtgagccaccgtgcctggccttgctttttaaataccttaagtacacagatatgcttatatttaatatcagttctgaaaacagagcttcagggtctctaccagatataagggaaattcaaccttggcattatgagctaaattatgt

SEQ ID NO: 169827 - DNA, 511 bp, Homo sapiens
ataaaagtatagctttgaaagcatggctgtagctgcagaaaatgggccaagaccttgagataaggcataggttacttatgctatttatttatttatttatttatgagacgagtttcgctctcgttgcccaggctggagtgcaatggtgtaatctcggctcactgcaacctctgcctcccaggttcaagcgattctcttgcctcagcctcctgagtagctgggattacaggcgtccacaaccatgcctggctaatttttgtatttttagtagggacggggtctcaccatgttggccaggctgatctcgaactcctgacctcgggtgatccgcccaccctggcttcccaaagtgctggggttacaggtgtgagccaccgtgcctggccttgctttttaaataccttaagtacacagatatgcttayatttaatatcagttctgaaaacagagcttcagggtctctaccagatataagggaaattcaaccttggcattatgagctaaattatgt

SEQ ID NO: 169828 - DNA, 400 bp, Homo sapiens
ggctttttttttccccagagcacaatagattgataagacatgttgatttctgaaacacttaatgctttcacacagactagacttgaagcctgagcaattttcatgtctgaaaaataagagaaagagataggtaaagtgtgccagtcttcgttaatttggctgtagctctccaatcaatttaatcaaatgcttttggtacaatcamgcaatgctcctccacacccatctttaaattttttttctttgccacttagtttaggcaaatgagttttgaatatttaactgggaaaggaggcattaattcatgaagcctgtgtcttgggaacaagcagaataatactagatgtttgcagaatacaagacaaggggttagttgcttttcttgacatcagttagagtc

SEQ ID NO: 169829 - DNA, 555 bp, Homo sapiens
atcaccacttttatctcctttatagctcctatcactatctgaaaatatgccactgatgttggcttgtttatgtgtcttctccacctgaaaggtaatcagggattccttacctgtatttttactgctatatcctcagcatctcgcacagttttgttattgtagatctatacatgctcagtaatgcagaagatggacatgcacacaagtcactagactagtgaacgtcgttcartaagagctttccggctgggcactgtggctcaggactgtaacccagcactttgggaggctgaggcgggtggatcattgaggccaggagttcaagaccagcctggccaacatgatgaaactccacctctactaaaaatacaaaaattagccaggtgtggtggtggggacctgtagttgcagccagtctggaggctgaggcatgaaaaatgcttgaacatgggaggcagaggttgcagtgagctgagatagcaccactgcactctagtttgggagacagagagagactccatctcaaacaaacaaataaacaaacaaaaagctttc

SEQ ID NO: 169830 - DNA, 555 bp, Homo sapiens
atcaccacttttatctcctttatagctcctatcactatctgaaaatatgccactgatgttggcttgtttatgtgtcttctccacctgaaaggtaatcagggattccttacctgtatttttactgctatatcctcagcatctcgcacagttttgttattgtagatctatacatgctcagtaatgcagaagatggacatgcacacaagtcactagactagtgaacgtcgttcaataagagctttccggctgggcactgtggctcaggactgtaacccagcactttgggaggctgaggcgggtggatcattgaggccaggagttcaagaccagcctggccaacatgatgaaactccacctctactaaaaatacaaaaattagccaggtgtggtggtggggacctgtagttgcagccagtctggaggctgaggcatgaaaawtgcttgaacatgggaggcagaggttgcagtgagctgagatagcaccactgcactctagtttgggagacagagagagactccatctcaaacaaacaaataaacaaacaaaaagctttc

SEQ ID NO: 169831 - DNA, 591 bp, Homo sapiens
tgcttttggttggaaaagaaggttcaatcattgctgcatagattatcattccagtaggtgccctgggcagcaatttctgaaccatcccttttgaaattttgttcccagctggagaaatgtcacagttgtctcagcttttgactctgacttttagtgagagatgcaaggaataggaaaacactttcaagaagaagcaatgagcagttgtatgcacatctggtgacttattgctgaagattctaaagcatttaaaaatattgattaagcctcaaactgttgggaaattgttcccataactttcattctgcccctagatttgctgaggttttgagctgtatttarcttggtgaatcttgtgtaatggccagaaagagacctcaggagccccatcccccaggttcttattagccttgacaagagtgttgttaaaattgcagactcttcacagttccaaagagatgccgtttcttgctgtttcaataccaagtctaaaacaatctctgtatacattttggcttctaaaatatattctgaggtaaaatagcaggttctactgtctttgagaagaccatttcttttgtttgtggtaac

SEQ ID NO: 169832 - DNA, 572 bp, Homo sapiens
ctttttttttcagggtcccgaacccctttatttgtacttagcagaaacgattgccttctgtagaggagtatcttcccaatgtagttaaatttgatttttattttccattcaaatatttagaaatttcaactyataccttacaatattaaacatttttgtagtcagtcaccacaaatctcagagaggtatttgcaagatttgtagtttgcttctattactttcggaatgtttagataattttataaaattgggacactgtcttcctagttgtttgcttaatctgcaggaaagtggattgaactctccaggggtcagtttagggtatgtggtctcttgacagatcgggaagccagatataccttgtaagaggtacttctaaagccataacaatttggtcttcaaaataaatttaaagtgctatgaaagagaataaaggaaaagtcttgaattgtatatgtaaagatagtgcatctctgtacgtgtttgcatgcatacaaatctacccaacaacattgtggacaatttctgtgctacccaagtacactagctctttagttcctagaaagccctgg

SEQ ID NO: 169833 - DNA, 572 bp, Homo sapiens
ctttttttttcagggtcccgaacccctttatttgtacttagcagaaacgattgccttctgtagaggagtatcttcccaatgtagttaaatttgatttttattttccattcaaatatttagaaatttcaacttayaccttacaatattaaacatttttgtagtcagtcaccacaaatctcagagaggtatttgcaagatttgtagtttgcttctattactttcggaatgtttagataattttataaaattgggacactgtcttcctagttgtttgcttaatctgcaggaaagtggattgaactctccaggggtcagtttagggtatgtggtctcttgacagatcgggaagccagatataccttgtaagaggtacttctaaagccataacaatttggtcttcaaaataaatttaaagtgctatgaaagagaataaaggaaaagtcttgaattgtatatgtaaagatagtgcatctctgtacgtgtttgcatgcatacaaatctacccaacaacattgtggacaatttctgtgctacccaagtacactagctctttagttcctagaaagccctgg

SEQ ID NO: 169834 - DNA, 572 bp, Homo sapiens
ctttttttttcagggtcccgaacccctttatttgtacttagcagaaacgattgccttctgtagaggagtatcttcccaatgtagttaaatttgatttttattttccattcaaatatttagaaatttcaacttataccttacaatattaaacatttttgtagtcagtcaccacaaatctcagagaggtatttgcaagatttgtagtttgcttctattactttcggaatgtttagataatttyataaaattgggacactgtcttcctagttgtttgcttaatctgcaggaaagtggattgaactctccaggggtcagtttagggtatgtggtctcttgacagatcgggaagccagatataccttgtaagaggtacttctaaagccataacaatttggtcttcaaaataaatttaaagtgctatgaaagagaataaaggaaaagtcttgaattgtatatgtaaagatagtgcatctctgtacgtgtttgcatgcatacaaatctacccaacaacattgtggacaatttctgtgctacccaagtacactagctctttagttcctagaaagccctgg

SEQ ID NO: 169835 - DNA, 572 bp, Homo sapiens
ctttttttttcagggtcccgaacccctttatttgtacttagcagaaacgattgccttctgtagaggagtatcttcccaatgtagttaaatttgatttttattttccattcaaatatttagaaatttcaacttataccttacaatattaaacatttttgtagtcagtcaccacaaatctcagagaggtatttgcaagatttgtagtttgcttctattactttcggaatgtttagataattttataaaattgggacactgtcttcctagttgtttgcttaatctgcaggaaagtggattgaackctccaggggtcagtttagggtatgtggtctcttgacagatcgggaagccagatataccttgtaagaggtacttctaaagccataacaatttggtcttcaaaataaatttaaagtgctatgaaagagaataaaggaaaagtcttgaattgtatatgtaaagatagtgcatctctgtacgtgtttgcatgcatacaaatctacccaacaacattgtggacaatttctgtgctacccaagtacactagctctttagttcctagaaagccctgg

SEQ ID NO: 169836 - DNA, 556 bp, Homo sapiens
taaccaatatgtttaaattttagcaacactgaaatacagtggatgtaactaaagagaatatggaaatggctataaacgaaaatgcttctcaatgaagagttttactcatttgaacaaaggaactatccctcttatttttttagtctctataaagtaaatgttcccaacactttttgtccatctcctctgtcttcagtagtggcacactgtccatgaattaaggatatgaatactaggcaggaagttaaattctgttctgcaaaaaaagartatgtcatttctgcttattaagaccatgataaatgcaacttgaataagaagaataattgtttagttaacacaataggaaaaaaaagtttaatagaataccagctcagccttttggaggcttagcatatttgaatggcaacatagaacactgtagggaaactctcaacctgtctctaaaatccagagtttgaagatgcagtaaggttttgagcttgtattttctcatccctgaaagtgccaattaagataataaaatttagagcctatccaagttggaattagatct

SEQ ID NO: 169837 - DNA, 554 bp, Homo sapiens
tatgaatatgtataaaagcctgttactgggttttattaaattaaaaaatatatatagaacattttctgtgccatgatagataaattattatatggttgaagagaaaaggaagaagaaataataagtgtggctttttgttttcattccactgatgatggcacaaacatattgagaccactgattatgcaggtttttttgtttcaagtttaatatcaaatgtgtctctaagttcatatttttaaaggtttacattctggacaatggactattctggaatctgctttcatttgatagacaggattctttgtgactgagagggcataatgttggctagggagtgactggacaggttactttgatatcactctagaaataagccttcttactttcatgtgcttctctctcattccaaaactgtcaccaaccgcatgrtgccctgaggcaggtaggtgatggggtaaattcatgagccctggagccctgtctactctgtgaggtcattggctcaaatcactaatgattttcacttcccaattttctactttaggtgaacc

SEQ ID NO: 169838 - DNA, 575 bp, Homo sapiens
tctttgtcagtttgaacacactcaagacatcagtggaaggacctaattcatttaaatgctactggctaggtatgctgacctcctccccatcttagctgctactgcctgtggttaagccagccccaatatggtstgcttctaactgcttcccagcttggtttgtttcccacctggcataacatgctggagaacaccttacttcaggtttgcttgcaaaacaacatcagtcctgtggttgtcctagtgtaaatgactccaccagtttctgttgcttacagaatcatttgcacaccagatgcctgaagctctttgatatctggacctacactcacccgcctcctctccactggcaccatcgtcccatatgtcacagctgtagctttcgtgcaacacttcctctacaacagaggttctcaaccagaggctattttgttctctaaagactatttcgcgatgagtggagacatttttggttttcacaaatggaggcagtagtgctactggcatctggtgtgtagcggccagagatgctgctaaacatactccaatgcataggacagacccccaaaggaaat

SEQ ID NO: 169839 - DNA, 587 bp, Homo sapiens
aggcctgacacgagaattattaaagcacttaggatccttctggtgacctttagagaagctgtgctgtgtgccaacacagtcctagagrgaagaaagacacattcctgatgacagacaaggaagctgaggtcctgagaggtagggtaacttgtccgagattacccaactaggaactggcaagactggaatttgaactcagggtggtctgatttcagggcatgtcatttttaggccatgctgtcttgtttggctctcttttcatttcctgtcatttcgctaggtgatattcattgagcacctcttttgtgccagtggagagctggcacctccactccaccgttctgcagtgaggttggataaggcacgaggtggtggccctctggaaactgtaaagtgctctctggccttggaggattcttctcaaccgtgtggctcagctctctctgtgctttcttcacagcctaactgggctgggagagtgctatctctggctgagagaaccacaaacttcaagatgtatgagggctacctgggaagcttgttaaaatgcagattggaaccacccccagagattccaattcagttgg

SEQ ID NO: 169840 - DNA, 533 bp, Homo sapiens
gtgccaacacagtcctagagagaagaaagacacattcctgatgacagacaaggaagctgaggtcctgagaggtagggtaacttgtccgagattacccaactaggaactggcaagactgraatttgaactcagggtggtctgatttcagggcatgtcatttttaggccatgctgtcttgtttggctctcttttcatttcctgtcatttcgctaggtgatattcattgagcacctcttttgtgccagtggagagctggcacctccactccaccgttctgcagtgaggttggataaggcacgaggtggtggccctctggaaactgtaaagtgctctctggccttggaggattcttctcaaccgtgtggctcagctctctctgtgctttcttcacagcctaactgggctgggagagtgctatctctggctgagagaaccacaaacttcaagatgtatgagggctacctgggaagcttgttaaaatgcagattggaaccacccccagagattccaattcagttggtcagagctgggcc

SEQ ID NO: 169841 - DNA, 598 bp, Homo sapiens
ggcctgacacgagaattattaaagcacttaggatccttctggtgacctttagagaagctgtgctgtgtgccaacacagtcctagagagaagaaagacacattcctgatgacagacaaggaagctgaggtcctgagaggtagggtaacttgtccgagattacccaactaggaactggcaagactggaatttgaactcagggtggtctgatttcagggcatgtcatttttaggccatsctgtcttgtttggctctcttttcatttcctgtcatttcgctaggtgatattcattgagcacctcttttgtgccagtggagagctggcacctccactccaccgttctgcagtgaggttggataaggcacgaggtggtggccctctggaaactgtaaagtgctctctggccttggaggattcttctcaaccgtgtggctcagctctctctgtgctttcttcacagcctaactgggctgggagagtgctatctctggctgagagaaccacaaacttcaagatgtatgagggctacctgggaagcttgttaaaatgcagattggaaccacccccagagattccaattcagttggtcagagctgggc

SEQ ID NO: 169842 - DNA, 587 bp, Homo sapiens
aggcctgacacgagaattattaaagcacttaggatccttctggtgacctttagagaagctgtgctgtgtgccaacacagtcctagagagaagaaagacacattcctgatgacagacaaggaagctgaggtcctgagaggtagggtaacttgtccgagattacccaactaggaactggcaagactggaatttgaactcagggtggtctgatttcagggcatgtcatttttaggccatgctgtcttgtttggctctcttttcatttcctgtcatttcgctaggtgatattcattgagcacctcttttgtgccagtggagagctggcacctccactccaccgttctgcagtgaggttggataaggcacgaggtggtggccctctggaaactgtaaagtgctctctggccttggaggattcttctcaaccgtgtggctcagctctctctgtgctttcttcacagcctaactgggctgggagagtgctatctctggctgagagaaccacaracttcaagatgtatgagggctacctgggaagcttgttaaaatgcagattggaaccacccccagagattccaattcagttgg

SEQ ID NO: 169843 - DNA, 603 bp, Homo sapiens
tgtgagaatcaaatcaaataatgcacacaaagctgttttataggctgtaagaataattaagagcaacaattgcgtatttttagcttttgctaggagccaggctcagtgctaagtgacgcatttctctcacaggccctatgaggcaggtaccagtactactcccattttgcacatgaggaaactgagtctgaaagaggctgagtgacctgccccttggcccacagccagaatgtggcactgccaggatcccaaatcaggctgactgagtcgagtgcccacatcctcaacccacagcacaccaaagggaaaaaaaaaaacaaaaaccaacctacctactgagatttgaaaagccaaaccccaggcaggccgcagtggctcatgcctgtaatcctagaactttgggaggccaaggcgggcggatcacctgaggttgggagttcgagaccagcctggacaacatggtgaaaccccgtctctactaaaaatacaaaaaattagccaggcatggtggtggtcacctgtagtcccagmtactcaggaggttgaggcaggagaatcacttgagctggggaggtggaggctgcagtgagctgagatcactgt

SEQ ID NO: 169844 - DNA, 218 bp, Homo sapiens
aatttaattaattaactttctgcccctgtctttttcctcttttccttctggaactcccataatgcaaacatttgtttggttaacratgtcccattagtcccttagtctgtcttcactctttttcattcttactatttcttttttcctctgactgaacaatttcaaaagatctgtcttcaagatcagagatgcttctacttgatctagtctgctgttga

SEQ ID NO: 169845 - DNA, 519 bp, Homo sapiens
tcctctgctgcaggtctgctgaaatttgctggaggtccactctaggccctgtttgcctggggatcacaagtggaggctgcagaacagcaaagattgctgcctgctccttcctctgtaaggttcgtcccagaggggcacccgccatatgccagccagagctctcctgtatgaggtgtctgttgacccctgctgggaggtgtctcccaatcagaaggcacaggggtcaggcacccagttgaagggcagtctgtcccttagcagaactcgaacactgtgctgggagatccgctgctctcttcagagctggcatgcagggctgtttaagtytgctgaagctgtgcccacagcctccccttcccccaggtgctctgtcccagtgagatgggagttttatctataagtccctgactggtactgctgcctttctttcagagatccccttcccagagacgaggactctagagagggagtcgggccacagccgctttgctgagctgcggtgggctttgcccagcttga

SEQ ID NO: 169846 - DNA, 519 bp, Homo sapiens
tcctctgctgcaggtctgctgaaatttgctggaggtccactctaggccctgtttgcctggggatcacaagtggaggctgcagaacagcaaagattgctgcctgctccttcctctgtaaggttcgtcccagaggggcacccgccatatgccagccagagctctcctgtatgaggtgtctgttgacccctgctgggaggtgtctcccaatcagaaggcacaggggtcaggcacccagttgaagggcagtctgtcccttagcagaactcgaacactgtgctgggagatccgctgctctcttcagagctggcatgcagggctgtttaagtctgctgaagctgtgcccacagcctccccttcccccaggtgctctgtcccagtgagatgggagttttatctataagtccctgactggtactgctgcctttctttcagagatccccttcccagagacgaggactctagagagggagtcgggccacagccgctttgctgagctgcrgtgggctttgcccagcttga

SEQ ID NO: 169847 - DNA, 478 bp, Homo sapiens
tgcatataaataatttacattcttataacactaaactaaacattaaagaagaccaaatcaaaaggaaaatgaaataaataatcctaactgtattgtgctaatcactaactggtccattgttagtagaatagccacataaaaargaactgatttaaacaattataaacacagtaatttgcctgctcacccctagtgggacagaccctaatatcaaaaatcactggaaaaaaatcaaactgttttcagtgttcatattgatcatgaagtcgtgttgatcactggtattctgagatgtgtgcgtggggtgtgtgtgtgtgtgtgtgtgtgtgtgtgtgtgcacgcgcatgtgggatctaacaaatgaggaattatcatgatgatgttaagaaccaggatttatgtcatgggaaagaggaaatagaaacgtaagactgacgaggttgaagaaaaggcttgtagtcctaaatttaaactggat

SEQ ID NO: 169848 - DNA, 346 bp, Homo sapiens
gactgagatatggggacagtcattcatttaaaactaagcctcatagcaaccatctgctctacttccaaaggacaatttaggacctgggaaaacaacatcagagttaaattgcaaaaacactagtctctatactagtccctgatgtaacgttcaagtcagggtttaatsattcctaaagcttacctgtgataatgcatatagcatttcagtcattacctttcatggagctatcaatgacagccttcacatactgaaatttacagccatgcatattctcatgacacatgtctactttttcagagttttctctaggaatgcaatgaaaccacccagaaaaaagcaccag

SEQ ID NO: 169849 - DNA, 296 bp, Homo sapiens
ttccaattctaagatggcatgactcttcagaattcctctagagaagcagaaaatgtgattaatacattttgaatgattcttagctgtaaaggttaaaacaatagcagctatctgattgatttttagataaccaaatatttaatcaaccaatcaaccttacagagcttctggattcaaactgtgttcctaatggtggagctattggaaatctaaccamctgataagtgaaatgataccgtttattaggcagtccagtacagtggaaggtacattgaattcagggttagacgagtgaa

SEQ ID NO: 169850 - DNA, 390 bp, Homo sapiens
tatgctataattagaggagttgtcagggctytgctgtaaatcctaaatttttccatcaaggcttcaacttggagttatgtatttgtttgaagaaactcagatgtcctgtgaattgcggatctcagtaaaatcaagtgtcgtaagaattacttctaacctgatttatcctaaaccacactcctttactatgaggatctatatctttctaaaacgggctttatttatattcgagttgttttataatgtgcttggggcatttgctctggagctgcctagtggcatagctacattataattggctccctttgggatattaattaggtggaatgtcagtcatctgtcttatatggcatgcttctgtgaaacaaacatggagcacatgaagtccta

SEQ ID NO: 169851 - DNA, 390 bp, Homo sapiens
tatgctataattagaggagttgtcagggctctgctgtaaatcctaaatttttccatcaaggcttcaacttggagttatgtatttgtttgaagaaactcagatgtcctgtgaattgcggatctcagtaaaatcaagtgtcgtaagaattacttctaacctgatttatcctaaaccacactcctttactatgaggatctatatctttctaaaacgggctttatttatattcgagttgttttataatgtgcttggggcatttgctctggagctgcctagtggcatagctacattataattggctccctttgggatattaattaggtggaatgtcagtcatctgtcttatrtggcatgcttctgtgaaacaaacatggagcacatgaagtccta

SEQ ID NO: 169852 - DNA, 631 bp, Homo sapiens
acacacacacacaacaattgtcagaaaccaacttaaagatttgtcaagactaatttaagtgactgaccaacaatagtcaaaaaacttagatgcatatgtaatgggatgttttttaacattcttcttattaaaagaaaattgcatcattgcctttatagtaatatgttaagatcataaaactgaaaagcgctcctttgataaatctggtagtctagggccacctggtgtccaaactatttaattacgttatttagcaaagaaaaaagaatactttttttttttctggtatgattccacttatgggatgtccagacaggcaaatccatagaaacagaaagcaggacagtgctttactcttttaaacttgaaattccctaattaaaagaagatattcccacaattaaagattagaacttaaaatatattagccaggtgtggtggcatgcacctgttaaggaacaaagattctgtattagtttcctattgctgctgtaaaaaattatcactaacttggtggtttaatgcaatacaagtttattaytttacaattctagggtcatatgttcataatgggtctctaaaatcaaggtgtcagcagggctctgttccttctaaaggccgtagaggagga

SEQ ID NO: 169853 - DNA, 518 bp, Homo sapiens
gctcatgccccggtcaggagcaacaagaacctcactgctggtctaagtgggggaagtgatagcccatggcttagcatgtttactaagaatttcaccaatgattgtttaggatgaggtacaggcagaaggggaagcactcggctagggaaggattgtggaggtggctgacttttgtaaacttttctggagtccttgaagagaatagcacagagaacagcaggtaagccaattatcaactcagggcatgctatgaaagccaaaggctttcatggccaactttaattagatcctcatctcttgttgcaggagtgcagastatgatgcatattagactcagaatataatcataaaaatgtcagcactgcaacggatgccaaattcacagccagggcagatgtcctatgttaacttcagggcccagaaagggaagcagtaggactgtgaaacctggaatggtcatgctacacaatcttgaatcccatattcatttgaatcttcaaaaaacaaaagaaaaaaaa

SEQ ID NO: 169854 - DNA, 406 bp, Homo sapiens
ctttggggaaaaagaaagatgaaaatgcacatggaacagaaaagacatttcaattgagagcatacacaaacattgaggatataataaagggaatcatttaagagaaactcctggaaaaagtaagaaacaaacaccaccttggacaaaacccaaatgttaaattcatattccagatgtgatgcaaacatattgtggcaagcaaggttttaaacaaatgatagagaattttaatataaagacacatgttaagatcatttgcatttgcatgtttaaaggacatggcattaaaaataatacaattataacacatattgggcctagaataaactatgtttatatagcagttgcaatacaaatgttgtttaggttttataaccaaagygtaggaaaatttcttaactgaatt

SEQ ID NO: 169855 - DNA, 586 bp, Homo sapiens
actcttattgatagacaattgtttccagcattgccggtctatatggttttgtgcccaaacaagcatatctttctaggataaatgcttaaaagtggaaattctgtgaaaaacaggaagtacatttttcatttggaagacattgccaaatgtccggtaaggatattttatacaatatgccctataattcaataacatataaaagcartctttctatacctttgtcaatattgtgaattttacaagtattttgtacttcacaaaactgattactaaaaattccatctcatttaagtttaataagtgtttattttattattagtgtgtttggtcagatttcagcagggtttaagcttgttatacttcttattttgcaaactatcatatacttactttactcttttctattttcttcactaggttgttgatcttttctacttgattcataagaatcttttaaaacattttatctgaaatagctattgcaatatttttccagtattttttgatattgttttatgctgtttctcaacccatctgccaagcagacattttaaaactatatgcagttaaattgttcaaaatagca

SEQ ID NO: 169856 - DNA, 595 bp, Homo sapiens
tgtgtcatttatcttttgtatttttccagtttccctttcatttaattctgctctgatctttgtgatttttttttttcttctcctggctttcagtttaatttgctcctgtttctgtagttccttgaagcgtgacaagaggctaccatttgtgctgtttcagacttttggatataggcatttaatgctataaaatttcctcttagcgttgcttttgctgtatcctggaggatttgataacttgtgtcactattatcgttcatttcaaagaattttctaaattactatcttgattccattgttaatccaaaaatcattcaagagcagattatttaatttccatgtatttgtataattttgagggttccttttgaagttgagttccagttttatttccctgtggtctgggaaagtacttgatatatcaatttcaattaccttaaatttattaaaacttattttgtggyctataatatggtcctatcttggagaatgttccaagtgccgatgagaatgtatattctacaattcttgggaagaatttctgtaaatatctgttaagtccatttgttctagggtataatttaagtccattggt

SEQ ID NO: 169857 - DNA, 587 bp, Homo sapiens
agaaagtcctgctccattatcaaagaacagatagaaagatcaaatttggagctgaaaaaaaagcaatgatactggtaccacatattctaaacaaagatcacttttgctactgtaaagatgattagtatattgaaattactttatagaatcatttccaagttatcctacaatctcagaaaatatgactcaaaataatgctttcaattatgtcactttcttcagccagtgattcttaaaaattatttctgtacatatggaaatctcttaaaaataatgattgggttatcaaagttgatttgatttggcatatctgtatagcttcataaataaaatattcaaaatttatagtagattattctaactaaatgcaaattatttgtccaatttgacttttttcaactgtgtasataatatgacaaaaaatcatatagttaaaatactcaaaattattatagtcaatattaggaggaggtcacagcaaaaaatgataaatagagataacaaaattaggtctaaataatgtgaattcaaatacatgtacttgaaaattacatttgaaacttagcaactcataatatagagatttt

SEQ ID NO: 169858 - DNA, 504 bp, Homo sapiens
atgagagtctgagctatgggagctggggagtcgagccccaggacccctcagtcctgctgggccgtttctaagactggttctgcacccggtgacctacaactccaggaacagtcttccttccagtggtctccatcacaggctggacagggtcggggtagcttcctcttgctacctgggcaatcctcaaagtgccctgatttgccgcacttgtgtcagttaacaggtgcccctcaggwatcctgggttttacaggcctgaagaattgccaatagaccctctgcttctttcttatgctttctctctttctcttgagcctcctccagatctttattgtaaaaaccaaggtggccatctccgggaggtttcctaaagtgctatctggttatatggcttgcttttgcagcttcctcctgatatcaggagctgcctgagtaataaacttattcttcagaattagttgtttctcaactgaatcaggagatagcgaggtacacctcaccaagg

SEQ ID NO: 169859 - DNA, 513 bp, Homo sapiens
ctcctgaatggtaatgagagtctgagctatgggagctggggagtcgagccccaggacccctcagtcctgctgggccgtttctaagactggttctgcacccggtgacctacaactccaggaacagtcttccttccagtggtctccatcacaggctggacagggtcggggtagcttcctcttgctacctgggcaatcctcaaagtgccctgatttgccgcacttgtgtcagttaacaggtgcccctcaggaatcctgggttttacaggcctgaagaattgccaatagaccctctgcttctttcttatgctttctctctttctcytgagcctcctccagatctttattgtaaaaaccaaggtggccatctccgggaggtttcctaaagtgctatctggttatatggcttgcttttgcagcttcctcctgatatcaggagctgcctgagtaataaacttattcttcagaattagttgtttctcaactgaatcaggagatagcgaggtacacctcacc

SEQ ID NO: 169860 - DNA, 501 bp, Homo sapiens
aatgagagtctgagctatgggagctggggagtcgagccccaggacccctcagtcctgctgggccgtttctaagactggttctgcacccggtgacctacaactccaggaacagtcttccttccagtggtctccatcacaggctggacagggtcggggtagcttcctcttgctacctgggcaatcctcaaagtgccctgatttgccgcacttgtgtcagttaacaggtgcccctcaggaatcctgggttttacaggcctgaagaattgccaatagaccctctgcttctttcttatgctttctctctttctcttgagcctcctccagatctttattgtaaaaaccaaggtggccatctccgggaggtttcytaaagtgctatctggttatatggcttgcttttgcagcttcctcctgatatcaggagctgcctgagtaataaacttattcttcagaattagttgtttctcaactgaatcaggagatagcgaggtacacctcacc

SEQ ID NO: 169861 - DNA, 556 bp, Homo sapiens
tttacaatattttattctgtatctattttctctgttccagcatgaagacaacaatctctggggacctgaatgccacaatgtgaatttgatgcagttgcaagataaaagaattgacttatcagggctactattctagggacacttgtgtcaacttaaatgaaaaaaatcttgaagaaatttatttgaaaaaamatcttggtaaacgtgagaaatatattacagaaatgtaatgtacacatttacctttgatgcaaaagatataaagtgttttgtgacttctttgcctaccactaactttaagatgtaaaaagaaagagacataaacacaaacaacacaaaaacaaagaactgttatgatatattaaaagggttagaataccatataggtgcacacacatatacacacaaatgaagatggctacagaccagactagagtagaacaaaagttgattattatcagcaagaatttataggtacagaaatataaatatatgaatctatatagacatatgtatcattttaaattgtaaagaaagatttcttctataaaatgtc

SEQ ID NO: 169862 - DNA, 556 bp, Homo sapiens
tttacaatattttattctgtatctattttctctgttccagcatgaagacaacaatctctggggacctgaatgccacaatgtgaatttgatgcagttgcaagataaaagaattgacttatcagggctactattctagggacacttgtgtcaacttaaatgaaaaaaatcttgaagaaatttatttgaaaaaacatcttggtaaacgtgagaaatatattacagaaatgtaatgtacacatttacctttgatgcaaaagatataaagtgttttgtgacttctttgcctaccactaactttaagatgtaaaaagaaagagacataaacacaaacaacacaaaaacaaagaactgttatgatatattaaaagggttagaataccayataggtgcacacacatatacacacaaatgaagatggctacagaccagactagagtagaacaaaagttgattattatcagcaagaatttataggtacagaaatataaatatatgaatctatatagacatatgtatcattttaaattgtaaagaaagatttcttctataaaatgtc

SEQ ID NO: 169863 - DNA, 509 bp, Homo sapiens
aagataagctataatgcaaaatatttacatacagtctgttgatatttttatctctatagattttagttttaattctgtatatgtttacaagcataaactattcactaattctgtatatttttaggtcacatttataagtaaataattgttataaatgaactcaaaaaatatgtggggctttttatgtgtagatgtaattgaaaattatgtggtatatggctaatattggctgttcgctgttttaagagctagaaataccctaattaacaaaaataaagaaataagaacccttatcctctggaagttttcccttctaaaagataaacttctcaaggtagcacctcatgaaaaaagaactgtcataagcatataaaattgttcctgtatttctttattttttgatttttattttagattcrgggtacacatgcatgtttgtactatagataagctgcctgtcatgggggttttgcatacagattattttatcacccaggtaataagcatag

SEQ ID NO: 169864 - DNA, 509 bp, Homo sapiens
aagataagctataatgcaaaatatttacatacagtctgttgatatttttatctctatagattttagttttaattctgtatatgtttacaagcataaactattcactaattctgtatatttttaggtcacatttataagtaaataattgttataaatgaactcaaaaaatatgtggggctttttatgtgtagatgtaattgaaaattatgtggtatatggctaatattggctgttcgctgttttaagagctagaaataccctaattaacaaaaataaagaaataagaacccttatcctctggaagttttcccttctaaaagataaacttctcaaggtagcacctcatgaaaaaagaactgtcataagcatataaaattgttcctgtatttctttattttttgatttttattttagattcggggtrcacatgcatgtttgtactatagataagctgcctgtcatgggggttttgcatacagattattttatcacccaggtaataagcatag

SEQ ID NO: 169865 - DNA, 292 bp, Homo sapiens
gaattctcaaggcccaaatccatttcatcaaggtggtctgagcaaaggtctttaagggttttgtcaagggctaggggctggaaaattgaggttgttgattggtcagggtaaggggcatgacatcatcagaatgtggaaactcattcttccaagagtcagcgtcttgcaggaccctttaaatcagatggtttaagtcattttgttggtatgcaaaacctaaaacaaaaaatcaaagaaaaagcttatcatctcacaacagtttagyttttatgtacagagcggaaaagaaaca

SEQ ID NO: 169866 - DNA, 584 bp, Homo sapiens
gtgcctaactaacaaggtgtcttctccttcccgcatgttcacagagataatgaaagtaccacggcacccttcttttctgcttcctgtgttgcccaasacaactcaactgaattcctcagtgaccccaagttgtccacatgggggaccagaaagaagggagctgaggcaggggatactgaacataacctgtttattcacattcatatacatataggtgggttattttctttaatattaaaaagcccagatttttagtactagattttcttttctcttgccataaatagctcagtacattgcttaatacatagaagactttgaccacaactgctgacatgcacacacacacagacacacacactccttatctttaatgtcaattctgactccactctgtccctaagctgtgaaaatgaatgttgaactatggacacccaacagacctagcctaatcctctccaagaagtgtccagattaccttggccagctgttaacctttgtccccaatagtcccggttttatttgaaaacctcccagcactgcttgtgtctcctgtgttaacaggcagttgatgagggaactgt

SEQ ID NO: 169867 - DNA, 548 bp, Homo sapiens
tgtctgtgttttattttcagtgtcagaactttaagatcaagtagaaaagatacccttcatctctatttttacagcattattgatatataattaaaatacaataaactgcatatttattcatgaaaccatttctatagtcaagataatgaatatagcagtcaccttcaagtttcctccttctcyctttgttatccctccctctcacccatcctcgtcctcccatctccagattaccactaattttctttctgtaactatagattagtttgtgttttctagaattttatataaatggaatcatacagtatgaacccttttgctggggcttcttttattgtgatgtgtggtctttcatatatcaatagcttaatcctttatattgctgagtactattacattgtatggatttacacaatttgtttattcatttaccctattgatggacatttggggtgttcccagttttgggagtgcagtttttgtctgtgaacattctcatacaactttttgggctggacatatgtcttcatttctcttgggtaagtacc

SEQ ID NO: 169868 - DNA, 647 bp, Homo sapiens
ttaatgactgatagaattgatcaaagaaaggaagccacactaattcaacacactttctttaccgaacattatttgggaaaatgaagcaatcaagaaggaaagtgaaaatgctgaaataatgcagcatggcttggtgaataacctactcttctggaagtaaattcactctttcagagcagtgatgtactttgaaaaatagtatctcaaaccttgaaaactttcagaacaatgtggcctttaattacttcatcttgagtaggaacataaaatttctacttaactggctaatgttaaaccgaaatgttaagaatcaatgtaggacaccattattctcaccaaagctttatgtttttctaatgtgctttaagtgaaaaggtaaytggcctcttgttcatatatttgtactttcacaactgcattttgattcctctctttcataattctaagggacactgaataatgttgtatacatcttaaacaggtttttaaaaaatttagaacaggaatgtttacatattaaaactataataattttaatgtatcaaaactctgatgcaatcagatgctgggttactctcctctgtaaccagtaacatgacccaaataccctttgcctataaatgcagcacgtaatttcaaaagaaaga

SEQ ID NO: 169869 - DNA, 448 bp, Homo sapiens
agggagttgtggggaccccttaatcactagtcaggttggcagaaagattggtggcctgggcactccattagtggctgtcttgtgaagtggacagcmtcatgggactgagccttcaacctgtggagtctttgccgagtcctggacctagtgtccgaactgaattgaactgtaggacagccagttggtgtcagagagttggagaattggttggtgttggaaaagacacaacacttaatatcagaattagtgtcagaaaaccgataatacaacatgccacacagtcatataaacaacatgcacctatatggaataaatcagtgttctaaaaaagtcattaattaattagaaaaggtgaagtaaccgttctgtgagggatgaacctgttatgtgaatgagcaagtgtttgtttcagaaacaggaagaaacacattacaatttaattaaattt

SEQ ID NO: 169870 - DNA, 576 bp, Homo sapiens
gttaccatggaaagggtggaaaggtctggatgttgtcatggcaacggtaaactgccgtggcatgctggtgggcatagcttatggggaggtgcttctgccctgttctacctagtcctcaatttggccccatgtccgagtcccttctcctacctcactgccataccatcgtgggtttcctctccagagaatgctgtgaggaaccagtgagtgattccacctcaattttatgtggttttggggaagcggagcgagagaagagcaagtaaaaccaagaatctcttgccatacacacgttacaggcaggacaattgtggctgttgttacttctgtatttactcartttttaaaattaagctcttggcctaaagatccaacatgtaacttcaggggagtccttcattaattaatactactttaaaccttagcacacatcgtctgggaatgacaaataagcatttctttttttttaaatttaattttattattattatactttaagttttagggtacatgtgcacaacgtgcaggtttgttacatatgtatacatgtgccatgttggtgtgcatttctaaatg

SEQ ID NO: 169871 - DNA, 338 bp, Homo sapiens
aattatttgtctttcaccatttttwaaaatttttattttattattttttttgcgacagggtcttgctctatcgcccaggctagagtgcagtggcacaattacaactcactgcagcctcgaactcctggactcaagtgatccttccacctcagcctcccaaataactgggattacagacatgtgccaccagacctggctaattcttctttctttttttttgtagagaagtttcaccatgttgctcaggctggtcttgaactcctgagctcaagcaatccacccaccttggtctcccaaagcgctgggattgcaggcatgaactaccacacccagcctag

SEQ ID NO: 169872 - DNA, 395 bp, Homo sapiens
gatggcatctgcatgacttctgtgtttatttttctcattacgacttcagagttagcaagacgatggcctctttatcttttctcactgccatattttccaggcacagtgggatgtagcatcccccctccactggcacagcaaagctctctgagtctagtagtagcacttcttaagaaagaccagtgacagtggggaaggaaggagagggcatgggtagggggcagtgtaagatgctgtgctggaaagcacatcactgtgtctagtgcatggggggaggttgacggtactgcctccytctttgcagcctgacctcactgtctgggtggcccacgtgcagcgggagcgggtgccttgtgccaaacgttgtgcacaccgacttccctacctgcttcctc

SEQ ID NO: 169873 - DNA, 433 bp, Homo sapiens
cacagtgcagttactcatcttgagcaaggtcccctgagtcccagcccaattttctagaattttattttaccaagtttcagagaaaccccatctatattctgaggaattttaaatacaacaccttattctaccaaataaagactttactggaaaaataaaaagcatgtgtagaatatttatgtagtggctaatgctccattaatgttaacaccaaaataggaaatagactttcccaataaaattaaacctaatttccatttatttggaaatatctacatatacaagaagatagwaagtttaattcagtaaacacccatgtactcactatttactgcttaaaaaaataggtcatacgctgagtgtggtgcctcatgcctgtaatcccagcacttcgggaggccaaggtggatggattgcctgagctcaggaattc

SEQ ID NO: 169874 - DNA, 508 bp, Homo sapiens
actctgttgaatagaagaatttatgaaatggagagcgtctaggataatctagattaaatgatgactatttatctcttctgatgttcttacacctctttatcatgaaaagatctattttatctaaaataaagataattatttagctacttagcaggagtttgggctgatcgatatatactaatgcagtaccagctattgtttgattcattagtcagtctagaagttacatccaagtcattatgtttatttcactccaaatcttaagacagtagcaatcctcaattttagaaagaatcaaaatttttggtgggcaaaactctgtattctgtggaacaccacatctctcagtattaacagacatttgtagagcactttattctcatatgggctctgcgtgatagccattgtgtttcaggggtggaaactgagctgtgaaggcttaaaatarccagtccctattgctttattgcccagtaatgagtgccaacaagtaacaaggtcacgatcc

SEQ ID NO: 169875 - DNA, 507 bp, Homo sapiens
gtaactggaatttggggaggtaaaaatgagatataaaatagcatgcgcttagtaagcttctgttagtacattgtaccaaycaggttattttaaggaacactcagccaattacaaaacatatgaagccaccaaaaaagaaacagcaactactacttctctacacaatagatatctatgtaaaggcttttaatcaaagtggcataaacccgtggaagtactgctcttaacacagacaatacttatttccatggagtcacatcattcctgctttcaagaggactgaaagcaacaatattccataggacaaagagttcttgataacaccactacaacccccccgagattttactactcttctcctcctctggaaatagaaacacactgaagctggggccgcacacaggtagagctaagtgtgcactctggtctaatgcaaacactgacagaagttcaggtgaggtccttttcccccttgcttgggaatactgatgctgctgatgaagtgaa

SEQ ID NO: 169876 - DNA, 594 bp, Homo sapiens
tcaggtgacacaatgcaaattcatgtgcatgagctcacaggtccctgtaaggcagcaacagctccatgattaagggaagtgaaatagtactgtggtttcaagtgctagttctggattcccatgttttgaagaattagctttgggatcatctgtaaaatggggataataaagtggtcttggatcataatctgtaaaatatgttaataatagtgtctattgaagacagacttccagaatggcaatttgaggagcaatgtgggatttcaccccagtgaaagaaccacttattgctgaaaattacacacatgcatgcacacacacaggcttcaaccatttaaastccttggaaattatcttaagtgcataaaatatggagaaacaattactgaaaaacattttaataaaccttgaacagaacagtgaaatttggtagtgtttgagccatggtttgcttaagtctttaccttggccccagctaaatgcaacagaggttcttctccaggcatgtgtagccaagaagataaggaatccctatttccttacccccagccaacttctattctgagactccatttgcactacaggggaggcaag

SEQ ID NO: 169877 - DNA, 378 bp, Homo sapiens
ggtaaccccttttgctcttccgactggatcctcataggattttcatgtgtctctgaccttgtgtttttcaagatgtgtctggctgtgcattttgccattcattttgcctggaacaacatgaacttttttgagccctacactcagttttgctttgttttccagctttagaaagatctgtatacttatgtgctcattattgaggacgtataatattaaatgagtagtgtctagcattaaaaaagataagctgagagtttatacaactgttgaaaccataaaatgacaaagacaattactctaaaaactatatatgcatatgtatctttagctaaatgaggttaataaaaatggtaygcttcatattgttcacaataattt

SEQ ID NO: 169878 - DNA, 570 bp, Homo sapiens
gtattaattaactattaactattgaacataaaatatcatccagcaatctcacttctaggtgtttattcaaaggaattgaaaaaaacatattgaagggttatctgtacttccatgttcattgaaacattattgacaatagccaagacatggaagcaacctaaatgaccttcaatgaatgaatgaagaaagaaattgtggtatatatacacaatgatattttattccacattaaaaaagaataaaaagattcttccatttgcaacaacatgaatagatgtggacggtatkatattcagttatataagccaatcacagaaatacaaatactatatgatttcatttacatgtggaatctaaaatagtcaaacttacagaatcataaaatagaatgctggtttccaggaactggatagaagaaaatgggaaggtgatagttgaaggatacagaatttcaattatgcaaaataagtaatttttgcgactctactatgcagcatagtgtctagagctaataatactttattatacactttacagtcatgaagagagtagatgttatgttaagtgttt

SEQ ID NO: 169879 - DNA, 408 bp, Homo sapiens
gcccaccatttttctcttaacatcccaacattttattattgatgtaatccatattcatacytatagcccactttacttacttaaattgctatgtaatattccattctatgaatatcaattatctgtataacctttccaatgaccatagtagggtggaagtggaagtggtaccactcaccatcacctctagtaatccactagcaaaatttttgctccctgttctgcgacattatgttctgctggcctagatgtcttggttctagagggaggaatgctgccaccaagagacacgacaatgattccattaaactggaagttaagattgccacctggacacttcgggctcctcctgcctctaaatcaacaggctaagaaggtagttacagtgttggctggggtgactgaccc

SEQ ID NO: 169880 - DNA, 590 bp, Homo sapiens
gtatgtatacacttgtactaaaaatatctttattttatttcctttcttttttcctttattatgtgacataagatttattgactcatatcagaatttaagtgttagtaactttatgtaatagcatttargttaaggattaatgcgcttccggttgtatgaaggatagctgtattatgttagatgtaattatgaccttattattgtcttcatttgaagattatgtctgatttcaggagatatgtatgggttcaagttgacaaggggtgtacttgtgatggttgatactgaatgtcaacttgattggattgaaggatgcaaagtattgttcctgggtgtgtctgtgaggttgttgccaaaggagattaacatttgagtcagtggactgggagaggccgacccaccctcagtctgtgtgggcacaatcttatcagctgctggtgtggctagaataaagcaggcagaagaaggtggaaggagctgacttgctgagtcttccagccttcatctttctcccatgctggatgcttcctgccctcgaacatcagactccatgttcttcagcttttggatacttggacatacaccagtgg

SEQ ID NO: 169881 - DNA, 607 bp, Homo sapiens
agggctctgcccacgtcacatgccaatcacaatccatgctgtccctggagctgctctcctttcttctgaccaactggctataaatcagaagttcctatgaccccctccttgggcttgatcatttgctttgatggctaacagaactcagggaaaaacttaygttgctggtttattagaaagaattgatcaagaatacagaagaacagccagatgaaaaggtgcatagggcgatgtctggaagagacctaagcacagaggcttctgtctccgtggagttgggatgcactaccccgttggcatgtagaggtattctccaacacagaagctctctgaacactccagttcaaagatttttatggaggcttcaccacataggtgtggtcaattattaactcagtctccagcccctctccctttctcacaggacaggggtgtgggactgaaacttccaagcttctagccatggctttgtgtttctggtgaccagcccccatccaggaacacaccaagccataggaacaaaagacgttcctattgctagaaaattctatgggattagggcctatatgtcaagaactttggtcaatgaacaaatattcgaacagaa

SEQ ID NO: 169882 - DNA, 607 bp, Homo sapiens
agggctctgcccacgtcacatgccaatcacaatccatgctgtccctggagctgctctcctttcttctgaccaactggctataaatcagaagttcctatgaccccctccttgggcttgatcatttgctttgatggctaacagaactcagggaaaaacttatgttgctggtttattagaaagaattgatcaagaatacagaagaacagccagatgaaaaggtgcatagggcgatgtctggaagagacctaagcacagaggcttctgtctccgtggagttgggatgcactaccccsttggcatgtagaggtattctccaacacagaagctctctgaacactccagttcaaagatttttatggaggcttcaccacataggtgtggtcaattattaactcagtctccagcccctctccctttctcacaggacaggggtgtgggactgaaacttccaagcttctagccatggctttgtgtttctggtgaccagcccccatccaggaacacaccaagccataggaacaaaagacgttcctattgctagaaaattctatgggattagggcctatatgtcaagaactttggtcaatgaacaaatattcgaacagaa

SEQ ID NO: 169883 - DNA, 607 bp, Homo sapiens
agggctctgcccacgtcacatgccaatcacaatccatgctgtccctggagctgctctcctttcttctgaccaactggctataaatcagaagttcctatgaccccctccttgggcttgatcatttgctttgatggctaacagaactcagggaaaaacttatgttgctggtttattagaaagaattgatcaagaatacagaagaacagccagatgaaaaggtgcatagggcgatgtctggaagagacctaagcacagaggcttctgtctccgtggagttgggatgcactaccccgttggcatrtagaggtattctccaacacagaagctctctgaacactccagttcaaagatttttatggaggcttcaccacataggtgtggtcaattattaactcagtctccagcccctctccctttctcacaggacaggggtgtgggactgaaacttccaagcttctagccatggctttgtgtttctggtgaccagcccccatccaggaacacaccaagccataggaacaaaagacgttcctattgctagaaaattctatgggattagggcctatatgtcaagaactttggtcaatgaacaaatattcgaacagaa

SEQ ID NO: 169884 - DNA, 655 bp, Homo sapiens
gttcctttgactgtggcttccagaagagcagagtggtttgggtctaccctgctcactgtgccaaatctgtaggagtgaagggaaagattcccctttaccctctgaaggttggttgaaaatcaacccacaaaaggcagattaataggaaaaaaagtctgtattagtctgttctcatgctgctaataaagacataccctggactaggtaatttacaaaggaaagaggtttaattgactcacagttcagcatggctggggaggcctcaggaaacttacaatcatggtggaggggaaagaaatacatccttcttcacatggcagcarcaaggagaagtgctgagcaaaggaggaaaagtcccttataaaaccatcagatcttgtgagaactcactcagtatcacgaggacagcatgggagtaacttaactgccccatgattcaattacctttcaccaggtccctcccattgtagattatggaaactacaattcaagatgagatttgggtggggacacagccaaatcatgtccaggaggtacaagcttattttaatgtgcatagcatggagaaatcacaggaacatggttacccaataacccaatggggtatggattcttatatgcacttcatcataaaaaaggggagatggggctgtag

SEQ ID NO: 169885 - DNA, 551 bp, Homo sapiens
gtggtaggattttattttattctttgtgctcctatttytcaattttttataagttgtaattttatactgttttaatatttaagaagacttagttgaaactaatgcagtgcagttacataggtttctggtcttgtgagactttgagacaacttaaatgctgtcagctaggggcatttgagagctcccacgtttcgaaaatgtagatgctctaggagctctccagggtactggattgcctctcctcaatctctgatcaatgaatcaggtccttgtgttctcttctgacctattggtttgccctaaatcttgcccttccggtcagctgcctgtctcaactatgtctgaaagcaacttagtttcccagatgagttcccagcaggctttgactattatttttatgctgatgccttctaaatctatcaagccggtattttcttctcacccaagctcttctatttcatttctattggccattagccctcattaacttatttaacaaatactactgagagtggccagaaatgtaaaattcaaaactataaaacttacag

SEQ ID NO: 169886 - DNA, 521 bp, Homo sapiens
gaattccctccttcaacccactccatgcagcactcctggagggtgtaccctggagggtcttttatgctctttccacagagccaggcttagtgtctggcacaaggaagggcacgcggcaggtgtcagatagaatcacagtagcaagaatgaggagcttgttgaacagacagcattgagaggatgccaggcacatacttagtaatttacatctattctttcatttaatcatcacaagcaccctgtgaagtaggtgctgtttgtgacaaggccatttcacagatgaggaaattaaagagtggcgggattcggtttcagctggactttacctacagggtyagccttagctgtcagaagtgaaagagcccattggccatttgatcttgtcacttgacttgacaggtctacaaacggaggcctggacagggaaagacgtccctgagactataaaggatggcgtagcctcagcaggagacccagctccctgcctctgtggggcaccacgtcgtgccagcccctggcat

SEQ ID NO: 169887 - DNA, 520 bp, Homo sapiens
gcagcactcctggagggtgtaccctggagggtcttttatgctctttccacagagccaggcttagtgtctggcacaaggaagggcacgcggcaggtgtcagatagaatcacagtagcaagaatgaggagcttgttgaacagacagcattgagaggatgccaggcacatacttagtaatttacatctattctttcatttaatcatcacaagcaccctgtgaagtaggtgctgtttgtgacaaggccatttcacagatgaggaaattaaagagtggcgggattcggtttcagctggactttacctacagggttagccttagctgtcagaagtgaaagagcccattggccatttgatcttgtcacttgacttgacaggtctacaaacggaggcctggacagggaaagacgtccctgagactataaargatggcgtagcctcagcaggagacccagctccctgcctctgtggggcaccacgtcgtgccagcccctggcatcacgcctgacacatagtacgaattc

SEQ ID NO: 169888 - DNA, 520 bp, Homo sapiens
gcagcactcctggagggtgtaccctggagggtcttttatgctctttccacagagccaggcttagtgtctggcacaaggaagggcacgcggcaggtgtcagatagaatcacagtagcaagaatgaggagcttgttgaacagacagcattgagaggatgccaggcacatacttagtaatttacatctattctttcatttaatcatcacaagcaccctgtgaagtaggtgctgtttgtgacaaggccatttcacagatgaggaaattaaagagtggcgggattcggtttcagctggactttacctacagggttagccttagctgtcagaagtgaaagagcccattggccatttgatcttgtcacttgacttgacaggtctacaaacggaggcctggacagggaaagacgtccctgagactataaaggatggcgyagcctcagcaggagacccagctccctgcctctgtggggcaccacgtcgtgccagcccctggcatcacgcctgacacatagtacgaattc

SEQ ID NO: 169889 - DNA, 603 bp, Homo sapiens
tgattatttacatttggacatcaaatagctcttgtgaaatattctgtgaagtgactgaggggctttttggattaaaattttgttttcttttgaattcaccatggctgctgctgtttctttttctcctcttcttcctacttcttttctcccccatttcctttcttttcttcttttatttttttatttttatttttttcataataaatactgaatgtatttttattttgtagaattcagtagaactcgggtcttgaaaacctacttgacgtttagactcagcatggtgaatgaaattgctcgtaaacccacccaaacaagcgcatgttcccatcgtaccaaacactggtttcctagaaaactgggtacacttacccagtagggcaaacaggaggaggtgggcttcaggggctgccaaggtgggaaggacattctgagcatgttcagcttggcatrttcaggctgaaatttaaaaaagaaaaagatacctaagatttcaacactgggaatcgcgcagtctagggatgttttttggggagggtatttgaagagaaaaaaaaaagcctagggaaattggttgaatgcttttaagagaaaatgtgtttg

SEQ ID NO: 169890 - DNA, 400 bp, Homo sapiens
agtaaagcatcagtactactggccagagcttgtgaayctgttaatatggctgtaactctggatgactgatatgggttattttctcaaagaaccttaattttatgcttatagtcttttagttactttctcaaactacatttcagagatggcctttgcaacagaaggggctcgttggtaattcctgagtagtgatggtcattgttatcatttattgagcactaagtgctgagctcactggtaagcattttgcaaatgtggttttatgtaattctcaccataaccctttctctatttgtagacataggaactgaggcttaaataatcaccttgattaatgtgaaatgcctacatgtactacatgtagtacatgtaggctgagcaccagccacagtcctgaatt

SEQ ID NO: 169891 - DNA, 458 bp, Homo sapiens
agtaaagcatcagtactactggccagagcttgtgaatctgttaatatggctgtaactctggatgactgatatgggttattttctcaaagaaccttaattttatgcttatagtcttttagttactttctcaaactacatttcagagatggcctttgcaacagaaggggctcgttggtaattcctgagtagtgatggtcattgttatcatttattgagcactaagtgctgagctcactggtaagcattttgcaaatgtggttttatgtaattctcaccataaccctttctctatttgtagacataggaactraggcttaaataatcaccttgattaatgtgaaatgcctacatgtactacatgtagtacatgtaggctgagcaccagccacagtcctgaatttatctttcaaggaatctttcttctgccttcagcgtcaggcactgtgctaagatctaga

SEQ ID NO: 169892 - DNA, 595 bp, Homo sapiens
caatgacgaggctgtttttactctggtacctcataaataacttttgatttaaagtttccaaagaattgacagagcacttcaaacgacctcatcggagagggaatgagcttctccctccatgccctgcccgctcaggtgaggactgagatcastagctggaggggttcatcaggggtgtagcccgactggcaactgacaggcttactgactgactgaggagctaaccggccagcaagctcatggagagactgacccatgggctgacaggttggtgaaataaccaagggatggttgagccaatggcatggttgatacaccaatgaagggactgactgtccaatagatggacagttggactaatggccagccagcagaccaacggattgaccgatggatcggtttgtcagtgagtcagtggatcgtaaggctaacctgtctgcctcccccaaatctggttagccagctgacctacagaccaacaggctgatgaaccaaccttcccagacactagcaggagaatatggaaaggagggggtcatctagcagatggacagggcaagcaaccattgacctacacacatatcagaaagaattc

SEQ ID NO: 169893 - DNA, 595 bp, Homo sapiens
caatgacgaggctgtttttactctggtacctcataaataacttttgatttaaagtttccaaagaattgacagagcacttcaaacgacctcatcggagagggaatgagcttctccctccatgccctgcccgctcaggtgaggactgagatcagtagctggaggggttcatcaggggtgtagcccgactggcaactgacaggcttactgactgactgaggagctaaccggccagcaagctcatggagagactgacccatgggctgacaggttggtgaaataaccaagggatggttgagccaatggcatggttgatacaccaatgaagggactgactgtccaatagatggacagttggactaatggccagccagcagaccaacggattgaccgatggatcggtttgtcagtgagtcagtggatcgtaaggctaacctgtctgcctcccccaaatctggttagccagctgacctacagaccaacaggctgatgaaccaaccttcccagacactarcaggagaatatggaaaggagggggtcatctagcagatggacagggcaagcaaccattgacctacacacatatcagaaagaattc

SEQ ID NO: 169894 - DNA, 509 bp, Homo sapiens
ttctttgcttatttactctgcctactaacatctcacaacaagtccttcctcaacgtgatttcrgggaaggacggtatttgtatgctatttttaaaatctattctgagtaatacagtctataacccacatgccaagaaccaaaaaatgaagtgtcttgaaagcactgaggtgagtattttaaaatatggttatttttacttttctgtgttatttgactgttcacaggaggcacgaatcgcttcacaaagacaataaaataattgtaaaaaaagaaagcagtcatcataaagactgccatggacacaaagctacatcactaatgaccatgcagctggagacgggaatgagaaagagaccgggagtggacggtgtggttagaaggacagccattactctcacacctgtaatcccagcactttgggaggccgaggtgggtggatcacgaggtcaggagattgagaccatcctggctaacacggtgaaaccccgtctctactaaaaatatttta

SEQ ID NO: 169895 - DNA, 584 bp, Homo sapiens
gaattctgtcctcagagttttcctttacttttataaagtaatacagagtctttatttcatcaatgtgtttcgctttagtaattcccttgtttttatttcaccaagtaaaaaatcaaaatagttaccaccactctcaggaagtgaaacttgtaccggaatcactgagttgtctatattccttttcgttactggcctcccgcccatcctcccaaaaggagaaatagtaagaactaataataacaaagtcctaaattctgcccacaagaakgcagggaacaaggcggttgagtgagattgagtggcagatgtcagtgatttaatttcactttcttaacttgcttttttgaaaaacatcttcatgtgcgacttggaggagaagaaaggcacaatgaaaacagacagcaacaaaggaccagctgtgagtttttttaaatacatacatacatggttggcagtaagaaacttccaggtttaacagtgaagaggaaaattcagtggcatttgacatgatcagtctcaatgcctagagcaggcaggcatctggtccctggttttctcattagtcgggttttctggaaagctga

SEQ ID NO: 169896 - DNA, 569 bp, Homo sapiens
ataccgtggctgttttcatcacaatrggtgagtgggaaagtaaaaataagtgagagagcagaagtcacagccctacaacacctaatctcagagctgacatctcatccctttctccagtattctccttgttagaagcaaggcagtgggtgtggcacacacaaagggaggagattacacaaggatacaaacatctgcaggagtggaccactgggagccatttcagactaaactggaagtaacacatatgcccctgggtgaatgtataagcaacaagcaacgtgtgatgtattcacacaataacatagcactcagcagtttaaaggaagaaactacgaatggacccacaacacagatgaacttccaaaacgttatgatgagtggaagccagacacaaaagagtacacactttaggattcaatgttatgaagttttagaacaggttgtctctggagaggaattgactggaaaggagcacaaaagaactttctagaatgaaaggtatcttgactcgcgggtggttatgtgggtatattcatatgtcaagattcatacaactgtacagttaaaag

SEQ ID NO: 169897 - DNA, 569 bp, Homo sapiens
ataccgtggctgttttcatcacaatgggtgagtgggaaagtaaaaataagtgagagagcagaagtcacagccctacaacacctaatctcagagctgacatctcatccctttctccagtattctccttgttagaagcaaggcagtgggtgtggcacacacaaagggaggagattacacaaggatacaaacatctgcaggagtggaccactgggagccatttcagactaaactggaagtaacacatatgcccctgggtgaatgkataagcaacaagcaacgtgtgatgtattcacacaataacatagcactcagcagtttaaaggaagaaactacgaatggacccacaacacagatgaacttccaaaacgttatgatgagtggaagccagacacaaaagagtacacactttaggattcaatgttatgaagttttagaacaggttgtctctggagaggaattgactggaaaggagcacaaaagaactttctagaatgaaaggtatcttgactcgcgggtggttatgtgggtatattcatatgtcaagattcatacaactgtacagttaaaag

SEQ ID NO: 169898 - DNA, 486 bp, Homo sapiens
atctatttacaagactccgtggctatttagtagccagaactcaaacctacagagacctgtgatgaacagyctcactactacagctctgaagcaatgaatatatttctgtatcataacaactacagaggaaaccatagacgaaaatccagaacctctgccaacgaaagacagcatgcaacacccaagtcaagtgatcagagatgtttttgtacgttatctgagaccagaaatccaaaaggagaagtcaaatctaaacagctgagtggttaaaaaaaaaaaaataagttcaccactctctacttctgccgtgaagcataacctgcatttactgattcagcaagcacatttcaagtgcttgctttatgctgggttctgctagagactgcggataaagcagtaaacaaggccaacgagctccgtgtcatcatggagctgacagcttagagggcgagacaggcacaatacagaggtaccaaaagagaaaac

SEQ ID NO: 169899 - DNA, 486 bp, Homo sapiens
atctatttacaagactccgtggctatttagtagccagaactcaaacctacagagacctgtgatgaacagcctcactactacagctctgaagcaatgaatatatttctgtatcataacaactacagaggaaaccatagacgaaaatccagaacctctgccaacgaaagacagcatgcaacacccaagtcaagtgatcagagatgtttttgtacgttatctgagaccagaaatccaaaaggagaagtcaaatctaaacagctgagtggttaaaaaaaaaaaaawaagttcaccactctctacttctgccgtgaagcataacctgcatttactgattcagcaagcacatttcaagtgcttgctttatgctgggttctgctagagactgcggataaagcagtaaacaaggccaacgagctccgtgtcatcatggagctgacagcttagagggcgagacaggcacaatacagaggtaccaaaagagaaaac

SEQ ID NO: 169900 - DNA, 486 bp, Homo sapiens
atctatttacaagactccgtggctatttagtagccagaactcaaacctacagagacctgtgatgaacagcctcactactacagctctgaagcaatgaatatatttctgtatcataacaactacagaggaaaccatagacgaaaatccagaacctctgccaacgaaagacagcatgcaacacccaagtcaagtgatcagagatgtttttgtacgttatctgagaccagaaatccaaaaggagaagtcaaatctaaacagctgagtggttaaaaaaaaaaaaataagttcaccactctctacttctgccgtgaagcataacctgcatttactgattcagcaagcacatttcaagtgcttgctttatgctgggttctgctagagactgcggataaagcagtaaacaaggccaacgagctccgtgtcatcayggagctgacagcttagagggcgagacaggcacaatacagaggtaccaaaagagaaaac

SEQ ID NO: 169901 - DNA, 570 bp, Homo sapiens
ttctaggcaataggaatttttcaactccattataaacttatgggatcactatcatatatccagtctgtcattgaccaaaatgttcttatgcagtgcatgactgtatatgtgtttctatttctcttctatttctatttctctctcttcttttcctcagatcttttagtctatcttggtgacaacactgcagcaccttgattactatggattagtttgcaataagtttggaaatctggtagtttaaattctccaactttgtttctttaagattactgtggccattctagtttytatatttccatataaatttagaaccatctgatgtagtttggatatttgtccctgcccgaatctcatgttgaatcataatccccaatgctagaggtggggcctggtgggaggtttttggatcatgggggtgaattcctcatggcttgatgctttcttcataatggtgaattctcatgagatctagtcatttaagagtgtatggcacctccccctcactctcactctctctctctctcgctcctgcttttgccatgtgatgtgcctgttccgcctttgcct

SEQ ID NO: 169902 - DNA, 597 bp, Homo sapiens
agttatatggacagtgaagtccagggtgaggaggtctcagatgcaaatgaggaacttattgggaactggagcaaaggtcacacctgttatgcttgagtaaagggtttggctgcattctgttcatgccctaggggcctatggaagtttgagcttgagratgatgacctagggtatcaggtagaataaatttcttagtagcaggtgttcaataggtggcctggctgcttcttacagcctattcccggatgtgggagtaaaggaatgctttaaagttggaacttatatttaaatgggaaacagagtatacaaagttggaatatttgcctggccatgtggcagaaaaagaaaaagctttttttgggagagggattcaaataggctgtagaacaaccgcttgctagagaaatttgcattactaaaagtgagccaagtgctacttgccaaggcaatgtggaaaatacctcgaaagcatttcagagaccatgttgtcagcccttcccatcacaactctgaaggtgtaggagggaagaatggttttgtggtccagacccaggaccccactgccctgtgcagcctcgggatattgctccctacatc

SEQ ID NO: 169903 - DNA, 489 bp, Homo sapiens
ttagaacccccacacagagtcctctctggggtactgcctagtggagctgtgggaaaggggccactgtcctctagacccaagaatgataaatccaccagtagcttgcaccctgtacctggaaaagctgcaaacactcaacaactgtgagagcagctaccagagctgaaccctgaaaagccacagggatggagcttcccaaggacttggaagctgacttcttgcaccagtgtgccctggacgtgagayatggagtcaaaggggattattttggagctttaaaatttaataactctcctgctgggttttgagcttgcatggggcctgtagcccctttcttttggccaatttctcccttttggaatgagaatgtttacccaatgcctatatcccagtgtatcttggaagtaagtcacttgcttttgattttaaagtctcataggtagaaggaatttcccttgtctcagatgagactttggacttttgggttaa

SEQ ID NO: 169904 - DNA, 577 bp, Homo sapiens
cctcctcagtcatgtggaactataagtccaattaaacctgtttttgttcccagtttcaggtgtgtctttatcagcagtgtgaaaatgaactaatatatttggtatctttttcaagttatttcaccaatgttttatagttttcattataaatgggtctgaaaaatttttatgtgcccactgtacatttgtagcactgtatcttaattcttacaggatctcagttgagaccctataactgtcactctcagcaagtggaactcacagagtttaagcagagcacagctactttcctttcccaaactgcctcttcaaatttatcctggtggctggcccctctcargcaacagatagtggtctgtcactgctagtcagaaaaacagtctcagtttagttattattatgtccagtcaaatgtagtaatacaaatgtacacttattttgaagttaaagtttctatcactgctaccccaccccaagcccagacctgcagtggaggagagaggactggcttctccatcttactgccttgatttttttctgccttctcattcactctctaggttgccttgggccccta

SEQ ID NO: 169905 - DNA, 469 bp, Homo sapiens
gctaatttttgtatttttagtagagatggggtttctccatgttggtcaggttggtctcgaactcctgacctcatgatccatctgccttggcctcccaaagtgctgggattacaggcgtgagccactgcacctggccattttcccttttttcttgggtaagtacttagggatagaatggctagctcagatggtagctgtatgtgtaacttttaaggaaactgtcaaacaattttccaaagtagtcacatcatctrgtgtttccatcagtggcttataagagttccagttcctccacatccttatcagcacttggtgtggtcagtctttctaattttatccattcacatatgcgagtagtggtaggtgattcacatttactttggcttgtagtgaagatatttaggtgaacattctgtgcaactatatcattcattcattgcacagtgcacaggcctcaaagctcaaatat

SEQ ID NO: 169906 - DNA, 590 bp, Homo sapiens
tgtctgtgtatatatgagttttctaagctttccagctgagtctaggggtgagaacttactgaattaggtctaatattcactagtggcttcccagcttctaagctatacaaccatggacacgatgttttctctctatgcctcagtttccatgtctgcagactgggtattacaatcgcaagacagattaaatgatatgatgcatataaagaaacragcctagaactcactagctcatgtcaagtccaaaccctctgcatgggactgttcactccattcccctgcacagtgaggtttacagtgacagaaagaactggcaggtgtagcggagggctgggaagttcattagaaagagaaggtgccactttctcttatcttgcctgtcaactgaacttgtacattcctggaagaaagcaagtgtcctgaaatagccacttaaaatgagtctgttagagtggattccacattaagggggggaaaaaaagtacttctccatctcttctccctgttggcaggcatacaggaagatgatgaaagggctaccacaccctgctgtggacactggccaacctgtcgcaaatgtccacagggag

SEQ ID NO: 169907 - DNA, 620 bp, Homo sapiens
ggtcatctatcatggctgagattcaccatacaacaaaagtacttatcaaaaatgaacataggtacaagcttctgcaagaacttaaagtctactatttaaagagtttagtctcagatccaaaataatcagacttctcttgaagttatgaaaattccattagctaaaagaaccacctccttccattcaagatatagctctttcttatccaccaaaggacaccactgtggaaggagaacatgatttgcacaaactgacttttcactgcatgattctgagtggaccccagaaagatttgatgggtgagtatgctgtaattggatatcaagacatgaagtttacaagtgaagattgattcaaggtcaatgccagctttactgggtgtgttgtggatcttgcaacatgaatggattcatgctgcaaagtttgacagctgtggtgccagaagacaaacaaaattacaagatcattcatgaaagctgaccttgctggaaaaacaggasaacatgtggctggccaagatctttcaagatcaggcaggtactgacaatggcttcaccttggaggttctaagatccccatcccaagtcacagcagcctgccacagtcacagcagcagcttg

SEQ ID NO: 169908 - DNA, 279 bp, Homo sapiens
tgtctctggcttcctgtctcaccccgtgatctctgtacacactggctccccttccccttcccccatgagtggaagcagcctgaggccttcaccaaaagcgggtgctggtgccatgctttttgtgcaccctgcagaaccatgagccaattagcctcttttctttataaattccccagcctccggtattcctttacagcaacacaartgaacggagacactatctgagcataattatgagttgtgtttggggcctgtggtaggatgtgagagttggcattc

SEQ ID NO: 169909 - DNA, 590 bp, Homo sapiens
cctattgaattgtgacctcctttgggccaatgagtaggactaagtctgatttgtatttatcttcatattcccaggatctacagcagcagcttagtatagtgggtgttcaaatatgtttctaagaagatttaatgatgaaaggagtaccaaaaatagcaaatccttctttactatcttacctagggtataagtcagccctgtgyctaactacatgtgaattcagtcaaaatggctgactggctcattccatgcatattgactgagcacctgctgtgtgctgtgccctgctctagcactgagaaatcagtgcatcaggcagtgggggaaataaatgggatctgtgccatggagcttacatcaccctgtggcagctagatagtgagcaaataaataaaaaaaatactctataattccaagtagtgacaaatggtatgaagagaagtcaagcatggtgaggagagagagagtgatggactaggaagaaagggaagaagttgctggatcatggttgaaacaattttgtgggttgacaggcattcatttaagaaaacacatactccagatactggatgaccaaagacgtggtgtag

SEQ ID NO: 169910 - DNA, 514 bp, Homo sapiens
caggttgttaatcatgagtgtgtttgtaatctgggaggatttcagcstcagtctgaatcaatgctctttcataagtttaatgcatttatcatgaggtttaggggcaagggccatcatctcgctcttgttatgcttctagtaacacatggtatagtactctatatacagttgattttaacaaatccatgttgaattgaaaggacttctggtgaattcataaatatgaatactattaatcccaattttttagcccaatcattttcatcagtgtttcttaaatgtctaacatatccatttgtcgtaggtgagattccttggagtggacagtcaagtacagtttacacagcgaggtcttcaggaataacattagtgggagagtggatatattggctagaaggagaagtagttgaattgcaacacagtcacaagaaagacctaactggatgtaattgtggctctagggctgctatgccctccatctccagagttgtcccactttaaggaaaggaggttt

SEQ ID NO: 169911 - DNA, 514 bp, Homo sapiens
caggttgttaatcatgagtgtgtttgtaatctgggaggatttcagcctcagtctgaatcaatgctctttcataagtttaatgcatttatcatgaggtttaggggcaagggccatcatctcgctyttgttatgcttctagtaacacatggtatagtactctatatacagttgattttaacaaatccatgttgaattgaaaggacttctggtgaattcataaatatgaatactattaatcccaattttttagcccaatcattttcatcagtgtttcttaaatgtctaacatatccatttgtcgtaggtgagattccttggagtggacagtcaagtacagtttacacagcgaggtcttcaggaataacattagtgggagagtggatatattggctagaaggagaagtagttgaattgcaacacagtcacaagaaagacctaactggatgtaattgtggctctagggctgctatgccctccatctccagagttgtcccactttaaggaaaggaggttt

SEQ ID NO: 169912 - DNA, 477 bp, Homo sapiens
gttggtggtggtgatgtgaatgtgtatacacgtgtatgagtatgttaattaaacagtagatgatgaccaaatacagaaacacatgttttcatacgtttactaaattgacattctaagtccagtttctctaatcactgtgggggaaaattgagtcatttcccaggatagtgcattaattaaaattctaaatttcaagaggatttgatgttttgggaactttcctgcattttgaagattaaaggagacaaaggaaaggaaacatgctttttattctctgtaagctcttttttttttttttttaatcaagtcatcctcacctacatcattatttttgaactaccctgactttggaagaattattttttttttgtttcatrtcccattccaacattatactcctttctatgttttttatactaactcttaatggtaaaaaggaaaaaaaaaaactcctttttttttttttttttttttgag

SEQ ID NO: 169913 - DNA, 600 bp, Homo sapiens
atgtgtaatatttcatacacactcctaccttagggtggagggggactccacagccccaagtgcattttctgatggaatgcaatataaccagtgctgctgccctggacacccctattttctgcgtcatgtgcataaagagcagctctaattggactagtcctgtgaagaaatcttacaataaaacattgatgacctaaatgatctttaggatggaagccaaacatgttctcagtgtgacagttctgaatggtagcagagctgcacagcatgtgctgacaggcagtgaggttccagccctggcctggtgcacctgaaaccactcattcctgastgttctgaggtcaagacacaggctttcaatgggttctactgtttgttcatgccttacaacagcaatagatgaatgcactttagaaatacccttggcagagtattcatggtgctattttatccaggtaaggagagacaaaagggaaggtaatggggggattgtgttcacttgtatttagtgtagcccgattcagaataagcatgttaaaggatatcaagtgagaaaatatggaaaagacctgagacagcatggggtgaggaaaggagaag

SEQ ID NO: 169914 - DNA, 533 bp, Homo sapiens
aaactgaatgaaaagagaaaataagagactctaaaatttgaaaaaggaaaaaatagaatttctagaaatgaataagtgtagtcattaacgttaaagcctcgcaggagggtttgagyatctgcagtattgtccgagcaccctttggacgtttcaggacctgacagacatattggatactgtatctacagagagatctgggaacctgctgctctgtggatgggctgtggcttcctggggctgataccatggaactcttgaaatggttccctgaatttttatcctgagtaagtttgctttgattaaaaagtatcccatagctgacatttttaaaaccaaaagtgtcctaaatgagtttattattcatcttaatgattttctgttttatgattacaaatttttaaaagtcacttttgtcctcttgctttcatctccattggctgtaaggactgactgatgcttaaggactgcgataccaagggttactagctcttaagtttctatgattccctattctatgggctagggactgcctt

SEQ ID NO: 169915 - DNA, 614 bp, Homo sapiens
tttttaaatatgtgaaatcctataaagtgttaatgttgatagaataaatttgtatttctgtaacactccataagagaatgagtttcaaatcttcataaaacaatmccatttctattaaaaagttatattatcgtgtaataaatgattttcaagaagagtagtataaatcctggagaaactaatagaataagttttaaaaggaagagtacaagtgtacatgcacaaaaaaaaaagagattcatgttacatctttatctgatgcaaagcaaaatgcctaaattacacaaatgcaattctgagtgtgttttgaataagggttttctttttggggaatatatcatggctgataatactaggttatatgttctttgaatatacccaaaccaaaatggagactttcagatagaaatctcttctgatttgtcattaatgattctgggctttctgatagtctgatactctgagtccctgatatttcggctgaaacctcctatgatttacaataagcaatgaaaaaatttccagtgattggattattttgggaaaatggaaaagaaattttgagtaggtctcaataactctggaaatgacatagtttcacttccttaaaatac

SEQ ID NO: 169916 - DNA, 614 bp, Homo sapiens
tttttaaatatgtgaaatcctataaagtgttaatgttgatagaataaatttgtatttctgtaacactccataagagaatgagtttcaaatcttcataaaacaataccatttctattaaaaagttatattatcgtgtaataaatgattttcaagaagagtagtataaatcctggagaaactaatagaataagttttaaaaggaagagtacaagtgtacatgcacaaaaaaaaaagagattcatgttacatctttatctgatgcaaagcaaaatgcctaaattacacaaatgcaattctgartgtgttttgaataagggttttctttttggggaatatatcatggctgataatactaggttatatgttctttgaatatacccaaaccaaaatggagactttcagatagaaatctcttctgatttgtcattaatgattctgggctttctgatagtctgatactctgagtccctgatatttcggctgaaacctcctatgatttacaataagcaatgaaaaaatttccagtgattggattattttgggaaaatggaaaagaaattttgagtaggtctcaataactctggaaatgacatagtttcacttccttaaaatac

SEQ ID NO: 169917 - DNA, 553 bp, Homo sapiens
tactgaaactgcaacttacaaagttaatatcatgtgttcttattgtcatccaatttgaaatatttatacatttattttgattccctttttacacatttgaattaatttataattgtaytgtttaatttcaaaacatttgtggaatatatacatagagagagatagagattattgatttgtaatataatccattgtggtgacatataccttgcaaagttttaatcttttgaattctttgatgtttatgctaataagaatcacatgtacattcaaaaacaaaataaaacaatgtaaaatattaggtagttgagaataactgttagaccccatgttctccaaatttctgtgaggtcaagtttgttggtattgattatttgtttacgcattctgtcaactgctgtgaaggcaattttgttccaactgtaattttagatttgtctatttacacttttggttctcatgacttttgcttcatgcattgtgaaacttccattatgtctatacatattattatgactaaggcttttgaaggattaacctatttttattatta

SEQ ID NO: 169918 - DNA, 392 bp, Homo sapiens
agtagttccaccaagattttccactttatgtttatgtttgttacatcaactctttatagttagtactagaaaatattcaagtagaataaaaacaaacaatatctacaacaaactcgaacccttaaaagtgttaaatgaatgtcacatttacctcaggggcaagacagatgcaaaaaacaaggtttctatttktatatcactattgacacacacaaaaagatatctcttaataccttctctgcttctttactatctttcttttctttctgttttccttcattcctcagtcaaaaacctacaaatacgggattaaaagaaagccaaaaaaaaaatcaaatagaacagaattttaggaggccaacaggatcataacaagatatggcaaagacagc

SEQ ID NO: 169919 - DNA, 570 bp, Homo sapiens
ttatttcatattgaaacttgcagagtagttccaccaagattttccactttatgtttatgtttgttacatcaactctttatagttagtactagaaaatattcaagtagaataaaaacaaacaatatctacaacaaactcgaacccttaaaagtgttaaatgaatgtcacatttacctcaggggcaagacagatgcaaaaaacaaggtttctatttttatatcactattgacacasacaaaaagatatctcttaataccttctctgcttctttactatctttcttttctttctgttttccttcattcctcagtcaaaaacctacaaatacgggattaaaagaaagccaaaaaaaaaatcaaatagaacagaattttaggaggccaacaggatcataacaagatatggcaaagacagcaagcagaatcatgcatcagaaagtcctaccagaacaatcaaagcacaggcattacatgatgggatagtgtgagttaaagggaagtgcttataagaaagaaacttcttaagactttgttttagaataagacattatttactttgacatggaaatct

SEQ ID NO: 169920 - DNA, 570 bp, Homo sapiens
ttatttcatattgaaacttgcagagtagttccaccaagattttccactttatgtttatgtttgttacatcaactctttatagttagtactagaaaatattcaagtagaataaaaacaaacaatatctacaacaaactcgaacccttaaaagtgttaaatgaatgtcacatttacctcaggggcaagacagatgcaaaaaacaaggtttctatttttatatcactattgacacacacaaaaagatatctcttaataccttctctgcttctttactatctttcttttctttctkttttccttcattcctcagtcaaaaacctacaaatacgggattaaaagaaagccaaaaaaaaaatcaaatagaacagaattttaggaggccaacaggatcataacaagatatggcaaagacagcaagcagaatcatgcatcagaaagtcctaccagaacaatcaaagcacaggcattacatgatgggatagtgtgagttaaagggaagtgcttataagaaagaaacttcttaagactttgttttagaataagacattatttactttgacatggaaatct

SEQ ID NO: 169921 - DNA, 606 bp, Homo sapiens
aatgttgtgaatggtaccttttaataattttcactttgtttctttattgctcttatgttaacaaacaattgatatttgtatatcaacttcataggaagctaaatagccttgtcaattctaacagtttatctgcagattttggggttctcaaaacatgtagtcattttctctgcaagtaatgccagttttatttccttattccattttataacctacaatttcttgttattttgtgattagcttggctaagttctctagtataattgtgaggagaaatggttatattccagatctcaggaggaagattttatttttccattgcttatgtttcctgtakgcttttggtaaataaccctttatttgaatcaaaaagtactcctctattctcttttgcttttttaaaaaacttttaagtttggggtaaaagtgcaagtttgttacgtaggtaaacttgtgtcatggaggtttgttctacagattatttcatcacccaggtattaaatctagtaccaattagttattttttctgatcatctccctcctcccaccttccaccctccaaaaggccccagtgtgtgttgttcccttctaggtcatgagttctca

SEQ ID NO: 169922 - DNA, 560 bp, Homo sapiens
taatttagtctacttcctcccccaaacagtttttcacttcccacggatagtgattatatttatttacataaacatggtggaaagattattgtgtcttcccagctgcagatacctggaaatggtttcttgattacagctctcattggtttagagtaaccttcgtacattttgtgaatcagttacgtctatatcccttatggataaagttacagaatagttttaaatwtttttccttagtattttctgtattcagtattctacttcattcttgcaaaacaggagaacaaacccacagagtctagtttccagaaggagaccaaataaagcacattcttttgctattgagttgccccaataactggataacttcttgtctagctaggtgtctccaagatgtttcagccttctaattctaactggaaagaatcttatgctttttttagatattcttgtgtattaactttttctagcagcttttacattaacatgtagaagattaaaacataagcgactgaaaaaatccaacattagcaggttaaacagctattgtttttcccact

SEQ ID NO: 169923 - DNA, 463 bp, Homo sapiens
tgaattctattgtattttaatctactgacaaatatgtacagtactacttctgcgatctcttttctctttttctgctttatatgtctatattttttccgatatgacatcattgtgataaatgataatttgcagtagtttggacatcacatgagagcagtgtgaaacttccaacttttttcctgcattgtttcatttatactaaattatttgtcattttcagcagttttacgctttcattatgaaggagttaggggagaacaatctatgttaatgccrttaaaacaggggccactgtccattctgccccaaagcctgcatgacaagcaaggctttcttcagatactcaaataatttttgtgcatacctgttgctgtttttggagaaaaacctgagagaaattgggaatttctccagtgtatatgacatgaaagtgttctctaattttcacctagccctctcttcc

SEQ ID NO: 169924 - DNA, 593 bp, Homo sapiens
cacttttatttatatgcaaattaaagagtggtttatgcagaaatttctaggaaaagggtgttaatttccgattcatggggtggttgctatagaaagggatggtaacttcccagtgttgccatggcaatggtaaactgacatggcccactggtgggcatgtcttatggaaagctgcttccgcgctgcccctgttctagctggtcatcaatttggtctgttgtctgaggacaccttcgtygccaagtcccgcctcctacctcactggccttggagtaggactttgacaactgaatgggtagtttgcaaagagaagggagacggagaggacagcataaaggtatttgggaggaaaagtccatgtccttaggcttgttatagcagctgcttcctttataaaaggaaagacccagggacactgtgagaccctgcttgctctccctgcctccactgtgagactctccagtcctctctgccacctgcagcccagatcatctttcaaggggaaacctggtcatatcacctatctcctgagaagtcttcgatggcttcccagagctttaagataaggattgaaatcttccaaatggcctgta

SEQ ID NO: 169925 - DNA, 599 bp, Homo sapiens
gctcttgttgccagttgtttggagttttctcctcacctccatccacagatatgttttctgagacttgcctttattgattctttccaaagtggtcaacttagaaacagcaatgtttctttaatgctcttatttcattcgttggcataatatttaattaagttatgtaatgacagtactaaatacayctgccataaatgatttagacagcaaatgcaatggtctcttggtcagtaaacaactcacatggtgagagtggaagtttttggggttgctgaaggatacctctatgggacataatgcatttgtctgcaaggaacagaatctttaactgaaacaagttttaagctttgctttcaaaaaactctcagtgcatagtaaaaaaaacgcattttaaattgtcccttagcacatatgcaagagtataaactgaagcaaattttcacaagcagcacttacctttactttatgtgatgctacctaatatttttgtctattctttcctattttaattctattagaaatgctaatcatgacccactaatataatctcatgtctcattaatggagtgcaacccacagtgtgaaaaacaccggcttaa

SEQ ID NO: 169926 - DNA, 613 bp, Homo sapiens
agttgtttggagttttctcctcacctccatccacagatatgttttctgagacttgcctttattgattctttccaaagtggtcaacttagaaacagcaatgtttctttaatgctcttatttcattcgttggcataatatttaattaagttatgtaatgacagtactaaatacacctgccataaatgatttagacagcaaatgcaatggtctcttggtcagtaaacaactcacatggtgagagtggaagtttttggggttgctgaaggatacctctatgggacataatgcatttgtctgcaaggaacagaatctttaactgaaacaagttttaagctttgctttcaaaaaactctcagtgcatagtaaaaaaaacgcattttaaattgtcccttagcacatatgcaagagtataaactgaagcaaattttcacaagcagcacttacctttactttatgtgatgctacctaatatttttgtctattctttcctattttaattctattagaaatgctaatcatgacccactaatataatctcatgtctcattaatggagtgcaacccacagtgtgaaaaacaccrgcttaacccaataggacatttattattttatg

SEQ ID NO: 169927 - DNA, 589 bp, Homo sapiens
atgtaggtgattgtaacataatgacaggtatttttgtatctaaacatagaaaaagtacagtaaaaatacagtattataatcttatgggaccaccatcataaatgcagtcagtcatcgactgaaatctcattatgctgcccatgactatattgcttagccatggattkcattgtgactacacttcctctttgtaaaatatttttttctcaaattaataaccactgtcttgacttttatctatgactttaaaatgacattgtagtaaaactttctgacagatttacaaagctacctccaagatggtcaaacacagaagaaacctatctgttttatcttgcatgtttggggacatttccattggaccacatcctccttggctcccatagaagggttgtgcttcagacctgtcacaccagcatcaacttgagatgattgctctgccacatattagatccccattttcttggatctcatatcttctttcttgacttctctcttgtgtgcaagcctacttttagaggataccttaaatcctccagtaacttctgagaaagtgtacatatgaaaaaatgaagtgttaagagtttgc

SEQ ID NO: 169928 - DNA, 443 bp, Homo sapiens
tttcttgttttcaagaaacaactatcacagtgagttcaaagtaagatgttagggtacaatactgtatattcatttcagaaaaggttttattttaaaatacttcttctaaggcatatttgtctagacatctcttccttccctcatgtgaaattaataacttaaaaagaactttgtgaatggttccaaatgcaaacttcaaaattgttgaataacttaataaggatgcatttcattcctggtttaccaaatatggttttgacagtatttccaatagtcaagatggtttctataatggagaaasccacattatttaataataatggcaccctaacaaagaactgtaagtgctctttaagactttaactgcaccagaccatctattcagtattggaaaaataacttcatgcaagtgtcctctaagattaacagggtagaaaaaggtt

SEQ ID NO: 169929 - DNA, 579 bp, Homo sapiens
gctcctggatatgtttcaaggaaactttggggatctcatagcaaatcatcccaaagcatccaaaaggtgcaacataaatattactaagttcttcccaatttgctacttctctattctcctcttccaaagctgttctttcttgagcattttatactttaagccsatttattttaatgccaaagaatgcagctggacctcaggaaaactggaactcggaattgcaaagctgtagggagacccacgcatgacctcactccatctcccatctctgcttcttactacatgtctgattcattcttctctctgcagaacttctgtctctttgctccaacacatggctgacaaaatataacaattccaaatagaatatggctactcagtgttttcttggtcttgagtccctcttggttttcatctcttcttgacactgtgcgtgtattatttttaatcctgacgacaacccttaaagactgaaattattccttctgcattacaaatgaggaaactaaggctgggagagattgtgagcccccgagtcactgtcatctgttggggattcaaagatggaaagacaaggtc

SEQ ID NO: 169930 - DNA, 579 bp, Homo sapiens
gctcctggatatgtttcaaggaaactttggggatctcatagcaaatcatcccaaagcatccaaaaggtgcaacataaatattactaagttcttcccaatttgctacttctctattctcctcttccaaagctgttctttcttgagcattttatactttaagccgatttattttaatgccaaagaatgcagctggacctcaggaaaactggaactcggaattgcaaagctgtagggagacccacgcatgacctcactccatctcccatctctgcttcttactrcatgtctgattcattcttctctctgcagaacttctgtctctttgctccaacacatggctgacaaaatataacaattccaaatagaatatggctactcagtgttttcttggtcttgagtccctcttggttttcatctcttcttgacactgtgcgtgtattatttttaatcctgacgacaacccttaaagactgaaattattccttctgcattacaaatgaggaaactaaggctgggagagattgtgagcccccgagtcactgtcatctgttggggattcaaagatggaaagacaaggtc

SEQ ID NO: 169931 - DNA, 474 bp, Homo sapiens
acctcactccatctcccatctctgcttcttactacatgtctgattcattcttctctctgcagaacttctgtctctttgctccaacacatggctgacaaaatataacaattccaaatagaatatggctactcagtgttttcttggtcttgagtccctcttggttttcatctcttcttgacactgtgcgtgtattatttttaatcctgacgacaacccttaaagactgaaattattccttctgcattacaaatgaggaaactaaggctgggagagattgtgagcccccgagtcactgtcatctgttggggattcaaagatggaaagacaaggtccctgccctcatagaattcaacagtacagtgacaaagcaggtagtcatsatcttatacacatagtcatacaatgatcattatagcattctgcgagaggtgctatcatagctatgtgaacaaagagttgtagtaacacaaagaa

SEQ ID NO: 169932 - DNA, 376 bp, Homo sapiens
taaaaaccatctaatgtctcatcctatatagcataaagtataattagagtcacatactataagccttgatgttcaaaagtggaatagtaaatttgtccctcactttgagtgttttttcgtctgtgactaatcagacctcaaaacaagttattaccatatttactcacataacaaaattgtaagagaattatgcttgctctgcaayatatgactgcactcacatttgctctttcatcttttaactgtctctatgacattctttttggaaatgcttatcagagctcttaaaatgagagttccatttctccacctggcccattccctttgatctagttgttgtccccctattgatgacagaaggccacccagcatcatg

SEQ ID NO: 169933 - DNA, 600 bp, Homo sapiens
cttctttttttcttcattatgagagttggagaagggtcagaatgaatagctgcctctttttggtttggaagccaactatgtaagaaatatatccacttaaagttatgggtgacttttctcttccctttaggtactaactcatggatgtttcgttaatctaaaaagtatttatcgagtgtggtccttggcctcacccttgggccacatagaaaaagacctggtgagctgtcataggagaccttgtgtttctgtcyggcgagaccagtattgaaatgagaagggaacagtgtggggcttgggtagtctggctgtggagaagtcccaaagccgactgaagaaaagtttccagcaactatacagagcttcaatcaaattgaaatcatgctcagaataaaatcatgtattcatgatgaaaaacagagcatcaattgaaacaaatgccatgtcccaaagggctgggaatttagcgaaacaggatggtaggaaacactggcaatgcaggggccagtgccaaagtgggaggattttgagctagattctcgtctagtaacacatatttgtaggacaactttgctgttctgttttggtgcctggccaccc

SEQ ID NO: 169934 - DNA, 600 bp, Homo sapiens
cttctttttttcttcattatgagagttggagaagggtcagaatgaatagctgcctctttttggtttggaagccaactatgtaagaaatatatccacttaaagttatgggtgacttttctcttccctttaggtactaactcatggatgtttcgttaatctaaaaagtatttatcgagtgtggtccttggcctcacccttgggccacatagaaaaagacctggtgagctgtcataggagaccttgtgtttctgtctggcgagaccagtattgaaatgagaagggaacagtgtggggcttgggtagtctggctgtggrgaagtcccaaagccgactgaagaaaagtttccagcaactatacagagcttcaatcaaattgaaatcatgctcagaataaaatcatgtattcatgatgaaaaacagagcatcaattgaaacaaatgccatgtcccaaagggctgggaatttagcgaaacaggatggtaggaaacactggcaatgcaggggccagtgccaaagtgggaggattttgagctagattctcgtctagtaacacatatttgtaggacaactttgctgttctgttttggtgcctggccaccc

SEQ ID NO: 169935 - DNA, 504 bp, Homo sapiens
actggaatttggggaggtaaaaatgagatataaaatagcatgcgcttagtaagcttctgttagtacattgtaccaatcaggttattttaaggaacactcagccaattacaaaacatatgaagccaccaaaaaagaaacagcaactactacttctctacacaayagatatctatgtaaaggcttttaatcaaagtggcataaacccgtggaagtactgctcttaacacagacaatacttatttccatggagtcacatcattcctgctttcaagaggactgaaagcaacaatattccataggacaaagagttcttgataacaccactacaacccccccgagattttactactcttctcctcctctggaaatagaaacacactgaagctggggccgcacacaggtagagctaagtgtgcactctggtctaatgcaaacactgacagaagttcaggtgaggtccttttcccccttgcttgggaatactgatgctgctgatgaagtgaa

SEQ ID NO: 169936 - DNA, 379 bp, Homo sapiens
cccaggtccagaattcttttggttgttcatagcaggtgtgtatctctctctstgtgtgtgtgtgtgtgtgtgtgtgtatgtgtgtgtgtaagtaaagaagaacaaagggggtggaaggagggtactgaaataaacagcaaactccaatagtaataaaggtaacttggaaaagaattgaggaagtcagaaatccacatgtgtatgtagacttcagtgtggaagatggcagaatagctggactaggcctccagtgaatcattcacaagggaaggatcaaggaacttaactatataaaaatttaaaaccattggaaatctaaaattaagataaatataaaaaaatactgttggaagtatttcgcgatcagatatattacaga

SEQ ID NO: 169937 - DNA, 596 bp, Homo sapiens
tcttcaatttgtttcatcagtgttttatagttttcattgtagacatctttcacttttttggttaaggtaatttttaggtattttagttgtacttattaatgggatttcttgatttctcttgaagattgctttgctactgatttttgtatgttgattctgtatctcacaacttaatttatttatcaatttcaatagttttttagtggagtatttaggttattccaaatataagatcatatcctctgcaaacaagaataatttgacgtcttccttttcaatttggatgccctttctttctcttgcctgattgctttagctaggacttccagtacgtgttaaataacagtggtgacagtgggcatccttgttgtattccagatcttagaggaaaggcttttagtttttctccattctctccattattgagatgtaaagttcaatatgtagsctgttaaactcttcatcattgattatgttatttggttgtttatatccttatatatatatttttgtctacataatttgtctcatattaaggaggattattttaaagttttctttttttactgtatttttatctgtgttctaccaatatc

SEQ ID NO: 169938 - DNA, 533 bp, Homo sapiens
aaaatgcctggcaatccgacgtgctcctaatcagttcaactgatgctatcatgtcctcacaagracctcaacaatattgtaacccagggggcttatcaatgccattttaataagagagagcattacatttttataagcctattttttatttaatttttttaaaaaaatatacacacaaggtttactggtttctataacctcgattcttttcacagatgaccatcaaacctagccaactggaatagttagcaaaaaactagcattacccattcttaagttggttttctttctttccaggtgaaggaaatgaaatcagtatgaggatttaagtctcttctgaaacagattagatttgaacatatccaacttttaacactgattactaggtccattgtggtactgattcaaattcctggagtattcttataattgaaagcttcttagctctcctcttatctgatgaaaaccaagttaagcatgaaaaatgtaaaatccacccaagcataaccagcacctagctcctaaccttcata

SEQ ID NO: 169939 - DNA, 533 bp, Homo sapiens
aaaatgcctggcaatccgacgtgctcctaatcagttcaactgatgctatcatgtcctcacaaggacctcaacaatattgtaacccagggggcttatcaatgccattttaataagagagagcattacatttttataagcctattttttatttaawttttttaaaaaaatatacacacaaggtttactggtttctataacctcgattcttttcacagatgaccatcaaacctagccaactggaatagttagcaaaaaactagcattacccattcttaagttggttttctttctttccaggtgaaggaaatgaaatcagtatgaggatttaagtctcttctgaaacagattagatttgaacatatccaacttttaacactgattactaggtccattgtggtactgattcaaattcctggagtattcttataattgaaagcttcttagctctcctcttatctgatgaaaaccaagttaagcatgaaaaatgtaaaatccacccaagcataaccagcacctagctcctaaccttcata

SEQ ID NO: 169940 - DNA, 446 bp, Homo sapiens
ctgggtgacatttattgcaatacatctatatacattgcaatttagccttaggtttaaatayccagacaaacagtaatgagttatctgactttgatcaataacaataacagctaatataaaaagccaggccgggcatggtggctcatgcctgtaatcccagcactttgggaggccaaggaggccggatcacttgaggtcagcgattcaagatcagcctggccaacatggtgaaaccccgtctctactaaaaatacaaaaaaattagccaggtgtggtggggcatgcctataatcccagctactcaggaggctgaggtgagaaaattgcttgaactcaggggacggaggttgcagtgagctgagatcatgccactgcactctatactccaacctgggtgacaaagcaagcaagactccgtctcaaaaaaaaaaaaagcctactactca

SEQ ID NO: 169941 - DNA, 469 bp, Homo sapiens
ttcttttgttggttaatctagctaatggtctatcaattttatttatcttttgaaagaaccagctttttgttgcatttatcttttgtgttttgttgttgttgtcctttcaagtttcatttatttctgctctgatcttggttattttttttcttctgttgggtttgggtttggtttgctgtttctccagttccttgaggtatgcccttagattgtctgtctgtgctgtttcagacttcctgaggtatgcatttaatgatatgaactttcatcttagcaccacttttgctgtatcccagaggttttgayaggttgtgtcactattatcattcagttcaaagaattttttaatttccatcttgatgtcaggtattctatgtcaattttttgtatttatgtgaatccttttcccctaaggtgtgtgatcctttgggggtgttaaacaaccttgttttatcatattaccagaatt

SEQ ID NO: 169942 - DNA, 510 bp, Homo sapiens
ctaccctcctaatctcttatcattttcattactggtcttttaattcttgttttatgagttgtgatatttaatttgataatttcattcattattcaatacttcagttctgggtaatactactataaaaactaaacaaaatgcagagacagctacttgaggactctgaaaagtaaacagccacagacaatcccatgacagaaatggctatggctacgcatagtggcctgcagaagccagaactctgaggaagggaaattgttttctctgttcatcagagtcccgatcccaagagggtagggrcaatccctgttgtttattgcctctcttctcacttctgagcccagacttgggcctaaacttggaagcgtatggcagaacagggtaactgaaccctaaagtttctggctagatggccaaaacagggagtcccagagaactgggaagcatccaggagatcacagagaagaaggagctcaggaaagtgatcccataaagttgtttataaactcc

SEQ ID NO: 169943 - DNA, 373 bp, Homo sapiens
attgatttgtatatgttatctcarttttttgaagtgttacttatacgtttataaaagttgtgagccaagaaaaatttgtgctgaggtttttatgaaaacatttactgccaaactatattttctatactttctgtatttctgtgtgagtatatttagacacacgtatatttggattatcagtgtgccaaacattatttataatatcatctcctgaattttatattttattttttttagttaaaaagaaaatactgccttttgaatatgaagttctcaaacacttttgagaaaccagatcaaaagaggtattaaccaaactttgagaaaccggatcaaaagaggtattaaccaattttaaagttgataatttaaa

SEQ ID NO: 169944 - DNA, 564 bp, Homo sapiens
tcccgcctagaagaagttgggagggcaagagacagccaactttctttgtcacaactctttataagggtaccaaatccattcctgaggtaggagccctcctgacctaatcacctcttcaggattccacttcttaatagtatcacactggaaacacctgaatttggaaggagcacattcaggccatggcagtggcttaaatcctctgctatccagagagtttgaattggataagggacccccaataaatatttctagggaattagggacttaaagaagacttattttctacagagggatccctatttaaaaatgtttatgggtttctatagtacagatgacagggcaatagtttactcacatattgattaatgttctgtttgcttataaaattgtaaytgaaaacattactctcagtttaagagatttgaagtgcatcagtaaaatctaaattggcatatctagactgattagaataatatatatgtcctgcataaatcataatgttgtttaacaagggtagcatagtcttaggaatctacttgagttttatttatgcatgaatac

SEQ ID NO: 169945 - DNA, 577 bp, Homo sapiens
taactgttaatttttaaacgtctttgtaacaaatatatacatgtaatcaagatgaaatatgagaggactctagggagcataaaaatcaaaataaacaatgcaaaagtgacaaataaatttgccattttggaaattaaagcagggattcccgaccaggtcaatgtctggcaatgtgtttcctgccatgtatggaatagctgccatgtcaaagmataatctggccccaaatatcaataatgatgaagatgagaaaccctaaattaaagttcactaccctggtatgggcttctcatgttcattcagtcattcagtggaacatctttaaacgctcaccgtgggctgggagtgttaagatcggacgaggaaatagcactgggacctgggagagggaaggagggtggggcccctcaggtctgggctatcagctaaacattttcagaacagacactgtgacaagtgtgcatcaacaatatctgctgctaggttgctcaaatctgaatagtgcttattgatgtgtccatgagacccagaaagaaagaaaaagaggagaggaaagagtcaaagtaccagaaggaag

SEQ ID NO: 169946 - DNA, 577 bp, Homo sapiens
taactgttaatttttaaacgtctttgtaacaaatatatacatgtaatcaagatgaaatatgagaggactctagggagcataaaaatcaaaataaacaatgcaaaagtgacaaataaatttgccattttggaaattaaagcagggattcccgaccaggtcaatgtctggcaatgtgtttcctgccatgtatggaatagctgccatgtcaaagcayaatctggccccaaatatcaataatgatgaagatgagaaaccctaaattaaagttcactaccctggtatgggcttctcatgttcattcagtcattcagtggaacatctttaaacgctcaccgtgggctgggagtgttaagatcggacgaggaaatagcactgggacctgggagagggaaggagggtggggcccctcaggtctgggctatcagctaaacattttcagaacagacactgtgacaagtgtgcatcaacaatatctgctgctaggttgctcaaatctgaatagtgcttattgatgtgtccatgagacccagaaagaaagaaaaagaggagaggaaagagtcaaagtaccagaaggaag

SEQ ID NO: 169947 - DNA, 577 bp, Homo sapiens
taactgttaatttttaaacgtctttgtaacaaatatatacatgtaatcaagatgaaatatgagaggactctagggagcataaaaatcaaaataaacaatgcaaaagtgacaaataaatttgccattttggaaattaaagcagggattcccgaccaggtcaatgtctggcaatgtgtttcctgccatgtatggaatagctgccatgtcaaagcataatctggccccaaatatcaataatgatgaagatgagaaaccctaaattaaagttcactaccctggtatgggcttctcatgttcattcastcattcagtggaacatctttaaacgctcaccgtgggctgggagtgttaagatcggacgaggaaatagcactgggacctgggagagggaaggagggtggggcccctcaggtctgggctatcagctaaacattttcagaacagacactgtgacaagtgtgcatcaacaatatctgctgctaggttgctcaaatctgaatagtgcttattgatgtgtccatgagacccagaaagaaagaaaaagaggagaggaaagagtcaaagtaccagaaggaag

SEQ ID NO: 169948 - DNA, 429 bp, Homo sapiens
cactgggcctcggtgatgttttatatcagtgattgccgcgtgtcttactgagggtcagggtctggatgactttgaggactgcagcctctaacagggcagggctctgaagcaccgcctagagtggtttatatattttgtccgaaaaaaatgatactttttgttgctttgttactgttttgagatttctatattaaatgttgaaatatcatgcaccatctctcctaacccattcttcttcctgaatccaattctgctttctgcttctctgattaattagctacttctagtatgtaagtactgcacaaaatcctaaatgtcagtaggaaaaacaagaatttaaaaaatctaaccactttccattgttggttattgcaaacataaggcctcttatacatgtctggggagggatygttagttcaaattgaattc

SEQ ID NO: 169949 - DNA, 634 bp, Homo sapiens
tgcatttacacaacatttgatatgtagaaggcaccaaataaatgattcttttttgatttttagagacagggtcttgctctgtcacccagactggagtgcagtggatggattatagctcactgattgaactcctgggctcaagcagtcctccatctcagactcccaaatagctaggactatagatgcmtgacaccgtgcctggctaattttttttattattatttttgtagagacagggtctcactctgttacccaggcttgtctcgaaatcctggcctcaggagatcctcctgccttggcctcacaaagcactgtgattataggcatgagcctctgggtccagcccttaagagttatatttatcaaatattttatacagtaaacaatgcacattattcagtgttatcaaaatttactcctaaactatttgcatgcatttttatccctttccccctttgttgatggaaatatgcaataaagatgcataatagatagatgtgtgataaaaatgcacataatttgctcaaggaaagcagcacatggaaagatgacatgtaagccagccatcttatttttaatctcatgctccttcaaaagcttaaagacaacaacaaacacaaaactctttcaaaac

SEQ ID NO: 169950 - DNA, 582 bp, Homo sapiens
attttaagcaagatattggcatggtgagagacaagtagttgagaaagacttctctgtgggtataagacctggaaagcagtgtggctgtagtggtgaatacaaggagagtgatgtagaggtcattgcaggcaaccagcaggtaggcattgggaacctgaaattagcagggacaatagggatagaagaagggatgggtaaccagcaatttagtagtgggaagggcactgtcttttgatcatgtagatgtgtgggtggacagcagyagcacaagtctgcctaatctacagtatgaaactaattcccacccattccttaagctgggtttggactgaatgccacacacaattctgaactgctttctttccacccccataagtaactttaaccttagacaaataaaactacctatacgatcctgtttaaagaaaacacaataagacagtaaatcttccaaaatagcaaagtagttcaagaaaaaagaccgaattcatacaatgttttgatcatcacacttttaaatcaaacacactttagttcattggtaatacattctggatttttaaaacaaatggaaaaccaacc

SEQ ID NO: 169951 - DNA, 616 bp, Homo sapiens
ttattagctcacaatttccatggtcctggaccccaggcactgcttagctgggtcctccgttcagggtttcactaggctgcaatcaggatgccagctagggctgcagtctcatctgaaggcttgactagtgaggagtcagtttccaagcttattcagttcattaacaaagtttatttcctcatggtgttgacagagggccctagttttgtcctggctgttggcagagtttactttcacatcctaagaccacctgcagctttccacccatacccttcttcaatgtggccacttactctatgcaaccagcaaggagagcctctcttctcagagaggcccagtcttccctttagggtttttcacttkattaagtcaggctcatccaagatgatccagcttttgattaacttgaaattaacttatttgtaatcttttatctgcagaattccttcactgtggcaatgtcacatgatctaatcacaggagtgacacactgtcatattcataggtctggccaatactcaccagagaggactacatagaacatgaacaccaggggttgggaatgatagggactgttttaggaatctgcctatggtaggaggtctattagatgccc

SEQ ID NO: 169952 - DNA, 522 bp, Homo sapiens
gggaggctgaggcaggagaatcccttgaacccaggaggcagaggttgcagtgagctgagatcataccactgcactccagcctggcaacagagtgagactccatctcaaaaaaaaaaaaaaaagaaaagaaaagaaagaaagtatttttttaatttcttaattttcctataaatataagtatatagaataagggtaagtgttatgttggggtgaatatagaaatctaagttttctcttatactgtgacagaaaaaaaagttagttttcttttagaatgttcctcaatattagaggttactcagctttattacaccctgaagttttctaatcatattcagatagtacattacaaaatgtcgggaatgagatgcatggttgttcaaacaagaatttacacaggcagacaaaaatgacagcagcagcaggaagcctacatttataatatatatatatatatatatatatayatacacacacactcatggaattccacaaaattataatccaaataggagtgtggac

SEQ ID NO: 169953 - DNA, 594 bp, Homo sapiens
cagtcattaaccaataacctctgacctttgagatgcaggcaagagggctggaaggaatctttgggataaattatccccactcttgaccttaccacccttatttctttaccttgttgcattgaattggctgtgatctccagtacaatatggtattgaacgctagcagccctggcaggaatcctaggctttttcttgactttaacagaaaggcttctaacctttcatcactaagtatgataatgtttgtggtaagattttaataggtatccttcataaggtgaaagaagctcccattcactctatgaattattcactcacaattcatattaggatgagtgttaaacttatcaaatgtttattctacatctattgaaatgattgtaacattctttctctcttaatcttrttaacataaaatgtattatttacaagattctccacttggtcattataaatatcatattgtgaatatgactatataaatataagtgaaatgtaaatatgtgtgtatacatgtgtaatttatatttaaatcctgatgaatttactctgtacaagattgtacagtctgtacactgcacaaaaggagctgtg

SEQ ID NO: 169954 - DNA, 374 bp, Homo sapiens
gtagcccacaagtgactgtgcttccagtgttaggtgtgaatcccatgtccttgggttcacagcctgcacacagagactttcagggaagctcctcctcttaacttggccragtcctgcccacacctgttggtgcccttgaccctccacacctgttggtgcccttgaccctcacttcctcctcctcatgttccactcagtgttctctcataattgctctgatggcatttattacttcgttattatttagcaatttgaattatgtttttttctcctaagccagaaaggaggctccttgagaaagtttactgtatccatctacatgggttcccttgcaccaattctttacacacagtatgaagtcaacatgttttcat

SEQ ID NO: 169955 - DNA, 431 bp, Homo sapiens
ttgggggctgccaaaacctcagtcatcaaagtcaatgatattttgatgccacatttcaaaaaataaaaattaatgccagaaaatctaggttgaactgaatatttatgtttgaaatcaagacagaatctgacctcacacttgtacagctcagtttcacttacttcagtgtaatcccagtcctgttctcaaatccagtttttattgaaaatattgacagtttgttcatcatgcatttttgtactaacttggattttgtcaaaagctgcattgaaatatgagtcgtcctgaagactgagttttctgatgctcctgaaattttgtgcycaaggccctctcagctcccttcttggtgcacaccaccttaggggctggcttatttacagggcgtccttccgctgcaccatgaacccccaggcaggggcagcctcttt

SEQ ID NO: 169956 - DNA, 404 bp, Homo sapiens
aacctcagtcatcaaagtcaatgatattttgatgccacatttcaaaaaataaaaattaatgccagaaaatctaggttgaactgaatatttatgtttgaaatcaagacagaatctgacctcacacttgtacagctcagtttcacttacttcagtgtaatcccagtcctgttctcaaatccagtttttattgaaaatattgacagtttgttcatcatgcatttttgtactaacttggattttgtcaaaagctgcattgaaatatgagtcgtcctgaagactgagttttctgatgctcctgaaattttgtgcccaaggccctctcagctcccttcttggtgcacaccaccttaggggctggyttatttacagggcgtccttccgctgcaccatgaacccccaggcag

SEQ ID NO: 169957 - DNA, 625 bp, Homo sapiens
ttatgagggtcatggcagaattcttcttctaaacactagaaagaatgactcctttgtcaatataaattcatcctaatgcatttggtctccctgtaggctgtattacacacttgagggaactcttgtgtcacattctgccactcagcattataataccttttcatcttgctttagattcacctctttataatagaagagaacacacacacacaagtaaaagatacattcgttttcatttatttttcatattgtacttttcagacattatcaagattgaacatcagaagaacaggcatactaacacaaacattccaaaggacaggaatagaacacaacagaaatgtttcattagtaattcagctcgttcatatttttatcccacaaaatttctttctttaaatctttatagattttttttccaaatcagcatgcatatgtaaaatctgaaaactgamgtggtaatctccccctcaaaattgtaaactgatacaaccaaataaatactgatttcagaattatctggctcaatatagatatattgttccattttattaatattattctaaatttcctatgtataaaattattgcagtttctaaggttttatatttaaatgttataaagt

SEQ ID NO: 169958 - DNA, 376 bp, Homo sapiens
atgtttacatccccttaaggacaaatgatgttgagaattattttgtattcgtatttgtcatccatctaccayttttgctgaagtatctgtacatatctttcgtccatttttgaatgggacttttaagtgttctttatgtattcaggaaacaagtccttaatcagaaatgttgtaatttatttttgttccattcacagtttgtacatcacttgtcttaagaaaacctttaatatgtgcaatttcttggtttttaatgggctatacttttgatgttatatctaaaaacttatcaccaaatccaaggtcaaagacatttctttgcctttctttccataaattttataactttaaatttttatacttaaatctatgatct

SEQ ID NO: 169959 - DNA, 376 bp, Homo sapiens
atgtttacatccccttaaggacaaatgatgttgagaattattttgtattcgtatttgtcatccatctaccacttttgctgaagtatctgtacatatctttcgtccatttttgaatgggacttttaagtgttctttatgtattcaggaaacaagyccttaatcagaaatgttgtaatttatttttgttccattcacagtttgtacatcacttgtcttaagaaaacctttaatatgtgcaatttcttggtttttaatgggctatacttttgatgttatatctaaaaacttatcaccaaatccaaggtcaaagacatttctttgcctttctttccataaattttataactttaaatttttatacttaaatctatgatct

SEQ ID NO: 169960 - DNA, 577 bp, Homo sapiens
cttttccggttcactaatctgagggtgcatttttaattccattctttttttagtattacgatgggagggaactggttgtctgcctayagacatattgacatttaacattatgaaaaaatgcaaataacaatgtgtttctggactataactgagaaggtctcaaaaaagcttgacctttcagggttttatgtaaataaacaccatgaaattttattctaaagtaatcatatacaagaaaaactcaacgcacataataacagaaatgttaataaatctcatatttttttaaccaaataagtgaataatgtattcattgaacttactccccaccccaccctactcttttcaccttaaaggtcagagctgatccagctaaatagtttacctttatggacatacaatgacaaaataatagtgataagaagacagaataaaagcaagcatacttacaaagtgatctagtggatgaggtgattctttgactagcattaatgtcattctcaaacttgtatatatggaaagcaaaaaaaaattagtgaataaactatgactatttagaaataatttcaaagatgct

SEQ ID NO: 169961 - DNA, 527 bp, Homo sapiens
tatatcagggcactttttttttaatcaagttgtctgtgaacagcaatttgctgacacaaggcataaaaatrtccagaggattcacacatatataacaaaattcctaacagtatttagaattggaccatgggacagtgtctcgggatatttaaaggaagtctcattgcttcagtcatttaatattaggctggacatattttggagaatatagctaagcaaatagtatcctactaacatatttcttgaggatggatacacttatttagtggtctttttttgttttgaaactctataatattatgaaactttcaactaatatttaaattgtttccataggtcttgaatctactgtataaactatatttgtagacattgtaagcaaacaaaccatttttgaagctgttttgaacatcttaagaatgttgtctatgcaatatcagtttattttcttgattaataatacctacatttctgaacttttcatcattttagcataacatcacaaatctgtgacatacaattgttaa

SEQ ID NO: 169962 - DNA, 605 bp, Homo sapiens
ttgggaggctgaggcgggcggatcacctgaggtcaggagttcgagaccagcctggccaacatggtaaaaccccatctccacaaaaaaattagccgggtgtggtgatgtgccctggagtccaagctactctgtaggctgaggcacragaatcgcttgaacccgggaggcagaggttgactgagccaagattgcgccactgcaccccagcctgggtggcagagagagactcttgtctcaaaaacaaacaagcaaacaaacagaaaaaacttgaaattttcttttataaaagataactttaaaatattttccaaatatatgcatggaaaaattgggtttttaaaaacattactacatatatttattgacaattgatattatttattattttttctgtgaattgtttgttcacatactttgtgcattgaaataattttttaatacaaatttctgtttttatattaaggacttttgttgttagtatcatcaatattttccagcttatgttttttgtcttaatttgtatcactattctgacattacattcatctattcatctaaaatgtttctgagtcaaaataatcgatcttataactgtatcactgaat

SEQ ID NO: 169963 - DNA, 413 bp, Homo sapiens
tctgtgtccacatttatttttacatactcaaatacaattgaataatgtatatttgctgcatattttgcaagctaggtgtcacagttattagttacaggagttagaaacattgtgttaggaatataatatctaataaccctagttattagaaaaattatgtttgtcggtttcttgagattttctatgtacacaattatgttatgygcaaataaggagagttggaggcagatgagagttaaattgttactatactttctgattcagaaaaatttggaagttttaagcattatgttaaataagagtgttcatagtaaacatcattgccttgttgcaatgtaagaatgaaagcatctagtctcttattaaatatggtattagttgttgttttcttgtaaaatttttgttattctttc

SEQ ID NO: 169964 - DNA, 429 bp, Homo sapiens
atgatactacttaggtatctaaaagagtcaaactcatggaagcagcgagtagaatactagttgtcaggagctcagaagaggaggaatcagggaggtattttcaatcagtacatagtttcagttatttaacataataaatcctatacagcatagcatgtatgsttacttatgttgtattgtagcagtccccagtctttttggaaccagaaactagtttcgtggaggacttttttcccactgacaaggggtgtactggggatggtttgagatggaactgttccacctcagatcatcaggcaacagattctcataagaaaccacaacccacatcccttgcttgtgcaattcacaatgcagttcacactcctatgagaatctaatgtctccgctgatcaacaggtggcagagctcaggcagtaatgtgagcat

SEQ ID NO: 169965 - DNA, 547 bp, Homo sapiens
tggttagtgatttgagcatgttttcttaataccttttagtcatttgtatgtcttctgtggaaaatatctattcaggttctttacccgttttcaatcaggctatttgtcttcttgctatttagttgtgtgagctccttatataatttagatataaaccccatatcagatgtacagctgcaaatattttctcttattacataggttgtctcttcactctgttgtttattttgctatacagaagcttgctagtttgtataatcccatttgtatatattttttgctttggaggtttatgcttttggagtcgtaagccttaaaaattattgctcagactaatgtcaataaactttttttctttgttttcttctagcagttttayagtttcaggtcttacattcaagtctttaatccactttcagttgattttgtaaatggtctgagataagggtttgatttcattcttctgcatgaggatatccagtttgcaaaaaaagatttaataaagagaatgccttttcctcatgtgtttttagcattttatttaaat

SEQ ID NO: 169966 - DNA, 547 bp, Homo sapiens
tggttagtgatttgagcatgttttcttaataccttttagtcatttgtatgtcttctgtggaaaatatctattcaggttctttacccgttttcaatcaggctatttgtcttcttgctatttagttgtgtgagctccttatataatttagatataaaccccatatcagatgtacagctgcaaatattttctcttattacataggttgtctcttcactctgttgtttattttgctatacagaagcttgctagtttgtataatcccatttgtatatattttttgctttggaggtttatgcttttggagtcgtaagccttaaaaattattgctcagactaatgtcaataaactttttttctttgttttcttctagcagttttacagtttcaggtcttacattcaagtctttaatccactttcagttgattttgtaaatggtstgagataagggtttgatttcattcttctgcatgaggatatccagtttgcaaaaaaagatttaataaagagaatgccttttcctcatgtgtttttagcattttatttaaat

SEQ ID NO: 169967 - DNA, 547 bp, Homo sapiens
tggttagtgatttgagcatgttttcttaataccttttagtcatttgtatgtcttctgtggaaaatatctattcaggttctttacccgttttcaatcaggctatttgtcttcttgctatttagttgtgtgagctccttatataatttagatataaaccccatatcagatgtacagctgcaaatattttctcttattacataggttgtctcttcactctgttgtttattttgctatacagaagcttgctagtttgtataatcccatttgtatatattttttgctttggaggtttatgcttttggagtcgtaagccttaaaaattattgctcagactaatgtcaataaactttttttctttgttttcttctagcagttttacagtttcaggtcttacattcaagtctttaatccactttcagttgattttgtaaatggtctgagataagggtttgatttcattcttctgcatgwggatatccagtttgcaaaaaaagatttaataaagagaatgccttttcctcatgtgtttttagcattttatttaaat

SEQ ID NO: 169968 - DNA, 518 bp, Homo sapiens
gtggcacatacctgtagttctagctacttcagaggctgragaggggggattgcttgagtgtagacattccaggctgcaatgagctatgattgcaccactgcacgtcagcctgggtgaaacagcaagattctgtctctaaataaatttttaaaataaaaaaaatatatatatatatttatatttatatatacatattggttaggtccatttgatcagtaccattgttcaagtccactgtttgcttattgatttttctgattaagctttttaatagtagttttatacccttattgatattagtcatatctcttttaaaactccttaaggattataagctttacaatacacatttttaaatcacctgacgctatctttaatagtgtcactctgccttatatgtagaaaaactaacagaatattcccaattcctctctctaatttcttctgcaataacattatggtaatacattttttaagataagataaggttggccaggggtggtggctcatgcctgtaa

SEQ ID NO: 169969 - DNA, 518 bp, Homo sapiens
gtggcacatacctgtagttctagctacttcagaggctgaagaggggggattgcttgagtgtagacattccaggctgcaatgagctatgattgcaccactgcacgtcagcctgggtgaaacagcaagattctgtctctaaataaatttttaaaataaaaaaaatatatatatatatttatatttatatatacatattggttaggtccatttgatcagtaccattgttcaagtccactgtttgcttattgatttttctgattaagctttttaatartagttttatacccttattgatattagtcatatctcttttaaaactccttaaggattataagctttacaatacacatttttaaatcacctgacgctatctttaatagtgtcactctgccttatatgtagaaaaactaacagaatattcccaattcctctctctaatttcttctgcaataacattatggtaatacattttttaagataagataaggttggccaggggtggtggctcatgcctgtaa

SEQ ID NO: 169970 - DNA, 505 bp, Homo sapiens
actacttctttctttggccagtttaaatctactgttgtgcacctctagtaacgtttaatttgaattacagtacttttcaggtccacaatttctatttttttaattttacaaatactacttccttattgatatactgtattctgtgtgatagtctcatcataccttcaattgcttgtttaattatacatttctttagttctttgaacatgtttctaatggctatttgaaatatttctttttcctatgaaattccaaatctgaccagtttcacaagacaatttcggctgtctattctttttctggttatggctcataattaaaaataaaaacataaytttttcttcattttcctgttgaaaacttgaccatttagataatatattatagaaactctgagcactgcctcctcctatggggcattggtgttacttgtgtgtttacttgtttaatgactgtttgtgttattttagtgaagtctatctgcttttccttcaatacacataca

SEQ ID NO: 169971 - DNA, 460 bp, Homo sapiens
ttgctatttgcaacaacatggaagaacctggagagtattatactagtgaaataagccagtcacacaaggacaaatactgaataattccacttatatgagagatctgttacagtcaaactcatggaagtacagaagacaataatagttgccaggggctgtgggggtggaggaaatagggagttgttcaattggcataaagtttcagttatgcaagatgagtagsttccagagatctggtctacagcatagtacctatagttaacaatacagtattgagcaggtcacactatgttagcagaatagattccatgttaagtgttcttactacctctacaccccacaaaacgataacatcgaggccaccaccaccaacaaggcaaagggacataggaaactctggaagctgttagatgtctattactttgattgtgctgatgatgtcacaagtttttgccaatgt

SEQ ID NO: 169972 - DNA, 646 bp, Homo sapiens
ccctctaacattttggagaaaataaaaatccaggatttgaagttataacagtctctagaaagtcaaataatttttcacaaactatgaattttgttttattttaaatgtgtgtacaatggattgattccaggatttggtagcagagagaaactccaggatttatagacrgttgcatactgaaaggtactttcatatacattacattttctggaagaaatgcaatgaagagatctcaccctgagaacctatatgtgcataaaacctagacgaaactccacaaaatcatagaaaagaaaaaaagtacaaaaatattaatttatctttgaaataaatatatagaggaaatgctcacatttaccatgtaaattacaagatgaatttggaagagccaacattgctgactatatgtagccaggaagactgagagacaagaccattacaaagaccagcaaactcaatgtggctatttggaataaaggcattgagagtggacaaaagaagaatgcagaccctgagttgaattgggggaaagctgaggacccagcacagggttgctgagcaccaagaataattccttgctccaagcagctcctgggaaaatagtaagttaaagaggcatagaatggcctcactcctctccaagggt

SEQ ID NO: 169973 - DNA, 646 bp, Homo sapiens
ccctctaacattttggagaaaataaaaatccaggatttgaagttataacagtctctagaaagtcaaataatttttcacaaactatgaattttgttttattttaaatgtgtgtacaatggattgattccaggatttggtagcagagagaaactccaggatttatagacggttgcatactgaaaggtactttcatatacattacattttctggaagaaatgcaatgaagagatctcaccctgagaacctatatgtgcataaaacctagacgaaactccacaaaatcatagaaaagaaaaaaagtacaaaaatattaatttatctttgaaataaatatatagaggaaatgctcacatttacmatgtaaattacaagatgaatttggaagagccaacattgctgactatatgtagccaggaagactgagagacaagaccattacaaagaccagcaaactcaatgtggctatttggaataaaggcattgagagtggacaaaagaagaatgcagaccctgagttgaattgggggaaagctgaggacccagcacagggttgctgagcaccaagaataattccttgctccaagcagctcctgggaaaatagtaagttaaagaggcatagaatggcctcactcctctccaagggt

SEQ ID NO: 169974 - DNA, 492 bp, Homo sapiens
agataaatatggtttgttgagactcaggcacattatcgaatgtagagtaaagaaagaagagtttcatgtattcagagttgagcaataatagcataatttctgaaaagtttcaacagaccagaaaagttagcaatgagcaattagagcagataatatacaatgaaacggttattagaaaaagaacagagatattaataaaaattgcctttccgctaataatgtaggtgaatagaattctattgaacaaaaaatctgagttcttaacataattttattctatctatgctgactttattttccattttaatttatattcaatatgaactttttcatgttttaaaatgtttaactttcttaccaaatgtatttaaatattttatgttgtaaatattttaggtttataattgccttcaatattcgacagatgaatcttcattctctctacattctattcacaaargtttgaaaactgaaagacaactttttggttaa

SEQ ID NO: 169975 - DNA, 606 bp, Homo sapiens
tgactaaattcgattacataagggtatgtatgttcctaaagttaactagaattaaaaagaatctaaattaataacaagatatgatactgatgttctagatttataatggggagaaccttgacatgcaggtatttaaggctagaagtttctatgaatttagcctctttggtatacacagtgcattaacagcagataatagaaaagctcattgtagaagtctacatttattttgtataacttaaaactattcagacttactgagacttgatttatggcccagacaaaagtctgtcttgaaaaaatattttatttgcagttgaaaagaatgttaatttttttattataagttgaaatgtttcataaatattaattctgtcaagttggttgatgcagttgttcaagtcttctataatctaattgatttccattggtcaatctattacttagataagatacatggaattatttgagyatatttgtaaatatgtgtatttttctttacagttcccagttttgcttcatatcttttgcaggtctgtcattgtgtacataaacttttaggattattatgttttcagatgaactgactcctttgtcgttatgaaa

SEQ ID NO: 169976 - DNA, 551 bp, Homo sapiens
atttcaggattgtaacatcttcttgttggattctttttattactatataatggccttctttgtctttttttttttttttttttttttttactgttactttaacatctgtttttttctgaggtaaaaatagctacttctgctctgttttgttttctatttgcgtgaaatatattttttcatcccttcacctcaaatctataaraatccttttgtgttaagtaagtctcttgaagacaacagatatttggtttgttattttttaatttaccctgccaatctgtatcttttaagtgaaacatttagactatttacattcaatgttaatagagatgtgaggtcctgttccagtcatcgtgttgattgttagctagatgctttgttttcttcattgtgtttttataggctctgtgagttttatcttttgagattctattctggtgtatatcaaccttttgtttcatggtttagaactccttttagcatttctaacaggactggtcttgtagtaacaaattcctcagcatttgcttgtctgaaaaatactttatttc

SEQ ID NO: 169977 - DNA, 551 bp, Homo sapiens
atttcaggattgtaacatcttcttgttggattctttttattactatataatggccttctttgtctttttttttttttttttttttttttactgttactttaacatctgtttttttctgaggtaaaaatagctacttctgctctgttttgttttctatttgcgtgaaatatattttttcatcccttcacctcaaatctataagaatccttttgtgttaagtaagtctcttgaagacaacagatatttggtttgttattttttaatttaccctgccaatctgtatcttttaagtgaaacatttagactatttacattcaatgttaatagagatgtgaggtcctgttccagtcatcgtgttgattgttagctagatgctttgttttcttcattgkgtttttataggctctgtgagttttatcttttgagattctattctggtgtatatcaaccttttgtttcatggtttagaactccttttagcatttctaacaggactggtcttgtagtaacaaattcctcagcatttgcttgtctgaaaaatactttatttc

SEQ ID NO: 169978 - DNA, 527 bp, Homo sapiens
tatatagcaagcataaattttcaatatttctgtaaartgggatagtgtaaatataaactgagatgatagtgttttttgaatactcattatgcatcaggcactattctgagtgctttccgtttgctaattcatggaattctcacaataattctgtgaggtagacaaaattttcttcttcagttcatatgtggacaaatctgggcaaagacagatgaaagaaattgtgcaaaatcacatagctagaaatgaacagaaccaaggttcttccttgatagtctagctccagaaccgaagctcttaaccacaatgatatactgaccctcagtgtggatattgtaattgcctgcctaacctcacattttcattcagctatttaaatctccccccatgtgaagctcatgtgctttggaaaaagcagcaaagcaggtcaagcttatactgatgaacatgagctcatttgccaaacatgacccaatttaggccaatgagatttaagacattttctaggggtttccagaaaaaggttt

SEQ ID NO: 169979 - DNA, 527 bp, Homo sapiens
tatatagcaagcataaattttcaatatttctgtaaaatgggakagtgtaaatataaactgagatgatagtgttttttgaatactcattatgcatcaggcactattctgagtgctttccgtttgctaattcatggaattctcacaataattctgtgaggtagacaaaattttcttcttcagttcatatgtggacaaatctgggcaaagacagatgaaagaaattgtgcaaaatcacatagctagaaatgaacagaaccaaggttcttccttgatagtctagctccagaaccgaagctcttaaccacaatgatatactgaccctcagtgtggatattgtaattgcctgcctaacctcacattttcattcagctatttaaatctccccccatgtgaagctcatgtgctttggaaaaagcagcaaagcaggtcaagcttatactgatgaacatgagctcatttgccaaacatgacccaatttaggccaatgagatttaagacattttctaggggtttccagaaaaaggttt

SEQ ID NO: 169980 - DNA, 527 bp, Homo sapiens
tatatagcaagcataaattttcaatatttctgtaaaatgggatagtgtaaatataaactgagatgatagtgttttttgaatactcattatgcatcaggcactattctgagtgctttccrtttgctaattcatggaattctcacaataattctgtgaggtagacaaaattttcttcttcagttcatatgtggacaaatctgggcaaagacagatgaaagaaattgtgcaaaatcacatagctagaaatgaacagaaccaaggttcttccttgatagtctagctccagaaccgaagctcttaaccacaatgatatactgaccctcagtgtggatattgtaattgcctgcctaacctcacattttcattcagctatttaaatctccccccatgtgaagctcatgtgctttggaaaaagcagcaaagcaggtcaagcttatactgatgaacatgagctcatttgccaaacatgacccaatttaggccaatgagatttaagacattttctaggggtttccagaaaaaggttt

SEQ ID NO: 169981 - DNA, 543 bp, Homo sapiens
gggatgaggggaaggtgagaatgacctttctgcttctgctatttttctcaaatgctgaagtgccatatttgaggatagcatgtcctaaaccccatcaataagaagtgtgataagatgaattgtcaccaaggaatgctgcaggaagagaagcccaaaattattattctttcaggagagtgtgaatgtgtctatgaggaggcaggtggacccaaggaggtgtcagatttggagtgaggaagaatcgaagtgtgtgtacttgtcaactttggccttggtgtcatgtcagcatacytcagtaagaatagaaggcagctactaatccccaccagggattgtacatctcagttaaaaccagtgaggacagtggccaatgactgggaaagttatgtcttttctgatgagcttctcttggaaactcttcctataaactcctcttggataggaaagaaaaagaaggagagaaagtgctaaatttgtcagtatgcctgaaaaagaaaatacctggaaggactaaaactaaaaactaaaattatatcttgaatt

SEQ ID NO: 169982 - DNA, 579 bp, Homo sapiens
attttacaagctccctagtaaatatcttgagacaaaattggatgactacacatttagcatgttatcatgatgctttgaaaatatgtatgtgtacatatatatgtaatatttatacacaaaatgtataacataatatttcatatgataataaatataaatgtaaatataaatttgacttaagaagggagtatatgttgatagcgttgaagtaagcttagatgatcaccttaaatgttgttactgtctttgttgccatagaataaacacttaaagagaaataacaactttgttttcagtttggagcatatttttggccctgggattattgattagagagattaatatgtattttccttatttcatctgtaaaatttaagttatttttaaacagttattttatttacacataatgtcaggctggcamctggaacaataaatgttgagttttattgtaaacttgatccaagtatttgaaactcaataatttttacagtgctaattgatatattacatggttctaagaattagaagaaggaaataataatttaagatgatatcaaattaaatattacaaattcc

SEQ ID NO: 169983 - DNA, 611 bp, Homo sapiens
ctggcactggttcaaaaaagaatttgtgacctcggggagggtcatccttatccatgacactgacagtctgaatcaactgaaaccaaaattaattaattaattaattaagcctaaggcaatgttcttgttattacaagatatcttaaatccatgtatttgtgctttaaatacatcacgaaaacaaagcaagaaaacaaaataaatgccattttcagaaaattatgccaatgtcttattttttacagttttgtcttagataacttatttagttaagagtggaagacatccattaagcaatggtttgcaaggtatcttaatgcattattgtcttatacctggccagcttaaagaaaaattcaatccctccaatacctatcctcttttgatattgttgaaaggcacagtccattgtattattaattgatgagcaatctgttacttccactagacaataattcttcaaaggaygagtacacagaagatgcatttttaaaaacaccaatgcttagcacaatccctcctatatattaacaatattattaatatatttttaaaataaataaatttgtctgtactatcagaaagaaaatgattttgaagctatggacacc

SEQ ID NO: 169984 - DNA, 610 bp, Homo sapiens
attattaggttatttgaagtgtttctacttttttgatataagtgcttattgctatgaactttcctcttcctattgctttttctgtattctgtaggttttcgtaggtttcattagtttcaagaacttttctaattttcttcttaatttattcattgacccacttatcattgtggagcatattgattaatttcgatgtgtttgtatagtttctaaaattcctcatgtgtttgagttctagttttattccattgtggtcagagaacatgcttgatattatttcaattgtttagattttcaaaatatgttttgtggcctaacgtmtgatctatccttgaaaattatcaataagaatgtatgttctgcagccattagataaaatcttctgtaaatattgactgtgtccatttggtttacagtacagattaagttccaatgtttctttgttgatttttttgtctagatgatctttccaatgctgacagtggtgtgttgaagtctctagctattattgtattaagatctgtttttccctttagctctaataatgtttgctttgtatatataggtgtgctaaggttttatatataggttgctcaatttacaattgtta

SEQ ID NO: 169985 - DNA, 533 bp, Homo sapiens
atccaaaccattagaaaaaaatgattaaagccccaattcactctgatgtcccactacacttaagtttaacatagttattcaaacatttgaaattcctttggctctctaagccacacagtcactaaccataaagacatcagtgattatgatatctcataacctttctttttaatgaataagytgttttccaccatttttgagacctctgctaaagttcttataaattaatttatacaaatagagttttgttttctctcatgacctatttccagccatgggaagtctcctacaaaagagatacttacttatgtccttatttgtgttaacaagcaagactttttcatcatgctgacaaccttctaggaatgttatttcagtcctactcagtatccaagatgagttcctaaaacatacccaaagaatatttagaaaaatggggccagtggtgatcaagtcatcatatatgttgttgctgtggcatgatgaacatgagttcaatgtttcttctgtgagaataacaagtcctgaagttt

SEQ ID NO: 169986 - DNA, 466 bp, Homo sapiens
ccgtctgtcctctcattctcaaacttaggtcgtgttcacttaaacaattaagccaatccatagatatagccttttttgtcacccattgtcaatagcaartgtttcaattgcctattgattaacacacttctctgactataataagcactgtggtatgttcatcaaatgtatgtttccttgattctttccatatattaataacaggaacctgtatcttcagtagaaaacatatatacatgtaggccacattgacagggaatttgctgttctaaacttgtaaatgcattctctcatgttacatctgttacatgatcaggaaaggtgacataagaactagtggtagtgccacatgttgcatattcgtaacccatagagttagcagtagaggctgtgtgatatgtgctatgtgccatcccagtctttggggacttgtaaccacagatattttcaagaaatgtttcttctg

SEQ ID NO: 169987 - DNA, 466 bp, Homo sapiens
ccgtctgtcctctcattctcaaacttaggtcgtgttcacttaaacaattaagccaatccatagatatagccttttttgtcacccattgtcaatagcaagtgtttcaattgcctattgattaacacacttctctgactataataagcactgtggtatgttcatcaaatgtatgtttccttgattctttccatatattaataacaggaacctgtatcttsagtagaaaacatatatacatgtaggccacattgacagggaatttgctgttctaaacttgtaaatgcattctctcatgttacatctgttacatgatcaggaaaggtgacataagaactagtggtagtgccacatgttgcatattcgtaacccatagagttagcagtagaggctgtgtgatatgtgctatgtgccatcccagtctttggggacttgtaaccacagatattttcaagaaatgtttcttctg

SEQ ID NO: 169988 - DNA, 466 bp, Homo sapiens
ccgtctgtcctctcattctcaaacttaggtcgtgttcacttaaacaattaagccaatccatagatatagccttttttgtcacccattgtcaatagcaagtgtttcaattgcctattgattaacacacttctctgactataataagcactgtggtatgttcatcaaatgtatgtttccttgattctttccatatattaataacaggaacctgtatcttcagtagaaracatatatacatgtaggccacattgacagggaatttgctgttctaaacttgtaaatgcattctctcatgttacatctgttacatgatcaggaaaggtgacataagaactagtggtagtgccacatgttgcatattcgtaacccatagagttagcagtagaggctgtgtgatatgtgctatgtgccatcccagtctttggggacttgtaaccacagatattttcaagaaatgtttcttctg

SEQ ID NO: 169989 - DNA, 627 bp, Homo sapiens
tacctcttcccttattttggtgttcctatacattgccctaaagatttgatacaagctttgcactaggactagcttaaaacagtaaacatttaattcctttctagatgtttcaactaagtattattgacagagtttgacttcattaagactgggatgttacagtggtatataaattcgaacgtttcatacaccaatatatagaaaggatataacatctttttaaaaactgaacttactctgaaagtgagactggccaatccattcatattmcatagaactagtgatactctgataccagtgaattttgacataaaatacaattaaagttgccttaagttttatatagagaatattttgaaaaaggtgatataaagtccatttaaaatacagaatataatgtaaatttgaaagaataatggtaaccatatttatagaatgctataatgttactgtgtacatcattcttagtaaagtttattcttattaataatttttgtataataatgtacatgaaaatattttcatgaattgctacttatttcattgttgatattcttgtaggtactcaaaactaacagattgtcacataaagacattcaatacctattggataaatgaattactaaa

SEQ ID NO: 169990 - DNA, 604 bp, Homo sapiens
ctgctctcttgtactgatctctgatagatgttgatatagtttggctctgtgtcgctgcccaaatctgatgttgaattgtaagccccaattttgggggaagggcctggtaggaggtgtttggatcacgggggaggattttccctttgctgttcttgtgatagtgaatgagttcccatgagatctgattgtttgaaagtgtgtagcttgtccccctttctctctctctctctctctctctctctctmtctcctgccagccatgtgaatatgtgcttgcttccccttcaccttctgccatgattgcaagtttcctgaggtctccccagaagtagaattgtttttgagttctgtacagcctgcagaaccttaagccaattaaatctattttatttataaattacccagtttcaggtatgtctgtttagcattgtgagaacagaataagacaggtgttatcatgagaacatattttaactgtagattttataaaataaatatttttgaggagtaggtcttgtaagagcatgtatccatgtgcaatggagataaatacttaccaaaaggcaaatcactgtatattttaatcagtatcttagaaaacttgt

SEQ ID NO: 169991 - DNA, 596 bp, Homo sapiens
agttctggtgttgcaccatagggtgactacagttgacaataatgtatttttatttcctagctaagaaagaggattttgaatgttctcatcacaaaaaatgacaagtatttgaggtgatggatatgctaattaccctgatttgattattacccaatgtatacatgtattgaaacatygcactgtacccacaaatatctaaaactatgaatcaattaaaaccatgaatcagttaaaaccaaaatagaacttcaaaaaatgctacaattcctataaaactctttgattcctgtgtggtacattttaagtacaaaaatacatgtttgttcttattaatgctgttattcatatgagaatgaataaatacaatttgaaccaattttttctcttctaaaacttgaatgtcttccttttctttgttctcagctgatacccttcgcatttatattatgacgatattaaggaaggaagatgccaatgcttttaatttttcaaaattacaaaaaataaaaagtgtgcatacttgaactgcagttgcaccatattctccactttttctcctcttataaagaaaaagcatatattttctaattcaagac

SEQ ID NO: 169992 - DNA, 596 bp, Homo sapiens
agttctggtgttgcaccatagggtgactacagttgacaataatgtatttttatttcctagctaagaaagaggattttgaatgttctcatcacaaaaaatgacaagtatttgaggtgatggatatgctaattaccctgatttgattattacccaatgtatacatgtattgaaacatcgcactgtacccacaaatatctaaaactatgaatcaattaaaaccatgaatcagttaaaaccaaaatagaacttcaaaaaatgmtacaattcctataaaactctttgattcctgtgtggtacattttaagtacaaaaatacatgtttgttcttattaatgctgttattcatatgagaatgaataaatacaatttgaaccaattttttctcttctaaaacttgaatgtcttccttttctttgttctcagctgatacccttcgcatttatattatgacgatattaaggaaggaagatgccaatgcttttaatttttcaaaattacaaaaaataaaaagtgtgcatacttgaactgcagttgcaccatattctccactttttctcctcttataaagaaaaagcatatattttctaattcaagac

SEQ ID NO: 169993 - DNA, 596 bp, Homo sapiens
agttctggtgttgcaccatagggtgactacagttgacaataatgtatttttatttcctagctaagaaagaggattttgaatgttctcatcacaaaaaatgacaagtatttgaggtgatggatatgctaattaccctgatttgattattacccaatgtatacatgtattgaaacatcgcactgtacccacaaatatctaaaactatgaatcaattaaaaccatgaatcagttaaaaccaaaatagaacttcaaaaaatgctacaattcctataaaactctttgattcctgtgtggtacattttaagtacaaaaatacatgtttgttcttattaatgctgttattcatatgagaatgaataaatacaatttgaaccaattttttctcttctaaaacttgaatgtcttccttttctttgttctcagctgatacccttcgcatttatattatgacgatattaaggaaggaagatgccaatgcttttaatttttcaaaattacaaaaaataawaagtgtgcatacttgaactgcagttgcaccatattctccactttttctcctcttataaagaaaaagcatatattttctaattcaagac

SEQ ID NO: 169994 - DNA, 358 bp, Homo sapiens
agaataatacatccttattctcactggcctcaaataaaagttatcatttacttctgttatgaagatggacaacaaaccacagaaatattagcaacaaccgagacttttgcaccaatggaaaacacagatattttcatattacattttagttgtcgtagatatctcaaaatattgtttctgctcatcactactttgaaattatggtagccattagacctgttagacckgctgctaaatcttgctatttaacatgttaataaaggagcacacaaatgaacagatattcagtttttaaaatgcaaatcggccaagtttggtgccttactcctgtaatcccagcactttgggaggctgaggc

SEQ ID NO: 169995 - DNA, 612 bp, Homo sapiens
ggttaatcgtatgacttgggtgatcttggacaaggaaactaatttctgtgagcctcggggctgctctcctgtgtaaaatggggataacacacctcaaagagcccaaattcttaaaaaaaactcatggaaggaccccccccatcgggcctgacaggtggtagcacctaaccaaagtcacttaccatctccctgcccctccgcgagggttgagaagtgcggaattcggtcactttccttaggaagttcatggtctgsttgggaatggggaagccatacatgcggagaaggtcttatgcttgctgtgtaaatctgcataattgtagcatgtcaggacatcagaacaggcctctgtctggcactcacgctgcagggacagaccagaaggcaggcagggatggatgaagggggcatcagagggggcagaaagggaagaccaagggaggggtcccagcagaactttctcttgagagttgcttagtctccagatcctcaagccttgactcacctaatggatggaaaatttgttttctaacttgcttgttcttttattaataatatatgcatatgctatggtttcacacatacagcactgtgaccaagagccctggcttt

SEQ ID NO: 169996 - DNA, 614 bp, Homo sapiens
agactttataaaaggcagttggttggggctggggaggaggagtgatggagggtgataactaaagtctacagggtttcttttgagcgtgaggaaaatgttctaaaattgactgtggcgatggttgcacatatctgaggacttactaaacccattgaatcgtacgttttaaatgggcgaattgtagagtatgtgtattatatctcaataaagctgttttaaaaaggggrcagttggttattagaaaagtctggctttgggggctggacagatgtgaccttgggttccagctctgccacttactagctgtgcatgcaagatattcaaccttgaaatctcagcttctttgagtgaaaatatttcacttttagggttgtagagtagatttaggatactttataaagcacctttaaaagtttctggcacctgaagagtattatgattaataatttttaataattagcggtgaaaaattatacgaacctgctactagaaatcattgcatgtaaacttctcatccatcagaagagaagctaattagcactgaaacgaagccatcctttcgaaattgacttacctggtaacttagctggttttaaagaattgtgttaggaaag

SEQ ID NO: 169997 - DNA, 614 bp, Homo sapiens
agactttataaaaggcagttggttggggctggggaggaggagtgatggagggtgataactaaagtctacagggtttcttttgagcgtgaggaaaatgttctaaaattgactgtggcgatggttgcacatatctgaggacttactaaacccattgaatcgtacgttttaaatgggcgaattgtagagtatgtgtattatatctcaataaagctgttttaaaaaggggacagttggttattagaaaagtctggctttgggggctggacagatgtgaccttgggttccagctctgccacttactagctgtgcatgcaagatattcaaccttgaaatctcagcttctttgagtgaaaatatttcacttttagggttgtagagtagatttaggatactttataaagcacctttaaaagtttctggcacctgaagagtattatgwttaataatttttaataattagcggtgaaaaattatacgaacctgctactagaaatcattgcatgtaaacttctcatccatcagaagagaagctaattagcactgaaacgaagccatcctttcgaaattgacttacctggtaacttagctggttttaaagaattgtgttaggaaag

SEQ ID NO: 169998 - DNA, 557 bp, Homo sapiens
tacctacagccttacaaaatatatttcttcaataataagacttaaacatcaaaattactccttggtccatgggctgtagaatggatgttgtgttagcagtcatgaaacaacatgaatctccttgtacatctccatcagcactcttgggtaaccaggtgcattaccaatgagcactactattttgaaaagaatatttttttctgagcaataggtctcaacagtgggcttaaaatattcagtaatctatactataaacagatgtgctgtcatctaggctttcttattttgtttatgaaacacaggaagagtggatttagcataattcttagagaccctagaattttcagaatgacacagagcgttggcttcaacttgaagtcaccagctgcatttgcctctaacaagagggtcagccatcctttgatgctttgaagccaggcactgacttctcctctctagctatgaaaggcctagatggcatcttcttccaayagaaggctgttttgtctaccttgaaagtctgttgtttagcgcagccaccttcatcaattgtgcag

SEQ ID NO: 169999 - DNA, 564 bp, Homo sapiens
agcaagggacaaagaatataaacaattcccactccaggcctggcgtagtggctcatgcctgtaatcccagcactttgggaggccgaggcaggtggatcacgaagtcaggagttcaagaccagcctggccaacatggtgaagccctatctctactaaaaatacaaaaattagctggacatggtggcacgtgcctgtaatcccagctactcgggaggctgaggcaggagaattgcttgaaccaggacccaggaggyggaggtagtagtgagcaagatcgcaccactggactccagcttgggctacagagcgagactctatctcaaaaaaaaaaaaaaaagaaagaaaaaaaaaaagaagaaagaattcccactccagagaagacagcagcagctacattttgtacagctcttggctacttatacttcattgtatccctacagtacacttcccgtttctgaattttggttttctcatctgcaaaacaaataatagtgggacaatacgatagcagcaggctgtgaaatataaaggtatggaaaggtctgagtggcatagaataaatgt

SEQ ID NO: 170000 - DNA, 603 bp, Homo sapiens
gccagtaaattctagtggcactcccccatcatccccagatgtgaaaatcaaaaatatctccagacatttctttatgttccctgaaaggcaaaaccacttcttgtgtagaaccattgcctaatattgaatttgtctttgctcttcatagccataatatttcctccaattttttgataaattagtaaatttgctgcttacaacattgttaatggcaataccaacttcagcatccctaagatttgaaaatatgccatgattttatcacttccgtctcctctatatttccaacaatctgacaaattatttarataatatcctaatagttctcttgaatttatttttgcacttttgagcatagatcccatcctcatttggactgttgcaattgcatgctcatctggactttctacttgtgatttctaaccatgtccacttattttttacattgccatcagagctttctctccagagcacacatctgatgacccggctgcagtgtcatacttctgcaatggtttcctgggtatcaatatccatagtaactcctcagctagtattcagtgtcttcatccatccatttatttaaaatatattttgtaatcg

SEQ ID NO: 170001 - DNA, 595 bp, Homo sapiens
gtcttttgtctttcattctgttaatgtggtgtatcacatttgtaagtctgcatatgttgaaccatacttgaatctcgaggataaatcccacttgatcatggtgaataattttttttaatgcgtgttgaattttgtttgctagtgttttgttgaggatttctgcatctatgttcagcagggatattggcctgtatttttatttttaatttttctgttgcttttttggtagtgtccttgtctggctttgattgaaagcattttcccctctttaattttttggggatagtctgagaaagattggtatttttaaatgtttggtagaatttatcagtgaagtgatccagtcctgagattttctttgatgggagactttttagtaatgatttgatctccttactctttaatggtctgttcggattttctatttctttatgattcatcyttggtaagttgatatgcctagaaatttatctatttcatccatctaagttatccagcttattgtcaaataattggtcataatagcttcatatgaccctttggctgtgtttctgttgtatcagttgtaatgtcttagtttccatttctgattttg

SEQ ID NO: 170002 - DNA, 516 bp, Homo sapiens
agtgagacctaggaaacctaagtgacttaaccataccctgcaactagttagctgttggtacagatataaaccttggttcacttatctgaaaataaactatgactctactcaaggaagcatttttcattttgctattttaaacactatatcsagacatgacatataacacatggaatatgttatattccagacatataacaccgtatgttattctttaaaaggaaggtttttacaggctggtgcacagctatagaatggcagatgcactttgaatatggagaagagcgtgtgacccctgaacccagaggtctactccctggagatcacactgcattaaacagctagaggtgttctttcattcggacaaaagaactgacgttgcttcactgaacctcttagggatactgaattaaatgagattatcatataatatgcctcatcactttcaccttctagtaattttacaaaaacaccaaattgaatatgaatttactatatattctacagtgaccgctc

SEQ ID NO: 170003 - DNA, 470 bp, Homo sapiens
gatttaaattcttcaaaagaaactacagtcaacttcttcaaacttttttttataattattatactttaagttctagggtacatgtgcacaatgtgcaggtttgttacatatgtatacatgtgccatgttggtgtgctgcacccattaactcgtcatttacattagatatttctcctaatgcttaaaagtagacctattacctataaggcatttaaccagaaacataacatggcaaaaatggattatcttgtgaggcttgaagcagacacccttggaaatcaaggaggagtcatgagaggtctcagctttgcaatctgattccttttcagggwtctgaggaagaggaaggataataacatattaggtcaagaagctcaccaggctccagctttctaattaaaatgagggcggagggatgaagagataagaagaagaggttgtaactctagatctccctgagtaatgcctac

SEQ ID NO: 170004 - DNA, 552 bp, Homo sapiens
cctccaacatcctgcaaggccgtaagaaactcgagaattacaactcaccctgtgaaggcacacctgagctgggtccttctcctttccctctttcatcatggaggatctagagtggtcaatgggtggggaaggaggattagagcacaagttgggggagaaagagaaagccaacgatgttcttgcccctgtcctttcgcctcccccagcttccaggttaaacctgacccagggaggggaggtaggaagttgtggtatccggagaggtgtcccagtggaaacaagagcctctgcagaaaagacactctgtgatcacattgtaccacaaaatgtacacwtgccataatgtccctacaatagagaaaactcactaaacagagtagaatagttagattaattatgttgcaaaaaaatttcacacaatattatgaagtcattagaaggtcacgcattgattcattccccagggatttattcaacttctccccacccgcccccacccgccccgcccgccacaggcaagcacccaggcactatgccagtgctggggttaaa

SEQ ID NO: 170005 - DNA, 321 bp, Homo sapiens
tagcagatttgttgctctttcttagagatgatttttttcatgtgcttttgacatttttccccttaccttattttgtaaagtccgctttgtgaaagacacaagactattgataacaatagatgttttaggaattggcaaacttttaaatcctagatggaatggcagaatagcccctcaaggagggaatggactttatttattcttggtgagttccgaatgcacaaaaataaagggcttgccagttgccagtgggaagtgaacataattatgacttcacagctgcttttcctaaagtaaarggagagaaaaaaggaagagtca

SEQ ID NO: 170006 - DNA, 573 bp, Homo sapiens
ggctcgggtgtgctccccatcctctgacyggtaatagaacaaaggacaaaaggccatctctccaagtcacaatatctctttattgaagctttgttctgctgctttgagccttttctctctgattcactggacttgcatttgagcaactttcccatttctctcttttctattacctcccaattctagaatgactaggttagactcactgttttcttgtttctcatttccaataaattcttcgacacactattaacatttgaaggttatatcagaagatggaaaaatcaaatgaatgccaatattctttcctgggtcccctgctctctggcttggcaactgaaatcctgggtcctgcattttccctcctgaaccacctccaaggttggccttcagagctcttaggactagactggctggtggagggactggtgctctcaaagggcctttcttcttaacaaatcctcccttgcttgaatgggatctagaagcagatttggaggcttgtggaaatggggcccatcaacattccagcatgtatcctattaccatttcaggcattctttgtggctccat

SEQ ID NO: 170007 - DNA, 573 bp, Homo sapiens
ggctcgggtgtgctccccatcctctgactggtaatagaacaaaggacaaaaggccatctctccaagtcacaatatctctttattgaagctttgttctgctgctttgagccttttctctctgattcactggacttgcatttgagcaactttcccatttctctcttttctattrcctcccaattctagaatgactaggttagactcactgttttcttgtttctcatttccaataaattcttcgacacactattaacatttgaaggttatatcagaagatggaaaaatcaaatgaatgccaatattctttcctgggtcccctgctctctggcttggcaactgaaatcctgggtcctgcattttccctcctgaaccacctccaaggttggccttcagagctcttaggactagactggctggtggagggactggtgctctcaaagggcctttcttcttaacaaatcctcccttgcttgaatgggatctagaagcagatttggaggcttgtggaaatggggcccatcaacattccagcatgtatcctattaccatttcaggcattctttgtggctccat

SEQ ID NO: 170008 - DNA, 573 bp, Homo sapiens
ggctcgggtgtgctccccatcctctgactggtaatagaacaaaggacaaaaggccatctctccaagtcacaatatctctttattgaagctttgttctgctgctttgagccttttctctctgattcactggacttgcatttgagcaactttcccatttctctcttttctattacctcccaattctagaatgactaggttagactcactgttttcttgtttctcayttccaataaattcttcgacacactattaacatttgaaggttatatcagaagatggaaaaatcaaatgaatgccaatattctttcctgggtcccctgctctctggcttggcaactgaaatcctgggtcctgcattttccctcctgaaccacctccaaggttggccttcagagctcttaggactagactggctggtggagggactggtgctctcaaagggcctttcttcttaacaaatcctcccttgcttgaatgggatctagaagcagatttggaggcttgtggaaatggggcccatcaacattccagcatgtatcctattaccatttcaggcattctttgtggctccat

SEQ ID NO: 170009 - DNA, 368 bp, Homo sapiens
gaaacttttgatctgcataagacatacagagttctaaaagtggtaaaaatgaagataaatrcaaaagaatttgatttaattttgaactgttttaataaaaaaataaaaaacaagaaaaaatatcaccattcaatatggggtttataacttatatagatatgaaatgcattacagcaacttcataaagaatggactggatgaaataaaagtatactgtttcagggtttctaatggtatctaaagtggagaaatatcatttgaagatagactggataaattttaaaaatataatttaaacggtacagtaatcattaaaaaattgaaaaaataaagatgtttacctaataaaccaaagtgggaataagatg

SEQ ID NO: 170010 - DNA, 368 bp, Homo sapiens
gaaacttttgatctgcataagacatacagagttctaaaagtggtaaaaatgaagataaatacaaaagaatttgatttaattttgaactgttttaataaaaaaataaaaaacaagaaaaaatatcamcattcaatatggggtttataacttatatagatatgaaatgcattacagcaacttcataaagaatggactggatgaaataaaagtatactgtttcagggtttctaatggtatctaaagtggagaaatatcatttgaagatagactggataaattttaaaaatataatttaaacggtacagtaatcattaaaaaattgaaaaaataaagatgtttacctaataaaccaaagtgggaataagatg

SEQ ID NO: 170011 - DNA, 362 bp, Homo sapiens
atttcttacaattgcatgtggatctgtgatttacttaaaaaaagtttaatttaaaaaattgaagaaatagagaaatacttgggtagtggcagagaaaaggtgaaatayctggagctagaagatggtctgttgaaaactcttctaaacattaaacatgaaaaattgtaagggacaggggtagagttaagtttttgtagatgcctagtcaaaatggtgggtctctcctattaggaatatacctgaaaagtataagtgtaaccataatcccacaacatatatttttatgggaattgtgtaagatagaatttatcagaattcccatgtttgtaggcagaaatcctgagcagcattacaaacagcag

SEQ ID NO: 170012 - DNA, 509 bp, Homo sapiens
ttattttaataaagaaattttaaaatgcatttgaatttttcctatgtatgctaattcaattaattttacatattttggggattattaatcatattattaagtaatatgaagattaaggacaatgtatactgtattgtatggtgctaggctcataggtacttaatggatagcaactactaattacaattttaatactataagtttggtgaaataataggtcattaataaataacaactgcttattgtggatagtgctgtttagttgtttactaaagattcctgtgggaagtttcttatgggagatggtgtacactgactaggcctttgagcagcagacatttgtttgtgtagaagacttctatctcattgacagtgrtaatgttgatctcagaattgtcctgctacaagtttaggccacaaggagcccctaagttcttatcattgcaggccgggtcaacctccttgctcttgccagattgctaggataatttccaaatgctcatatggct

SEQ ID NO: 170013 - DNA, 509 bp, Homo sapiens
ttattttaataaagaaattttaaaatgcatttgaatttttcctatgtatgctaattcaattaattttacatattttggggattattaatcatattattaagtaatatgaagattaaggacaatgtatactgtattgtatggtgctaggctcataggtacttaatggatagcaactactaattacaattttaatactataagtttggtgaaataataggtcattaataaataacaactgcttattgtggatagtgctgtttagttgtttactaaagattcctgtgggaagtttcttatgggagatggtgtacactgactaggcctttgagcagcagacatttgtttgtgtagaagacttctatctcattgacagtgataaygttgatctcagaattgtcctgctacaagtttaggccacaaggagcccctaagttcttatcattgcaggccgggtcaacctccttgctcttgccagattgctaggataatttccaaatgctcatatggct

SEQ ID NO: 170014 - DNA, 509 bp, Homo sapiens
ttattttaataaagaaattttaaaatgcatttgaatttttcctatgtatgctaattcaattaattttacatattttggggattattaatcatattattaagtaatatgaagattaaggacaatgtatactgtattgtatggtgctaggctcataggtacttaatggatagcaactactaattacaattttaatactataagtttggtgaaataataggtcattaataaataacaactgcttattgtggatagtgctgtttagttgtttactaaagattcctgtgggaagtttcttatgggagatggtgtacactgactaggcctttgagcagcagacatttgtttgtgtagaagacttctatctcattgacagtgataatgttgatctcagaattgtcctgstacaagtttaggccacaaggagcccctaagttcttatcattgcaggccgggtcaacctccttgctcttgccagattgctaggataatttccaaatgctcatatggct

SEQ ID NO: 170015 - DNA, 509 bp, Homo sapiens
ttattttaataaagaaattttaaaatgcatttgaatttttcctatgtatgctaattcaattaattttacatattttggggattattaatcatattattaagtaatatgaagattaaggacaatgtatactgtattgtatggtgctaggctcataggtacttaatggatagcaactactaattacaattttaatactataagtttggtgaaataataggtcattaataaataacaactgcttattgtggatagtgctgtttagttgtttactaaagattcctgtgggaagtttcttatgggagatggtgtacactgactaggcctttgagcagcagacatttgtttgtgtagaagacttctatctcattgacagtgataatgttgatctcagaattgtcctgctacaagtttaggccacaaggagcccctaagttcktatcattgcaggccgggtcaacctccttgctcttgccagattgctaggataatttccaaatgctcatatggct

SEQ ID NO: 170016 - DNA, 608 bp, Homo sapiens
cattatacttccatcctactaggcttcttcagttcctctcacccactgggggctttgttcttgttttctatgtttcaaaacctgtttgatctggtgttgaggctatccagattcttttttccttcaggtttcakttcaaatgccatctgccctggacggtgttccagctccccatctgggtattacctatccccaagtcattctctatcacattatcctgaggtgtattgcctacagagcctattactatctacagttatcttgtttatttacttatcttctgtatttgtccctaccaggacttaaagtcactgggaggcatggatttttatctttcttcccattcactgaactatgactgctaacaccaccaatgcctgatacattgtagcctctgaatacatgcttgtttagattctgaataagaatactctgagggcatggtagcattaagtattaagagacaggatgccatgcaggtttctactaggctttggtcagtatctattccgctgtaggaagtatatgcagtggtaagtggctggattttggctgcagaaaggtggtcctaccaagcacaatacaggcaaggagtgattgtgaacaat

SEQ ID NO: 170017 - DNA, 608 bp, Homo sapiens
cattatacttccatcctactaggcttcttcagttcctctcacccactgggggctttgttcttgttttctatgtttcaaaacctgtttgatctggtgttgaggctatccagattcttttttccttcaggtttcagttcaaatgccatctgccctggacggtgttccagctccccatctgggtattaccwatccccaagtcattctctatcacattatcctgaggtgtattgcctacagagcctattactatctacagttatcttgtttatttacttatcttctgtatttgtccctaccaggacttaaagtcactgggaggcatggatttttatctttcttcccattcactgaactatgactgctaacaccaccaatgcctgatacattgtagcctctgaatacatgcttgtttagattctgaataagaatactctgagggcatggtagcattaagtattaagagacaggatgccatgcaggtttctactaggctttggtcagtatctattccgctgtaggaagtatatgcagtggtaagtggctggattttggctgcagaaaggtggtcctaccaagcacaatacaggcaaggagtgattgtgaacaat

SEQ ID NO: 170018 - DNA, 385 bp, Homo sapiens
ttactatctacagttatcttgtttatttacttatcttctgtatttgtccctaccaggacttaaagtcactgggaggcatggatttttatctttcttyccattcactgaactatgactgctaacaccaccaatgcctgatacattgtagcctctgaatacatgcttgtttagattctgaataagaatactctgagggcatggtagcattaagtattaagagacaggatgccatgcaggtttctactaggctttggtcagtatctattccgctgtaggaagtatatgcagtggtaagtggctggattttggctgcagaaaggtggtcctaccaagcacaatacaggcaaggagtgattgtgaacaattaacagaccaaaaagtcaag

SEQ ID NO: 170019 - DNA, 385 bp, Homo sapiens
ttactatctacagttatcttgtttatttacttatcttctgtatttgtccctaccaggacttaaagtcactgggaggcatggatttttatctttcttcccattcactgaactatgactgctaacaccaccaatgcctgatacattgtagcctctgaatacatgcttgtttagattctgaataagaatactctgagggcatggtagcattaagtattaagagacaggatgccatgcaggtttctactaggctttggtcagtatctattcygctgtaggaagtatatgcagtggtaagtggctggattttggctgcagaaaggtggtcctaccaagcacaatacaggcaaggagtgattgtgaacaattaacagaccaaaaagtcaag

SEQ ID NO: 170020 - DNA, 497 bp, Homo sapiens
aaggtgggtgaaccccttgaaaggggtcagtagatttcctattcttgaaaagatagagtccattttaaatgtctgctgcattcagatgacaaactatgggtcctttctaaatatctttttctttttccttttcttttgattcattaaaaaaaaaacctatgtttttagggagtttactttcttcagtcattaagcttggacgttaagtatacattgttgatcaaaaaagctgtgttctttgccctggagtttatagttcattgaacttaatggtattgagagtctggaacgattgttccataattttagaggttctcaggaccagtgatagaaaattattccctaaaaccaaggtgcattttgatatttttgtgattaaaaaaacatwaaaaagattttataactctggcattttcatcagatacatatacttacatgctaacattcatgttcagttatatgatatgcataagagtatataaatgttttataagtgg

SEQ ID NO: 170021 - DNA, 497 bp, Homo sapiens
aaggtgggtgaaccccttgaaaggggtcagtagatttcctattcttgaaaagatagagtccattttaaatgtctgctgcattcagatgacaaactatgggtcctttctaaatatctttttctttttccttttcttttgattcattaaaaaaaaaacctatgtttttagggagtttactttcttcagtcattaagcttggacgttaagtatacattgttgatcaaaaaagctgtgttctttgccctggagtttatagttcattgaacttaatggtattgagagtctggaacgattgttccataattttagaggttctcaggaccagtgatagaaaattattccctaaaaccaaggtgcattttgatatttttgtgattaaaaaaacattaaaaagattttataactctggcattttcatcagatacatatacttasatgctaacattcatgttcagttatatgatatgcataagagtatataaatgttttataagtgg

SEQ ID NO: 170022 - DNA, 561 bp, Homo sapiens
gattttctgtttctctgtcaattgaaaatgtaaggactctgaagcgtatgatgtttaaaggcaaggggacctaggagcttccagaattcaaacttattctgctagggctgattctctaaatttaaattgtgtaccctgtggtgctaacaaaataatcctttataacttgtgcgggttgaagacagttgatgagtgaagatgatttattaactttatagcaatatcctcggagctttcttctatcaccatttttgcagtcaacatgaactttttaaaccataaacatttcttaatggatgaattgagaaatgtatgctcattaaacactgargaggaaaatgagaaaatgggagtcatcttttataactttaattttgaaagttatctttgaaaactttaaaataatttataacaataacatactttgagactccactgagcaaatttactttatcatgcaaaaatataattaagtttaatatatgtgctggacatcagaatttctccttttttcctagtttcttacttgcattgattgtttgctttcaattggcctggatt

SEQ ID NO: 170023 - DNA, 531 bp, Homo sapiens
tcacagttacaaatgagaagaatattctcataacatttacaaaaatgagaacctactcggagccccgctcatcaccatgcatwcaccctcaattaaaacaatgcccctgatagcaggcagtataatctgcattttatttcactcatgagcaaaataacaagttactcaggcctgaggcactcatgagtgatatggggcgtgtaatatcctttccattgagtttcctattattaagcttgaaataaggagttcagaattaactgtgacaatgattttatctagtgttggcatcaccattagcttttgcagtttactgctaataaaactttaaatttgctattacttctaataaccttcttgccaccttagctgtagaaattagacaaagaaccctgctgacatgtggctagtgacattttctggaagtgtagagaactctgatgacaacagtgactattatttaccaaagtataataaagccaggccccactggccttcggcagcctaacttaaagcacctgttcctggggt

SEQ ID NO: 170024 - DNA, 531 bp, Homo sapiens
tcacagttacaaatgagaagaatattctcataacatttacaaaaatgagaacctactcggagccccgctcatcaccatgcatacaccctcaattaaaacaatgcccctgatagcaggcagtataatctgcattttatttcactcatgagcaaaataacaagttactcaggcctgaggcactcatgagtgatatggggcgtgtaatatcctttccattgagtttcctattattaagcttgaaataaggagttcagaattaactgtgacaatgattttatctagtgttggcatcaccattagcttttgcagtttactgctaataaaactttaaatttgctattacttctaataaccttcttgccaccttagctgtagaaattagacaaagaaccctgctgacatgtggctagtgacattttctggaagtgtagagaactctgatgacaacagtgactattatttaccaaagtataataaagccaggccccactggccttcggcagcctaayttaaagcacctgttcctggggt

SEQ ID NO: 170025 - DNA, 597 bp, Homo sapiens
ttatcaagtgaagagaggtcagtaaagctatatccaaatctatataaatatttataaattcatctattctattgtaacaaatatataacatgagatacaccctcttaaattttttaagtgtgcagtacagtattgttaacgctaaattcaatgttgtacagatttctagaacattttcatcttgaatgaatgaaactttatacctgttgagcagcaactccccatttctgtctctcccaatatatttaatttatttgtaattttaatttcttctcctctaccacacataaagacaagggagcacttatttgaaggcacgagagagaacagcaaatgtttattagctccaaggggagggagtggcaagatttcccgcggctgtcggattatgaaaggccttccaagttatactatgaawttttttcttttatctggacggattggaagccactagaattgttttttgtaagggtatgaaatggccaggatacccacttcacaaccatcactctgggggcaattaggagagtggactcgaggggagtgaaaccagaagcaagtgagctagtccggaaaatgtggtaatttaggcaaaaa

SEQ ID NO: 170026 - DNA, 343 bp, Homo sapiens
gtttactagaaggacttttggggtccttgaaggtttcttttttagattaaagtatattaacyttgtactaaaattatctgtaatagatttgatgtatctgttatagtctgttaatagcagctgggttttcccagtagactagaaaggcttagaatgaaacaaccataacagttaaatagcttattgatttctatatccatggactacacttggtaggtcctattcctgcatacagtgatcattatggctgccatgtatacacatacatatttgagtagggcagtacttgaggaggaaggagagtcagggaaatcttttatatgaagtgaatctgtatttattt

SEQ ID NO: 170027 - DNA, 589 bp, Homo sapiens
gaaaatagcttagcagtttcttctaaagttaaacatacaactgacatgcgatacatcaagaccaatgtcaggtatttacccaagaaaaatgaacatttaaatttacacaaaacatatgaaaacaattatagtggttttattcaraatcaccaaaactggagactattcacatgtctttcaattggtgaatggataaacaagctatggttcctccatagattggatgttgctgagtgatataaaggaacacattactgatagatgcaatgccatggatggagctctagtgcattgtgttgtatgagaaaaagccagaattcaaaagctaaatactgtgttagtccttttatgtggcatactggatcagaaaacagagcagcaatttcctgggacctgggagtcagagaagaggttggctacaaaggggcaatatgaagtaatttttgggtattggaagtctaagaatggaaaagagtaaatcttactcttcatcaatttaaaaaattgatttcaaaagaaaaaaagcatatatagagagagaaagaggggaaagaagatcaacagtatgttgctggataatatgttaacc

SEQ ID NO: 170028 - DNA, 468 bp, Homo sapiens
tatgatgaagggataaagtttgaaacagaagaccaggttctgactcagaattttgtttcctaatcactggttaatctccacctgcycctttttccacatcctttggtagcaaatatgttgatattaaggtttatcaagttacatcaattgacacatttaattttgttttctgttgtttcatgtagactatcccattagagaatacatttgtagccagaaaaccaccttggacttttagggagcaattcctccctaaaaggggagcgatggtcagggccttctggaattactcctacaagaataggagcagggaaagaggatatattttggagaggaagtgggatataaagaggatattagtgcacaaggatttaggatattagcttaagtagagtaagaaggacagagctaacaaccccaatgggatgaaatggctataattatttctttgtgtttctaggtatatct

SEQ ID NO: 170029 - DNA, 478 bp, Homo sapiens
gatgaagggataaagtttgaaacagaagaccaggttctgactcagaattttgtttcctaatcactggttaatctccacctgcccctttttccacatcctttggtagcaaatatgttgatattaaggtttatcamgttacatcaattgacacatttaattttgttttctgttgtttcatgtagactatcccattagagaatacatttgtagccagaaaaccaccttggacttttagggagcaattcctccctaaaaggggagcgatggtcagggccttctggaattactcctacaagaataggagcagggaaagaggatatattttggagaggaagtgggatataaagaggatattagtgcacaaggatttaggatattagcttaagtagagtaagaaggacagagctaacaaccccaatgggatgaaatggctataattatttctttgtgtttctaggtatatctggagaaatcattt

SEQ ID NO: 170030 - DNA, 555 bp, Homo sapiens
taggcaaataatagggtaagaatttcaaagggaggagagtgtacagccattgatgaagccaacatttttgaccttaacaaatgggtaggtggtgaagcaatcaacacagataagtaagaatgggagaatgaaatgctgaatttgcagtgcttatggaggattcagatggcaccatctaaacttgtcatttaacagttgttraacttattttgaaccgggcaatgactatctgctaggtcctagtgctgagaagtcacagtttctgctcttatgcaccttaactgagtagcggaaatgttgtaaatgtgatataaataagaagactatttacacataggtgttggttaaaactgcaggagttgatttttttattagtagagaaatatcctactgtattgctaaggtaatgtctgaacttggtggaatttcttttaataggcaaatagtgctttgaaagaatagattgcaatattgtagccctgaaagttttaacattaattaaaaaaaaaagaaaatgtaaaaagaggaagtgcatagtcaaaagaattagaattc

SEQ ID NO: 170031 - DNA, 555 bp, Homo sapiens
taggcaaataatagggtaagaatttcaaagggaggagagtgtacagccattgatgaagccaacatttttgaccttaacaaatgggtaggtggtgaagcaatcaacacagataagtaagaatgggagaatgaaatgctgaatttgcagtgcttatggaggattcagatggcaccatctaaacttgtcatttaacagttgttgaacttattttgaacmgggcaatgactatctgctaggtcctagtgctgagaagtcacagtttctgctcttatgcaccttaactgagtagcggaaatgttgtaaatgtgatataaataagaagactatttacacataggtgttggttaaaactgcaggagttgatttttttattagtagagaaatatcctactgtattgctaaggtaatgtctgaacttggtggaatttcttttaataggcaaatagtgctttgaaagaatagattgcaatattgtagccctgaaagttttaacattaattaaaaaaaaaagaaaatgtaaaaagaggaagtgcatagtcaaaagaattagaattc

SEQ ID NO: 170032 - DNA, 477 bp, Homo sapiens
aaatgggtaggtggtgaagcaatcaacacagataagtaagaatgggagaatgaaatgctgaatttgcagtgcttatggaggattcagatggcaccatctaaacttgtcatttaacagttgttgaacttattttgaaccgggcaatgactatctgctaggtcctagtgctgagaagtcacagtttctgctcttatgcaccttaactgagtagcggaaatgttgtaaatgtgatataaataagaagactatttacacataggtgttggttaaaactgcaggagttgatttttttattagtagagaaatatyctactgtattgctaaggtaatgtctgaacttggtggaatttcttttaataggcaaatagtgctttgaaagaatagattgcaatattgtagccctgaaagttttaacattaattaaaaaaaaaagaaaatgtaaaaagaggaagtgcatagtcaaaagaattagaattc

SEQ ID NO: 170033 - DNA, 477 bp, Homo sapiens
aaatgggtaggtggtgaagcaatcaacacagataagtaagaatgggagaatgaaatgctgaatttgcagtgcttatggaggattcagatggcaccatctaaacttgtcatttaacagttgttgaacttattttgaaccgggcaatgactatctgctaggtcctagtgctgagaagtcacagtttctgctcttatgcaccttaactgagtagcggaaatgttgtaaatgtgatataaataagaagactatttacacataggtgttggttaaaactgcaggagttgatttttttattagtagagaaatatcctactgtattgctaaggtaatgtctgaacttggtggaatttcttttaataggcaaatagtgctttgaaagaatagattgcaatattgtagcyctgaaagttttaacattaattaaaaaaaaaagaaaatgtaaaaagaggaagtgcatagtcaaaagaattagaattc

SEQ ID NO: 170034 - DNA, 350 bp, Homo sapiens
ttgtttccaaagtagcttgtggttttgtttttacatgaattaccgtaatgcacrtactaatattttcaacctgtaactactgagcacccacatgtacaggcaccaagatacattggtcaccaaaggaagcaaaaactactgggcttgtgaagtttccattctagtggagaaaagcagatgatgagcaatatgcatcacatatcaaatcatgtaacatcttagaagatggcaatgcggtgaaattgcacagcagaggaagaggggtgagaagtttgtgtgtgtagtgaggagtgccgcaattttaaataagatggccaggcaagcttcactgagaatatttgggcaaagac

SEQ ID NO: 170035 - DNA, 350 bp, Homo sapiens
ttgtttccaaagtagcttgtggttttgtttttacatgaattaccgtaatgcacatactaatattttcaacctgtaactactgagcacccacatgtacaggcaccaagayacattggtcaccaaaggaagcaaaaactactgggcttgtgaagtttccattctagtggagaaaagcagatgatgagcaatatgcatcacatatcaaatcatgtaacatcttagaagatggcaatgcggtgaaattgcacagcagaggaagaggggtgagaagtttgtgtgtgtagtgaggagtgccgcaattttaaataagatggccaggcaagcttcactgagaatatttgggcaaagac

SEQ ID NO: 170036 - DNA, 350 bp, Homo sapiens
ttgtttccaaagtagcttgtggttttgtttttacatgaattaccgtaatgcacatactaatattttcaacctgtaactactgagcacccacatgtacaggcaccaagatacattggtcaccaaaggaagcaaaaactactgggcttgtgaagtttccattcyagtggagaaaagcagatgatgagcaatatgcatcacatatcaaatcatgtaacatcttagaagatggcaatgcggtgaaattgcacagcagaggaagaggggtgagaagtttgtgtgtgtagtgaggagtgccgcaattttaaataagatggccaggcaagcttcactgagaatatttgggcaaagac

SEQ ID NO: 170037 - DNA, 336 bp, Homo sapiens
ttttcaacctgtaactactgagcacccacatgtacaggcaccaagatacattggtcaccaaaggaagcaaaaactactgggcttgtgaagtttccattctagtggagaaaagcagatgatgagcaatatgcatcacatatcaaatcatgtaacatcttagaagatggcaatgcggtgaaattgcacagcagaggaagaggggtgagaagtttgtgtgtgtrgtgaggagtgccgcaattttaaataagatggccaggcaagcttcactgagaatatttgggcaaagacttgtaggagatgttccaaacttagtttaacactaaacatatggaagac

SEQ ID NO: 170038 - DNA, 405 bp, Homo sapiens
atacatttgcatatacttgtttccaaagtagcttgtggttttgtttttacatgaattaccgtaatgcacatactaatattttcaacctgtaactactgagcacccacatgtacaggcaccaagatacattggtcaccaaaggaagcaaaaactactgggcttgtgaagtttccattctagtggagaaaagcagatgatgagcaatatgcatcacatatcaaatcatgtaacatcttagaagatggcaatgcggtgaaattgcacagcagaggaagaggggtgagaagtttgtgtgtgtagtgaggagtgccgcaattttaaataagatggccaggcaagcttcactgagartatttgggcaaagacttgtaggagatgttccaaacttagtttaacactaaacat

SEQ ID NO: 170039 - DNA, 557 bp, Homo sapiens
attaatcatcatctcaagaaattaaaaacaaaataccaaatggatataatttagactatatcattaaactacatgcataaatttagaaaagaacaatgaattaatagccaattaaatccatttaccatagaaattaaaaaaatgcataacagtgacaataaacagagaatcaaaattggtgttagaaactttttaaaaacaaacagtgagaatattaaccatcaatccctccgagatacaataaaagcaatattcagagttaatttcacaatccccaaaatgcttaattgaaaacaacatagtttaatataaagtattgtattctaaatcaaggaaaataataagtaaaatgcaagtaaatcagaatttgcaaagaaaaaattatgaattaaacaacattgaaaagtatctggtaatctgtaccaatctactttgtaagttasttgaagaaagaagataaggggatataattacagataaagagaactttttaaaaataaaaagaataacatatatcatttttatcatatatgtaatcattatacatgtaacgaaat

SEQ ID NO: 170040 - DNA, 557 bp, Homo sapiens
attaatcatcatctcaagaaattaaaaacaaaataccaaatggatataatttagactatatcattaaactacatgcataaatttagaaaagaacaatgaattaatagccaattaaatccatttaccatagaaattaaaaaaatgcataacagtgacaataaacagagaatcaaaattggtgttagaaactttttaaaaacaaacagtgagaatattaaccatcaatccctccgagatacaataaaagcaatattcagagttaatttcacaatccccaaaatgcttaattgaaaacaacatagtttaatataaagtattgtattctaaatcaaggaaaataataagtaaaatgcaagtaaatcagaatttgcaaagaaaaaattatgaattaaacaacattgaaaagtatctggtaatctgtaccaatctactttgtaagttacttgaagaaagaagataaggggatataattacarataaagagaactttttaaaaataaaaagaataacatatatcatttttatcatatatgtaatcattatacatgtaacgaaat

SEQ ID NO: 170041 - DNA, 578 bp, Homo sapiens
acctttcaaaattatatatacaagtgccttttgacttgggatttttctaggatttctaagatttttttcttttagaaattcttgcacaaaattacaaagatataaatacaagtattttcatgtaacattttgcttatagaaaatgattggaagcaaatccaggtgaggtggcttgtgcctataatcctagctactcaggatggtgaagtggagtgggaggatagcttgagcccagaagttcgagaccagcctgggcaatatagtgagaccctatctcaaaaaaaaaaaaaaaaagattagaagcaaagtgatacttgtcaatatgggaatatttaaataccttattgrtatttacatgcatgacataaagaatactttaaaacaagataaataaatttctattgtaaaagactagatgaaaacatttttgatcaggaaggggctgtttggctcctagctatacaaccagattcctataaaggtcttccttttaatctatgaattaagctactaacccctaacccatgccatcttcccataagtactctcattctttctctgtcttccaaacccaaaaa

SEQ ID NO: 170042 - DNA, 537 bp, Homo sapiens
cactatctcatcacaaatagcagtattcctgagtatgtattcttcaagaagttcaaatcattccacacacattttctcatgaatcctcccatactatcatgtccaaatttcagggctgtggaaattaagattgagagaggtggagttatttacccccaaacatgtactatgctaattaaggagcttaggcatggagtcccagagtactctttgtactgggtggaagctccattcttccacacaggaccactggaaggtgatctrcatcaagtgccacatgttttaaataactgaggttatattcttaggccaactacacatctattgaatttatttacagtggccacagtgtctcatttggaagatcaatacctcaccaacactgagccacaaaacataaattcttttggataaaagaaagctgcttccctatcactttatggaacttggctcttagcatcatggacctgccatctctcccattggcatgagctttgataatttattttgccaagggcaagatttatacacatgaac

SEQ ID NO: 170043 - DNA, 537 bp, Homo sapiens
cactatctcatcacaaatagcagtattcctgagtatgtattcttcaagaagttcaaatcattccacacacattttctcatgaatcctcccatactatcatgtccaaatttcagggctgtggaaattaagattgagagaggtggagttatttacccccaaacatgtactatgctaattaaggagcttaggcatggagtcccagagtactctttgtactgggtggaagctccattcttccacacaggaccactggaaggtgatctacatcaagtgccacatgttttaaataactgaggttatattcttaggccaactacacatctattgaatttatttacagtggccacagtgtctcatttggaagatcaatacctcaccaacactgagccayaaaacataaattcttttggataaaagaaagctgcttccctatcactttatggaacttggctcttagcatcatggacctgccatctctcccattggcatgagctttgataatttattttgccaagggcaagatttatacacatgaac

SEQ ID NO: 170044 - DNA, 565 bp, Homo sapiens
aaagagctgtgaattagacaatacctaagggctattctggttattaaataaaagtattcattaaaagatctatatttgtctaatgcattagagtttcagagttttcaattgctctctgtatacattacaaggaaattttttgcaacagtccgaagaagaatgtcccaaagatgtaatatcggagtgtgtgcttacttcttgatagctgcacatccttgctgggactgaatgtcaaccagaggtgggagatgaactctgccatggaacatctcattcactcattcattcaccacatgttattcaatgtctagtatgtgctagacactaagctaaatggagaagaggctctgatctcagtgtctacattcaaatgggggatgaggaattgtcggtaacggtgcaarcagaacaactatttcagatagtgacagagtgctgtgaagacaataaagcaggtgaatataagaaatgattgtgaagaaaatgactgtggaggttatgtcatgtcagggggtcagggcacacttctatcagagaagctttcatcagttaagatgtgaatgta

SEQ ID NO: 170045 - DNA, 565 bp, Homo sapiens
aaagagctgtgaattagacaatacctaagggctattctggttattaaataaaagtattcattaaaagatctatatttgtctaatgcattagagtttcagagttttcaattgctctctgtatacattacaaggaaattttttgcaacagtccgaagaagaatgtcccaaagatgtaatatcggagtgtgtgcttacttcttgatagctgcacatccttgctgggactgaatgtcaaccagaggtgggagatgaactctgccatggaacatctcattcactcattcattcaccacatgttattcaatgtctagtatgtgctagacactaagctaaatggagaagaggctctgatctcagtgtctacattcaaatgggggatgaggaattgtcggtaacggtgcaaacagaacaactatttcagatagtgacagagtgctrtgaagacaataaagcaggtgaatataagaaatgattgtgaagaaaatgactgtggaggttatgtcatgtcagggggtcagggcacacttctatcagagaagctttcatcagttaagatgtgaatgta

SEQ ID NO: 170046 - DNA, 514 bp, Homo sapiens
ctgtttgttacctgtttcatgtttgtggttcaatttctatttttgctttcatctgtgttctattttgatatagtcattagagataacttgaacatggagagtaagtagcctagcaaaaatgtgaagaatcttgacactgaagtcaaatagaaaaactgaatttgagctttgtgacttaatacagttacatagtacgtctccaacttagaaatcagttattttctaaaagtttcctagtgaattagttgtttgaacattgtagttagatttttaaaacaatttctaaagtctaattaccatataatatagtttgagagttyatatgttatgagaaaaaggcaattgctatggtctgaatgtttgtgtcctcaccaaattcatatgttaaaatcctaaccctcaaggggatggtattaaaaggtggttactttgggagataattaggtcatggggtcagagccctcaggaatgagattagtgctcttataaaacccgctcaagagagacccctcac

SEQ ID NO: 170047 - DNA, 429 bp, Homo sapiens
acttttttaaaattatatttaaattacatttgaaaacatgactgtgtttttattagcattattcttaatattttctgctcaaatcagggccatttctgaaatatgtaggaaaaaaaacaggaaaaggaatagaaatttyagtcaggcaattggagaagagttggaagtgagaaagaaaggtgaaagatgattaaaaatatttgtcaattttcctcaggtgaaatcaacaaagttttaagtgatgaaagtcagagggaaaagcagagcatcttcaatatcttagctgagaagagaggaggtgttgagagaaagatactggattacagttcacagtacagccatggttgatatcattggcctaggatgagctgctatgtctcaaaagagtgatgaggataatttagaagccaacagaaatgactacatatt

SEQ ID NO: 170048 - DNA, 183 bp, Homo sapiens
agcagacagcatcaggtttcagcatttttttttctctttttttaagacagggtctcactctgtcaccgaggctggagtgcagtggtgcgatcatagctcattgcagcctcgacctcttgggctcaagcawccgtccccttgcagagctttcagcttgggatcaggtttggaaaactagaattc

SEQ ID NO: 170049 - DNA, 405 bp, Homo sapiens
gaattccgtggaagccacgccacctgctcagagtggtcctgggtgcgactgctgcactcattttgtagatgaggaagctgaagcatgaagaggctgagacacctgcccacrtcttagctgtcatctggtcatagtccccatggttaaaggggactgagcccaccccacactccaagaaggagagtgcccacgcctggccaacctgagtggcacatgcctgatggcagtgatgacagtgacaatgtctgcagctctgggaaggggacaggctcctgcctgtggcattgaatcccactggatgtggactgggggccggacacggagggagacaacacagcagaaagcgaggcctaaagagagagacccttcccagcgacatggatgagggcctggcttaggttacac

SEQ ID NO: 170050 - DNA, 577 bp, Homo sapiens
atgtgtggtacccacttgaggccattgtgctctctgcttccctgcattgtatttctgctggatgtaagttcctttcataagggaaatgatcagatcctggtgcctggaggagaattcaaatagcagagttgggatgtggcgccccaagcccttttgcaggctctctaaggctgagatcctggctcaatacactgtaggaaaayaacctcttttctccaccccgggtatataatgcccaggctctcttttaagttgagttctctccttttggttgagccctccaacttcatatgttttgtaaaggcttaaaggatattgtccttctgatggtacacttttggttttattttttatccggtctgggtaccttgtttaaaaatttgttgagttgggttttttccttgtttctaaaaaacttctgagggtaaccatctaatggtggacattggttgaccaataagagttactagggtgattgctaccagttcatgagcactttggtctccaaagatcaagactcctgtgagaagttaaattggtaatggataggcaagattaccactatagcccctgtcag

SEQ ID NO: 170051 - DNA, 577 bp, Homo sapiens
atgtgtggtacccacttgaggccattgtgctctctgcttccctgcattgtatttctgctggatgtaagttcctttcataagggaaatgatcagatcctggtgcctggaggagaattcaaatagcagagttgggatgtggcgccccaagcccttttgcaggctctctaaggctgagatcctggctcaatacactgtaggaaaacaacctcttttctccaccccgggtatataatgcccaggctctcttttaagttgagttctctccttttggttgagccctccaacttcatatgttttgtaaaggcttaaaggatattgtccttctgatggtacacttttggttttattttttatcyggtctgggtaccttgtttaaaaatttgttgagttgggttttttccttgtttctaaaaaacttctgagggtaaccatctaatggtggacattggttgaccaataagagttactagggtgattgctaccagttcatgagcactttggtctccaaagatcaagactcctgtgagaagttaaattggtaatggataggcaagattaccactatagcccctgtcag

SEQ ID NO: 170052 - DNA, 396 bp, Homo sapiens
ctacatttatgccctaggctcagatcatatatattatctattaaatatatcaatattggataaaacaaaataatgttaaatgaatgtttcaataaacaacattattaaaaaatattagcattttagtaattttcaattttagtttcctcaaggaaagtgagctgcttaggtttcatttatttacttaactttttttattttttgaagatagaaaaataatacaacaatgattttcttgaaaacttgctggaaccatgattcccagttgttattcttgacaaagagtaaattattataaatgagtttgacttaaaataacayaattttttttaatatccttattagaatttgaagacattttatatataaagcagcgggaaaattaactgctcttct

SEQ ID NO: 170053 - DNA, 574 bp, Homo sapiens
gagttcttttctaaaccctgctttgcttcaaaactgcctcaaatcacatgttttttctctctcttcgtttttctcttcgtattttgttattaaaaaaaactctttttaaataratgtgtgtttctaccttgcttgcattctatattctttatctgtaaattttacaatttatagaaaacatcattttcccccctcagcttctcggtttaatcaacagagcaattttacatgtatgtttttatcatttatactatttttcttgtagtttttcagaaacacttattattctcttatggtcatgtaaatatgagttaaccagaataacctaaaaagcaattgtactttttctaggatttattttaaatgcacaattatagattacacaaaatatggttaacaattaaagaactgatatttgtggatggttggttgagtagggcttgttatattacaatctctaaatatgtggacaggcacagtgttataaattagtcagtaaatacttagttttctatggatttctagattttaggcaaaaataaatggtttgcctaaaccagattagaagttatga

SEQ ID NO: 170054 - DNA, 574 bp, Homo sapiens
gagttcttttctaaaccctgctttgcttcaaaactgcctcaaatcacatgttttttctctctcttcgtttttctcttcgtattttgttattaaaaaaaactctttttaaatagatgtgtgtttctaccttgcttgcattctatattctttatctgtaaattttacaatttatagaaaayatcattttcccccctcagcttctcggtttaatcaacagagcaattttacatgtatgtttttatcatttatactatttttcttgtagtttttcagaaacacttattattctcttatggtcatgtaaatatgagttaaccagaataacctaaaaagcaattgtactttttctaggatttattttaaatgcacaattatagattacacaaaatatggttaacaattaaagaactgatatttgtggatggttggttgagtagggcttgttatattacaatctctaaatatgtggacaggcacagtgttataaattagtcagtaaatacttagttttctatggatttctagattttaggcaaaaataaatggtttgcctaaaccagattagaagttatga

SEQ ID NO: 170055 - DNA, 540 bp, Homo sapiens
gaaaatcaaggaggactgataagagttaaaaacagtttataacttcaggaaagtcaacattcattttaaaaatagtttaagaattaagagggggatctcctctttcagttttggagcccccatctgtctctgtacgggggagcttcttccttctgtcttcttccttccttcttgcctattaaactctctgctccttaaaaccaaaataaataaataaataaacaaacaccttattgtcctcaagtcatccaaaaaaaaataaaaaaggaattaagagaccaggatacttaaaatggcttgtatttgaagctaccttcccttcctaggrttctgtttattcttagaaaaagaaatgtgaaaaaaacaggaaatggatctggtcatgctcaagagtataaggactgggcattttataaatccaggtaaaagcagtgcgagagcactgcctgttgctctaatatgtgcacagcattacatgaccaaccccttcatagttaccacctctgaaaactcaactcccatcgcatttaatgttgacaa

SEQ ID NO: 170056 - DNA, 540 bp, Homo sapiens
gaaaatcaaggaggactgataagagttaaaaacagtttataacttcaggaaagtcaacattcattttaaaaatagtttaagaattaagagggggatctcctctttcagttttggagcccccatctgtctctgtacgggggagcttcttccttctgtcttcttccttccttcttgcctattaaactctctgctccttaaaaccaaaataaataaataaataaacaaacaccttattgtcctcaagtcatccaaaaaaaaataaaaaaggaattaagagaccaggatacttaaaatggcttgtatttgaagctaccttcccttcctagggttctgtttattcttagaaaaagaaatgtgaaaaaaacaggaaatggatctggtcatgctcaagagtataaggactgggcattttataaatccaggtaaaagcagtgcgagagcactgcctgttgctctamtatgtgcacagcattacatgaccaaccccttcatagttaccacctctgaaaactcaactcccatcgcatttaatgttgacaa

SEQ ID NO: 170057 - DNA, 181 bp, Homo sapiens
cacatgggccacctgagaagccccaagaataggctgcaggctgtacawgagaacacagagggaactgatgcaggcagggcctgtactgtgaaggtccttttacaccatggaacatttgcactttatcctagagccaacacacacatgcgcatacatttttacataaatcttaacagggtca

SEQ ID NO: 170058 - DNA, 380 bp, Homo sapiens
tttcttaggtggaactaaattatctcttccattaatttctccccattgtttaatattctgttctttgaagcaacacagatgaatctccctttcccatgtggcttcatgtattttgggcctcttccttcctccaccactaagcttcctcttccctcggtgtctctagctgcttcttgggcartatggtttgaggtaaatctccatccccaagcatcataattgctggttatttccctctatttgatatctagtgtgtccgttcctcaaacactgcatgttcatagttagacatactattccagatatgacctaaacatgtcagagcatgtggactgaccagatacttcttttcatgttgtctgtgtctttctgtgtagctc

SEQ ID NO: 170059 - DNA, 445 bp, Homo sapiens
atgttaacgaaagtaggttgatcacaatttttaaaatgaagcaataccaaagacagtgaatccactgatgacagggtcaaaatctacccaatgactacattataaaaacaggccaaatgtaacaagataaggcatttttaaagtgataaatrtacatttatatgtgtaggttcagacaatcaactctcatgaataaagatctatgctcaagcagtcccctgcaccactatttctaacagcatgcagacaacctaaacatccatccgtaaggggacagctaaataaattaaggggatagagtatactttgtagcaacaaaaagaaaaactacagttgactgaaataataatcggaagaatatacacgataaatcttgggtgataaaagtagtttaagcattgtatacagagactgttcccattcctgttttggttttgaaagaatt

SEQ ID NO: 170060 - DNA, 451 bp, Homo sapiens
gaattctgtcttgtgttaatccatgattttcaagatgttaacgaaagtaggttgatcacaatttttaaaatgaagcaataccaaagacagtgaatccactgatgacagggtcaaaatctacccaatgactacattataaaaacaggccaaatgtaacaagataaggcatttttaaagtgataaatgtacatttayatgtgtaggttcagacaatcaactctcatgaataaagatctatgctcaagcagtcccctgcaccactatttctaacagcatgcagacaacctaaacatccatccgtaaggggacagctaaataaattaaggggatagagtatactttgtagcaacaaaaagaaaaactacagttgactgaaataataatcggaagaatatacacgataaatcttgggtgataaaagtagtttaagcattgtatacagagactgttc

SEQ ID NO: 170061 - DNA, 609 bp, Homo sapiens
gcctggaatggggacctcatgactctgactggtgccctatcctgctgcggctcagctgttatccaagatgcaagacaaagtcctccccactctaccctctcctctcttcagttggacagaaggaaagggtctcttttggagccacaagctgtgcagcctgaggttaggggaggggtgatgccaacactccctgggctgttccagctggtgtctaagtatgtcatgtgtccctcctctccctgccgccaagcccacggtctctgggcctagctcatcactaggactcacctaagagatgcagtccttctggcctcgactgccctccaagtttacatggagacacagagcactgtatcccttggtggtgaggtttgcggggactcaagttcagaccactggataggcgattggccagggctggtttaaatgctccctccgtggttgggcgtcagctgagttggtctggtgttccttttgctctaacagaacagcacttagttcaatgcctcaccattactgtgctctccctcctcagctcccagagaagctcttagcactaggcttgytgctgctgcgtggggtgtggaagggatggtgtcggtgattcag

SEQ ID NO: 170062 - DNA, 629 bp, Homo sapiens
tttacatttactaacattcaccagttttaagtgtacaatttgaggagttttgacaaatgaagagtcatgtaaccaccacttcagtcaagacatagaactgtcccgtcaccccaaacagttccttcatgactgtgcagccaatccctgaaactgcctgcctcycccaggaaccattgatagggtttctgtcactatagctgtcttttctggaatttcatacaaatgtaaacttaatatgtagtcttacatactcagtgtctttaccaaaaccctttgagatttatctatgtcattatgtgtcttggtagtttgttcctttttctctattagtagttattccattctatggacatttaaaggatatttatactatttccagtttttagctttcacaaatatagctggggtttataacccagaaatgtatatatctggggatatatacatttctcctgggtaaatacctagagggggattgctgggtcatacagcaaatatgcatttaaattttttgtcacaaaacaggcaatctggaatttttattggaatagtgctgaatgtatatcaatttttgaaaaattggtatctaaataatatcaagtgaatatggtatgtcaataatatccaga

SEQ ID NO: 170063 - DNA, 593 bp, Homo sapiens
gtgtttcaccaacactcatcttacaatacrttacaggttaaatgtgattttatataaataactttacaactatattttctaagacttctttcaaagcttcttgatttggcaagtaacagaatgggttacagtagtttacatacaacaggtgtcccagtaagacattgtgatattgatgaacaaggtataggaacacctctgctttgggaaatattactctaaaacaggagtgtgctaccattagctatgaaaataattttaaaggcctaaactcctttttatcaagtctggctactgttatagcacccttaccctaggctatgacaactatatttacttgactatgaattgttacctccttactgcacaatttctggtacagagagcattcagtgtttgctgaacaaacaaattattgaagcagaataccctattctcccaagtatcctaggtgtctgagacattattaccctgtgctattgtcaaactcacctaataacaattctcaaagtcctacatcataatccatttatgcttcactattaaaaaaaagaattacggtgtatacgtttggcacctcaagctgtcatgtc

SEQ ID NO: 170064 - DNA, 550 bp, Homo sapiens
attagacatgactatgaattccaataatttgctggtaggagaataaataaagactttgcaagtttatgcaggttatgaragcaaaggttagctgacagaacagcagcaacatctttattgagcataaacaaatcatttatcgctccttctgctcccctgttacatgtttaaactcagggaaaccacgataaaaccctgcagatagagctaggattattcaccccagcgatcctaaatcacacaaggcttgtatctcacagcttatagaaacagagaaagagagtactcctcttagggcctttcctgttgtaactacggtgacaactggcatgtgtgtgttacttctaagctccagtttcatcgcccagtgctcccttgtggatatttctagaagtcatgatgacccctgttggatgcagagcttaacataatacgtcgcctaatgctgaagtctctggcaaggcaattcacactgctgaatcgaaaaaaaagagtcttatatcttcaaaggcttcacagtctttagcctttatgttaggtccaaataaat

SEQ ID NO: 170065 - DNA, 568 bp, Homo sapiens
aatcccagaagaaaacctaggaaatattctggacatcggccttgggaaataatttattagtaagtcctcaaaaacaactgcagcaaaaacaaaaattgacaagtggtacctaataaaactaaacagcttctgcgaagcaaaagaaactatcagcagagtgaacagacaatgtacagaatgggagmaaatgttcaaaaactatgcatctgaccaatgtctaatatctagaatctgtaaggaacttaaacaatggaagaagcaaaaaagaccattaaaaatgggcaaaagatataaacagacacttctcaaaagaagacatacaagtgtcccacaaacgtatgaaaaaaatgcttatcaacactaatcatcagaggaatgcaaatcaaaaccacaatgagatatcatctcacactagtagggatgactattattgaaaactcaaaaaacaacagatgctggtgaggctgtagggaaaagggaaagattatacattgtcggtggaaatgtaaattagttcagccactgtgtcaaaagcagtttggagatttctgaaagaactgagaactac

SEQ ID NO: 170066 - DNA, 568 bp, Homo sapiens
aatcccagaagaaaacctaggaaatattctggacatcggccttgggaaataatttattagtaagtcctcaaaaacaactgcagcaaaaacaaaaattgacaagtggtacctaataaaactaaacagcttctgcgaagcaaaagaaactatcagcagagtgaacagacaatgtacagaatgggagaaaatgttcaaaaactatgcatctgaccaatgtctaatatctagaatctgtaaggaacttaaacaatggaagaagcaaaaaagaccattaaaaatgggcaaaagatataaacagacacttctcaaaagaagacatacaagtgtcccrcaaacgtatgaaaaaaatgcttatcaacactaatcatcagaggaatgcaaatcaaaaccacaatgagatatcatctcacactagtagggatgactattattgaaaactcaaaaaacaacagatgctggtgaggctgtagggaaaagggaaagattatacattgtcggtggaaatgtaaattagttcagccactgtgtcaaaagcagtttggagatttctgaaagaactgagaactac

SEQ ID NO: 170067 - DNA, 601 bp, Homo sapiens
ctgtggaatactcattaatttatgaaagtttggggagggcctatctgaaacacaatgtgaaaaaattttacaaaaaaaaataaaatgagcaagagtaaagaaaaaaggttttgggtccttaggaacatgtagttatttgctataaattagcatcctttgaaataaagaacccatctgaaaagctgaatatagaagagatattaatattgcatctaagttctggagatgaaattagatgtttaatttcttaaaaatcttttgattttgaaaactttcaaacccagaaaagacttgaaagactagtaccatgaacaggcatatcccattagtcagcctgtttaatgttttgatggtgctctgaaaatgctgctctgtagatatgacmttttctgctttgctgtagacagtgtaattctgattttaacttgagaaagccataagactaagtaattagactactaatgccaatactgaaggaagaaaggctacctatgcctattggcaaataattaatcaggatatatttaagacttgacttaaggtactgtgggggatgacaagatgtttacgggacatacttaaaaatttatagccatttgag

SEQ ID NO: 170068 - DNA, 601 bp, Homo sapiens
ctgtggaatactcattaatttatgaaagtttggggagggcctatctgaaacacaatgtgaaaaaattttacaaaaaaaaataaaatgagcaagagtaaagaaaaaaggttttgggtccttaggaacatgtagttatttgctataaattagcatcctttgaaataaagaacccatctgaaaagctgaatatagaagagatattaatattgcatctaagttctggagatgaaattagatgtttaatttcttaaaaatcttttgattttgaaaactttcaaacccagaaaagacttgaaagactagtaccatgaacaggcatatcccattagtcagcctgtttaatgttttgatggtgctctgaaaatgctgctctgtagatatgacattttctgctttgctgtagacagygtaattctgattttaacttgagaaagccataagactaagtaattagactactaatgccaatactgaaggaagaaaggctacctatgcctattggcaaataattaatcaggatatatttaagacttgacttaaggtactgtgggggatgacaagatgtttacgggacatacttaaaaatttatagccatttgag

SEQ ID NO: 170069 - DNA, 583 bp, Homo sapiens
aggaacatgtagttatttgctataaattagcatcctttgaaataaagaacccatctgaaaagctgaatatagaagagatattaatattgcatctaagttctggagatgaaattagatgtttaatttcttaaaaatcttttgattttgaaaactttcaaacccagaaaagacttgaaagactagtaccatgaacaggcatatcccattagtcagcctgtttaatgttttgatggtgctctgaaaatgctgctctgtagatatgacattttctgctttgctgtagacagtgtaattctgattttaacttgagaaagccataagactaagtaattagactactaatgccaatactgaaggaagaaaggctacctatgcctattggcaaataattaatcaggatatatttaagacttgacttaaggtactgtgggggatgacaagatgtttacgggacatacttaaaaatttatagccatttgagaaaagaagacaccttcccatgaaaaaataatcaktgataaaagaagtaacaaatattgagaggggggaggcagaaagtggccacagagttaatgggatgaga

SEQ ID NO: 170070 - DNA, 621 bp, Homo sapiens
tagggattggttggcatatctgtgatggggtaattaacagatgtctattgatctcttgtctaaaaacttttaagtttagaaggttaccgaaattccttagaagtctgccactttattattatttttaacagctatattgagatacaattcatrtgccttataattcacccatttaaataaagtatttcaattttttttgcatattcagagttgtgccaccgttaccacaataaattttagcacatttttatcactgccaaaagatatcccatagccatcaactttagccatcttgcccaatccccttgctctccccagccttaggcaatcaccaatctactttccatctctgtatgactaatcttgaccttgcatataaatggaatcatacaatatgcagccttttgtgtctggtttctttcccttagaatgatgtttccaaggttcattcatgttgtagcatgttatcagtactctgttcctttttacggctgaacaatagtctactctatggatgtatcacgtattattttctactcatcagtcagtgaactttaggttgtttctacttttgggatattatgaataatgctgctgtaaacatttgtgtacaagtctttc

SEQ ID NO: 170071 - DNA, 621 bp, Homo sapiens
tagggattggttggcatatctgtgatggggtaattaacagatgtctattgatctcttgtctaaaaacttttaagtttagaaggttaccgaaattccttagaagtctgccactttattattatttttaacagctatattgagatacaattcatgtgccttataattcacccatttaaataaagtatttcaattttttttgcatattcagagttgtgccaccgttaccacaataaattttagcacatttttatcactgccaaaagatatcccatagccatcaactttagccatcttgcccaatccccttgctctccccagccttaggcaatcaccaatctactttccrtctctgtatgactaatcttgaccttgcatataaatggaatcatacaatatgcagccttttgtgtctggtttctttcccttagaatgatgtttccaaggttcattcatgttgtagcatgttatcagtactctgttcctttttacggctgaacaatagtctactctatggatgtatcacgtattattttctactcatcagtcagtgaactttaggttgtttctacttttgggatattatgaataatgctgctgtaaacatttgtgtacaagtctttc

SEQ ID NO: 170072 - DNA, 609 bp, Homo sapiens
tccttcttggtctaacagtatctggaaaactcgagaaggctttttcctaaaccatcagtaggtcaagcaagaaagttagcagagctgattctgctgatgtaccttccataactgacagtattcatctttgaaatgatcaagccctggtattttgactgaaaatgtgaagtcttttataaggaaatgaaaaaaatctactaattttttataaacaccctaaattctgagtttttgcatacatgccacttgatcttcataattatatcagtaataccactgcataaaaacatcagtcagaggaaatctaatttaatgtgaaaatagctattctgaggagaggtgggaacactgaagaggttctggagttacacagaccttcgctaagtaccatctctgtcacttactagcttcatcatcctgaatgacttaacttctctgagcccaaccctttcagttaatgtgcacaaatcacctaaagtacctagtacatagtaggtgctcaatgaatgttagctattcctacccttttgacraagaaaccattagctagtaccaaaatgataatggagtcttccctttccactcatcctaaagcaggtattcatgtca

SEQ ID NO: 170073 - DNA, 536 bp, Homo sapiens
aataaatcttcacacataaggtcaactgattttcaataagggtactaaaacaattcaatgtcacatccataacctttttgacaaatggtgttggggcaactggaatattcacatgcaaaagaatgaagcttagcccctacctcacaccgtgtaaaattaattaactcaacagagatcataggcataaatttgagagtcaaaactattaaactcctaagggaaaaacayaggagtagtaggttttttttttttttttttgagacagagtatccctctgctgcccaggctggagtgcagtggcatgatttcagctcactacaacctctgcctcccaggttcaagcgattctccctgcctcagcctcctgagtagctaggattacaggtgcccgccaccatgcctggctaatttttgtatttttagtagagacgggattttgccatgttggccatgctggtctctaactcctaacctcaggtgatccacctgcctcggcttcccaaagtgctcgattacaggcatgagccactgcacca

SEQ ID NO: 170074 - DNA, 562 bp, Homo sapiens
ctggaattcacttttttttttttttttttccgagacggagtctggctctgtcacccaggctggagtgcagtggggcgatctcggctcactgcaagctccgcctcccgggttcacaccattctcctgcctcagcctcccgagtagttaggactacaggtscctgccaccatgcctggctaatttatgtatttttagtagagacggggtttcaccgtgttagccaggatggtctcgatctcctgaccttgtgatccacccgcctcggcctcccaaagtgctgggattacaggcgtgagccaccgcgcctggcctctggaattcacttttaaaccattgcattatactgtggctttagagaacttgtttccagtattttatcataaagtattttccaatgataatatgctttgaaatcgtgattttaataagtgtatgatattctagcaaatgaatgaactgttatgtatttaaacattccctttttttagacatgaaggtcattatcaagtgtttattacaaatattgatgaatttaacattttcatataaatcaaactgccta

SEQ ID NO: 170075 - DNA, 562 bp, Homo sapiens
ctggaattcacttttttttttttttttttccgagacggagtctggctctgtcacccaggctggagtgcagtggggcgatctcggctcactgcaagctccgcctcccgggttcacaccattctcctgcctcagcctcccgagtagttaggactacaggtccctgccaccatgccyggctaatttatgtatttttagtagagacggggtttcaccgtgttagccaggatggtctcgatctcctgaccttgtgatccacccgcctcggcctcccaaagtgctgggattacaggcgtgagccaccgcgcctggcctctggaattcacttttaaaccattgcattatactgtggctttagagaacttgtttccagtattttatcataaagtattttccaatgataatatgctttgaaatcgtgattttaataagtgtatgatattctagcaaatgaatgaactgttatgtatttaaacattccctttttttagacatgaaggtcattatcaagtgtttattacaaatattgatgaatttaacattttcatataaatcaaactgccta

SEQ ID NO: 170076 - DNA, 584 bp, Homo sapiens
gctttgaaatcgtgattttaataagtgtatgatattctagcaaatgaatgaactgttatgtatttaaacattccctttttttagacatgaaggtcattatcaagtrtttattacaaatattgatgaatttaacattttcatataaatcaaactgcctaatattttctgtgaaggtaaactctaagatgcagaattactaggtcaaagttatgaatacttgtgaaccatcttgattctctacttgttttctggaaggattttgcaatatgtgtttctactcagagaaaatgagaatgtccatctcatagcaacattatcagctctgaatagtgtcactacttaaaacacttgtaaattaaattagataggtgaaagaagggatatcatatttatttcacattgtttggctaccaataacacttaaaaatatttttatatatgtatcagccattggaattttttattaattcctgcctcagagaaagcaacagagctaatggttaagaacacagactctctttttttgtcagaggctctagagcaagatgaatgcttccagcttgtaggaggtggaacatggttat

SEQ ID NO: 170077 - DNA, 507 bp, Homo sapiens
aacattttcatataaatcaaactgcctaatattttctgtgaaggtaaactctaagatgcagaattactaggtcaaagttatgaatacttgtgaaccatcttgattctctacttgttttctggaaggattttgcaatatgtgtttctactcagagaaaatgagaatgtccatctcatagcaacattatcrgctctgaatagtgtcactacttaaaacacttgtaaattaaattagataggtgaaagaagggatatcatatttatttcacattgtttggctaccaataacacttaaaaatatttttatatatgtatcagccattggaattttttattaattcctgcctcagagaaagcaacagagctaatggttaagaacacagactctctttttttgtcagaggctctagagcaagatgaatgcttccagcttgtaggaggtggaacatggttatattagacatattgttctcaaaggctgacatggaaagtttcagccattcctaga

SEQ ID NO: 170078 - DNA, 658 bp, Homo sapiens
ctaatactgaaaaactacaaatattatcagtatgaagacaaaaagttcaaactaataaaaaataaaaataactatggtaatttgttaagaaataggctatgtaaaattacaaattgtgatattaaaatttcctaacgtagggggagaataaacaaagtgtacagctttttgcttgtttattttctttcctttgagattaaagttaagttgttatcagtttatacaartatcaatttatacaaggaaaagtctgtacaaatacaaaagcttgttataattgtagaacacattttgtaagtctcactgtaaccacaaagcaaaacctagagtgtatgcagtaaacataaaaagcaaagaataaaaacatactactagagaaaaattagttaaccacaaatgaagactaagaaaaaaagaaaaagaggatctgtaaagcaacaagaaaacaagtaacaaaatggcagtagtaagcccttaactatcaataattaccataactgtaaattgattaagatcttcaattaaaagattgaatggaaaaaaaaaacaagacctaactataagctacctgcaaaaaattcactcattctgtaaacagactgaaagtgaaaagcaagatatacaaaaatccttgaaaattgaaataaaaaagaactgt

SEQ ID NO: 170079 - DNA, 539 bp, Homo sapiens
tctactgcagcattcttcacagtagccaagatacagaatcaagctcagcgtctatcaacaaatgaatgcctaaagaaaatgtggtatatttacactatggaatactattcaggcataaaatgaaaacttacagagatggctctgatttgtgacataatgagtttaaataagattagaaagcatacactgctattcgatttctactattaatttgccatacagtcctggaaaattcaactaatctctatgagtcttagttttctgtcttataaatagctgcagcattacttttttgaacytaatggaataaatgcaataaataatgtaaaagtaccttttaaaacagcctattttctaattttaataacaataattgtataattgctcataactatgaataatattatttgatcttttgcactgggtttcctttttcttccccctctttctcagttatgtacctagcacttaatcatcaaaaaagcaagtaagctccaagtggagctttggagtttctcagaatgcttctgtgtagtttt

SEQ ID NO: 170080 - DNA, 560 bp, Homo sapiens
tcaactactcaggaaacagaggtaggagaattgcattagcctgggagtttgaggctgcaatgagctatgattgtggcaccacattccagtgtgggcaacagagtgagaccctctttctaaaaaaatcaaaataaaaaatgacaacaattttctgaacagttaggatgagaccgtctttatattgtgatctttcaattttcagcccgttaaaagacaaaatactgaggctcagaaagattagtaaatgtagaaaaaagcacagcctgcaagtgacagacactatttaaatgacagttatcttaactccaaaatttatactatttccactccatcatacatcatacttccttaacctccattcttgtraatgaatagaattaaaaaacataaaaatgatgttatacaatataagatttatagttggtattaatgcaatcacttttaatctgtggaaaaatcattgtatcttataaagataaaataaaatttgtcaatcttgagtacacaactatgatagataataaattatacacacaaatattgtttcattaccaaaagca

SEQ ID NO: 170081 - DNA, 432 bp, Homo sapiens
atccaaagcaatcaacagatgtaatgcaattcctatcaaaataccaatgacattttttactaaaatagaaaaaaaaaaccctaaaatttatacagaactacaaaagactytaatggctaaagaaatcttgaaaaaaaaaaaaaagaaaaaaaagctgaaggcataactttaaaatgtattacagagctatagaaatcaaaacagtgtaatattgttataaaatcagacggactaatgaaaaaggatagagactacagaaacaaatccacacatttacagccattttattttcaagcaaggtgcccaaaaagcacattacagaaagggcagacacagcaataaatgatcgtgagaaaattggatatttgcatgccgaagaatgaaagtagagtgttctctctctctgaattgaataaaaacttaaaagtaagt

SEQ ID NO: 170082 - DNA, 432 bp, Homo sapiens
atccaaagcaatcaacagatgtaatgcaattcctatcaaaataccaatgacattttttactaaaatagaaaaaaaaaaccctaaaatttatacagaactacaaaagactctaatggctaaagaaatcttgaaaaaaaaaaaaaagaaaaaaaagctgaaggcataactttaaaatgtattayagagctatagaaatcaaaacagtgtaatattgttataaaatcagacggactaatgaaaaaggatagagactacagaaacaaatccacacatttacagccattttattttcaagcaaggtgcccaaaaagcacattacagaaagggcagacacagcaataaatgatcgtgagaaaattggatatttgcatgccgaagaatgaaagtagagtgttctctctctctgaattgaataaaaacttaaaagtaagt

SEQ ID NO: 170083 - DNA, 608 bp, Homo sapiens
ctgtaataacagttacaataatttctgtgagtataatttttttttattttaaaatatgcttcattctgctgatttaagtggtctaagaaattataaccttgcagtcaatagattaatacgaagacagggatggtccaayagacattattgcaataagtctttcattacagaacttggatcagaatgtctaaggatttgaatcgccccagggatccaagagttgtgattgaaattggatccacatctattccaaactatgtaatattcccaagcatcctcaaacccttcttgaggaaaagaaaaatttaaacaatatgagaaaatctggcttatctatacaagaaaactgttagactgatttcagccttctcatctacaacactatattctgaaatttaattaaatagtagttttaaatctgaaaagaaaagaaaaacatactaagcttaaaagtaagagaggctatgagacatattggctattaaaacatttggatatctatatatatcctattgcaaaaatatttaaattatttcaacaaaatggaaaaaagcaattgaaggaagaggacaatataggatataagaaattactttaggtgattatta

SEQ ID NO: 170084 - DNA, 385 bp, Homo sapiens
gctagggttgttgcattaggtcagaaaaaaaaaaggaagaactagatacaacttattgaaaatggatggttattgaaaatggatggtagaggaagggaagaaacaaacacttaatattagattctgaactttgacaattcagaaaacagagctgtaatatttttctccattttattgtccatagagactgccttggaatttgcaaatagtaggctcctcagttggaagtattaagacgtgctctctcatataggtaatttggttaaaaatctcaaaataartaaaacattgaaatgaagcctcacaaaagctccatttaacatgtaagcacattgagaaataaagaaaacagtaacttttgtgagttatgtagctaacaaatggc

SEQ ID NO: 170085 - DNA, 385 bp, Homo sapiens
gctagggttgttgcattaggtcagaaaaaaaaaaggaagaactagatacaacttattgaaaatggatggttattgaaaatggatggtagaggaagggaagaaacaaacacttaatattagattctgaactttgacaattcagaaaacagagctgtaatatttttctccattttattgtccatagagactgccttggaatttgcaaatagtaggctcctcagttggaagtattaagacgtgctctctcatataggtaatttggttaaaaatctcaaaataagtaaaacattgaaaygaagcctcacaaaagctccatttaacatgtaagcacattgagaaataaagaaaacagtaacttttgtgagttatgtagctaacaaatggc

SEQ ID NO: 170086 - DNA, 659 bp, Homo sapiens
gtattttgaaggtctttgcctttctctttgctcgctttcagtttcatctgcttcgtagaaagattctctctaatctgggtactctcagtatactgtgtattttgctgatgagacactgctttaagaacattctggtacctggtgaaagagagtagcagctaacttaaatattataagaaaagttttttcattctaaagactgaaattttctctcttttcctacaacagttagggattttaaacaatcttattcctaccttatccaggttatagtagaattrgaatttataaaaagggcatataaaataggactcatagatgaaaataatattgctatcataccatagacatcaaagtccttaatgattatttaattattttgtatcatagggaaatattaatattttaatcaaatgttaacaggaaaaaaagaaaaaggtcatactcagatatataaactcttcctcaccaactgaacaattgaatgtcccaaattatacaacaaaacatgatggaaaaatcagtaggcatattcagataatagactaaccaaaggaaaaaaaccaattaactactcactgggattctgtaaataaataaaaataagtggagcacactttatctaaaagataagactttttaatgtggtaccaaaaaga

SEQ ID NO: 170087 - DNA, 659 bp, Homo sapiens
gtattttgaaggtctttgcctttctctttgctcgctttcagtttcatctgcttcgtagaaagattctctctaatctgggtactctcagtatactgtgtattttgctgatgagacactgctttaagaacattctggtacctggtgaaagagagtagcagctaacttaaatattataagaaaagttttttcattctaaagactgaaattttctctcttttcctacaacagttagggattttaaacaatcttattcctaccttatccaggttatagtagaattagaatttataaaaagggcatataaaataggactcatagatgaaaataatattgctatcataccatagacatcaaagtccttaatgattatttaattattttgtatcatagggaaatattaatattttaatcaaatgttaacaggaaaaaaagaaaaaggtcatactcagatatataaactcttcctcaccaactkaacaattgaatgtcccaaattatacaacaaaacatgatggaaaaatcagtaggcatattcagataatagactaaccaaaggaaaaaaaccaattaactactcactgggattctgtaaataaataaaaataagtggagcacactttatctaaaagataagactttttaatgtggtaccaaaaaga

SEQ ID NO: 170088 - DNA, 575 bp, Homo sapiens
agaaaagggtttttcaggttttggagtttctccatggaggtgaaacagaactgcattgtcaaagtgatagaaggtaagccagtgtggctggcatgaattgaatgagagtgaagtgttgaaagtaaagttagaaatgtaagtgtcaccacgacatttaggcccctagaagcaattataaggtaacttcaatgtctagtggaagttaagaattacctttaaacagacttcaattaagccctcagggaagaccaccatctgttctccagggtgtgtcaagatgaagaatatttaaattcattttttccagttacaccccacacacctcaacacacgtacacctatacttgcattcatagtgtagttctatatatatatatatakatagatagatagatagatagatagatagatatagtgtgtgtatattgagagtacactatgaatcttggactatacacaaatgagttgttctgaaaactctatagatatcagtatggcttatgggctattgccacatccagccacaaacactgagctatgcatgtgagagagcataagtcaaggttttttcacaa

SEQ ID NO: 170089 - DNA, 581 bp, Homo sapiens
agggtttttcaggttttggagtttctccatggaggtgaaacagaactgcattgtcaaagtgatagaaggtaagccagtgtggctggcatgaattgaatgagagtgaagtgttgaaagtaaagttagaaatgtaagtgtcaccacgacatttaggcccctagaagcaattataaggtaacttcaatgtctagtggaagttaagaattacctttaaacagacttcaattaagccctcagggaagaccaccatctgttctccagggtgtgtcaagatgaagaatatttaaattcattttttccagttacaccccacacacctcaacacacgtacacctatacttgcattcatagtgtagttctatatatatatatatatatagatagatagatagatagatagatakatatagtgtgtgtatattgagagtacactatgaatcttggactatacacaaatgagttgttctgaaaactctatagatatcagtatggcttatgggctattgccacatccagccacaaacactgagctatgcatgtgagagagcataagtcaaggttttttcacaatgtactgctag

SEQ ID NO: 170090 - DNA, 364 bp, Homo sapiens
ttaattttaattatcttacattgggctccaaataactttatggtggtcatcttggattttgctactgatcagcgaaattgcaggccatttaagcaatattagtacacagttttaatgatatgacaaattaaattgaacaacattttagtctgaactaattacattatattaaaaactataggascagtttcactttctgtagacctactggggaaaataatttaattttaaatgtatgaagtcataaaaaatcaatatcttactatatgattgaactaattgaccaatgatttctgtttctaactgtgttcatgcattgggtgattggatttggggatctatctggcatagagataacatcatt

SEQ ID NO: 170091 - DNA, 364 bp, Homo sapiens
ttaattttaattatcttacattgggctccaaataactttatggtggtcatcttggattttgctactgatcagcgaaattgcaggccatttaagcaatattagtacacagttttaatgatatgacaaattaaattgaacaacattttagtctgaactaattacattatattaaaaactataggaccartttcactttctgtagacctactggggaaaataatttaattttaaatgtatgaagtcataaaaaatcaatatcttactatatgattgaactaattgaccaatgatttctgtttctaactgtgttcatgcattgggtgattggatttggggatctatctggcatagagataacatcatt

SEQ ID NO: 170092 - DNA, 548 bp, Homo sapiens
tccttctttaaataatgcatttactaggcactgtgttgctgctctagaggaccagtagtatagcacacagaagccaatacagctcagcaacctctccctccagagaaagagaagagtgaatcatgcatccaatgttctggctattcaagattgttgcctgagggacggctttctctctagtttgactcagaataattatgaaacctggcatattctagttgcctragggcctctgcgaacaaaaaaaatagaactgggaggtggtctgttgcctcatggaatccatgatgcagaatatagataacagagagaggaagagattacaagcttctgaaaaaaaagcaactggaacattcctataaatagaaatctacataaacaagtctagtgaagacgcattaaaaaaaaaaaagactagagaagccacatgaatttgtagccagggtgactggtgaaagtctttctctgtccaaagctaattggtaaagattgggtaaattggctctttttttcaaatgcatgcataacttataaagttgtaagtaaca

SEQ ID NO: 170093 - DNA, 571 bp, Homo sapiens
tgtaagaaactgacaaactgtcttccaaaatggctatgccatttcacactcccacaggaaatggatgagggtttgtgttactccatatatttgccagcatttggtgttgtcagtgttctggcttttggcacttttaatgggtgtatatgatatagaagttaagaagaaattatttaggaagatagtaagggcataggagtcctcagtaaggcttttccttttaatgaaaagcagcccaaaatcrttttctaacaaagagcagcctgtaaagttgagctgcagacatagacaagcaagctgggagcttttacgggtgaatgctcacagatactaaaaatcagacatgttaagatggtggctccatcttcctttccctgccagccatgtgtactatcaaaagcagacaagatagcactgatcaactacaaaacccatttgcataagaagattagggtggggcagacagctttccctacatgctatgtaaacatcaggccttatcaaaggaactgtgagccgtatggaaatcagatactgcctccccaaactagactataaaatttggaaaatt

SEQ ID NO: 170094 - DNA, 571 bp, Homo sapiens
tgtaagaaactgacaaactgtcttccaaaatggctatgccatttcacactcccacaggaaatggatgagggtttgtgttactccatatatttgccagcatttggtgttgtcagtgttctggcttttggcacttttaatgggtgtatatgatatagaagttaagaagaaattatttaggaagatagtaagggcataggagtcctcagtaaggcttttccttttaatgaaaagcagcccaaaatcgttttctaacaaagagcagcctgtaaagytgagctgcagacatagacaagcaagctgggagcttttacgggtgaatgctcacagatactaaaaatcagacatgttaagatggtggctccatcttcctttccctgccagccatgtgtactatcaaaagcagacaagatagcactgatcaactacaaaacccatttgcataagaagattagggtggggcagacagctttccctacatgctatgtaaacatcaggccttatcaaaggaactgtgagccgtatggaaatcagatactgcctccccaaactagactataaaatttggaaaatt

SEQ ID NO: 170095 - DNA, 593 bp, Homo sapiens
tggaacttagaaaatgttactaaaatgatgattaaattggagagagagagagataaaagaaaaataaggatatccatcatccattcactgactttgggagtataacttcatacatctaagggagtcaaggatgtgtataaatttcctaaagtctcattactaagtacatatgtgagtaatgtccacgcaggtataccagaatctatgtacaaaatgtttatagaagtattgtacataatagccacaaatgggaacaacccttgtctctatcaaaagagaaagaataaataatactagaaaactggaatactacataagaatgaaaatgaacataatgcagtcttcaacttggattatgctaaaaacataaggttgagtaaaagtgttaagtcccagaaaaatacagatgactcayagtttctaatttatacattttttctgttttttctaacatgtaataaatatctcttttacataatttaaaatatgatgatagtaaactcacaaatcagctttccctttcttttgctctccttggcacagtatattattttacttttaataatgtcgggagaatgcatgtgtattaagaa

SEQ ID NO: 170096 - DNA, 518 bp, Homo sapiens
aataatgatgtatatttcaaagatgtctcaatcacatttccccttttattrtaactatcataatctaagtgtaaaaataagataaaaattatattttaaactgtaaaaacacattatacagaaaaatatagaaagaaataagaatttgttaatgttcattttatttttaatattatgggttttcaaaatttataatactttcaagtataaaatatacataaattttgttaagaaaaaaaacagttgagtttctaaaacattttcacatcatccttgctgataagttacagaaaaaaagtttacttttgaatgaaaatggctaataatattacatctaaacaggaaagcatatcatgatattatatatgatattatatttcctcagtcatcctttgtagcttccatataaattgtttatatggagtgaaaaaaaatcaagataggaaatcgcaacattgttacatagattagcagattaatgccaacacttttcacatgaactccattagcataagctt

SEQ ID NO: 170097 - DNA, 518 bp, Homo sapiens
aataatgatgtatatttcaaagatgtctcaatcacatttccccttttattgtaactatcataatctaagtgtaaaaataagataaaaattatattttaaactgtaaaaacacattatacagaaaaatatagaaagaaataagaatttgttaatgttcattttatttttaatattatgggttttcaaaatttataatactttcaagtataaaatatacataaattttgttaagaaaaaaarcagttgagtttctaaaacattttcacatcatccttgctgataagttacagaaaaaaagtttacttttgaatgaaaatggctaataatattacatctaaacaggaaagcatatcatgatattatatatgatattatatttcctcagtcatcctttgtagcttccatataaattgtttatatggagtgaaaaaaaatcaagataggaaatcgcaacattgttacatagattagcagattaatgccaacacttttcacatgaactccattagcataagctt

SEQ ID NO: 170098 - DNA, 565 bp, Homo sapiens
cttgaatttgcagatgtacctggcaaataggctcttgataaatgttaatacatatatttgctgaatggatgtcagataaatgccttggcttcttacataaaagagaaaaataggagcaaatccatgattgaactgaattttagatagcctgtctggtttcagtttgattataaatgtcccattgtaaatattacctccaaatctatacaaaatgagacagagtcacagatttatcccaaagtcatcctaagtaaggtcctgaggaaactttctgaatgtcagaaaccctggggcagatctaagcattcaaaaattgtttaatcctgtttaattctggtccacacattctgggcatttgattattrttttagtagtataagggtaaaattcagtgatgaaatcttagctataaatataaatacaaagttccaagcagtgattaccagacctctcaacttggccacggatagcatttctactactctatctaaatcttatatggcaaagcagaagaaatctccacataaaagtttctttatttgcaaaatccccatgtttttctaat

SEQ ID NO: 170099 - DNA, 565 bp, Homo sapiens
cttgaatttgcagatgtacctggcaaataggctcttgataaatgttaatacatatatttgctgaatggatgtcagataaatgccttggcttcttacataaaagagaaaaataggagcaaatccatgattgaactgaattttagatagcctgtctggtttcagtttgattataaatgtcccattgtaaatattacctccaaatctatacaaaatgagacagagtcacagatttatcccaaagtcatcctaagtaaggtcctgaggaaactttctgaatgtcagaaaccctggggcagatctaagcattcaaaaattgtttaatcctgtttaattctggtccacacattctgggcatttgattattattttagtagtataagggtaaaattcagtgatgaaatcttagctataaatataaatacaaagttccaagcagtgattaccagacctctcaacttggccacggatagcatttctactactctatctaaatcttatatggcaaagcagaagaaatmtccacataaaagtttctttatttgcaaaatccccatgtttttctaat

SEQ ID NO: 170100 - DNA, 482 bp, Homo sapiens
gttatcattatgtttgaaatgacacttttaggagtttgtactggtaaaaatgcacactttggggactaaaataaatttatattatgtcactgaaatcaagaatatatgaagtgtatggaagttaggtgatatcaactggttatttatgggtatagaaaagatcatttctgcagaaaattataaactgggcatactacctcgattttgattaaatataacaattactcattactttgtacctctattttgaaaaatttatgatttatgtagcagtggttgctactgaaaataatatcataatattttttggcctggaagctgaaaggaattccatgggaccaaccatgtgatatcaaccatttcatagtctcaactactatttaatcaatwttggatattttccaaaaccactcagaatcataagagactgcattgatctttagctaaaacctttatgatatttataattcttttaaccagat

SEQ ID NO: 170101 - DNA, 626 bp, Homo sapiens
tgtattttagagaatctctaaacacattttgaaaatgtcaaaatgcaatcttataacagatatataaaacaatagtgttaatatcatcatataatattttctaatcttgaaagagagtcaaagattctaggagatatttattccactacctaggtgataagccacatttggaaggatagaaggtaaaaataagaaaacaaaaatgagaacaggaaaatcaacacctacaaaagcctccctttttttcttatcaaarcctgtgcaggggtcatgaagcccacattttgtgacaggttgtcatgaaaataatgagtagatctctccttccaaatttttaacgaaagatttattagaacatggaaagtcagattaagaagaattgggaccaaagcctgtttaacttacttggtttgatggttaataaaatagtttttccacagatggaatttactcagtaatccacatatttgtctgttatttctataatgaaaggtcaacatcaccatataaggggaaagtggggaaaggaaagctctcaaatgtttctgtttcttgctaacttgtcccagggtcttcctgaagaagaaactaattaaggtaaaataaaaattttggtgtatcacctt

SEQ ID NO: 170102 - DNA, 555 bp, Homo sapiens
attttccaatataatcattcaacctaccagcctgtacttttaactgagttacagacagaaaaatccctgtcatccttgtctagcaaaacactctttgcaacggtgattcaggatctggggcttcatgatggaattcagagagtactttttggcaacaacttgaacttttggctgcacaagctcatcttcatagatgccatctccttcttgtcagggaagaggctgacattgtccttggacaggtacatccttgtggacattgatgatatatttgttgggaaagagggaacaaggatgaatgtcaaagatgtgaaggtaagcttatttatagacaacatcgaaatttgtatttcacaatatggtactgataaaatattactaatatgatagattattaatccctaaagttttaaggtgcagtagagttgaaataagatagccatttagaaaaatattgaaccaagacttaaccattctttacacacacatacacacaccagaagcttcagaatgggacagagctraaatattaaaatatcccgaagagttagtgaa

SEQ ID NO: 170103 - DNA, 585 bp, Homo sapiens
cttgtgactgtctcatcctatgtataactaaatttattttgtgtgcaaataattttagcaaacacataaaaaattagaggacacaactaagaataataaaggaatcaaagagtgttaagatgttatcgacgtttttggatcttctgttaaagtgtttatcttccaaagataaaatttggatacttcttcaaaataacagggtatttttttcatcctaagacctgatggccactgtaaagcaaaatgattgaaagcagtagaataagttcactttttaaaaaccttcaaagtatatgtgaaccaatgaactctgtttttaataagttcctatgaagcactgcttgactgtgacccaaatatttcattttgtgactgttaagaagagataaagtgaccrcaattgagttctatccagatttttctcattttttcttttacttttttagtatgtattatttcctttaattagtataaatgacagttttctttttatttttgaaatcataggcttaacaagaagacagttacttcaaaaggttctttgagtggttggttcctatcttcacacgctaaaaatatagcatt

SEQ ID NO: 170104 - DNA, 572 bp, Homo sapiens
gtcttggtgattaacatttggctcctcttgacttatgcaagtgtctgcagctggcttgggcttgaattcctccccagaaaatggatttttcttttctaccatatggtcaggctgcaattttttccaacttttatgttctgcttcacttttaaatataagttcccatttcagaccatctctttctttatgcaaatgagttaggcttttaggaagggccaggccatatcttcaacactttgcttcttagaaatttgttcctccagacgcccttgatcatctctctcaagttcaaagtttcaaagatttttagagcagggacaaaattcctctagtctctttgctaaaatatagcaagaatgacctttgctctagtttccaataagttccccatctscatctgagaccacctcagcctgggcttcattgtccatatcactatcagcattttggtcacaaccattcaacaagtctctaggaagttccaacctttcccacatcttcctgtcttcttctgaacccttcaaactgttccaacttctgcccattacccagttccaaagttgcttccacat

SEQ ID NO: 170105 - DNA, 566 bp, Homo sapiens
cattgtaagtaatctaggttttcatttcttctgaattatttcaagtagcaccacacatttaactttatcaatggaaggaaaagtcatctgttttaaagagattcctttatggaagcaaatagggttattctccacttaaaaaattgccaaaattgtataaaagtacattttaaaataagaattaaaaagttgagaaaatacataccagtaataccttttcctttgtgaatcwgtctttattatagagttcacacaaatatgtaaagtattcagttcctgatttcagtagtagagacaggacatattcacagttatctgcattacaaggcagaatgcaatatatatcatgccaacatgattgtacacaatggggaccaagacagggtgacagtaattattcctctaggaaccaggagtgtttaatggaggatgcggtatttgagtcttctgcgatcactggacagaactgtagcaaagctagctgggcagtgtattctagggcagtggatcagcctaagctcagacttggctgaaaatatcaggacatttttgagaatggtaagttg

SEQ ID NO: 170106 - DNA, 566 bp, Homo sapiens
cattgtaagtaatctaggttttcatttcttctgaattatttcaagtagcaccacacatttaactttatcaatggaaggaaaagtcatctgttttaaagagattcctttatggaagcaaatagggttattctccacttaaaaaattgccaaaattgtataaaagtacattttaaaataagaattaaaaagttgagaaaatacataccagtaataccttttcctttgtgaatcagtctttattatagagttcayacaaatatgtaaagtattcagttcctgatttcagtagtagagacaggacatattcacagttatctgcattacaaggcagaatgcaatatatatcatgccaacatgattgtacacaatggggaccaagacagggtgacagtaattattcctctaggaaccaggagtgtttaatggaggatgcggtatttgagtcttctgcgatcactggacagaactgtagcaaagctagctgggcagtgtattctagggcagtggatcagcctaagctcagacttggctgaaaatatcaggacatttttgagaatggtaagttg

SEQ ID NO: 170107 - DNA, 358 bp, Homo sapiens
ccccatgattcagttacctcacaccaggtccctcccaccacacatgggaattatgggagataagatttgggtggcagcacagccaaactgtaacaygaatggataggtgaatagagtactttatcctgacaaactacaaggatgaaaatttgtatctacctcttttcattatgtatcttctgaaagtaaaaaagttttaggagttaaaatggtgtttaaatctaattgtctactgacattgctggcttgtggaacaatgaacacacaactgctgattttaaaagaaattccgatgaaagaaaagtgtttctgtttgaatttatgtaaatattaattcaatctatcaatattcgggaag

SEQ ID NO: 170108 - DNA, 498 bp, Homo sapiens
tctataacttaaaagataataataagaacagtttggcacaaaccatttagtttagaacagagaataataccaccacctttccaatcacgtcacttttttgctaccactggagaggcaacacatatcctgaatttcaagtgtatcatattcttagctttcttgttacttgtatcacrtaagaaagcacccctaaacaataaattgcttagtatctagatgttttaaatttgaatttatataaatatgttcctaccatacacattttcttcaaattgctttttctcttacttttactcgtatggctcacccacattgatacctatagccctagtttactaaactaattttctttgtagtacttactatctccaatgttggtattgtcaaacattaaaatttttatattttcctgattatgtggatgattagctattcttgtatttaatgactatttcttttttatgtagtttgcatactctgtatgcctttttcttgttt

SEQ ID NO: 170109 - DNA, 498 bp, Homo sapiens
tctataacttaaaagataataataagaacagtttggcacaaaccatttagtttagaacagagaataataccaccacctttccaatcacgtcacttttttgctaccactggagaggcaacacatatcctgaatttcaagtgtatcatattcttagctttcttgttacttgtatcacgtaagaaagcamccctaaacaataaattgcttagtatctagatgttttaaatttgaatttatataaatatgttcctaccatacacattttcttcaaattgctttttctcttacttttactcgtatggctcacccacattgatacctatagccctagtttactaaactaattttctttgtagtacttactatctccaatgttggtattgtcaaacattaaaatttttatattttcctgattatgtggatgattagctattcttgtatttaatgactatttcttttttatgtagtttgcatactctgtatgcctttttcttgttt

SEQ ID NO: 170110 - DNA, 393 bp, Homo sapiens
ttatttggccataaaaaagactgaaatcctcccatttgcagccacatggatggaactagaggctattatgytaagtgaaataagccaagcacagaaagacaaatatttcatgctttcactcatatgtggcaaattaaaaagtgggttttttgaagatagagaatagattggtgattaaaagaagccaggaaggatagaaaggatgggaaaattaagggaaagaaaagaacgtaaatgtggttattactacttaaatgtatacttcaaaagggtaaatgtggtaaattttgtatgtatattttacagctataaaaaaaaacaaaataaaaaaatgtaaaatttacagatgtttatcctttatatgcacttaaataaacgagatgaagacactga

SEQ ID NO: 170111 - DNA, 585 bp, Homo sapiens
acacacagtgataatttaaatctaatctgatgaacgatattgctgcttaaattaaatgttgcccacactgtgagtaacatgaacaatgaatatgggattatctgctgcacagagattcattacagttcagcttgcttatacttactctttctggctcatttgtatatcttgctggcctttaagtggtgccagcttaccctttatctatcatccctctattgtttctcattaacctacagagtcaagtattactttgcacaaatttgatttaaaatacagactcaaattaaacatattgaaatcaccagcattgagccacagtaataagttaaaaaggcccccaaatctatttggactcaataaccgatatgatcaatgacaacttgaactcaggttaaagttgctttcacttagtttgctatcaratgaataaacaacaaaatgatttatacatatcagtaacacaagtgtaaagatacaacttcctgtttattcaagggtgtgtgccaactttatatttagcaacctaacaatggaataagccagtgatccccaatctttttggcaccagggaccagtttcatg

SEQ ID NO: 170112 - DNA, 393 bp, Homo sapiens
ttatttggccataaaaaagactgaaatcctcccatttgcagccacatggatggaactagaggctattatgttaagtgaaataagccaagcacagaaagacaaatatttcatgctttcactcatatgtggcaaattaaaaagtgggttttttgaagatagagaatagattggtgattaaaagaagccaggaaggatagaaaggatgggaaaattaagggaaagaaaagaacgtaaatgtggttattactacttaaatgtatacttcaaaagggtaaatgtggtaaattttgtatgtatattttacmgctataaaaaaaaacaaaataaaaaaatgtaaaatttacagatgtttatcctttatatgcacttaaataaacgagatgaagacactga

SEQ ID NO: 170113 - DNA, 609 bp, Homo sapiens
agcttagaaatccgaaagagctatctctcatcttctcccagggtttgataacctcttctctttacttcgccagaggtgttttgacctttaattaaaaggaaaatttgttgtcttcctctcagaagacagcaaataatgaactcattaaaatgaggttagtgttcaggccttagagcaataagagttgaagtctcattagcagctaacaatgcagaacacagcacataaataaacctaatatggcacagcgaaatgcctcggtgcrttaaatttgagcagaatcaaatgtttactgtcaatgatgtctggggcataaagttttaatgcacttaataaagaaaagcaaattgcttcctattagccatgaaatgttaccacagaaattgtcccaaaaagtgtattatgtaaatgtgtgatgtgttagttattaacaaagatattgtagaaatatatctgtcttgcttgatacatgcaacaattaggaagaataaagatcactcaaaaatttctaaacgtaattctagtgattaatgtaaaataatgtgggatgtaagatttttttaagtgactttatctcactgctggcccaagataagagatatttgcaat

SEQ ID NO: 170114 - DNA, 457 bp, Homo sapiens
gaattctgatactctaaacctactatataataaaacaatgatgaatttttttgtcagctcagctgtttatacctgttagagggtgggaaagagcaaagtaattaaattaagaggaaagaaaaatcatrtgatgaacacaggagtgtatgaaagaatatacttatcaccctgctaaaatattcaatattttacaatattcccatagagggcaatattgtataaaagatggtgaatgaagactctgccaattcatctctgttgatatgctttaaagaaaactgctgttaccataaatttggagctccacttcccctcaaactctaatatataaactgatgcacacaaaaacataacacagagtctcatcaaaggcaaagaaaattaatttggtatcacttactggtagattacttgagtgaatagcctccagtttcacctttaatttgatttaatcact

SEQ ID NO: 170115 - DNA, 454 bp, Homo sapiens
cgtaaacctaccatcttgctatttgttttctaaccatctattatttgtgttcttattcccgttcttttgctttatctggaattaaatgattttttttatggttccactttatttcctttcttgacttactagccatgactcattattttgttactttgatggatcttttaggacttatagtatacatttttatttaatcgccatcttacttcaagtgatatyatacacctttgcatgtagtgtaagaaacttataacattgtatcttcatttttcccctcaactttattgttattgtttgtatacactgtacttccacatatattctaaacttccacactacattgctattaccttatttaagcagtctattatcttttaaaggattaaagtatttttaagttttatatatttacatttatagacaactttttggtgttctttattcacttttg

SEQ ID NO: 170116 - DNA, 632 bp, Homo sapiens
gtgttagctggtgaagaactcaggaccctcaaaagagaattcaggccaaaagagtggtgttgccccttctctggaagcatttgaattactactataaggtaataatctttgtgttttagattttcaaatctcaaacaataaatatgttgcttttaattatttttggaatacagccaacacaatatttaccaaatcactttcagaaggccagtgaggaagcccaaaacacagcagctacacccactgatttctgtttttctaagttgaaaactgatccgtctcgattgcagatgattatgaatagttttgtacgtccagcaacatattgctaacctcagcctttctttcttaagctcattatttgctaatgattttcttggccacaaagctcataaaattcccttgagttgcttaaaaaaaaaaacctcttaggacatttgttccatttgttcagcatctgcgccrgacaacatctggagcctgaggaaattccacagctcagggtatgatgcgtaaatgaaattactttttcatgcacttcagaagagattcaagagcatctttctgaccaaacaagcccttttgttctcctccagcaagtgtttctcattaaaaatgtcatctccctaata

SEQ ID NO: 170117 - DNA, 430 bp, Homo sapiens
agttctcagggaagacaaggtgggaaaggcttttgtttcggagagactaggctatagaaaagcacaaaggcacgagatatccctttatttgtaccatcatttgtcctttgttcttttgttcaacaayttaggacttactagattggctggagcttggtacacccaaactcaattttagatgaacagacacccttttaggggctagtgatacaaggatgaatatgacaaggagtctgccaagtattttttttttccagtaggggctacagacccgtaataaatataaaagtaaatgtataacatacaagcgctgcaaagaaaaataaatcataataagagtgagattgaatattaggaaaagaagacctgaatacagtgatctttaatctctctaaggaagagactcttctgaagacgcatgaatttgaac

SEQ ID NO: 170118 - DNA, 612 bp, Homo sapiens
gcagggcagtgaatagaaaaaccatgtgtccttgtcaaccttacatcttagcagagactcgagctggttccacctttttgtgaggaactcatgcaattttccccataaaggtccagttcactaaatggcctcacataacttatcaaaattgtatgaagaaaaaaaattatgtaagtttttaatatgacactaaaattgtactcttttcctaaagaattctttgcttactccacaagtgtgcagcttaagggcatttaraattatttcttgtagatattcagatatattttaggtggagctataggaaatcgctaatattcacccactctttttttcttttttgagacaaagtcttgctctatcacccaggctggagtgcaatggcatgatctcggctcactgcaacctctgcttcccaagttcaaatgattctcctgcctcagcctcccaaataactgggattactggcatgtgccaccatgccctgctaattttttttttgtatattttttggtagagatggggttttaccatgttgtccaggctggtctcaaactcctgaccttgtgatccacccaccttggcctcccaaagtgctgggattctaggcac

SEQ ID NO: 170119 - DNA, 600 bp, Homo sapiens
ccaggtaaataaattacttcttttctttatggcagacttgctgtaatgagaagaaataaacattactaaactcatcaaggttcgggtaaaatttcagtgctgtcactcatcagccatgttgacwgggacgtattatttagtagtatcagtactatgttatctcatctgcaagaaggtggtaacaatctcgaaagaataaaacttttgttgaggactgagaaaaatggaaagcacttagcgtagtacttggcaggcagttggcattcagtcagtgatgataacttttctttcccccacaacttgatctgagtctttgctttccattcctggactactgaagacaatttctaaagataacacttgtcaatggccctcatccaagagaatatcacacaaatatgatctgcagagcacagggtataacagttctcacacattgtggaaatgtcaaggtttattatgcccctgtgacatattgccatggcttaatttacatttccatttgctttatgagaagtttcttactctggaacatctgacctctccttgatgcctcttttattcttcaaactgctttcctagcccatctggccacatatt

SEQ ID NO: 170120 - DNA, 410 bp, Homo sapiens
cagccttctgagtagctaggaatatagaggtgtgccaactcatctggcttgtacatagttttatatttatgtattcattattttgtagattatgaaatttcttagtggtaagtgcaacatatttaccactgcttaggacgtagtttacttttggaaggttcatacaatgtgacgttttaaaaattaaccaaactcgtctaaatttattgatttgacaggtgacatctcttgaaatagwgcacacgtaaaatccatcaggataccttaatgcacattgcgtcacttcttttcaaaacattcccaagaagctcaaatagagtagaccattttatttcaaactttatttttcaaaaaggcagtaggcagtaggttgatattgcacaatcccctgccatcccctagagattctg

SEQ ID NO: 170121 - DNA, 410 bp, Homo sapiens
cagccttctgagtagctaggaatatagaggtgtgccaactcatctggcttgtacatagttttatatttatgtattcattattttgtagattatgaaatttcttagtggtaagtgcaacatatttaccactgcttaggacgtagtttacttttggaaggttcatacaatgtgacgttttaaaaattaaccaaactcgtctaaatttattgatttgacaggtgacatctcttgaaatagtgcacacgtaaaatccatcaggataccttaatgcacattgygtcacttcttttcaaaacattcccaagaagctcaaatagagtagaccattttatttcaaactttatttttcaaaaaggcagtaggcagtaggttgatattgcacaatcccctgccatcccctagagattctg

SEQ ID NO: 170122 - DNA, 193 bp, Homo sapiens
acaactctttctaaaagatgctcaaaagaagagccgagaaacactcaagtatctggagagttatatgtaatcaagggagcayttttttttaaagatggatgtttgtacactgaaaggcatgatacaatgctgaaattgtagcaaaaagagaatagtccaaggggcaaaatcaatatattttttaattgatcta

SEQ ID NO: 170123 - DNA, 429 bp, Homo sapiens
tgtttttgtttttaagagacmgcgtcttgctctgtcactcaggctggagtgcagtggtgcgatcatggctcactgcagctttaaactcctggttcaaacgatgctccaccttagctgccaagtagctgagactataggcatgtggcactacacctagtgaacttttgttttttattttttgtagagatggaatctcattatgttgcccaggttggtctcaaattcttgggtcttccaaaacactgggaaatatcctttcaatgtttcttcccaaatcagtcaatgacacaccggactatttggcacaagaatcagaagtctcctccaaagcctctgtaggagaaacagtatccatgtgccttcctcactctgggtctcaaatgccctcagcaaatttcagcacaaactttccagtaagatatcgaattc

SEQ ID NO: 170124 - DNA, 430 bp, Homo sapiens
gaattcagtaactagtggtattcttttgtttttgtttttaagagaccgcgtcttgctctgtcactcaggctggagtgcagtggtgcgatcatggctcactgcagctttaaactcctggttcaaacgatgctccaccttagctgccaagtagctgagactataggcatgtggcactacacctagtgaacttttsttttttattttttgtagagatggaatctcattatgttgcccaggttggtctcaaattcttgggtcttccaaaacactgggaaatatcctttcaatgtttcttcccaaatcagtcaatgacacaccggactatttggcacaagaatcagaagtctcctccaaagcctctgtaggagaaacagtatccatgtgccttcctcactctgggtctcaaatgccctcagcaaatttcagcaca

SEQ ID NO: 170125 - DNA, 422 bp, Homo sapiens
gcctgcctttctgtcaggacacagtccctttgggtggcataggctttctggacaaggagaggcaggtcttcggaaggaagagctgactcctcaacagctaagctcctgtagctttgccttgtgagactggtgtccattccaaataggatgttgttggagcacttttgcaagccagtcagcctgcgtagctaataaagtcgtcacttaatgtcatctgtcggttcttggaaaccacagcattaagcaaaatgatgtgtaacaaaaccagttttatcctaggctaattgatataaacaagagttaagtttctacagcgtatttctggtcrcaaaaacatccccaaactcctaaataaagaccaaaacacaatattcaacattgaaatacatgcaagctatacatacgtcgatgaaagattaata

SEQ ID NO: 170126 - DNA, 582 bp, Homo sapiens
gaccttagcatggcttcttgcagctggaagcttttctggtacaccctccggctcctttggttttcggtgacctgttccttagctcagtaatcaaccacaaagctttcacccacagcaaattgctcagctctgaaccacacccttcaggrtgggctccagcgaggttctaaaccaagttcagctggtaatttcactacaaatggctgcaagtgtcgaacctcctggggcctgatttaatagctccgcctccccaccccctcctcctgggctagtcagaatccgccttgatcgacagctggaaaggggggttggaaggctctgggctatgcggtgggtgtttttttttttttctaaagttcatatttgttatttggaaatctgtgattcatgctcataaatgggtgtgtgtgcaagggagagacaggcattgaatggcttcgattttactttcaggactggaagatgccagcaagcaccgtttgccactctcaaagtaagagacttgcagcctttctgagtggagtccaggtgactccaccgtgaggctgcacactgctcggccctttcacgatttacagagcc

SEQ ID NO: 170127 - DNA, 397 bp, Homo sapiens
caatccacatgcattccctcgtttggttcttacatgaacgttgtgagggcagtagtgcctcctgcacagatgagggatttgagtctccaagaggtcagctagctacttcccaaatgtcccrcagtgaatcggtgtccttctttagtattcatgcaagttccataatacatatttatgtcatatgtattaatcataccatggccccatgtaattgtaaaatcatatatggcaatagattaatataatcccaaggtagaagacgaacagaaaaaaatattctttttaatatcaaaagcagaacaaattttggtctttgtggagtactgaatttttcacttgagaaaccagaaaaaaaaatccaatttttttctagtttgtgaacttctattggatgctt

SEQ ID NO: 170128 - DNA, 571 bp, Homo sapiens
ctattcaagtgatttttccaaaataaccacacattccaaagtgactctttgtaactttacaataaggcatttggcagtttctttatcataaaaaacaaaagtaccttgtacctgcccaagcacctttttacatgttttatctgacaacaattgatcatatttataatgtggtttagattggcatgtgaaaatgagaaaggtcaaaatggatccattttcttatgatatggaatttttatagataagaaatagtgcatggcatatttatatgaaaatktatatacctttttaaagttttattgcataaaaggataattgattattaataagatatattagtaacacatcatagaaccctgtaactgcctaaagatgaattcatattctaggaaattttgctctcaagattgaatattgatcacaagactgaaaactccagtcactgtaattttacttgaagcattttctaacagatgttacatcttggtttgccattatattttaaatacgttctttttcttttttcaacattcattaaaccagtcttttcttcttgtctctaataagagca

SEQ ID NO: 170129 - DNA, 433 bp, Homo sapiens
caatttactgacttgccactgagtttgcagctagcaccttaagttttctgagtcctataccagggcatttctccccatctaattagtgacaagttagagacaaaaatcatgaactagggctctgcttctttaatcttccataatatttgttggaagttaagactacatgatttttaaaagactctcaataaatatttgatgagtagacgaaagtcaaacaagctgtcttatgagtgaatgaactggacatactgatgtgagaaaaaacaactcaatagccaaactggttaccgtccaaaaaaatattcaatatgattggcttatggccaacagttttcattgctatgatcayaaatagatcacagttgtcagtgggaaagctactgataatctctgctgatcccttgactggaatatttttggccatacatga

SEQ ID NO: 170130 - DNA, 515 bp, Homo sapiens
caatgtcatacagaatatcttgtgtcttcacatttctaggggagatgatagaagccttcatcaattcttccagggtatctgtgaatcacaaacctggaagaactgctggctcaaaggggcttgattagttgattatagttctgcttcctctgcctctgaaaactcaccaaagtaagagtgaactgatttttaaaaagtataaaggctgaaacgtcaacgaaatatgagtacaactgttgggtgagagatttcaatgaagtttttaaagataatgaagtccatgagaagtgaaaatggaaatggtgaaaaactactttagtacttgtggggagaggtatctgtgcgaggtgagctacaccactcaatgccagaaaggctcaaaatcaagaggcagaatgtatcatgaaaagcggcagaatgtaaggtatagaagataaaacttggagattggctgggccccctayaccaatcaaggcagccatgtaaccttctgttcctccctaaaagattgcaag

SEQ ID NO: 170131 - DNA, 614 bp, Homo sapiens
tgcactctatttgctaatagttgtagtattctgtaccacaattgctgagattaatatcttgagaaaatattgtaccattccagttaataattatgttgatttctattcttcagtttaaagtagatatatgaaaataggacctagtgtgtgaccactcaaaaaccctattttcctcaygtttgtagtgtatttctaaaggcctctccaggattatttcaaaatcaaaattgaaatattgtctaccaagatattgaattaattatgtatctatttcattttactgtttgaacactcccttctaatttgtatatagagagatagaattgtctagcacttttccgaaggaaaaagaaatcaagaataatatttaaaggctcataatatcttccgtctacatgtattaattgtatatggactttaaacaaatacaattaaggatagtcttgttctgcatataattgatttgcctatgttgatgagatgctgacaaccaggtatgaaagctggttttgcttatctaaaagagtggactaaaagtaagttaagtggtttctttagtgttctgtagctttagttgtacatggagcacctgctcctcttggaagtcacagcac

SEQ ID NO: 170132 - DNA, 613 bp, Homo sapiens
aatgctgaattgtatcagataatttttcagcatcagttgaaatgattatacggttttggccttcattctgttgatatgatgtatcacattgatttgcatatgttgaatcatccctgcatctcagggataaatcccccttagtcatggtgaattattttttttttggtttgctattattcaggatttttgcatcaatttttatgagtgatattggcctgtagttttatttttttcatgtgtctttgtctggttttggaatcagggtaatactggcatgatacagtgattttggaactatttctctcttcctctattttttagaatagtttgagtaggactgctactagttcttcattacatatttggtagaattcagcagtgaagccatcaagtcccgggctttttttactgggagactttttattatgcttcagtttcattacttgttactagtctgttcaggttttgaatttatttrtggttcaatctcagtaggttgtatgtgtctgggaatttgtccatttttttccctagatttttccaatttattgacatatagttgctcatagtagccactgataatcctttgaatttctgtggtattagttataat

SEQ ID NO: 170133 - DNA, 542 bp, Homo sapiens
gagtagtccaggggaagagagtctagtggtgtccaggacctgtgcacagaggatgtccacacaggatctccaccccatgtggctgggagattggttacagtacaggttgattgrgcaaataagtaaatacatggaggatagtgagagtcaaattcccaacgtcaaagaaagagggtacacatatgaaacataagaaagaatgttcacgcctgtaatctcagcactttgggatgctgaggtgggcagatcacgaaattaggagtttgagaccagcttcgccaacatggtgaaactccatctctactaaagatacaaaaacttagccaagtgtggtggtgtgcacctgtaatcccagctacttgggagactgaggcaggagaaacgcttgaacttgggagggggaggttgttatttcttagattgcgccattgtactctagctctgggttacagggcgagactccatctcaaaaaagaaaagaaaaaaaaagacagaatgaacccagtgggtttgcattaggatttaatcaattagtgtaaatt

SEQ ID NO: 170134 - DNA, 542 bp, Homo sapiens
gagtagtccaggggaagagagtctagtggtgtccaggacctgtgcacagaggatgtccacacaggatctccaccccatgtggctgggagattggttacagtacaggttgattgagcaaataagtaaatacatggaggatagtgagagtcaaattcccaacgtcaaagaaagagggtacacatatgaaacataagaaagaatgttcacgcctgtaatctcagcactttgggatgctgaggtgggcagatcacgaarttaggagtttgagaccagcttcgccaacatggtgaaactccatctctactaaagatacaaaaacttagccaagtgtggtggtgtgcacctgtaatcccagctacttgggagactgaggcaggagaaacgcttgaacttgggagggggaggttgttatttcttagattgcgccattgtactctagctctgggttacagggcgagactccatctcaaaaaagaaaagaaaaaaaaagacagaatgaacccagtgggtttgcattaggatttaatcaattagtgtaaatt

SEQ ID NO: 170135 - DNA, 561 bp, Homo sapiens
gcattaatttttatgaagaaaaatgtattgagtaaggcrgatacagagccaggagagaggaaagatattaaactgccggtcagagacctttctgataagagaactgacaccaagacctaaaggaagtgaagatgtaatattaagtatcactttttttctaggataaaaatagtgttggcaatttcaatcctgtttatatttattaagcacctaaactatattgcttttgtcctcaggaatgctataatctcattaggaagataaactacagaaggagtaatataataggattaaaaacaatgttactgcccattcatatgagtagataaactggcagtattaaaaagtttgagaaggtgccactctcttcttgataatttatctttctttggctgacaatgtactacatcattcgaggttttccttctacttttctgacaatcacatttcaacctcctgtactgacttcttgtctcttacctcgtctgtaagtgagagagttcctaaagcttgtcctaggctacttctgttttcttggcagattctccttaataaagacct

SEQ ID NO: 170136 - DNA, 561 bp, Homo sapiens
gcattaatttttatgaagaaaaatgtattgagtaaggcagatacagagccaggagagaggaaagatattaaactgccggtcagagacctttctgataagagaactgacaccaagacctaaaggaagtgaagatgtaatattaagtatcactttttttctaggataaaaatagtgttggcaatttcaatcctgtttatatttattaagcacctaaactatattgcttttgtcctcaggaatgctataatctcattaggaagataaactacagaargagtaatataataggattaaaaacaatgttactgcccattcatatgagtagataaactggcagtattaaaaagtttgagaaggtgccactctcttcttgataatttatctttctttggctgacaatgtactacatcattcgaggttttccttctacttttctgacaatcacatttcaacctcctgtactgacttcttgtctcttacctcgtctgtaagtgagagagttcctaaagcttgtcctaggctacttctgttttcttggcagattctccttaataaagacct

SEQ ID NO: 170137 - DNA, 610 bp, Homo sapiens
cttcaaggacctaagatgaaagtggaggaccttgggtggggatatcccaaacctgaaagatcctagagctgggagggaggarcaggagctttgtctactgttgccctgcctggaatcccacacttgaacactcatgtctttctccccagccaccgtgctcctcgtagtatccgggatgaaattctcactcctcagtctgcttcctcagagcatcttgagatggcctcctgatccccgttgctggtctcatctatagatgcttgtctgaagttacccttctctttaattgtgctgagctgtctgcagttctcccaagcatagcatgctgtgctccctggcctttgctcatgttgtttattttgctagagcatcttttcccaccttcctggttaggtatttcctctttctggatgccatccctgaatgcagatgatgacttgggatgagcaaagtatcccttctctatttccaaagcactttatttgctgacagtaacattaggcgatgtggtgttgccagctgtgatgcactaaaattcccctgaatccttgagattctggtctcaaggcaagtaatggtgaggtgagtctgaagacaaccctcagaacac

SEQ ID NO: 170138 - DNA, 610 bp, Homo sapiens
cttcaaggacctaagatgaaagtggaggaccttgggtggggatatcccaaacctgaaagatcctagagctgggagggaggagcaggagcttwgtctactgttgccctgcctggaatcccacacttgaacactcatgtctttctccccagccaccgtgctcctcgtagtatccgggatgaaattctcactcctcagtctgcttcctcagagcatcttgagatggcctcctgatccccgttgctggtctcatctatagatgcttgtctgaagttacccttctctttaattgtgctgagctgtctgcagttctcccaagcatagcatgctgtgctccctggcctttgctcatgttgtttattttgctagagcatcttttcccaccttcctggttaggtatttcctctttctggatgccatccctgaatgcagatgatgacttgggatgagcaaagtatcccttctctatttccaaagcactttatttgctgacagtaacattaggcgatgtggtgttgccagctgtgatgcactaaaattcccctgaatccttgagattctggtctcaaggcaagtaatggtgaggtgagtctgaagacaaccctcagaacac

SEQ ID NO: 170139 - DNA, 610 bp, Homo sapiens
cttcaaggacctaagatgaaagtggaggaccttgggtggggatatcccaaacctgaaagatcctagagctgggagggaggagcaggagctttgtctactgttgccctgcctggaatcccacacttgaacactcatgtctttctccccrgccaccgtgctcctcgtagtatccgggatgaaattctcactcctcagtctgcttcctcagagcatcttgagatggcctcctgatccccgttgctggtctcatctatagatgcttgtctgaagttacccttctctttaattgtgctgagctgtctgcagttctcccaagcatagcatgctgtgctccctggcctttgctcatgttgtttattttgctagagcatcttttcccaccttcctggttaggtatttcctctttctggatgccatccctgaatgcagatgatgacttgggatgagcaaagtatcccttctctatttccaaagcactttatttgctgacagtaacattaggcgatgtggtgttgccagctgtgatgcactaaaattcccctgaatccttgagattctggtctcaaggcaagtaatggtgaggtgagtctgaagacaaccctcagaacac

SEQ ID NO: 170140 - DNA, 607 bp, Homo sapiens
gcacattactcatgtgtttgtggtgatgttggtataaacaaacctactgcactgctagtcatataaaagtatagcacacacagaaggtataggacataatactcaataatgataataaatgactatattactgatttatgtatttattttttattgctatttcagagcatagtcattctacttatatgttaactgtaaaacagcatcagacaagtccttcaggaggtatttcagaagaaggcattgttgtcctaggagatgagagctccatgcatgttatttaccctgaagaacttctagtcagacaaggtggaagacagtgatattgatgattctgaccctgtgtaggcctaggctaatgtgtgtgttcatgtcttagtttttaacaaaaagcttaataaataaaaataaattgcaaaagtagaaaaaagcttatagaataaaaatactaatataaagaaagaaaacatttttttacagctatacagtgtgttttaagctyagtgttacaaaactcaaaaagttaaaaaatatttaaaagcttataaagtccaaaagttattcactaaggttaatttattattcaagaaagaaaaatatgtttagc

SEQ ID NO: 170141 - DNA, 570 bp, Homo sapiens
cgtttagtgtgtcattgtagcctcatggaactttcaggattaggcatggtagtatcttcagctgtaataaagagaaacttgagaaccacccaaggtcacacagctgagaagggcagagatggaactcagcagggcctgtccgagtatccccaacccagatgtgtgaagaaacaccctacgtaacatcctgcaaatgtttccctttagctttctacttttgaagattttaagtgtttcatctgaagtgggagggtktaaactcaatgttctgttacaatatggatttatttctacattcagccctaaagtgatattctggacatgattacctcttgatgtgattggcacttttcctttcctgtcttattatacttaaagtgactagagatgatcccatgtagagagggactttaaaaacttcatccactcagccctctggcagtgtggtcagtgttgactgtctgccaactgtgtactagagaggacagtgtgcagctgagagcagatgataccataatctgtctggagggacctcaccaatctgaaggagaggctttataagagccagct

SEQ ID NO: 170142 - DNA, 579 bp, Homo sapiens
ctttttttggtccaaggattcctcccatatttgtcacatcatgtgtgatcttcttggagggtactattatcctgtgtacaccaagaaaaccaacttatagagtggcctggtaatttgccaaaggtgccagagctggtggccagagaaactgagttttgaagctaggtctcaattcaaaaatgactcagatttctctcactgtgctgttgtacagtatgtgcattactttaaaagttatgagagtatctggacttttcccacttgcaacccattctggctaagctgagcaagggacttttccatcgcaaaagatcccttcaaccttcaactgctgtttccagaggaaaagtgggtcctcaggatggctttctcaactaaaattgagctgttgtatctcaccagtgatatccaggggctgctcatggagctgggaatgaggtacaatccctaaatcatgttgttcagagttcctattttccwattgtaagcagacatttatccctttggaatttctcttttaaaaaaataatagaaatactttataatatacaaggttctagagactaatatggcaaactt

SEQ ID NO: 170143 - DNA, 380 bp, Homo sapiens
atgtgggcacccctggttcccagccgttgtccttaaccaaacctataggaatccttagccaaaaaagatattttaaggttcatttattattgaagctccagtatatatagtcagttctgttcaatttagtaaaccagtgttcttaatcataacatgcatatactgtatgtatctacatgcatattcatagagataagtcatatttaaatccaactgtaacgtttcattcgtgttaactgcagtccttgcttgtyagggaagtagcagagccttcagccaggtgtagaggagtgtgtatcagtcctcatcctgtctagaagcccttaattgtcttctcctactgtgtttttgtgtcggtcacctatctttggctattgact

SEQ ID NO: 170144 - DNA, 579 bp, Homo sapiens
cttatttcaataaagtcatgttttgtcagttgtaactttacctgatgaaagcatcagcaggggcaaaaccaaactctggatggaattttttaagaaaatcccttgctttttaaaatacaaaaccaaagttaatcattggtayaaaaaaacccaagtacaacttgattaggaaaagttagacaatcatagcaaaaacaaaaccaaaaaactttccttcttagaccaggtaacatgaggaagggggaaaaaaacccaaacaaaatagtccccccacatgacaggtgtcttcagcttgccatattgatccaaagttcatacattttatcatgtacaagatacattagacttacaataaagtctaattattagacttttatgtcagtggattgtgcttgcagaaatacagaagtaacatactgaccctaggtgaggagtttcttacatggttaactggattgacccaattggagtaaaagatttttgctgttacctcgatgctcctgcagttgttacctcagcatgccactgtagtccttgactctcacattaaaactaactttggctaggtactggtggctc

SEQ ID NO: 170145 - DNA, 576 bp, Homo sapiens
tgccttacgttaataagaacccaaagttctttctcaaacctgcctttctttttactccttcactcatcatatctctttctctgaaataaataaaaacaggttaccttgaagatatcaaccttgaatggaatagctatgttcttaacctaatctttgcctgtcgttcaaggactttgcctctgtcttattacctacatttgggagcctagaagccgttggatttttccaacctttcaatgccccaaatttttacagtctctttatttcttttatttctggttacaccmgccaattatctcctaacctcatccctttcttgtaatactttcccaaaatgcagcaaatagaaaccaacatgcaataacattttggctctttataatcatttcccccagagctgctggctcagtagggccatggcctacctcccaagatattacaggaagcagttttaccaaatactttaccagtctataccatagatctgccatctctgcagccccgaataccagtttcctcactctccagtattcaactattaagccaataacacatattttagggttacagcagcaa

SEQ ID NO: 170146 - DNA, 437 bp, Homo sapiens
gaatcttgtctgctatgctgaagggatttatacatatactttattttaaaatttaaaatttcaggcatgtttgttttgttttgttaatttatttttattatttccttggaccagcagtttgacctgacagaggcatatttattttggaactactttttttttccttcaaatttttagaagctctcaaaatctaaaattcartggaattaatattttaaacataataaactcacatcattgatatatttctgtaaaatatcctgtaaatcagattgttatatatctaatttcatttttgttttgatttgcatttcccattgatcttaagcatgcatattaagatatttcttttttcctttttttaagagacagggactcattccgttactgaggctggagtgcagtggcacatcatagctccctgcaacctggaattc

SEQ ID NO: 170147 - DNA, 459 bp, Homo sapiens
gaattctgtatttggtatatagagtgttttcatttttgtgagtttgggtttttgtttggtcagttatattcagggggttcttattctcccctaaatactattaagtcatagatataaaatccaacccacttctttttaaagactttggataaaacgctgagatgggagaratcccttgaccccttcctgggacttgcaacactggtgtggctcattttactcagctaccaccctcgaaccccttgtggaaaggggagcacacaggtgagcaggtgcaagagccagggcaagtgcctttggccaccagccagcccacagcagcatctaggagttgcccgcgacctctggagccccagaaagcatgtgttacaaacaatgctcttttagctttcccatccacggatggcttaagtgctgaacagctcagtgaagagtcagtgtgacagcctttttgagtcc

SEQ ID NO: 170148 - DNA, 459 bp, Homo sapiens
gaattctgtatttggtatatagagtgttttcatttttgtgagtttgggtttttgtttggtcagttatattcagggggttcttattctcccctaaatactattaagtcatagatataaaatccaacccacttctttttaaagactttggataaaacgctgagatgggagagatcccttgaccccttcctgggacttgcaacactggtgtggctcattttactcagctaccaccctcgaaccccttgtggaaaggggagcacacaggtgagcaggtgcaagarccagggcaagtgcctttggccaccagccagcccacagcagcatctaggagttgcccgcgacctctggagccccagaaagcatgtgttacaaacaatgctcttttagctttcccatccacggatggcttaagtgctgaacagctcagtgaagagtcagtgtgacagcctttttgagtcc

SEQ ID NO: 170149 - DNA, 459 bp, Homo sapiens
gaattctgtatttggtatatagagtgttttcatttttgtgagtttgggtttttgtttggtcagttatattcagggggttcttattctcccctaaatactattaagtcatagatataaaatccaacccacttctttttaaagactttggataaaacgctgagatgggagagatcccttgaccccttcctgggacttgcaacactggtgtggctcattttactcagctaccaccctcgaaccccttgtggaaaggggagcacacaggtgagcaggtgcaagagccagggcaagtgcctttggccaccagccagcccacagcagcatctaggagttgcccgcgacctctggagccccaraaagcatgtgttacaaacaatgctcttttagctttcccatccacggatggcttaagtgctgaacagctcagtgaagagtcagtgtgacagcctttttgagtcc

SEQ ID NO: 170150 - DNA, 610 bp, Homo sapiens
aaacactcttattggagaatatgcaaagagacatttgggagctctttcaggcctattcagaaaaacagaataaccccagataagaacgagaaagaagctatttgtaaaactgctttgtgatttgtggattcatctcacagagttaaaackttttttgattcattggattttaaacactctttctgtagaacctgtgaagggacattttggagcctattgaggcctatggggaaaaaaacaaatatccacagataaaaactaaaaataagctatctgtgaaactacattgtgatgtgtggattcatctcagagagttaactctttattgttatccagaagagttgaaacactctttttgtagaatctgcaaagggacacttttaggtcccttaagtcctatgaaggaaagagaaaatccacagataaaaactgaaaagaagctatctggtaaactgctttgtgatgtgtggattcatctaacagagttaaacctttcatttgattcagctggttggaaacactctaattgcagcatctgtgaaatgacatctgggagcctaatgtgacctatggggaaaacccgagtttcctcattaaaactagaaagaag

SEQ ID NO: 170151 - DNA, 610 bp, Homo sapiens
aaacactcttattggagaatatgcaaagagacatttgggagctctttcaggcctattcagaaaaacagaataaccccagataagaacgagaaagaagctatttgtaaaactgctttgtgatttgtggattcatctcacagagttaaaacgttttttgattcattggattttaaacactctttctgtagaacctgtgaagggacattttggagcctattgaggcctatggggaaaaaaacaaatatccacagataaaaactaaaaataagctatctgtgaaactacattgtgatgtgtggattcatctcagagagttaactctttattgttatccagaagagttgaaacactctttttgtagaatctgcaaagggacacttttaggtcccttaagtcctatgaaggaaagagaaaatccacagataaaaactgaaaagaagctatctggtaaactgctttgtgatgtgtggattcatctaacagagttaaacctttcatttgattcagctggttggaaacactctaattgcagcatctgtraaatgacatctgggagcctaatgtgacctatggggaaaacccgagtttcctcattaaaactagaaagaag

SEQ ID NO: 170152 - DNA, 601 bp, Homo sapiens
aaacactcttattggagaatatgcaaagagacatttgggagctctttcaggcctattcagaaaaacagaataaccccagataagaacgagaaagaagctatttgtaaaactgctttgtgatttgtggattcatctcacagagttaaaacgttttttgattcattggattttaaacactctttctgtagaacctgtgaagggacattttggagcctattgaggcctatggggaaaaaaacaaatatccacagataaaaactaaaaataagctatctgtgaaactacattgtgatgtgtggattcatctcagagagttaactctttattgttatccagaagagttgaaacactctttttgtagaatctgcaaagggacacttttaggtcccttaagtcctatgaaggaaagagaaaatccacagataaaaactgaaaagaagctatctggtaaactgctttgtgatgtgtggattcatctaacagagttaaacctttcatttgattcagctggttggaaacactctaattgcagcatctgtgaaatgacatctgggagcckaatgtgacctatggggaaaacccgagtttcctcattaaaact

SEQ ID NO: 170153 - DNA, 624 bp, Homo sapiens
gtttagttctgcaagatgaatgcacacaagttccttcctagtttttatctgaagatgtttccttcttcacagtactcctcagtggtctctgaaatatccctttgcagattctaaaaaaaacagtgtttccaaactgcwgcatccaaagaaagatttatctctgagagatgaatgcccaaatcacaaagaagtttctcagaaagcttctttcttgtttttatttgtagacgtttcttatttaaccataggcctcattgctctcttaaatatcccactgcagactctaaaaaacagtgtttctaaaccacacaatgaaaagaaaaatttaactctgtgagatgaatagacacatcacatagcactttctaagttagattccttctagtttttatcctgggatattcggtttttcaccattggcttcaagcaaatcccaaatgtccatttgtagaatggagaaaaacagtgtttccacactgctgaatccatagaagtgtttaactctgtgagatgaatgcacacatcacacagcagtttctcagaaggcttctttctagcttttatctgaagttgtttcctttttcaccagaggcctcagtgctcttataaccatccttttgaaga

SEQ ID NO: 170154 - DNA, 624 bp, Homo sapiens
gtttagttctgcaagatgaatgcacacaagttccttcctagtttttatctgaagatgtttccttcttcacagtactcctcagtggtctctgaaatatccctttgcagattctaaaaaaaacagtgtttccaaactgcagcatccaaagaaagatttatctctgagagatgaatgcmcaaatcacaaagaagtttctcagaaagcttctttcttgtttttatttgtagacgtttcttatttaaccataggcctcattgctctcttaaatatcccactgcagactctaaaaaacagtgtttctaaaccacacaatgaaaagaaaaatttaactctgtgagatgaatagacacatcacatagcactttctaagttagattccttctagtttttatcctgggatattcggtttttcaccattggcttcaagcaaatcccaaatgtccatttgtagaatggagaaaaacagtgtttccacactgctgaatccatagaagtgtttaactctgtgagatgaatgcacacatcacacagcagtttctcagaaggcttctttctagcttttatctgaagttgtttcctttttcaccagaggcctcagtgctcttataaccatccttttgaaga

SEQ ID NO: 170155 - DNA, 517 bp, Homo sapiens
atcaaaaagaaggttctcagtaagcttctttctaatttttatcagaagatgtttgctatttcaacatagacctcaatgatctccaaaatatccctttgcagattctgtaaaaacagtgtttccaaactgctgaatgaagagtcattttattctgcaagatgaatgtacatatcacttagsagtttctcagatagcttccttctagtttttattctgggatattcagttttttcacctttggcctccaagtactcccaaatgtctattcacagaatggacataaacagtgtttccaaactgctaaatctaaagaaaggattaactctgtggatgaatacacacatcacagagaagtttctcagaaacttcttaatggtttttatctgaagatgtttcctttttcacaataggcatcaatgctctccaaaatatccctttgcagattctacaaaaacagtgtttccaaactgctgaatgaatagaaggttttaactctgtgacacgaatgtacacatca

SEQ ID NO: 170156 - DNA, 517 bp, Homo sapiens
atcaaaaagaaggttctcagtaagcttctttctaatttttatcagaagatgtttgctatttcaacatagacctcaatgatctccaaaatatccctttgcagattctgtaaaaacagtgtttccaaactgctgaatgaagagtcattttattctgcaagatgaatgtacatatcacttagcagtttctcagatagcttccttctagtttttattctgggatattcagttttttcacctttggcctccaagtactcccaaatgtctattcacagaatggacataaacagtgtttccaaactgctaaatctaaagaaaggattaactctgtggatgaatacacacatcacagagaagtttctcagaaacytcttaatggtttttatctgaagatgtttcctttttcacaataggcatcaatgctctccaaaatatccctttgcagattctacaaaaacagtgtttccaaactgctgaatgaatagaaggttttaactctgtgacacgaatgtacacatca

SEQ ID NO: 170157 - DNA, 553 bp, Homo sapiens
accactgaatctgaagaaagttttaagtcagtgagatgaatgcacacatcacaaagcaatttctcagaaagcttctttctagtttttatctgctgatgtttcctttttcaccatagatctcaaatctctctgaaatatctcttcacagattctaaaaaaacagtgattccaaactgctgaaagaaaagaaaggtataactcagtgagatgaatgcacgcacatgcatcataaagcagtttctcagtttctcagatagagtccttcttgtttttatcctgggatattcactcttttgccattgggcccaatgagctcccacawgtccattcacagaatggaacaaagcagtgtatccaaactactgaatccaaagaacagttaaaatctgtgagatgaatgcacacatcacaaaggaggttctcagaaagcttctttcctgtttttatctgaagctgtttccattttcaccataggcctcaatgctctctgaaatatacctttccagattctacaaaaacactgtttccaaactgctgtgtgaaaagaaagctt

SEQ ID NO: 170158 - DNA, 627 bp, Homo sapiens
attcatctcacaatgttgaaactttcttttgattcagcagtttggaaacaatgttgttgtagaatctgtgaaagaacatttgggagttcattgaggtctatagtgaaaaagaaaatatcctcagataaaaactggaaagaagctttataagaaacagctttgtgatgtgtgaattactctgagttaaaactttcttttcattcagctcttcagaaacaatgtttatctgaaatctgcaaatggacatttgggagctcattgaggcctaaggtgaaaaataaaayatcttcaaataaaaactagaaagaaacttcctgacaaactgctttctgttatgggcattcatctcacagatttgaatcttttgattcagcagtttggagacactgtttttgtaatatctgtgaaaggacaattgggagtgcatttaggcctatggtgaaaaaaatatctttatataaaaactagaaggaagatttctgagaaactgcttgttgaaatgtccattcatcacacacaattaagcctttcttttgattccacagtttggaaacagagtttttgtaccttctgcgaatggacattcaggagctcactgaggccaatggcaaaagagagactatccca

SEQ ID NO: 170159 - DNA, 379 bp, Homo sapiens
aatggacatttgggaacccattgaagcctatcgggaaaaacagaataacgccagaaaaaaactagaacgaagctatctgtgactctgctttgtgatgtgtcgattcttcccacagagttaaaactttctttcaatttagcagtttggaaacactctttgtggaaaatctgtgaagggacacatgggagcccattaaggcctataagaaaaagttraatatcctttgataaaaactgaaaagaaacaaactgtgaaactggattgtgatgtgtggtttcatctcagagaattaaaactttcttttgattcagcaggttgaaaacactcttttcaaagtatctctgaagggatattttggaacccattgggacctaagggg

SEQ ID NO: 170160 - DNA, 556 bp, Homo sapiens
aacactctttttagagaatctatgaaggaacatttgggagccctttgaggcctatggagaaaaactgaatatcccaacatggaaactcaaagaagctatgtgtgaaagtgaggtgatgtgtggattcatttcatagagcaaaacccttcttttgattcagmaggttggaaacactcttttttagaaaatctgcaaagcgacatttgggatcccattgaggcctatggggaaaatctgaatatcccagataaaaacttgaaggaagctatctgtgaaagtgctttgtcatgtgtggatttatctgaagttaaaactttcttttgattcaccaggttggaaacactctttgtggaaaatctgtgaagggacattagggagcgcttttaggcctatggggcgaaaccgaaatatccccagataaaaactaggaagaagttatctgtgaaactaccttgtgatgtgtggaatcatctcacagagttaaaccaccctttttattgagcaggttggaaacactttttggagaatatacaaagggacattgggagcccattgt

SEQ ID NO: 170161 - DNA, 616 bp, Homo sapiens
aatacccccagatataaactagaaagaagctacctgtgaaactgctttgtaatgtgtggattcatcttaccaagttaaaactttcttttcattcagcaggttgaaacactctttttagagaatctatgaaggaacatttgggagccctttgaggcctatggagaaaaactgaatatcccaacatggaaactcaaagaagctatgtgtgaaagtgaggtgatgtgtggattcatttcatagagcaaaacccttcttttgattcagcagrttggaaacactcttttttagaaaatctgcaaagcgacatttgggatcccattgaggcctatggggaaaatctgaatatcccagataaaaacttgaaggaagctatctgtgaaagtgctttgtcatgtgtggatttatctgaagttaaaactttcttttgattcaccaggttggaaacactctttgtggaaaatctgtgaagggacattagggagcgcttttaggcctatggggcgaaaccgaaatatccccagataaaaactaggaagaagttatctgtgaaactaccttgtgatgtgtggaatcatctcacagagttaaaccaccctttttattgagcaggttggaa

SEQ ID NO: 170162 - DNA, 556 bp, Homo sapiens
aacactctttttagagaatctatgaaggaacatttgggagccctttgaggcctatggagaaaaactgaatatcccaacatggaaactcaaagaagctatgtgtgaaagtgaggtgatgtgtggattcatttcatagagcaaaacccttcttttgattcagcaggttggaaacactcttttttagaaaatctgcaaagcgacatttgggatcccattgaggcctatggggaaaatctgaatatcccagataaaaacttgaaggaagctatctgtgaaagtgctttgtcatgtgtggatttatctgaagttaaaactttcttttgattcaccaggttggaaacactctttgtggaaaatctgtgaagggacattagggagcrcttttaggcctatggggcgaaaccgaaatatccccagataaaaactaggaagaagttatctgtgaaactaccttgtgatgtgtggaatcatctcacagagttaaaccaccctttttattgagcaggttggaaacactttttggagaatatacaaagggacattgggagcccattgt

SEQ ID NO: 170163 - DNA, 556 bp, Homo sapiens
aacactctttttagagaatctatgaaggaacatttgggagccctttgaggcctatggagaaaaactgaatatcccaacatggaaactcaaagaagctatgtgtgaaagtgaggtgatgtgtggattcatttcatagagcaaaacccttcttttgattcagcaggttggaaacactcttttttagaaaatctgcaaagcgacatttgggatcccattgaggcctatggggaaaatctgaatatcccagataaaaacttgaaggaagctatctgtgaaagtgctttgtcatgtgtggatttatctgaagttaaaactttcttttgattcaccaggttggaaacactctttgtggaaaatctgtgaagggacattagggagcgcttttaggcctatggggcgaaacygaaatatccccagataaaaactaggaagaagttatctgtgaaactaccttgtgatgtgtggaatcatctcacagagttaaaccaccctttttattgagcaggttggaaacactttttggagaatatacaaagggacattgggagcccattgt

SEQ ID NO: 170164 - DNA, 439 bp, Homo sapiens
gtaaataacacaaagcacaactttggtgcctacagaaagtgactggaagagaagcaaagtagtttgtcttgcagaactaaaggcaggctgtgaacttagaggcaaatggcactttggaaagtggggtaaaatgtaaaacaaacgccggcaargtcagttgaaaatctcttaccagagccccaagtccacctgtcctcccatctgataagaaacttagatgtgtgttgtctggatatatcaaacctgataatttctggctcagagataccacggtttaaacttgaaatatcaagaaaactgtaaaccaaaaatggaactccaactttcttccctaactctgcttttggaaaccaagtagccatgcttttacttcccaggcaggaaattgggagatcattttcagaagaaactgaactgtctctaataaagatctacagat

SEQ ID NO: 170165 - DNA, 327 bp, Homo sapiens
gtttcaagtctgttgaatcaataggaagattaaactctttgagaataattcacatatcccaaagcagtttcacacatagytttttctagtttttatctggggatattcaggtttttgatgggatccctaatatcccttcacagattttacaaaaagagtatttccaacctggtgaattaaaagaaagttttaaccctgtgagatgaatctccacatcacaaaacaattttacaggtaggttattcattgttgttatttagggatattcagtttttctccatagggctcaatcagctcccaaatgtcccttcacgaagtctacaaaaa

SEQ ID NO: 170166 - DNA, 430 bp, Homo sapiens
tgttttttccccattggcctcaataggatctaaaatgtttctttgcagattctacaaaaagagtgtttcacacctgctgaatcaaaacaaaagttgaacactctgagatgaatccacacatcacaaagaagtttcactgagagcttctttctactttttatcaagggatattcatttttccccataggcctgaakggcttttcaaatgtcccttagcagattctagaaaaagagtgtttccaacctgctggagcaaaagaaaagtttatctatgtgagacaaatacacacaaaacaaaacagtttcacggatagcctctttctactttttatctggggatattctgtgtttacttatagtcctcaatgagctccaaaatgtcctcttgcagattctctgaaaacagtatttctaatctgctgaatcaaaa

SEQ ID NO: 170167 - DNA, 430 bp, Homo sapiens
tgttttttccccattggcctcaataggatctaaaatgtttctttgcagattctacaaaaagagtgtttcacacctgctgaatcaaaacaaaagttgaacactctgagatgaatccacacatcacaaagaagtttcactgagagcttctttctactttttatcaagggatattcatttttccccataggcctgaatggcttttcaaatgtcccttagcagattctagaaaaagagtgtttccaacctgctggagcaaaagaaaagtttatctatgtgagacaaatacacacaaaacaaaacagtttcacggatagcctctttctactttttatctggggatattctgtgtttacttatagtcytcaatgagctccaaaatgtcctcttgcagattctctgaaaacagtatttctaatctgctgaatcaaaa

SEQ ID NO: 170168 - DNA, 473 bp, Homo sapiens
gattctctgaaaacagtatttctaatctgctgaatcaaaataaaggtaaaactctgtgaggtgaaagcacacatcacaaagcagtttcacagatagctcctttctagttttttttttctgtggatattcggttttatcatatagggacaaatgggtcccaaaatgtcccttcgaaaatactccaaaaaaagtgcttttaagctacttaatcaaaagaaagcattacttctgtgagatgaatccacacatcgcaaagcagcttcacagatactttctttctagtttttatctggggatattcatttttaattattgatctctatgggccccaaaatgttccttcacagattctacaaaataagtgtttccaacctgctggaaaaaaaaggtttaattctgtgagrtgaatccacagatcacagggcaattttacaggtagcttctttgtagtttatatctggagatacacagtt

SEQ ID NO: 170169 - DNA, 561 bp, Homo sapiens
gcttccaaatgtccctttgaagattctccaaagtgagtgtttccaacctgctgaatcaaaataaatatttatctttgtgagaagaatccacacatcacaatgcagtttcacagatagtgtttttctaatttttatcttgggattttttttttcatagacctaaatgggctccaaaatgtccttttgtacattctctaaaaagactgtccccaacctgcttactgaaaagaagtcttaactttgtgagaagaatccacacctcacaaagctgtttcacagacagcttgtttctagtttttayctggggatatattatttttccccttacgcctcaatgggatccaaaatatcccttcacttatcctctaaataaagtgtttccaacctgctgaaacaaatgaaagatttaactatgtgagatgaatccacacattacaaagcagtttcacagatagcttctatcaagtttttatctggggatatcctgtttttccccacaggcttcaataggctcccaaatgtcccattgcagattttctaaaaagagcttttccaagctgc

SEQ ID NO: 170170 - DNA, 561 bp, Homo sapiens
gcttccaaatgtccctttgaagattctccaaagtgagtgtttccaacctgctgaatcaaaataaatatttatctttgtgagaagaatccacacatcacaatgcagtttcacagatagtgtttttctaatttttatcttgggattttttttttcatagacctaaatgggctccaaaatgtccttttgtacattctctaaaaagactgtccccaacctgcttactgaaaagaagtcttaactttgtgagaagaatccacacctcacaaagctgtttcacagacagcttgtttctagtttttatctggggatatattatttttccccttacgcctcaatgggatcyaaaatatcccttcacttatcctctaaataaagtgtttccaacctgctgaaacaaatgaaagatttaactatgtgagatgaatccacacattacaaagcagtttcacagatagcttctatcaagtttttatctggggatatcctgtttttccccacaggcttcaataggctcccaaatgtcccattgcagattttctaaaaagagcttttccaagctgc

SEQ ID NO: 170171 - DNA, 606 bp, Homo sapiens
tgaatgcacacatcacaaaacagtttcacacatagcttcattttagcttttatcttctgatgttcaattttccccttagttttcagtgggctcttaattgttcttttgcaaattctacaaaaagagtgtttccaacccaatgaataaaaagtaaaatttacctctgtgagaaaaattcactcatcacaaagccatttcacagataggttccttctagtttttatctggagacatttgattatttgttataggcctcaatgggctcccaaataactcttcacagattcrccaaaaaagaatatttccaacctgaggaatcaaaagacaagtttacaaaagtgagatgaatccagacttcacaaagaagtttcacagacagcttctttctggtttttatctgcagacactcgggttttctccattgtcttcaatgggctctaaaatgtcccttcacagattcttcaaaaagactgtttagagcctgctgaattaaaagaatggtttaattttgtgagatgaatcaacacaacacaaaccagtttcacagaaaggttctttcagtttttatctgggaatatttgctttttctccataggtatcaatggg

SEQ ID NO: 170172 - DNA, 480 bp, Homo sapiens
ctgggaatatttgctttttctccataggtatcaatgggctctcaattgtcccttcacaagttcttcaaaaagacagtttacagcctgctgaattaaaagaaaagtttcattttgtgagatgaatcaacacatcacaaagcagtttcacagaaagattcyttcagtttttatctgtgaatattcagtttttcttcttaggcctcaatgggctgtcaaatgtgccttcacagattctacaaaaacagcgtttccaacctcctgaatcaaaagaaaggtttaactcttttgtaaaatccacacatcacaaagcagctttatagatacttcattctaatttttatctttggatattcaggttttcttcttaggcctcaatgggctcccaaatttcacttcgcagattctaaggaaatagtatttctgtgatgactcaaaagaaatgttttcactatgagaagaatccacattcacaaaacagtt

SEQ ID NO: 170173 - DNA, 480 bp, Homo sapiens
ctgggaatatttgctttttctccataggtatcaatgggctctcaattgtcccttcacaagttcttcaaaaagacagtttacagcctgctgaattaaaagaaaagtttcattttgtgagatgaatcaacacatcacaaagcagtttcacagaaagattctttcagtttttatctgtgaatattcagtttttcttcttaggcctcaatgggctgtcaaatgtgccttcacagattctrcaaaaacagcgtttccaacctcctgaatcaaaagaaaggtttaactcttttgtaaaatccacacatcacaaagcagctttatagatacttcattctaatttttatctttggatattcaggttttcttcttaggcctcaatgggctcccaaatttcacttcgcagattctaaggaaatagtatttctgtgatgactcaaaagaaatgttttcactatgagaagaatccacattcacaaaacagtt

SEQ ID NO: 170174 - DNA, 599 bp, Homo sapiens
tttatctttggatattcaggttttcttcttaggcctcaatgggctcccaaatttcacttcgcagattctaaggaaatagtatttctgtgatgactcaaaagaaatgttttcactatgagaagaatccacattcacaaaacagttttatagatgcttatttctactttttatttgggatattcgatttttctccataggactaattgggctccaaaatgtcccttcacatattctccaaaaaaattttttccaacctgctgaatcaaaataaaagattaaaattaaaagatgaatccacatatcacaaagctgtttcacagataactcgtttgtagtttttaactggggatattcatttctttaccataggcctcaatgggctcacaaatatccccttgcagattctccaaaaagagtgtttccaacctgctcaatcaaaataaaactaaactctgtgagaygaatgcacacatcacaaagcagtttcactgacagcttctttgaatttttttttttctggggaaattcaatttttccttttaggcctcaaagggctcccaagtgtcccttcacagatcctccaaaaatagtgtttccaa

SEQ ID NO: 170175 - DNA, 467 bp, Homo sapiens
gtagcttcatttcagtttttatctggaaatattcagtttttccacgtaggcctcaaagggctcccaatcgtcccttcacagattttccaaaaagagtatttccctacttctgaatcaaaacaatgatttaactctgtgatatgaatcaacacatcagaaattartctcacaaatagcttccttttagtttttatcacgtagcagattctacaaaaagagtgtttgtaacctggtgaatcaaaagaaatggttagcactgtgaaaagaatccacatatcacaaagcagtttcacagagagcttctttctagtttttatctgggaatatttggttataaccagtaggcctcaatggactctcaaatgttccttctcaatttctcctacaaaggtgtttccaacctgctgaatcaaaaccaaggttgaactctgtgagatgaatccacacaaaacaaagcagtttcacag

SEQ ID NO: 170176 - DNA, 467 bp, Homo sapiens
gtagcttcatttcagtttttatctggaaatattcagtttttccacgtaggcctcaaagggctcccaatcgtcccttcacagattttccaaaaagagtatttccctacttctgaatcaaaacaatgatttaactctgtgatatgaatcaacacatcagaaattaatctcacaaatagcttccttttagtttttatcacgtagcagattctacaaaaagagtgtttgtaacctggtgaatcaaaagaaatggttagcactgtgaaaagaatccacatatcacaaagcagtttcacagagagcttctttctagtttttatctgggaatatttggttataaccagtaggcctcaatggactctcaaatgttccttctcaatttctcctacaarggtgtttccaacctgctgaatcaaaaccaaggttgaactctgtgagatgaatccacacaaaacaaagcagtttcacag

SEQ ID NO: 170177 - DNA, 466 bp, Homo sapiens
gtctttagcttatcagagagtagctagtgggagtaggcttaactaggagcctgcaaatctgtccactttccattacatcaagagagtgtctttctctttgaacacagtgtttacacataaggcagcaagtctcactcacagcatggaaatagggtggcaaataggaggctttcctcctcagagtcttcttgtytttccacaacttattgtctcatatttttggccaggttttacaggcagcccataaacctttttcccaacatgcccccattttttcatttttaaaaccgccattgctattaaggcttgttctttgtgtctggtttttctccagaggcgtattccacatttgcagactaaaagcaaacagtataaacagatacacattaaagcaaagattgcaatagttcatcctccagtggtcttaattcatttaagagggtttacatttgaaagtccatcagca

SEQ ID NO: 170178 - DNA, 480 bp, Homo sapiens
aataaaacgaaatatttaactctgtgagacatatccacacatcacaaagaagtttcacagataccttctttctagtttttatctggagatatttggtttttcactgtaggtctcaacaagctcccaaatatccgtggccacattctacaaaaagaggttttgcaactggctgaatcaaaagaaaaggttgtctctttgagatgaatccacacgtctgaaagcagtttcaaacgaggyttctttctagtttttatctgggcatatgttgtttttccacataggcctcaaagggctcccaaatgtcccttcatagaatctccaaaaagaatgtttccaacttcctgaatctaaagaaagttttaactctgtcagataaattgaaacatcacatatcagtttcatagatagctcctttctactttttaatctgaagctattctgtttttccacatagtccttaatgggctcccaaatatccct

SEQ ID NO: 170179 - DNA, 511 bp, Homo sapiens
aagcgctccctaatgtcccttcacagattttccaaaaatagtgtttcccacctgcttaatcaaaagaaaggtttaaccctgtgggaggaattgacacatgacacagaagttttacaggaagcttctttctagcttttatctgggaatatttcgttttttcccattcacctcaatggactyccaaatgtcaccttgcagattctgcaaaaagaatgtttccaacctgctgaatccaaagaaaagtttaaatctgtgagatgattccattgatcacaaagcagtttcttagatagcttctatctagatttttttctggggatattcagtttttccccataggcctgtttgagtacccaaatttccattcacagattctacaaacagattgttttaaacctgctgaatcaaaaaaaagtttgaactctctgggatgaatccacacattgaaaagctgtttcacagatagcttctttctagtttatatctgggatatttggttttccccctaaac

SEQ ID NO: 170180 - DNA, 538 bp, Homo sapiens
aaagcagtgacacagatagattmtttccgttttttttttcctgtggatattctgtttttttccataaacctggataggttcccaaatgtcccttcacagattcacaaaaagagtctttccaccttgctgaatcaaaagaaaaggtaaagtctctgagatgaatccacacatcacaaaacagtttcatagacatcttccttctagtttttatcagggggtactcagttttttcctgtgggcctcaatgggcttccaaatatcccttcacagattttaccaaaagagatgttctaacctgtagaatcaaaagaaagttttacctctgtgagatgaatccacacatcacaaagcaatttcacagataacttcattctagtttttatctggagatattcagtttttctcattaggcctcaatgggcacgaaaaagtccccaggcagattctccagaaggaaaacttccaacctgctgaattaaaaaaaaagagtttaactctgtcagacgaatccgcatatcacaaagccatttcacaaata

SEQ ID NO: 170181 - DNA, 588 bp, Homo sapiens
gtttttccccataggcctcaaagggcttccaaatctccctttgaagattctttaaaaagagtatttccaacatgctgatcaaaggaaaagtttacctctcagatgaatcctcacatcacaaagcagtttcatacttagcttctttgtagattttatctgggcacatttgtttttcccatgtaggccaaaatgggttcccaaaagtcttttctcagattctccaaaaacggtattactaaactgctgaatcaaaagaaagacttaacsatgattgatgaatcacacatcacaaatcagtttcacacatattttgtttctaatttttatctggggaaaattctggttttccccatagcctcaaagggcccccaattgttttctcacagattctccaaaaagagtgtttccaacctgctgaatcaaaagaaatttttaactctgtgagatgaatagacacatcacaaagcagtttcaccgataggttcttagtattttttatctggtgatattcagtttttccccataggcctcaaaggactcctaaatgtcccttcacagattctacaaaaagagtttttttcaaactac

SEQ ID NO: 170182 - DNA, 571 bp, Homo sapiens
tgttttcaacacgctaaaccaaaagaaaggtttaaaactgtgagtttaatccacacaccacaaagccatttcacagatagattctttccagtttatatctgaagatatttgaatttttccctgtaagcctattgtggctcccaaatgtccctttgcatgttctccacagtgttgccagcytgctgaatcaaaagtagggttcaactctgtgagatgaatacatgaatcacaaagtagaattttaatgtgggtatacttctttttttcccttaggcctcaatgaggtctgaaatatgccttcacaaattctataaaaagagtatgtataatctgctgaattaaaagaaggatttaactctttgagatgaatccacacatcccaaagcagtttgtaagagagcttctttctagttcttatctgggcatattcagttattcttcataggcttcaacaggctcccaaatgtcccatcacaaattcttcaaaaagagtgtttccaacctgcttgaccaaaagcaatctttaactctgtgagatgaatccacacatctcatagcagcttaatgataa

SEQ ID NO: 170183 - DNA, 571 bp, Homo sapiens
tgttttcaacacgctaaaccaaaagaaaggtttaaaactgtgagtttaatccacacaccacaaagccatttcacagatagattctttccagtttatatctgaagatatttgaatttttccctgtaagcctattgtggctcccaaatgtccctttgcatgttctccacagtgttgccagcttgctgaatcaaaagtagggttcaactctgtgagatgaatacatgaatcacaaagtagaattttaatgtgggtatacttctttttttcccttaggcctcaatgaggtctgaaatatgccttcacaaattctataaaaagagtatgtataatctgctgaattaaaagaaggatttaactctttgagatgaatccacacatcccaaagcagtttgtaagagagcttctttctagttcttatctgggcatattcagttattcttcataggcttcaacaggctcccaaatgtcccatcacarattcttcaaaaagagtgtttccaacctgcttgaccaaaagcaatctttaactctgtgagatgaatccacacatctcatagcagcttaatgataa

SEQ ID NO: 170184 - DNA, 578 bp, Homo sapiens
acagaatcaagagaatggtttactttgtgagaggaatccacacatcataaagcagtttcatggatagcttctttctagttttaatgtgtggatatttggtttttccccgttggcttcaattggctcccatttgtccctttgcagattctccagaaagactgtttccagcctggtaaaccaaagaatggttgaacactgtgaggtgaatccacacatcaaaaaccaatttcatggatagcctctttytagttttatcttgggatattccgttttgcactgtaggactcattaggcttccaaatgtccctttgcagattatccaaaaacagttttttgaccttctgaatcaaaagaaatgtttaactctgtgagttgaatccacacatcccaaagcagttccacaaagagcttctttctcgttttcatctggggatattctgtttttgtctaggcctctaaaggctttaaaatgtaccttcgcagattctccaaaaagagtgtttccaacctgctgaaacaaaagaaagttcttactctttgaggttaatccacacatttcaaagcagttttacagttag

SEQ ID NO: 170185 - DNA, 594 bp, Homo sapiens
tctaaaggctttaaaatgtaccttcgcagattctccaaaaagagtgtttccaacctgctgaaacaaaagaaagttcttactctktgaggttaatccacacatttcaaagcagttttacagttagcttctttttagtttgtatctagggatattcgatatttcctcatcagattcaaaaggttccaaactgccccatggcagattctacaaaaagagagggtttccaacctgctgattcaaaagtaaggtttaaccctgtgagaagaatctacacatcacaaaacagatgcacagatagctcttttctagtttttatcttgggatattcagtttttccccatagtcctcaatgggctcccaaatatctccctgctgattctcaaaaaagagaatttccaagctgatgaataaaaagaaaaatttagctctgtgtgaggaatccaaacttcatgaaagaatttcaccaataggttatttctggcttttatctgcaaatattctgtttttccctgtaggcctcaaaaagcttcaaaactttcattcacacattttacaagaatagtttttgccacgtgatgaatcaaaagaaaggtt

SEQ ID NO: 170186 - DNA, 474 bp, Homo sapiens
atattcattttttttcaagtataccaatatggactccaamatgtctagtcccagattctccaaaaaaaagtgtttccaacctcctgagtcaaaagaaaggtttaactccgtgagatgaatgcacacatcaaaaacagttctacagataacttctttctagtttttatctgggatattctgtttttccccataggcctcaatgggctcacaaaggtcccttcacaatactacaaaaagagtgtttccaacgtactgactcaaaaaatgttttaactctgtgggataattccacacatcacaaagcaatttcacagatacattctttacagtttttacctggggatattcagttgtactgcataggcctcaatctgctctaaaatgtacctttgcagattcatcaaaaagtgtgtttccaacctgctgaatcaaataaagttttaactctgtgagatgaatccacacatcacaaag

SEQ ID NO: 170187 - DNA, 371 bp, Homo sapiens
aatatggactccaaaatgtctagtcccagattctccaaaaaaaagtgtttccaacctcctgagtcaaaagaaaggtttaactccgtgagatgaatgcacacatcaaaaacagttctacagataacttctttctagtttttatctgggatattctgtttttccccataggcctcaatgggctcacaaaggtcccttcacaatactacaaaaagagtgtttccaacgtactgactcaaaaaatgttttaactctgtgggataattccacayatcacaaagcaatttcacagatacattctttacagtttttacctggggatattcagttgtactgcataggcctcaatctgctctaaaatgtacctttgcaga

SEQ ID NO: 170188 - DNA, 472 bp, Homo sapiens
attcattttttttcaagtataccaatatggactccaaaatgtctagtcccagattctccaaaaaaaagtgtttccaacctcctgagtcaaaagaaaggtttaactccgtgagatgaatgcacacatcaaaaacagttctacagataacttctttctagtttttatctgggatattctgtttttccccataggcctcaatgggctcacaaaggtcccttcacaatactacaaaaagagtgtttccaacgtactgactcaaaaaatgttttaactctgtgggataattccacacatcacaaagcaatttcacagatacattctttacagtttttacctggggatattcagttgtactgcataggcctcaatctgctctaaaatgtacctttgcagattcatcaaaaagtgtgtttccaacctgctgaatcaaataaagttttaactctgygagatgaatccacacatcacaaag

SEQ ID NO: 170189 - DNA, 464 bp, Homo sapiens
taacttcattctagattttatctggggatattcaattttaaacataaacctcgatggagtccaaaatttcccttcaccgttttacagaactgatgtttccaacctgctgaatcacaaaaatgtgttaacactctgagataaatcgacacatcaaaaaagagtttcacagatagcttctttctagtttctatctggggatatcctgtttttccccatggacctcaatgagctcccaagtgtccctttgsagattctccaaaagtgtgtttccaacccgctgaatcaaaacaaaggtttaactctgtgagatgaatccacacatcacaaaggagtttcacagatagcttctttctactttttatctttggatattggttttgccttttacacacccatggactcccaaatatttattcaaagattctccaaaaacagtgtttccaacctgctgaatcaaaagaaag

SEQ ID NO: 170190 - DNA, 593 bp, Homo sapiens
ctaagaaaagtggggtgacaaagaccccgatgaaggaaygctagagagtgtgaaagcagaggacacatcttcaaaggacacctgaagacatctaacagaagccccgtggtaagctgagcacttggaagaatttgggtataaatgggagaaggtgaaagcagacattctgcttatttaaatatcttaagacatttattacgaagaggaggagagaaagttagtaatcagaactttttatcactctttagtacagtaaagcagttttgccaatggtttcctgaacaagagaaaatggagttggatgaatgggagagaattgtaagatattttaaagaagcgtataaagatggagcagaaattccagtttccatttggtcaatgtgggcactaataaaaacagctcttgagccatttcaaacagatgatgaggtagattccaatgagcaagaggaggatgagtgtaaaaaactgacttcaggctctgagcatgaggaacagatactggaggagattaaagaaaagaaaggcaaactaaaaaaaaagcttattttactagcctgtcagctacatccagtgaattaattgaatggcca

SEQ ID NO: 170191 - DNA, 507 bp, Homo sapiens
gccaaaatactatcacatattgtcccttcccagttcccttcttctatgagaacacgcactaaacacatgctacactttctcactgtatcttccacgtctcttcatgattctgtccacattttgcatttttttaaattttctgtaatgcattctgaaatatttatgaactctcaccatggccatctctaatctgatgagttcatttttgagtttttaatttaaaatactatatttttatacaaactgcttttcaaatttgctgcatcaattttttagtctcctaaaaatatattcattttattttaaattttttacagcaaatrtgctttataatctaacagtgatatttctactaatgaactgttgtggatctgtttgtactctttttctacttccctttcaaatggtggaatatcatttccttgcatacctagatgcctttgaatgacaaatatttatttttctctgaaaattatttttgtgcacttttgaggattagtaagaaga

SEQ ID NO: 170192 - DNA, 421 bp, Homo sapiens
tatccccattatcgtcatctgtggccctatttgttttataaatgtattgtctttttccatgcctgtcacatctctattgctcrttcatttttctctttgtcccttacagggagcattgcctatctctagattaagcaaaagttgcatattaacaaagcacaataacctgctcaatctttctcacacagagaaatgtttgttaagtaattaacgtgtagatgatgatacaaagagcttgattaaattagatgtcaaaatacccttgtgattcagaatatgaatggtatttaatttctttgaaatcaataattgctgagtgacattaattaatgccaatatttcagaagttgttctagttagtgaaatgtatacaacatccaaaaatttcagaactctgaaggacaacattattctatagtta

SEQ ID NO: 170193 - DNA, 421 bp, Homo sapiens
tatccccattatcgtcatctgtggccctatttgttttataaatgtattgtctttttccatgcctgtcacatctctattgctcgttcatttttctctttgtcccttacagggagcattgcctatctctagattaagcaaaagttgcatattaacaaagcacaataacctgctcaatctttctcacacagagaaatgtttgttaagtaattaacgtgtagatgatgatacaaagagcttgattaaattagatgtcaaaatacccttgtgattcagaatatgaatggtatttaatttctttgaaatcaataattgctgagtgacattaattaatgccaatatttcagaagttgttctagttagtgaaatgtatacaacatscaaaaatttcagaactctgaaggacaacattattctatagtta

SEQ ID NO: 170194 - DNA, 421 bp, Homo sapiens
tatccccattatcgtcatctgtggccctatttgttttataaatgtattgtctttttccatgcctgtcacatctctattgctcgttcatttttctctttgtcccttacagggagcattgcctatctctagattaagcaaaagttgcatattaacaaagcacaataacctgctcaatctttctcacacagagaaatgtttgttaagtaattaacgtgtagatgatgatacaaagagcttgattaaattagatgtcaaaatacccttgtgattcagaatatgaatggtatttaatttctttgaaatcaataattgctgagtgacattaattaatgccaatatttcagaagttgttctagttagtgaaatgtatacaacatccaaaartttcagaactctgaaggacaacattattctatagtta

SEQ ID NO: 170195 - DNA, 532 bp, Homo sapiens
ggttcccctttatcctttttgcttaataaattccatttttctcacccttcaaagtgtctgtgagcctaatatttcatgaccatgtgacaaggaccccatctttagctgaactaaggaaaagccctaaaaatgtcctgtgtctttcagcgcttgttgggttcacagcctattaaataagccagctgctcttyaccctcccagacaaatcaacttaggggaggtagcagggtgcgggccttggcctgattccccggctggggctgggctgtgatgtgggcaggcaagcagcagacaagactgtatctgcaggtgcagcatagcctcgacctagggcggtgagagtttgtggccaaagctgtgagcagaggcacaggtggtgacaggagtagaggtgccccatggggaacatactgacctgttttgtgtgccccaggaccagccccgagttggaccagcacaaggggttggtgtgtccctgtgagtctgagatctatgaggcagcagctgggtacatgatggcaggagcactggt

SEQ ID NO: 170196 - DNA, 458 bp, Homo sapiens
tgagaaactgctttgttttgtgtggattcatctcatggaattaaacctttctttggattcaccagtttataaacactttttttggagaatctgtgaggagatatttgggagcccatggaggcatatggaggaaaactaaacattcccagataaaaactagaaagaagctatatgtgaaactggtttgttatgtgttgattcatttcamagagataaacctttattttgattcagcacatcagaaacatgttttttgaagaatctgcaaagggacttttgtgagcaaattgaggccaatcaggaaaaacaaaatatccccaaataagaacttgaaaaatatctatgtgtcaaactgacttgtaatgtgtggattcatctcagagtgttaaacctttgacttgattcagcaggttagaaaaactctttttggagaatatccaaagggacatttggcagcc

SEQ ID NO: 170197 - DNA, 376 bp, Homo sapiens
aaacgaaataccccacataaaaactagaaagtcgctatatgtgaaacwgttttgtgacatgtggactcatctcagagatttaaaccattcttttgatccagcaggttggaaacactctttctgtagaattggagaaaagacattttggtgctcattggggcctttgggaaaaaaactgaatatccccaggtagaaactggaaagaagctctctgtgaaactactttgtgtggcctggattcatctcacagagttaaaaattccttttgatccaacaggttggaaacactctatttaaagaatccgccaagggacattttagagcccatttaggcctatgaagaaaaacagaatatatgcagataaaaactagaaag

SEQ ID NO: 170198 - DNA, 570 bp, Homo sapiens
ttctagtttatatctggggatattcagtttttccccatagatctcaaagggctccaaaatgtcccttctcagattctccagaaagagcctttccaacttgttgaatgaaatgaaatatttaattctgtgtgatacatctacacgtcacaaagcagtttctcagataatctctttctactttttctctggggatattctgtttttccccataggcctcaatgagattccaagtgtacctttgagattctagtaaaatagtgtctccaacctgctgattcaaaagaaagttttaactctgtgagatgaatccagacatcacaaaccaatttcacagatagcttccttctagttttctctgggggtattctatttttcctctaagcctcagtgggctccctcatgttcctttgcatgttytacaaaaagagtctttccaacctgctgagttaaaaataatatttaactttgcaagatgaatccacacattaccaagcaatttcacagatagcttctttctaatttttatctgaggatatttgatctatccttgtagtcaactatgagttccca

SEQ ID NO: 170199 - DNA, 465 bp, Homo sapiens
tgacaagtaacaggaggactgtgcrgccaaggcagagtgaacaaacgtacattagatgagatcatttataccaagaatgtgtggtatgcctagtgtctggtgcggaatcaatgctccaaagctgtgaagcccggctctgccttcagccagctttgacgccaaccccacccatcacacaggcagacacttcccaaggtaaccaagggctggtggcttctaggtggtctgtggaatttttgtactgttgacatttgttgtgttaatgcctgtggctttcataatgctactttacattgtaccatctcattggtgttttgatgagcagggtgtctttttgcctgttaactatggtgaggttttcagtgaaaaaagagaatccctacacaactgtgtaggggtgaagagagaactttcccttcaccctctaaaggattgtttaaaaatcaagtcacaaaaggttgatta

SEQ ID NO: 170200 - DNA, 465 bp, Homo sapiens
tgacaagtaacaggaggactgtgcggccaaggcagagtgaacaaacgtacattagatgagatcatttataccaagaatgtgtggtatgcctagtgtctggtgcggaatcaatgctccaaagctgtgaagcccggctctgccttcagccagctttgacgccaaccccacccatcacacaggcagacacttcccaaggtaaccaagggctggtggcttctaggtggtctgtggaatttttgtactgttgacatttgttgtgttaatgcctgtggctttcataatgctactttacattgtaccatctcattggtgttttgatgagcagggtgtctttttgcctgttaactayggtgaggttttcagtgaaaaaagagaatccctacacaactgtgtaggggtgaagagagaactttcccttcaccctctaaaggattgtttaaaaatcaagtcacaaaaggttgatta

SEQ ID NO: 170201 - DNA, 549 bp, Homo sapiens
ttgttgtttttccttccgaagccaagtcctcgagtttcaggtagacttcagttgatttctgcgaggtctttgctttctctctgccagaataatcactgctgaggtaactgcagacaaggtccttagcaccttagatcagtataggaaagaaaatgaaaaatgtttgtctcacctctttttrctgctgatctctacaggaaagcaaaaagccccgaagagcctggcttggaataaaaacatgcaccatacaagatttttatgaagattaaataacttgggctaaaatattctggaagctgccaagggctctacagatgagctatacagaggcatttgctgaaaactggcctggattgacaagcgcaatgcaaacgtaaggagctgaacagcctctgctgtcccggggggatggcagccagacaaggcatgtacaatactgggatgatgagaaaacgggtgtctcaagaggagactagaagagattcttggcccagcaaaaaagttaaagagggggagaaactgcaggtattaaagtcaaaagtaatagtg

SEQ ID NO: 170202 - DNA, 549 bp, Homo sapiens
ttgttgtttttccttccgaagccaagtcctcgagtttcaggtagacttcagttgatttctgcgaggtctttgctttctctctgccagaataatcactgctgaggtaactgcagacaaggtccttagcaccttagatcagtataggaaagaaaatgaaaaatgtttgtctcacctctttttgctgctgatctctacaggaaagcaaaaagccccgaagagcctggcttggaataaaaacatgcaccatacaagatttttatgaagattaaataacttgggctaaaatattctggaagctgccaagrgctctacagatgagctatacagaggcatttgctgaaaactggcctggattgacaagcgcaatgcaaacgtaaggagctgaacagcctctgctgtcccggggggatggcagccagacaaggcatgtacaatactgggatgatgagaaaacgggtgtctcaagaggagactagaagagattcttggcccagcaaaaaagttaaagagggggagaaactgcaggtattaaagtcaaaagtaatagtg

SEQ ID NO: 170203 - DNA, 549 bp, Homo sapiens
ttgttgtttttccttccgaagccaagtcctcgagtttcaggtagacttcagttgatttctgcgaggtctttgctttctctctgccagaataatcactgctgaggtaactgcagacaaggtccttagcaccttagatcagtataggaaagaaaatgaaaaatgtttgtctcacctctttttgctgctgatctctacaggaaagcaaaaagccccgaagagcctggcttggaataaaaacatgcaccatacaagatttttatgaagattaaataacttgggctaaaatattctggaagctgccaaggsctctacagatgagctatacagaggcatttgctgaaaactggcctggattgacaagcgcaatgcaaacgtaaggagctgaacagcctctgctgtcccggggggatggcagccagacaaggcatgtacaatactgggatgatgagaaaacgggtgtctcaagaggagactagaagagattcttggcccagcaaaaaagttaaagagggggagaaactgcaggtattaaagtcaaaagtaatagtg

SEQ ID NO: 170204 - DNA, 545 bp, Homo sapiens
ttgttgtttttccttccgaagccaagtcctcgagtttcaggtagacttcagttgatttctgcgaggtctttgctttctctctgccagaataatcactgctgaggtaactgcagacaaggtccttagcaccttagatcagtataggaaagaaaatgaaaaatgtttgtctcacctctttttgctgctgatctctacaggaaagcaaaaagccccgaagagcctggcttggaataaaaacatgcaccatacaagatttttatgaagattaaataacttgggctaaaatattctggaagctgccaagggctctacagatgagctatacagaggcatttgctgaaaactggcctggrttgacaagcgcaatgcaaacgtaaggagctgaacagcctctgctgtcccggggggatggcagccagacaaggcatgtacaatactgggatgatgagaaaacgggtgtctcaagaggagactagaagagattcttggcccagcaaaaaagttaaagagggggagaaactgcaggtattaaagtcaaaagtaat

SEQ ID NO: 170205 - DNA, 565 bp, Homo sapiens
gaaactgcaggtattaaagtcaaaagtaatagtgatgtcagatctgtraggtttctcctttctattcactaggactgtagatgtatgagagacacattcagggttaaggtctcattggagggcacatcccagaggcctgtgggaaaccaacccagaggggtccttgttacctgcatctcagagcacgcatggggtgacagacatgcagaagtaggggatctggggagtatagggaattttggtttctagatgtatttccagactttccaatggccaaacttcttttctgataatctggtggtatgcaggctagcaagagacttgaattggccatgtctgtctcacatttcagctattcccaggagtgcttggcaaaggaaaatgtgggtgaacagtttgacagcaaattgccttggaagcctgcagaagggtgtactcctagggaggatgataataaagctagtgtgtacttattgattattatgatgtgggctaggcactgttctaagtactttatgtgtgtcaatccttttgatcctcagtacaatcctatgaagtaggatga

SEQ ID NO: 170206 - DNA, 379 bp, Homo sapiens
ataccttgctttcattatccacaatatatttctttatttactcaatcctagaataattaagtcatctttaaaaggaggtaataataactgcctcttgggtgttgttgagaggataaaagaaayaatatgcataaaaatgcataacatgaaagggcttgacacgctgggatgaaagatcactccacagacatccagagacacacccaagttccaccaaagcttttccttggctgcttttctttgtctccacttctcattcccctattatatggtttggttctgtgtccccacccaaatctcattttgaattataatcctcaatgttgggggagggacctggtggaaggtgattggtttatggggacagttttccccttgc

SEQ ID NO: 170207 - DNA, 172 bp, Homo sapiens
ccattctacacagaagcattcagacaaacttctctgtgatgagtgcattggtcacacagaattgaacctytcctttgattgagcaattctgaaacactcttttagagggtctgcaagtggacattttagagctttggggcaattgtggaaaagtaaatatcttcacataaaa

SEQ ID NO: 170208 - DNA, 172 bp, Homo sapiens
ccattctacacagaagcattcagacaaacttctctgtgatgagtgcattggtcacacagaattgaacctttcctttgattgagcaattctgaaacactctttyagagggtctgcaagtggacattttagagctttggggcaattgtggaaaagtaaatatcttcacataaaa

SEQ ID NO: 170209 - DNA, 172 bp, Homo sapiens
ccattctacacagaagcattcagacaaacttctctgtgatgagtgcattggtcacacagaattgaacctttcctttgattgagcaattctgaaacactcttttagagggtctgcaagtggayattttagagctttggggcaattgtggaaaagtaaatatcttcacataaaa

SEQ ID NO: 170210 - DNA, 172 bp, Homo sapiens
ccattctacacagaagcattcagacaaacttctctgtgatgagtgcattggtcacacagaattgaacctttcctttgattgagcaattctgaaacactcttttagagggtctgcaagtggacattttagagctttgggrcaattgtggaaaagtaaatatcttcacataaaa

SEQ ID NO: 170211 - DNA, 349 bp, Homo sapiens
cctctggaaacaccatcatggacatacccaaaataaaacttsaacaggtttctaagtattccttaatccagtcacattgacacatgtaaaactaagttcacacatctactccttgtcaatttagcaaccatatgcatctccttaaaactatacttaatttccaaaaagaggcaataacaaaatcatacttatgcctaacatgatactactaacatgatgcaactatgctgcatacaaccaaaaacacactaatctcatccccacaattgggctttcgtaatttcaacattcagatttatggcatttagaattgcatctttcaggattatgatccaaactcctatggcag

SEQ ID NO: 170212 - DNA, 509 bp, Homo sapiens
atgaaccttaaaataaatataatctggccgggtgcagtggctcactgtaatcccagcactttrggaggccaagacaggcagatcacctgagatcaggagttcaagaccaacttggctaacttggtgaaacctgcctctactaaaaatacaaaaattagccaggtattgtggcacatgcctgtaattccagctacttgggaggataaggcaggagagtggcttgaacctgggaggcggaggttgcagtgagcagatatcacaccactgcactgcagcctgggtgacagagtgacactctgtctcataaataaataaataaataaaatccgactggaacaacagatgaaccatttaagttaaactcagaatatctaatatatttggatccccagaaacatctgctcaaaatgaccttttttttccatttttgggagcagtcttaaggaaaactaattactttttaagtagttcatattttagcccccaatttaaataatgacttctgcagg

SEQ ID NO: 170213 - DNA, 582 bp, Homo sapiens
agactacagagttgccaaaattgtgtgcacaccatgaagaaaaaagaaatataggawaaagaaatcctaggataaggactaaaaaataaataaatacaaaagccatgcaaaaatccagagccatggagagcaagcaaaaccctgataaaatgtgctaaacttctgccaaaccttgctaaaatttcagatggacagggtgcaccttactaagctcttagtttcattagctagaaaatgaggataacaactcttaccttgacagatgatttaaataataaaatagtgttgatgaaatctcccctgcaaatgatatgctcaaatcttatatcttataaagtctacagggatcttttttctcacatttaaattaaatttattctctataaaaaacttagtggaaatagtgctgctatatatgatgatcctttaaacatgtgattctatttttcacatagttgaaattttatcctgggaatatgaaagcacaacagcaacaaaaggagaggaatctttaccaggaggtagcatgaggtcagcaaaagtactgttagactagaccttaaaaacaaaagcaaatggaaa

SEQ ID NO: 170214 - DNA, 582 bp, Homo sapiens
agactacagagttgccaaaattgtgtgcacaccatgaagaaaaaagaaatataggataaagaaatcctaggataaggactaaaaaataaataaatacaaaagycatgcaaaaatccagagccatggagagcaagcaaaaccctgataaaatgtgctaaacttctgccaaaccttgctaaaatttcagatggacagggtgcaccttactaagctcttagtttcattagctagaaaatgaggataacaactcttaccttgacagatgatttaaataataaaatagtgttgatgaaatctcccctgcaaatgatatgctcaaatcttatatcttataaagtctacagggatcttttttctcacatttaaattaaatttattctctataaaaaacttagtggaaatagtgctgctatatatgatgatcctttaaacatgtgattctatttttcacatagttgaaattttatcctgggaatatgaaagcacaacagcaacaaaaggagaggaatctttaccaggaggtagcatgaggtcagcaaaagtactgttagactagaccttaaaaacaaaagcaaatggaaa

SEQ ID NO: 170215 - DNA, 589 bp, Homo sapiens
taaattaaaaatacatgtgaaatagacaatttgagaacgcttattttagtatataatcaaatccaagccaataatattcttaaaaagtccatcaataattataaaagtagtagaatatgcctaatgtatttgaataatgggtggctgccataatccaggactgttaatgtaataacatgctgtttgctcataatgacaattaaaaatttccccaagatttatttatatatgcatttcatgttctaatataccctaagggcatagttaaataacaaattggcaatatttggttcatgagcaaaaataacaaaagatctaaaataaaaatgaaatgtgtatatttaatgtacaataggcaacaatggctaaataaactttttgtaaagaaagacgataagatcttcatgactgttttgctgtcttttttgaatgttggtcacaaaactgctccatggtgccagccattattcaaaaacytaataggactgcaaagagtattttctataagatcagtagatatatccaaggatatgtaaatagtcagtgaatattacatgataatgttctcattaatcagtgtgtgctaccc

SEQ ID NO: 170216 - DNA, 620 bp, Homo sapiens
ttttggactggctaggatcttcagtaagaagtggaatagaattagtgagagtagatgatgttgccttgttaattgtccttagtgggaaagctatctgtctttcatcattaagtttgacattaactgtaaatttttcagtctttttttaattggattgaaagtattactttctaatcatagtttcttaagactttttaaattatgaatgaatattataaaatggcttatgcatacaagatgatcatctgttttttatacttttaatccatattgtaaattatattctattttaagctgttaaaaatcttgcatttttggaataaattccaatttcttgtgatactttatcttttacatatattgctggatttgatatgctgatattttgttaaggatttttgcatctatgctcttgagggatattgatctactgttttctttccttgtaacatctttgtctaatttttgtaaaaatcagaatgatgtgtttctcataaatttcgtggatagtgtttcttttcttttacttwtcaattttgttgaatgtatttgctgtaagttgttcatgatactgtcttattttaggttggacatcccttatccaaaagctccaaaatcca

SEQ ID NO: 170217 - DNA, 633 bp, Homo sapiens
taagttaatacagagaaacatcaagataagggataactgtttgacaagggtatccctgaaaacagctttttccctttcctctcttggattcatatgagcactgctaaggaaggttagaatggtggtagattatacagtaggaactcctccaggagakaaatcaggccttattgatctcttgcagttctcagtattatttttaattataataagttattgatgaatgatgaaatgtggtagttcattgttctaaatttgtcaatctaggaataaacagataaagtagcttgatatctttagtcagtcaattcaaacatgtgattggatggatggctttcactaacgtcagaaggtttgcatcatttgatggctttttcctggtgtcaacacttctttacataagcggatcaacacatcctggtctaagcaaagaacatatcttactcccctcgcccccactccccccaaaaatccctcaacatgttgtatggtctccaaggaaaagtattcaaaaagtattcaaagtcagtggggccttaaaatccttttttttttttttttttttttttttttttttagcaatccagttctgggcaagagttcaaaggaagtgtctgttacaatgttagacac

SEQ ID NO: 170218 - DNA, 633 bp, Homo sapiens
taagttaatacagagaaacatcaagataagggataactgtttgacaagggtatccctgaaaacagctttttccctttcctctcttggattcatatgagcactgctaaggaaggttagaatggtggtagattatacagtaggaactcctccaggagataaatcaggccttattgatctcttgcagttctcagtattatttttaattataataagttattgatgaatgatgaaatgtggtagttcattgttctaaatttgtcaatctaggaataaacagataaagtagcttgatatctttagtcagtcaattcaaacatgtgattggatggatggctttcactaacgtcagaaggtttgcatcatttgatggctttttcctggtgtcaacacttctttacataagcggatcaacacatcctggtctaagcaaagaacatatcttactcccctcgcccccactccccccaaaaatccctcaacatgttgtatggtctccaaggaaaagtattcaaaaagtattcaaagtcagtggkgccttaaaatccttttttttttttttttttttttttttttttttagcaatccagttctgggcaagagttcaaaggaagtgtctgttacaatgttagacac

SEQ ID NO: 170219 - DNA, 571 bp, Homo sapiens
gtcgagttaaaaagtgatacaagcactggcaaagataacaaacgtaaggagaaagtcttagaaattaaggtatttatgctggatgtggtagctcacacctgcaatcccatcactttgggaggcctaggtgagtggatcatttgaggtcaggagtttgagaccagcctggccaacatggtgaaaccctgtctctactaaaaatacaaaaaattagytgggtgtggtggtatgtgcctctaatcccagctactcaggaggctgaggcaggagaattgcttgaacctgggaagcggaggttgcagtgagctgagattgtaccactgcactccagcctgggtgacagagcaagactccatcttgaaaaaaaacaaacaaacagaaaaagaaattaaggtatttaaagtcctcatttcattcagaaagggaataaacacattgactgaattaaaactttttaaagttaaatgtacctattaaattttttgagcaaactttaaaaatatagaaatagcataagttatacattagtataaaaaaatgaagtgaaaaagatacaaattccaaaggaagt

SEQ ID NO: 170220 - DNA, 571 bp, Homo sapiens
gtcgagttaaaaagtgatacaagcactggcaaagataacaaacgtaaggagaaagtcttagaaattaaggtatttatgctggatgtggtagctcacacctgcaatcccatcactttgggaggcctaggtgagtggatcatttgaggtcaggagtttgagaccagcctggccaacatggtgaaaccctgtctctactaaaaatacaaaaaattagctgggtgtggtggtatgtgcctctaatcccagctactcaggaggctgaggcaggagaattgcttgaacctgggaagcggaggttgcagtgagctgagattgtaccactgcactccagcctgggtgacagagcaagactccatcttgaaaaaaaacaaacaaacagaaaaagaaattaaggtatttaaagtcctcatttcattcagaaagggaataaacacattgactgaattaaaactttttaaarttaaatgtacctattaaattttttgagcaaactttaaaaatatagaaatagcataagttatacattagtataaaaaaatgaagtgaaaaagatacaaattccaaaggaagt

SEQ ID NO: 170221 - DNA, 563 bp, Homo sapiens
gtgggtgggtaagtcacaacttactagtgttttgggaactggcaggaggtatccagtaaaactaggagaatttttaaggctatgcaggtgcaaatcccgctcctagcccctyttttagacactactagtaagaatagtattttgaatttacttttcagcttacctgaagaaatttagagtattttttcagtgtcacatgggtttctatatatttgccataacagacttgattttaagtcactattttggggcattagttattcttggatactttggacagggtttgagcagaaagctgtatttttatatgttaaaatctaagaggtgccttggagcctttagaatcatttaactatttattttttgagactattaaaggtgatctttcttttcacactttaaaaaacatatataacaatttaggtctctaatggaaaaaaatcccagcattaggtaattatataaaatattaacctgtatatttttcaactcataggaagctgtagaattaataattattgtaaaaagaaatttttatatgtttaattttttttaattttgaa

SEQ ID NO: 170222 - DNA, 563 bp, Homo sapiens
gtgggtgggtaagtcacaacttactagtgttttgggaactggcaggaggtatccagtaaaactaggagaatttttaaggctatgcaggtgcaaatcccgctcctagcccctcttttagacactactagtaagaatagtattttgaatttacttttcagcttacctgaagaaatttagagtattttttcagtgtcacatgggtttctatatatttgccataacagacttgattttaagtcactattttggggcattagttattcttggatactttggacagggtttgagcagaaagctgtatttttatatgttaaaatctaagaggtgccttggagcctttagaatcatttaactatttattttttgagactattaaaggtgatctttcttttcrcactttaaaaaacatatataacaatttaggtctctaatggaaaaaaatcccagcattaggtaattatataaaatattaacctgtatatttttcaactcataggaagctgtagaattaataattattgtaaaaagaaatttttatatgtttaattttttttaattttgaa

SEQ ID NO: 170223 - DNA, 589 bp, Homo sapiens
cttctacaattttactgcttggtaaactattttttcctgcatattttctttgtaaaacaatagatatatacaggaattaaaaaaatttcttagtatgtggggtttccttgagtgaaaatgcaatatgtcatgatgattaagtgtgaggaaacttgagtcatactgtccaggtttatatcctgagtctatatctgagagctgtgtgaacttgaacaaattacttaaacttgtttggcttcatatttcttattttactccaaaagattgatgcaaaaattaaaatctctctctctatatrtatatctatagatataatatttatgtaaaacatattatgtataatatatttataatagtccatgaaactagcaaatgctatagacatgctggcataatagcctaattttactttatattttacagttttgttgtaagaaaatgtggcctctatgatttctactttttagcctttatttgtggactatgatcacacttagtacaagtccataaatatgttccttactctatatgtaaaagccatcacttcctttgcctggcactatcaaagatgaagggaagcagatcatta

SEQ ID NO: 170224 - DNA, 535 bp, Homo sapiens
ggacctggtaggaggtaattgaatcgtgggggcaggtcttttctgtaatgttctcatgaaagtgaataagtctcatgagatctgacagttttataaggaaaagttcccctgcacaagtgctctctttggctgcagtcatccatgtaagatgtgacttgctcctcattgccttctgccatgattgtgaggcctccctagccatgcagaactgtaagtccattaaacctctttttcttctcagtcttgggtatgtctttattagcagcatgaaaatggackaatacagccattaaacaccagagtttctatgtctggtttctttccctctgactaccccaattcactccacctcctcttccaggaagtacagaaattgcaaacaatagagatgttcattggtcaaagctcttaccttaaaaagtatttgcttttttgccctactattttggacatactgaaatatacctgatatggtttggagatttgtttaatccaaatctcatgttgaaatgtgatccccattgttgaaggaggg

SEQ ID NO: 170225 - DNA, 630 bp, Homo sapiens
ctgccttcatccaagtttattactggagctgatgccaaccccgcagtcattccagtaaggtttgcatctgataattttccccaccatcctgactgaacccccacagatgtgaaagcagcaacaggaattgctacagtacaaactagtttctttgggaactgaaaaaaaccattgatttcaatttcagtacatattttgcaacacttaatatttgatacagaatagaactctggaggttttccttcttaaatctgctttttcaaagtgagccaaartgtgaaatcacatgattttggtctgttagtttttccttcacctttcacaatgtggcactgattttgattgacatttgaagacagagactaatttattaaaatatttctccctgttctttttctttttgcttttaaacatcacaagtgaaacttctggtaatttcaagagtgtacactttaaataagaataaaagccagtgggcatctggcaagatggttgaaaaagaaaagcttttgttggcagctcccacagagaccaacaaaagaccggtaatttctgcatttccacctaaggtacccagttcatctcgttgggactggttagacattgagtgcagcccacaaaaggcagcag

SEQ ID NO: 170226 - DNA, 597 bp, Homo sapiens
agttgcaccggtcactaaggtggggattcacatcaacaaatatttawtgagcttctagaatttgccagaaactgtatcaatgctagggaaaggccaggcccagtggctcacgcctgtaatcccagcactttgggagtctgaggtgggaccaccacttgagcccaggagtttgagaccagcctgggcaacatagcgagatcctgtctctacaaaagaaaatatgagctaggcatggtggtgcatgcctgtagtcccagctacttgggaggatcgcttgagcccaggaggtcgaggctgctgtgagccatgtttatgccactgcactccagcctgggcaacagagtgagaccctgtcaaaaaaaaaaaaaaaaaaaagctagggagaataccaaaataacttaagacctggtgccactgtcaacaaatttgcaatctattgtgcagacaaacatgtaaacaacaatataagataaaggaaatagctgtctcagcagtgtgggtttttaactgaggccacgggatgggcccctgttctgtgacctgcaaatattataggcaaagtgtgcatgtgcaggcctggagctctgcctggaggtg

SEQ ID NO: 170227 - DNA, 597 bp, Homo sapiens
agttgcaccggtcactaaggtggggattcacatcaacaaatatttattgagcttctagaatttgccagaaactgtatcaatgctagggaaaggccaggcccagtggctcacgcctgtaatcccagcactttgggagtctgaggtgggaccaccacttgagcccaggagtttgagaccagcctggrcaacatagcgagatcctgtctctacaaaagaaaatatgagctaggcatggtggtgcatgcctgtagtcccagctacttgggaggatcgcttgagcccaggaggtcgaggctgctgtgagccatgtttatgccactgcactccagcctgggcaacagagtgagaccctgtcaaaaaaaaaaaaaaaaaaaagctagggagaataccaaaataacttaagacctggtgccactgtcaacaaatttgcaatctattgtgcagacaaacatgtaaacaacaatataagataaaggaaatagctgtctcagcagtgtgggtttttaactgaggccacgggatgggcccctgttctgtgacctgcaaatattataggcaaagtgtgcatgtgcaggcctggagctctgcctggaggtg

SEQ ID NO: 170228 - DNA, 551 bp, Homo sapiens
ggaataatagaaggaatctttgcaatgctgggcctggcagcaccgccctgtgagatcagacctcacgtgaaccatgttctcacgtcacctgaggcatgcaggtagactccacaaaccaggtgtgaatacttattagggatgcttaccatgtaagawataattagaaaaggtaaagggctcctattacgtggcgggctcccaaatttgtaattttacttaatcactgctggaacctgtgacagaagttagaaaaacagactgtggctcagaggggtgaaatgaacttgcccagaccacaaagagggaaatggttcaatctggatttgcattaagatccttctgttttcaaaactctctttccaatacactatactcatacttctccctaccctgcaaaaaaagaatgaaaatgcagaattaatcaccatgcaggttcaaaaacaaataaccctcttttgatatgccagtagcatatcacacatagaggccttcagctaaataaacaatcaattagggaaaggatagaaatgttaatattggtaaaacctact

SEQ ID NO: 170229 - DNA, 188 bp, Homo sapiens
ctctggggaagttgatcttgtcagtcagcccttccaggtgagactccagcactgccttgttcatgtaagctccatccacatccttctcgatgaaggcaaattcattccccatctctgtccrctcgttgatctcatcctggtacttatcgttgaagtcttccagcagcccctgcgtgttgccaagatct

SEQ ID NO: 170230 - DNA, 609 bp, Homo sapiens
gaagctttcacttgaagaaagggcttctcacgtatagactgcttaggaagccagagggtcaggcagaaggcagggctccagcattgcagggaggagggctcactcagctcaacactgcccagctctgagtgaggccagagagttatgcctcccttgcctgtgggtccctgtgccaacctagggaccatcctcagagcccccacacctgctgctcacagccagaatgtaggacccgcttagctgctctcagaagagtcctgttcagcaagccgtttaaactcactcctcccatcccacccagcccatcgcctcttccattccctgagctacacttgatagttgtaacaacagctaacctttgttggttctcttctatgtgccaagcagttctgtgaggggagtagtagtattggcctgcattttacaacagagaaaactgaggcacagagagattaagtggtttgatgtaaggcaaccagtagagcagggatttgatctgctcttgcctgtctgaccacagaggcagagccckggcctccatctgccccgccatttgctactccagcagctgcactgcccccagcatctgtcctgcagggactgaactga

SEQ ID NO: 170231 - DNA, 648 bp, Homo sapiens
ttttaagtgctatgtaacctacactgtcaaaataagtatataccatactaaaatggctactttaaatggcaatacttatttacatatctaatttctgacatgttcatttaaaaaccaattttaccattacctggtaatatcttatattcaggaagtattcaacaaacttttgctaaggataaycattttaaaatgaccacattaatgtcttaaattttattcctatgataactttattcctttaaggacttaccttagctgcatgatatgtaccagcttcaagtaattcttttttagcttctttggcaagcaggttaaaccgacttaacattgcagccttacaaagccgacttgccattgacataccacttttaaatggggaactaagcagagagaaataaaattttttaaatttctttttcagtaatttatgttggcaattgtatagattaaaatcaatatggatctacaaaatatttcttgattatttgcaatatacatagtaattttttttttacataagaggcattcttaatatttactttctgaagtaaatttcttaaattacattttaaattatttagtattgcatcaaaaattaatgtagaagattgaccttggaacatttctattgtatgaagcaaaatt

SEQ ID NO: 170232 - DNA, 648 bp, Homo sapiens
ttttaagtgctatgtaacctacactgtcaaaataagtatataccatactaaaatggctactttaaatggcaatacttatttacatatctaatttctgacatgttcatttaaaaaccaattttaccattacctggtaatatcttatattcaggaagtattcaacaaacttttgctaaggataaccattttaaaatgaccacattaatgtcttaaattttattcctatgataactttattcctttaaggacttaccttagctgcatgatatgtaccagcttcaagtaattcttttttagcttctttggcaagcaggttaaaccgacttaacattgcagccttacaaagccgacttgccattgacataccacttttaaatggggaactaagcagagagaaataaaattttttaaatttctttttcagtaatttatgttggcaattgtatagattaaaatcaatatggatctacaaaayatttcttgattatttgcaatatacatagtaattttttttttacataagaggcattcttaatatttactttctgaagtaaatttcttaaattacattttaaattatttagtattgcatcaaaaattaatgtagaagattgaccttggaacatttctattgtatgaagcaaaatt

SEQ ID NO: 170233 - DNA, 723 bp, Homo sapiens
tgaattctatcagacattcaaagaagaattggtaccaatcttactgaaactattccaaaagatggagaaagagggaatgatccctaaaacattctatgaagccagtatcaccctaataccaaaaccagcaaaagacattaaataaaaagaaaactaaagaccaatatccctgagtaacatagatgcaaaaatcctcaacaaaaatactagctaactgaatccaagagcataaaaagatcatayaccatgatcaagtgggtttcatactagggatgtagggatggtttaacatatgcaaggtgataaatgtgatacaccacataaacagaattaaaaacaaaaattatgtgatcatctcaatagataaagaaaaagcatttgacaaaatccagcatcgctttaagattaaaaccctcagcaaaattggcataggagggacataccttaaggtaataaaagccatctatgactaacacacagccaacattatactgaacagggaaatgttcaaagtattcaccctgagaaagaactggaacaagacaaggatgccttctctcatcatttctattcaacatagtactggaagtcctagccagagcaacctgacaaaagacagaaataaagaacgtccacatcagtaaagagggagtcaaactgtcactgttcactgatggtatgatcgcatatctagaacaccctaaagattcatccaaaaacctc

SEQ ID NO: 170234 - DNA, 355 bp, Homo sapiens
tgttgtttaggtgaagatggatgatgccttccttgaatcatcagctaccaccgacagagtgaagtgagatggaatagtgggcacaatctcattcatcctactctatgtagcctaatgggtccagaatttatyatcactattttacactggaaaaaagatgagattatgaggggtcagggaggctttgagtttttgctctaacttcaccactaattaagaatgtgatcttgggtaagccactttaacctctgtaaatgtcaaatttcttatcagtaaaatgtgactatacaagacaataaatttgaaaatactttgcaaaattgaaagtaccatggaaataattcttcaatcccaa

SEQ ID NO: 170235 - DNA, 236 bp, Homo sapiens
aattaccgtaatgactatctcatagatgagtaaaaaasgtacacagagaagtaactggtcctaggtcacacaactagtaacttcaattgaagttgcagctttctcgggcttgagtgacaaataatggtcattaaaacaaaataaacaaattatttgaaatgaatgtgtcaaatgacctccaagtatcacaaagccattggttttcgttcatgacaagcccaccaaagcaaagaatt

SEQ ID NO: 170236 - DNA, 521 bp, Homo sapiens
tattttttcttacaatgaccaacagtttacattttccaagagcagtgtgagattactggaggaaagctaactagttacacggaaattaagtccaccttctacattaccaccaccatctatgttaagatactatttctgtcacctgttagtttactggtattccacctaaaacaacagactgaaacttgatgtcgctgtaactatctttactaaaatcttgacatgttaaagttatttagcaaagatgttagctttgagatccatattggcaagttagcaccaggaaaattaaagaaacaacctaactactcatgtgtgtgtacaaacacacacacatgtacatatacacaaagtttttaaaatttaaaattttaagctgtcaatgcctcttaagagcacttatccttccactttcctaaaatcttcctaatcaytggctataatgtgaagagatcagaaactactttctgcattttccttatctgtactcgtgtagcctttcacaggcacagcatggttac

SEQ ID NO: 170237 - DNA, 601 bp, Homo sapiens
tctgttcctcatagtactgttataaagatttaacaaaatgatgtattgaatgtacttttacaactaagaagtccttacttttggtcttctctgtgaaacctatgatatcagtctgaccgttgaaccaaagagattgtttttccctcagctttatggaagtaccttaaaaaatacataaaaattgtatttaaggtatacaacttgatgttttgatatatgtgtacattgtgaaataattgccaaaatcaaactacaggcatacctcattttatggagctttgacttattgcactacacagacattgctttttggttgttctgtcttttaacaaatgaaaggtttgtggcaattctgtgtggagcaaatctatcagcagcattttgctaacggcatgtgctcattttatgcctctgtgtcacattttgttaattctcacgatttttcaaactttttcattattattattctgttatggtactctgtgattggtgatctttgatsttactgttgtaattatttttgagccccagaaaccatcatgatacaagaccacaaatttattgatatatgttgtgtgtattctgactcttcccctgactg

SEQ ID NO: 170238 - DNA, 581 bp, Homo sapiens
gaattcatatattctaaaaactctttaatttcatctaaattttaaaatgtgttaatacaaagttgtatatcgaatcttctcatgatggaaatttcctttgtatctcatattatatcytgtttttaaatctttaagattatttatgtcctcttaatttttcttaacatcagacttgtgaaaggatagactattggggggtattttaaaatactgaggattatgttctattgatcaactctatattttatagaacaatatcattaatatctactttatctttataatttattatttctacttcatttaggttttttccattgttcttttattgagttttggatttcaatgctaatttcatcctctctgcttctctaagaaatgtatttataactgtatatttttcttcaagcctttctatggccacaccctgcatgctttgtgttttttgtagggccttcgttgaccttgagtaaccttataatttgctttgttttcttcttcatcacaagaataattttggttactttggtttttattttgtcattaatttctaattttgttgcattgtgatcagaaaatat

SEQ ID NO: 170239 - DNA, 497 bp, Homo sapiens
tctactttatctttataatttattatttctacttcatttaggttttttccattgttcttttattgagttttggatttcaatgctaatttcatcctctctgcttctctaagaaatgtatttataactgtatatttttcttcaagcctttctatggccacaccctgcatgctttgtgttttttgtagggccttcgttraccttgagtaaccttataatttgctttgttttcttcttcatcacaagaataattttggttactttggtttttattttgtcattaatttctaattttgttgcattgtgatcagaaaatatggcctgtgatttctgttttggagaattcgttgtcatgcatgtttggaaagaatattatctgcggtttgttggttatgaaaatatataaagttaagcttcataaatgtgtaattagaagctctacataccaatgcttttgtatttttgatatcagtttctgagaaattgtattaaattttcta

SEQ ID NO: 170240 - DNA, 561 bp, Homo sapiens
gtataaaaaagggaaggagaactgccctaggtgactctgttgtgagatgggcagttggtaacaaggagaaacgcaccaggggctgttgtttgatgacatgacaaactggaaccatctgggaggagtctgtttatattttcactggactcaaaaagatgctatagctccattttggcaagaaacaaggaataaatgggctttatttaaactgcagctgcagacctcatgtgtacagattaacaaaccaggctccacagcaacactttggccagaaatgcagaaacagcaaaatataatcaaatccccagccacactcaaatcarcctagccagctacttaattttttggtcaatctctggttcaagacctaatggtacttggtcttagagatgtataagacaaagaaagtgtccctgcacccacctctataataataccttacaattgaaaagagtctactgtttatatagcactttcattttatttaatggggtagttgtaagaacaaaataagaaaaagtgtgaagttttatcttattaatcatctttatcatcaccagc

SEQ ID NO: 170241 - DNA, 595 bp, Homo sapiens
atggatggatgaatgaatggatgggatgtatgggtagaagagacagagctatagaaaggtaaaaagatcagtagyataaaattacagttaaatatttgggctatggagcaacgctgagttcaaatttcagttctgccacttatttgctatgtgaacctggccaacttactcaactagtccttagtttctacatctgtgtaatggggcagtatcctcttttagggttatgattaggattagatgaattaattcatgtaaagtacttaaaacagtgtttggcgtggtaagcactcaatagacattagcttattttattttattttattttatttttgagatggagtcttgccctgtcacccaggctggagtacaatgtcgcgatctcagctcactgcaacctccgcctcccaggttcaagcaattctcctgcctcagcctccaaagtagctgggattacaggcctgtgccaccacgcccagttgatttattattattattattattatgagacagagtttcactcttgttgcccaggctgaagtgcaatggtgccttctcaactcactgcaacctctgcctccccagttcaagcgat

SEQ ID NO: 170242 - DNA, 587 bp, Homo sapiens
tggccatctccacttcctcacctaccattttttctcaatacaccatgatcaaatttcaaatcaatgaagctgtgttgctgttgattatcatattgatgatagcsaaatcacatggtcactcctcagttcttatgttttagagttgttggtgtacaagtggcatttacatcgcagggctggataagactacatggaggagagagagacagaaagagagggagagaactgagcccttcaaaattataaaatcagggacatgaataaaatcatcaaaagatccttcagtttgttgttcccttctcatgctgcatatactctctgggaattctcaaccaaactcatgacttttcctatcatctactgccaggccttcttgacgtccagtgccaaatcaccatctgactgctaatatctcagaaactttctattctacatatccaaaggactactaattatccctccctaacccaccaatgcaaaagaaactccttctcccataagcccattctgatttatagaatcagcacctagacaggaacttgagtcagaaactcgggtgtcatcctagtctacttcgtttccttctt

SEQ ID NO: 170243 - DNA, 587 bp, Homo sapiens
tggccatctccacttcctcacctaccattttttctcaatacaccatgatcaaatttcaaatcaatgaagctgtgttgctgttgattatcatattgatgatagcgaaatcacatggtcactcctcagttcttatgttttagagttgttggtrtacaagtggcatttacatcgcagggctggataagactacatggaggagagagagacagaaagagagggagagaactgagcccttcaaaattataaaatcagggacatgaataaaatcatcaaaagatccttcagtttgttgttcccttctcatgctgcatatactctctgggaattctcaaccaaactcatgacttttcctatcatctactgccaggccttcttgacgtccagtgccaaatcaccatctgactgctaatatctcagaaactttctattctacatatccaaaggactactaattatccctccctaacccaccaatgcaaaagaaactccttctcccataagcccattctgatttatagaatcagcacctagacaggaacttgagtcagaaactcgggtgtcatcctagtctacttcgtttccttctt

SEQ ID NO: 170244 - DNA, 603 bp, Homo sapiens
gagagaactgagcccttcaaaattataaaatcagggacatgaataaaatcatcaaaagatccttcagtttgttgttcccttctcatgctgcatatactctctgggaattctcaaccaaactcatgacttttcctatcatctactgccaggccttcttgacgtccagtgccaaatcaccatctgactgctaatatctcagaaactttctattctacatatccaaaggactactaattawccctccctaacccaccaatgcaaaagaaactccttctcccataagcccattctgatttatagaatcagcacctagacaggaacttgagtcagaaactcgggtgtcatcctagtctacttcgtttccttcttaatcgatgtccagtttccactggcatgcttattctacctctttaacatttcctccttcacatccatcccctctgctccaccccaatgttacaggcttggatcaggacctcatcaattttcagtagaattaatgccatcatctcctaactagactttctccctccagttttattcattccttcttatctaccaagtatcccactgctgaaataatgtttatgcaacacaaatcag

SEQ ID NO: 170245 - DNA, 603 bp, Homo sapiens
gagagaactgagcccttcaaaattataaaatcagggacatgaataaaatcatcaaaagatccttcagtttgttgttcccttctcatgctgcatatactctctgggaattctcaaccaaactcatgacttttcctatcatctactgccaggccttcttgacgtccagtgccaaatcaccatctgactgctaatatctcagaaactttctattctacatatccaaaggactactaattatccctccctaacccaccaatgcaaaagaaactccttctcccataagcccattctgatttatagaatcagcacctagacaggaacttgagtcagaaactcgggtgtcatcctagtctacktcgtttccttcttaatcgatgtccagtttccactggcatgcttattctacctctttaacatttcctccttcacatccatcccctctgctccaccccaatgttacaggcttggatcaggacctcatcaattttcagtagaattaatgccatcatctcctaactagactttctccctccagttttattcattccttcttatctaccaagtatcccactgctgaaataatgtttatgcaacacaaatcag

SEQ ID NO: 170246 - DNA, 547 bp, Homo sapiens
tattattcagttggttttgatgctggcttggtctgaggctgaagccctaatgctgggcttttatcatattatgaaggctgaaacctcatgctccagagtagacagctgagcccatcttagaccctcatttctgagcccctaatgtctgcttaatggctggccactgcgacctggtacacggagtatcagcccatgtcaattagccccattataaaccctgaagaaataagccatcctttcctggtcccttcctcttgccttcmtctttcattgtaacatgaattgtgctagcaatgggcaccaagtagccagcatgtgtactgaataaaagcaaggaatatgtagtacaatgacaatgagattggttgacaataaatatgtgtcgtttgcaatctaaaaacagacaaaatgatcatttaaaaaagatgggttcatgagtttatgtccatcattcataaaggtaaggtctattcaatgccacttaaccagctttgatgatagaatttatgaggttgtaccaggttggaatgataaagcactcaaaggt

SEQ ID NO: 170247 - DNA, 482 bp, Homo sapiens
agtagtgaggtacagggaaggggaagcattctatagttttataattatatctgaacctttttttaaaattaggacagagcgaagctctcactctggtacctaagctggaatgcagtggcataatcttgactcactgcagcctctacctcctgagttcaagccatcctcctgcctcagcctccygaatagctgggactactggcacacaccaccatgcccagctaattttttttttttttggtagaaatggggtctttctatgttgcccaggctggtcttcaacatctggaatcaagcactcctcccaccccagcctcccaaagtgctgggattacagatgtgagccaccacacttggcctgtctcagtctttaagtgagcctgtggcccaagggtctgaacttcacaagtgcccgtcacttcttttcccagaattaggtgggacaagatggctggcgggagctggagttgggtatcttctgt

SEQ ID NO: 170248 - DNA, 583 bp, Homo sapiens
gggcctcatgggaggtatttggattatggggatggatccctcatgaatggcttggtaccatctttgtggtaatgagtgagttcttgctctattggttcctgcaagagctggttgttaaaaagaacctagcaccttttccctctcttgcttcctctctcaccatgtgatctctgcacatgctggctcccttcggccttctgccatgagtggaagcagcctgaagccctcactggaagcagatgctggtgcaatgcttcctgtacagcctgagaaacatgatccaaataaatctcttttctttataagttacccagcctcaggtattcctttatagcaacactaggtggaccaggacaacatggcaataaacagaccacaaaaaggacacttgtttatagtatgacagctaaaacaagacagctgggtatcactttgtttgacctcaactgggaatatgcacattgggtaaatccaattttttgttgttctgttcatatccacaratgactgtgaaaacactatgaatgtttatttttgggattacaaataaattttagcaagtaggcgaattcacaaatatgga

SEQ ID NO: 170249 - DNA, 474 bp, Homo sapiens
tctgcagaaggcctgtggttgcccacggagcttccagtcctctctccctctcctaacagcacccagatattcctttgcggggccacctcttctccactgtgtragtaccatgaggtttggatgggactatgtccaaattcagtttcaggagaatagtggttcatattaccataatcccattctcttggcttcaatgactggttcagaaatatacagtcagccaagcctatgagaatatagcaaaccaggctctttcccctaaatgggaacagggatatctatagtttgggtttcagcaggcagccgtctcatggcccatgaggtaaaacattccaaggatgaagcccaggcacaaaaaagggcagagcaagaagtgctgcagaaaaacagagctagagtcctgttcaaactgtgcctgaggctcacatgacctctgcacttgccagtttccaggtgttctaggtttgcagaatc

SEQ ID NO: 170250 - DNA, 342 bp, Homo sapiens
aaacagtgtttagcaattttcttctccttctttcctcccttccacttttgctctctcctttccttttttctcatcttccttcctttcctcctgaattctccaactcagggctgcaagtattcatcaaytgaagaacgaatgtccaccctctaagagcttgtgcatatagccgcaatgcgaggatgacttactctctttcagcttttttgcccgtctcagaacacaactttctttgtgaaagtctatacccaaagacagtgcaaaatccctcttaagtctgactaacaccctcatttgttaggaaattcttatctctgcaaggcccagcatttgtagtaacaa

SEQ ID NO: 170251 - DNA, 538 bp, Homo sapiens
  misc_feature (1)...(538): n = A,T,C or G
agcaattgtatttcatttctcttatctgaaatctctgctgactttccatgtcttatgaatttaaatagtctaaatagggcatgagatcttaaatattccttccagtttctacattttctattcagcaacaacattttcccyggaaaagggtgaaagcctgtgagtcccccacagggcaggagcactgaatacacccacattttcctaccatctgacatagatgagacacaaagtagggactcagatgattatttaactgaatcaactggattccttaattctcacaatattatccttcctaatttgtaaatagggaaatggaggcttagtcacacaaaatatcttgttcgaagttactaatcaattaagtaacttaataatttattgacatctgaggcatttctctctttctacagcctcagaccagaaatgatgggatttcagccttcttttcttagagattggtgagccaagacctggagagagaactctggttgtcttaagtcacccagatgaactattaatagancacgaattc

SEQ ID NO: 170252 - DNA, 454 bp, Homo sapiens
caaataacatgagggacattacaactaactgagtaggctcttctgtcatgatttggaccttaagggtaaagtgtgtgggaaaatgcactttaattcctttgaatttcagcagatttgcctgagcttgtatcacagaatggaacaccaaggtaagataatttttaaaagttaacagtctattagaatacaataggtaggtgtrctggaatgctcccatactcaaattcaaggtcttgactaagtttagttgatctccaaggacaattggtataacaaaggtatcgaacagcaggtctgaggaaagctcagcaaagctcagaagcctcatgcaaggtattagggaaagtttaatttgttcgttgtaagagccaaaggaaaacaatcaaagaccaaattgtgagtgtgaatacaatattcattatataacacataacctgccacttgacatatttgc

SEQ ID NO: 170253 - DNA, 528 bp, Homo sapiens
gtcagcgtttcctcctgtaggcatagagatctgagtaatgtgttccatagaactggaagaagatgacagacagacagcagatgatcgatatttcataaaaattctaactaaaagctgatatcttgcacatagtgggtatttaataaatttctctagaatgawttcatgaatctcaatgtcagtaattagcatgcagtgggtagaggtagagtacaactgcaacactaaaggattaaatcaaatccatccacttatggatgacccatataatcgcactgcacatttataattgatatggcatttatgtttctcatggctctgccacactgtctcactgccactcataacagccccacaagcagaaaattttccaactctcattttataggtgaagaaactgagatggacattaaataacataatggaaattgtattgctaaggacctaccgaattgtgatttaaattcagttctactgtttcccagcacagtggctttttcttaaagtggaagtttgtctacgaaatac

SEQ ID NO: 170254 - DNA, 447 bp, Homo sapiens
tgatcgatatttcataaaaattctaactaaaagctgatatcttgcacatagtgggtatttaataaatttctctagaatgatttcatgaatctcaatgtcagtaattagcatgcagtgggtagaggtagagtacaactgcaacactaaaggattaaatcaaatccatccacttatggatgacccatataatygcactgcacatttataattgatatggcatttatgtttctcatggctctgccacactgtctcactgccactcataacagccccacaagcagaaaattttccaactctcattttataggtgaagaaactgagatggacattaaataacataatggaaattgtattgctaaggacctaccgaattgtgatttaaattcagttctactgtttcccagcacagtggctttttcttaaagtggaagtttgtctacgaaatac

SEQ ID NO: 170255 - DNA, 447 bp, Homo sapiens
tgatcgatatttcataaaaattctaactaaaagctgatatcttgcacatagtgggtatttaataaatttctctagaatgatttcatgaatctcaatgtcagtaattagcatgcagtgggtagaggtagagtacaactgcaacactaaaggattaaatcaaatccatccacttatggatgacccatataatcgcactgcacrtttataattgatatggcatttatgtttctcatggctctgccacactgtctcactgccactcataacagccccacaagcagaaaattttccaactctcattttataggtgaagaaactgagatggacattaaataacataatggaaattgtattgctaaggacctaccgaattgtgatttaaattcagttctactgtttcccagcacagtggctttttcttaaagtggaagtttgtctacgaaatac

SEQ ID NO: 170256 - DNA, 460 bp, Homo sapiens
gcttggtccacactctgtattttagggtcttagcccctaggttctgcagctatttcaacagtttccttttgctagtcatgtgaaactgcccctggaattttctattctgtgaccatcctgtattattcctgtctcargttgaatggtgtccccccaaaatttatgttgacctgtaacttcagaatgtgattgtgatactgtgaaatatatatttggtcttcaaccccgttttctggcataaaactgctaaaattcttagaattaccaaaatgatgtctgtttatatgctactgattgactggtggctggccatccaagggtagcttcaggatggggcagatcacaagaaagatcaaggcaggattagagggctgggactttcagccccacccctaaccttcagggaggggagagggtctgaagtgcaagttgattaccaatggccactggtttaattaat

SEQ ID NO: 170257 - DNA, 572 bp, Homo sapiens
caagactacattgcattagccatgacccttagtagcaaattaggttcctgagctctatttcttgctacacatgaagctgggaccatctgtaaggatctcacaagagcgtccatgaatgctcttgctagaataagtagtgtaagcagctagattttgcatgattgtgtctgttggcagaggctgcccattgtgaacctgagttggagggaaccgtgaatgagtagtttttagcttcttagcctctagcatctgtaaggcatactacaaagggaggaaataaagaggcatgagtccatctgccacatctaccacatctgttgtttgtgtttgcctggcaccacatcatcctgtttcttatggaaacrgaacttttttttttttttttcctgtaagggaataatgcagtcaacggtatacactgactcagatctaccagttagactaatctgtcccctagacactgtaatttgtttatagatgtgccattgatccattttggttctggaagactcgtccccaaggctcctctgccaaagctatgaaaagagacttgttcttactaccaagaatcc

SEQ ID NO: 170258 - DNA, 640 bp, Homo sapiens
tgttgggttatgcccttaaattacttattccttacaaatactttacttttttgcaaaccagaatcactgactgtcaattttatgagacacactgctcagaagtctccagagcatgcccccatttaaaaaaagaattctctgatctgtctgactgagttgagttttaggttgtgattagaactcctagttaatctctgcaaacatggagatgtggaaaggaactcagcagaaaagcaattgaggggctctctatgattgtttttcccattaaccaagtctattgcaatccctaagccagctgtggcaagtctatttaataactttattttcatttcctgattttttactcagtttctcctgcagtcctcattcccggrcagcctggattcattgtttgttatttccgtccatatgctactttaaaataatcacatgtggatttatgttgaagtctgtccttagcattggtttccttggccagcagttatcagtgatggaaatcaatgtaacaaaagacttggataaaccatgaagggagaaaaacaagaaagacatccacttctccagcataatgttccatagggtgctgaaatgttacgttttatttttaattgaaaataaatttttccacacaaaggcc

SEQ ID NO: 170259 - DNA, 579 bp, Homo sapiens
ggtggttaggaaagaaggaaacagtaattggaatcattttcctagtattatttaacaacacagttatcttaaaagagtgatcacatggtgtttggtattgagctacaatttaattgtaactttgaaacaacaacaagaagaaaatcaatattttagcctkctctgagtatgtgcctgaaggctcctatttgagctaagggtctaggagttaaaacttcatggttaaagcttccaattatttagaggatggagtattgtttttctgcacagtatctattctatatcagttaggataattcaggtttttgccgctgtaaccaacaacccccaaatcttggtggtgcataacaagaaggacttatttcttgcttagatgcatgaccatagcggtttgtctgagggctgttctcatgtggtctctcagagactgcggttgagggagatttcctcttgatatatgtttccttgatttctctgcaacagtgggtgggaacatagagaatcacaaattggcctacaaagcttcttctagaaatgatactagtttatatctcataggccaaagcaagtcacttgtct

SEQ ID NO: 170260 - DNA, 579 bp, Homo sapiens
ggtggttaggaaagaaggaaacagtaattggaatcattttcctagtattatttaacaacacagttatcttaaaagagtgatcacatggtgtttggtattgagctacaatttaattgtaactttgaaacaacaacaagaagaaaatcaatattttagccttctctgagtatgtgcctgaaggctcctatttgagctaagggtctaggagttaaaacttcatggttaaagcttccaattatttagaggatggagtattgtttttctgcayagtatctattctatatcagttaggataattcaggtttttgccgctgtaaccaacaacccccaaatcttggtggtgcataacaagaaggacttatttcttgcttagatgcatgaccatagcggtttgtctgagggctgttctcatgtggtctctcagagactgcggttgagggagatttcctcttgatatatgtttccttgatttctctgcaacagtgggtgggaacatagagaatcacaaattggcctacaaagcttcttctagaaatgatactagtttatatctcataggccaaagcaagtcacttgtct

SEQ ID NO: 170261 - DNA, 579 bp, Homo sapiens
ggtggttaggaaagaaggaaacagtaattggaatcattttcctagtattatttaacaacacagttatcttaaaagagtgatcacatggtgtttggtattgagctacaatttaattgtaactttgaaacaacaacaagaagaaaatcaatattttagccttctctgagtatgtgcctgaaggctcctatttgagctaagggtctaggagttaaaacttcatggttaaagcttccaattatttagaggatggagtattgtttttctgcacagtatctattctatatcagttaggataattcaggtttttgccgctgtaaccaacaacccccaaatcttggtggtgcataacaagaaggacttatttcttgcttagatgcatgaccatagcggtttgtctgagggctgttctcatgtggtctctcagagactgcggttgagggagatttcctcttgatatatgyttccttgatttctctgcaacagtgggtgggaacatagagaatcacaaattggcctacaaagcttcttctagaaatgatactagtttatatctcataggccaaagcaagtcacttgtct

SEQ ID NO: 170262 - DNA, 523 bp, Homo sapiens
agtcttgaatccaccaggctctgttatgtgaatatgggagggcccacttagagtcatcagcatcagtttcctcatctgcactttagggtgatgctctactttccttgcaggatttctttggtgggggtgatcaagtgatttaatgagatataaattgttggaagagtcattagcactgtggaatgagctgtggaatagagcaaagagtatcggatgcaggggtcagrggaagtgtgtggtcaagtgaagacagcacgggttgaatcataaagtggagcttttctaactaggggatttgctaaagtttggaaatgtagccctgtctttggagggtgacttgtttgttatgagggtatttcaatactgtatttttcattttgatgaaaatctaacaaaaacaatataagcctgttttggatcatctggttctccttataaccaagtactgccatgcaatgccagtgcctacatttgcactggtgtttacaacagtgttggagccaagacaagaaagaccactttg

SEQ ID NO: 170263 - DNA, 486 bp, Homo sapiens
gagggcccacttagagtcatcagcatcagtttcctcatctgcactttagggtgatgctctactttccttgcaggatttctttggtgggggtgatcaagtgatttaatgagatataaattgttggaagagtcattagcactgtggaatgagctgtggaatagagcaaagagtatcggatgcaggggtcaggggaagtgtgtggtcaagtgaagacagcacgggtygaatcataaagtggagcttttctaactaggggatttgctaaagtttggaaatgtagccctgtctttggagggtgacttgtttgttatgagggtatttcaatactgtatttttcattttgatgaaaatctaacaaaaacaatataagcctgttttggatcatctggttctccttataaccaagtactgccatgcaatgccagtgcctacatttgcactggtgtttacaacagtgttggagccaagacaagaaagaccactttg

SEQ ID NO: 170264 - DNA, 523 bp, Homo sapiens
agtcttgaatccaccaggctctgttatgtgaatatgggagggcccacttagagtcatcagcatcagtttcctcatctgcactttagggtgatgctctactttccttgcaggatttctttggtgggggtgatcaagtgatttaatgagatataaattgttggaagagtcattagcactgtggaatgagctgtggaatagagcaaagagtatcggatgcaggggtcaggggaagtgtgtggtcaagtgaagacagcacgggttgaatcataragtggagcttttctaactaggggatttgctaaagtttggaaatgtagccctgtctttggagggtgacttgtttgttatgagggtatttcaatactgtatttttcattttgatgaaaatctaacaaaaacaatataagcctgttttggatcatctggttctccttataaccaagtactgccatgcaatgccagtgcctacatttgcactggtgtttacaacagtgttggagccaagacaagaaagaccactttg

SEQ ID NO: 170265 - DNA, 512 bp, Homo sapiens
acttggaagtggatccttttccagtcacatctctggtgagaacccagccatggccaacaccctgactgcaaacttgtaagaggctgagtagagaacccaggttcctgccctatagaaattgtgagataattaatgtatattgcttgaagctgccaagtttattacacagacaaggaaacaaattaagctagtgctgtgctgtccttctagaatgctcttcttctttggaratcctgcccctttttcaagaatcagatctgaaatctctctttcacctttttctcacctaaaacctgacaatttatccaaggacctcccaagcagtttgattttcagcctcttttcaacaccgttttcccacatggatgactctgggccttaatgtctcacatggtactacatattccacagggatcatcatgaattcacatatatgctcagtactccactctctctgcctgatcgtttcctcatgatcttttgatggtgcttccctgggcctatcacacctc

SEQ ID NO: 170266 - DNA, 427 bp, Homo sapiens
taaagatctaggaaagaagaaaatgaatacttgtaaacttttctacattccctcaaagtrtattttcattttctataatttcaaacttacagaaaatttacaagaatagtacaaagaactcttatctagactttacctggattcactaattatttgcaggtttcccatttgctttattgttatctcttcttcttccattccttcctcccttctttcttccatatttttgagctacttaagtgttgttggaaatattttgcccttttatccctaaatacttcagtgtgtcttttctaaaaataaggatatcctcttaccacagaagttatcaacatcaggaaatttaatgttgatataacattgccaaatctgcagtttatatttaaatttgtcagttgttctggtaatgtcctttttagttatttct

SEQ ID NO: 170267 - DNA, 424 bp, Homo sapiens
gaaattataagacagaaaaagaaaatcatctggttccaaaaaaatacctttccacagagaattggacacctcaccagttaatagcactggcaagaagccagcataaatattgaccacatttcccttctgggagctgaactgctgcattccatctgaaaaaaatcagtacttccatattttatgttcttaaaaaagaaggaaactaattctctctacaaagcttttaaaatgcagaccaaaccttttttgtgaacatmatgtgctatttctaagctgcctgcttgacacctctgctatgatgccttgcaggcacctcaaggttaacatttccaaaattaaacttcagtgaacttttctccataagtatgctctctgcagagatgtctttgcagggagtggttctgccatcccctgttgtttccat

SEQ ID NO: 170268 - DNA, 402 bp, Homo sapiens
tatgagtagtagttttcaacagtggacttaaaataatcagtaaatcaatatgtaaacagatgtgctgtcatccaggctttgttgtttcatttatagagcacaggyggagtagatttagcatcattcttaagggcataggatgtttggaatggtcaatgagcactggcttcaacttaaagtcgccaatgggattagcctctcccaacagagtcagcctgtcctttgaaaatttgatgccaggcactaacttccttagagctatgaaagtcctaaatgacatcctctttcaatgtaaggctgtttgtctacactgagaatctgttgtgtactgtagcttccttcatcaatgaccttagctaagtcttctggatcacttgctgaagcttctacatcactacttgc

SEQ ID NO: 170269 - DNA, 579 bp, Homo sapiens
gaagcttgaagtggtatttagagatgctacatttagtgacttcagaaggtataaactgaagcagcaatgtagattaatattcaagatatgaggataaaagggtgactaaagtgggatccaaagcaaatgggtgccagaaaaacaatgaaagaagaactgatggaggctatgatctaatttacatttaggggaatgaggaaaacagtggaagattttgcaaccatgaaaataaatactggaagttctgaccaaagaaattaggttaaaaaaaagarataaaaagacattcatattggaaaggagaaagtaaaattatctctgtttctagatgacatggtctaatatgtagaaaaccatacgtacttcacaccaaagaaaactgttagaactaataagtaaatttagtaaagttgcagggcataaaattaacatacaaaaatcagttgtgtttctgtacactaaacaatgaataaccctaaaaggaaattaagaaaataatcccattttaaataacatcaaaataaaaaaggcatcaaaataataaaatacttatgaataaacttaattaagaacacaaag

SEQ ID NO: 170270 - DNA, 295 bp, Homo sapiens
tcaacaattttggatatctaatttgataaaatttaaacgaatgagacaaatgatgaaatcaagaaataaaagaaattaagctatcagtatattgttttagctctttttaatgaaacttctagttcaatatcagtaaattattttgcttggatatgaactctaatatgttttaccaacatgattttatgctactggcctctaggattttgaggatagtggactttataaatatttatgtgtgtattttmaaatatctatccctctttacaagcatagtatttgcatatattttcac

SEQ ID NO: 170271 - DNA, 565 bp, Homo sapiens
tagttattctttttcccatttgacagacgaagaacgtgagatacatggggagtaagcaacttgccactaaatgggtgaactgggtgaactggtgtcaaatccacctctgcttgcccttaaaatccataaacactttttttgctacatcacattacctgatgatacgttayacttaaaatttttttcatatgttgaaaaaaggaatagagaaatatcagtagacaccgtcatagttcgtggtttgtcagaaacttataaaataacgcaaacaagacaaaagtttccaaagacctctaaaacaaaaagacccagggaagaaataaaaaaggaaataaaagaactggaaagaagtgaggcatgttcagagaaaattcatttagctctaacttttccttcctcactggttagtctaaaaatgctttcattcttctttccctgggacaacttaatactcttccattcatcactccctatgtgaattttttccttttgccaaatgagtttactcagtgccatctgaacaaggaactgtgctttacttatatagatctcttacatctgaggc

SEQ ID NO: 170272 - DNA, 565 bp, Homo sapiens
tagttattctttttcccatttgacagacgaagaacgtgagatacatggggagtaagcaacttgccactaaatgggtgaactgggtgaactggtgtcaaatccacctctgcttgcccttaaaatccataaacactttttttgctacatcacattacctgatgatacgttacacttaaaatttttttcatatgttgaaaaaaggaatagagaaatatcagtagacamcgtcatagttcgtggtttgtcagaaacttataaaataacgcaaacaagacaaaagtttccaaagacctctaaaacaaaaagacccagggaagaaataaaaaaggaaataaaagaactggaaagaagtgaggcatgttcagagaaaattcatttagctctaacttttccttcctcactggttagtctaaaaatgctttcattcttctttccctgggacaacttaatactcttccattcatcactccctatgtgaattttttccttttgccaaatgagtttactcagtgccatctgaacaaggaactgtgctttacttatatagatctcttacatctgaggc

SEQ ID NO: 170273 - DNA, 494 bp, Homo sapiens
ctggaaaactatttctttctcctttgtttgaagaacatttttactggatatastactctaagatgaaagttttttttttcttttgcactttaaatatgccctgccactctctcctggcctgtaaagttttcactggaaattctgctgccagacttattgaagctccattgcatgttatttgtttcttttctcttcttccttgtaggatcctttctttatgtttgtctttaggagtttgattatcaaatgccttcaggcagtcttccttgggttaaatcttcttggtgttctataaacttcttgtacttagatattgatgtttttctctaggtttggaaagttctctattattatgtttttgaataatctttctacctcaatttctctctctctctctatctactctttaaggccaataactcctagatttggccctttgaggctgttttctaggttttccaagcatgcttcattctttttcattcttttttctt

SEQ ID NO: 170274 - DNA, 494 bp, Homo sapiens
ctggaaaactatttctttctcctttgtttgaagaacatttttactggatatagtactctaagatgaaagttttttttttcttytgcactttaaatatgccctgccactctctcctggcctgtaaagttttcactggaaattctgctgccagacttattgaagctccattgcatgttatttgtttcttttctcttcttccttgtaggatcctttctttatgtttgtctttaggagtttgattatcaaatgccttcaggcagtcttccttgggttaaatcttcttggtgttctataaacttcttgtacttagatattgatgtttttctctaggtttggaaagttctctattattatgtttttgaataatctttctacctcaatttctctctctctctctatctactctttaaggccaataactcctagatttggccctttgaggctgttttctaggttttccaagcatgcttcattctttttcattcttttttctt

SEQ ID NO: 170275 - DNA, 494 bp, Homo sapiens
ctggaaaactatttctttctcctttgtttgaagaacatttttactggatatagtactctaagatgaaagttttttttttcttttgcactttaaatatgccctgccactctctcctggcctgtaaagttttcactggaaattctgctgccagacttattgaagctccattgcatgttatttgtttcttttctcttsttccttgtaggatcctttctttatgtttgtctttaggagtttgattatcaaatgccttcaggcagtcttccttgggttaaatcttcttggtgttctataaacttcttgtacttagatattgatgtttttctctaggtttggaaagttctctattattatgtttttgaataatctttctacctcaatttctctctctctctctatctactctttaaggccaataactcctagatttggccctttgaggctgttttctaggttttccaagcatgcttcattctttttcattcttttttctt

SEQ ID NO: 170276 - DNA, 494 bp, Homo sapiens
ctggaaaactatttctttctcctttgtttgaagaacatttttactggatatagtactctaagatgaaagttttttttttcttttgcactttaaatatgccctgccactctctcctggcctgtaaagttttcactggaaattctgctgccagacttattgaagctccattgcatgttatttgtttcttttctcttcttccttgtaggatcctttctttatgtttgtctttaggagtttgattatcaaatgccttcaggcagtcttccttgggttaaatcttcttggtgttctataaacttcttgtacttagatattgatgttttyctctaggtttggaaagttctctattattatgtttttgaataatctttctacctcaatttctctctctctctctatctactctttaaggccaataactcctagatttggccctttgaggctgttttctaggttttccaagcatgcttcattctttttcattcttttttctt

SEQ ID NO: 170277 - DNA, 639 bp, Homo sapiens
gtctttgataggcttatcagtagattgaatatggctgatgaaagaattagtgagtttaaagatatgtcactagaaacttcctaaagtgaaatgctaacataaaatagtagaaataacagaaggagaaagaaaggagaagaagtatttgaagtaataatggtggagaattttccaagattaaagtcagacaccaaaacagattcaggaagttcagagaacactcagaaagttgaaaaaaaaaaaamacacctatacctaggaatatcatattcaaactaaaaataacaaaagacaatgagcaaatcttgaaagaagccaaaggaaaaaaaaatactttactaatagagaaaaagagataggaattacaatggatatctcttctgaaatcatgccagcaaagagagagtggagtaaaatatttaaagtggtgaaagaaaaaaagtcgccaaggccacagagcaaactgggtaaactcagccattctccttctcagtggaggagaaacaaaagctttttgagataaacaaaaacagagaatttgtctccagaaatctgcattacaagatatggtaaaactaaatttttcagaaagaagaaaaattacacaaatcagaaactcgggtatgtataaagaagagc

SEQ ID NO: 170278 - DNA, 639 bp, Homo sapiens
gtctttgataggcttatcagtagattgaatatggctgatgaaagaattagtgagtttaaagatatgtcactagaaacttcctaaagtgaaatgctaacataaaatagtagaaataacagaaggagaaagaaaggagaagaagtatttgaagtaataatggtggagaattttccaagattaaagtcagacaccaaaacagattcaggaagttcagagaacactcagaaagttgaaaaaaaaaaaacacacctatacctaggaatatcatattcaaactaaaaataacaaaagacaatgagcaaatcttgaaagaagccaaaggaaaaaaaaatacyttactaatagagaaaaagagataggaattacaatggatatctcttctgaaatcatgccagcaaagagagagtggagtaaaatatttaaagtggtgaaagaaaaaaagtcgccaaggccacagagcaaactgggtaaactcagccattctccttctcagtggaggagaaacaaaagctttttgagataaacaaaaacagagaatttgtctccagaaatctgcattacaagatatggtaaaactaaatttttcagaaagaagaaaaattacacaaatcagaaactcgggtatgtataaagaagagc

SEQ ID NO: 170279 - DNA, 577 bp, Homo sapiens
acttttattttcatctttatttatttgctactttaaaaatatagttttctttatttggggtgtatttctttgatcattaaggaggttgagaatttttcatgtgcttacttatcatgtgacatttcttctcttgtgaataaattgttcatgtcatttgcacccatgcctacatggcaagcctctccttcccagatgggaacttcaaatgtggactattcaaataaaaatagaaactttaaaatcctctacttgctgttgttaaaatgaccattcttagaatgacagctagagagtagttaagcacccaataattaaatcaatttctaattatccacataaatttaatgtgttttcttccaatgaattgaaggaaaatcttcccctctcccaaatgctcccttttcctaaacactaaattgataaaatatttgaaaaaaattgtgttcattaaatgatgactcatacacttaaagttcttgaattttcttaaagtatttgacttggtctsattcttcccagagcaataaagtcaacttgaatggtcacttcctctgttttctgggagttgctatggata

SEQ ID NO: 170280 - DNA, 439 bp, Homo sapiens
acagcttcatcctctcaggaatgattctgcatgatttcccatgtatggacctatgaaaatcacatactggcctttcttccctggggtagatccttgttctctcatttctcattttatcatagacagtgagaagaagtcattttgctctttcaatgttcttggaaaactctttagcaagatcttgcattcattaggaatatttcctacttataccttactgtcagtgataacttttctctcaatttcttccagtttccaataacaacttctttatcattatttatgacctagccaataacctctttctccatctaagaatcttagactcccactaatactcccctcaaagccctttgaacttcagcctgccatctagttccaaacccaacaccatrtattttaggtttttattatggaagcatcaaacctccaggtatca

SEQ ID NO: 170281 - DNA, 572 bp, Homo sapiens
tgtcccactttagggtgtgggagctatgaccttcctgctcctggatgctgggctcagctaagttttgataagtttatttgcattaattttatttaaataacattcaaaatattatatctaatttgctttagtaatttcaagaatagatgagttataaataatagagaactaaaaaattaataattcctggaagactaacaatcagaccttaatgttagtactttctttttttctcaaactaaaaatatcaaaactgtaagaggtatatcagtcaggatccagaagataaacatcaggttaagattaccagacagtaatcttaatatcaaaaattattaactgtwagaggggatttgctagcaaagaataaacagaactgttaataatagagtaatagcaaattataggggccactacccataaggctgaattgatacataatagaagcaagagggtctggaaccagcttccacacaccataccgatccagattcattggagagggcatagccatgaacatctgcatggcagggtttgctgaggctgcaaagtactcaggaagatatcagtag

SEQ ID NO: 170282 - DNA, 471 bp, Homo sapiens
ataggtgtcatacaagcagcactctgtcatgaaggcaactgatggggtttcagagtcagcactgtctggatacctggagctggccctgcaaaagctgtggatgtggctggacaggctttgtagaaacaagctgtgttgtaggagccaacgtcaagaagcataaaagaacctgggagagaaacccattcatccttcaatttcccccttagtagcttctactaacaaagcttaacattatcctgactggcaaagaaggaatgtttacaggttccagccccactgtcagaaataaagcagtaaattgtgaactttcaaccaagagacaataaagtgatgactaggacagtrcatgcctttggttactcagtttccatattcactcttctattcaatcttgaactttcattcaaaaatgaaacaactctgtatttccacctaataagttataaatgttcttcctgaaagtgaagg

SEQ ID NO: 170283 - DNA, 471 bp, Homo sapiens
ataggtgtcatacaagcagcactctgtcatgaaggcaactgatggggtttcagagtcagcactgtctggatacctggagctggccctgcaaaagctgtggatgtggctggacaggctttgtagaaacaagctgtgttgtaggagccaacgtcaagaagcataaaagaacctgggagagaaacccattcatccttcaatttcccccttagtagcttctactaacaaagcttaacattatcctgactggcaaagaaggaatgtttacaggttccagccccactgtcagaaataaagcagtaaattgtgaactttcaaccaagagacaataaagtgatgactaggacagtacatgcctttggttactcagtttccatattcactcttctattcaatcttgaactttyattcaaaaatgaaacaactctgtatttccacctaataagttataaatgttcttcctgaaagtgaagg

SEQ ID NO: 170284 - DNA, 471 bp, Homo sapiens
ataggtgtcatacaagcagcactctgtcatgaaggcaactgatggggtttcagagtcagcactgtctggatacctggagctggccctgcaaaagctgtggatgtggctggacaggctttgtagaaacaagctgtgttgtaggagccaacgtcaagaagcataaaagaacctgggagagaaacccattcatccttcaatttcccccttagtagcttctactaacaaagcttaacattatcctgactggcaaagaaggaatgtttacaggttccagccccactgtcagaaataaagcagtaaattgtgaactttcaaccaagagacaataaagtgatgactaggacagtacatgcctttggttactcagtttccatattcactcttctattcaatcttgaactttcattcaaaartgaaacaactctgtatttccacctaataagttataaatgttcttcctgaaagtgaagg

SEQ ID NO: 170285 - DNA, 627 bp, Homo sapiens
gagaaagaaaagtcattaatatagttcaaaactattatccctttaatacaggcttttggataatcattcctatactctgctttttttaaactttgattattctcactgttacatcttctttttccyattattaataaatcactaatttctaactcacctatctgttccataagaaaagcttgacttcaagtaacaaaacccaaaataaaaataattaacaaagttgaagtttattcttgtttcaagtaaaagtaggtagtcttgagatggtgtgatagctcaaaaatccccagggattcaggttcctatcctgttgaagaatcgttactaataactaatttccacctcacagtccaagaaaaatctccctggttccagtcatcatgttacatttcagcaaacaggacctaggcaaaggaaggagaaagcatcatcctttcattaagtgacacttcttagaatttgaatacctcattttcatatactccctttggggagaacttagttccataacatatatgtttttaagggagactgagtaatatcatctttttatttctctgagtgttcatgtgttcagaaaaaaatataaataaaaggcttagaggaaatggatatgggtagaca

SEQ ID NO: 170286 - DNA, 627 bp, Homo sapiens
gagaaagaaaagtcattaatatagttcaaaactattatccctttaatacaggcttttggataatcattcctatactctgctttttttaaactttgattattctcactgttacatcttctttttcctattaytaataaatcactaatttctaactcacctatctgttccataagaaaagcttgacttcaagtaacaaaacccaaaataaaaataattaacaaagttgaagtttattcttgtttcaagtaaaagtaggtagtcttgagatggtgtgatagctcaaaaatccccagggattcaggttcctatcctgttgaagaatcgttactaataactaatttccacctcacagtccaagaaaaatctccctggttccagtcatcatgttacatttcagcaaacaggacctaggcaaaggaaggagaaagcatcatcctttcattaagtgacacttcttagaatttgaatacctcattttcatatactccctttggggagaacttagttccataacatatatgtttttaagggagactgagtaatatcatctttttatttctctgagtgttcatgtgttcagaaaaaaatataaataaaaggcttagaggaaatggatatgggtagaca

SEQ ID NO: 170287 - DNA, 410 bp, Homo sapiens
gaattccctgaccccttgcacttactgggtgagrcgatgccctgccctgcttcagctcaccctccgtgggctgcatccactgtccaacctgtcccagtgagataaaccaggtgcctcaattggaaatgcagaaatcacccatctgctgcgtcaatcactctgggagctgcagaccagagctgttcgtattcagacagtttggaacagaagaaaattcttaacactgcagttccaagtcatttctattggttatttaattaaaaatattaaacaagcaaaaaaaaaaaaaaaatagaaaaccccaaccacaaaataagtaactgcctttagaactactaggggagagggaagcaatagctttaagaggtgataagatcactgtgttagctaagatcatttatatactataa

SEQ ID NO: 170288 - DNA, 406 bp, Homo sapiens
agacgatgccctgccctgcttcagctcaccctccgtgggctgcatccactgtccaacctgtcccagtgagataaaccaggtgcctcaattggaaatgcagaaatcacccatctgctgcgtcaatcactctgggagctgcagaccagagctgttcgtattcagacagtttggaacagaagaaaattyttaacactgcagttccaagtcatttctattggttatttaattaaaaatattaaacaagcaaaaaaaaaaaaaaaatagaaaaccccaaccacaaaataagtaactgcctttagaactactaggggagagggaagcaatagctttaagaggtgataagatcactgtgttagctaagatcatttatatactataacaagcaaattgaggaatttcagtgaat

SEQ ID NO: 170289 - DNA, 410 bp, Homo sapiens
gaattccctgaccccttgcacttactgggtgagacgatgccctgccctgcttcagctcaccctccgtgggctgcatccactgtccaacctgtcccagtgagataaaccaggtgcctcaattggaaatgcagaaatcacccatctgctgcgtcaatcactctgggagctgcagaccagagctgttcgtattcagacagtttggaacagaagaaaattcttaacactgcagttcsaagtcatttctattggttatttaattaaaaatattaaacaagcaaaaaaaaaaaaaaaatagaaaaccccaaccacaaaataagtaactgcctttagaactactaggggagagggaagcaatagctttaagaggtgataagatcactgtgttagctaagatcatttatatactataa

SEQ ID NO: 170290 - DNA, 426 bp, Homo sapiens
agggaattccctgaccccttgcacttactgggtgagacgatgccctgccctgcttcagctcaccctccgtgggctgcatccactgtccaacctgtcccagtgagataaaccaggtgcctcaattggaaatgcagaaatcacccatctgctgcgtcaatcactctgggagctgcagaccagagctgttcgtattcagacagtttggaacagaagaaaattcttaacactgcagttccaagtcatttctattggttatttaattaaaaatattaaacaagcaaaaaaaaaaaaaaaatagaaaaccccaaccacaaaataagtaactgcctttaraactactaggggagagggaagcaatagctttaagaggtgataagatcactgtgttagctaagatcatttatatactataacaagcaaattgag

SEQ ID NO: 170291 - DNA, 621 bp, Homo sapiens
gtgagggaacttttttgttttgtcctaatcatctactaattggtaattaccattaattcacttcagaaatctctccccattccagtttccaagctaaacttttgttgaacccctmcatttagaattatagaaaagatcttcaacagaatgtcaatttttacttcatatttttatattaattatataattaatgttgtaatcatgtaatttatttattggattcttaaattatatttttcagtaacaccttgtactttgaaggcttatttacaaaaccagatatatcatttgatcaatttgtttggtttgttgcaattatatttcttttatcagctaattgcattttaatgatggggaaaatgttacaattatttatgtactgtggcactcaagtttagcattggctaatgtaggttaccagtaatccatgacacttatactcattctgtttattcctatttaatccacacttctgttcacattttttgactaactttgattccacttctgtcttctacatctttcatgtaagctctggttattctaaaactaagagtttttgaccttccaaaattaaggtaagcatacataatcttaacacacttgaaataaagaaaaata

SEQ ID NO: 170292 - DNA, 623 bp, Homo sapiens
atattttgtccaagaataagtcactatrtttttcaatttgttattagagacagaagagtaattggtgcacaatcctaacccgaatataaaatgcagacattaaaaaacaagtattgatcacttactctggactatgttctttgacagatactagggataaaactatgaaccacagacgtgtccttgtgcttatagtccaattgggctaggaaacataaacaattacaaatagatacgtaattgtagtttgtgattatatagtaatagagactgtgttacagcataacactggaggaccaactttaagtggtttggttatgggaagcctcacttttgggagatgaatcttaagctgagatccaaatgattaaaaaataggatgtgggggaatattcattaaaaaataagccagctaatgggccatgggaaatattcatatggataactgaaagaaaaccagagagactggaccgaagtgaccaaggttggggaatagtgggtaggacatgagaagtcggacagatagagaccaggccacaataatggaggataaagaatgtaactttattgtgaatgaagtgagaaactaatgaggacttttgaattggtgagttacaagatct

SEQ ID NO: 170293 - DNA, 623 bp, Homo sapiens
atattttgtccaagaataagtcactatgtttttcaatttgttattagagacagaagagtaattggtgcacaatcctaacccgaatataaaatgcagacattaaaaaacaagtattgatcacttactctggactrtgttctttgacagatactagggataaaactatgaaccacagacgtgtccttgtgcttatagtccaattgggctaggaaacataaacaattacaaatagatacgtaattgtagtttgtgattatatagtaatagagactgtgttacagcataacactggaggaccaactttaagtggtttggttatgggaagcctcacttttgggagatgaatcttaagctgagatccaaatgattaaaaaataggatgtgggggaatattcattaaaaaataagccagctaatgggccatgggaaatattcatatggataactgaaagaaaaccagagagactggaccgaagtgaccaaggttggggaatagtgggtaggacatgagaagtcggacagatagagaccaggccacaataatggaggataaagaatgtaactttattgtgaatgaagtgagaaactaatgaggacttttgaattggtgagttacaagatct

SEQ ID NO: 170294 - DNA, 623 bp, Homo sapiens
atattttgtccaagaataagtcactatgtttttcaatttgttattagagacagaagagtaattggtgcacaatcctaacccgaatataaaatgcagacattaaaaaacaagtattgatcacttactctggactatgttctttgacagatactagggataaaactatgaaccacagacgtgtccttgtgcttatagtccaattgggctaggaaacataaacaattacaaatagatacgtaattgtagtttgtgattatatagtaatagagactgtgttayagcataacactggaggaccaactttaagtggtttggttatgggaagcctcacttttgggagatgaatcttaagctgagatccaaatgattaaaaaataggatgtgggggaatattcattaaaaaataagccagctaatgggccatgggaaatattcatatggataactgaaagaaaaccagagagactggaccgaagtgaccaaggttggggaatagtgggtaggacatgagaagtcggacagatagagaccaggccacaataatggaggataaagaatgtaactttattgtgaatgaagtgagaaactaatgaggacttttgaattggtgagttacaagatct

SEQ ID NO: 170295 - DNA, 623 bp, Homo sapiens
atattttgtccaagaataagtcactatgtttttcaatttgttattagagacagaagagtaattggtgcacaatcctaacccgaatataaaatgcagacattaaaaaacaagtattgatcacttactctggactatgttctttgacagatactagggataaaactatgaaccacagacgtgtccttgtgcttatagtccaattgggctaggaaacataaacaattacaaatagatacgtaattgtagtttgtgattatatagtaatagagactgtgttacagcataacactggaggaccaactttaagtggtttggttatgggaagcctcacttttgggagatgaatcttaagctgagatccaaatgattaaaaaataggatgtgggggaatattcattaaaaaataagccagctaatgggccatgggaaatattcatatggataactgaaagaaaaccagagagactggaccgaagtgaccaaggttggggaatagtgggtaggacatgagaagtcggacagatagagaccaggccacaataatggaggataaagaatgtawctttattgtgaatgaagtgagaaactaatgaggacttttgaattggtgagttacaagatct

SEQ ID NO: 170296 - DNA, 503 bp, Homo sapiens
aaatggaatgaaaaggaggcaaattagaagtgagaagtgaaactaaaaggtgatagtctacgtaaaaaaaattacagtagtttagactcagttggtaatgggrgagacaaagctggatgaatttcatatatattttgcagtttgcatttgtaggacttgctgtcttttgggcatggggaattaaagaagcgaagaatatcctcaccacattcggagattgacatccaactcaaggaactggatggattatgatggtatttacgaagtttgggaagacaagaagagttatagttgaactcatttatgcatttgaagatagaaatgttcctgcggtttgcaaaggagaataggaaatgcagttaaatatttgaagctaaagctcagagaaaaatctgggatagatgtgagagggtttttgtagataatatttaaagccaagagaatgtatcaaaacttctttggaaagaaagtacaagaaagaaaagagaactcaagcataagcc

SEQ ID NO: 170297 - DNA, 526 bp, Homo sapiens
aatctactggtgggaatgagatcaaaaacataggagaaaggctattacccataagtggtctcaactctggtatcacgttgaattcttttggaaagatttagaaagtatcaatgcttgggccaatcccataccagctaatcaaaatctctggagtggggccttgtaattagtatttttaaaaaattactctgcaagtttcaaatatrtagttaatattgagggctattgaactaacttaaatatgattctcaaactttagaatacctcagaagcaccccccttttctcaccatcatttctgattcaggtttcttggtgatggtgacgttgctcatgttgagaaccactgaattaatagaatgaagaaagtccacatgaagatgtgaaagggaagggttccagagttcagtgaaaggatgtacttttgacagagacccacttcatctattatcatgagaagggaaagtgatgatggaacaagtaagattgaacagtgtcgggaagaccagggtatgagtatttcaatg

SEQ ID NO: 170298 - DNA, 587 bp, Homo sapiens
ttttttctgaatttgacagtttacttcaggtttcttggtaaatagaatgagttaccagaccttgcaagaccattgtattaataatctttgatttacgtcaagacagtttatgatggggccatcatcaaatgccccagccacagatggcagagcaaaaacagtatgattgcttgtcttaggcacttaactgcatggccaggaggagaaaactagatttaggccttttactaatcttgttggtgtccatagagaaaagayagttttggtaattcattcttcttcgtcttcttcacattcatctgccaccccaagaaaatgtgagcttactcaaataatcagggatattttctaagtatgttgaaatgttgagcttacccatcatataatttttattctctgcaatattacagggaaagtgaggagcatgtatggaggaatgcataaaattaacttcaaaggtggctccttagagcaaaggccaatgaaggcaggtttgtagttgatttaatcatcagaagtgcagttgagagataaatgtcagcaatttcttttcaatcacctagtgacctctagtatgaagctggata

SEQ ID NO: 170299 - DNA, 587 bp, Homo sapiens
ttttttctgaatttgacagtttacttcaggtttcttggtaaatagaatgagttaccagaccttgcaagaccattgtattaataatctttgatttacgtcaagacagtttatgatggggccatcatcaaatgccccagccacagatggcagagcaaaaacagtatgattgcttgtcttaggcacttaactgcatggccaggaggagaaaactagatttaggccttttactaatcttgttggtgtccatagagaaaagacagttttggtaattcattcttcttcgtcttcttcacattcatctgccaccccaagaaaatgtgagcttactcaaataatcagggatattttctaagtatgttgaaatgttgagcttacccatcatataatttttattctctgcratattacagggaaagtgaggagcatgtatggaggaatgcataaaattaacttcaaaggtggctccttagagcaaaggccaatgaaggcaggtttgtagttgatttaatcatcagaagtgcagttgagagataaatgtcagcaatttcttttcaatcacctagtgacctctagtatgaagctggata

SEQ ID NO: 170300 - DNA, 572 bp, Homo sapiens
catcagcagcatttgtaatgttttatttcttaagagtagttataaatatatagatttgtgttataagcctatagttcataaaaatacaaaatttttaaaattacaaaacaaaataaaagaaatgaaaaatatgaaaaaaatgataagaatagaaacagtaggaaggacataaaaagggcataaaggaaattgaggaaaacaggtaaacacagtsacttctgaactgttatcaaaatcccacaattaagctaatcatctgcctgacagtatttgacctaagtagcctattaaaggaagaaaaaaaaatctacaagattccaagatgagaagatttcatttaataaaaatatgaaaaaagtatatgttttaaaaagcagcttggatgacgaaacaggatgagcatgaaaggcagaagcataaaacgtggaatgatcaggagccattttagtacttgttgctataaacaccgatgtcacaagacttggaatacttcggaaatttactgaagtggggcaaatcaaaattcacaagtgttctatacacataattcattaacagaatcatttctgcct

SEQ ID NO: 170301 - DNA, 580 bp, Homo sapiens
agcataataatttcttagagtttgatttatttttgtatataactacagtaatttatgagaaaattccactgtttattgtttctaaaatatgtatacgtaagcaaaaaagccaccaatgagagaaatttatggaaataaatacaaactatggatagatggttattttaaaatatctaaaatattgaagagcagtattcttattttagaaaaaaaagatcatgcttattttccatcagagctttatctytgcttcaaaatatatctatcattaaaatagtggtaaactgtcccaagagtgaacccaatactgggttattattcatttcttcacactgatgagtttggcagattaagctcaaggcaagaagagaacaactcttactatcatgatatttaatggacacatggaaaagagaaacatagtaatacagtttgatattccttagaaatttttcattttgatgcataaaataaggttgtggattatctgaagaaaattttgtaatctaaataatagtaaattaggaaagttgtattaataagtatggttataaatatctaatgatataataaaagctat

SEQ ID NO: 170302 - DNA, 580 bp, Homo sapiens
agcataataatttcttagagtttgatttatttttgtatataactacagtaatttatgagaaaattccactgtttattgtttctaaaatatgtatacgtaagcaaaaaagccaccaatgagagaaatttatggaaataaatacaaactatggatagatggttattttaaaatatctaaaatattgaagagcagtattcttattttagaaaaaaaagatcatgcttattttccatcagagctttatctctgcttcaaaatatatctatcattaaaatagtggtaaactgtcccaagagtgaacccaatactgggttattattcatttcttcacactgatgagtttggcagattaagctcaaggcaagaagagaacaactcttactatcatgatatttaatggacacatggaaaagagaaacatagtaatacagtttgatattccttagaaatttttcattttgatgcataaaataaggttgtggattayctgaagaaaattttgtaatctaaataatagtaaattaggaaagttgtattaataagtatggttataaatatctaatgatataataaaagctat

SEQ ID NO: 170303 - DNA, 661 bp, Homo sapiens
cctgttaatcaaagtgtgagtcccctaagagactgacaaagcaggtgagagggctgaaggatgaagcttggtgaagctcatcagggagcatctggatccatgtttacagaggagactcattctcagagcacaagtgttccacagcaaccccctccccctcccaaaataagccaactgggctgaaggttcactgcaaccttatctaattaagtacaaagctcttcaagaatgctgagttaagacccttcatcaactgctttggtcaaagcatatattaacaaactgaccaaatgtttgaggaaaatcattggcaggacagattgcaaaaacaagaagcaaccccaagaaatacagatacgtcaggaatgggaagaaatctttgaggaaaataaatgtataatttatatattcaaagagtttcaagatgctatcatatgactaaatatagaaggttttaatatttacaacaaaaaaccaaaaagtcccatagttcttggaaattaaaagcatggctgctacctttttttttaaagggggaaggaagaaaaggaaatgcagtagaagtaagaaattgcccaatggcaaaagactgaatcastgtatgggaagtttaaggcaaaggaaggcattcctccagatcacaggatgcagagtattaata

SEQ ID NO: 170304 - DNA, 609 bp, Homo sapiens
ttcccaaccagcagtgatttttcttctaggggacatttcacaatgtctggagatgtttttgctgtcacagcaaggagatgccactagcatttggtgggtagagggtaggtatgcgtccaaactttctataacacataggacagctcctctcccctcagcaaagrtttacctagctcacaatggcattagtgctgaggctgcgaaaccttgacccagatgctatacttagcattctatgtacttagtatcccacgatgacaggcaaattgtgcagaccaaggtaaacaactatttctatttatcctttccttgctgtcacttcactgtctctttgagattaggtatgactatctgattttcttttgtcactgaatacaaaagagtgagaaaattcaaaggggagagtatttcagaacgggcatgtgattctctgaatcacatcttctcattttccttcctgcctagaacaaaagtttgtgtttcaaaaattttaggggctttcttagctcacagtggcctgaggagagtagccccggagagtcatctggacttccaatttactttgcagaagtcagcaatagtcctctgctgtgttaaagcactgaagtt

SEQ ID NO: 170305 - DNA, 611 bp, Homo sapiens
acttaaaatgatgaaaactggcttaggaatgaggaaagcctggttctttccaagcatttccactaacttagtgttttgcaaacttgtctatatcttggaatgttttggggagcttcaggaattactgatgctttgtcccactccctgggattatgatttaattagtctaggatgcggcctgcacttggaatgtttagaataattcccaggtgattctaatgtgcagacaagtttgacggcctctgttctcacttgttctggaaaactaactcactcaacttccatttccccatccatgccagggcacagaggattatagaataaaggctacgtggttaacagcactgaatttgaagccagaactaaytgagtgtgagtaaaattgtagtaactgatgagttcagattgttaggaaacttaatttctctgtatttcagttttcttaaccataaatacatcacctagaattataaatctcagaaggttactgtaaaaactaaatgagacaacttatacaaagtatataaaattaagttaactggcacatggttaagcttcaaaggaatgttagctattatcatgttaacagttttaattcataagtttatcgt

SEQ ID NO: 170306 - DNA, 595 bp, Homo sapiens
aaggaatagagaccagaaattgagatggaaaaaaattcaagaacatataacatttaaaaatatatggagaaatagtactrttctttcaaataacataagcaaaatagttaccaggaaggcaaaacgaatatttttaaaagaattaagtccactttggcttgtttctttgtatacttatttagcacggaaggcaaatatggttggccctgtggggatcagggaagaggcaaagtcctgaaaataaaaattgggagtctaaagaaggcaaataaacagaacacaaaataaaagtacacagttctctgttccttaaaaataatgtgtattccaggctgctcttcgcaagtgtttcctccctcactgaggtcttttcttatttttatcccccttacccatgtcttatggagggcacagaatcacaagccttccaaatgatatggctgaattgaagtaatgatggtagaaggagcagtcaaatgagattgcaagggattaaaacaaaagtgagaatgagaggaagcagagtggcaactgagtctgggcaggaatcacctcaactcacatttatgcttggtgccaccaattagctcagtct

SEQ ID NO: 170307 - DNA, 595 bp, Homo sapiens
aaggaatagagaccagaaattgagatggaaaaaaattcaagaacatataacatttaaaaatatatggagaaatagtactattctttcaaataacatawgcaaaatagttaccaggaaggcaaaacgaatatttttaaaagaattaagtccactttggcttgtttctttgtatacttatttagcacggaaggcaaatatggttggccctgtggggatcagggaagaggcaaagtcctgaaaataaaaattgggagtctaaagaaggcaaataaacagaacacaaaataaaagtacacagttctctgttccttaaaaataatgtgtattccaggctgctcttcgcaagtgtttcctccctcactgaggtcttttcttatttttatcccccttacccatgtcttatggagggcacagaatcacaagccttccaaatgatatggctgaattgaagtaatgatggtagaaggagcagtcaaatgagattgcaagggattaaaacaaaagtgagaatgagaggaagcagagtggcaactgagtctgggcaggaatcacctcaactcacatttatgcttggtgccaccaattagctcagtct

SEQ ID NO: 170308 - DNA, 553 bp, Homo sapiens
ctgctcttcgcaagtgtttcctccctcactgaggtcttttcttatttttatcccccttacccatgtcttatggagggcacagaatcacaagccttccaaatgatatggctgaattgaagtaatgatggtagaaggagcagtcaaatgagattgcaagggattaaaacaaaagtgagaatgagaggaagcagagtggcaactgagtctgggcaggaatcacctcaactcacatttatgcttggtgccaccaattagctcagtctatttagagtccatatgctttaaactcaaagatcaggactgagtaaacatgctcataatattattatcatgcacatatcatgtttatattaacatttgaaaacccagcggcatagamcactaaaaaggatcacactgagaaactaaatctgatttcttctttcaaattaaagttttacatcaaaacccatctttgctgagaataaaatggagtcattgttacaatgcttcttccctctgcacatttagataaattacaaagctgcttctggctgagatcaaatggagagaa

SEQ ID NO: 170309 - DNA, 553 bp, Homo sapiens
ctgctcttcgcaagtgtttcctccctcactgaggtcttttcttatttttatcccccttacccatgtcttatggagggcacagaatcacaagccttccaaatgatatggctgaattgaagtaatgatggtagaaggagcagtcaaatgagattgcaagggattaaaacaaaagtgagaatgagaggaagcagagtggcaactgagtctgggcaggaatcacctcaactcacatttatgcttggtgccaccaattagctcagtctatttagagtccatatgctttaaactcaaagatcaggactgagtaaacatgctcataatattattatcatgcacatatcatgtttatattaacatttgaaaacccagcggcatagaccactaaaaaggatcacactgagaaactaaatctgatttcttctttcaaattaaagttttacatcaaaacccatctttgctgagaataaaatggagtcattgttacaatgcktcttccctctgcacatttagataaattacaaagctgcttctggctgagatcaaatggagagaa

SEQ ID NO: 170310 - DNA, 567 bp, Homo sapiens
atgcaagagtgagatgagcctagcctcccagtctatatctttctcccatgctcaatgcttcctgctcttgaacatcagactccaagttcttcagttttgggacttggactggctctacttgctcctcagcwtgaagacagcctattgtgggatcttgcgatcatgcaagttaatacttaataaactcattcatatatatatatatatatatatatatatatatatatatatatatatatatcctatttggtccatccctcgaagagaactctgactaatatggtttaattgactcataatttcacatggtttaagaggcctcaggaaacttacaatcatggtgaaagtcaagggataagcaagtaacttttttacaaagtggcaggagggagagagagagggagggagagagggagacagagagagagaaagagagtgagagagtgcacagaggaaactgtcattttaaaaaacatcagatcttgggaaacctccctcagtatcatgagaacagcatggaggaaaccatttctgtgatcaaatcacctcccaccaggtttctccctt

SEQ ID NO: 170311 - DNA, 584 bp, Homo sapiens
aaatagagtaaatggaatgaaatacaaaggcaataaatatcatgctatgtttgcaatggtcaagtgtcttgcttgctagagtctttttttgtgggggaagttttattttaattgagatataatttatataccatacaattttctcttttttctcagtgtacaattcagtggttcttagtatagaagcagagaatcgcatttactggctcaagtaactatataacctaaaggacaacattaaaggtaaacacatgaaggggtttcaaaagatgtcattaggtcagttctcccgctctgtcactctcttctctgttttcctctatgttggctcctgagcaagttcctatcaccaaaagggttgatattttaccctctctggttcaagtctagttgaagagaaaaactctctgaaaaatctctagaaatgacacatggttgcrtatcattagctctgaaataggccatgtgttcacattgaactatagccaggcatctatagtactctgattggcaaggcaaggatcccatgcccaccccagagagaaacctagctccacacaaccacaggaattgcaagttggaga

SEQ ID NO: 170312 - DNA, 545 bp, Homo sapiens
cacttgcaggcaggctagtggtgggagtcttttcttccaagatcttcaagtttctcatgaaacaaaagacaagaacttaagctaaatgtgagaaatgggaggaggagagaaaatgaactcatcctctttgtgagaaaaagagatgatgaatgtgaaactttccttacagtgatttgctgtaattggaagtatggtgcagaatacggagaggtacatraaaaaagactgagctgagattgtgccactgccctccagcctgggcaacaagagcaaaactcaatctcgaaaaaacaaaaatgctgttaatttttgtttgttgatatttatcctgcaactttactgtacttgtttattagctcccatcggatccctattgcttttggaaaaaaagcctatttttccttttgttccctgtgccttttgggtcatattaaaaaaaaaataattgcccaaaccaatatcatggggctttcctctagtagttttatagatccaggtcttatatttaagtctttgatccatttgagttgatttttcaatggggt

SEQ ID NO: 170313 - DNA, 574 bp, Homo sapiens
ctccaatctgttcattcttacagtagtagcccccactccctgctagtgtgaatgcttggcttctgacctttacaaagaccccaakcaggatgtacccacccttgctggcttcagctctccttacgctccatccttctattggtatccccgccatgcttcagggtctgctgcaagtccaggatgactacctatctctaagttagcatttattctctgtgggcacacaagggattatttccatttccactaaatcaggtttaccctcaaattaactcgttagcctatgtgagcacttgtgtctcagccacacatttcctacaaatcccattctctctggataaatctagttatccttgtttctcagtctttatagcaagactttgagacaagctggagaacattgcttaatgcaattgaccgctgtcactacaatgttctaataattacaactcatactttaagaaattatttacagtatccatacctggtctgctccctttcttatggactacatgactattccaaaccttcagccctttcctcaagttatctactcaactttcacagtgtatgt

SEQ ID NO: 170314 - DNA, 475 bp, Homo sapiens
cgaatatcattcatcattagtttgtagcaattactctttattccaatattataataaccctcgctctataatcataacccaggaaaagccaggccatacagagataggagctgaggggacatagtgaggagtgaccagaaagacaagggtgcgagccttctgttatggccggaccgggccaccagagggctccttggtctagcggtaacgccagtgcctgggaagacgcccgttgccaagcggactgtggtctagtggtagcgtcagtgtcaaggaaaaacacccgctacctagcagaccgggaaagggagtctccctttccccrggggagtttagagaagactctactcctccaccttttgtggagggcctgacatgagtcaggcccgcctgcagttatccggaggcctaaccgtctccctgtgatgctgtgcctcagtggtcacgctcctggtccgctctcatgttccactct

SEQ ID NO: 170315 - DNA, 513 bp, Homo sapiens
agaattcatatctaagttacccaaacagtggcaaggacagtaataatgattattttagttcatctttacactgcacttgctatgggcagttctagctgctttccacatattaaactcatttaagtcttacaacaactctrggtagtacgaccccctttctcagtgacaagcaaattaacgcttggtaacatccagtcatgcagctgaggacagagctcaaacccaaacctgggcagtccggcggtctgtgccccaaacagcggctctgtgactcctcagtgcgatgagaaacagggcgtgccaagctctcgaattttaacaaaggagatcaaaaaccctaaactaaatgtatttcaaaagctacaatttttattagtatacaaaaagggcaatcttgctttcaaaacaagaatgtgattcttgcatctcacctgccttttgattttctaagtttccatgctctcttttctgtggttacttctcacatattgaagacaaagcatgagaagtgga

SEQ ID NO: 170316 - DNA, 513 bp, Homo sapiens
agaattcatatctaagttacccaaacagtggcaaggacagtaataatgattattttagttcatctttacactgcacttgctatgggcagttctagctgctttccacatattaaactcatttaagtcttacaacaactctgggtagtamgaccccctttctcagtgacaagcaaattaacgcttggtaacatccagtcatgcagctgaggacagagctcaaacccaaacctgggcagtccggcggtctgtgccccaaacagcggctctgtgactcctcagtgcgatgagaaacagggcgtgccaagctctcgaattttaacaaaggagatcaaaaaccctaaactaaatgtatttcaaaagctacaatttttattagtatacaaaaagggcaatcttgctttcaaaacaagaatgtgattcttgcatctcacctgccttttgattttctaagtttccatgctctcttttctgtggttacttctcacatattgaagacaaagcatgagaagtgga

SEQ ID NO: 170317 - DNA, 513 bp, Homo sapiens
agaattcatatctaagttacccaaacagtggcaaggacagtaataatgattattttagttcatctttacactgcacttgctatgggcagttctagctgctttccacatattaaactcatttaagtcttacaacaactctgggtagtacgaccccctttctcagtgacaagcaaattaacgcttggtaacatccagtcatgcagctgaggacagagctcaaacccaaacctgggcagtccggcggtctgtgccccaaacagcggctctgtgactcctcagtgcgatgagaaacagggcgtgccaagctctcgaattttaacaaaggagatcaaaamccctaaactaaatgtatttcaaaagctacaatttttattagtatacaaaaagggcaatcttgctttcaaaacaagaatgtgattcttgcatctcacctgccttttgattttctaagtttccatgctctcttttctgtggttacttctcacatattgaagacaaagcatgagaagtgga

SEQ ID NO: 170318 - DNA, 439 bp, Homo sapiens
ctgggtgtccacctgtagggacctcaaattagaacgtcagctcctcccagagtcttcagctgcatgaccctcaatctttaacatcagctcctctccaggtctgcagctccatgaccctaaaaatacatgagcagctcctccctgaatcttcagctgtacgaccctcaaactacaacatcagctcctgtctgcacctccagctgcagrgccctcaaactagaatatcagctcctccccgagtcttcagctgcacgaccctcaaactagaacatcagctcctgtacagatttccaactgtagggccctcaaactagaacatcagctcctccccgagtcggcagctgcaagaccctcaaattaccaactcagctcctcccggagtcttcagctgcatgaccctcatctagaacatcagctcctctccgggtctgcagctgca

SEQ ID NO: 170319 - DNA, 439 bp, Homo sapiens
ctgggtgtccacctgtagggacctcaaattagaacgtcagctcctcccagagtcttcagctgcatgaccctcaatctttaacatcagctcctctccaggtctgcagctccatgaccctaaaaatacatgagcagctcctccctgaatcttcagctgtacgaccctcaaactacaacatcagctcctgtctgcacctccagctgcagagccctcaaactagaatatcagctcctccccgagtcttcagctgcacgacyctcaaactagaacatcagctcctgtacagatttccaactgtagggccctcaaactagaacatcagctcctccccgagtcggcagctgcaagaccctcaaattaccaactcagctcctcccggagtcttcagctgcatgaccctcatctagaacatcagctcctctccgggtctgcagctgca

SEQ ID NO: 170320 - DNA, 449 bp, Homo sapiens
atctcaaacctccacaggtccaactttagtccatgctgccatcatttttcaccttgattacttgacaaccttcccaaacacctagtggttctgaagcttaaatcacatcataacatgaccctgtttaacaccttcagacagcttctcattgcaataaggacaaaacccaaacactttgccgtgacctgtgagactctcccaccttaacaagttctagcccgtgcctacctctcaagggcatcttcctacctggctactggcacccgtgcttcagtcacaggccagcccaagtttctgcctacctctgggcctttgtgcttgctgttctttctgcttggaatgctcttcccrtagatctttgcctggctaggagcttctcaccattgagatcttagcttaaatgtccttctgtcaagagaacttcctgcctagccttgctccatgactac

SEQ ID NO: 170321 - DNA, 550 bp, Homo sapiens
agatcttagggccagatacgtttcatgagaaaaaatatgtatgtttgctcttcttcttaaagaacattttacctgcatttttwaaaccattttctccattttccagggcttaggaaccttttataaaagcagtatgttgtcagtatttgttaaatctacaagtaacacttcaggtcaacatatgtattatgtatatttaattgctattgcagtcaaggaaattgtggtcatgggccatatccagtggtctacttagtaaaataaaaactatattaccattcctcttggggtattgatttagaagagaaggctggggtccacatgtaaacacccttagcatgcttacctggtggcctctgacctttcatgctgttttcacatgcgtgtaccacgccctctgcaaagacagtcatgttctggaacactgctcgcgatgcctttgcccgatgcccattgccaaggaatgtgtttatggtttgggatccaggggctagtgactggcaggctcttggaaaaaaaaaaaggttttttcttctttctcaccttctac

SEQ ID NO: 170322 - DNA, 550 bp, Homo sapiens
agatcttagggccagatacgtttcatgagaaaaaatatgtatgtttgctcttcttcttaaagaacattttacctgcattttttaaaccattttctccattttccagggcttaggaaccttttataaaagcagtatgttgtcagtatttgttaaatctacaagtaacacttcaggtcaacatatgtattatgtatatttaattgctattgcagtcaaggaaattgtggtcatgggccatatccagtggtctacytagtaaaataaaaactatattaccattcctcttggggtattgatttagaagagaaggctggggtccacatgtaaacacccttagcatgcttacctggtggcctctgacctttcatgctgttttcacatgcgtgtaccacgccctctgcaaagacagtcatgttctggaacactgctcgcgatgcctttgcccgatgcccattgccaaggaatgtgtttatggtttgggatccaggggctagtgactggcaggctcttggaaaaaaaaaaaggttttttcttctttctcaccttctac

SEQ ID NO: 170323 - DNA, 613 bp, Homo sapiens
gaataatgtttttgctggtggagagtgttgcctccatattgttggctgctgactgatcagagtagtggttgctgaaggttggcttggctgtggcaatttccaaagataagayaacaatgaagtttgacacattgattgactcttcctttcacaaaagatttctttgtagtatgtgatgctgtttgatagcattttacccacagtagaacttattacaaaattggactcaatcctcttcaaccctgccactgctttatccactaggtttatgtaatattctacatcttttgttgtcatttcaacaatgttcgtagcatcttcaccaggagtagaatctatttcaagaaaccactttcttctctcatccataaaaagcaacaattcatccattcaagtttgatcatgagatggccccatcttcaggctccactcttaattctagttttcttgctatttccactatacctgcaatctagaacccctcaaagttatccatgagggttagaatcaactttgtccaaactcctattattatgtatattttaacctcctctcatgaatcacgaatgttcttaatggcatctagaatggtgaattctttccagaagatttt

SEQ ID NO: 170324 - DNA, 613 bp, Homo sapiens
gaataatgtttttgctggtggagagtgttgcctccatattgttggctgctgactgatcagagtagtggttgctgaaggttggcttggctgtggcaatttccaaagataagataacaatgaagtttgacacattgattgactcttcctttcacaaaagatttctttgtagtatgtgatgctgtttgatagcattttacccacagtagaacttattacaaaattggactcaatcctcttcaaccctgccactgctttatccactaggtttatgtaatattctacatcttttgttgtcatttcaacaatgttcgtagcatcttcaccaggagtagaatctatttcaagaaaccactttcttctctcatccataaaaagcaacaattcatccattcaagttygatcatgagatggccccatcttcaggctccactcttaattctagttttcttgctatttccactatacctgcaatctagaacccctcaaagttatccatgagggttagaatcaactttgtccaaactcctattattatgtatattttaacctcctctcatgaatcacgaatgttcttaatggcatctagaatggtgaattctttccagaagatttt

SEQ ID NO: 170325 - DNA, 353 bp, Homo sapiens
aggccagtctcgaactcctgagctcaagtgatcctcccagcacagcctcccaatgtgatgggataattgacatgagccaccacacctggccccgttctactgatcttgagctgagactgacctgcagggccacaggacaccccacgagctcagcagcaccccttgtgctcacacaggcctacgcggctgtaggctggaccctggcttggcctcacccttgggacatgaagggctggccrgggtgaggctagaccatgagggctctgacaagaggaccaagcaccggggccccgagcctgccccgctggagactgaggccacctctgcccgcaggtctctgaaggtcggcctgc

SEQ ID NO: 170326 - DNA, 610 bp, Homo sapiens
atcatcttcctgtgagaaatctgctctacttgttcttaccctgcttattcattttcccagggaaagcacagattgtcctcacaacaactctcctttggaattaaagaccttaattctcacggtaaccagagggtagaggggaaagaaagagtaaggatgagatttaacaatgtctttggagagtgtattatctcttattaaagcaaacaggaaaatggcaaataaatgtggtttatttttatttaacatttctacactgatttatcagagataaaaattaattttgcacagtaatctactttcttgctaactttattttcttttttaataatctagataggatttctcaagtacataacgttgacacatttttattttctttttttattatactttaagtttcagggtacatgtgtacaatgtgcaggtttgttgcatatgtatacatgtaccatgttggtgtgctgcacccattaactcgycatttaaacattaggtatctctcctaatgctatccctccccccttcccccaccccacaacaggccctgatgtgtcatgttccccttcctgtgtccatgtgttctcattgttcaattcccacctatgag

SEQ ID NO: 170327 - DNA, 610 bp, Homo sapiens
atcatcttcctgtgagaaatctgctctacttgttcttaccctgcttattcattttcccagggaaagcacagattgtcctcacaacaactctcctttggaattaaagaccttaattctcacggtaaccagagggtagaggggaaagaaagagtaaggatgagatttaacaatgtctttggagagtgtattatctcttattaaagcaaacaggaaaatggcaaataaatgtggtttatttttatttaacatttctacactgatttatcagagataaaaattaattttgcacagtaatctactttcttgctaactttattttcttttttaataatctagataggatttctcaagtacataacgttgacacatttttattttctttttttattatactttaagtttcagggtacatgtgtacaatgtgcaggtttgttgcatatgtatacatgtaccatgttggtgtgctgcacccattaactcgccatttaaacattaggtatctctcctaatgcwatccctccccccttcccccaccccacaacaggccctgatgtgtcatgttccccttcctgtgtccatgtgttctcattgttcaattcccacctatgag

SEQ ID NO: 170328 - DNA, 610 bp, Homo sapiens
atcatcttcctgtgagaaatctgctctacttgttcttaccctgcttattcattttcccagggaaagcacagattgtcctcacaacaactctcctttggaattaaagaccttaattctcacggtaaccagagggtagaggggaaagaaagagtaaggatgagatttaacaatgtctttggagagtgtattatctcttattaaagcaaacaggaaaatggcaaataaatgtggtttatttttatttaacatttctacactgatttatcagagataaaaattaattttgcacagtaatctactttcttgctaactttattttcttttttaataatctagataggatttctcaagtacataacgttgacacatttttattttctttttttattatactttaagtttcagggtacatgtgtacaatgtgcaggtttgttgcatatgtatacatgtaccatgttggtgtgctgcacccattaactcgccatttaaacattaggtatctctcctaatgctatccctccccccttcccccaccccacaacaggccctgatgtgtcatgttcyccttcctgtgtccatgtgttctcattgttcaattcccacctatgag

SEQ ID NO: 170329 - DNA, 578 bp, Homo sapiens
ctccaacttacgatggttggacttacatcataaccttcataaattggagagccatcatgtttttcactttcagtacagtattcaataaattgcatgagatatcaaacactttattataacataggctttgtgttasatgatttttcccagctgcaggctaatatcagtgtctgagcacatttaagataggctaggctaagttctgatgttctataggttaggtatattaagtacattttcaatttagattatattttctaacttatgatgggtttatcaggacacaaccccatcataagttaaggaacatctgtagggctaagtgagatggataatgtccctgatctcatagtgcttatatcctaattggggaagacgaataacaaccaaagcaaaaagataatttcagttggtgataatgcaattaatctggggaagggtaatgtgatagcattatcagagtctttctaagggttccccacaatgcattagcaataaactaacaaacagaaaaaaataaagaaaatgttcatcccgagattgtaatacagtttaattatctgtaacctaattagcag

SEQ ID NO: 170330 - DNA, 581 bp, Homo sapiens
cctttagataaaatctgggaaaagtgaagatcattactgctagaattcaatttgaatatatttttacttaaatactgactttttaaactttgctttcttctaagacaaatttcttagttggccaacaataactggcaatgtstaagcatctatgataacttatcaagagtcaccactttgaaaacttaataatattagttttaaaataattatgtggtggttgaagtttattagtggaaatgaggcaggaggacagaggaaagaaacagcaaacttgatgtattttatgacctaaaggtctaatgccagaagagctaatcttacaatgcctgttcatgaaaaactcattgaaaagtcccatgatattaataagttaaatgtccttacctacaatgaatcccagtagaaattttacaataaatttgtcttcagtgaaaggtactagggtagagaaaggaaaaaaatcacataaattaagagtttttgccattttttatgtttgtcacatatttgtggactaagtagatgaggaattattgatatagaattcaacaaaattcaatgagatataattttaatta

SEQ ID NO: 170331 - DNA, 430 bp, Homo sapiens
agaattcagtcattcaggaagaaactaaacgtactctttctgttccaattttaaaattcctaggcaaaaaaaatggctattttcatcagttgtccattcttcgatgagtcaactctggtcaaggagtgggtacacrttggagaatagggtttgacccaacctgtcaactggagacaggagccatggacatgtagggctcaatggctgccctggatctacggccattatgatgaggatgtgatgtgcacctatacaccaacacaccagagactgtcctaaagagtgataacttaattcagtcgctttaattttttaaaaaaatcaattttaaaaagtcaatttgcttagaagaaaactacaatcataactattacttgggtctgtttaaacaattttatttttaaaaactttgtgattttggtgatgcata

SEQ ID NO: 170332 - DNA, 498 bp, Homo sapiens
tttaaaatacaaactgatgagtcacagaaacaaatgaagttggctttactgaaagtagtttttacttcagatgctctgtttctcaccatgccccatggccttcttctgaatatttcctctgcctacaaagtggcttaacatccctatgcatgacagtgtgtcatctgttgataacttatataataatgtcccccccggtaatagttgaaaactaaaaagcaaacaayaaaaactatcagttactgtggagaagatggggaaaattaaaaatgtattcagagaatggtgaggcgtatatagaccacatctgtaatagtccgttttcacgctgctgataaagacacacctgagactgggtaatttataacaaaaagaggtttcattgactcccagttccacatggctgtggaggcctcacaatcatggtgaaagacaaaggaagagcaatgggacatcttacatggtggctggcaaagagagagaatgagagccaagcga

SEQ ID NO: 170333 - DNA, 511 bp, Homo sapiens
tgacgtgatgtttatggcaataatactargtgataaatttaatgtcttaaatatagattttgtttagctcttttcattccgaaattaaactgccttgtaactggtatggtatgattcataacttttcatcccctttccaataggattctcttaactggctataatcattctttttttatgcacaaaataaaagagatttgtttgtttgttacttatgtgttttcactgacaagcaataatgcatcattaactgcatctcttgttagttgtcattattggtttgcagagtgataactttgtctcagcaacacaggttctccctcattatgggtaagaataaaagagcctttttgttcattcaacaatctaataaatattcatcgagtgccttctttgtgaaaggcctagcacaagacaatgcatagaatataaaactgtctaagataggctctattttctggcaatttattgaggtaacttacacgtgttgactttcagggactcagggact

SEQ ID NO: 170334 - DNA, 542 bp, Homo sapiens
ataaaactagtacttggagacattcataagctgacgtgatgtttatggcaataatactaggtgataaatttaatgtcttaaatatagattttgtttagctcytttcattccgaaattaaactgccttgtaactggtatggtatgattcataacttttcatcccctttccaataggattctcttaactggctataatcattctttttttatgcacaaaataaaagagatttgtttgtttgttacttatgtgttttcactgacaagcaataatgcatcattaactgcatctcttgttagttgtcattattggtttgcagagtgataactttgtctcagcaacacaggttctccctcattatgggtaagaataaaagagcctttttgttcattcaacaatctaataaatattcatcgagtgccttctttgtgaaaggcctagcacaagacaatgcatagaatataaaactgtctaagataggctctattttctggcaatttattgaggtaacttacacgtgttgactttcagggactcagggact

SEQ ID NO: 170335 - DNA, 542 bp, Homo sapiens
ataaaactagtacttggagacattcataagctgacgtgatgtttatggcaataatactaggtgataaatttaatgtcttaaatatagattttgtttagctcttttcattccgaaattaaactgccttgtaactggtatggtatgattcataacttttcatcccctttccaataggattctcttaactggctataatcattctttttttatgcacaaaataaaagagatttgtttgtttgttacttatgtgttttcactgacaagcaataatgcatcattaactgcatctcttgttagttgtcattattggtttgcagagtgataactttgtctcagcaacacaggttctccctcattatgggtaagaataaaagagcctttttgttcattcaacaatctaataaatattcatcgagtgccttmtttgtgaaaggcctagcacaagacaatgcatagaatataaaactgtctaagataggctctattttctggcaatttattgaggtaacttacacgtgttgactttcagggactcagggact

SEQ ID NO: 170336 - DNA, 521 bp, Homo sapiens
caccctctacactgtggcctccaaactaaactgttttacatctcctcctgccctttgtcccaacatttcacagagcatgtgggaaaggaagtcaaaataagagaaataagagaaagctacatgctccattgtccatcaccatttccccagccgagagtagattggagtgaagagaaagggaagttttgccccgaataagggattaatgttctgaaataaattgtccttgagtttggaaggcttgaaaatggatttttttttttatgyctgaaattgccctaagaagcagtgagattcactggtggtaaggcagagggaaggatgaggccaaggttcaaccaaacttaaagacaattaggcaaaaggaataagctttagtgatctattgtacagaatgactgtaataaataacaatgcagtacatatttcaaaattgctcagagagtagactttaaatgttttcaccacaaacaaacggtaagtatgggagctgatgaatctgttaattagccttatttaat

SEQ ID NO: 170337 - DNA, 558 bp, Homo sapiens
gaaactttcatattataacaggaacatggagccaatgtttaattaaccacccctaaaggaggaaaagagacaacttaaataaagcaaaagaaaaatctcaaatcacttgcatttgactttaraatactctctgacacaaattctccacaatcagtcaggctccatcctatctcagtagcctgggaacagcttgggagtgtgaaggtgaggccttgaggtcattatagaaggccattagggggtaaatagagagttgaccatttgcgttgaggttaattcttacaattatagagaagagggcttagatagctatgtttattttccgtatctctcttcccagcttcatataacccagtcaatatctccctcccccactgcaatctctttcctttatgtcatttctacttgtggtgcccttgtcaccaccccctcttttcccactgagctattttagctatgagaatcagagtagccggcatggtcagagcagttaaagaaggatgaatgatcctatttatgccaaattaaagaagccctccagaagtgcttccagagagt

SEQ ID NO: 170338 - DNA, 407 bp, Homo sapiens
aaaccaagtgagactaaatactaaaaagccaaagagaaaattcattttctttaaagttcatgtaaatactgcatttyttaaaagtatctgagaagaggaggtcgggttgcaaactgaaataccttcaagagccaggcatttaatatttatttaattaataaataagtgccatcccccatgacctagatacactgtttgcatattaaacacctaaggatacagcctttacttttgcaaagaaatatgttatttccagttttgcatgaagcactgggacctttcagtccattttaattttttccctctttcttagaagctaggatacagtgaaatatgccgtaccataagaaaaacaacagtgcaagcaataatccgtggtaagagacaattggtcttggtgtcagaga

SEQ ID NO: 170339 - DNA, 472 bp, Homo sapiens
ggtatttgataaaaatgcttgacaccccaaccagtgcacttcattcattccaagctatgatcctaaccagagcctccactgtgtcttaaatggaagcttataacaataataaactgttacattatactttgttatgactgttgttataaatatatcstttcataatatggacaaatcttttctctctacaagaagcattttcatgaatgatttgtggaacagttgaggtcctgccagtgagaatgataatctagtattctctctctccattcctgttacattggccccttggatttgtggcatgcttaccttattgacagtgattcattatggctttgtgctttgtttttatttgaaattgcagcaaggtgatgtaagtcactttagatttcacttcccaccattggatcataatgtagacattagcttgtgacacatgttgtcagcactttcagattatatgtgaaactta

SEQ ID NO: 170340 - DNA, 505 bp, Homo sapiens
gcccagttggtgttagatgttgtccttggaattatgaaaatgagattggattaaacggtttttcttcgtgagtagttcacattctaatgaaggagatatasatgtactaattaaaacataataataaaaacacctagctaaaatcaggggttctataaaagaagagtagaatgggaagaatggatacttgcgggcaactagcagtctctgatacagtttgcatattaatgcatgcactcaacaaatgtttattaagtgtctgctgtgcattatccctgcctaggtagtgatctgtctgtctattgtttatatagagaagtctgggatttaaacatgtaaagtatataagaatggttacctctagggatggatacactcaggtatagtacaaatgttttatagaatgcatgttttatccctgttatttaaacaattggtttaaaaatggtagcagcaaacaaattagaacattgaatctgaaaagataaactcaatcttttcagac

SEQ ID NO: 170341 - DNA, 579 bp, Homo sapiens
gttcacaggggcaagactgctacagacatggccccttgggtcttgccgtgagcccatagccctcactggctttgacttgggtattttcaaccactgttaccaaactggcatgtaacactctctagtgaacacytgctgactatttggaggttctcctgttcccgcatccatcagatgcctgcttgcttctctctgctttctcttgcacaaacactgattcctgctcttcttggtagcttgtcctcacttgcttataatttggagtttgtgagatacatcatctccgggtttgatgtatgtgttgtccttagggttttgaccaactagttgctctgtttttatgtggggacttgggaaaacctcaaattatgctgccactaccaccaacatcttacccaagtacaccccaaatgaaatcccactccatatctcccgctccttccctgcctcctgatacattcaccacactaatttttatgttctttaactttgctttagggcctttcaattggaatgtacttcctgaatatagtcatgtggctgaccacttcttaatatgcaaatatcattttaaatgcc

SEQ ID NO: 170342 - DNA, 547 bp, Homo sapiens
ttcaagggggttagttacaggtgaatctcagggggaagggtgttccaagaggaggagggcagcaccaagaccaagttgggagggtacctgtcacatttgaggagcagaaggccagtgyggctggagtgaggcaagagaggggaacacagcgtgagtgaggtcagggtggggagtgcagcagatcctgtgtggctttgccactttgttgcactttcaaggctcctgtcaccactgagcctttcactctgagtgtaagaaggtctgctgtgttctgattagcagccacaaagcatcctgtggtacagaggatgtatttaccagtcttctcttgagatggatacttaggttgtttctgacctgtttttatcagaactacaagaccgtgtatatatcctggaatcaacatatctttgcacatgtgtgtgatcttatgtgcaggataaattcctaataatgacagctacaatgtctatttttaatttttctagataatgccaagttgcctctgaaaaagctgtacaaatgtatgtgatccacagtgtttggg

SEQ ID NO: 170343 - DNA, 585 bp, Homo sapiens
gtaagtaagcattggcttcaacttaaaatcacaagtgcattagcccttaacaagagaatcaacccaatctgtaaaactctgaagccagtcattgacttctctctagctaggaaagtcccaaatgtcttcttcttctgatataaggctgcttaatctacaatgaaaatatgttgtttatactggcccctttcatcaattatatgagctagatcttctagttaacttgcagcttccacatcagcacttgctgcttcaccttgtacttttatgttatggagacagctcctttccttaaatctcatgaaccaacctcttctagcttcaaactttccttctgcagctttcttacctctctcagctttcacagaatggaagagggttagggcattgctctggattaggctttgatttaagggaatgttgcggctggtttgttctctccaaaccattaaaactttctccgtattgcagtaaggttgttttgccttcttataattagtgtgttcattggtgtagcacttttaatttctttcaaggagttttcctttgcattcacaactyggttaactatttggcgaaagagac

SEQ ID NO: 170344 - DNA, 558 bp, Homo sapiens
aaaaatgctcaacattttccatgagaaaaataaattaatgtaatagctgttttatgatccatgagttaattttctcacaccacactgctttacaatattgtaaggcagcaggtccagcaatttcttcaaatgaataaagatcaaactattaaagacacaagtcactagtttgaataactttgtattacaaaactgtagaatatgtaaaattatcactctatgagttggataaatatattgaatttatgaccttcaattgctttccttatctataaaatggaaatgactgccctagacgcctgaaagaatatagggcataactccaacaacaacaacaaaacaaaacaaacacaacaacaacaacaaaaaacaaacaactttaattcttgtttcgcccattccagtattttcagattgtgatctgggggcatgaacaatacctttttaaaagsttaagcacctatttataattgatctgacctctatcaaccaatgaagcagcctgtcatgcagttgtaatattttatgtccacagaggccccaaagtatattgcaatc

SEQ ID NO: 170345 - DNA, 564 bp, Homo sapiens
caaaagttatatgcagattttctgactatgcaagaggtcagtgcccctaatccccactttgttcaatgattatttgcaatgtaaaacactaaagtaacatgaaaaggatacttaaataacagaagatttgacaattcagaaaagtcattaaggattgtgctaggcccaaattttatcataataaagagtaattttgttatcaacaggaaaataatcgcagctttaagatgactttytatgttttttaaaaagggatgggttcttgctgtgttgcccaggttggactcaaactcctgggctcaagtgatcctcccaccttagcctcctgagaagcatccttgtagccaccatgccagaatctaattatttatatgctgaataaataagtatttactgtgggaaaataacaacgtggagagagggggttctgctgcttatacttgtttttatacattgttggttgtggtaaagactgctaattggtgaactaacatcccttttctttttttctaatatggaacactgatttttcagagtgatggcaatatactcaagccaataaac

SEQ ID NO: 170346 - DNA, 578 bp, Homo sapiens
cacctcttaaatatctgtaactccatccccctttcatcctaactgcccacactccagaccaggcccccataatctctcaccccaaatgttgcaagagcttcttccctgcttttaacagttrgggtctagtaaggaagataaaaaccaccctagatatttcaagtaggaggaatttgacagaggagattaaaggcataatcataaactttggaaaggctgggattatcagttttgggaaaaactgttactgacttccagaaaatcttgacaattggttcagggaaacctgaatcccattgagctcagctgcctgccatgtggaagaggctgacttgcaggagcttgtccagaagctactgtaaacctcacatctgcacacagctgccaggggagaaatatggtgtgtctctgccactttccacatcttgcacaagggcctctcaaaggcagaatctaagttagaaagaggtggggaggggattctggaaaaatgtggttccaagtttttattatgcaatgaggacagagtggagaaggcagtggagctggtgctgagttggcatcaggtatctcacact

SEQ ID NO: 170347 - DNA, 515 bp, Homo sapiens
gagtggagaaggcagtggagctggtgctgagttggcatcaggtatctcacacttgtatccactgtgtatgccttctatccccctccaccacactgaattcaatcactaagttatagccagagcaatttttctgttcgtgtcattctcttgatcaaaactctttaatagcttcctatttccattaagttaaaatcaaacttgaaactcttcagtggcctgaatatgacttagttcttgcctacatctcagtctcatcactcatttctctgcccccctttctagaatccagcataccagctttctttcaaaaaatattttttaatgtaccctgctcttgctgtctcaggtccttcactcacactgttttgattgattagaatgttttgttcccacttccccaatgtctttcccttctcttcctcctaytcaaccttcgggtgtcatctgaaacatcactgtctccaagaagccttctctgagttcctggaccagatttgtctccttctatcagctcc

SEQ ID NO: 170348 - DNA, 515 bp, Homo sapiens
gagtggagaaggcagtggagctggtgctgagttggcatcaggtatctcacacttgtatccactgtgtatgccttctatccccctccaccacactgaattcaatcactaagttatagccagagcaatttttctgttcgtgtcattctcttgatcaaaactctttaatagcttcctatttccattaagttaaaatcaaacttgaaactcttcagtggcctgaatatgacttagttcttgcctacatctcagtctcatcactcatttctctgcccccctttctagaatccagcataccagctttctttcaaaaaatattttttaatgtaccctgctcttgctgtctcaggtccttcactcacactgttttgattgattagaatgttttgttcccacttccccaatgtctttcccttctcttcctcctactcaaccttcrggtgtcatctgaaacatcactgtctccaagaagccttctctgagttcctggaccagatttgtctccttctatcagctcc

SEQ ID NO: 170349 - DNA, 583 bp, Homo sapiens
tgtgttttaaattgcctatgctrttaggatataagctctttaaaggcaagggctctgactgtcttgttcatagttctctcccctgtgcccaaagcagtgcaaggcatgtagctggcactggataaacatttattatgtgtgcaatgaataccagggaaggatttttgggtgtggcagacagataagtgagaatgccatcttctatgtccctcggggactcaggcccactcatttttccacacaccagagtcaaccactgatgtttcaatttcccttttctcctgatcactcatgttggtttctagatcctctgaatgtgccctcagagggtccttgctaatctgtgtctaaagaaagaatgtaagaccctggctaaagcttaccctaagaaattccactaggccttagctattgaaggaaacagattcccacccaagagtgacaggttacagctctgctcacagggagacccgtcctcagagagccccgtggggttgctgaggcacaaaatttacagaaagcctttctgtttggggtggtgggttttcactgctttgttttcttgtgtgctcagtggcttgtt

SEQ ID NO: 170350 - DNA, 583 bp, Homo sapiens
tgtgttttaaattgcctatgctattaggatataagctctttaaaggcaagggctctgactgtcttgttcatagttctctcccctgtgcccaaagcagtgcaaggcatgtagctggcactggataaacatttattatgtgtgcaatgaataccagggaaggatttttgggtgtggcagacagataagtgagaatgccatcttctatgtccctcggggactcaggcccactcatttttccacacaccagagtcaaccactgatgtttcaatttcccttttctcctgatcactcatgttggtttctagatcctctgaatgtgccctcagagggtccttgctaatctgtgtctaaagaaagaatgtaagaccctggctaaagcttaccctaagaaattccactaggccttagctattgaaggaaacagattcccacccaagagtgacaggttacagctctgctcacagggagaccygtcctcagagagccccgtggggttgctgaggcacaaaatttacagaaagcctttctgtttggggtggtgggttttcactgctttgttttcttgtgtgctcagtggcttgtt

SEQ ID NO: 170351 - DNA, 605 bp, Homo sapiens
cgtaacaacggacgaacccagggagtcgcattttggagccaaggaagctcaggctgccccgcacccctgcacccccactcccccctcctcctgccgactgcatcgcctttgggaagatgaatagcttggccgaagttgtttttcctttccggtggccctgatcaggtgtccccgccccctcctgccgttcgccttctctcgccgccttctcccgacgccccckcccggcccggcccctcctcccccgcccccctccgggctggaccgcggatggtacgttccgcacgtgagctgggtgctggtctggccggcgacgcgcgtgccctgtggccaaacactgcctggagtgagagcaaactaccagcgcagtggggccggcgcgagtgtgcgtgtgtgtgcgtgtgtgtgtgcgagcgcggtggaggggggggaccaactgcttcacactttcaacactgcactgaagagggagagcgagagagagactggagacgcacagatccccccaaggtctcccaagcctaccgtcccacagattattgtacagagccccaaaaatcgaaacagaggaaacgaacagcagttgaacatggacgaaggaattc

SEQ ID NO: 170352 - DNA, 403 bp, Homo sapiens
tgtgtacaacataatgcctatagttaatgatacggtactgtacacttttgtgttgagagggtcaatctcatgttaagtgttcttaccacaaaaaaaagtgacacaggaaaatttggaggcaacagatgtttatgaccttgagtgtggtgrtatcactggtgtgtacatatgtccaaactcatcaaactgtatatattaaatatgtacaggtttctggtatatcaattatactcaataaagccttaaaaaaatcaactgattaaaataaaagtaacatggtccactggggagaaaaggtttgacttaggtcaaactagctggaaagcagagaatataaaagaccctctgaggcctcacatgaattaaacaggtcagttatctacctacattaaatctgcataaa

SEQ ID NO: 170353 - DNA, 387 bp, Homo sapiens
aatgcttttcccattaaactaccattgacattctccacagaactagaattttctattttaaaattcatatggaaccaaaaaggagtcttgctctgttgcccaggccggagtgcagtggtgcaatctcagctccctgcaacctctgcctaccaggttcaagtgattctcatgcctcatcctttcaagttgctgggattacaggtgtgtgccatcacatctggctaatttttgtatttttttagtagagatggggtttcgccatgttggccaggctgttctcaaactcctgctctcaagagatccacctgccttggcctcctgaagtgctggtattacaggygtgagccactgcacccagccatcagtggttctttcttatatccagag

SEQ ID NO: 170354 - DNA, 617 bp, Homo sapiens
gggtttgcttgtcttccctttacctcccctgcaacacacacaaaataagagggacctatgccccaagaatatagaggaaagagggaggatgtaatgtggaaaaggaagggtgtacatgtgaaagaaaaaatcctgcaggcaccgtaaaaggagagaatcaacagcttttactctagctgtgaggggaggactactgcattgtcaatgttggaaatgagccttaaaataggtcactcgtgtggcccttgagatagatacactatattgaggaggataaacctgaatatgcaatttctccaccaatttatttatttagcaaagaaatacatgtggcatctccacttgtcatttaggcatctcaaaatcaataaatccaaaataacccttaacttctcaccttgcaactrgttcctttgtttccccctccatcctccaagttgtttaggttaaaaactttggtttcatccttaacttttatatttctctcacgcgtaacatttaattaatcagcaagtcttgtctactctgctttaagatctatcaataataggatcacttcttcactgatactaccttactcttagccactggtaatatttgcctggactgggagggtc

SEQ ID NO: 170355 - DNA, 594 bp, Homo sapiens
tatcaagaatagagggtttcctgcccactcctactcccacctccttgctcagctcacagtcacccaagcacgcacacacagctctgccatgctcctgtgtgcagtttgcaaggtattaaaccctcagagccaactccatcagggctgcttgaggattcatggaaatagttaagccagcagcaggctcataataagttattatcatggtagttgaatgaaaaggcaagctcagtttgtatacaccttagggaaagtcacagatgtagttcatgctacatatacattttctcttaattaaacattgttctatagcattattggaagtgcaaatcattgagtgtacaattgtcctgcttgaagacaatccagagagcttctcacacagtggctatgttttttgagaacatagtttagggggaaaawagatggtttagggggcttgttagccaagttcagagctctaaattcatagcacattttttaaagtcagtgagcaaaaagtttagaactccaagacaggcatcaagcataacgctttcaatttagatgccacttggtagcaattagacattcccagcattggtttctcagtgc

SEQ ID NO: 170356 - DNA, 566 bp, Homo sapiens
aatatgcttcatttcttccgattaagtgttgtaataaagatatcttgtctttatgtgccaaatatctctcaaaagaatgaagaatatcagagttttaaaaatctgattgaattcatttacaaactgttaactactagaaacaacctggcataatatccacctgattcctcatagatgggtaactagtrttattgatttgatttcactcatcctcagggattagagcaatctacttatggtgacttcttgcttgcttgcttttctttttctttctttctttctttttttttttttttgacagtcttcctctgttacccaggctggagtgcagtgacagtcatagctcactgtatcctcaaaatcatgagctcaagtgaccctcctgcttgagcctctcaagtagctaggactacaggcatgcactaccttgcccagctgatttaaaaaaaaaaaaaatttgtgagacagggtgttgctatgttgcccaggctggtcttgagctcctggcctcaagtggtcctcctgcctaggcctcccaaagtgttgggattataggtgggagccac

SEQ ID NO: 170357 - DNA, 594 bp, Homo sapiens
gtgcaggggagtttagctgttattttctcagatatcataagctctaagaggctgatgcttatctgagaatcccatttaaggaaattgcgcatgcttaactctagtggtgtttctatggccatttcacaattatataaggaggaatcaatttaataagaactttattggaatcaatacatttgattggcctagtttcacaagcaccttggcaatgccacattctcaaaaatcagccacatatgaaaccagtgtgcatgcaaggatagttatcaagtacttagtgaaactcgctaaattatcaaagaagatgggggaggctgctatgacttggaaaggccagatggaaagaaaagcatagactgaaacagagtcacttcatagttacacactgaggcccagaagtagaccaatctcattttaaatttttcctctgccccctactaattttgtgaaactcagaaaatttctgaacctctcacctcagggtcctcctctgaaggataaggaaaatcatagtwatgggaagtaatgaggtcatttgtgaatctcagaggtaaagagattatttgtgaaggccacttagtacaacactta

SEQ ID NO: 170358 - DNA, 457 bp, Homo sapiens
ccttccttccaccaaaactgccctttatcaaggtcaccaaagacctccacgttgctaaatctgataagcaattgtcctatcttactcacctatctgtagcattgactctccctcctccttgacacctccaggataccagtctcgtttgtcaccacctcactggctgctctccttcagtctcctttgctgactagtcctcaacttcccaatatcaaaaaactggggtttagacctgtctacaactattcttctctgtctacacccacccccttgatgatttcctccagtctcaatactttaaaaacctgacccacytaagctataaagagcctcaaatctgtacctatagcccaacttctcctctacactccaaacctatatagtcagttccctattcaacatgtctacttgtatgtctaataagcttctcaaatttagagtgtccagaacggaattc

SEQ ID NO: 170359 - DNA, 603 bp, Homo sapiens
ggctagaatgcaggtctcctgaatcccaagccagcacttttcccggtggtgatacagattagttttggtaccattaattcttagggaaatttcagattcctattgactcatgtaatctgaagaagtacttgtttaaaaacagaaaaatgcctatgggcaaatttatttgaagtcattyttgaagtcattaatgcattgctttgaaacttggaagaataaactcagaacaatgagaaaagagatggacttgcatatagggctaatttctggagtaataaacacttattttgaattatcataatatctatcagatattgattatagtttaaaagcaagagcagacaaccccgatctcttttatacaggttcaaatagagtaaaaatattagtaagagatttattatagttaaatggaagtctgaattggtaagcttttttttcttcctctctcccatcaagaccttccattctagtttcttccttcactccctcaacaaatccctagggagcatttatccatggtgggctggtgtacatttctatagtgaatgataccatcatgtggcctatttggtgaaaagaacaacaatggaaggcttagac

SEQ ID NO: 170360 - DNA, 603 bp, Homo sapiens
ggctagaatgcaggtctcctgaatcccaagccagcacttttcccggtggtgatacagattagttttggtaccattaattcttagggaaatttcagattcctattgactcatgtaatctgaagaagtacttgtttaaaaacagaaaaatgcctatgggcaaatttatttgaagtcattcttgaagtcattaatgcattgctttgaaacttggaagaataaactcagaacaatgagaaaagagmtggacttgcatatagggctaatttctggagtaataaacacttattttgaattatcataatatctatcagatattgattatagtttaaaagcaagagcagacaaccccgatctcttttatacaggttcaaatagagtaaaaatattagtaagagatttattatagttaaatggaagtctgaattggtaagcttttttttcttcctctctcccatcaagaccttccattctagtttcttccttcactccctcaacaaatccctagggagcatttatccatggtgggctggtgtacatttctatagtgaatgataccatcatgtggcctatttggtgaaaagaacaacaatggaaggcttagac

SEQ ID NO: 170361 - DNA, 603 bp, Homo sapiens
ggctagaatgcaggtctcctgaatcccaagccagcacttttcccggtggtgatacagattagttttggtaccattaattcttagggaaatttcagattcctattgactcatgtaatctgaagaagtacttgtttaaaaacagaaaaatgcctatgggcaaatttatttgaagtcattcttgaagtcattaatgcattgctttgaaacttggaagaataaactcagaacaatgagaaaagagatggacttgcatatagggctaatttctggagtaataaacacttattttgaattatcataatatctatcagatattgattatagtttaaaagcaagagcagacaaccccgatctcttttatacaggttcaaatagagtaaaaatattagtaagagatttattawagttaaatggaagtctgaattggtaagcttttttttcttcctctctcccatcaagaccttccattctagtttcttccttcactccctcaacaaatccctagggagcatttatccatggtgggctggtgtacatttctatagtgaatgataccatcatgtggcctatttggtgaaaagaacaacaatggaaggcttagac

SEQ ID NO: 170362 - DNA, 646 bp, Homo sapiens
ttgcacatgcctatgtcctgaatggtattgcctaggttttattgtagggtttttatgattttacgtctaacaattaagtctttaatccatcttgaattaatttttgtgtaaggtgtaaggaagggatccagtttcagctttctacatatggctagccaccaccatttattaaatagggaatcctttctccatttcttatttttatcaggtttgtcaaagatcagatggttgtaaataagtagtgttatttctgagggctctgttctgttccattggtctatatctctgttttggtaccagtaccatgctgttttggttactgtagccttgtagtatagtttgaagtcaggtagcgtgatgcctccagctttgttcttttggcttaggattgtcgtggcaatgtgggctcttttttggttccatatgaactttaaagtagttttttccagttctgtgaagaaagtcattggtagcttgatggggatggcattggatctataaattaccttgggcagtatggccattttcatgatattgattcttcctatccatgagcatggaatkttcttccatttgtttatgtcctcttttatttcattgagctgtggtttgtagttctccctgaagaggtccttcacatcccttg

SEQ ID NO: 170363 - DNA, 364 bp, Homo sapiens
tgcctataatcccagctacttgggaggctgaggcaagagaattgccagagtctgggaggcagaggttgcagtgagccccgagattgtgccactgcactccagccggggcaacagaacgagactccacctcaaaaaaaaaaaaaaaagaaaaagaaaaaaaaaagaacatattcaaattcctagatttggaatgtggaaattgtttgtgggggtgtagtaattctgcctgctatatttctaatgtgtgattatgaaaataaattggagaaagttaggtggtatctttgatattacttctattgctctgcttgaaatatgtttatgtgtctgtaactcartttcatgcttaaatggcttagagaaa

SEQ ID NO: 170364 - DNA, 609 bp, Homo sapiens
tattaaattgaggctataacccttttatttttaaaacaataaattttactcattgacaatatgttgtctcaaagatctaaaaatcattctcatttttggctcacgcctgtaatcccagcactttgggaggccgagacgggtggatcacgaggtcaggagatcgagaccatcctggctaacacggtgaaaccccatctctactaaaaaaatacaaaaaattagctgggtgtggtggcgggcgcctgtagtcccagctactcaggaggccgaggcaggagaatggcgtgaacccggcggctggagcttgcagtgarccgagattgtgccactgcactccagcctgggtgacagagcgagactccgtctcaaaaaaaagtattctcattttattggaaaatgatgttataaatgtatgctaattgtagttttaaaaccaaatcatatgatggttaaattaatttcacatatacaaagaaaatgtaaataaactaaaacggaaatctcatttataaaatgaattgccataatcctagaatgaacttttgttctttaagtattgtctctttcattcttaataatgtgtaaccattctgggactatcgaagttac

SEQ ID NO: 170365 - DNA, 395 bp, Homo sapiens
tttgtttacatagtattgtgaagtatattgtattttgggagtgaaactatttaggctatcataggccaataatgaatatattcattagtctataatatccctgaaattgtgtaaggattcatttcctctttttagcacgtttttcctccagagtattgaattatgtgtatctgttgaaacccactttgcctctgttatgtgccctctgtttccatagtcattcttactggtaaacaccttttcaaaratgagttctttctgatctcatcttctgtaatatgcccctttgattgcctcagataaggttaaccatattgcctcctatattcctttagagatttcaatcaataaatccattttatgtttgtttggctagacgatcacaagctattggg

SEQ ID NO: 170366 - DNA, 575 bp, Homo sapiens
aacttgtccccacttcctttcttaacaacaacgaaaaatacagaagtagaacttgaaattaaaattaaacatttctctctaaataatttcttaaataccaatatatagtattttttcagactaatgataacatagaaatatgggaccatgtatttataaagctatatcttattatatatacatcttattctagtgttattttgtatggtaccacaattacttatgtagttcaaggatctgtacatttcttggtctactggattactctttataatataattttttaattatatgatttcaaaagttcaccagtgcaacatccttatttaacaatgcatctttctcatcagatgcaaccatwtggaggcttactatacaattgttttatgtccacatggttagggctagggaagtacttttcagtacattgttactcttgttatatatatatagtgtatgtgtgtgtttgtatgttatagaaaccttactgaattgtgggaaaagctttaaattatttttccactaaatttcaaggggacatctactttacatattggaacatttatttcctagtc

SEQ ID NO: 170367 - DNA, 634 bp, Homo sapiens
tgacctaatgcacttatattttgcagcatcataagaaaatacagccataattcattcatcattccttgattcagaacactaattaattcattaattcttgaaatatgttttaatatattatagtgccagagtctttggaatacatgagacacaaagaagaaatattcttattactcatattataataaccagaaatttttagactccattttttaaagtatatgtgaaaagtagagattgttttcagagagaattactttcccaaagctaacaattcatgatctacccaggagatacttgtttgtttacttttatttctttatatattttatttgcctgtttactttttgttatttgtcttttctaagtgggaatcctggaaagagcccaaagcctttgaacaaggctacaaacaaatgagaaagttggattgtgttcatttatttggtaccacaagagaagagcttttgttctttacttgttgtagacatttaatcattcacttcatttaatattcrttaagatataggtatgcaaatatacaaagctgaataggtgcttagtctttctattcctcactttttagaaagaaatatctaacttaagttttatgtatgatttgcttatggacaag

SEQ ID NO: 170368 - DNA, 559 bp, Homo sapiens
agcaattttcccctgtagattttttaaggtaaataaaggaagcacattaaaagtataaaaagaatgctcactgtagaataatttttaatagctaaaatctcaaaataacctaaatattcaataatagaatggttatgtaaataatggtttagttgtaatgaaaaaatactaagcagatattcaaaatcatgttcaaaaagttaatgacacagaaatattcatataatttaaaggacaaaagcagtttagaaaatgcaatttatgctattaacatgwttacctaatatatatgtgtacacataaaaatattaaaatttgaactagaatcaaattattatgcttctcattgtagagatcataattttttcttcttttatctctttttcaaattctctgcactaagaaaatactgcttctctaattagaaaaaatatccaaaataaataaataaaaaatattaagactaaaattttttccaacctgtaagataaaaagttagtctggccaagcttcatggatgctgagtcagaggtaaagtactttgttaatcatgacaaca

SEQ ID NO: 170369 - DNA, 405 bp, Homo sapiens
aaaaagcatgttggtttcctagaaaagtccataaatggaataaaaatattaaaatcagatagttttttaaaagtggtcattgaacctagtgctttaatggaaaagcaataatttaccattatggtaattttcaggatttgcaaacaccaattcagtagaaaaaygaagaaaattagtagactgcatgatgattatgctagctttcttttatatctctgttcatatgacctgctgaataaatgattataaatttagttaatgattatactggaacacaagttgataggtttggctctatgtctccacccaaatctcatctggaattgtaattgccataatccccatgcactaagggagagagcaggtgggaggtgattggatcatggggtgtttttttccccatgc

SEQ ID NO: 170370 - DNA, 552 bp, Homo sapiens
tcatgggatcaatttggctagaaaactccaagtaaatcatgagtcacttagcattatttccataatacttttataacagcgcctacccatattgaggacttccaaacttggctgagagccttggacacttgataccatatttttgatatcatattttaaaataagaaattgttataatgtatcaaagttgattcatctgttttatgaaatcatttaatttcccttgtaaaatggaagggaaatatcatgtaaatatgtaaacagcttttaaaacaaataaggatgattgctttctaatggcatctaacttactaagtttgtgttttattagcatttcaatataatcagagataattgtattcttctttgagaacatrtcaccagacattagaaaattgcaaattatcaaataaatattactcgctcccatttaatatgtatattcaccaacaaattaatcggttttttctccttaattttttactcaataggagagactcaattttcaataaatacattttaaaaaagaaaatcatgaaagtcaagtataga

SEQ ID NO: 170371 - DNA, 552 bp, Homo sapiens
tcatgggatcaatttggctagaaaactccaagtaaatcatgagtcacttagcattatttccataatacttttataacagcgcctacccatattgaggacttccaaacttggctgagagccttggacacttgataccatatttttgatatcatattttaaaataagaaattgttataatgtatcaaagttgattcatctgttttatgaaatcatttaatttcccttgtaaaatggaagggaaatatcatgtaaatatgtaaacagcttttaaaacaaataaggatgattgctttctaatggcatctaacttactaagtttgtgttttattagcatttcaatataatcagagataattgtattcttctttgagaacatgwcaccagacattagaaaattgcaaattatcaaataaatattactcgctcccatttaatatgtatattcaccaacaaattaatcggttttttctccttaattttttactcaataggagagactcaattttcaataaatacattttaaaaaagaaaatcatgaaagtcaagtataga

SEQ ID NO: 170372 - DNA, 534 bp, Homo sapiens
attcagccactcttttcctgaacaaaacctgtgttctgttagcaaagataaaggaatgagtatctgcttaggtagtcaacaaacagcatatgccataattatgatctcatcaaaaaaagccattccaaatgggataagaattgytctgaatgcagtactgattccaagtaaatgagtgagccactgagacacagcatagagacttctgattccaaagtggtggtatacatacaagctggcttccatccttaccctcaccccccacagaaaaccaaaacccaatatgcagcactgagattatcaccagtaatatcccagaactcaaacataaggatgaatccatttctggggccgcagagaagtttaaaacaaaactctgagcagacagaaagaaaatcagattctcatatccttcactcccctccccaaatttgctccgcaccaaacacatggaatatgtcctttgacttctggtttctacactagaaaaagtaagatagaggtggacaagcagtttctccaccatctcgggct

SEQ ID NO: 170373 - DNA, 404 bp, Homo sapiens
gggataagaattgttctgaatgcagtackgattccaagtaaatgagtgagccactgagacacagcatagagacttctgattccaaagtggtggtatacatacaagctggcttccatccttaccctcaccccccacagaaaaccaaaacccaatatgcagcactgagattatcaccagtaatatcccagaactcaaacataaggatgaatccatttctggggccgcagagaagtttaaaacaaaactctgagcagacagaaagaaaatcagattctcatatccttcactcccctccccaaatttgctccgcaccaaacacatggaatatgtcctttgacttctggtttctacactagaaaaagtaagatagaggtggacaagcagtttctccaccatctcgggct

SEQ ID NO: 170374 - DNA, 534 bp, Homo sapiens
attcagccactcttttcctgaacaaaacctgtgttctgttagcaaagataaaggaatgagtatctgcttaggtagtcaacaaacagcatatgccataattatgatctcatcaaaaaaagccattccaaatgggataagaattgttctgaatgcagtactgattccaagtaaatgagtgagccactgagacacagcatagagacttctgattccaaagtggtggtatacatacaagctggcttccatccttaccctcaccccccacagaaaaccaaaacccaatatgcagcactgagattatcaccagtaatatcccagaactcaaacataaggatgartccatttctggggccgcagagaagtttaaaacaaaactctgagcagacagaaagaaaatcagattctcatatccttcactcccctccccaaatttgctccgcaccaaacacatggaatatgtcctttgacttctggtttctacactagaaaaagtaagatagaggtggacaagcagtttctccaccatctcgggct

SEQ ID NO: 170375 - DNA, 404 bp, Homo sapiens
gggataagaattgttctgaatgcagtactgattccaagtaaatgagtgagccactgagacacagcatagagacttctgattccaaagtggtggtatacatacaagctggcttccatccttaccctcaccccccacagaaaaccaaaacccaatatgcagcactgagattatcaccagtaatatcccagaactcaaacataaggatgaatccatttctggggccgcaragaagtttaaaacaaaactctgagcagacagaaagaaaatcagattctcatatccttcactcccctccccaaatttgctccgcaccaaacacatggaatatgtcctttgacttctggtttctacactagaaaaagtaagatagaggtggacaagcagtttctccaccatctcgggct

SEQ ID NO: 170376 - DNA, 419 bp, Homo sapiens
taaggccatactattgcacagggttttattcaaactttgcacaggattttattcaaacttttttctgctgtcccagaaatattattcagacctcaactctagagattagaatgtaaaggtgggagtctgtgggtggagtgatattagcttgattccaattgctgacttcatgaccactgatgagggcttcagggcaggtccatgatgttcatttgttttccttagtcaagttaatgcyagctaactttggccagaaattaattaatcctgctcagggtgctaggaaattctagatgtagcttgtagattatctcatttctccactgtcttcagtcagttcatacagaatttcaaaaactatctcaaatccatatatttgctcttcctacactgctagggttcaaactgccattgttgct

SEQ ID NO: 170377 - DNA, 214 bp, Homo sapiens
tgaaggggtatgcatttgaaatcttgatggatttggccaattgacctctcaatgctggtaccaatatacctgcccagcaagagggcatgacagtgagcagatgtctgtgtggacacaaagtacattatggttctaggagtttttgactctagctaatctcctctcatgtggtaagttaygatagaattatttaaaaaattgctgctggcaaagt

SEQ ID NO: 170378 - DNA, 495 bp, Homo sapiens
ttttacggatttcttctcttatatcacaagttcatggacaatctgaggaagcttgaattacaagtagccaattggcctatctacctcatttatatttattatctttattcacayacacagggcaccaaatttctctggaaaatcagctgtgctacttctaaggtacaaaaaaaatgtgtaagattgtctgagagatttaaagctgtcgtcgtagtaactgggaaattaccacctacaaccactccactgaggcctgaaactcagttaattaccactgcttaattaatccaagagtctctctcactgaatgcccagctgggttgtgaaaataatcactaaataacccaaaggtcttccagaagccaggagaacagcactttggcctgcctgtagaggcagagatccctctggtctccttctggttcactggaaagctggttaccactaaggagaaaggaaaggttaaagatctctgaacaaaagagattcacatac

SEQ ID NO: 170379 - DNA, 495 bp, Homo sapiens
ttttacggatttcttctcttatatcacaagttcatggacaatctgaggaagcttgaattacaagtagccaattggcctatctacctcatttatatttattatctttattcacatacacagggcaccaaatttctctggaaaatcagctgtgctacttctaaggtacaaaaaaaatgtgtaagattgtctgagagatttaaagctgtcgtcgtagtaactgggaaattaccacctacaaccactccactgaggcctgaaactcagttaattaccactgcttaattaatccaagagtctctctcactgaatgcccagctgggttgtgaaaataatcactaaataacccaaaggtcttccagaagccaggagaacagcactttggcctgcctgtwgaggcagagatccctctggtctccttctggttcactggaaagctggttaccactaaggagaaaggaaaggttaaagatctctgaacaaaagagattcacatac

SEQ ID NO: 170380 - DNA, 526 bp, Homo sapiens
tcgatttttggtctgactttttttcctccttcatggagatggctctatggggctttcaacttgtcagatataatctattctggccacacagtcttgagagaacracagccacagaatctgtggtgtcagatgaaaatgttgtagaatgcaagtgcaaagcattgcagaggtgatgaacatgaggttctccctccctgagaaggaatgaacaagatccggacctggaagagcagttgcaaaaaatgacaggggcctctgtggacagagtgtagcccagagcctcagctggccaagtggacaattcccaaaggctgcaagtcctcacatctctctgtcattcccactgagacattttgaaaagaaggtcaaatagcccttcatcaggatatgctgattcagacagacaactaagccgaggtggctttggtgaacacactatgggatgaaatgagttcccctgtggtctgctgccctgttgctgttaaactgaaactagagaagctcagagttgctaagagattgtcac

SEQ ID NO: 170381 - DNA, 454 bp, Homo sapiens
attgacaaatccctaccagtcctccaagatcctgttcaaatggcaccttcatgaagcctttcctgttcttccaaytcttagatggtctctttctttgaggataattttccgattttctttataatttttttatgacacatcccatttttcacatatttttcaacagattcattaaatgtctgcagacattagacaaaatgctcccataatgctatactatttaatccttcccacagtcctaagatttgaacactttccagataaagggatgccaatctagagagagtcaataatttttttttaggttacaaagctgataggcttcaaagcagaaatgtagcccaattctgtctgattccaaaccatatactgttttcaccagatcatgttgttaaaatagaagatcatctttatgattattttgggcatgcttctttctcctctatgagattcc

SEQ ID NO: 170382 - DNA, 523 bp, Homo sapiens
tgtgtaggatattttaatgtcagacttggaagtagtgttcatcacttctgcttatattgcttcagttagaactcagtctcatggtcacatctaactgcaaggcaaagcattctgaggacatggtctaactatactcccaaaaagaggaatgaatttgaacagttagtcagtctctgccactatcccatccttkagttgcttataattcaaagaggaagacaagatgaaggattgtacacataataagtgagggatcactagaggcagaattagtcagtgaaaactttctaaggagagacttttaaaatgggtagaataaggagataaacataaagagtcatcccatgaagtaaaacaatgcggtatgagcaaaattataggtagaaataggcaaacattggcaggggaatgtgaagaggtcattttgacaggtgcacagagtcaatgccaggaagcagagagcaacgtacctggctaaggagaataggatgaaactaccccaactaagaccactgactcctcc

SEQ ID NO: 170383 - DNA, 403 bp, Homo sapiens
ttacgagaaccgatactattactaaacaagtgtgagttttgaagtctttcaaatatttaaatataaactctaagaaaagtttcaaaaagaaagaaagaaatgaagtggggccactaatattagcaagcaatacttaaaggagatatagcaaacgtgaagcacagagccgggaacagagtggacgcacagcaagggctgtcgtctcaaatggggtgttgtgggttcctttggataacaaggaaaactgaaaaggagaaacagacagaaagcaatagaggaagtgggtgggggcagagaaaagaaaggagaggatctgcaggtgaaggagaagaaagtggatgaaagatcaatgagggagatgaataaaaaagraaaatgagcaattaacccacaaggaaattgg

SEQ ID NO: 170384 - DNA, 451 bp, Homo sapiens
ttttgtagattacgagaaccgatactattactaaacaagtgtgagttttgaagtctttcaaatatttaaatataaactctaagaaaagtttcaaaaagaaagaaagaaatgaagtggggccactaatattagcaagcaatacttaaaggagatatagcaaacgtgaagcacagagccgggaacagagtggacgcacagcaagggctgtcgtctcaaatggggtgttgtgggttcctttggataacaaggaaaactgaaaaggagaaacagacagaaagcaatagaggaagtgggtgggggcagagaaaagaaaggagaggatctgcaggtgaaggagaagaaagtggatgaaagatcaatgagggagatgaataaaaaaggaaaatgagcaattaacccacaaggaaattggagaccctactcagcattktctttgacctcttcaacgaga

SEQ ID NO: 170385 - DNA, 384 bp, Homo sapiens
gcttaaagatgtgacagcaggtggcacctgggagacatgaaggcagcagcacaacagacagatgggaggygggggaatgtaggagaaatggggcaggcatatcatgacctcagcataagcttttatcctcattgcctcgggaagccatggcagtgccttaagccctgtccctgtcttcatatgcccttttgctctcatagctttttgtcctgtggatcttctgattggcttctctctttatagcaagttaacataaagtcaattcctccttaaaaaagaagcatctgggctgggcacggtggctcatgtctgtaattccagcactttgggagaccgaggagtgcggatcacttcatgtcaggagttcgagaccagcctggccaa

SEQ ID NO: 170386 - DNA, 622 bp, Homo sapiens
gttgtcagcaatgtgaagacagaaatgaagagaaagcaaatcgccgtcattggtatctaaaacgtgctgcgtattttaactcctgggaatattttctctggttggtcttcatcttgaagcaatctgcctgatgaaatttttctggcccaccgtgttttctttcttttgggcctttctcctcttgattttttcttcaagggctctctggtaaatggcaggacccagtgttgaagtcagcacttcctgtcactgggcaggggctgggggtttctgtcatcggggcatttatccttgagaggcaaaggagtgaggcatccaggaaacatctccgcytaaggacaaacacctgctggagaagctcctgggactggttcacaggctcagtggaggttgccagctgaccctctctatcctctgaggtctgaaggggaagagctgacaggtcagggaacactgccccagctgagctgatggctgatcagccctccttctccattcaggcttccagatgttccctatgcaaaagaggaagggccgccgtgaaaccaagttctgaggtggttccctccccacaggggccaggttttatttgcagtcaggaagcaagggagctttggggcgc

SEQ ID NO: 170387 - DNA, 652 bp, Homo sapiens
aagttgcactgggggccgaccaagtttaaagtgaggtttgaacttgaaacacaagagcttcaaaccttcacttgcagagttgatttttctaatttaaaacagataagagatgtcatatttgctgatacaaatatgattctaaagcagaatgtgatttttgtgtgtgttgctgcatttttattgtatttttattatcccaggaggtacctggcttctcagtgctttttttcttaatctcactattttctataactgccctttttttttttctggctgtttccaagggcagctaaagtcttatttattctaaagaatttggtcaaatcagaggacaccatgggctttttgggacattctgtccaaaactttttcattccctgagaaagtttttactccctcatgagccaaccctgtttgtgggtctagacccagatgttcaggaattgcaaaggcataattcaagtttctctccggaactggttcctagtctaaaggtctgaggtccagggagctgggttytcagagactgacatttagtcacagccctttcctcatctaagaatttgaatgacttgagaaatatgtcacaggaatcagagatggaactgaaaacctcagctgtactctgggataaagctgagttagagaattc

SEQ ID NO: 170388 - DNA, 609 bp, Homo sapiens
caacctgcctggactgccacattgcttggtatcccacctattgaaactgtaggaacataaacttggctgctgctttactttcagcttctaaatcttgcacaaatttctcccatggccaaccctaacatgagaccggatactgaagggaattctgggaaatgtagttccagcttagctaaatgcacatggtgcaagaccaccacagagtgcaaataacagaacttaatgrtgaaaatacccttcactagtatgccggccagctgacacctggcaggctccttcatttctctccatccatgctcctcatgatttcaaacagctgcttatcccaaatccaacgtcccttactcctgtctcctattgacctgtgttcaattaacctgccagaatataaaagctgaatgtggcccttatttctatagtcacaaagttcactttaaacgaatgacctctggtgatcatggcaactcttcatcccccttctctggctcacaaattatcaaggaaaggacatcctaatggagagggtaatttaatctgaattgctctttagtccctggacatctcttgactgcctggctgtcagaagaaagtgtgtttttttcagct

SEQ ID NO: 170389 - DNA, 609 bp, Homo sapiens
caacctgcctggactgccacattgcttggtatcccacctattgaaactgtaggaacataaacttggctgctgctttactttcagcttctaaatcttgcacaaatttctcccatggccaaccctaacatgagaccggatactgaagggaattctgggaaatgtagttccagcttagctaaatgcacatggtgcaagaccaccacagagtgcaaataacagaacttaatggtgaaaatacccttcactagtaygccggccagctgacacctggcaggctccttcatttctctccatccatgctcctcatgatttcaaacagctgcttatcccaaatccaacgtcccttactcctgtctcctattgacctgtgttcaattaacctgccagaatataaaagctgaatgtggcccttatttctatagtcacaaagttcactttaaacgaatgacctctggtgatcatggcaactcttcatcccccttctctggctcacaaattatcaaggaaaggacatcctaatggagagggtaatttaatctgaattgctctttagtccctggacatctcttgactgcctggctgtcagaagaaagtgtgtttttttcagct

SEQ ID NO: 170390 - DNA, 513 bp, Homo sapiens
gaggaataaaataaaatcacatttggcacacaaaatttaccccagggatgctacacatctataaaacatgagccacaaacatgaatctaagattcccagtgacaagagggaaatgcggtcatttccaagagttacaagatccacaaaacaaaaaccttccatatgtttttcttgacactaargtctgagaggtgtttgttctctgggtcctgctacagtgtgagccttgtgatgtggacgagaacaccaacatcatccctgtggtcaatacaatagcaagaatgtcagagcaacttctcagagcacacctagaagctcacctcagatgcagccccaaagagcagcggctaaacaacttgaaaagtctgtgccttcccttaaacagccttactgtacatgaaacatttcccaggcaatttcgtcttagattccaccttcacagagagaaatgtatgaaaacatttttagaacacctgtccgtccgttggtaaattttttttaaagtgggtacaa

SEQ ID NO: 170391 - DNA, 206 bp, Homo sapiens
gggagcaagaagtgtcttcttctggactctgctttattgccttaggaggaagaattttacccagaataccccagctgacttcccataacatctcattagccatgatggggaggtcacattttcacttctacactgatcgctggccaagggcakggcattgtcatgactggctgacaccgttcatgactcatgtctgagacacgggc

SEQ ID NO: 170392 - DNA, 426 bp, Homo sapiens
gcacacacattttccactgcaccaagttattttctggacaggctggttagcatttgggacagaattccattctgaatagggcatttattgacaactgagacatagtgggtattcaataagtgatagccgccatggttactgttgttgtttcaatagagtaatmgcaatcattaccattctggccagtcatggtgagttacataaatgtactcaagcttccaggacttaattcaaacccacttcatcacccatgaaaactaagataatgggaaagatgacttcaccttgaatggctgccccaaggataagccctgttggaacatctcccctgcaaagatacacaagattattttttacgagtgaaacagtgagccctgatcctgcagttacaggaccacgtgtgcgagtgagcactgtggcagatct

SEQ ID NO: 170393 - DNA, 426 bp, Homo sapiens
gcacacacattttccactgcaccaagttattttctggacaggctggttagcatttgggacagaattccattctgaatagggcatttattgacaactgagacatagtgggtattcaataagtgatagccgccatggttactgttgttgtttcaatagagtaatagcaatcattaccattctggccagtcatggtgagttacataaatgtactcaagcttccaggacttaattcaaacccacttcatcacccatgaaaactaagataatgggaaagatgacttcaccttgaatggctgccccaaggataagccctgttggaacatctcycctgcaaagatacacaagattattttttacgagtgaaacagtgagccctgatcctgcagttacaggaccacgtgtgcgagtgagcactgtggcagatct

SEQ ID NO: 170394 - DNA, 398 bp, Homo sapiens
ctgacctagaggaaacagatcatttatcttctaaaccagagtcactattctaaccacatagggttttgaaggcacatgggataataacagtaaaagtacccagtagagagcttggaactttgtaagcactcagcaaatgtgaattattgttaatacatcacttctctgcctgttgggctccactgccttgagaatcaagtctaaactgcttagcatggcctacgaggccttgcttatctccccarcccacccctgccactgcccctcttgttgtccaagccacagccacacttactgaaactctctgaatgtcccgtgttccctctagtccggatcgttacacaggatcttcactttacctggaacatctcccatcccctttacctgggcagcttctt

SEQ ID NO: 170395 - DNA, 492 bp, Homo sapiens
caggcatgcaacagcagcaactgggcacctgtcagacgaaagcactatgagctgtgtgggactccagaaactaacagcagcacagaacactagtgatgctgtgggtcccccagaagcatttccacaagaggagcttcactggactctcactgaatgcctccgagaagtctgttgagcagaaacaattacccccaattaatacatgratataactggggctcagggagtttacataaataggtaggtagatatccttcattcagtattctccacaggacaggcattacagtgtccatttccatgaataatctttcaatcctcacaagagtcctatggtgtccaccttaaagaggaaaaactccgaagtttggagagattatgtgatgtgcccaaggtcattaagccagcagtgggatggggtcccacactcaggtcttctggcctcaagtccagagctctgtctacaactcagcaaaggccaaattttatccc

SEQ ID NO: 170396 - DNA, 492 bp, Homo sapiens
caggcatgcaacagcagcaactgggcacctgtcagacgaaagcactatgagctgtgtgggactccagaaactaacagcagcacagaacactagtgatgctgtgggtcccccagaagcatttccacaagaggagcttcactggactctcactgaatgcctccgagaagtctgttgagcagaaacaattacccccaattaatacatgaatataactggggctcagggagtttacataaataggtaggtagatatccttcattcagtattctccrcaggacaggcattacagtgtccatttccatgaataatctttcaatcctcacaagagtcctatggtgtccaccttaaagaggaaaaactccgaagtttggagagattatgtgatgtgcccaaggtcattaagccagcagtgggatggggtcccacactcaggtcttctggcctcaagtccagagctctgtctacaactcagcaaaggccaaattttatccc

SEQ ID NO: 170397 - DNA, 492 bp, Homo sapiens
caggcatgcaacagcagcaactgggcacctgtcagacgaaagcactatgagctgtgtgggactccagaaactaacagcagcacagaacactagtgatgctgtgggtcccccagaagcatttccacaagaggagcttcactggactctcactgaatgcctccgagaagtctgttgagcagaaacaattacccccaattaatacatgaatataactggggctcagggagtttacataaataggtaggtagatatccttcattcagtattctccacaggacaggcattacagtktccatttccatgaataatctttcaatcctcacaagagtcctatggtgtccaccttaaagaggaaaaactccgaagtttggagagattatgtgatgtgcccaaggtcattaagccagcagtgggatggggtcccacactcaggtcttctggcctcaagtccagagctctgtctacaactcagcaaaggccaaattttatccc

SEQ ID NO: 170398 - DNA, 492 bp, Homo sapiens
caggcatgcaacagcagcaactgggcacctgtcagacgaaagcactatgagctgtgtgggactccagaaactaacagcagcacagaacactagtgatgctgtgggtcccccagaagcatttccacaagaggagcttcactggactctcactgaatgcctccgagaagtctgttgagcagaaacaattacccccaattaatacatgaatataactggggctcagggagtttacataaataggtaggtagatatccttcattcagtattctccacaggacaggcattacagtgtccatttccatgaataatctttcaatcctcacaasagtcctatggtgtccaccttaaagaggaaaaactccgaagtttggagagattatgtgatgtgcccaaggtcattaagccagcagtgggatggggtcccacactcaggtcttctggcctcaagtccagagctctgtctacaactcagcaaaggccaaattttatccc

SEQ ID NO: 170399 - DNA, 420 bp, Homo sapiens
ctttttatggttcacttctgactgattcgattttggaatctgatattggtctgttcgagattttaatttcttcctgatccaatcttggraagttgtgtttccaggaatttggccattcctctacattttctagtttgtatgcatagatgtgttcataatagtctctgaggaccttttgtatttctctagaattgattataatatcacttttgtcacctctgtgcttattttttacagtctatcaagcttgcttattttttcaaagagccaacctttggttttataaaccttttgtatggaattttgggtctcaatttcattctgttctgctctgatttcagttatttattttcttctgctagcttcggggttagtttgctcttgctttttaagttcctctaggtgtgatgttagagtgtt

SEQ ID NO: 170400 - DNA, 520 bp, Homo sapiens
ggggaagctagttccatgctagcggttctaaaatgggatactttttaaatagaaacgggggggaagatttgctgaaagagtcagaagacccaggagaagcccatgagtgtacacccttccttttctgggccccacaacacggttcacatcaccctccacccctttgctaatgttcctctctccctgaacttcttcagcacacaattcargtctccccttggactctgggttctccccaaagcagattgtgttagtcagggttctccagagaagcagaagcagaaagatttaaagaggtaagacagaggagatttatttatggtgagagctagttcacgtgattgttgagtccgagaagtcctacaatctgccaccagcaaggtggagactcagaaaagccagtccaagaccaaaggcctgagaaccaggagggccactcgttcttgggtctgaaggcccaagaactaggagattggatgtctgagggcaggagcagatggatgtcccagttccagaagag

SEQ ID NO: 170401 - DNA, 255 bp, Homo sapiens
atatgtttctacctgtaatctcttgccctaggcttccacaggtctgtaatctctctgaagaagtgcctgccaatttttctgcctgacatctgagatacataaaacgagaccagatattctggcaagacaggttaaaatattgcaaatcaggttaatttcagtgtcaattctgaccttaagcttaaaagtgtattctgttgtctctcacttctatrctcaaccctgtccccagacacattacatgccagtttatat

SEQ ID NO: 170402 - DNA, 583 bp, Homo sapiens
ttctaatacttaagaagccatgcaaaatcagcatgtatgttatgtacatgcgggtcagactgttaaggtaaaatgctttaaaattgattagtacataatttacctcatattaatgttcttgaaacacttcttatattaaagatttcaactgctttcaakttttgtatttttatcaatagaattttccttttgctgccttttactcagactccttcaaagattctcttccattccagtgagaggaaataaattatgccctagcatgaagaagataaaatcagcaatagaacaatcactataggtcagttggtgccttttccttttggcaatatgctccattttgataacagaaagatttttccaccttgatcaatccaatttaagcttcacactgggttgtaaaccagtaatgagaaaaatgaatcttcaaatttgtatcctggagggatttttttccagccctaatctgtggctttgcccatcaccctctataaaggcttttccgtagcaaggctataggaacattgcatcgaaaagtacagcttctggggggtctctgttggcaaataaaaattcgccgaat

SEQ ID NO: 170403 - DNA, 583 bp, Homo sapiens
ttctaatacttaagaagccatgcaaaatcagcatgtatgttatgtacatgcgggtcagactgttaaggtaaaatgctttaaaattgattagtacataatttacctcatattaatgttcttgaaacacttcttatattaaagatttcaactgctttcaatttttgtatttttatcaatagaattttccttttgctgccttttactcagactccttcaaagattctcttccattccagtgagaggaaataaattatgccctagcatgaagaagataaaatcagcaatagaacaatcactataggtcagttggtgccttttccttttggcaatatgctccattttgataacagaaagatttttccaccttgatcaatccaatttaagcttcacactgggttgtaaaccagtaatgagaaaaatgaatcttcaaatttgtatcctggagggatttttttccagccctaatctgtggctttgcccatcaccctctataaaggcttttccgtagcaaggctataggaacattgcatcraaaagtacagcttctggggggtctctgttggcaaataaaaattcgccgaat

SEQ ID NO: 170404 - DNA, 614 bp, Homo sapiens
aatgcaatcagcattaattaaaattctcctgcttttaattatgcccatgataagtttgggagaatataaactaccaggaagcaaatagcacaaagataattaaacaaaaataaaggctttgtagactcagattgcttcaaattacttagctaaatatgcacattcatgtttatgtttgtttacttagagtttcttcttcatggattcttacagctccctaatatggtattctaacataatcaagcttcatctcacttactccaagaagtttttctgaaattaccctagacaatattttactatggttctcctcgtctctgcccattactctttcagcctacaagttctttcacatattagtttgtcggttcaccagagttttgccttcggtcttctcattytacaatagacaatatattttgcttcagcaaaggacagctagcctccagccatgagctctgcctggttgtcctatagagcttcatgattaacatgtctaatactgtgctcattacgtcctccctccccaagcctactctaagttccatattctcacacttggttaatgatgttaccatcaagtaatatgttcctcttcttcccacctcttacag

SEQ ID NO: 170405 - DNA, 468 bp, Homo sapiens
cccaagtcttgggagaggtatgaagatccagatataggaagctaaaagattcttacgtaaattcaatccaaagaagttctctcagaatcacaatatagtcaaactatcaaaagtcaaagacagagaaaaaatctgaaaacagcaagagaaaaacatcaagtcacatgtaagggaatccttattagactaacaacagatttctcagcagaaaccttacagacctggacagaatgagatgatatattcatagcactaaaagaaaaacctgtcagtcaagaatattatatacagcaaggctatttttaagaaataaagcctttttcagacaagtaaagactgagggaactcatcaccactagactggccctgcaataaatgcttaagggagtcctacatcaggaagcaaaaatacattgtctactctcatgaaaacgtgcccagttwtgaagtttactggtagagaaaata

SEQ ID NO: 170406 - DNA, 632 bp, Homo sapiens
gttacctcaggcaaatgccgtttctcagctgtgtgatcaaaagtaaattacttgaccaccacgggcttcagtttcctcatctgtaaagtgtagagatattaaaacagtttcctaagattgtgagaataaatgggataaatttatgaaaatccctggctttcaatatgcattcaatatatgtacattttaatggaatttgaattattttgataagataaatgcagtagtagtgtaaccacttaagaacctatacaattgttttcctatgaaactgtgagtcaagtattttcttcatacacacatgcttttgggaattgttgagggaagtcagggaccccaaaaagagggactggctgaagccatggcagaggaacataaattgtgaagatttcatggacatttattagttccccaaattartacttttataatttcttatgcctgtctttactacaatctctaaacataaattgtgaagattatcacttccccaatcaatactcttgtgatttcctatgcctgtctttactttaatctcttaatcctgtcatcttcataagctgaggatgtatgtggcctcaggaccctgtgatgattgcttaactgcacaaattgtttgtaaagcatgtgtg

SEQ ID NO: 170407 - DNA, 508 bp, Homo sapiens
  misc_feature (1)...(508): n = A,T,C or G
nnnnntggctagccacattcagaagaataaatttgaatacctacctttcacayatacaatactgaaaatggattaaatatcttatatgtaagaccttaacctataaaaatcttagaagaaaacctaggaaataccattctggacattggctttagcaaataatttatgactaagtcctcgaaagcaattgcaacaaaaacaaaacttgacaaatgggacctaattaaactaaagagcttccgcacaacaaaagatactattgacggagtaaacagacaacctacagagcgggagaaaatattagcaaactatgcattcaacaaagatctaatatccagaatctatagggaacttcttcaattcaacaagcaaaaagcaattcaacaagcaaaaaaccagtaatcccattaaaaagtgggcaaaggatttgaacagacactttttgaaagaagacttaaaagcggccaacaaacatatgaaaaattgctcaatatcattattcatcaga

SEQ ID NO: 170408 - DNA, 508 bp, Homo sapiens
  misc_feature (1)...(508): n = A,T,C or G
nnnnntggctagccacattcagaagaataaatttgaatacctacctttcacatatacaatactgaaaatggattaaatatcttatatgtaagaccttaacctataaaaatcttagaagaaaacctaggaaataccattctggacattggctttagcaaataatttatgactaagtcctcgaaagcaattgmaacaaaaacaaaacttgacaaatgggacctaattaaactaaagagcttccgcacaacaaaagatactattgacggagtaaacagacaacctacagagcgggagaaaatattagcaaactatgcattcaacaaagatctaatatccagaatctatagggaacttcttcaattcaacaagcaaaaagcaattcaacaagcaaaaaaccagtaatcccattaaaaagtgggcaaaggatttgaacagacactttttgaaagaagacttaaaagcggccaacaaacatatgaaaaattgctcaatatcattattcatcaga

SEQ ID NO: 170409 - DNA, 305 bp, Homo sapiens
tcacatgtctggcaagttggtcctagctgctggctgggagctcagccaggagtcttagtttctttcttcatgagattatctacggagctgcttgsttggcctttctcacagcatggtggctgagttccaagagtaagtgttccatgtcaaggtagaagcttctagtatcttaagatctggctccccaaatagacatagtaacatttcctctgtgttccatttgtcaaagcaatcacagagctctaacagattcaaagagtgggtgttgactcctcctgtctcaatgggagaagcgtcaaaatttt

SEQ ID NO: 170410 - DNA, 588 bp, Homo sapiens
gctcttcaactggatttatgagaaataaggatcatattctgatttccatttatccatttcctgtgtcattttccagcttaattttaaactgaaaaagaaaatagaggagtgatgtattgtcttttaacaaccctctgaaaagatgacaatatgtctattcattgcagtattatttttaacataaaaagtcagagaaagactgtatttctggatgttcgctaatcttgcattcctggaatgaattcccctaggtcatagtatataaaactttttaaaaccagttttattatgatatattcacatagcatacaattcacccatttaaagtgcacaattcagtgatttttagtatatccacggagctgtgcaactatcaccacaatctaattttagaacattcacataattgcaaaaagaaacycaatgcccattaacagtcactctccatctctcctcctcctcaccaccccatccccagtgtaagtgacgactgatctactttctgtctctatagatttgcctattacagcattacatataaatggtatcatataccatgtggtcttctgtgaatggtttctttaactt

SEQ ID NO: 170411 - DNA, 578 bp, Homo sapiens
taatttttctatgcccagacactgatgaacgtccacaagtatcaaggctatcaaggaaattatgaccttaccaaacagactaaataaggcaccaggaaccaatcatggagagacagacgtatgtaacctttcagatagagaattcaaagtagctttttggtggaatttcaattaaatcattataacaaacaaaaaattaagaatcatgtcagataaatttaacaaagagactgaaatacttaagaataatcaagcagtagttatgaagttgaaaatgtctggcatatggatgaatgcatcagactctcttacttgcagaattgataaagcagaagaaagaattagtgagctagacaggccatttgaaaacacatagtcataggataccaaagagaaaaaaataaaaaagaatgaagcacatctacaagataaaaaaaaatcctcaaaggagcaaatctgagacttattacctgtaaagtggaggtagacagagagatagggttaaaaagtttattcaaagggataatatcaaagaacktccaaacctagagaaagatatcaatattcaagtacaggaa

SEQ ID NO: 170412 - DNA, 574 bp, Homo sapiens
tcttttttctataacctgtaaaacaatgaaaacacaaagtaatcttttaaaaattacattctcttaaccataaaacaataaccacatcaaaattattgtctgaattttagttttttatataaatggatttttggtgaaaacttatttaatatgataccttactaatttaattacatagaaccttcatggatgggttgttctggagatctaaataaaggattagtcttgagtgtgaaaacttgctaaattttaacaatatttaatttagtaatggtagaaatcaattcaatgatttgtaatggtagaaatcaattcaattctccatttcttcatcaatggagtaataggattagaaatgtgcctaagtaagatgaattatgtagcagttgcagactatatttcagggaagatttagagtcagaacagtcctgcagataggtgggggcttataaagcctgagctagaatagcatgaagaatgtggaactagagagacttatyagacggacatcaaatcatgagaacatggtcattaattggataagacagcaatttaaagaaaaatcccaaagata

SEQ ID NO: 170413 - DNA, 574 bp, Homo sapiens
tcttttttctataacctgtaaaacaatgaaaacacaaagtaatcttttaaaaattacattctcttaaccataaaacaataaccacatcaaaattattgtctgaattttagttttttatataaatggatttttggtgaaaacttatttaatatgataccttactaatttaattacatagaaccttcatggatgggttgttctggagatctaaataaaggattagtcttgagtgtgaaaacttgctaaattttaacaatatttaatttagtaatggtagaaatcaattcaatgatttgtaatggtagaaatcaattcaattctccatttcttcatcaatggagtaataggattagaaatgtgcctaagtaagatgaattatgtagcagttgcagactatatttcagggaagatttagagtcagaacagtcctgcagataggtgggggcttataaagcctgagctagaatagcatgaagaatgtggaactagagagacttatcagacggacatcaaatcatgagaacatggtcattaattgrataagacagcaatttaaagaaaaatcccaaagata

SEQ ID NO: 170414 - DNA, 574 bp, Homo sapiens
tcttttttctataacctgtaaaacaatgaaaacacaaagtaatcttttaaaaattacattctcttaaccataaaacaataaccacatcaaaattattgtctgaattttagttttttatataaatggatttttggtgaaaacttatttaatatgataccttactaatttaattacatagaaccttcatggatgggttgttctggagatctaaataaaggattagtcttgagtgtgaaaacttgctaaattttaacaatatttaatttagtaatggtagaaatcaattcaatgatttgtaatggtagaaatcaattcaattctccatttcttcatcaatggagtaataggattagaaatgtgcctaagtaagatgaattatgtagcagttgcagactatatttcagggaagatttagagtcagaacagtcctgcagataggtgggggcttataaagcctgagctagaatagcatgaagaatgtggaactagagagacttatcagacggacatcaaatcatgagaacatggtcattaattggataagacagcaattkaaagaaaaatcccaaagata

SEQ ID NO: 170415 - DNA, 460 bp, Homo sapiens
aggaaaattttgaagtaattttgataaaattgtttatttgggctcctcattgttacagtcaaattccattcccaattgttcttttattcccagagtaactcaagcaatactttccacatagtatataagaattaaatcatrgaattaatgaatgcatggatgaggctgtcaacccaaaacttggtccccacaatgaatttaataaatgtgatgagatacagttaagaaatatacttttatttccaaggtattgatacgttaagacatgtagagtaacatactcaatacaaactctattgtagatcacatcaaaatattgtcatattttgttatttcacataagctaatattaaattaataaaacaaggaaaaatatggtatcatgtattttttgaaattagaatttaactgcatatttaggatgacactcttaatgtaataatagctacagtagtaatgc

SEQ ID NO: 170416 - DNA, 582 bp, Homo sapiens
cattctggacattgctatgagttctttattacctattttaacatcttcgtattattttttcaagactcaaaatccaggcaggattaaatagttggcttgacccaggtcacagcctacactgcagttatcaaggaacagacagagagccctcggtgctgtcagccttgtgatggggaaatggaccctgcttccccaaaaggcatttgcaaggagsgatttgaaactggaaggatctcaagtgtttagtcgaaagaccatggcccatgtcagtcatcactgtcatatccacagataatagagtgttggaaagaagctgagaaacaacctgggttctattcaaattcagttcttagtgttgtgtgaccttctctaagcctgggtgtcctcagttttaaactgggataatattgttttgcccaaaatatctcatttcattgtaaagagtgaaatgagataatttatgcaaggtttctttccatttcttttcattccaaaaaatttataggtagtaatggtctacctgtgtgagcaaaatacaaaaaaaaaaaggaagaagttaataagttaataataaccatttat

SEQ ID NO: 170417 - DNA, 403 bp, Homo sapiens
cagagagagcacagccaagttatgtacaaaagggaccaggggcatcacacacatcaccattcacatttgggccaataagaaaaaaatacttagattgtaagagttttttgtgccctagctccaagtgagagaacagtgccacctcctatgttttattaatrgaccacattgcctcattgtaatactatttaaccatatagtaggatccattcttatcaattcagtaaattcatattaaatatttattgctttaaaaaatttttcttactctcttttcctgagtcttagcattgatccctaaatcaatgcagaatatattccagcagtgcttctctggacactcaacctaggttttactaggtcataccagtatgctggccttatgggagagaaaaaaccaagg

SEQ ID NO: 170418 - DNA, 547 bp, Homo sapiens
tgttccaatactccagccaaactaatgtgtacgaaaagtggagacataaaatataaatgagaagacatcattcaatattmtaaaggctttaaaaaataattagagaatatcataccaatatagttgaatacttagaaaacaattaataaatttcatgaaagacacaaactaacaagattcataccactaaaaccataaaacttgaaaggctctatttctctcaaaaatatttaatttgcagttaaagcttttccacaaagtaaatccgttacaggtatccacactgttgaattctaccaaacatttagagaggaaatataccaatacaagtcaaactatgtctgaaaatacaaatggagaagacacttgccatctcattctatgaagtcaacattattctgataccagaaccagacaaatacatgacaaaaaaattaaactacaggttaatagtcatcataaaacttattataaaaattctcaacaaaacattagcagatttaatctagacataaaaataacatcatgactcattggaacttatcta

SEQ ID NO: 170419 - DNA, 477 bp, Homo sapiens
gatgaagcaatgcagaagctgacagccaaaatacccartatagagaagaacataactgacctgatggagcttaaaaacgcactataagaacttcacaatgcaatcacaagtatcaacagcagaatagaccaagcagaggaaagaatctcagagcttgaagactttctgaaataagacaggcagacaagaatagagacaagaatagagaaaaaagaatgaaagaattgaaagaatagagaaaaaagaaatagaaaaaagaacgaaaagaaatgaacaaaacctccaagaaatatgaaattatgtaaagagaccaactctacaacagactggggtacgtgaaagaagtgaggagaatggaatcaatttggaaaacatatttcaagatatcatcaagaacttccataacctagctgtacaggtcaacattcaaattcaggaaatgtggagaaccccagtaaaatactccatgagaagatc

SEQ ID NO: 170420 - DNA, 465 bp, Homo sapiens
agtaaagttaaatgacttgcttgaggtcaatcagcaactggtaagtggcaaagctggtatttgaaccccaatgggcatgagtgcagagtccatgcccttaaccagtctgctactttgcaggaaggagcctgaatggagcaggacacctaggacatgtgaataattatcagaccagctttatgtaagtgatttgatcactctggtctcatggaactgtctctaaaatgatggattctgacttgaygatgtctaacgtctctttgaacatcccatggctgagattccatgtaactgtacttatattgtccatgagttagaagcaggtgccagaccctttcccattgccacagattattgtagaaaattagttaattgcctcctgaaagcctcagggtatctgatcttatggaataaagttcaacagctgtgcttacattttggggactacattttgaaccatcatta

SEQ ID NO: 170421 - DNA, 393 bp, Homo sapiens
tgactcttaagtctttatctcttgcccatagctcatctctcaactacagacccatatatgcactgcgtaacaacacccctgcttagaattctaatatggtgcaaacctagaggtcttcttttcctcgccttttctcatccactacatccaatctctcatccaatcctgttgctttgttttcaaacactatgtagaaactgagggcttcttgtcacttccttgctagcatcctgtccaagccccatcatccctttcaccgtgacatttctttttttttttttttgagacaaggtcttgctctcttgctcaggctggagtgcagccgtgtgatcacatcactgcaaccttgacctccygggttcaagtgattcttccacctcagcctcctgagta

SEQ ID NO: 170422 - DNA, 595 bp, Homo sapiens
tatagagtagtccatttataagacctgatatatttacttcagaaagtttggaggatttaattgatgtgaaaccttgcccgtcttcaaaatccgtagaaggttctgttctaccttgttcaacatagtagaactttcagcatgcaaataacgtacttctgtctgttttgcctcttgaagtccattcaaagacttattgtttccctcagggtaagttatggtcattttcaggattatctaaaatattacaccatatgtagttcatttattaattcaacacgtttactgaacattttctctctgtgattcatggagctatctacagacggttgaacacatgagtctgaagtttcgagtagaggccagagattaaaagacaaagtttatctatgattatataaatattattcagaaccactgattttaataatattttatgggtagagagtggaaaggtacaaagagaaggggcatagcataaagctttaagtagtkccagaagtacaggctgagatgaacaaagtagcaaatggaagagaagtagcccaactgaagaagaaaacccagagaacagagcatgaaaaaaggcaaacacaga

SEQ ID NO: 170423 - DNA, 376 bp, Homo sapiens
atgactgtccctggggttaattcactctctttagaccctgaagcgagagtggtacacagtgttttatgtcttgtactctagatggagattgcctgaaggaaagggataaataaattctacatggaggaaagttaaaggactgttagacttggttcagtagcacattctgcrtcccttctgagaatagaagtttcattctcaatcaagaacatgaagtttcccatgtgtgaatagaagctcaataaatatttaatcaaaagaaatgctaaataggagtggtgagagagggcatccttgtctttcaccagttttcagagggaatgcttacagcttttgcccattcaatgtgatattggctgtgggtttgtcataaata

SEQ ID NO: 170424 - DNA, 498 bp, Homo sapiens
agaaccaaatttttaaaaacaataagagcataagaaagaaagtgtggatagaaacctgagaggaagaaatggtctccaggttgagagggtatactgagagctgagacagatggatagaaaaggsgtaacgcagacaaattacagtgaaactcaagaatttctaaagaaaagaagagcctaaaaactttcagatagtaaaataacagaaacaaatgggctccctaccaaaagaagaacaagaataagaaaaaaacagctacagtcctcaatggtaaaaatgaaaatcaccaaggtcaatcaatgtcttcatgtcttcatgcctgggaaggaaaatattcaaaaagtatgtaatctcatcttctgtgaaaccagcattatagcatgagggaaaatagagatattatcaaaatattagagggcaaaaaatcagaaaaaaagaaaaatcaatcaaagaaaaatgattagaacaggactgcaaaaaggaaaaattaagtcaaa

SEQ ID NO: 170425 - DNA, 607 bp, Homo sapiens
gatagaaacctgagaggaagaaatggtctccaggttgagagggtatactgagagctgagacagatggatagaaaaggcstaacgcagacaaattacagtgaaactcaagaatttctaaagaaaagaagagcctaaaaactttcagatagtaaaataacagaaacaaatgggctccctaccaaaagaagaacaagaataagaaaaaaacagctacagtcctcaatggtaaaaatgaaaatcaccaaggtcaatcaatgtcttcatgtcttcatgcctgggaaggaaaatattcaaaaagtatgtaatctcatcttctgtgaaaccagcattatagcatgagggaaaatagagatattatcaaaatattagagggcaaaaaatcagaaaaaaagaaaaatcaatcaaagaaaaatgattagaacaggactgcaaaaaggaaaaattaagtcaaattgtatcatcagtctcatatattattatatccaattatatcaaatctcataaaatcatcgaaaatcatatactaagattaaattataacattttaagctttcagatttggtttaaaacatttagttttatgatatatagaaaccacatgaaataa

SEQ ID NO: 170426 - DNA, 498 bp, Homo sapiens
agaaccaaatttttaaaaacaataagagcataagaaagaaagtgtggatagaaacctgagaggaagaaatggtctccaggttgagagggtatactgagagctgagacagatggatagaaaaggcgtaacgcagacaaattacagtgaaactcaagaatttctaaagaaaagaagagcctaaaaactttcagatagtaaaataacagaaacaaatgggctccctaccaaaagaagaacaagaataagaaaaaaacagctacagtcctcaatggtaaaaatgaaaatcaccaaggtcaatcaatgtcttcatgtcttcakgcctgggaaggaaaatattcaaaaagtatgtaatctcatcttctgtgaaaccagcattatagcatgagggaaaatagagatattatcaaaatattagagggcaaaaaatcagaaaaaaagaaaaatcaatcaaagaaaaatgattagaacaggactgcaaaaaggaaaaattaagtcaaa

SEQ ID NO: 170427 - DNA, 607 bp, Homo sapiens
gatagaaacctgagaggaagaaatggtctccaggttgagagggtatactgagagctgagacagatggatagaaaaggcgtaacgcagacaaattacagtgaaactcaagaatttctaaagaaaagaagagcctaaaaactttcagatagtaaaataacagaaacaaatgggctccctaccaaaagaagaacaagaataagaaaaaaacagctacagtcctcaatggtaaaaatgaaaatcaccaaggtcaatcaatgtcttcatgtcttcatgcctgggaaggaaaatattcaaaaagtatrtaatctcatcttctgtgaaaccagcattatagcatgagggaaaatagagatattatcaaaatattagagggcaaaaaatcagaaaaaaagaaaaatcaatcaaagaaaaatgattagaacaggactgcaaaaaggaaaaattaagtcaaattgtatcatcagtctcatatattattatatccaattatatcaaatctcataaaatcatcgaaaatcatatactaagattaaattataacattttaagctttcagatttggtttaaaacatttagttttatgatatatagaaaccacatgaaataa

SEQ ID NO: 170428 - DNA, 487 bp, Homo sapiens
ccttctgcaaaatttaaatccaaagaaacagagctggttgatgatatggtcaaatatacttctattacactgttgtaccttctaccttttrttcttcttattgctgtctgctacttcagcagaagtctgaatctgttccccaaaaattcatgttgaaacttaatcagcaatatgataatattcagaggtgaagcctttaagagataattaagtcataagatcagagcccacatgaatgacattagtgaccttagacatcaaaacagcttttcatcactcttctgcccttctgccatctggaacacagagttgaagacaccttcttggaagcggagactgtaccctcaccagacaccaaacccactgccatcttgatcttgaactttccaaccttcagaaacatgagcaataaatttttgctgtttttaaattacccagtctcagatactttcttatagcagcatgaatgggctagaacactatcctt

SEQ ID NO: 170429 - DNA, 570 bp, Homo sapiens
ggttcaagcaattctcttgcctcagcctcctgagtagctgggattacagacgcctgccaccatacctggctaatttttgtatttttagtagagacagagtttcaccatgttagtcaggctggtctcaaactcctgacctcgtgatctgcctgcctcggcctcccaaagtgctgggattacaggtgtgagccaccacaccaggcccattttatattctttatagcatatgtcatcatcagaaaatgtcttgtgtttttgtaagcttgcattttccattgtccacctctgcactagaatgtgagctccattaataccacagaccgtggctattttgagggcttctgtgttttcaacacctactgcccatatatatttactgaataaatggatgaataaaattcaatattcttacctgcaaccaaattggtataaagttatttatacactcttttttaaagctctatatratagactaaaaataaatatactaagaaaaaggcgtaatccttacttgaaaccttgagcaaaaaaccaggaaccaccccacaatgtccacgtgcttaattattt

SEQ ID NO: 170430 - DNA, 447 bp, Homo sapiens
tctctattttcaaaacaatgtttaaagagcaggggctttggagtcccaaagactgggtttgaaaactgtctcacccatttataagctatagtgcctttggcaatgtacttaatattttttgtttgtttgcttgacttcaatatcctcataagtaatgtaggaataaaaattcttacctgtcataaggttttggtgaacactaatttagaatgagggtctaattataatatttatattaatagcttacaaatatcgagtacttacaaagtattgagcactgacgccaatgctgtatctgtattatcttattaatttgtcttaagcaaataataaayctgcaactggtaagacctatagttagagcagacactagaattctcataattgatgggaagccagtcacaacgacaagatttaagtgcagagtaagagaataatggattactt

SEQ ID NO: 170431 - DNA, 615 bp, Homo sapiens
attgcctttcacttgtttctctctgtcctcacccaggtaccatagtgacttatcagtagtttcttcctttccattactcctgccactgctgaagtccaggccctctttgtcactgttcttctagcctcctaactcatttttctggccctactgaaatcaktcttccatacagccatgagaattctctatgggcaaaccatactcctatttagggatcttcaggagctgcctagtgccaacagggtaacaatcccgtcttctcagtgtggtgctgaagttgttccatttccctaaatccaccttgctcttccacttctatttccttacactttcttccatgcaaactatagcccacccacatcacacgacttagaagaacctaattatctaattataccctacactttcaaactctgattttgcctaagctatgccccataatgacttcctcttaaactcaattttttcccagttatttaaagcaaagcccaaattgtcttctgtgaaggcttccccgtctgccaactagaaatacttttttcctctctgatgacctgagagcattttatctgtgaatctgtcataggcctagcttaattaataactgcatgagaa

SEQ ID NO: 170432 - DNA, 625 bp, Homo sapiens
ggaccccttgcaggagaacaagggttatggactgaattaggcagtgctccatgctggctttggactaccagcttttaaaacaaatatttagtgatgtcctcctggtgccagacccaacrctaggtaaagctactgtggtaaaaacatgtaaagacagacatcaggcaaactcagaacagaagatgatggtggttattattttaaaaaactccctcttggccagttaaaatgaattagaatgatcaaaagcattagcactgagttcttgctttgtatagttcagcctacaaatcaaatactgctctctgtttattactgcaagatcataattcacaaaggaatgttcagagaggtcagtatttatgactacccgaagtgtttcatttgcaaaaattataaatggaaaatctggcacttagttagaaatgtagatcttctggtacataaatttgccccattgatttttatgtatttcttaaactgtgcactgttgatttcaatattgttttggaacagattgaccataaatatttaaataactgctgttcaacaaagttactcaaaacagtagctgtttgaagatacaactgtgatctgctgaggtcaagaaaagcaaattaaaata

SEQ ID NO: 170433 - DNA, 515 bp, Homo sapiens
atcagttcttataaggcagagcctgtcagtggttacacccccaattacaatacacacttccttgtggccccagcctcaacacagagtgtagctttttctatagacaggtcatttattccttctttccacaaataatgactgcctgtgtgtcagaaactgggcaagtactggggatacaacatttaaaaaggcaggcactgctcctatttaatcttaatatgaatactgattactatggaaacatatagcttgaaagtaaaacccactgggaagattcagaaaaatctctctgaagaagtgacatataatgtaagtcttgaagaatgttattagacrcccagatgaagatggagattattttgtacaaagggaacagaattgtggaaactcaaaggtaagacaggtgagacagtggtgacttaaatcactaacataccactgcctctagggagtctcttctgcacccacctcagtcttgggacaaggactcctcctatataggttcccaagaattc

SEQ ID NO: 170434 - DNA, 631 bp, Homo sapiens
tgtacaaggaaagggaagtgttttctgaagaacagaataatgttgcagaggtaatctcaaagctgacacagctaattagaaaataactcagaaatattttgccaattttccttgtttcatttaacatgcaaacaagtcattggaaccagtgtcaagaaaacaaaaatcagtaggtgctgccacatacatctgtccgagctctctgttttgtcactgtctgtttgataacttggtgcatgcccaagaaagcaattagcaaartagaattagcttagtacatcactgtggagtgttgattgttggattggttcacttggagtctgtacttgggttacagagcagtaagaacacagctgactttcagcacttacatgaaatgtggtttctgggggtcctaagttaatgctttaaagagagggtaggctgagccttctacaccttccccatttcctgtttttttctggggaccttctctgctgccttctaacctagcatgctatgcatacgtgtatgtgtgccttgtaaacattctggcaattccctttcaactaagcactgcagaattccacatttctatagtcagaagctggttgtataccttctatatgtgatgtgcctgtgttttagatct

SEQ ID NO: 170435 - DNA, 515 bp, Homo sapiens
acatttttcaggcttaaggattgtcctactagtggcatttgattgaaaagggttgaggatgctgaggtgttgtgactccaactcatgtctagccacactctcttggaactgagctggcgaccagcctgttctgaaaacccactcttgttttcatcctccaggtagaatcctgagactgggggctgtgtgtttataatgaaggaagcttgtattatatcataaggtaattttttatccgtaccttcagggaagggagtagacatttgggatcacccttgaattgagactgagggtggtatttttcatagacattgatatctcatggactttttttttacagttggacatttccctttaaaaatttattggtggcaaaaggaaatggtccactgagaaatcttttcttcctcgtggagaaaaacttagtaagtccttatccatattgaggggakgagaggaatgaaaaaatggcatggactaaaatctccaggagaacttttcaaatactaaagatc

SEQ ID NO: 170436 - DNA, 551 bp, Homo sapiens
atcaaagtattgttatgagagtgaaaaaaagtgttgtaaaacacctagcataatgcctgtgaatattcaatgaatggggcatcatattcttctttcatatttcccactgcattcaccacagcaataactaaggatagtccattaaatgttttgcttacctacaaagctagcatttattgtaggctcattacttaccaggccctgtgctaagtacttcacagttactatctctcaaaaatattatgagataagtactattcattttccccattttcattttttacaggtgagcagataagacacagaaaggctgagtaacctattgaaaaccacccagccaaaatgtgatagatcagggtatgcacccatactgcctgactccagagtccaggctctttgctgccctacaagactgcctacaacatttcaggcattgttcttagcacatgggtaattaaaagataaaaaacactcatctrttctttaaggtatacagtctagcaggagggaaaaatgcatacgcacacaactctaacagtaggttttaaccc

SEQ ID NO: 170437 - DNA, 574 bp, Homo sapiens
ggagccagcccagggctctgatgtcctgcacagggcccttcagagttgaggctggcctttgtgcggcctcttttgtgccagctcagctttgtgaatacaatgaacagagggtgtgacatgcagcaaataaagctccttattgattgggaggtgactgtaaagagttattttcaggggctttgtgctagcagtgtgcttctctctgcagagagagggagagggagaaagagagagagagagagagaaagagagatccttgcccagaaaaattttctctgagagaaatctaatttaaaattgattatgttataggctataaatgtatattcaccacatagaaagagccttaatggtgcaatcctctctgtttttatgaggatactgcaataacttatggcaggcacttagtgtgaaatatgaatgaatgtcttgctgacacatcagccccaatttggtgtagaaatctttccatcaaggaagctgaatttctaaaaggacagacttaggtactccagagacagttaaaaataaggwcttcagacttcagtgaaaaagagaggcttttattttttac

SEQ ID NO: 170438 - DNA, 600 bp, Homo sapiens
accttgactgtattggtctttacatgaatatagatacatgtyataaaattacatggaaataagcacacacatacagtgggtacatataaaactgggaaaatctgaatgtcagtggatcacatcaatgtcaatttcttggttataatattacagtatagttctacaggttgttgccatggagggaactgggtaaagcatgtatggaaactctctgtagtatttcttacaactgcatgtgaacctacatctatttcaaaataaaaagctaagacaaatcaaaatgaaatcaaaatacagcataagcattttaccatataaatacaattttagctgggaacattctcagtaaacacaattttaatgcctatataatatcctattattgaaacattatttacctaatgatttccctaatattggatattcaacattgagatgtgtgctacattaccatatcacaaataacagtgcaaagaatacctctgtgcataaaactatatctcatttctaaggaaatatttttccttagaaaattaaaaaatatttttcttagaaaaatatttcataaagtcagtgctgggagacattaacagttgtaat

SEQ ID NO: 170439 - DNA, 600 bp, Homo sapiens
accttgactgtattggtctttacatgaatatagatacatgtcataaaattacatggaaataagcacacacatacagtgggtacatataaaactgggaaaatctgaatgtcagtggatcacatcaatgtyaatttcttggttataatattacagtatagttctacaggttgttgccatggagggaactgggtaaagcatgtatggaaactctctgtagtatttcttacaactgcatgtgaacctacatctatttcaaaataaaaagctaagacaaatcaaaatgaaatcaaaatacagcataagcattttaccatataaatacaattttagctgggaacattctcagtaaacacaattttaatgcctatataatatcctattattgaaacattatttacctaatgatttccctaatattggatattcaacattgagatgtgtgctacattaccatatcacaaataacagtgcaaagaatacctctgtgcataaaactatatctcatttctaaggaaatatttttccttagaaaattaaaaaatatttttcttagaaaaatatttcataaagtcagtgctgggagacattaacagttgtaat

SEQ ID NO: 170440 - DNA, 600 bp, Homo sapiens
accttgactgtattggtctttacatgaatatagatacatgtcataaaattacatggaaataagcacacacatacagtgggtacatataaaactgggaaaatctgaatgtcagtggatcacatcaatgtcaatttcttggttataatattacagtatagttctacaggttgttgccatggagggaactgggtaaagcatgtatggaaactctctgtagtatttcttacaactgcatgtgaacctacatctatttcaaaataaaaagctaagacaaatcaaaatgaaatcaaaayacagcataagcattttaccatataaatacaattttagctgggaacattctcagtaaacacaattttaatgcctatataatatcctattattgaaacattatttacctaatgatttccctaatattggatattcaacattgagatgtgtgctacattaccatatcacaaataacagtgcaaagaatacctctgtgcataaaactatatctcatttctaaggaaatatttttccttagaaaattaaaaaatatttttcttagaaaaatatttcataaagtcagtgctgggagacattaacagttgtaat

SEQ ID NO: 170441 - DNA, 592 bp, Homo sapiens
tcctgtcttcatgcagagtatggactagtagagaaaacatacaaggagcaagaaaattataatgcatttggtaagtgtatgatggagaacattcaggaccttctacaagggccacaaagctcagagttcagggttaagaaaggcttacttgggaaaatgaaaccaamactgagatttgaatgatgaatgggggttgccagaaaaagagagagtgaaaatatttctggcaaaggagacagtatgtgtgtagtgctggaggtgaggggatatggcattagaggacacatggagcagagagtacgtgaggagaatggtgagtgaggctgggggtatcctaagaaaatgaaacctaatgaagctttttgggaggcgagtgacatatgtacacactggagatgctactctggatacagtgtgaagaatagactggaggtggtcaagacaataaggagagggggagtaagccaaagaggctgctccaatatccagagaagagaagatggtgtccaaactaagatagtggcaatggggttggagcgaggttgagggattggagatactgacctatttagagaaaagagggaaaatgaca

SEQ ID NO: 170442 - DNA, 592 bp, Homo sapiens
tgtaaactcctagtctgcccatagcttaaaatatattttatcacattgcagtatactcaatttgtattcagtgatttttataaagccacttaaagtatcattctatcagtctttatcccgttccaatcttagacatttttgggtaagaattaatcatttctaaggcttcccctactgcscctcaccatctacctgatggtaagtcggtagagaggagaggaatgtcatataatgtcctagcctctaacccttgctggtcttcagttgagagaactcattctgcttggcctttgccaccagcctttgtcctttttcatctcttctggtgaagttactctcaccaagccctggacatcttgagttggcatccattcaaatcaagcaggtcccacttgacctttgtgatggtttgctgcgactcctagctaatgcctctggtctaaaggtccttgcctttagctttgttgtcctgatctcagacctcttgctgtccatcagtcctctctataattctgtgaactttgattttcagaatccaggattttgatgaggtatattatttgaactcgaaaagctgagctttacaaattaa

SEQ ID NO: 170443 - DNA, 614 bp, Homo sapiens
gacgcagcactctggagcaggggcctggcaaacccaaggacaaatatcagcttggctactcccccagctgygggactcaggaaagcagcctacctctgagcctcggcttcctcatctggaaaatgggaatataaatcagatcagcctcacgtggctgctgagagaagggcacgagatcattcacgtgagtgttggcatcactcacaggtgagaggtgtaaaactgcctggcatgagtgatgctaaaaaataatgctagttccatctcttccccttattccagaagatgaagcctgcagtacttcctaggggacaaggaggtgactagaaatgtcacatcctctccacccacggggctcacccagaaagcgatgttctgtggatagaggaagggttccaggaaggcaggaacaaagagaatttttttaacatctcttccagaggcccagcacccccacccccagagatttaattaaaggaagtaaaatgaaatgaaaataaacagacttatgcaccaacattcatagtaggcttattcattacagtcaaattctgaaaacagcccggtctgccaatgaaatacacacaaacagtgagcaatcaacaaagtgtggc

SEQ ID NO: 170444 - DNA, 614 bp, Homo sapiens
gacgcagcactctggagcaggggcctggcaaacccaaggacaaatatcagcttggctactcccccagctgcgggactcaggaaagcagcctacctctgagcctcggcttcctcatctggaaaatgggaatataaatcagatcagcctcacgtggctgctgagagaagggcacgagatcattcacgtgagtgttggcatcactcacaggtgagaggtgtaaaactgcctggcatgagtgatgctaaaaaataatgctagytccatctcttccccttattccagaagatgaagcctgcagtacttcctaggggacaaggaggtgactagaaatgtcacatcctctccacccacggggctcacccagaaagcgatgttctgtggatagaggaagggttccaggaaggcaggaacaaagagaatttttttaacatctcttccagaggcccagcacccccacccccagagatttaattaaaggaagtaaaatgaaatgaaaataaacagacttatgcaccaacattcatagtaggcttattcattacagtcaaattctgaaaacagcccggtctgccaatgaaatacacacaaacagtgagcaatcaacaaagtgtggc

SEQ ID NO: 170445 - DNA, 614 bp, Homo sapiens
gacgcagcactctggagcaggggcctggcaaacccaaggacaaatatcagcttggctactcccccagctgcgggactcaggaaagcagcctacctctgagcctcggcttcctcatctggaaaatgggaatataaatcagatcagcctcacgtggctgctgagagaagggcacgagatcattcacgtgagtgttggcatcactcacaggtgagaggtgtaaaactgcctggcatgagtgatgctaaaaaataatgctagttccatctcttccccttattccagaagatgaagcctgcagtacttcctaggggacaaggaggtgactagaaatgtcacatcctctccacccacggggctcacccagaaagcgatgttctgtggatagagkaagggttccaggaaggcaggaacaaagagaatttttttaacatctcttccagaggcccagcacccccacccccagagatttaattaaaggaagtaaaatgaaatgaaaataaacagacttatgcaccaacattcatagtaggcttattcattacagtcaaattctgaaaacagcccggtctgccaatgaaatacacacaaacagtgagcaatcaacaaagtgtggc

SEQ ID NO: 170446 - DNA, 580 bp, Homo sapiens
aacttaaggtatgatctccgacttcctgttgagggagataagggctctgctctctcatcccacccctgtggtgggccattgtgaaagggaggcaacagtcatctccgtagagcacctacaataggcactagtgggtgttcaggacgtgagatctctcacgcttcttcgtgtgtttctaaaatgcagaccccagcccctgggttcccaaatgcccgcacctgctggtcttgctctaggagctcctggaagagtttccactgctgcctcyggaagcgatttgacttccccagctgccaggcagcgttctcctggacttcctgcctcaagtagtcacactcttccggggggaggccagtcatgccagggagcgtctgaaggaacagggcatccacgaacttctggaaagtgtccacggtgctgaagtacagctcctggagcggagaaccacagatggggttacaggtcacggcaggaccctgtgtggggcctgagctgctctctgcctctcctccacaagcctcccacaagacacaaggagatccacagacaggaactctcaagtcacacgtatgcaagcatg

SEQ ID NO: 170447 - DNA, 394 bp, Homo sapiens
tctgacaacgcctcacctgtctgctgtgccatcctggctcaggccaccatcatccctggcttcckaccaagactttctatttccacacgggcccaccccaccctacccatcacagtctgctgtcagacatttagaacctagattagatcaagcacccctctgcttggaaccagtaagtcctctgccagtgaaacccaagtccctgcaacatccaacaaggcagaactcaatccggtgcacacgccctgaccaacctccctccctgggcctcctctgcccttggctccctcggtccagtcccagcttcatgctgaccctgaaccccaggcaggaccctgcctcggggcctttacactcatgggaacccctggctagttccctctttcttagacgc

SEQ ID NO: 170448 - DNA, 394 bp, Homo sapiens
tctgacaacgcctcacctgtctgctgtgccatcctggctcaggccaccatcatccctggcttccgaccaagactttctatttccacacgggcccaccccaccctacccatcacagtctgctgtcagacatttagaacctagattagatcaagcacccctctgcttggaaccagtaagtcctctgccagtgaaacccaagtcccygcaacatccaacaaggcagaactcaatccggtgcacacgccctgaccaacctccctccctgggcctcctctgcccttggctccctcggtccagtcccagcttcatgctgaccctgaaccccaggcaggaccctgcctcggggcctttacactcatgggaacccctggctagttccctctttcttagacgc

SEQ ID NO: 170449 - DNA, 591 bp, Homo sapiens
gtaggataataaataatctgaaactcaagcattctcacaaaacacagaattgtaaagtgatactagaatttagagtcagaaactctttaaacaactgtacttacatttaatttattcatcagaagtgcttagcttacttattgtcttatatatcgtggaaaattttcatacatatatgcatgtatgtacatacacatatgtacacatagctatgcgtatatatacatatacatgtacagttatacatatatttatatgygtgtaatatgtaaacatatttatgtgtatatatgtaaaaatgtacacatatttatgtatatatatgcatatctatgtgtacatacacacatgtgaaaatatacatacatatacatatgcgtgtatatataacatttttatatatgtatacatttacctttaaatatgtacattgagtacatataaatatttcaattgcatttagtgttttctttgaaaattttctctttctcaacttatgaccctagtgagattttaattataattttaaacagaataacaattacaaataacaattacaaatacttaaattacaaatgttatttaaacaaa

SEQ ID NO: 170450 - DNA, 570 bp, Homo sapiens
ctaacatcatttcatgtaactggtaaatagacctataacaaaattaattactatggaagatttttcccctttactggaaatattggtaaatatttcaaagatatgcattttttatgtgtagtagagtcacacttttatcaagacattgcaaaatagggtggcatagtattttaattttcacatcaaatagaatgtatttgcagggattggccctatgttgatttgcaaaaataattttaatgatagaaaggaatgaacattctcaggaactcctctttcaattcccttgggacagaggcctttacaaatgagatcaaaataactgtcctatcactctttcactcttttggaacacagtaggtacactgaaagaaaaatcagaaatacttaaagaaggcacactactacaatatataaattgccttgcctctcacaatccaagcrtctgaaaattgtactttttgatattaactgatcctcacgatgtttttgaagcatgaatgcctacattttcctattaaataaatcaaaaaatgaaaactatttttttcaaactgtgaaataaacgta

SEQ ID NO: 170451 - DNA, 587 bp, Homo sapiens
caccccggccacacacacactttgactaacacatcttattcaatctaattactcggtgatttkttcaatatttcacattaaagacaaaggttatactggtccttattaacaagtatttttaagcagcttttatataccaagcagtgagctggttatcaaatgggaaggactattctattagtccaggagttaattcaattatcataaagtgaagatgagttcatgtgtataatatccctagaatactacaatttacagaagtctttttttcacatgtttacattcttctgtttttctattagtatttccagaagctcatctacctaatgttactttacctaaagttactttacttctcatattctagcactccatgtttaccaggatctgatagatagccctctgaacaaaagtagagcttttagctccgtaaactttttagagaaactttcttatacccgcaagttaacaggtctgagagccataggagtaaactgatgtttgatttctcactttctcttttgactttgtcattcagtccatcacaatcctgtcactctgcctttgggacattgttgaggtccact

SEQ ID NO: 170452 - DNA, 587 bp, Homo sapiens
caccccggccacacacacactttgactaacacatcttattcaatctaattactcggtgattttttcaatatttcacattaaagacaaaggttatactggtccttattaacaagtatttttaagcagcttttatataccaagcagtgagctggttatcaaatgggaaggactattctattagtccaggagttaattcaattatcataaagtgaagatgagttcatgtgtataatatccctagaatactacaatttacagaagtctttttttcacatgtttacattcttctgtttttctattagtatttccagaagctcatctacctaatgttactttacctaaagttactttacttctcatattctagcactccatgtttaccaggatctgatagatagccctctgracaaaagtagagcttttagctccgtaaactttttagagaaactttcttatacccgcaagttaacaggtctgagagccataggagtaaactgatgtttgatttctcactttctcttttgactttgtcattcagtccatcacaatcctgtcactctgcctttgggacattgttgaggtccact

SEQ ID NO: 170453 - DNA, 615 bp, Homo sapiens
agcttttagctccgtaaactttttagagaaactttcttatacccgcaagttaacaggtctgagagccataggagtaaactgatgtttgatttctcactttctcttttgactttgtcattcagtccatcacaatcctgtcactctgcctttgggacattgttgaggtccactcattattcacactgccacagtctttatctagaatacatttaccttgtgccagggctaatgagacagccttcaaggtagarccctgtcttcaacctctctcctatccaatttatttaactctaagcaactggaattatttccttcaaagcaacatgaccttctttgtcattatactgaagcagctgccaattgtgtttctcctgaagtctaatcttttgatctttgccttcaagatgcttggcctttaagtccactattaccttacctatttcatgcttgcttatgtggtcagctgtttcaggacaggcttaacatactaacctctagacacctactcacttagtaaggtatttgggtgttcttttgaaattggctcctggctactaaactttatcttctcttttcctttttcaacattcttccccaagtgcagtttcttcatgt

SEQ ID NO: 170454 - DNA, 516 bp, Homo sapiens
taataaatggaagtgaaattggtatgggaaatctaactagatttgtcaaattctaaacagctattgctgttgcctcatgaaatgttttatatgctctcatttatctctaaactgtaactataccctaataatgttggattacttaacctacaatttccccttctttctatttgtgaagctattcttaattttaggmcttcaatcctagtatattacctaacaaatattcttgtatcttgctaagtctgggattcccctggttgactctgcagtttgggtattaagctccagacagaaggttaatattttagatatgagcacatgagataccttctcttacgaatgcttatctttgtagagtttttcagggataatacatgtataaaaattatgtagaggttcctttgtctacttttgtctacctatttatacctgctgagctgtactaaaatcctctaaaactgcagtgactcaggttaggtattgaaagtcttctacaaatttgagggtcttact

SEQ ID NO: 170455 - DNA, 631 bp, Homo sapiens
aattagtgtggaaatatgttctttcaaaaaactggatacagctaccatcttactgagaaaacactgtggtgtaaatgcccatagtatgcctctttgggaagggtgtatgtgtggaaaattagatatccttactcccaccaatgacatgaacttgaaggaagcaaagaaacagagacagcaataacccattaaccaaatctttaaattgagagaataaatagcaagatgaagaaaaagaagggagtcagaaaagagtaagagagaaagagagggagagagagaacacgtgagcaggcctggcattctgggctgtagcatatgttaaatgcttgctgagaaattttcagggcagggtagacacagatctttcaagaaatgcaatactattaatatttgtatcactatggaaaatattttctattttcatgaagcttcatcacaattctgctgttattggaagtggagaaattggaatgttgtctggtagcaggttatctgtaacgacaaactctacaaatcatattctaaagatrtaattacttactggcatgtaaccacttatatctgttagacattcttttaaaattcaacttattttaatgatacatattgaagataactaaagtcccaa

SEQ ID NO: 170456 - DNA, 412 bp, Homo sapiens
tcatggtctgaaaatattacagtatttaaatagagaaaaacggagatgatattcacataatatttattacagtatattgtaataatacttctattttaattattagctattgttgttaarttcttattgtgcccaatttaaaaactaaagtttattataggtaaaatccatatagaaaaaaacataatatacatagggtttaatactatccatggtttcaggcatccactggaggcattggaacatatcctccatggagaagctgggaccactgtatcccttctgtagttgatgaacattgagaatgaactaataaataatgttgctatgaaaattcttatatctatttcatttcttttagtgcacttgtacatatttataaatataaatacagtcatgcatcacttaacaa

SEQ ID NO: 170457 - DNA, 597 bp, Homo sapiens
atggggacagttactcttatgctgttcttgtgatcattaagtgagttctcatgaaatctgatggtttcataaggggcttttcccccttttgcttggcacttccccttgctgctgccatgtgaagaagggtctgtttgcttcctctcctgccatgattgtaagtttcctgaggcctccccagccatgctgaactgtaagtcaattaaacctctttcctttataaactagtcagtctctggtatgtctttattagcagtgtgagaaggaactaatacaacaaacaaaaatgttactgaaataaaacaaaataaaacaaattgcaaaaataatgttatagattacatattcactctattgattgttgcttttgctttggggaagctttttatattgatgtaatccacttgtctattgttgcttttagttgcctstgcttttagggttatatccaaaaaatcattgccagataatgtcatgaagattttatttctatgttttctttcagtagttttattgttgcagatcttatattgtctttaatccattttgagtttgtatttgtatttggtatgagataaggaactaatttcattcttc

SEQ ID NO: 170458 - DNA, 390 bp, Homo sapiens
ttttttttaagcctttcaaaatgacacttttagactacccaaataataaatctgtgtttaatatgtctacccttatatctatctctacacctatatccacaattttctggaaattcagaactactacttttaggaactttttaaaggttaggtgaatcagatgttcacataatgaagtctgtggaaaggacaactatagattggttagctttggttgtgactaaaaggttaagtagtggcggcttattgattataaatattgactggcattttctttawtaatacttttgatttttgatggttcctcagaaattaatatgtatttggaaggtctttaattttcatcatccacagcaccttgcacagtgttaagcacaaaacagatgagta

SEQ ID NO: 170459 - DNA, 543 bp, Homo sapiens
cactgaaaccgaggtagagggataatcatttaatcacctatttagtgtcagagttaggatttgacacctgatagtttgatttcagagctgggatgcttaaacatacagggtaggctttgttttaaaagattttagtaaaaggattatagattcatggcaagayaaccagtcaccaaattaagcaatttgtcaaatgaccaattccccaaattaccagtttacctcaaatttttattcatatatgttctataattggcaatttattttagaatgacagtatctttagtattttacaattagtgtgacatgtataatatggaattcttgtgttgtttgttttagcaatattgtgtaatatcttctagtacatttacattacaagtttcttctaataaatttgtgtttctttgctgagaacaaagaaaatatatatttttgatttttgaattgttataaggtatgaagtataccttaatgtgcacttgagacacaaatctgatcatgagtataaaagaaaagagatagctagagatacaaatatgg

SEQ ID NO: 170460 - DNA, 646 bp, Homo sapiens
tattatatcataaaaaagcaaaaccagtgaaaagcctactaagtaaattttgtttttgccattggtcagttattggtaaaaaatacctattcagattttcaccttgaaaaatagaacaaaattatgttccatagagactaaagcctaaaaacatcatcactaaaacacaaaaagacaaaccctattaacaaaaagtgaaaataaaagccgactatcaaacacattaggagatattcaactttgaagaaataaaaaaattattctttaaacaaagaaataagaattttcttttcaccatgaaaagcgaaatagccaggctattatacacactaattaaggaaactcagaaagccgatacccatttagtaagatggacacatgaagcagaagcggctttccaggccctaaagaaggccctaacccaagccccagtggtaagcttgccaacggggcaagacttttctttatatgtcacagaagaaacaggaatagctctaggagtcctttcacacgtccgagggaccagcttgcaaccygtggcatacctgagtaaggaaactgatgtagtggcaaagggttgttctcattgtttatgggtagtggcagcagtagcagtcttagtatcagaagcagttaaaataataca

SEQ ID NO: 170461 - DNA, 559 bp, Homo sapiens
catgtggtctttcgaaaacacaaatcattcagtgtggctggcacaaggtaggcaaatggggaatgcaggaggtgctggagaagtagataaagaaacaattttcataagctttgatttagactctaagagtttggaaaagctagtcactggtgagcttgagtctcatggtcctttacccaaaacattttcataaaggtgatcaattacttaaactcagctgtgatgaaccctgtctcttgtccaaaatggcagtaaattatctgtgtttttgtaaaactagaggtctattaaattgtctcagtgaacrtacatattttattaatctctgcgtgagcacttagcacatacctggtgctccaaagtgtttgttattttgaaatggattaaatttaattgacctatctgtgtggtggtttggccaataaaggaagacaatactaaaaatagaagaagcaattttgagagaaaatctcttgcaatgaaaaagctctttcccctcacagtgaaaagtcagtatggatttctgctccagaactcttctcactgccattgaaaagct

SEQ ID NO: 170462 - DNA, 585 bp, Homo sapiens
ttcaccattaacgtgtatggaagaaggtatccatgagagactgaggaaatattgctagaccgggacacaaacaccaggcaaggctaccagagcatgaggctggtgaggcaggtgcagcaggaggcccatgacactgaggtgtgcagactctcagccctcctgggtctccacacctggctcaggccttcccctaggccttgccccactgatgatctcattcctcttcactgccatttactcacctctagagagccccagaacctgcgcctcctcactccttacatggttagtgcctgcagagcagggcctctgacatttgaattctttcctatttttccaaacttagcacagtacaggtcctcaatagatgcttaatgagtaaatcagaactgctctgatagtcccccttctatggaccttgtggtgcctccggcccagaccccccttcactcccttgttcccttgtggactcactctcrcacttgtctcatactcgtgactcactctcatactgagagcagacctcagctctcagctccctgcagggtgcctaaccccattgcccggctacaggcagatacccca

SEQ ID NO: 170463 - DNA, 554 bp, Homo sapiens
gatgggtagtttgcaatttttttctcccattctgagagttgtccctccactttgttgattgtwccctatgctgtgcagaagctttttaactcgatgtgatcccatttgtcaatttttggtttggttgcctgtgcttgtgggatattcctaaagaaatccgcccagtccaatgacctggagagtttccctagtgttgtcttctagtagttttatagtttgaggtcttagatttaggccttaaatctattttgatttaatgtttgtatatggcaagagatatgagtccagtttcattcttctgcatatggatactcagttttcccagacccatttattgaaaagattgtcctttccccaatttatggttttagcatctttgtcaaaaaattcgttcactttagatatataagtttatttctggattctctatgctgttccattaatctatgtgtctgtttttatgccagtgccatgctgtttcagttactatagctctgtagtacaatttgaagtcaggtaatgtgattcctccaattttgttatttttgttaagg

SEQ ID NO: 170464 - DNA, 554 bp, Homo sapiens
gatgggtagtttgcaatttttttctcccattctgagagttgtccctccactttgttgattgtaccctatgctgtgcagaagctttttaactcgatgtgatcccatttgtcaatttttggtttggttgcctgtgcttgtgggatattcctaaagaaatccgcccagtccaatgacctggagagtttccctagtgttgtcttctagtagttttatagtttgaggtcttagatttaggccttaaatctattttgatttaatgtttgtatatggcaagagatatgagtccagtttcattcttctgcatatggatactcagttttcccagacccatttattgaaaagattgtcctttccccaatttatggttttagcatctttgtcaaaaaattcgttcactttagatatataagtttatttctggattctctatgctgttccattaatctatgtgtctgtttttatgycagtgccatgctgtttcagttactatagctctgtagtacaatttgaagtcaggtaatgtgattcctccaattttgttatttttgttaagg

SEQ ID NO: 170465 - DNA, 357 bp, Homo sapiens
tttctaataacttggtctccataactagtttttatctcactaataggatccattcatactttaatccacatagccattttttgaataaacatacaaatagctacccatgtccagtgatctagtaggccctagaggtacaaggtgagcaaagggagactcagtttttcttttcatgagtattgggcttctcaaagtgtagaataatggcacagtatacacgttcaggtatgcacgtgcatgyatttgaatatgtaaatatcaccttagtgagtttggaataaaaatcaattctaaaacttttatctagcaaggcagattatttaagagagaaaaagagtaggagatagagaagagaga

SEQ ID NO: 170466 - DNA, 357 bp, Homo sapiens
tttctaataacttggtctccataactagtttttatctcactaataggatccattcatactttaatccacatagccattttttgaataaacatacaaatagctacccatgtccagtgatctagtaggccctagaggtacaaggtgagcaaagggagactcagtttttcttttcatgagtattgggcttctcaaagtgtagaataatggcacagtatacacgttcaggtatgcacgtgcatgcatttgaatatgtaaatatcaccttagtragtttggaataaaaatcaattctaaaacttttatctagcaaggcagattatttaagagagaaaaagagtaggagatagagaagagaga

SEQ ID NO: 170467 - DNA, 520 bp, Homo sapiens
catattcaaactacagaaaatcaaagattaaaaaaaaaaacctaaataaagccagaggaaatgaaagctcctctgcagaggagcaaagaattacatctgacttctcagaaaacatgaaagtaaaaaagagagagtagagttagatatttaaagtgttgagagagaaaaaaaaaataccaacctagaactctgaaattttcagaagygtttgaaccacagcaactccatcttgaataggggttggacaaaacaagactgagacctactgggctgcattggcaggaggttaggcattcttactcacagatgagataggaggttggcacaagacacaggtcacaaagaccttgctgataataaagcatgtggtaaaggagttggcccaaactcatcaaaaccaagttgatgatgaaagtaacctctgttcatcctcactggtcattacacaataattacaatgtattttcatgctaaaggatactcctaccagcaccatgacagtttacaaatgccatggcaa

SEQ ID NO: 170468 - DNA, 615 bp, Homo sapiens
cctgcacaatctttatccaaagagacgcaattatattcttttaaaaaatagcaaggaaatgtaaatataggtgtgagtttcctattccaaaaatttaagctacgtcttttcctttggcatgagtctaagtgaacataacttctaaaaatacagtcctcagtttcttttttatagtgagataatttgattcctcctgtagcttttctacaataaagaaaatcacaagcaaggttaagctcagtcttatatttttcataaatttcatcaaatacaaatacctcaaaaatctttatcctaaaaagccaatttgaagctacattataagccaacgacatatataaaacacaatctaaactaccaagtaattgccacaacctgggtagtattaagagtttttaatcagaaatttgtattgtaatcttatgcctttccataagggttcaaatcgtttttaccaaggagyagatgaatatattattctatcaacagtagctgtatttcttattatatgattagaatcacttattgaacaaagcctatgcaaatataattgaaacactatccagaaatatgttgtctttgctctttgtattttatcttttcttcttctaatga

SEQ ID NO: 170469 - DNA, 596 bp, Homo sapiens
aaaaatgattggtcagattagtgtcaaagctgagagaggtggaaagagagaaaggttttgttttatctgcaggaagccactaacagaatgacagtttctgcagaaacccttgtaacaagataccctttggtatgaagttcctaacaagccagtgtctgccgcacagcagggctgcctggaatgtctgctgcggcacagaactgcccaaggaagagagtcaggaaacaggagagattccatccttccatgtcccatctgaggactaatagaaaatagtgagaaagttactagagtgaagattgtccagaagatgaggcagaactggctggtcccagtagaggccactgaatggaggcaacaaggtgacagaattaaaaaagaggaagaatccgagtgtctgataacaagaatgagctagaatcgcctttgccctttggaagccctcagcattgattcacttttgcctgctttctgattcaggaataacagtaggacaggaaaaatacagtacacagctgtgtgtgtagtaattgtcrgtgtgcttgcatgttaaaatcagtatattgaaacatccagctgtctatgctcacttaaag

SEQ ID NO: 170470 - DNA, 470 bp, Homo sapiens
taaaagataaatgcacaaagcagctacatgtaaaatgycactttaggacacgctgttctaacacaaatactgtcaacatatcatttgtgagtgaactgacaagatgtccaaggaatgagttacagtggagaaaattcaacgtgcatcacagaatagttaccagctcctggccctccacagatgtggacctaaaaccacctggagggcagagtcggctccctcccgctgtgagtgcttcctagtgagccagcagctgaaggcctccctagcttcacttctccagagcgggcatggagataactagtgaaagtggtcacaaagtcggggccaagaagtctctaacccctaaatcaagattgagagatactggaccgggcacagtgtctcacacctgtaatcccagcactttgggaggcctaggcaggcggatcacctgaggtcaggaattcaagaccagcctggccaacatg

SEQ ID NO: 170471 - DNA, 470 bp, Homo sapiens
taaaagataaatgcacaaagcagctacatgtaaaatgtcactttaggacacgctgttctaacacaaatactgtcaacatatcatttgtgagtgaactgacaagatgtccaaggaatgagttacagtggagaaaattcaacgtgcatcacagaatagttaccagctcctggccctccacagatgtggacctaaaaccacctggagggcagagtcggctccctcccgctgtgagtgcttcctagtgagccagcagctgaaggcctccctagcttcacttctccagagcgggcatggagataactagtgaaagtggtcacaaagtcggggccaagaagtctctaacccctaaatcaagattgagagataytggaccgggcacagtgtctcacacctgtaatcccagcactttgggaggcctaggcaggcggatcacctgaggtcaggaattcaagaccagcctggccaacatg

SEQ ID NO: 170472 - DNA, 470 bp, Homo sapiens
taaaagataaatgcacaaagcagctacatgtaaaatgtcactttaggacacgctgttctaacacaaatactgtcaacatatcatttgtgagtgaactgacaagatgtccaaggaatgagttacagtggagaaaattcaacgtgcatcacagaatagttaccagctcctggccctccacagatgtggacctaaaaccacctggagggcagagtcggctccctcccgctgtgagtgcttcctagtgagccagcagctgaaggcctccctagcttcacttctccagagcgggcatggagataactagtgaaagtggtcacaaagtcggggccaagaagtctctaacccctaaatcaagattgagagatactggacygggcacagtgtctcacacctgtaatcccagcactttgggaggcctaggcaggcggatcacctgaggtcaggaattcaagaccagcctggccaacatg

SEQ ID NO: 170473 - DNA, 393 bp, Homo sapiens
caaaatcattttgaaccattgtaagttggggactgtctaaagaattgagaattggctcaagtaatgacagaagctgattagtatggaaatttgaagtcagcaagttggagacccagcagaggtaaggtatagtccaaaagcttgcagccttgaggctcaagaagagccaatgttttcgttcatttaagaaggtaggaaaagaccaatgtcccagttcacacagtcaggcaaaaggagctccccagtactcacgggagggtcagctgtttygttctattcaggcctcccaccaagaggatgaggaccatccatattggggagtgcagtgggcttcactcagctagagattcaaatgttaatctcattcagaaaacaccctcacagacacacaga

SEQ ID NO: 170474 - DNA, 434 bp, Homo sapiens
atgtgtgcaatgaggtgtagcccacaaagcctttaatcagtgtgaccattccaatatctcatggcctttaattttgcttctgttcggttatcaacattggatgttataacatcaggtggcatgatgtgtgacatttgtctgtcrttcattcattccattatttattgaatgcctattacagcacagaatttgacatgggagtgggagagtaatcgtgaacaatactagtaaaatgcctgccctcatgaggattatgttcctgttgtcatgaagttgtcatctccttctagatgataaacaagaaacaaataaccaaaatgcactcaaagaataataataagggcttgaggaagttaaagcactttaagaaagttaaaaaaaaaaaaactagtcatggggcagtggctaattgagtggtcagggaggcctcttca

SEQ ID NO: 170475 - DNA, 434 bp, Homo sapiens
atgtgtgcaatgaggtgtagcccacaaagcctttaatcagtgtgaccattccaatatctcatggcctttaattttgcttctgttcggttatcaacattggatgttataacatcaggtggcatgatgtgtgacatttgtctgtcattcattcattccattatttattgaatgcctattacagcacagaatttgacatgggagtgggagagtaatcgtgaacaatactagtaaaatgcctgccctcatgaggattatgttcctgttgtcatgaagttgtcatctmcttctagatgataaacaagaaacaaataaccaaaatgcactcaaagaataataataagggcttgaggaagttaaagcactttaagaaagttaaaaaaaaaaaaactagtcatggggcagtggctaattgagtggtcagggaggcctcttca

SEQ ID NO: 170476 - DNA, 434 bp, Homo sapiens
atgtgtgcaatgaggtgtagcccacaaagcctttaatcagtgtgaccattccaatatctcatggcctttaattttgcttctgttcggttatcaacattggatgttataacatcaggtggcatgatgtgtgacatttgtctgtcattcattcattccattatttattgaatgcctattacagcacagaatttgacatgggagtgggagagtaatcgtgaacaatactagtaaaatgcctgccctcatgaggattatgttcctgttgtcatgaagttgtcatctccttctagatgataaacaagaaacaaataaycaaaatgcactcaaagaataataataagggcttgaggaagttaaagcactttaagaaagttaaaaaaaaaaaaactagtcatggggcagtggctaattgagtggtcagggaggcctcttca

SEQ ID NO: 170477 - DNA, 607 bp, Homo sapiens
ataatccttgtcctgaaaaaagcaggctgaccttggggaaattttaatagtgataagattgagataattgtaaccagttactctttaataaccatcattttctagatatgtgytaaccacatgtacgcacatttccttatctaattacatttgaactttacaataacactttatcttaggatcatttcattacaagagatagttgcctgtcattgaaactagcttaaacaaaacaaaagaaagaaatctagtggaagaaataggacagctgacaggccttgcctaggaagcctcctgaatgctggcatgaaggtttgaggtccaggaactaatgtttcacttattgttcatttgtggcctcctgatgtgtcatctctgcttttactccacatagtttctttgttccccttattttcattaaacattctttcctgtttacttaaacctctgcagagagggcagcctgaattttgaaattccacctcatcttgcagttcagtcacctcacaccaatttacttccttgcctaggaagcctcctgaatgctggcatcaaggtttgaggtccaggaactaatgtttcacttattgttcatttgtagcctcct

SEQ ID NO: 170478 - DNA, 575 bp, Homo sapiens
gaattcatcccagattcactgggtaattgaaattggccatgggtgcttgctaattacctttatcsaaaggaaaaacaaattctcatatctttataccaggaggtagttttgcaatgtggagcccgacgcctaggtaacattaggttcctaccctcccatgaaaatgtcaataaaaagagtccaactttgtaacacatttgtagaaatttattctgagccaaatatgagtgaccatggcccatgacacagccctcaggagatcccgagaacatgtgtccaaggtggttgcagcacagcctagttttatacatttcagggagacatgagacatcaatcaaatacatttaagatataagttggttcagtccagaaaagtgggacaactcaaagcaagggggtgtccaggttataggtagaatgaaaaatttcggattggcaattgcttgaaagagttattatcatagaaaacaatgtctgggttatgataagaggttgcagagaccaaagttttatcatgaagatgaagcctccatttcgcaggcttcagagaaaatagattgtacaggtttcttctc

SEQ ID NO: 170479 - DNA, 575 bp, Homo sapiens
gaattcatcccagattcactgggtaattgaaattggccatgggtgcttgctaattacctttatcgaaaggaaaaacaaattctcatatctttataccaggaggtagttttgcaatgtggagcccgacgcctaggtaacattaggttcctaccctcccatgaaaatgtcaataaaaagagtccaactttgtaacacatttgtagaaatttattctgagccaaatatgagtgaccatggcccatgacacagccctcaggagatcccgagaacatgtgtccaaggtggttgcagcacagcctagttttatacatttyagggagacatgagacatcaatcaaatacatttaagatataagttggttcagtccagaaaagtgggacaactcaaagcaagggggtgtccaggttataggtagaatgaaaaatttcggattggcaattgcttgaaagagttattatcatagaaaacaatgtctgggttatgataagaggttgcagagaccaaagttttatcatgaagatgaagcctccatttcgcaggcttcagagaaaatagattgtacaggtttcttctc

SEQ ID NO: 170480 - DNA, 630 bp, Homo sapiens
ggtgaaaaggaaaaaaaaagggggaacagggaccctctgcaaagtcagagtctctgctggtgtgcttcctgccttgcagattgaatcccagtttccacacaggaagaggtgggaccaggctcctccctctgcaaacagtgcaaacttctgtggctccaccccaaggtgcattccttccagtgtgggctggttgcagtttcactggggaccctctcccacctggctgtctcaccatcatggcctaaaccagtctttcaggttaaatttagggtgccctggcagaggaggggtccattcagatgtttgtgaggggtggagggggtggctatgagttttatttttggtttataaagatgaggggatgaggtacaatcctccttggtgattctatctcagagatagttccagacccttgagaaacacattcctacattgtaaaacctgcaagagacttatcttttttctttaaaaaattgctatatccctaagaagcagagaaagaatttatgtttctgaaagaaaatrttctgaggaaatggtggtggtggtggtggagatctctttccctttttccatcagggagaattattatttttttcctatgttccatttgtatttactgttacacta

SEQ ID NO: 170481 - DNA, 630 bp, Homo sapiens
tcagcaaaacaacagctctgcagttagctgacttgcttctaacctccatcatctaaagtagaatattaacctcttatatcgttattcaaaattgtcacctggggtttcagctcctattctaacaggtcaatagaagcatttcctgaagagaaacaggagtgtgtgtgttttgggagtatggaagatatttctactaagaaaaggagtttttctccacagtgttaacattagaaatctagcacctatcatttcacaaattgaatacctgaggcttagggaggtgaagtgacttccttgaaggagacaagtagcaaatgtggaggttcatgtctgcagcctatagaacccaggaaccctctttccactatgccagactaacctgggaacccaattagctgccatcaaaagtataagaattctttttatttgcctattatctctcatgataagtgaatcaatcacttactgagcayaattcctacaaagtgcaaaatgaccaaagtccccagagtagcttcctctacatcgtgagctgcaactccagtaaaagaggctggcaactctcaaagacaaaatgcactggactgtggagcatatgatttcattaggactatttgtaatagagagaac

SEQ ID NO: 170482 - DNA, 466 bp, Homo sapiens
ttgtggcctgggcagcaggctagatgggcctctcaggaggacttgctaggttgcagtgccccagagcaatttatgacataaaatctgtaatatttgagagataattgtcacatcttataatcaagatcaaataactgggttctccttttgtctgcaaatgatgattgtgcttgcccacrgtgaagccgacctgcgtgtcaaggagctcgatgaggatggaatcccagtgctggctgccagggtgagggtcattttggttgcaggcgagagtgatagaatgttaccaaaaagagaggaaaaacaaactttcaattatgacaagtgcaaaaaaactttttattttgaggtttagcatttctcaaaataattacagttacatgcttccatactacatacttctctctcaaagattagttggttggatttatctagggcttgaacacaatatcctatcaaccttgtaatc

SEQ ID NO: 170483 - DNA, 466 bp, Homo sapiens
ttgtggcctgggcagcaggctagatgggcctctcaggaggacttgctaggttgcagtgccccagagcaatttatgacataaaatctgtaatatttgagagataattgtcacatcttataatcaagatcaaataactgggttctccttttgtctgcaaatgatgattgtgcttgcccacagtgaagccgacctgcgtgtcaaggagctcgatgaggatggaatcccagtgctggctgccagggtgagggtcattttggttgcaggcgagagtgatagaatgttaccaaaaagagaggaaaaacaaactttcaattatgacaagtgcaaaaaaactttttattttgaggtttagcatttctcaaaataattacagttacatgcttccatactacrtacttctctctcaaagattagttggttggatttatctagggcttgaacacaatatcctatcaaccttgtaatc

SEQ ID NO: 170484 - DNA, 382 bp, Homo sapiens
ttcttggaaacagaattgttctacaaaggtatccaccctgccattaatgtcggtctgtctgtgtctcstgtcagatctgctgcccaaaccagggctatgaagcaggtggcaggtaccatgaagctggaagtggctcagtatctgaggtcaccacttttgcccagttcagttctgacctcgatgctgccactcaacaacttttgagttgtggtgtgtgtctaactgagttgctgaagcaaagacagtatactcccatggctattgaagaacaagtggctgttatccatgtgggtattaggggctatcttgataaacgggagcccagcaagattacaaagtttgagaatgctttcttgtctcatgtcagctggcaccaagccct

SEQ ID NO: 170485 - DNA, 382 bp, Homo sapiens
ttcttggaaacagaattgttctacaaaggtatccaccctgccattaatgtcggtctgtctgtgtctcgtgtcrgatctgctgcccaaaccagggctatgaagcaggtggcaggtaccatgaagctggaagtggctcagtatctgaggtcaccacttttgcccagttcagttctgacctcgatgctgccactcaacaacttttgagttgtggtgtgtgtctaactgagttgctgaagcaaagacagtatactcccatggctattgaagaacaagtggctgttatccatgtgggtattaggggctatcttgataaacgggagcccagcaagattacaaagtttgagaatgctttcttgtctcatgtcagctggcaccaagccct

SEQ ID NO: 170486 - DNA, 283 bp, Homo sapiens
gggaatatgttttactccatacatattcaggtaagactaaagatcctgggaktttggagtcatgggggaaagtgatattattcctgagcacttgctaggaactatccccaggttgcctcaggaccagcccctctcactacagtaaccccataaagcagtgcctacactttacattttatgggttcgaaaccagctcagtgggacttagttaactgcccacagtcaagtgtcagcatcaaaactggagtctcacccaaagccagctgaccccaaagctcacact

SEQ ID NO: 170487 - DNA, 283 bp, Homo sapiens
gggaatatgttttactccatacatattcaggtaagactaaagatcctgggattttggagtcatgggggaaagtgatattattcctgagcacttgctaggaactatccccaggttgcctcaggaccagcccctctcactacagtaaccccataaagcagtgyctacactttacattttatgggttcgaaaccagctcagtgggacttagttaactgcccacagtcaagtgtcagcatcaaaactggagtctcacccaaagccagctgaccccaaagctcacact

SEQ ID NO: 170488 - DNA, 283 bp, Homo sapiens
gggaatatgttttactccatacatattcaggtaagactaaagatcctgggattttggagtcatgggggaaagtgatattattcctgagcacttgctaggaactatccccaggttgcctcaggaccagcccctctcactacagtaaccccataaagcagtgcctacactttacattttaygggttcgaaaccagctcagtgggacttagttaactgcccacagtcaagtgtcagcatcaaaactggagtctcacccaaagccagctgaccccaaagctcacact

SEQ ID NO: 170489 - DNA, 283 bp, Homo sapiens
gggaatatgttttactccatacatattcaggtaagactaaagatcctgggattttggagtcatgggggaaagtgatattattcctgagcacttgctaggaactatccccaggttgcctcaggaccagcccctctcactacagtaaccccataaagcagtgcctacactttacattttatgggttcgaaaccagctcagtgggacttagttaactgcccacagtcaagtgtcagcatcaaarctggagtctcacccaaagccagctgaccccaaagctcacact

SEQ ID NO: 170490 - DNA, 391 bp, Homo sapiens
agaaattattattacaaacagtgctgcagtaaacattctactacatattagggggatgttttgtccttatttgagaatttctgtaagaaaaatgcctatgtcctaacaccggatgtaaaacatataaatagwttatgctagagcaagaggttcatatactgagtgtttctaaaatatttttttgatttaatagtttattactttcattgtgtaactgtacatgctccaagtacattctacaggaaaatctcaaacacttcaggaaagcagtaaacattaccataatgtgataaaattggtattttattaattttaaattatatttctaacacataagccatattacccttgacaaggtactcttgttaggagtcagacaaatttatgaatg

SEQ ID NO: 170491 - DNA, 391 bp, Homo sapiens
agaaattattattacaaacagtgctgcagtaaacattctactacatattagggggatgttttgtccttatttgagaatttctgtaagaaaaatgcctatgtcctaacaccggatgtaaaacatataaatagtttatgctagagcaagaggttcatatactgagtgtttctaaaatayttttttgatttaatagtttattactttcattgtgtaactgtacatgctccaagtacattctacaggaaaatctcaaacacttcaggaaagcagtaaacattaccataatgtgataaaattggtattttattaattttaaattatatttctaacacataagccatattacccttgacaaggtactcttgttaggagtcagacaaatttatgaatg

SEQ ID NO: 170492 - DNA, 391 bp, Homo sapiens
agaaattattattacaaacagtgctgcagtaaacattctactacatattagggggatgttttgtccttatttgagaatttctgtaagaaaaatgcctatgtcctaacaccggatgtaaaacatataaatagtttatgctagagcaagaggttcatatactgagtgtttctaaaatatttttttgatttaatagtttattactttcattgtgtaactgtacatgctccaagtacattctacaggaaaatctcaaacacttcaggaaagcagtaaacattaccataatgtgataaaattggtattttattaattttaaattatatttctaacacataagscatattacccttgacaaggtactcttgttaggagtcagacaaatttatgaatg

SEQ ID NO: 170493 - DNA, 592 bp, Homo sapiens
atatgaaaaaatgtccaacatcactatcatcagagcaatgcaaatcaaaactacaataagataccacctcaccccagtcagaatggctattatgaaaaggtcaaaaaacaacagatgctggtgaggctgtgtgtgcataaaagggaatgcttataaactgttgaggggaatgtaaactggttcagccactgtggaaagcaattgaagatttctcaaagaacttagaactaccatttaacctaccaatcccattattgggcatatacccaagggaaaataaatcattctaccaaaaagacacatacacttgtatgttcataacagcattattcgcaatagcaaagacatggaattaacctggggtgcttatcaacrgtagattgaattttaaaaatgtagtagtagtacatatacaccacagaatactacacagctatagaaaagaatgaaatcatgtccttttcagaaacatggatgcaactggaggccataaccctaagtaaattgttataatataggaatggaaaaccaaatacagcttgttctcacttgtaagtgggagctaaacactgagtacacattgacataaata

SEQ ID NO: 170494 - DNA, 580 bp, Homo sapiens
tcaactgcatggcagtcaaatcttaaaytctaaaaccactacatctctgagtcaaaaagttgtatttgtggtagtagtctaaaagaaaaattctcaccaacaacacctcagggcattgtaaaaagtgttgctgattcttttcattagggtggtaattgctaattaaagcctaatgtatagtggggctataagggctttttttccctccatgttggaaataagcaacttcccacatcagaacgggcaatggaaacaaccagaagccgcatggagatctggcacgggggccagcgagggcagaacgggagtcagcattgcgctcatggctctccgagagggtattggcggtggagcaccctgaggaaatgggagagttacccatgaggcctggtacaccagcatttcctctacctttcctatatgccaggggatttacgaaagatttttttttataggaacaaatagactatttatatccccaacaatcaccttttttttttaagacagaatctcaaagtcagttttcagaaagtatgtgaggatttattgcgttccaggtaaaagcagctgcccattatac

SEQ ID NO: 170495 - DNA, 580 bp, Homo sapiens
tcaactgcatggcagtcaaatcttaaattctaaaaccactacatctctgagtcaaaaagttgtatttgtggtagtagtctaaaagaaaaattctcaccaacaacacctcagggcattgtaaaaagygttgctgattcttttcattagggtggtaattgctaattaaagcctaatgtatagtggggctataagggctttttttccctccatgttggaaataagcaacttcccacatcagaacgggcaatggaaacaaccagaagccgcatggagatctggcacgggggccagcgagggcagaacgggagtcagcattgcgctcatggctctccgagagggtattggcggtggagcaccctgaggaaatgggagagttacccatgaggcctggtacaccagcatttcctctacctttcctatatgccaggggatttacgaaagatttttttttataggaacaaatagactatttatatccccaacaatcaccttttttttttaagacagaatctcaaagtcagttttcagaaagtatgtgaggatttattgcgttccaggtaaaagcagctgcccattatac

SEQ ID NO: 170496 - DNA, 580 bp, Homo sapiens
tcaactgcatggcagtcaaatcttaaattctaaaaccactacatctctgagtcaaaaagttgtatttgtggtagtagtctaaaagaaaaattctcaccaacaacacctcagggcattgtaaaaagtgttgctgattcttttcattagggtggtaattgctaattaaagcctaatgtatagtggggctataagggctttttttccctccatgttggaaataagcaacttcccacatcagaacgrgcaatggaaacaaccagaagccgcatggagatctggcacgggggccagcgagggcagaacgggagtcagcattgcgctcatggctctccgagagggtattggcggtggagcaccctgaggaaatgggagagttacccatgaggcctggtacaccagcatttcctctacctttcctatatgccaggggatttacgaaagatttttttttataggaacaaatagactatttatatccccaacaatcaccttttttttttaagacagaatctcaaagtcagttttcagaaagtatgtgaggatttattgcgttccaggtaaaagcagctgcccattatac

SEQ ID NO: 170497 - DNA, 580 bp, Homo sapiens
tcaactgcatggcagtcaaatcttaaattctaaaaccactacatctctgagtcaaaaagttgtatttgtggtagtagtctaaaagaaaaattctcaccaacaacacctcagggcattgtaaaaagtgttgctgattcttttcattagggtggtaattgctaattaaagcctaatgtatagtggggctataagggctttttttccctccatgttggaaataagcaacttcccacatcagaacgggcaatggaaacaaccagaagccrcatggagatctggcacgggggccagcgagggcagaacgggagtcagcattgcgctcatggctctccgagagggtattggcggtggagcaccctgaggaaatgggagagttacccatgaggcctggtacaccagcatttcctctacctttcctatatgccaggggatttacgaaagatttttttttataggaacaaatagactatttatatccccaacaatcaccttttttttttaagacagaatctcaaagtcagttttcagaaagtatgtgaggatttattgcgttccaggtaaaagcagctgcccattatac

SEQ ID NO: 170498 - DNA, 508 bp, Homo sapiens
acgggggccagcgagggcagaacgggagtcagcattgcgctcatggctctccgagagggtattggcggtggagcaccctgaggaaatgggagagttacccatgaggcctggtacaccagcatttcctctacctttcctatatgccaggggatttacgaaagatttttttttataggaacaaatagactatttatatccccaacaatcaccttttttttttaagacagaatctcaaagtcagttttcagaaagtatgtgaggatttattgcgttccaggtaaaagcagctgcccattatacgaaatcttttttttttttttttttgagacagagtctcactctgttgcccaggctggagtgcagtggtgcgatctcggctcactgcaacctccacctcctaggttcaagcgattctcctgcctcagcctcccgagtagctgggattacaggagtgcaccaccasgcccagctaatatttttgtatttttagtagagatggggtttcacc

SEQ ID NO: 170499 - DNA, 585 bp, Homo sapiens
agtgtctccattctctaacattttactcaaaatattggttaggttagactccacacccaccaaaacccaaaacacattccgtctcacagatgctctacattctttcaatacagaaaccttacgacaaagcctacaayatacacttgttttggtaaaataattggtccagttagtaaaaaatgagttgaattagtgttctccctctcacatattataacttttttcaattacagagatgtttacagaatttatctgaggtgctttctgtgtatctctgaaaacaccttcgtaatagtaggcacaccctggttagtggttctcggccctggctgctcactggcatcaccaggagagctctggacatactgaggcctgagcccttcccccagacactaatttaatgggactgtggtggggcctgggcatggatgtttttagaagcatctgctgatagataagcaataaatacgagtttattaactacacatggtgatttgatttccttggattcttccctgattttctgatccattggcccgtatatgaacaggctaacttctagtgtgtgaaaagactgacaggata

SEQ ID NO: 170500 - DNA, 585 bp, Homo sapiens
agtgtctccattctctaacattttactcaaaatattggttaggttagactccacacccaccaaaacccaaaacacattccgtctcacagatgctctacattctttcaatacagaaaccttacgacaaagcctacaatatacacttgttttggtaaaataattggtccagttagtaaaaaatgagttgaattagtgttctccctctcacatattataacttttttcaattacagagatgtttacagaatttatctgaggtgctttctgtgtatctctgaaaacaccttcgtaatagtaggcacaccctggttagtggttctcggccctggctgctcactggcatcaccaggagagctctggacatactgaggcctgagcccttcccccagacactaatttaatgrgactgtggtggggcctgggcatggatgtttttagaagcatctgctgatagataagcaataaatacgagtttattaactacacatggtgatttgatttccttggattcttccctgattttctgatccattggcccgtatatgaacaggctaacttctagtgtgtgaaaagactgacaggata

SEQ ID NO: 170501 - DNA, 499 bp, Homo sapiens
atcttgaagttttgttatgaggattagagcacaattcctggtatctgctctctggctgacactcagaaactgagacttstcattaagattgtgatggtgagatgatgatgagaaattgtttgactatctcaggaatagtagaaattattaaaatattgaattgtacccatgagaccatgtggccaggcaagaagaatgagataggccctttcttcaaagtatatgattttttttattattgaagaaattattcataaacacttgaaaacaaagcatattcaaagttttaaactgtacctaaaagatagtgccataagagttgtgagcttttgctaaaaactttgaccttaaaatgggcaactcatgaactatgaattattttaagggtctaatttattgcattttttgattcatatgaatttcccttgacaatgttaattcagttatcagggcaaatgaaaaaataagctctgtaaattaaaatacagaaatatttaca

SEQ ID NO: 170502 - DNA, 431 bp, Homo sapiens
tgctgggcaaatgagttagtttgttgttaagtttgtcatactgttcattagctctggccaaaaaatattttagcggagtaatgtctgaatcagaatttcatttgaaaacttgtgtaccaatcaaaaactgctgcccattgcccctgagaaatattctctcttttctaaggtgtttttcaaatgaacaattttgttcaagtccaatgttctccagattagccactgaaggcctaaattatccttggtatagagatgggtgcaagtgctaggatcgtagcaagggtacgtataagaaatgggaggttttyctggaggaaaaaaaggaaaagaggatttacactcagaaaattccatgggagctggcaatggtcagttgaaagtaatatttgtgcactttatgtcttaggcccccaacctgatagttggcaacc

SEQ ID NO: 170503 - DNA, 432 bp, Homo sapiens
acaatagtaaatagtaaaactgaaaatattttccaagaataaatgtgcttcatgtgggtttgatcagcacatctgattgaagatttgaggtgagatacattgtccccattaagtttaagggtttcagcgcaaaattagctgatctactctttgaaacgcagagcatttgtgaaaatgccaaaygcatctctgttagaatctcatccatgagcaaatgagtaatgtaagtcagatacaatggttaattctgtggtttgccaaatctgtacactttcctgttactttgtagattgtaaaataatgatgcagcgttcaccctaatgatcaattgttttccttactaaaatgtaagcatttaaaagatctgcctaattttttctaagtgtatgttaggcagatctatacttccaactcctaaagcattcttctaaa

SEQ ID NO: 170504 - DNA, 432 bp, Homo sapiens
acaatagtaaatagtaaaactgaaaatattttccaagaataaatgtgcttcatgtgggtttgatcagcacatctgattgaagatttgaggtgagatacattgtccccattaagtttaagggtttcagcgcaaaattagctgatctactctttgaaacgcagagcatttgtgaaaatgccaaatgcatctctgttagaatctcatccatgagcaaatgagtaatgtaagtcagatacaatggttaattctgtggtttgccaaatctgtacactttcctgttactttgtagattgtaaaataatgatgcagcrttcaccctaatgatcaattgttttccttactaaaatgtaagcatttaaaagatctgcctaattttttctaagtgtatgttaggcagatctatacttccaactcctaaagcattcttctaaa

SEQ ID NO: 170505 - DNA, 564 bp, Homo sapiens
atgagctggtattaaatcaaagtaaccctggcatatggagtatctctgccatgttaagagcagaccttggtatgagactgactctgggctttacatatgaatttggaattgccaatatctccacttgaactatgtgagacaataaaagtgctcccttatacactttagataatgggccctttgggggatcygatgttcattctgcctttcccagaaaaatacaactataataaaatgttgtaatcagtttcagtttatttattgctgatcttttatttttgttttaatttaacatggcaatccactttctatagtcaaaagtgcaatttaaagaactctaacaactcacaatatagaagaatgtctttggaaattttaggattcaaatctaaaacaaatcttaagatttctttttcctagattgtactgatgttacaagtgccttatgtaatacccagttcttccccatggagatttctcagtgaaagagccacatcacatgttcacaagagcatcaagaataagagggccacgtacctaggaagaaagattggcaagcattct

SEQ ID NO: 170506 - DNA, 579 bp, Homo sapiens
tgtagaaaaccacctagggaagggtagatatatgtaaagtaagtgaagggtggggatcagtcagaggaaagtgcaccaacaggaagagatgttctcagctcggtccatggatttatccaagacttgtagcttagctttcgggctttaaactgcctttggtttgaaagttggatttcrttggggacatgccactatctgcctacgggcttgtctgactcctgccactattaaaagtactaaatcagtgcatctagcctgagggctgcccctcgtccacccagcagaggtttttgttttgttttgtttttcttttgttttaattaaaattttaattaaaagggactaatatagagggtttttaaaaaattaccatatgtgttgagtatttatgctatgccaagcactttgcatatattttctcatttaatcctctaaatagtgaggttgattgccttatctccatcctatagatgagaaagctgagactgagagaaattaagaaacccacatgaggtcatgttgtatgtaagttagtttttgctgcatcataaaccacccgtttatgatttcaaacaggta

SEQ ID NO: 170507 - DNA, 579 bp, Homo sapiens
tgtagaaaaccacctagggaagggtagatatatgtaaagtaagtgaagggtggggatcagtcagaggaaagtgcaccaacaggaagagatgttctcagctcggtccatggatttatccaagacttgtagcttagctttcgggctttaaactgcctttggtttgaaagttggatttcattggggacatgccactatctgcctasgggcttgtctgactcctgccactattaaaagtactaaatcagtgcatctagcctgagggctgcccctcgtccacccagcagaggtttttgttttgttttgtttttcttttgttttaattaaaattttaattaaaagggactaatatagagggtttttaaaaaattaccatatgtgttgagtatttatgctatgccaagcactttgcatatattttctcatttaatcctctaaatagtgaggttgattgccttatctccatcctatagatgagaaagctgagactgagagaaattaagaaacccacatgaggtcatgttgtatgtaagttagtttttgctgcatcataaaccacccgtttatgatttcaaacaggta

SEQ ID NO: 170508 - DNA, 408 bp, Homo sapiens
ctacattaccaacttccctgggtctctagcttgccaactgcaaattttggactcctcagtctctgtaatcacataaascaatttcttacaataaatgtacctatgtgtccacatatccatctaagcatctagtgggttctgggtttttttcttttggaaggtacgtgactaatacagattagtactgagattagcgtgatttagtactaacagtggttctagagaaacaaaattttaagaataaatttcttgaatttgttctgaagtttccagaattggctttctaatctgattagaattaaagatgctagtggttctgtttccagtggtaaagaaagcactcacagtacctggcgtgatttggcaacagaaatatgcaaaatatcacccttggatagtcctaatcaa

SEQ ID NO: 170509 - DNA, 408 bp, Homo sapiens
ctacattaccaacttccctgggtctctagcttgccaactgcaaattttggactcctcagtctctgtaatcacataaagcaatttcttacaataaatgtacctatgtgtccacatatccatctragcatctagtgggttctgggtttttttcttttggaaggtacgtgactaatacagattagtactgagattagcgtgatttagtactaacagtggttctagagaaacaaaattttaagaataaatttcttgaatttgttctgaagtttccagaattggctttctaatctgattagaattaaagatgctagtggttctgtttccagtggtaaagaaagcactcacagtacctggcgtgatttggcaacagaaatatgcaaaatatcacccttggatagtcctaatcaa

SEQ ID NO: 170510 - DNA, 408 bp, Homo sapiens
ctacattaccaacttccctgggtctctagcttgccaactgcaaattttggactcctcagtctctgtaatcacataaagcaatttcttacaataaatgtacctatgtgtccacatatccatctaagcatctagtgggttctgggtttttttcttttggaaggtacgtgactaatacagattagtactgagattagcgtgatttagtactaacagtggttctagagaaacaaaattttaagaataaatttcttgaatttgttctgaagtttccagaattggctttctaatctgattagaattaaagatgctagtggttctgtttccagtggtaaagaaagcactcacagtacctggcrtgatttggcaacagaaatatgcaaaatatcacccttggatagtcctaatcaa

SEQ ID NO: 170511 - DNA, 598 bp, Homo sapiens
gtgccctgaaggagacatttatctcctgtaatttcaggtctaagattgctgaaaatgaagcccagaaactcatcctgtgactggctgaattacaatgtaagtttgaactcccagccttgtagagtatttatggggaaagtgagggcattgattgggaaggaatggaatctgaatattggagtggggatgtgatgtgarggaagacctggatgaagctggaaacactgaaccactaagttcttttctgctggaagatgtctccccagccccagggggagcagcctctctacccccatttgaagagagtaacctcttagtgactgatgaaattttagtggcctcccctgaggaagctgccatcaagaaaatgctgaatattctcaggaaccatgcctaccatctttctttgcttctggatctagaactagactcatctcagcgggcccctaaaggtgaggtataaagtgtggcccatgaggaggtgtgctacactctacaataattgtttgagtttttaaaattatacagacagaaacctaggaaacatgtgagaatggatattaagtgtgagagatattggtggaggaacaccaactta

SEQ ID NO: 170512 - DNA, 542 bp, Homo sapiens
aagctggaaacactgaaccactaagttcttttctgctggaagatgtctccccagccccagggggagcagcctctctacccccatttgaagagagtaacctcttagtgactgatgaaattttagtggcctcccctgaggaagctgccatcaagaaaatgctgaatattctcaggaaccatgcctaccatctttctttgcttctggatctagaactagactcatctcagcgggcccctaaaggtgaggtataaagtgtggcccatgaggaggtgtgctacactctacaataattrtttgagtttttaaaattatacagacagaaacctaggaaacatgtgagaatggatattaagtgtgagagatattggtggaggaacaccaacttacctcaggctgaaattacttttactaagcatagattatacagttaatgtgcatctcaggagtcagaaagggctctaacactttctgtggttgactaaagcctagaccaaaaggtggcctacagtgagtaagttggaaatgccagacctgccttggtt

SEQ ID NO: 170513 - DNA, 542 bp, Homo sapiens
aagctggaaacactgaaccactaagttcttttctgctggaagatgtctccccagccccagggggagcagcctctctacccccatttgaagagagtaacctcttagtgactgatgaaattttagtggcctcccctgaggaagctgccatcaagaaaatgctgaatattctcaggaaccatgcctaccatctttctttgcttctggatctagaactagactcatctcagcgggcccctaaaggtgaggtataaagtgtggcccatgaggaggtgtgctacactctacaataattgtttgagtttttaaaattatacagacagaaacctaggaaacatgtgagaatggatattaagtgtgwgagatattggtggaggaacaccaacttacctcaggctgaaattacttttactaagcatagattatacagttaatgtgcatctcaggagtcagaaagggctctaacactttctgtggttgactaaagcctagaccaaaaggtggcctacagtgagtaagttggaaatgccagacctgccttggtt

SEQ ID NO: 170514 - DNA, 521 bp, Homo sapiens
gatgtacttcttttcactgctattgtgagaaatcaatttgtaaggagagcctaagtgtctctgaagagctttgtgattgccagaccttacagtggagaatgcagtcactgtttggaaaatctagacaatgggagtaattggatcccaggatggcaggagccaaggggtggtaccaaagtgagagtgggtgtggttcctgtaagggaggcagactcaagacagcaatcagaatcatctcacttgtgcakatttatggtgttggttagttgagcatgatggttctagaggtgaaatactctggaagtctactaaattcttactttctctgtatacataaggctgttcttgcattgctataaagaaatagttgagactgggtaatttataaggaaagaagtttaattagctcatggttctacaaggaagcattagcactgacatctgtttctggggaggcctcaggatcatggtggaaggcaaagcaggagcttccatgtcacatggtgaaagctggagcaaaa

SEQ ID NO: 170515 - DNA, 554 bp, Homo sapiens
ggagaaaacagaagatgtacttcttttcactgctattgtgagaaatcaatttgtaaggagagcctaagtgtctctgaagagctttgtgattgccagaccttacagtggagaatgcagtcactgtttggaaaatctagacaatgggagtaattggatcccaggatggcaggagccaaggggtggtaccaaagtgagagtgggtgtggttcctgtaagggaggcagactcaagacagcaatcagaatcatctcacttgtgcagatttatggtgttggttagttgagcatgatggttctagaggtgaaatactctggaagwctactaaattcttactttctctgtatacataaggctgttcttgcattgctataaagaaatagttgagactgggtaatttataaggaaagaagtttaattagctcatggttctacaaggaagcattagcactgacatctgtttctggggaggcctcaggatcatggtggaaggcaaagcaggagcttccatgtcacatggtgaaagctggagcaaaagagagagagttaggtgccac

SEQ ID NO: 170516 - DNA, 569 bp, Homo sapiens
gggagaaaacagaagatgtacttcttttcactgctattgtgagaaatcaatttgtaaggagagcctaagtgtctctgaagagctttgtgattgccagaccttacagtggagaatgcagtcactgtttggaaaatctagacaatgggagtaattggatcccaggatggcaggagccaaggggtggtaccaaagtgagagtgggtgtggttcctgtaagggaggcagactcaagacagcaatcagaatcatctcacttgtgcagatttatggtgttggttagttgagcatgatggttctagaggtgaaatactctggaagtctactaaattcttactttctctgtatacataaggctgttcttgcattrctataaagaaatagttgagactgggtaatttataaggaaagaagtttaattagctcatggttctacaaggaagcattagcactgacatctgtttctggggaggcctcaggatcatggtggaaggcaaagcaggagcttccatgtcacatggtgaaagctggagcaaaagagagagagttaggtgccacacttttaaacagcc

SEQ ID NO: 170517 - DNA, 554 bp, Homo sapiens
ggagaaaacagaagatgtacttcttttcactgctattgtgagaaatcaatttgtaaggagagcctaagtgtctctgaagagctttgtgattgccagaccttacagtggagaatgcagtcactgtttggaaaatctagacaatgggagtaattggatcccaggatggcaggagccaaggggtggtaccaaagtgagagtgggtgtggttcctgtaagggaggcagactcaagacagcaatcagaatcatctcacttgtgcagatttatggtgttggttagttgagcatgatggttctagaggtgaaatactctggaagtctactaaattcttactttctctgtatacataaggctgttcttgcattgctataaagaaatagttgagactgggtaatttataaggaaagaagtttaaktagctcatggttctacaaggaagcattagcactgacatctgtttctggggaggcctcaggatcatggtggaaggcaaagcaggagcttccatgtcacatggtgaaagctggagcaaaagagagagagttaggtgccac

SEQ ID NO: 170518 - DNA, 524 bp, Homo sapiens
gaagatgtacttcttttcactgctattgtgagaaatcaatttgtaaggagagcctaagtgtctctgaagagctttgtgattgccagaccttacagtggagaatgcagtcactgtttggaaaatctagacaatgggagtaattggatcccaggatggcaggagccaaggggtggtaccaaagtgagagtgggtgtggttcctgtaagggaggcagactcaagacagcaatcagaatcatctcacttgtgcagatttatggtgttggttagttgagcatgatggttctagaggtgaaatactctggaagtctactaaattcttactttctctgtatacataaggctgttcttgcattgctataaagaaatagttgagactgggtaatttataaggaaagaagtttaattagctcatggttctacaaggaagcatkagcactgacatctgtttctggggaggcctcaggatcatggtggaaggcaaagcaggagcttccatgtcacatggtgaaagctggagcaaaa

SEQ ID NO: 170519 - DNA, 521 bp, Homo sapiens
gatgtacttcttttcactgctattgtgagaaatcaatttgtaaggagagcctaagtgtctctgaagagctttgtgattgccagaccttacagtggagaatgcagtcactgtttggaaaatctagacaatgggagtaattggatcccaggatggcaggagccaaggggtggtaccaaagtgagagtgggtgtggttcctgtaagggaggcagactcaagacagcaatcagaatcatctcacttgtgcagatttatggtgttggttagttgagcatgatggttctagaggtgaaatactctggaagtctactaaattcttactttctctgtatacataaggctgttcttgcattgctataaagaaatagttgagactgggtaatttataaggaaagaagtttaattagctcatggttctacaaggaagcattagcactgacatctgyttctggggaggcctcaggatcatggtggaaggcaaagcaggagcttccatgtcacatggtgaaagctggagcaaaa

SEQ ID NO: 170520 - DNA, 274 bp, Homo sapiens
taaatggaagccgctagaactgtctctgccttggaaagtagtaaaycaaagttagtactgcattcctggagaggttgcaaacattaatgctaccattaaggttttgaaatatgcaagggtggtgattcccaccacatcccccattcaattcacctatttgaactgtgcagaaaacaaatgaattttggagaatgacagattacagtaagcttaactagatagtaactccaattgcagctgctgtatcagatgtggtttcattgaataaattaac

SEQ ID NO: 170521 - DNA, 274 bp, Homo sapiens
taaatggaagccgctagaactgtctctgccttggaaagtagtaaatcaaagttagtactgcattcctggagaggttgcaaacattaatgctaccattaaggwtttgaaatatgcaagggtggtgattcccaccacatcccccattcaattcacctatttgaactgtgcagaaaacaaatgaattttggagaatgacagattacagtaagcttaactagatagtaactccaattgcagctgctgtatcagatgtggtttcattgaataaattaac

SEQ ID NO: 170522 - DNA, 627 bp, Homo sapiens
agatcttaaggcttgagaataattttatttgactcatgttttaccttcaaggcagactggggcaggggttggatccccaaggctccaaaggccacarccccatagctttgctgggcacagcccacaccacagccctcatgggttggagtctcctgcctgcagctctttcacgctggcattgcatgctggtgactctaaaatgtggaggtctccagcatggccctacccccatagttccactagattttgtgttagtgagtactctctgaggtggccccactcacacagctccactgtgcatacctctggtggagacactctgaggcattctctgaaacctaggggaggaagctaagccttcaaagctcctgaactctgtgcacttgcagagttcgcactacatggatgctgccaagtgctatggcctgtacctcctgaagcagtgacttgagccacacctgggcctgcttgagccatagctgggacagccaaggagcactgtgccagaatgcagggagcagagatttgaggcggccctggatggtaagcctcaagttcccatgggcaccctgggcccctccctcaaacctgttctgcccccaaggccctagcactctgcctgtgaag

SEQ ID NO: 170523 - DNA, 487 bp, Homo sapiens
acattagatcttaaggcttgagaataattttatttgactcatgttttaccttcaaggcagactggggcaggggttggatccccaaggctccaaaggccacaaccccatagctttgctgggcacagcccacaccacagccctcatgggttggagtctcctgcctgcagctctttcackctggcattgcatgctggtgactctaaaatgtggaggtctccagcatggccctacccccatagttccactagattttgtgttagtgagtactctctgaggtggccccactcacacagctccactgtgcatacctctggtggagacactctgaggcattctctgaaacctaggggaggaagctaagccttcaaagctcctgaactctgtgcacttgcagagttcgcactacatggatgctgccaagtgctatggcctgtacctcctgaagcagtgacttgagccacacctgggcctgcttgagccatagctg

SEQ ID NO: 170524 - DNA, 598 bp, Homo sapiens
gtaatatattacaattaaagtgtctaattctcagatcctttgtaacacatgggctacaataaatcacatacaaaaaaagtcttaaattattagaatctattatgtaaaaagtgactaagagaatcatgctagttttcaatttattgcctctgatctccaaatgcagtcttcaatacatgttctgtactaatggacatctttaagcatttctgcttaccagtaaggataccagtaagcagaaagaagrctgttctgctctttccagctgctgcatggtgtgccagcagtgtgggtatgagaacatctggtgtcattctgccccagtgacatgttcaaaatacaccacccctcagtcctagcctgtcctagtgaccaccttcatgcagccctcttgagagagacgctatgtggtccaggtctcttgcccacactgccaccctgattccctctgcctgcttgtccctaccttccagacttgtcttgtgaggtccccccgatgcagcggccctcctctcagggttaccatatgctctaagctttgtgctgcactggcattgcagggaagtttacattttcccactgaagttttgataatgta

SEQ ID NO: 170525 - DNA, 598 bp, Homo sapiens
gtaatatattacaattaaagtgtctaattctcagatcctttgtaacacatgggctacaataaatcacatacaaaaaaagtcttaaattattagaatctattatgtaaaaagtgactaagagaatcatgctagttttcaatttattgcctctgatctccaaatgcagtcttcaatacatgttctgtactaatggacatctttaagcatttctgcttaccagtaaggataccagtaagcagaaagaagactgttctgctctttccagctgctgcatggtgtgccagcagtgtgggtatgagaacatctggtgtcattctgccccagtgacatgttcaaaatacaccacccctcagtcctagcctgtcctagtgaccaccttcatgcagccctcttgagagagacgctatgtggtccaggtctcttgcccacactgccaccctgattccctctgcctgcttgtccctaccttccagacttgtcttgtgaggtcccccygatgcagcggccctcctctcagggttaccatatgctctaagctttgtgctgcactggcattgcagggaagtttacattttcccactgaagttttgataatgta

SEQ ID NO: 170526 - DNA, 581 bp, Homo sapiens
tttacccctctaagaccaaatgcccaactggagcatttatgctgtttgtgcagcattgcccagctgcagagaagcccaaggctcagagggtaagaagtgactggaagttgtcttgctacgtatgtggtgcaggttctttaactttcataaaaatatatttgataagatggtcaatttgcatgagtatttacccaatcagagggtgcagagaacagttatatggagatttttttttaagctattacatttacatcatttagaaatcaaaatgagataagttacctaccaagggtaccttccccatttctaygcccatcatagggagctgagaatggcctgactaataaatttgcattagaattaacaaccacagggatggcatactttacaacagcaacccagggacaaggaaaggggagaggatgttaccaagcctagggaaacaactcaggctcatggtgaacagggagggaaactgataatgtctaactaacacaattttaaattcagtaagaaaatggtttgttagatcatgtagctcacttactcgccattgaaaaatgctgtgagtgtttccatgg

SEQ ID NO: 170527 - DNA, 517 bp, Homo sapiens
agtgaaagcaagtttattaagaaactaaaggaatgaaagaatggctactgcatagagtagccctgagggctgctggttgcccatttttatggttatttcttgatgatatgctcaacaaggggtggattattcatgtctcccctttttagaccatatctggtaacttcctgatgttgccatggcatctgtaaactgtcatggcgctggtgggagtgtagcagtcaggacgaccagaggtcactctcatcgccatcttggttttggtggattttggccggctccttcactgcaacctgttttatcagcaaggtcttyatgacctgtattttgtgctgacctcctatcttatcctgtgatttagaatgccttaaccatctgggaatgcagcccagtaggtttcagcctcattttacccagctcctatttaagatggagttgttctggttcacatgcctctgacagagacagacccaggattgagttagtttgtactttcactgatagtttccttgaattc

SEQ ID NO: 170528 - DNA, 561 bp, Homo sapiens
ggttggggttgaatagataaaacatgactatggcaaacgagcgttcgataaagtctgatcctgtaatctttgtgctggcagaacaccactgtagtaaacttgggtttggcaaaccctgtataaaaacaggacccttgacttaagatacagtgtaaacatgttgacttcctaaaaccctcaatgggtatgtkgtgaaggaaagcttagacccagactctgttatataaaaacaaattaacttgaaatgtaatttttctctactaaggcttttcataatatatgagcagcccaacccccaagcccctgccaaacccatcacaattattgtccaaattcccgtggagtccaaaggggaggtggtattcaaaagaagtaactgctggtggactttgaataaaatgagaagtctgtgaggccaattaggttgtcagtggacaaaaataagcataaattagagcaattaagtaaatgaaaatgatcaaaaggaatttgtggcaagaatttttttgaacagatccttttctattatataggtacaaagaccattttaaagagttcaaa

SEQ ID NO: 170529 - DNA, 578 bp, Homo sapiens
ttgtcagaaacaatatcctccaatcatcccatggggtctcaaacctatagtaattgcagtttcgaagggtatgcatgactgacgtgtgcagtgcttttccagatctaggaaactactacatgcttggttttttacgtttcatgttttaagctatgtctatttattaagaaatttttccttacgtattatttttaaaygaaggtcaaatatgacttgttgccctcttcttaggatattcacagttcatttcttcctgttgaaaatggttttcccacatgaagtttggcactctggggtgaacatataataaagtaatcagatctgaccagggcagtaattttcatacggagaactgactgaaatgtgggccagagagtgcaataacatgcacttgttctttcaatgtggcataaagtatgcaccagcagattccatttagtgtggatttcagagcatcctggaaaaatcattatccatctctcctaggttacagctaccatttcgcaactttgctcctggtaacttgcagatgttgcctatatttgcaacacaaggcctcatttgtttgagccccaatt

SEQ ID NO: 170530 - DNA, 578 bp, Homo sapiens
ttgtcagaaacaatatcctccaatcatcccatggggtctcaaacctatagtaattgcagtttcgaagggtatgcatgactgacgtgtgcagtgcttttccagatctaggaaactactacatgcttggttttttacgtttcatgttttaagctatgtctatttattaagaaatttttccttacgtattatttttaaacgaaggtcaaatatgacttgttgccctcttcttaggayattcacagttcatttcttcctgttgaaaatggttttcccacatgaagtttggcactctggggtgaacatataataaagtaatcagatctgaccagggcagtaattttcatacggagaactgactgaaatgtgggccagagagtgcaataacatgcacttgttctttcaatgtggcataaagtatgcaccagcagattccatttagtgtggatttcagagcatcctggaaaaatcattatccatctctcctaggttacagctaccatttcgcaactttgctcctggtaacttgcagatgttgcctatatttgcaacacaaggcctcatttgtttgagccccaatt

SEQ ID NO: 170531 - DNA, 672 bp, Homo sapiens
tacctcaagcccctggcagctactgatctatttactgtctccatagttttgccttttccagaatgtcatactgtacattactgtttttgagagtctcttttccatctcagattcatccctgttcctagagagtagctctcctagagttccccctgagaacctggggtgttcactgaggccctttcctcttggcgagccttttaagattgcaaaacctctgctgtattcagacacttttgcttagttgcttaatgtcctgctccatgcagcctcagaatttggcaaatattttgataggaaaacagtgtcaagtgtccattaacctttctcattgggtttccagcctcatgagatttggatttttccagtccccaaaactggaaccaaaaattckgctgtctttactgcctcttagaggccttctgcccaagtctgttgcctggattctttccctcttgccaagtactctgaactagcaaatgccccaaaggaaaaatcagttataaaatgtcgacattcctctctaagttttctcattctccaggacttgttgcccaagtctgagtttcctcatcgcttcttcaatgacttcaaatagatgctattttgtgtatattatccagcttttctagttgtctcagtgagagcaatgaccttcatctcagctgaaag

SEQ ID NO: 170532 - DNA, 539 bp, Homo sapiens
aatatttttcttgaatattttctgtccatggtagaattacactgtctttaaaactgtatattctattttcatcacttaacattttagcataagcgtttttgtgttgttaaattctattcctaaagattatctctaacagctgtataacacttcattatgtgtacatactataatttatttaaccatttccctagggttttcatttagattgtcttcaattatttgttactatgaataatgttatagtgaacattttttacacagatttatatctgcatttcaaagcatttccttaggtcatttccaaaaactagaattaccatgtcaagcagtataaatattttaaatcaaatttccctgcagaagggttggactcatttattctttcatgaggaagaaatgagagtgcctatttcacctcatccttacragcactaaatatgcttgcatgttgttccctctctctcctcccctctctcatctccttcaagggttttgatacaaaccttgatcactacttggtcaggtaccaaaaaagg

SEQ ID NO: 170533 - DNA, 524 bp, Homo sapiens
attctcctgcctcagcctcccaagtagctgggattatgggtattcrccactacacctggctaatttttgtatttttagtacagatggtttcaccatgttggccaggctggtctcaaactcctgacctcaggtgatctggccacctcggcctctcaaagtgttgggattaccggcatgagccacagcacctggcaattaaacgtgatgtttaaagtgggaaaaaatcattatttaaatttcttggcaataaaaatggctattatgttgctctgcgcaattctgcttttgtggaggggaaacaaaagaccttttgtaaaataattcttctggcacagtgtcccaactataaaataatttaattgttgttcttaaaatgctggactataacacttgttattattctaagaagacctcatatttgagaagaaattcttgctaaattgggggtgaagaatgtggctcaataattatttctgctagaaaagggacagaactgaaaaaattagactgcagaatgacttaaa

SEQ ID NO: 170534 - DNA, 438 bp, Homo sapiens
tctgtaattttcccttctccctctaccccattatcctgaaagtttatgattgttttctttattattttaatgttaaaaatttacccaggagtgtctaattatggatttattttcccaggaatgaagtgaactgtttcatctgtgaccccgaagaatcttcaaaatttagatacttctttatttataagtttgaattttgtcagttgttttggtctcttcctgagagaaaaatagaattcttagtttgattctctcttctctgtccttattggtttttatttctttatcattattctctgtgctttaaaatatgtctcagttttgtcctctctctcatgttctcagggttttctaatgttaattcagatcttttcttttttcaacatgaattacaagtgttatcragtatttgttttttctgtaatcctcttattttgc

SEQ ID NO: 170535 - DNA, 466 bp, Homo sapiens
aatctcccaggatttaattaggacatagtcgtgtaacagaaggtagaggaagataaaggaaaactaacatttattaagtaacttatgcactaagcactgtgccagccattgtttaggtgaaatatgtgtgtatatacatgtgtttgtacatatacgtactatatatatgtaagcatgtagaatatatacacagaataaagaataataatgaaataatagctataagcacaccacctgaaataagaaaggaaacattacaagcatcccagagcctcctaaatgcccccctgatcttatcccatgccctctggccagaaataatagttatgtgttaatcatataattgcttttcygtatactctgcatgtgtatctgttaataaataaaatactgtataatttttgcctacttcaatcaatattatctctgagatttatccatgttgttatatgtagctgtagctcat

SEQ ID NO: 170536 - DNA, 552 bp, Homo sapiens
atgagaatgttatgccttaggccaagagcaaactataggcaattgcagaaacaaccagctagaggcatagagaagggcagaactccacctatgggataggaggaaggaaataaacaaacatatggagctataaataaaaaagattttctataaatataggaaagtatttagagaaagaagagaggataattaacccaggatagaaaagaaatcaagcagattttctgaaacttgggatcattcatcacgtattcccctgaagaacattagcttttccagagcacagtttgaaaactttggacttagctgagctctcaagggctcttccacatgtgtgatttcaagagcagagaacaatcctttccattccaaacctatgacgttttgttacatgttgaaatttcattaggatgataatgttagaaaagtgtgcagwttaaatctcatgtgaaaagtattgttgtgttactgtatgtcattgaggaaataattttatgctggtcccttgccttaccactctcacagcactgcagagaagcttgtatgtgccag

SEQ ID NO: 170537 - DNA, 531 bp, Homo sapiens
tacccttcccttgttgtttggttggtcttattcattttttttttggcatacctagtccttgcgggtaaagaactttttcatttagagaaaaaaaaagccarcaaaattatagacctaaagaatggatatttttgaaggtgagaattaaaagagtgaattgtatattttggccaagtattatctaagaatatattataattatcttcgtaaggcattggtggtagcagataaagggaattgaggatgaactgaggatgggtgaatgggtgagggaacagtacctacttaagagttggcattaatctgggtaaagtgtggggactccaggaaacaggggaagccctcttgaatgagtcatttaaagtcacatttgcagacagttttgggtgggcagtgatggggtttgcacaggatgtccaaacaagggttctgcccttcttactcatttctctgattcacatctggtctcttaataccgctacgtggctttgctatccttagtggatgactctgactgtatggaatgtagca

SEQ ID NO: 170538 - DNA, 507 bp, Homo sapiens
caggatagttgcttggcttcctctgttattacgaagaggacaaatccctcytctactttctatcagactttgagcaaaaaacaaagcagaacactgaagccactgaaatttcagggtttgtctgctgggcaactgacactacctagtgtcagtaatgcaagctattttgtacatataagtctatgctaatctgcttatttcagtatttttacataattgtacatatatttccatttttagatatttattattagtagagtatgttactagctcacttctaggagtagggaggattttgagaaatacttcacttggtggtgagcacttgattttcagccaagacaatgaagctcaactggtatttttagctcacataccaggttgaaaggtaaagttatttcatgagcatggctggcctggggagagcaagcataaactctggtactgtgtggcactggagattttctacatcattccagaggtagcaggttaaaactagaataacat

SEQ ID NO: 170539 - DNA, 507 bp, Homo sapiens
caggatagttgcttggcttcctctgttattacgaagaggacaaatccctcctctactttctatcagactttgagcaaaaaacaaagcagaacactgaagccactgaaatttcagggtttgtctgctgggcaactgacactacctagtgtcagtaatgcaagctattttgtacatataagtctatgctaatctgcttatttcagtatttttacataattgtacatatatttccatttttagatatttattattagtagagtatgttactagctcacttctaggagtagggaggattttgagaaatacttcacttggtggtgagcacttgattttcagccaagacaatgaagctcaactggtatttttagctcacatrccaggttgaaaggtaaagttatttcatgagcatggctggcctggggagagcaagcataaactctggtactgtgtggcactggagattttctacatcattccagaggtagcaggttaaaactagaataacat

SEQ ID NO: 170540 - DNA, 425 bp, Homo sapiens
gagggaaacctgcttgtccccactccactgggagctactgtgctttatgtaagctgaaaaagaggcctaaaaatacattctgtttttggattctggaattggcacttcacaggagtatctagtttcatatatagaatttccagaggtaagatgcaaatataagcttgagttaaataaaaattataataagacagtgagaagatgtgggttctaagaaagctaacgagtagcaagtagtactatatcagaacaagcaagaagactttagtttgagtgatccatccatttatccaaagtggaagaaagctggcaaaaggcaggtgaggtctcagggtctcactgagcagactgggatacagggcagtgtttcaggaaagaaactgagtactgactcttggyatggagtgaaccaacagagtaggaca

SEQ ID NO: 170541 - DNA, 638 bp, Homo sapiens
gatatccatccatacatatatacatatatatgtatgtatgcgtatgtatatatagattgatttgtatactttaaacatatagtctattctctttatccatagtagttatgttctattaagtcaccacaaatactgaatcagaaaatacacagctattgctactgggaaatacagggttaggttcctgtgagcctctggtcacattttgttcaaccgaaatgtcatttgcattatacatgttcatttgccaaggaccttgtaaggtaagccagtctcatcagcattgaaaacctgctcctctacgtaacctttttccctgtaacacttagcaggtattcttaaaattcctctgcagtcttcttatctgcagaacctgcctcacattgaagcctaacattttttatgtgatatcaccattrgaaagacacaagctggccagtactagccaaggaggttttaacattttcctgaccttgggtaacacagccataaatgtcttggactttcagtctcacaacaatgctatccagtatgctttttttttaattgaaaaaataagctatcatctcattaattcacaaatttaacttttctttgttttccatggcttcatttataaatattactttaacactttc

SEQ ID NO: 170542 - DNA, 638 bp, Homo sapiens
gatatccatccatacatatatacatatatatgtatgtatgcgtatgtatatatagattgatttgtatactttaaacatatagtctattctctttatccatagtagttatgttctattaagtcaccacaaatactgaatcagaaaatacacagctattgctactgggaaatacagggttaggttcctgtgagcctctggtcacattttgttcaaccgaaatgtcatttgcattatacatgttcatttgccaaggaccttgtaaggtaagccagtctcatcagcattgaaaacctgctcctctacgtaacctttttccctgtaacacttagcaggtattcttaaaattcctctgcagtcttcttatctgcagaacctgcctcacattgaagcctaacattttttatgtgatatcaccattagaaagacacaagctggccagtactagccaaggaggttttaacattttcctgaccttgggtaacacagccataaatgtcttggactttcagtctcacaacaatgctatccagtatgctttttttttaattgaaaaaataagctatcatctcattaattcacaaatttaacttttctttgttttccwtggcttcatttataaatattactttaacactttc

SEQ ID NO: 170543 - DNA, 488 bp, Homo sapiens
agaaagcaacagctgttatcccatgaaattcagcataggtgagtgtggggcagcagccagacccatggcttctgacaattctgaattttacccaagccctgtgctcccagaaaaaaagatcaggtgaaaatctaccctatagttttacacacatgcaaccttttgtgttccagaacacagcttaggcaaagaaactttcttcctcatatgacctagataggactcaccagtggtctctctatgacaagaccagacacagacttttcaaacttccawtttttttttgtttcagaaatgattacattaagttcttgtccccgctaatgaatagcacaatacacttattaattacactttggttaagcttctcttcctccccaggtacttaaactttgaccagcatatgactgcatcttaacagccccatctgagaattggctggcctcactgtaaaacattctctgatctaccatctgctacatcttcat

SEQ ID NO: 170544 - DNA, 462 bp, Homo sapiens
gaaagtaattttaaaatatctaattttaattatatatttgtctatttcttctttagttctattagtttttgttttatatattttaaaattatgttgatacatgtacttcaatgtatatattatgtatattattttttataaattaaccatcttatcattatgtaatgtccctcttttttctaatagtcttcttctcctgaggttcactttgtcttatgctaacatagtcacttggrctttcttctgcttactattttcaaattgtatcttatttgactttttcattgtaaagtgtgatttatatttaaaatgaaactctttttctattgtataatttattgttcacaacatgatgtttagatagacgtatacttagtgaaataatttttagaggtaggcaaaaaatgtatttttcatcttaaatagttacctttgagtgtgtggtaggagcacctaaaatct

SEQ ID NO: 170545 - DNA, 523 bp, Homo sapiens
agtagaaggaatttgccttgtgttagatgagactttggacttggacttttggcttagcactggaatgagttgaccttgggggayggttggaagggcatgatggtattttgaattgtgaggacgtgagatttgggagggaccagggggagaattatattgtttggctatgtccccacccaaatctcatcttgaattatagttcccataatccccacatgttgcacgagggacccaatgcacataattgaatgatgggggtggtttcctccatcctgttctcatggtagcgagttagttctcatgggatctgatggttttataaggggcctttccccacccatcactctgcacttctccttgctgccaccatgtgaggaaagacatgtttgattccccttccagcatgattgtaagtttcctgaggccttctcagccctgcggaactgtgagtcaattaaacctctttcctttataaattatccagtctctggtatgtcttcattagcagcgtgagaatggacta

SEQ ID NO: 170546 - DNA, 523 bp, Homo sapiens
agtagaaggaatttgccttgtgttagatgagactttggacttggacttttggcttagcactggaatgagttgaccttgggggatggttggaagggcatgatggtattttgaattgtgaggacgtgagatttgggagggaccagggggagaattatattgtttggctatgtccccacccaaatctcatcttgaattatagttcccataatccccacatgttgcacgagggacccaatgcacataattgaatgatgggggtggtttcctccatcctgttctcatggtagcgagttagttctcatgggatctgatggttttataaggggcctttccccacccatcactctgcacttctccttgctgccaccatgtgaggaaagacatgtttgattccccttccagcatgattgtaagtttcctgaggccttctcagccctgcrgaactgtgagtcaattaaacctctttcctttataaattatccagtctctggtatgtcttcattagcagcgtgagaatggacta

SEQ ID NO: 170547 - DNA, 573 bp, Homo sapiens
cgatatagaaaatgatatcctaaaggaaaaaaacgctgaaaggtggttactaagtaaaggccttcagtttttctttcccagaacacgcttgaggtgtatttgacatctgtctaactcaaatttcattccttttgaatgtctcagttcccatattccttccacaatgtagacaaaaatctccatttaccctgttgaagaatctcatactaaaatcctaaatcacgacaaagcaaggttatgagcatggctcagagcatgcactgtgacctcacaaggaaargtgactatgggggcctggattaggaaagatgtcagggaggaggtggcatttgagttaggcctgaaacaagcattagcagtggagcacccagagtcgcagtgaaggaaaatgtaaacagaaaggatgtagcaggaaaggaacaaagtcaagatttctggatgcaacgacagagagctacaagagtttgttttggtctggcccatgcttcatgaaagaaaattgtgagacatttgttataaaggaggattgtagactggcccatgaggaatctcactgccaagcaaaggagaggc

SEQ ID NO: 170548 - DNA, 619 bp, Homo sapiens
cttaccatctacatctaggacattcctggtacctgctgccttaggttggatttcctgggagaagaatcagagacaaaatataggtgaatgtgatttattgaaggagtacccttccggagaaattggaagggttgggagagaagtagcataaggaaagggaaggaatagagcaaggctgtggtctcaggacaaatcaaaacttagcctgaaccctgtggagatgggtgtycaggagcattgttccacgcagagctgccccacctctgaggcaaaggggtcagtgtttgtacccctatatcagtcataccccaatcctgagatactgggtctggagtaatatgtatgatctgtgctttaagtcaggcaatctcagacctaagcttctacattttcctaggccctcttcctgttaggtttttaatctgcatcaaattacttatccattctaaactttagctaccatccctgaaaaatgaggatattaatttctatttcaaaagataattgtgagaatgaaaggagctaattgtatagaacacttgcataatatacctttatgagtgcagtagtgagcactagcaaatgccagctcctaatcctctcacccagtcccggcaca

SEQ ID NO: 170549 - DNA, 558 bp, Homo sapiens
caatttcaaatggctcctcagtttttcgttgcctttcttgaacttgaatttttgacaaatacaagccagttattttgcagaatattatttaattttcattaatatgatgaaataacttttaaaataaattaacaatggaaaggaacttcaagattttataaattaatcagcactctctatatatcctatatctcacctctatgcagcagcttacacaagaaagaacaccccaaccttgagagaaagaatggggcagagagagagaagagtgaaaagaaaaaaagggagttgtgagaaaattaaagcaatcagagcattttcaggacaagagaaatagcttttctacagccacagmcttttatttaattcattaaaatctcataaattttaaatcgtaaatacaattcagtggaagtaaccagtagctatgtataaataggccactgtagtcaaagctcagtgtatctaggtatctatagttctttccagacttgaatttctagcttcatctttacattttacataacctagagtgtttgcaaaaccaaactatgttta

SEQ ID NO: 170550 - DNA, 558 bp, Homo sapiens
caatttcaaatggctcctcagtttttcgttgcctttcttgaacttgaatttttgacaaatacaagccagttattttgcagaatattatttaattttcattaatatgatgaaataacttttaaaataaattaacaatggaaaggaacttcaagattttataaattaatcagcactctctatatatcctatatctcacctctatgcagcagcttacacaagaaagaacaccccaaccttgagagaaagaatggggcagagagagagaagagtgaaaagaaaaaaagggagttgtgagaaaattaaagcaatcagagcattttcaggacaagagaaatagcttttctacagccacagacttttatttaattyattaaaatctcataaattttaaatcgtaaatacaattcagtggaagtaaccagtagctatgtataaataggccactgtagtcaaagctcagtgtatctaggtatctatagttctttccagacttgaatttctagcttcatctttacattttacataacctagagtgtttgcaaaaccaaactatgttta

SEQ ID NO: 170551 - DNA, 387 bp, Homo sapiens
tcttccccatctctaatatgatgataaaacctgactataaacattaacaaaggaatgggatgtaaatagactctggaactctagaagagattagaaaatcttatttgaaactatcttctgaaattgagattcctgggaacactggcakacgttgctatcattagaattctcacccagctagcagaataaagggtgtagttaccctgaaaaattccacaggcactatctccagagatggctgtatagcacctgtgccctttcttccgataggcagatactcccagtagaggaaacacacgtgacacgtgttcccacccaaggacaccatgagaagctctgcagagcaggtcagtgctgactccaccctgggcctctgagtcagatgtc

SEQ ID NO: 170552 - DNA, 620 bp, Homo sapiens
ctgagacttaacaacctgctaaaaatgagctttgggggcctacacgtctaggaaaaaaccctcctagtcatgagagatcagatgaaacctgaaaagagactcattttcttgtaaaatgctttctccaagattttaaaaaagaaaaggggagaaacgtgaaagtaaaatatcttgggccctttcaagctgggaactgctcagggcaaatctgcctcccattctattcaaagtcatccctctgctcactaggatagatgcaaactctgattgcttcctttggaaagacttatcagaaactcagaagaatgcaaccatttgtctctcacctacctgtgacctggaagcctctgggggcggggggcgagggggtgggggacttgttttgagttatctctgcctttctggatggaattaatgtccttcttacatatattgattgatagctcatgtctctgtaargtgtataaaaccaagcagtgccctgaccaccttgggcacatgttgtgaggacttcctgaggctgtgtcacaggtgcgtcctcaaccttggcaaaataaactctctaaattaactgagacctgtctcagattttctgggttcacaggaattttgtggaggca

SEQ ID NO: 170553 - DNA, 620 bp, Homo sapiens
ctgagacttaacaacctgctaaaaatgagctttgggggcctacacgtctaggaaaaaaccctcctagtcatgagagatcagatgaaacctgaaaagagactcattttcttgtaaaatgctttctccaagattttaaaaaagaaaaggggagaaacgtgaaagtaaaatatcttgggccctttcaagctgggaactgctcagggcaaatctgcctcccattctattcaaagtcatccctctgctcactaggatagatgcaaactctgattgcttcctttggaaagacttatcagaaactcagaagaatgcaaccatttgtctctcacctacctgtgacctggaagcctctgggggcggggggcgagggggtgggggacttgttttgagttatctctgcctttctggatggaattaatgtccttcttacatatattgattgatagctcatgtctctgtaaagtgtataaaaccaagcagtgccctgaccaccttgggcacatgttgtgaggacttcctgaggctgtgtcacaggtgcgtcctcaaccttggcaaaataaactytctaaattaactgagacctgtctcagattttctgggttcacaggaattttgtggaggca

SEQ ID NO: 170554 - DNA, 475 bp, Homo sapiens
ttgtggtttagaggcgctctgtaagaataggactttggacttcaaaatgtgcagcatatgaaacaatacatttcagttattttttttgcctgaaagctttttttttttttttttttttgagacaaagtctcattctgtcacccaggctggagtgcagtggtgcaatcttggctcattgcaacctccacctcatgggtgaaagcgattctccttcctcagcttcccamgtagctgagattacaggtgcatgccaccacacccagataatttttgtatttttagtagagacagggttttgccatgttggccaggctggtctgaaactcctgacctcaaaggacctgcctgctatggcctcccaaagtgctgggatcacaggtataagccactgtgcccagccctgaaagctttctaaatgattctcggtagacccagaattttcattttagagagtcaaaggtatggagtttcccaa

SEQ ID NO: 170555 - DNA, 475 bp, Homo sapiens
ttgtggtttagaggcgctctgtaagaataggactttggacttcaaaatgtgcagcatatgaaacaatacatttcagttattttttttgcctgaaagctttttttttttttttttttttgagacaaagtctcattctgtcacccaggctggagtgcagtggtgcaatcttggctcattgcaacctccacctcatgggtgaaagcgattctccttcctcagcttcccacgtagctgagattacaggtgcatgccaccacacccagataatttttgtatttttagtagagacagggttttgccatgttggccaggctggtctgaaactcctgacctcaaaggacctgcctgctatggcctcccaaagtgctgggatcacaggtataagccactgtgcccrgccctgaaagctttctaaatgattctcggtagacccagaattttcattttagagagtcaaaggtatggagtttcccaa

SEQ ID NO: 170556 - DNA, 454 bp, Homo sapiens
gctgtgcctggcacatggaaggcactaaaaaaaccctgaatgaatgaaggtaacaaatgaacaagcctttgctgtgacaggtaagcccgaggttccctccaaggttgttctggcacagagttcgcacactgactgcagttactgggcaaggggatggcaggactccttaggacctggtcccacttcctctccacactgtagagggagaacctattaaccctggagtcccaggtagcctcaagacagggttttgaggactccaacagctggaaagyagcaggtgcattccttggtagcccaatgcagcccctgttctgacgagcagtctgaagggccgtcttctccccacatttcccattccaacgctttaactctcttctcaaatggcaatgtctccttgcactttgggccagtttccactaatcagtgtttccagttggctcaattaggttta

SEQ ID NO: 170557 - DNA, 523 bp, Homo sapiens
gaaagacctggaaattcatacctaaaacatgcattgcttaaagcaggtgctcagtaaatatggagttgagtgagtgrgtgagtgagtgagtgagtgagtgagtgcgtgcgtacgtgcatgaaggagcctcttactaaaagccattgaagttttacatgaagagggcacagaattcctgctttctgggaaaccctgtatccctgaagtgttcttctccaaattttgggaagcaagtcccattactaggaaccctcactgctttttcttttttttccctcttgcactctcctgaaccaaggagaggcagatctgtgcactcctgggagaagactgccccaccaaatggccaaaagtcagaaccagaaacctgcaggtgagagttgacgccaacacctcactgcttctatcagctccaagctggcttcacaggcactttcctgcagccaggatgcagtacctcccgctgtgtgagccctgggctctgctaggcacagaaagagatgctgtaggggaagcctttgaa

SEQ ID NO: 170558 - DNA, 523 bp, Homo sapiens
gaaagacctggaaattcatacctaaaacatgcattgcttaaagcaggtgctcagtaaatatggagttgagtgagtgggtgagtgagtgagtgagtgagtgagtgcgtgcgtacgtgcatgaaggagcctcttactaaaagccattgaagttttacatgaagagggcacagaattcctgctttctgggaaaccctgtatccctgaagtgttcttctccaaattttgggaagcaagtccyattactaggaaccctcactgctttttcttttttttccctcttgcactctcctgaaccaaggagaggcagatctgtgcactcctgggagaagactgccccaccaaatggccaaaagtcagaaccagaaacctgcaggtgagagttgacgccaacacctcactgcttctatcagctccaagctggcttcacaggcactttcctgcagccaggatgcagtacctcccgctgtgtgagccctgggctctgctaggcacagaaagagatgctgtaggggaagcctttgaa

SEQ ID NO: 170559 - DNA, 599 bp, Homo sapiens
gtgggtgaagggtcctttcaaattctgtagatcccagtacattgcatctacagggtatgtgtttaaatgaggggtagttgacccacataactccccaccctcctgcctcatggttagaatgtatgttcattggggattctgcatacattttcatcacatatctacttttctggcttttaagtaatatcctctcctttgtttttgccaacagtgttcatgaatagtgaatgtaggaaagcattatcattgctatgttttattttcacactgtatctcagtatcagccyatactttcaatgtactaacaactgtcactgaggcaaaaagttttaattaagctcacacatgattattttccagcaaacagagcctaattgatgaaattgctaactgtacttccaggtgcagtcagtagccagtagtgcattgttagtatgcaatatggcatgggctgttacatggtgtgatactagattatatatttactatgaacgtatgtattgttctttaatgacatctatttgttcattccaaaaatatttattgagcacggactctgtgccagttattagttagagtaataatagctgctgtggcaa

SEQ ID NO: 170560 - DNA, 599 bp, Homo sapiens
gtgggtgaagggtcctttcaaattctgtagatcccagtacattgcatctacagggtatgtgtttaaatgaggggtagttgacccacataactccccaccctcctgcctcatggttagaatgtatgttcattggggattctgcatacattttcatcacatatctacttttctggcttttaagtaatatcctctcctttgtttttgccaacagtgttcatgaatagtgaatgtaggaaagcattatcattgctatgttttattttcacactgtatctcagtatcagcccatwctttcaatgtactaacaactgtcactgaggcaaaaagttttaattaagctcacacatgattattttccagcaaacagagcctaattgatgaaattgctaactgtacttccaggtgcagtcagtagccagtagtgcattgttagtatgcaatatggcatgggctgttacatggtgtgatactagattatatatttactatgaacgtatgtattgttctttaatgacatctatttgttcattccaaaaatatttattgagcacggactctgtgccagttattagttagagtaataatagctgctgtggcaa

SEQ ID NO: 170561 - DNA, 392 bp, Homo sapiens
ataaatgctttggctgttgtctgaagaattatgggcaatccttacaggtatgtttgagtgacggtagtaatgagattgagttagattacttaaaattttgaaccatcctggatactcagcttatggcaggagtgaggggtggcaggagtagcagtaggaaccagaatggagactattgcaatattccaggcaagagagattctgggattagatcagagcgataatggtgcaagtgccagagttaggaaaaatcaaacatgggatatgagagaaagagaggaataaaaatgacatcaagccctttgacctgagcaagtggatgtgcaatggtgacggtgctgtttgctgaaatgaaaaagagtgaggatgrgcaggttcatgtgtagtgcagg

SEQ ID NO: 170562 - DNA, 433 bp, Homo sapiens
gaaagcttttcatctgggacctttgcagattgctaaattaacagtcttgagctgataaaccggttggagccagccaatggagcacaccgggatataaaggccaacgctgctggggaggtttctactatcatccgtgagctctgtgaggtggtgaggattgggcatgggagagagggagacgtgggagaagtaagtgtccctcaacctccctgcctacttctccatagtctcatgatttgaagtcctgggaacataggtgaacctggaaggcactatgctaagtaaaataagccagtcacagaaggacaaatactgtaggatttcactcacwtgaggtctctaaaatagtcaaacttataggaacagagagtagaatgagggctgccagaggctacagggaaagggaatggggcatggctattcaatgttataa

SEQ ID NO: 170563 - DNA, 606 bp, Homo sapiens
ctttggttacccaaagagactgcaagaagggaaatccccaagcaattacaaccctcaataagcttttacttttatatgtaaaaacacagaaatgattggaggattgtagatacacagtttcagattgttaggaaaatttatcagatcaactagcataagagacagaaaggggtgcaaaggaaatgaacactggctgaggtctccccgactacktgccaggaagttcgaatggggaactatcaggccacgatgaccgcaaccctgcaagtggaccgggatctagttcctatatgcagaaaccaagcctcaaggaaggtaaattatctatttccatgatgaacatctgactgtaacagaagcacactctcttcctctcccacgctggcagcggaaagggccgattgaagtgagtggctcagtttctgcccagctgggacttctgtcggggctcagcctaattccgcattggaggcattgaaatttcagcatgacagcccccttcctgaatgagagtctatgtctggggaatgaaccgtgagtcccagatttctctaatatgttttcatggtgatgctatgaaagtcaaaacggaataggaaaataatt

SEQ ID NO: 170564 - DNA, 606 bp, Homo sapiens
ctttggttacccaaagagactgcaagaagggaaatccccaagcaattacaaccctcaataagcttttacttttatatgtaaaaacacagaaatgattggaggattgtagatacacagtttcagattgttaggaaaatttatcagatcaactagcataagagacagaaaggggtgcaaaggaaatgaacactggctgaggtctccccgactacgtgccaggaagttcgaatggggaactatcaggccacgatgaccgcaaccctgcaagtggaccgggatctagttcctatatgcagaaaccaagcctcaaggaaggtaaattatctatttccatgatgaacatctgactgtaacagaagcacactctcttcctctcccacgctggcrgcggaaagggccgattgaagtgagtggctcagtttctgcccagctgggacttctgtcggggctcagcctaattccgcattggaggcattgaaatttcagcatgacagcccccttcctgaatgagagtctatgtctggggaatgaaccgtgagtcccagatttctctaatatgttttcatggtgatgctatgaaagtcaaaacggaataggaaaataatt

SEQ ID NO: 170565 - DNA, 606 bp, Homo sapiens
ctttggttacccaaagagactgcaagaagggaaatccccaagcaattacaaccctcaataagcttttacttttatatgtaaaaacacagaaatgattggaggattgtagatacacagtttcagattgttaggaaaatttatcagatcaactagcataagagacagaaaggggtgcaaaggaaatgaacactggctgaggtctccccgactacgtgccaggaagttcgaatggggaactatcaggccacgatgaccgcaaccctgcaagtggaccgggatctagttcctatatgcagaaaccaagcctcaaggaaggtaaattatctatttccatgatgaacatctgactgtaacagaagcacactctcttcctctcccacgctggcagcggaaagggccgatygaagtgagtggctcagtttctgcccagctgggacttctgtcggggctcagcctaattccgcattggaggcattgaaatttcagcatgacagcccccttcctgaatgagagtctatgtctggggaatgaaccgtgagtcccagatttctctaatatgttttcatggtgatgctatgaaagtcaaaacggaataggaaaataatt

SEQ ID NO: 170566 - DNA, 531 bp, Homo sapiens
ctgtaagtcagaagtctggacagaacttagctgggttctctgctcagcatatcacaaggctgaaatcaaggtgycagttaggcttggggtctcatctgaggcacaaattcttcttctgtgctcacttggttgttggcagaattcatttccttgcagtaggactcatggtggccaataggagagatccccttccaggctgttatggcggagtggtaaataagctaacataataacagtaatgactatctcatttcattagtctatcctcacactgctaataaagacatacctgagactgggtaatttataaaggaaagaggtttaatgtactcacagctccacatagctggggaggcctcacaatcatggcagaagacgaagagagagcaaagggacatcttaggtggcagcaggcaagacaaatttgtgtaggggaactcccctttataaaaccatcagatatcatgagacttattcactgtcatgagaacagcatgggaaagacccgcccgcatgattcaattacttccc

SEQ ID NO: 170567 - DNA, 567 bp, Homo sapiens
aggcataagccaccatgctggccaactcagcttttcaagtagttcctcttatcttttgttatgtaactgttcacaccctgttcctttagggttttgttaaaggccaaccatctaaccccaagtcagtggttctctctgaacatttaatccctaaaaacaacaacatcacattcaactcacaaaaggcccaactgcattatggtaaccagggttgaaattcacctcagcagacttccaaaactcacatggctgggatctaagtaggcaaatgcctgtattatatgtctctgtgatggtaaatggggctaagtcaccagagtccaggagcctcacacttctgccaggagccatggagcgacatggctgctctcctctcacccttcccttcaggggccccaacaggcttcccaggcctcagcggatagacgtgaactttccagcccctgggctgaggtgtctcaagggacttcttgaattacagacccagacaccaagaagcctccccttctccatttgggwgtgctgtggcaaaaagagaacaattccctcctttccacctccaagctt

SEQ ID NO: 170568 - DNA, 570 bp, Homo sapiens
gggaaactatgggcagcccctggcctggtgctagggcctgtgttaaaagtcgctttccgtttatagtcctggagtcacccttattaactggattctacggttactctgtgccttgttgtctataggcctttgagaaagtcacatatcctgttttttgttgttgtctgtttgtttttgagacagggtctcactatcttgcccaggctgtagtggagtggtgtgatatcccagctcactgcagccttgactttgacttcctgggcttgagcaattctcccaacctcagcctccggagtacctgggactacaggtgcgtgccaccatgaccagctaatttttctgttttttatagagatggggtcttgctgtgttgccctggctgrtctcaaactcctgaactcaagcgagcctcccacctcagcttcctgagtagctgggactacaggtgcgtgccaccatgaccagctaatttttctgttttttatagagatggggtcttgctctgttgccctggctggtctcaaactcctgagctcaagcgatcctcccacctcagcctcccagtgttgg

SEQ ID NO: 170569 - DNA, 539 bp, Homo sapiens
ctttaccctgtagtcagccagtcaaaaaggatgctttctggggagcttgtcctcactctaatgactggcattaaatggagctaaatgagatttgagtgtttcctccagccaatttccttcaggataacaggctctactgtttgtactcacagaacctagagcccttgaggctgctgttcctatcactgggccatcaccgggcccctgcatttgttattggatacctaaatcataaggagcaagactatatttgttcctaccccacggatttgcaagggcattcagcagtactcagtcactttttttttaaatttaatttaattttaagttcaggggataccygtgcttgattgtttgtttgattgttgattgattggtacctgtgccaggtttgttacgtgggtaagcatgtgccatggtggtctgctgcacctatcaacccatcacctaggtattaggcctcagatgcattgactatttatcctgatctcagccacttttctaataggtctcactggattcactttgaggtgagaaac

SEQ ID NO: 170570 - DNA, 501 bp, Homo sapiens
cactggattcactttgaggtgagaaactggttgtaagtgatatgatataaaattgttttaaccttttattaacctttatttatttattttgagatggagtctcactatgtcaggctggagtgcacaggcgcgatctcggctcactgcaacctccaccttccaggttcaagtgattctcctgcctcagcctcctgagtagctgggattataagcacgcaccaccacacccagctaatttttgtatttttagtagagatggggtttcaccatgttgcccaggctggtatkgaattcctgacctcagatgatccacctgcctcagcctcccaaactgctgggattacaggcatgagccaccgtactggacccctttgttaacctttaaactgtggtactgtgatattatttattatttcatataaacaaaaaagccatggtatggctgcatgaaataatgtactataaacagaagcctttctcactctacagagagcaaagaat

SEQ ID NO: 170571 - DNA, 590 bp, Homo sapiens
taaaatccaaacttaacagaacttcactatggcttattgctatttttcttcattttaactttctcctttaaagtcaggttattgctattatggtgggataaatcatagttatacctggaatttttaacaattgaaacaggcttcttataaaastcttttaattgcacattagttttcctatggaatttaagtaatacttaaatttgtagactgatatagcacaaggtgaatagtctagattttttttattatttattctaaaattttaatttttatccttttctgagtcaaatagtctagaaaattttaatgcttaatctaaagaataggtgcttcatttaaatattaccctggtttgaactctctggaagttattctgaaaataatctatgaggcttttaaaagcagttatctgttggctaccagcaatattattctaggttatacaaacgtttttagtttctgtggctctatacacaggttaatcaataaacatgtccttcaaatgaaacattttcaaacttttcctagttatatattatataaaatactaatataaaactaggggctgagcatggtggctcatacct

SEQ ID NO: 170572 - DNA, 672 bp, Homo sapiens
atgctcttaattgaagaaaaccacagatgaaccatgtacagtctgagactctttcaagcaactgaaacagctcttgtcctcccttataagatctctgacaataaacctaccaatgtcttgcattcacaaaatgtgctttttttttttagaacgttggtatgaattgtatctcagtgaaattagaaccatgtccctcctcaattatgagatttggttggtgaccaccggtttattgtattgataatgaaatctcacaattaacttcttttctgatcaggaacccacccgattggcaaacattgaaaaggtggatggcattaagacttgccaaggatgtggagcaacctagagacacacgttgttgagggagtatccattgccacaaccacctttgaatacaatatttattattttcattcaaataayagaaaatatacatactctaccactcaaatttgcctctcttagttttgtatcttggagtagacttgtagaatcggaaggcaccatacatagatatttactgaaatattgttttaatctgtctaatcaaatgaacaaaaataattcagagtacattatccacagaatggatcaataaatcatggatatgcacccaatggaataccatagagtagagaaaaagaatacattgcagctgtgagaaacaat

SEQ ID NO: 170573 - DNA, 477 bp, Homo sapiens
ggttcttatgtaattattacaaaggtagcctacatagtgcagaaattggaayttgattagtataaatgcatttttatctgaatttttgcaaagtaagttcaataagtcatttgatttgttaatattcagtgtttataattttgtagagacgtgttttaacttttactctgtatttctgtgctcagagagttgtttgataagcctgtgcaacttgacttcggagttttatttcaagcatatgtagtttgtatcaggaaatcatatttttttagaattatgtattcatcatagaaaaatccttaattagcagtagtgaaggaaagctcttagactgaagactgattagcccagcctccagaggagatgtacgttagtgggacaacgtcctctaataaaggaacattcaagtcagaaatcacagtgaaacaccttaaattgttaaccacgaaggaaacagcgcctccaaattgataaggc

SEQ ID NO: 170574 - DNA, 455 bp, Homo sapiens
ttattacaaaggtagcctacatagtgcagaaattggaacttgattagtataaatgcatttttatctgaatttttgcaaagtaagttcaataagtcatttgatttgttratattcagtgtttataattttgtagagacgtgttttaacttttactctgtatttctgtgctcagagagttgtttgataagcctgtgcaacttgacttcggagttttatttcaagcatatgtagtttgtatcaggaaatcatatttttttagaattatgtattcatcatagaaaaatccttaattagcagtagtgaaggaaagctcttagactgaagactgattagcccagcctccagaggagatgtacgttagtgggacaacgtcctctaataaaggaacattcaagtcagaaatcacagtgaaacaccttaaattgttaaccacgaaggaaacagcgcctccaaat

SEQ ID NO: 170575 - DNA, 474 bp, Homo sapiens
ttattacaaaggtagcctacatagtgcagaaattggaacttgattagtataaatgcatttttatctgaatttttgcaaagtaagttcaataagtcatttgatttgttaatattcagtgtttataattttgtagagacgtgttttaacttttactctgtatttctgtgctcagagagttgtttgataagcctgtgcaacttgacttcggagttttatttcaagcatatgtagtttgtatcaggaaatcatatttttttagaattatgtattcatcatagaaaaatccttaattagcagtagtgaaggaaagctcttagactgaagactgattagcccagcctccagaggagatgtacgttagtgggacaaygtcctctaataaaggaacattcaagtcagaaatcacagtgaaacaccttaaattgttaaccacgaaggaaacagcgcctccaaattgataaggcatttagatct

SEQ ID NO: 170576 - DNA, 477 bp, Homo sapiens
ggttcttatgtaattattacaaaggtagcctacatagtgcagaaattggaacttgattagtataaatgcatttttatctgaatttttgcaaagtaagttcaataagtcatttgatttgttaatattcagtgtttataattttgtagagacgtgttttaacttttactctgtatttctgtgctcagagagttgtttgataagcctgtgcaacttgacttcggagttttatttcaagcatatgtagtttgtatcaggaaatcatatttttttagaattatgtattcatcatagaaaaatccttaattagcagtagtgaaggaaagctcttagactgaagactgattagcccagcctccagaggagatgtacgttagtgggacaacgtcctctaataaaggaacattcaagtcagaaatcacagygaaacaccttaaattgttaaccacgaaggaaacagcgcctccaaattgataaggc

SEQ ID NO: 170577 - DNA, 527 bp, Homo sapiens
gaattctctgattaatcagtaacaaggatctggcatccatctgttgacataccttgactcagtgcagttaaggatttatgaatgaaacacctcatacatgtttagtcaccctccctgttagccagcaagcaaggcagcatcctctctcraagctggctgccttcagagggtctgttctgtaaaccaaggctgtttctcggaccaactatcccaaaactaggacgtgccgaataagtagaaagaagtatttgtcttatgttttagtcagaagtttcagataccaggataaaatcacttttgtcagacctggataaaataaagtcaggatagtatgaaggagagatggctcatgctcacatatgggagataaaaactgctttcagggactttctaaaaaccccacaagaaacctttttgcatccttcatgcatctcctgttttgacaaggtttatcactagatattctttagtactgcagtaattcagataagatatctcagaacactcgcccagtaatgacatctcca

SEQ ID NO: 170578 - DNA, 527 bp, Homo sapiens
gaattctctgattaatcagtaacaaggatctggcatccatctgttgacataccttgactcagtgcagttaaggatttatgaatgaaacacctcatacatgtttagtcaccctccctgttagccagcaagcaaggcagcatcctctctcgaagctggctgccttcaragggtctgttctgtaaaccaaggctgtttctcggaccaactatcccaaaactaggacgtgccgaataagtagaaagaagtatttgtcttatgttttagtcagaagtttcagataccaggataaaatcacttttgtcagacctggataaaataaagtcaggatagtatgaaggagagatggctcatgctcacatatgggagataaaaactgctttcagggactttctaaaaaccccacaagaaacctttttgcatccttcatgcatctcctgttttgacaaggtttatcactagatattctttagtactgcagtaattcagataagatatctcagaacactcgcccagtaatgacatctcca

SEQ ID NO: 170579 - DNA, 527 bp, Homo sapiens
gaattctctgattaatcagtaacaaggatctggcatccatctgttgacataccttgactcagtgcagttaaggatttatgaatgaaacacctcatacatgtttagtcaccctccctgttagccagcaagcaaggcagcatcctctctcgaagctggctgccttcagagggtctgttctgtaaaccaaggctgtttctcggaccaactatcccaaaactaggacgtgccgaataagtagaaagaagtatttgtcttatgttttagtcagaagtttcagataccaggataaaatcacttttgtcagacctggataaaataaagtcaggatagtatgaargagagatggctcatgctcacatatgggagataaaaactgctttcagggactttctaaaaaccccacaagaaacctttttgcatccttcatgcatctcctgttttgacaaggtttatcactagatattctttagtactgcagtaattcagataagatatctcagaacactcgcccagtaatgacatctcca

SEQ ID NO: 170580 - DNA, 572 bp, Homo sapiens
tataaatttccttgttaacactgccttagctgtgtcccagagattctggtatgttgtatctcagttcttattagttttaacgaacttcttgatttcttccttaattttactatatacccaaaagtcattcaggagcaggttgcttaattgccatataattgtatggtttcgagtaattttcttagtcatgaattctatttttaatgcactgtggtctgagagactggttaatatgattctgattcttttgcatttgctgaggagtgttttgtgttcaactgtgtggtcaattttagaatacgtgccatgcggtgataagaatgtatattctattattcttgagtggagacttttgtgtatgtctatcaagtctatttggttcagtgttagttcaggtcctgaatatctttgttaattttctgcttcaatgatctaatactgtcagtggaatgtttccttctcccattattactgtgtggtattctaagtctctttgaacatctctgagaacatgcttcmtgaatatggatgctccttagttgggtgcatatatgtttaagttagttagatct

SEQ ID NO: 170581 - DNA, 204 bp, Homo sapiens
catctgcatagtcaaaaggcttagggaagtctctcctggagaaaagcatccccagatgaacgtacttcctctgtaatgggtgatgggcagaacagaaacacctgagcacsggactggaggtgaaaagtcctatgtgggactgattagatttggaatcttggaagttacaagtcatttatgaagtctcagattaccatatgtaaa

SEQ ID NO: 170582 - DNA, 204 bp, Homo sapiens
catctgcatagtcaaaaggcttagggaagtctctcctggagaaaagcatccccagatgaacgtacttcctctgtaatgggtgatgggcagaacagaaacacctgagcaccggactggaggtgaaaagtcmtatgtgggactgattagatttggaatcttggaagttacaagtcatttatgaagtctcagattaccatatgtaaa

SEQ ID NO: 170583 - DNA, 204 bp, Homo sapiens
catctgcatagtcaaaaggcttagggaagtctctcctggagaaaagcatccccagatgaacgtacttcctctgtaatgggtgatgggcagaacagaaacacctgagcaccggactggaggtgaaaagtcctmtgtgggactgattagatttggaatcttggaagttacaagtcatttatgaagtctcagattaccatatgtaaa

SEQ ID NO: 170584 - DNA, 556 bp, Homo sapiens
  misc_feature (1)...(556): n = A,T,C or G
tgacagagcattcttaccttcctttctgtcaactctaagctgtagacagggccttactcctttaaccaatcacaaaccagagaatccccaagtccacctacaacctataagacctctcctgaagataatccccctttytgaaccgaaccagtgtataccttccatgtgttgatgtctttgcccgtaactcctgcctccctgaaatgtataaaaccaaaccaacccggccacctcggaaccacttactcaagccttcttggttgcgtgttttctccaggcctcagtcactcatattggttcagaataaacctctttaaaatatattacagtttgttttatccattaacaaagtcaagcaattagttcttagatctgaaaatataactattactgcactaaaatagattaatgaaagaggatatactagatacaggaatatgaatagcacaaaatgtggcacatttgtggaacaccagaaaagggattctacgagttagccagttaaaataactaagggcatggccatttcacatcncaggtccagaatttgaaagat

SEQ ID NO: 170585 - DNA, 556 bp, Homo sapiens
  misc_feature (1)...(556): n = A,T,C or G
tgacagagcattcttaccttcctttctgtcaactctaagctgtagacagggccttactcctttaaccaatcacaaaccagagaatccccaagtccacctacaacctataagacctctcctgaagataatccccctttctgaaccgaaccagtgtataccttccatgtgttgatgtctttgccygtaactcctgcctccctgaaatgtataaaaccaaaccaacccggccacctcggaaccacttactcaagccttcttggttgcgtgttttctccaggcctcagtcactcatattggttcagaataaacctctttaaaatatattacagtttgttttatccattaacaaagtcaagcaattagttcttagatctgaaaatataactattactgcactaaaatagattaatgaaagaggatatactagatacaggaatatgaatagcacaaaatgtggcacatttgtggaacaccagaaaagggattctacgagttagccagttaaaataactaagggcatggccatttcacatcncaggtccagaatttgaaagat

SEQ ID NO: 170586 - DNA, 448 bp, Homo sapiens
gaattcacatctctgttctctgtgttccttggccacttagtaccattcacaatatctctcatagctagctctctgccttagggctggcccatgggactaaaattccttgtggtaggtatttttttttcatatttctattcttatagcatctagcatagaacaaacagcctagtatctagtgggtatccartaacaacttatgcaggtgattaggcaagaaaaagaaataaagcctattcaaattggaaaggtggaagtcaaattgtccctatttgctggcaacataatcttatatatagaagaacttaaacactctgccaaaaatccattagatgtgataaacaattcagtaaggttgtattgtatgtatcaaaacatccctatgtaacccatagagatgtataattattttatgttgatcaaaaataaaataataaaagctcttaat

SEQ ID NO: 170587 - DNA, 641 bp, Homo sapiens
tttgtagacgtgattaagttagggatcttggcatgaggggacgaaccttctttattcaggtggccttgaattatgatcacaagtgtccttataaaagagaggcaaagggagaaagcacagaaaggagaggaggaacttaagtgcccatggaggcagagaccgcagtaatgcagccacaagttagggacgccaacagaagatgggaggggcaaagaaccagtccacccccgtagactccaggaaaagtgtggtcttgccaacacattgattttggaattctggcctctagaactatgaaagtataaatttctgttattttaagcagcccagctgtgatactttgttaagcagccacagggactaatacccctactatgtgccactcactgtgccagtcctggggaagatttaggctggaaaagcatggcctttgcagcrtttttcccccaccagtgctgagacaatatgttgaaaagactgggaaaatgttataatgtattcaaaataccagatgagagctttctgtgtacctgtcactatgctcagctccagagatgggatatgaacaaaataggcccaattctcttccctctgtgccgaacttactttctgttaagtacaaaatagggcttaatgctatg

SEQ ID NO: 170588 - DNA, 583 bp, Homo sapiens
aaactccatctcaaagaaaaaaaaatgcttctatcactcttagccttgttttacttcatactctggtggtgggcaggtttgctaccttaaataygtcctagaagctgaatccaaatactttttgaacaattttctgacttcctttagagaaatgtactgtcagagtactatgtataattttttaaatacagctaccctgaagacttataaaagtctggttgttcaggcagtaatttatttacaaattcatgaaaatgaaaacagtttatgcaagcaaccagctctgggatgcctcatcgtcctttgcaaaattatccaaatcatgatgaaataggctttatttttatggattaaacagagaagaatgtctaatgaattgtctagaaattgaaatacgcaccttttatgaatagggacatttcataagaccattctgtattgtgagttaggaattcagatcagttgaagcattaaaaaaatcaaaccttctgcagctcattaaagcataaacctaatttttagaatttatccgactaatatagtaagacctccacctgcttagaataatattaatacttggcct

SEQ ID NO: 170589 - DNA, 599 bp, Homo sapiens
aagggaagagagtttatttgaagaaataatggcttaaaaccactcaactgagaaagaaaatggatatccaaattcaggaatcacaaaagactccaattaagttgaactcagagtctcacaccaagacacacaataaccaactggtcaaaagcaaaagtcaaagagagattcttgaaaacatcaagagaaaacagactcatcatgtacaagggagtttccataagattatcagtggatttctcaccagaaacattacaggtcagaagggagtgggatgatatattcaaagtattgaaagaaaaaaaaatcttgcctagcaaaaatactacatcttgtaaaactrtccttcaaaaataaacagaccttcccaaataaacaaaagctgagggacttcatcaccactagattaggcttagaagaatagctaaagggagtttcaaaatgaaatgaaaagattagctagcaacatgaaatcatatgaaaatataaagctctttgctgaaggtaaatatttaagcaaacacagaatcctctaatactatgatggtggtgcataaataatttttaattctagtgtagttaaaaatataaaagcatga

SEQ ID NO: 170590 - DNA, 496 bp, Homo sapiens
tcccccctggtttagactactagaggaaatagagaagagtatacatgctgagaaattacaggctggaacttcatctgaaattagctactgagtgagggataagtggggttcacccaggaaggtcattcttatggctcagttcagagttggaggaggcttctgaacttagaaaggaaagtaaattacaacccaacattaatagcaattatctttcaagtcttgacttagatgcaatgtcttcaggacgtccttcctgacttacctacattattaactccatttgaatttcctttttattgtagttgttgttcttaagtgcataggattggtttaattttacccaatgagttcacagcacattgtaattattggcagtagtgcaagactctctcrtctcttctcttgcctccgttctcattctctcccctccctagagaatccattctaaacgtgtctggtatgtctctaagtatgagagtggcttttagaaatatgt

SEQ ID NO: 170591 - DNA, 529 bp, Homo sapiens
ctatactaatattatgcagccatgtcccctgtacagcagttccctggatctcatggcttcttttttgatttgccttgtttgttaccaacttccatcagtaagacaatctatccaatccttgtcccctttgccacatcacatcctcagggcaataacaargttgttaagtttatgcaccttctccacttggagcaaggcctcaccatgtcaggcctccgcctgattctcctccctgcctgggatggcagattttgctctagtgggtctccaggccgtgaggtctcctgtcttttatgttctgatccgggtggtgagctgcagctcactacaagtccttacttgtctctgctggcctttagagactttgtactcaatttggaggaactactcttgatggattgtaagtgagaggatttcctggtctccctctggagtccgccagaaaaccacattctctgcttttcagcgttgactgctcatgcttacgtaatttctaagagtaagatcctatggactgtcctggcagcaa

SEQ ID NO: 170592 - DNA, 529 bp, Homo sapiens
ctatactaatattatgcagccatgtcccctgtacagcagttccctggatctcatggcttcttttttgatttgccttgtttgttaccaacttccatcagtaagacaatctatccaatccttgtcccctttgccacatcacatcctcagggcaataacaaasttgttaagtttatgcaccttctccacttggagcaaggcctcaccatgtcaggcctccgcctgattctcctccctgcctgggatggcagattttgctctagtgggtctccaggccgtgaggtctcctgtcttttatgttctgatccgggtggtgagctgcagctcactacaagtccttacttgtctctgctggcctttagagactttgtactcaatttggaggaactactcttgatggattgtaagtgagaggatttcctggtctccctctggagtccgccagaaaaccacattctctgcttttcagcgttgactgctcatgcttacgtaatttctaagagtaagatcctatggactgtcctggcagcaa

SEQ ID NO: 170593 - DNA, 529 bp, Homo sapiens
ctatactaatattatgcagccatgtcccctgtacagcagttccctggatctcatggcttcttttttgatttgccttgtttgttaccaacttccatcagtaagacaatctatccaatccttgtcccctttgccacatcacatcctcagggcaataacaaagttgttaagtttatgcaccttctccacttggagcaaggcctcaccatgtcaggcctccgcctgattctcctccctgcctgggatggcagattttgctctagtgggtctccaggccgtgaggtctcctgtcttttatgttctgatccgggtggtgagctgcagctcactacaagtccttacttgtctctgctggcctttagagactttgtactcaatttggaggaactactcttgatggattgtaagtgagaggatttcctggtctccctctggagtccrccagaaaaccacattctctgcttttcagcgttgactgctcatgcttacgtaatttctaagagtaagatcctatggactgtcctggcagcaa

SEQ ID NO: 170594 - DNA, 410 bp, Homo sapiens
agtgtgaatgtccaaaggcacttctgttgaataaaacaccaagtggagaaattgaagatccctgattgtggaagtatccaactgtttagaactcaactgaaatcctgaatgatagttctctacatgtagcaggaggagcaagtgactcatggaaataaygggtttatttaaataaagatagcctttatgtggacatcaaattcatcaatgaatgtatccatttatttgtcaaataattatttagctcctattaagtgctacatgctattccagataacttagtcaaaaaggcaaatgtgtccctacctttatgagctttaattctagcaggaactaaaaaaagtcacataataaacagacataaaatgcagtgttaggttgtgattcttgctatgaagctacaaaagagg

SEQ ID NO: 170595 - DNA, 606 bp, Homo sapiens
aagatcaagtgtgaatgtccaaaggcacttctgttgaataaaacaccaagtggagaaattgaagatccctgattgtggaagtatccaactgtttagaactcaactgaaatcctgaatgatagttctctacatgtagcaggaggagcaagtgactcatggaaataatgggtttatttaaataaagatagcctttatgtggacatcaaattcatcaatgaatgtatccatttatttgtcaaataattatttagctcctaytaagtgctacatgctattccagataacttagtcaaaaaggcaaatgtgtccctacctttatgagctttaattctagcaggaactaaaaaaagtcacataataaacagacataaaatgcagtgttaggttgtgattcttgctatgaagctacaaaagaggaaagctgagtaagggaataaagaaacaaagtgcttatcagtagtgaacttccatgcaggccatgataggctcatttcaaaagaagcagaaatattttattatttttccttgggttattagtgtcacatgtaagaatagtgcactagatttactaccacagatttttgtacttatacttattttgaacaa

SEQ ID NO: 170596 - DNA, 607 bp, Homo sapiens
tagacttgggggcaatatatgagaaacaggctctgctctaaaggataggatgagaggtgggcagggaggatttgtatggtttgaattccaggcacacacgctaactgctaatttggcatcatccaccaggttgaatattttcatgaaattctgtcttacatctctgctaatcctaaaacaaagaatgaggatcatttcaggtgagtctaagtcaggagaaactattaaaattgttatattcttcatttaatttttttctatgattattttttcttctttttatactaattagaataggccaaactgctgcaacaaatagactaaaawgtgtattgtggctgaaatatagtagaagtttataactcactaatgtagcagaaggaggatattgaagatttgtgagtcacttttctccaggtggtgattcagaattccaagctcccatagtccaatatggtgcctttcattttttttcctgagaaaattaacacattttaatttttcctcaagaagggaggtacaagagtgatcaattgtgatctagaagattaaggcaagaaagttagtgaaatttgctacagtgtctactattatagttgtcattatg

SEQ ID NO: 170597 - DNA, 607 bp, Homo sapiens
tagacttgggggcaatatatgagaaacaggctctgctctaaaggataggatgagaggtgggcagggaggatttgtatggtttgaattccaggcacacacgctaactgctaatttggcatcatccaccaggttgaatattttcatgaaattctgtcttacatctctgctaatcctaaaacaaagaatgaggatcatttcaggtgagtctaagtcaggagaaactattaaaattgttatattcttcatttaatttttttctatgattattttttcttctttttatactaattagaataggccaaactgctgcaacaaatagactaaaatgtgtattgtggctgaaatatagtagaagtttataactcactaatgtagcagaaggaggatattgaagatttgtgagtcrcttttctccaggtggtgattcagaattccaagctcccatagtccaatatggtgcctttcattttttttcctgagaaaattaacacattttaatttttcctcaagaagggaggtacaagagtgatcaattgtgatctagaagattaaggcaagaaagttagtgaaatttgctacagtgtctactattatagttgtcattatg

SEQ ID NO: 170598 - DNA, 517 bp, Homo sapiens
caatgatttcttggatataacaccragggcataggcaagaaatgaaaaaaatatatataaattggactccatcaaaatttacaacttctaattgaggcatggaaaactaaataccatatgttttgatttgtaagtaggagctaagtgggtactaagctatgggtactcaaaggcatacagaatggtataaaggacaatggagagtaagaaattggggaggatgggaaggagggtgaaggataaaaaactacatattgagtacaatgcacactactcaggtaacaggttcactaaaattccaggcttcaccactatacaattcatccatataacaaaaaaccacttgtaacctaaaagctattgaattaaaattatattaaaaattaaaaaaaattattattgagcatctactatgtgttcaaaactattttagatgctatatatttgccacttcatttaatccttggcattactctatggaatagataatattctcattttgcagttaaagaaactc

SEQ ID NO: 170599 - DNA, 517 bp, Homo sapiens
caatgatttcttggatataacaccgagggcataggcaagaaatgaaaaaaatatatataaattggactccatcaaaatttacaacttctaattgaggcatggaaaactaaataccatatgttytgatttgtaagtaggagctaagtgggtactaagctatgggtactcaaaggcatacagaatggtataaaggacaatggagagtaagaaattggggaggatgggaaggagggtgaaggataaaaaactacatattgagtacaatgcacactactcaggtaacaggttcactaaaattccaggcttcaccactatacaattcatccatataacaaaaaaccacttgtaacctaaaagctattgaattaaaattatattaaaaattaaaaaaaattattattgagcatctactatgtgttcaaaactattttagatgctatatatttgccacttcatttaatccttggcattactctatggaatagataatattctcattttgcagttaaagaaactc

SEQ ID NO: 170600 - DNA, 517 bp, Homo sapiens
caatgatttcttggatataacaccgagggcataggcaagaaatgaaaaaaatatatataaattggactccatcaaaatttacaacttctaattgaggcatggaaaactaaataccatatgttttgatttgtaagtaggagctaagtgggtactaagctatgggtactcaaaggcatacagaatggtataaaggacaatggagagtaagaaaktggggaggatgggaaggagggtgaaggataaaaaactacatattgagtacaatgcacactactcaggtaacaggttcactaaaattccaggcttcaccactatacaattcatccatataacaaaaaaccacttgtaacctaaaagctattgaattaaaattatattaaaaattaaaaaaaattattattgagcatctactatgtgttcaaaactattttagatgctatatatttgccacttcatttaatccttggcattactctatggaatagataatattctcattttgcagttaaagaaactc

SEQ ID NO: 170601 - DNA, 517 bp, Homo sapiens
caatgatttcttggatataacaccgagggcataggcaagaaatgaaaaaaatatatataaattggactccatcaaaatttacaacttctaattgaggcatggaaaactaaataccatatgttttgatttgtaagtaggagctaagtgggtactaagctatgggtactcaaaggcatacagaatggtataaaggacaatggagagtaagaaattggggaggatgggaaggagggtgaaggataaaaaactacatattgagtacaatgcacactactcaggtaacaggttcactaaaattccaggcttcaccactatacaattcatccatataacaaaaaaccacttgtaacctaaaagctattgaattaaaattatattaaaaattaaaaaaaattattattgagcatctactatgtgttcaaaactattttagatgctatatatttgccacttcatttaatccttggcattactctatggaatagataatatyctcattttgcagttaaagaaactc

SEQ ID NO: 170602 - DNA, 266 bp, Homo sapiens
tccaacagttctcaaaatgtgatcagaggattcctggggatgttgggagggagagatcccttggatccttttagagggtcaacaaggtcaaaaatattcataaaattaagatgttatttgccttttttttactctcactctcataagtgtacagaagggttcgccaaagacaamaatggcatgtgatgaatagtgatgactatttctctgatacctaacagattgtgtgcctgtgtattgtattttctagagttttcaaaggtagt

SEQ ID NO: 170603 - DNA, 444 bp, Homo sapiens
aaaagacagttgcttcttctgtcacctttgccagagaaataaatacagtaaaaggtgctctgcaacccccacaccctggttcctcctgtggcccctttgtaactgaagtcttaggtggatgaatttaattggtggaacttaggtgctctagcttcaaagaaggctaggggaagtgagctttctggtttccactttagggaggcaggactcaaaaggtaggggaaatttcacagtactctaaaggtgttcaaatcccatgggcagccagtaaacatcacaggtgtgaggtgctgggtggagtrgctgccgtgaatatgtgttttggttcatggactacatcagtggctcttaaagtccagtaattcacagattcatgagagataataaaatgattatttttgttttaagccattaagtttggagttggtgtgctgcccagcaata

SEQ ID NO: 170604 - DNA, 556 bp, Homo sapiens
tggcacaaaagcctccatcgagtcacccagcttttgcctggtacctatcctaacctaaaaccttgccacatgttaccttggcgaaaggccagtgccacacttcagtgatgattyggctgtcctacttggttagaaccgagttcacttccttcctcaacactcctgccacattgatctggaagtttcaccttgagccaagtgatagttaattttatgtgttaacttggctaggctatggtttctagacatttgaataccagtctagatattgcagtgaaggtattttttagatgagatttacatttaaatcaatagattttgggtaaagcagattaccctccataatgtaagtggcccttccaatcagttgaaggtcttaggggcaaagactgaggtcctccaaggaagagggaattctgcctctggaccaccttcagactcaagccgcaacatcagctcttcctgggtctccagcctacctgcagatttcgaccgtgccagctcccacagtagtatgagccaattacttaaaataaatctctctctgccaacatcc

SEQ ID NO: 170605 - DNA, 556 bp, Homo sapiens
tggcacaaaagcctccatcgagtcacccagcttttgcctggtacctatcctaacctaaaaccttgccacatgttaccttggcgaaaggccagtgccacacttcagtgatgattcggctgtcctacttggttagaaccgagttcacttccttcctcaacactcctgccacattgatctggaagtttcaccttgagccaagtgatagttaattttatgtgttaacttggctaggctatggtttctagacatttgaataccagtctagatattgcagtgaaggtattttttagatgagatttacatttaaatcaatagattttgggtaaagcagattaccctccataatgtaagtggcccttccaatcagttgaaggtcttaggggcaaagactgakgtcctccaaggaagagggaattctgcctctggaccaccttcagactcaagccgcaacatcagctcttcctgggtctccagcctacctgcagatttcgaccgtgccagctcccacagtagtatgagccaattacttaaaataaatctctctctgccaacatcc

SEQ ID NO: 170606 - DNA, 556 bp, Homo sapiens
tggcacaaaagcctccatcgagtcacccagcttttgcctggtacctatcctaacctaaaaccttgccacatgttaccttggcgaaaggccagtgccacacttcagtgatgattcggctgtcctacttggttagaaccgagttcacttccttcctcaacactcctgccacattgatctggaagtttcaccttgagccaagtgatagttaattttatgtgttaacttggctaggctatggtttctagacatttgaataccagtctagatattgcagtgaaggtattttttagatgagatttacatttaaatcaatagattttgggtaaagcagattaccctccataatgtaagtggcccttccaatcagttgaaggtcttaggggcaaagactgaggtcctccaaggaagagggaattctgcctctggaccaccttcagactcaagccgcaacatcagctcttccygggtctccagcctacctgcagatttcgaccgtgccagctcccacagtagtatgagccaattacttaaaataaatctctctctgccaacatcc

SEQ ID NO: 170607 - DNA, 556 bp, Homo sapiens
tggcacaaaagcctccatcgagtcacccagcttttgcctggtacctatcctaacctaaaaccttgccacatgttaccttggcgaaaggccagtgccacacttcagtgatgattcggctgtcctacttggttagaaccgagttcacttccttcctcaacactcctgccacattgatctggaagtttcaccttgagccaagtgatagttaattttatgtgttaacttggctaggctatggtttctagacatttgaataccagtctagatattgcagtgaaggtattttttagatgagatttacatttaaatcaatagattttgggtaaagcagattaccctccataatgtaagtggcccttccaatcagttgaaggtcttaggggcaaagactgaggtcctccaaggaagagggaattctgcctctggaccaccttcagactcaagccgcaacatcagctcttcctgggtctccagcctacctgcagatttcgaccgtgccagctyccacagtagtatgagccaattacttaaaataaatctctctctgccaacatcc

SEQ ID NO: 170608 - DNA, 586 bp, Homo sapiens
gtactaatatccagaatctaaaacgaactcaaacaaatcagtaagaaaaaaaaaaaaatcccatcaaaaaagtgggcaaaggacatgaatagacaattctcaaaagaagatatacaaatggccaacaaacacatgaaaaaattctcagcatcactaattatcaggaaaatgcaaatcaaaacaataatgtgataccatcttactcctgcaagaatggccataataaaaaaatcaaaaaacagtagatrttggcatggatgtggtcatcagggaacacttctacactgctgacgggagtgtaaactagtacagccactatggaaaacaatgtggagattccttaaagaattaaaagtagaactaccatttgatccagcaatcccactactgggtatctacccaaaggaaaagaagtcattatacaaaaaaagatacttgcacatgcatgtttatagcagcacaatttacaactgtaaaatcatggaacaaacccaaatgcccatcaatcaacaagtggataaagaaactgtggggggtgtgtgtgtgtgtgtgtgtgtgtgtgtgtgtgtatacacatatatacaca

SEQ ID NO: 170609 - DNA, 586 bp, Homo sapiens
gtactaatatccagaatctaaaacgaactcaaacaaatcagtaagaaaaaaaaaaaaatcccatcaaaaaagtgggcaaaggacatgaatagacaattctcaaaagaagatatacaaatggccaacaaacacatgaaaaaattctcagcatcactaattatcaggaaaatgcaaatcaaaacaataatgtgataccatcttactcctgcaagaatggccataataaaaaaatcaaaaaacagtagatattggcatggatgtggtcatcagggaacacttctacactgctgacgggagtgtaaactagtacagccactatggaaaacaatgtggagattccttaaagaattaaaagtagaactaccatttgatccagcaatcccactactgggtatctacccaaaggaaaagaagtcattatacaaaaaaagatacttgcacatgcatgtttatagcagcacaatttacaactgtaaaatcatggaacaaacccaaatgcccatcaatcaacaagtggataaagaaactgtggggkgtgtgtgtgtgtgtgtgtgtgtgtgtgtgtgtgtatacacatatatacaca

SEQ ID NO: 170610 - DNA, 561 bp, Homo sapiens
cctcatttcgttgacacttaaatgagaaaatatctgccatttaaataaacactttgttttaaacatggcttttcaagatcataagaaatatactttaatcttgtgcaaaaaagacattatccaccatttgaatctctgtgcccatatgtttctatgtttagattatgtgtttttacatytcacattaaaagtgtaactactggccatttacttattgctgagaactcacagacactgatattttaaatatttaaacaagtaaaaatgcttattcagaaagaaaatttttaattcaaactagaagacttcaccttcaagtaggtcctggcctctaaccagcggaaatcacgctatcgtgttaatcacttccccgctatccgggttgccttatttttcaacatatgcctgtctttaattttcccgccacaacaattaggaacattatgtgtggtttagcaaaaagcctagaagtgatttctttgtggctagagaggcacaggagcagagtgtgctggctcttccagcataaacgcgtttccttggcgctccttccattcacgc

SEQ ID NO: 170611 - DNA, 512 bp, Homo sapiens
taaccctgttacatatcttgcttatctgaggccagtgaagttatctagccaaggttgcatagccaggaaatggtagaggtggatgttgagacagggagtccagccagaggccaaagtttatggaaacacaaataatagtgaatgtgaacagtcaagatarggagatctagctgtttggggtgcacaaaagtttatggaggtgaaagcattggatatgttaggttaaggattagtagaaatgagctgtgttataaagaagacagaacaatttttcctcattcacttattagtaaaaaataaatacataaataattctaaaaaaactcacaaaggccaggaaaaaacaaggcttttacatggaagtcatcttaattatacataccatatatttctggagaatagtgagataaacttagaaaactgagctgcagcccaaagctggaaggcttcagacgctgagctaaggaatcagacttaacttcattatgtcaaaggtgagccctttaaagaat

SEQ ID NO: 170612 - DNA, 595 bp, Homo sapiens
ctacagcttcaaaggccttcggtacatcaatataggtgtgatgtgaggctcccactgagattccagaacagtgtatctacttacttagtcaccatccccactctgaaacctaataaataacccaaacctgatgtgattaaacaagcacccttgctctgtcactcccttttctttctcttcccttaccaaatcactcttctctttctcttctttatcttggtaaatgtcattactatttaccaagttcctcagacagaaatgtatgaggtattttgattgttttagtatatcattaccaaaaaactttacaatcagtcagttctaccttcagaatatattcccccaatttggctattttactacctctctgccctccaccacagtccatgccctaattatttgtggctgttactaaaacggcctccactgtggtcctccacctccacmattgcctattccacatgttctactccccaccttgcagagtgtttttcttttaatatttagaaaaattttattcctataagtaagtgtattgtcaaaataatcttataaaataaattaggaaatcaattttctttttccaaaattattt

SEQ ID NO: 170613 - DNA, 595 bp, Homo sapiens
ctacagcttcaaaggccttcggtacatcaatataggtgtgatgtgaggctcccactgagattccagaacagtgtatctacttacttagtcaccatccccactctgaaacctaataaataacccaaacctgatgtgattaaacaagcacccttgctctgtcactcccttttctttctcttcccttaccaaatcactcttctctttctcttctttatcttggtaaatgtcattactatttaccaagttcctcagacagaaatgtatgaggtattttgattgttttagtatatcattaccaaaaaactttacaatcagtcagttctaccttcagaatatattcccccaatttggctattttactacctctctgccctccaccacagtccatgccctaattatttgtggctgttactaaaacggcctccactgtggtcctccacctccacarttgcctattccacatgttctactccccaccttgcagagtgtttttcttttaatatttagaaaaattttattcctataagtaagtgtattgtcaaaataatcttataaaataaattaggaaatcaattttctttttccaaaattattt

SEQ ID NO: 170614 - DNA, 629 bp, Homo sapiens
tattgccttgattctgttgatgatatcatgggtgtttttctgttttatctccagatgtatcaaattacatacactaaacatgtgcagggktttttaatataattttaccttaataaagctgattttacaagacctgtcaatagcaaaatgacactttttttccaagaaatggtgctttgaaaattgaatattcacaggcaaaaggatgaaactagaccattaccatgcaacatatgcaaataataactcaaagtgaatcaaagtcctaaacataaaagcttttcatatgaaactcttagatgaaaatgcagaggaatatcatgattttggagttggcaatgatatcatggatatgacaccaaaagcactattaacaacaacagaaaaatagataaattggacgttgtcaaaattaagtactttgtgtattggaggacactattaagaaagtgaaaagccaatacatggaatgagagaaaatatttgcaaatcagtatttgtgaatgggttaatatccaaaatacaaagaatttaaaaagttaaccatagaacaaatagcccaattaaaaaatgggcaaaggatttgaatagacatttctccatagaagataagcaaatgattcattaac

SEQ ID NO: 170615 - DNA, 629 bp, Homo sapiens
tattgccttgattctgttgatgatatcatgggtgtttttctgttttatctccagatgtatcaaattacatacactaaacatgtgcaggggtttttaatataattttaccttaataaagctgattttacaagacctgtcaatagcaaaatgacactttttttccaagaaatggtgctttgaaaattgaatattcacaggcaaaaggatgaaactagaccattaccatgcaacatatgcaaataataactcaaagtgaatcaaagtcctaaayataaaagcttttcatatgaaactcttagatgaaaatgcagaggaatatcatgattttggagttggcaatgatatcatggatatgacaccaaaagcactattaacaacaacagaaaaatagataaattggacgttgtcaaaattaagtactttgtgtattggaggacactattaagaaagtgaaaagccaatacatggaatgagagaaaatatttgcaaatcagtatttgtgaatgggttaatatccaaaatacaaagaatttaaaaagttaaccatagaacaaatagcccaattaaaaaatgggcaaaggatttgaatagacatttctccatagaagataagcaaatgattcattaac

SEQ ID NO: 170616 - DNA, 629 bp, Homo sapiens
tattgccttgattctgttgatgatatcatgggtgtttttctgttttatctccagatgtatcaaattacatacactaaacatgtgcaggggtttttaatataattttaccttaataaagctgattttacaagacctgtcaatagcaaaatgacactttttttccaagaaatggtgctttgaaaattgaatattcacaggcaaaaggatgaaactagaccattaccatgcaacatatgcaaataataactcaaagtgaatcaaagtcctaaacataaaagcttttcatatgaaactcttagatgaaaatgcagaggaatatcatgattttggagttggcaatgatatcatggatatgacaccaaaagcactattaacaacaacagaaaaatagataaattggacgttgtcaaaattaagtactttgtgtattggaggacactattaagaaagtgaaaagccaatacatggaatgagagaaaatatttgcaaatcagtatttgtgaatgggttaatatccaaaatacaaagaatttaaaaasttaaccatagaacaaatagcccaattaaaaaatgggcaaaggatttgaatagacatttctccatagaagataagcaaatgattcattaac

SEQ ID NO: 170617 - DNA, 569 bp, Homo sapiens
taatgagagcgtgtttaaaccagcaaaatcaaaaatggagacttcattgtaaaagtactggtgtcttagtcaatgcagccagatggtaggtaagggctagaagcaggaagccacaggagttaaggcctcccggtgtgcttcccctgtctctcctgcctactttctgtgtctgtttgcagtgtccaccataccgtgggcaygcagcagctggccatgctggcactcctgttgtcacattctagtgatccactcaaacttgagtctggactctcttagttataacttcaaattcccagggagagacctttcctttgccaatggggtcaaatctagtcagatattatgtaaatttcctatggactgagagagggacagttattgttggtaaggactgacaagctatccaaaaattttccggtggaaatctccaaaggaaatatcattgacttttcttcattcaagagagcatcacatgctatattctttgcaacagtgatattcttatatttatagtaagattcttctagtttctggaatgccagtgctgaaaagcagaatgctgagagaga

SEQ ID NO: 170618 - DNA, 569 bp, Homo sapiens
taatgagagcgtgtttaaaccagcaaaatcaaaaatggagacttcattgtaaaagtactggtgtcttagtcaatgcagccagatggtaggtaagggctagaagcaggaagccacaggagttaaggcctcccggtgtgcttcccctgtctctcctgcctactttctgtgtctgtttgcagtgtccaccataccgtgggcatgcagcagctggccatrctggcactcctgttgtcacattctagtgatccactcaaacttgagtctggactctcttagttataacttcaaattcccagggagagacctttcctttgccaatggggtcaaatctagtcagatattatgtaaatttcctatggactgagagagggacagttattgttggtaaggactgacaagctatccaaaaattttccggtggaaatctccaaaggaaatatcattgacttttcttcattcaagagagcatcacatgctatattctttgcaacagtgatattcttatatttatagtaagattcttctagtttctggaatgccagtgctgaaaagcagaatgctgagagaga

SEQ ID NO: 170619 - DNA, 567 bp, Homo sapiens
aatgagagcgtgtttaaaccagcaaaatcaaaaatggagacttcattgtaaaagtactggtgtcttagtcaatgcagccagatggtaggtaagggctagaagcaggaagccacaggagttaaggcctcccggtgtgcttcccctgtctctcctgcctactttctgtgtctgtttgcagtgtccaccataccgtgggcatgcagcagctggccatgctggcactcctgttgtcacattctagtgatccactcaaacttgagtctggactctcttagttataacttcaaattcccagggrgagacctttcctttgccaatggggtcaaatctagtcagatattatgtaaatttcctatggactgagagagggacagttattgttggtaaggactgacaagctatccaaaaattttccggtggaaatctccaaaggaaatatcattgacttttcttcattcaagagagcatcacatgctatattctttgcaacagtgatattcttatatttatagtaagattcttctagtttctggaatgccagtgctgaaaagcagaatgctgagagag

SEQ ID NO: 170620 - DNA, 248 bp, Homo sapiens
ttgtgctgccacatgttttgattactggatggtgtagtgtgggccaggaggaatgcattcttgctgtgttyttctcgagtagactgaactacagcaaaagtttcccaaaatgttttaggaaaattgtctccttgaaatgtttctaactgttgtttaaaaagattctgagatcaaatacatttattcaatcctgaatgccttctatctttagtgcagactcctccccagagatttgtgcattctaatga

SEQ ID NO: 170621 - DNA, 584 bp, Homo sapiens
gttaagtcttctgatccataaacacaagacaattttccatttatttagacctttaatattgttcaggaatgttttgtagttttcagggtaccaatttgtatctcacgattaaacttatttttaagtatttttttgttattctactgtaaatgaattttttttcttaattttaagattgtttattgtatcacatagaaatataattaattatttttattgaccttgtattcttcaaccttgcagaatttgtttattagttcagattayttttgagtggactccatatccaaggtcatggtcatctgaaaatagagataattttaattatttccaatatagaaaaatttctttctttttcttgcctaattctctggagaaacaaacataataaaatgttgaataaaagtggctagaatgaacatctttgtcattttaaacttagaagaaaaatattccatctttcatcattaggtataatgttagcagcaggattttcacagataccctttatcaggttgaagatgtttccttctattcctaatttgttcaatatttttgtcataaaattatattaggttttgtca

SEQ ID NO: 170622 - DNA, 497 bp, Homo sapiens
tgtttggaaccaggaatggaatcctctgaaatacccaaatacagtaaaaaggatgccattgttctctagatcaaagaattaaatgagatctatgagttctgaaaagttcttcatcttatgagatttgcaggctcttttcctgaacaaaaccttcagcaaaagatgaaaattactggatgtgcttactttaggatgaacttgacaacttctttttgacattattttataaaaagacagacactaaacatagcaggccacagagttaagagtaaagcctccaaacccaratatttaaaacctagctactcaagaagccacagaaataaagtgtagttttctagtgaaatccctttggcattatcttcctgatgaatgttttcaaaacacactgagcagtctatatccctaaggattgcttttctctagttgatttatatgtttacacatgtttaactactcattgtattgtctggtaaagagaaaattcataccatgca

SEQ ID NO: 170623 - DNA, 560 bp, Homo sapiens
agaacttactcactatcatgagaatagcagcatggaagtaactggccccatgatttaagtatccaccatggggtccctcccacgggattttggcccctccamaatctcatgtcctcacatttcaaaacacaatcatgccttttcaacagtgccccaacgacttagctcattccaacattaacccaaaagtccaagtccaaagtctcatctcagacaaggcatgtccctttcacctatgagcctgtaaaatcaaaagtaagttagttacttcctagatactatggaggtacaggtatttggtaaatacacctgttccaaatgggagaaattggccaaaatgaaggggctacaggccccatgcaaatcagaaattcaatgaggcagtcattaaaccttaaatttccaaaatgatctcctttgactctgtgtctcacatccagatcacgctgatgcaagaggtaggctcccacagccttggacagctctgatcctatggctttgcaggctacagccctgctccaggatgatttcacaggctggtgttaagtgccagtgacttt

SEQ ID NO: 170624 - DNA, 540 bp, Homo sapiens
actggccccatgatttaagtatccaccatggggtccctcccacgggattttggcccctccacaatctcatgtcctcacatttcaaaacacaatcatgccttttcaacagtgccccaacgacttagctcattccaacattaacccaaaagtccaagtccaaagtctcatctcagacaaggcatgtccctttcacctatgagcctgtaaaatcaaaagtaagttagttacttcctagatactatggaggtacaggtatttggtaaatacacctgttccaaatgggagaaattggccaaaatgaaggggctacaggccccatgcaaatcagaaattcaatgaggcagtsattaaaccttaaatttccaaaatgatctcctttgactctgtgtctcacatccagatcacgctgatgcaagaggtaggctcccacagccttggacagctctgatcctatggctttgcaggctacagccctgctccaggatgatttcacaggctggtgttaagtgccagtgactttttcaggtgaatgggtgcaag

SEQ ID NO: 170625 - DNA, 548 bp, Homo sapiens
actggccccatgatttaagtatccaccatggggtccctcccacgggattttggcccctccacaatctcatgtcctcacatttcaaaacacaatcatgccttttcaacagtgccccaacgacttagctcattccaacattaacccaaaagtccaagtccaaagtctcatctcagacaaggcatgtccctttcacctatgagcctgtaaaatcaaaagtaagttagttacttcctagatactatggaggtacaggtatttggtaaatacacctgttccaaatgggagaaattggccaaaatgaaggggctacaggccccatgcaaatcagaaattcaatgaggcagtcattaaaccttaaatttccaaaatgatctcctttgactctgtgtctcacatccagatcacgctgatgcaagaggtaggctcccacagccttggacagctctgaycctatggctttgcaggctacagccctgctccaggatgatttcacaggctggtgttaagtgccagtgactttttcaggtgaatgggtgcaagctgtaatt

SEQ ID NO: 170626 - DNA, 608 bp, Homo sapiens
tgtttaacccatcaactcattttcctgaccatcaaattctgttttcatgcaatacttactagcatcccacagaattagtctgctgtgtgagtatagttcagaaactgctctgtgggttaagaatacttatgattccatttggagagggtaacacctccttcattagaagactctcttagtaagcatgagtataccaagtcttccctgcatcatgctattcttctccgaatttgcatttagctcaggtccaaatgttccaaagcattcttctaatatggaaccaaattctcaactcttaaaaataggaaggatcggccgggtgcagtggctcttacctgtaatcccagcactttgggaggccgaggtgggcgggtcacgaggtcaggagttcgagamcagcctgaataacatagtgtaaccctgtctctactaaaaatacaaaaattagccaggcgtggtggcacctgcctgcaatcccagctactcaggaggctgaggcaggagaattgcttgaacccaggaagcggaggttgcagtgagctgagatcataccactgcactctagcctgggtgacagagcgagacttccatctcaaaaaaaaaaaaaa

SEQ ID NO: 170627 - DNA, 329 bp, Homo sapiens
tagaacaccagctcttctattacatgggatggtacctaaatatttagtttttgcctacattgcatcatttgaattccatcataaaagacacatttctcagtcttaaatattttyattgactaagcatgttctcatgctgtcatgtcattgctgaagtttactaaatttcaataatcatgaaacagttgattttggtttttattccaatgattttatttaataatgtttaaaatcattaacacattgaacaaatatttctttaggaatacagttagcagctgggtgaggtggctcacgcctgtaatcccagcactttgggaggccgaggt

SEQ ID NO: 170628 - DNA, 582 bp, Homo sapiens
gctactcatggctcatatttagggaggtggggagggggtgatgtgaaaagtcctttgtctgcactgtccaggacagaataaccatgtgtggtcattttyatttaaattaaactaatttaaaaattcattttctccgttacatcagccacagttgaagcgctcggtggctgccgtgttagacagtacagaatgcggaacatttccatcatcacagaaagttccatggggcagcactgtcttctcacatctccctgcttccttccttagttctgggttccttatcctccctgccacacacacacacacacacacacacacacacacacacacacacacacacactgcctcactgtccaaattccatttgtttattatgcagaaaaatgggctattcaggctgcatccaaagggcttcttttctttccactaaagaagaattgtcaatgttctctgaggtgttttcctaaaaaccaaagacctgtctgtcttgggaagaattatcactgtctcccagaacgcagaaatgtctacagtccattcttgtttctcttaaattatgacactggtttttgaatgtggcac

SEQ ID NO: 170629 - DNA, 503 bp, Homo sapiens
ccccagccaaataatgaatagtccaaaatgttgatagtacccaggttgaggaaccctggtaggtggtccgagttcctttgagtcctaattctattatgtaattttaccacaggtcccatccagacctctgaagttgaacaaggtaagtctaacttcccttttgaagcttcctccaactctatataccacgtgaattccttcctgcccctcccagctgtgctcttagaccctctctgtattccagtccttagtgctgccacaccactcttggaggtctttcattgcagcacctgttatcatttaaaattaccatgaattttcttatccctttataagaatacgtgcaactctgggcagggacttattgcttgtttcttcatcatctctagtacmtaatctttaatgatgaatagcaatcatcactaaatgcttgtttgaataaatgattgatagtggaacagttagcaaacacaaagctcatgttttcacatctggttcctgta

SEQ ID NO: 170630 - DNA, 629 bp, Homo sapiens
atgtgatgtactaagaaaaattctgtgcagatctctgaagggtttaaccacagcaagccatgctctgaagacagtcctggaggagttgagggaaagctttcagatgccatctttatccattgaagaagtagccctacctagtgccaagtcttttgatggttacttggtagagaaagatgagtaagacaatgttcctgttcctctgggagtccatctctaaagagagaagatagatatgcaaacaaattattgtgaaatgtaagctaagtttgggaaataaggaaggttgtgcaagagcagagtgattatgcgaggsctgagggatgaagtagccatccctggaggacgggggcacccactggctgattaatgtaccatggtgggaggaaggaccatgctgacatgctggcaagcggggaagctccagtcacctgggactccttcagcttttccctaaaggactggtaatgcgctgaaggtgattccttaaatcctaactacatagccattggtttggggagtcccaggattgctcagagtttgtatcgtttcaaatccaagactgctgctcttaatatagagccctccccacctcagcaaatatagcctgatcgattccagcaggctgt

SEQ ID NO: 170631 - DNA, 609 bp, Homo sapiens
tattaaataaaatgaaaaaaaatctacagtgaggttgtctcagtctttgtagttatgggctaccagccagcttagatattagagctacaagtgtgtaaaaaccaagatatgcccaaatttctgtgatctttattcatctgacattagaccatatgtacacaaaaacttctgaaataattttaacagagatcacaagatggaagattcttttatagttgttttggtattttcattcttaagaagcaaaattgacttttgatgtacttgctttaaactgtaaattttgccaggatgttttaattgtacagtatttgtttcaactcttgtttaaattatgctttcttgttaattttgaataatttgtagtgtttgttaacattttagctttaatctctagagctgcctagagtcatagaccaatagataattatctgcaaacatttacctctactaaggagayagatatttaacagttttttaacatgttaaaaaacaaccatattgagtaaaatagtatagcctctgctaaaaaattaatgatatttaaattccaagaaaatatttctaaaatagatgaagatcaagccaatgaatgatgactcaatatca

SEQ ID NO: 170632 - DNA, 564 bp, Homo sapiens
tgtccctcccccatcccaagcaaccacaaatgaattttcagtcactatagattagtttgcattttctagagtttatgtaaatggaatcagacagtacatacttttttggtctggtttctttcactcagtataattgttttgtgacttatctacattgtgtgtatcaacaatgtgttcatctttcttactttatttattgtttatccattcatctttgattaacattgaggttctttctggtttttgactattacgaataaagcyactatgaacattcatgtgaaaatgtttcaacagatacatattttctttccttttgagtaaatgtctatgggaattttaaatgatccatgaaagaaaaaggactttataaatataagaattaaaagttcaccatggaaaatcattatatttgacaacattaacattttaaattactgcaactcaaaaaaaaatgttcttaaccaaacttcaggttaaatgatagtcaaagaaactgtataagtaatagctaacaatgataagaacttgccataagcaaagcatcggcaactctgtctgatc

SEQ ID NO: 170633 - DNA, 564 bp, Homo sapiens
tgtccctcccccatcccaagcaaccacaaatgaattttcagtcactatagattagtttgcattttctagagtttatgtaaatggaatcagacagtacatacttttttggtctggtttctttcactcagtataattgttttgtgacttatctacattgtgtgtatcaacaatgtgttcatctttcttactttatttattgtttatccattcatctttgattaacattgaggttctttctggtttttgactattacgaataaagctactatgaacattcatgtgaaaatgtttmaacagatacatattttctttccttttgagtaaatgtctatgggaattttaaatgatccatgaaagaaaaaggactttataaatataagaattaaaagttcaccatggaaaatcattatatttgacaacattaacattttaaattactgcaactcaaaaaaaaatgttcttaaccaaacttcaggttaaatgatagtcaaagaaactgtataagtaatagctaacaatgataagaacttgccataagcaaagcatcggcaactctgtctgatc

SEQ ID NO: 170634 - DNA, 560 bp, Homo sapiens
gaggttcatccttttagtatgaactaaacggttcatatgctttagtatttaagcattttcagatttcaagactacttaggagtcatctctaccatttgtgcmtcataataccccttttattgttgtgtaaacatatataacaatattagcaatatttgtaacagaatctagtttaataaacttagtaccaaatgtaaactataggattcatgatggtaattagtccaaacaactggcatacttacaattgcatttcttctgaacaaacctaagcttgcatgctgttctgtaggtggagagtcggatgcgatccagatcttgagcccctagtgcggggaaaaaggacacataaggtatgccatgtgtgcagaaagaaatttacaatgtttacaaataaaacaactgtagatatgatccttacccctaattttatttttattagaatataaatataactttaagacttgaacaggtctgtcctattcaaggacaagttcctcaggttctagggaaaaagagcacacacatgtaatcaacattggagattaggttgtaaacca

SEQ ID NO: 170635 - DNA, 406 bp, Homo sapiens
aggaattcccttagaaatgttctcaagagatgaacatttagccaatggccacgtaggattatttccaatgayagagaagattattacttgtgaaaataaatgaactttaaaggaagtaaaatttaactctgtcacttcccagttgtgtgagtttcaccaagtttttccttggcatctcaatttcctcatggataaagcgagataacaatatcaactttactggctggtaatacagatataaagtcttgacttctgcactgagaacataatgaccacttaacagtaaatgggccccttaagaggcttcatgtgccatttctgaacaaaaatatgtgatagaaatttcttttttatatttgagctttgatttacctccctgtaacttcaacctatttgatctagtttc

SEQ ID NO: 170636 - DNA, 468 bp, Homo sapiens
aatagcaagcaaatgatttactgaccaccacaatagatagttatttccaatcttcacaatcactcttgaaatacagctattakccctgtgttacacataagataactgaggatctggaaactgaactgacaaatgcaaaagtagaagaggagtcaatggcaagactagcattcagatccaagtctatcggtttaaaagttatttccccattgcacaccctgccccctcaaaaagaaaaggccaacatttaaattctagtgtttgaaaggatgtccaaattatatttgagtatttaaaatgttttcatttatttatgtgttttttagtagtatgctgttggaaacaagaaaaaaaaagaaagttaaggtaggcaggaagacaaggtaaaaaggaaaagttatgtatacactgcagcagcagcagaactaagtcacacatcactgaactaggctggtcaagaacaagaag

SEQ ID NO: 170637 - DNA, 432 bp, Homo sapiens
tatctctaagacttgatgtgcattacataatagcaagcaaatgatttactgaccaccacaatagatagttatttccaatcttcacaatcactcttgaaatacagctattatccctgtgttacacataagawaactgaggatctggaaactgaactgacaaatgcaaaagtagaagaggagtcaatggcaagactagcattcagatccaagtctatcggtttaaaagttatttccccattgcacaccctgccccctcaaaaagaaaaggccaacatttaaattctagtgtttgaaaggatgtccaaattatatttgagtatttaaaatgttttcatttatttatgtgttttttagtagtatgctgttggaaacaagaaaaaaaaagaaagttaaggtaggcaggaagacaaggtaaaaaggaaaagttatgta

SEQ ID NO: 170638 - DNA, 317 bp, Homo sapiens
cactggctgcattttgtagtcttccatcttagtcttataacttctctcatacaataagtgtttattcagtccttattgtgttgcagtgctgttctggtttctagaattggagtgtacaaaataggtccctaatcacacagaacttacatgtgtgtcggagagggaggagatagagatattaaataagtgcattgagcatgcaataataatctattttctctccttttagatttcaaaatattcaatyggcatataaaaattgtatatattcagaggtatacaatgggatttgacatttatatatacatactatttat

SEQ ID NO: 170639 - DNA, 571 bp, Homo sapiens
aaaatacttatggatatactaaaccaaagaaataaaaaatacctacaaggaaaactataaaacactgctgaaagaaatcacagatgacacaaacaaatagaaacacaccccatgctcatggatgggtagaatcaatattgtgaaaatgaccattgtgcccaaagaaatctacagattcaatgcaatttccatcaaaataccatcattgttctttgcataactagaaaataaatcctaaaattcacatggaaccaaaaaagagcccacattgccaaagcaatactaagcaaaaagaacaaatggaggtatcacattacccgacctcaaattaaactacaagactatcattaccaaaacagtatattactggtataaaaataagcrcatagcccacaggaacagaatagagaactcagaaatgaagccaaaaacttacagcaaactgatcttcaacaaagcatacaaaacataaattagggaaaggacactctatttaataagtggtgttggaaaaactggcaagccacatgtagaagaatgaaactggattctcatctctcaccttattaag

SEQ ID NO: 170640 - DNA, 630 bp, Homo sapiens
gcgtgtgtgtgtgtgtgtgtgtgtgtctctgtgtgtgctttaagtcttattttggagactgcacatttaagataatattctacaaataatttcttaaagagtcatctagtgcttgctacatagaagctwctgtcaaaaacaaggataatatttagcaataaagtcacaatttggcagaaaggttaagtgtaaattagaaatttcatgagagattcagagagacatgtacgcaatatacttggatcagtataggaggacaagactgtttcaaggatttaagacagtcttcgaagaggacatatatttcagctaaattttagagcaaagcctgtaattaattaggatgacaagactggggaacatagggactaaaattaggcaacatttccgaaggcgaatgctgtcaagaattgtgaaaggtcctatatatgcccattatgttaaactattgtcattaaaattttctatatttttactgaaaaaaaaaagaattgtgagaggtcacttttgtatcctacttatccactaacaagttaggctgctacattttcaaatattcaggagaaagcatgagacacattgtagtcagaaacacaggattttactaatcatggcacagcaagctggatg

SEQ ID NO: 170641 - DNA, 630 bp, Homo sapiens
gcgtgtgtgtgtgtgtgtgtgtgtgtctctgtgtgtgctttaagtcttattttggagactgcacatttaagataatattctacaaataatttcttaaagagtcatctagtgcttgctacatagaagctactgtcaaaaacaaggataatatttagcaataaagtcacaatttggcagaaaggttaagtgtaaattagaaatttcatgagagattcagagagacatgtacgcaatatacttggatcagtataggaggacaagactgkttcaaggatttaagacagtcttcgaagaggacatatatttcagctaaattttagagcaaagcctgtaattaattaggatgacaagactggggaacatagggactaaaattaggcaacatttccgaaggcgaatgctgtcaagaattgtgaaaggtcctatatatgcccattatgttaaactattgtcattaaaattttctatatttttactgaaaaaaaaaagaattgtgagaggtcacttttgtatcctacttatccactaacaagttaggctgctacattttcaaatattcaggagaaagcatgagacacattgtagtcagaaacacaggattttactaatcatggcacagcaagctggatg

SEQ ID NO: 170642 - DNA, 566 bp, Homo sapiens
ttgttgttttcttattgttttgtatattatttgtttcttcctctcttactatttatatttkttctcatttgtatatcttttataccagtgagttgtatacttttgtttgttttcatgatggtagatattgtaccttacttccagatataagactcccttacacatttattgtaagaccattataggggtgatgaatttcctgagtttctgcttgcttgggaaagaccatatttcttcttcatttcttaagcatagcttaagaacttaagctacctagctttgctaggtagttttcttacagcttttttattattattttcagcactttgaatatatcatctcattctctcccggcttataaggttcctgctgagaaatctattagtctaatgagcattcccttatatgtgacttgacatttttctcttgctgttttagaattctctctttgtctttgattttggcagtttcaatatagtgtgccttgaagagaaatatttcatttctgtggtcctcttcaaggcacattgtattcaaactgccaaaatctatcactttaatcagtt

SEQ ID NO: 170643 - DNA, 566 bp, Homo sapiens
ttgttgttttcttattgttttgtatattatttgtttcttcctctcttactatttatattttttctcatttgtatatcttttataccagtgagttgtatacttttgtttgttttcatgatggtagatattgtaccttacttccagatrtaagactcccttacacatttattgtaagaccattataggggtgatgaatttcctgagtttctgcttgcttgggaaagaccatatttcttcttcatttcttaagcatagcttaagaacttaagctacctagctttgctaggtagttttcttacagcttttttattattattttcagcactttgaatatatcatctcattctctcccggcttataaggttcctgctgagaaatctattagtctaatgagcattcccttatatgtgacttgacatttttctcttgctgttttagaattctctctttgtctttgattttggcagtttcaatatagtgtgccttgaagagaaatatttcatttctgtggtcctcttcaaggcacattgtattcaaactgccaaaatctatcactttaatcagtt

SEQ ID NO: 170644 - DNA, 569 bp, Homo sapiens
ctcagggtagcagtccccttgatgtagaaatttgctccttagttcagctaaaactggattcgcatcacatgaccaagaaggattaggaatgcagacacattgaaaggtgaggggaatggaatttactgggtgaaaaaggaaaagaagaagaagaagaagaagaaaaaaaaaaactcscagcaaagtgaaaggggttcctgctaacagccccccgcccacctcacagacagaatctcatattcatgagaataaatattgtatataactgatatccccctaaacagaaggtatgtaaatccacccttccaccaatattaattgaaaatccccaatgggaaccagttatattgtccaagcatgcatggtgtagagtagaagctggagtgctggtagggacaaattcttcattttctagccctctgtagagtgtttactcggactcatggcaaaagctcatgaacttctcccagcaacaactacgaggacttgggactagaaatttttcacctgaggggcatttcctgccttgctgtggaacgttaaataaagctatccatgtgaccacaggg

SEQ ID NO: 170645 - DNA, 581 bp, Homo sapiens
tcactgccttaacttgaaagtggcatgtcttctacccgtactctgttgtcttgaactagttacatgaacctgcctaactgcaagagggcgagaaattgcagttttcaatgtgccctggaagggaaggagtattggaaagtaagaagtactcatgaaatctttcttctaaggcactttgagcaattataccatcccattactgcccacatctggacatcttgctatrtaagatcaataaatatctattcattagggccactgtaagtcagatttttgttcactgaattcaaacagaattctaacagttaaaaagtgtttaaattactttaaattatctatccaagtttacattcatggaatttaaaataaatagggtatttttagttataatcccatattactatataactataacactaatcagacagatagcaccagaatttagtgggcactgaaagagaagacatgttgttccaaacttgcagacagtggaacccagaaatttgctatgttctgctgtgtttgtttccttcactgtagaaggatttctatagaatggagtgggcatatatttatagtct

SEQ ID NO: 170646 - DNA, 520 bp, Homo sapiens
aaagggagcaaatatcaatcttgaattaccaggaggctctaaaaatgattcttcaggttttagttcttaatattacttaatccaaattaggctgttttcttcctttagaaataaacaaaatggcatcattcccaccctactcctgatctaatgtaytatggaatagcatattagacttacaaagcaatattttcttagtcccatcctatatgagaattttaaccaatgatatctgttttttttctagctctactttctctagagatagtccatgatgttagagaacttttgctaacagatctttttcttatactataaatttgctttgtaaattagagtcataaatgagaccagattctgatttatccccctttatgatatgcatgattgatatttgagaagcttgttttttcagatttatagcaggaatactagcccaaatgaggtatactgtatatttttctctgatgtattgagagctggaatctgggacacagttaatttaaaaggcagaaattaa

SEQ ID NO: 170647 - DNA, 520 bp, Homo sapiens
aaagggagcaaatatcaatcttgaattaccaggaggctctaaaaatgattcttcaggttttagttcttaatattacttaatccaaattaggctgttttcttcctttagaaataaacaaaatggcatcattcccaccctactcctgatctaatgtattatggaatagcatattagacttacaaagcaatattttcttagtcccatcctatwtgagaattttaaccaatgatatctgttttttttctagctctactttctctagagatagtccatgatgttagagaacttttgctaacagatctttttcttatactataaatttgctttgtaaattagagtcataaatgagaccagattctgatttatccccctttatgatatgcatgattgatatttgagaagcttgttttttcagatttatagcaggaatactagcccaaatgaggtatactgtatatttttctctgatgtattgagagctggaatctgggacacagttaatttaaaaggcagaaattaa

SEQ ID NO: 170648 - DNA, 520 bp, Homo sapiens
aaagggagcaaatatcaatcttgaattaccaggaggctctaaaaatgattcttcaggttttagttcttaatattacttaatccaaattaggctgttttcttcctttagaaataaacaaaatggcatcattcccaccctactcctgatctaatgtattatggaatagcatattagacttacaaagcaatattttcttagtcccatcctatatgagaattttaaccaatgatatctgttttttttctagctctactttctctagagatagtccatgatgttagagaacttttgctaacagatctttttcttatactataaatttgctttgtaaattagagtcataaatgagaccagattctgatttatccccctttatgatatgcatgattgatatttgagaagcttgttttttcagatttatagcaggaatactagcccaaatgaggtatactgyatatttttctctgatgtattgagagctggaatctgggacacagttaatttaaaaggcagaaattaa

SEQ ID NO: 170649 - DNA, 322 bp, Homo sapiens
caaatgttgcagataaatcaagtgagataagtattaaattaggaactaagaagttattgctcattttgtaaaagacagttccagagaaatgatgggtaagctagtttaatrgtaatcgattagggagcaaaaattgatggtataaaagagaattaagaaaattggggcatgacactcctgagtagttgagaaggaacagtgcacaaatggaggaactacctttagatgggagtcagccttcactggaaacttgtattgactaaatttgttagtttaaatctaaatgtttagtattattttaaccaactaataaaaataaata

SEQ ID NO: 170650 - DNA, 662 bp, Homo sapiens
gactaaatttgttagtttaaatctaaatgtttagtattattttaaccaactaataaaaataaataattgtgcaaaacgattttaataaaacaaaatgtattacataccttattgcattcttaatttgaataacattacatagattttctatgttatataacctgcatgccatgttttcactaatattctgatcttgataaccatattgttcccttgacttcagccagtatttcatttttaatgacttaaaaattcttattcttacttcaaactatatatcataattaagtcaaacatccaataggacatattctttttggaatagtgcttatctgcaacctacatcttaccaattgaaatcattatttatcttctgggcccaatgtattaaaatgtctttctgacctttctattattatttacatattttccataatctaatctgaagaaattactattactctctttgatattcaatcactcattccctaactttagtctttgaaaatcagcctttaaccttttatttccatatgcagaccttccaaattaatgaaatttcattcagcctctggcatagagcagccccctaaatggtcttttaatcttcactttcttcttctgyctcaccctttagttactgtaactttttcctccttcct

SEQ ID NO: 170651 - DNA, 550 bp, Homo sapiens
caactttacaattaagtaagctacacactcatcaaaacattcttgctctcttgacctctcttactcttccacatcttttctttcttatcactctctagacagagtgtaggggtaccttatttatgttgattactgcttttgttctagattcagctttggctccttgttgatggatgacaatgggtaagtcatgtcacctccctagatctcaggttctcacctataacatccaaggtttctcttaattctgatattatggcattgtcagcttagacgctatgacagaaacaaagaagtaaaacrttcactaaatacaatactttgtaaataactatttacaaagccttggatggagagttggattagatgctctttaaaattatttccaaacttaattttgatttttactagaattccatttgtttaatgtttattcaacaaatacttgttgaggtgcctgctacataacagcattgttctaagtgcttctgtgtctaaagcaccaaagaggcctgctctttcttcccttgtctgcatgaaagtatttcac

SEQ ID NO: 170652 - DNA, 608 bp, Homo sapiens
acaggttttgtcacatggaacgctctgttttatccatccaatacaatagcatgtattgttttcttaaattacctttttttgttttgttttgttttgttttgttttgagacggagtcttgctctgtcgccaggctggaggtgcggtggcacgatctgggctcactgcaacctccacctcccaggttcaagcgattctcctgcctcagcctcccaagtagctgggaccacaggcatgtgtcaccatgsccgctcattttttgtattttcagtagagacagagtttcaccatgttggccaggatggtctcgaactccagacctcgtgatccacctgccttggcctctcaaagtgctgggattataggcatgagccaccacacctggcctaaattatcttttttaaaatcaatcatagacacgtttttttcttaattttgaagaaaatgccccaaagtagacacatctttttccagttctgcagaaaagtgtgccatgaaatcaaaacaccatgtgtggcagcttcagcttagcctatgtccctgaaccaggcctagtaagatattctacattttgttatctttgagaatattttccaacatctgcttctat

SEQ ID NO: 170653 - DNA, 593 bp, Homo sapiens
ctccatctccataaagtgattctttcacattgcatgcctgtaacaaagtatctcatgtacgctgtaaatgtatacacctactatgtacccacaaaaattcaaaataaaaaaatttaaagaaaacaaacagcagtgataatagagtatatgaaggaaaatgccagagggatgcacccggaactgtgggagttagagcatcccccatttaggtggcgtcattgttgagaatggcatctctaaggaaggcacagctaaactgaacctgaaagatgagaaggagttagccaagcaaaaaggaaaagggaagtggaggatgttcccaatagatccataatatagtctacacaccagcaccatgcaaacaaaagaattgtgctaaaaagattttttaaaacaactatccatgtttaaattacatcactgaaataactgaagaatgagttggcatggtatctggttccgtgtgctcttgaacaactaactggckgatgacaatgttccagcacaactccgggcacagatagagtggcacggatcagagctgaggctcagaaatgactgtcagaagccatttcatgttgtgaaaatctcat

SEQ ID NO: 170654 - DNA, 487 bp, Homo sapiens
agatctccagaaagtaagggtcccattcccatttttataacagatcctggatcccmaaaagaggggatcagctcatctcccatgggattcttatctctcagttgggggtggggacatttccataatttctaggtggccaagagcatgcttctcttatccaaacatgcagagctaagtatctccccataatcgccattagctaaccccaaaagtatatttccaacctagttactacataccaaacctctcttataatgcaaagtaatttctgataccccccaaagtcaaaaatgtcagataatgccacgcaaaagagaacagagccttagatttttgagagggaactgtcaggtggctagaatacagtaagccaggagtaaactgtcagagatgaagaaagagaggtagccaggagactagtcagagacagccttgtgaccactgcaaagaccatggattttattctaaatgtgacataaaggtattg

SEQ ID NO: 170655 - DNA, 620 bp, Homo sapiens
acaaagtaattaacacaactacattcaattatgagagataatttggaactatcaaacagtaactttaaaacaactataattaatatgttaaaggatctagtgaaaaacgtcattaatttgcatgatcacaaggaaaggatcagcaaaaagatggaaactataagaaaaatgctagaatgaaaagcatgataaaagagatgaagaatactggagaatgatgaaagcatgatgatgaataggcattgtctggcttcattccctctcaccctcaagaaatctaactagcaattatccacaggcaaaaataccatcctgaatactgggagtaaatgtgacacccccttggactgaagaacctagaaaagctgcaatcaaatgacaagaggagaaattcttttgaaccacactgcaccttcctcaagccagcatagtgccacacagagataatttccccrgacccacaatttctgtagtagaaaaaaaatgagttggagatggatagtcaacttccccaccattctctctttttctttcctcaggaaaaaaaaaaaaaaaagaaagccttatcccgctgagggaaaaacaacaacaacaacaaaaactatgtcaccatcagggct

SEQ ID NO: 170656 - DNA, 499 bp, Homo sapiens
acagggaaatatttaacatactaggaaaaaaaggtttaaattcattaacattactattgtaatgttcatatactcctcttttcttaggacacactacaaatgattttatagtgtttccatttaacacacatagtagcttttcttctggattgtatgtgcagtgccattgaacagaagcataaaattgtcagtggcctacattttttagattatttaactatgattagaaatattttgatccattttttcacttcagctctttttcatattagtgcacacttgacccttgaacaatacaggtttgagctggacgggtccacttatatgcagatttctttcagtgaaagttacactgagtgcttctgcctctcctgcctcctcttccacctcttctccctcttctgcctctgttacccctgaaacagcaagaccaacccctcctcatcctcagcctcctcaayatgaagacagtaaagatgaaaacctttatgatgatcca

SEQ ID NO: 170657 - DNA, 521 bp, Homo sapiens
atgaaaagattagctagaatgactctaggaactgttttctaaggatctgactcattgattcctttttttggtagggttctctgggccaagttagttcgagtatttatcatttaaattaggawattaccatcaccatcatcatgtacattcataaatcaaagcaagattagagaaggaatatggtggatcacagagcaactcagaaagacgacagcaacaactaggaaatgaaacaccatggttgtatttcaggaaccctacccagcagataggaattaccatagctcctaaaattccatctgggtggttgatggagcctcaattaatctgacaccatagcccatgctcccctcttgctacctgctgaagttagcagggaaaagtcaaagagggtgctgtcagtggggtcaattcttagggatcatagtgaaccaccctccattgcactgactctttcccacaaaatgggctagagatagcagctctccttatgtatttaagaaagaatggtcaaaaaatac

SEQ ID NO: 170658 - DNA, 593 bp, Homo sapiens
ttattcctcctgtctaaatgaaattttgtgttatttcagtaacatctccccaatcccttaaccctctagcttctggcaaccactagtctagtctttgcttctgtgaattggacatttttagatcccacatacaagtaaaatcattcagtatttgtttttatgagcttggcttatttcacttaatatcatgttctccaggttcatccatgttgttgygaataagaccatttccttttttaaaatagccaaatagtattgtattgtgtataaaaaatgtagtatatataacattttacttttaaaggaagaaaaagagactaacacactgttattattttttttcttaagcaagctaaatcaagatctctttttgaaaattatgctggcttatttttcatgtttccatttcaggatagaaagaaacttcttccaatgtcacaagtgaaatcagagaattataacagttatccacatggctcagatttctgtactgaggaattagaataccacccatcttcagacagtctgtcagaccagaaggaatctctaggtgcaaagtcctatcatcttctttattacccattctgaaatca

SEQ ID NO: 170659 - DNA, 541 bp, Homo sapiens
aaataatactgtgtttgattgcagtggtagttacacaaatttacctatgtggtaaaatgatatagaactacccacacactttacatcttggttattttctggttttcatattatactacagttatggaagatgcagccagtgggggaaactggatgaaaggtatacaggacctctcagtactatttttgcaactttctgtgartctataaatattcctaaatgaaagtttcaaaatgggtaattacaaacaagttgtgcagtggaaaattattattagagtaggtgaagtttattcaaattgatggtagagtcatattattttatatttactttataaaataaaatgttacatagttaaagataacattgcatatttaaattttattaagaagagaagatcatactgatgctggctaacatagaaatatgatttaaatattttcttcaaaaccataaccgttatattaaaaaataatcaactcttacatgcttcagtagcactctctatgtatacttacagcaaccttacatgtaagcact

SEQ ID NO: 170660 - DNA, 634 bp, Homo sapiens
cgcctcggcctcccaaagtgctgggattacaggtgtgagccacaaagcccggcctgcattgatattttcatttcaatgattattaactataactagagtatatgtgttcactatgcatgctttatggaacagggtttagcaatattttgtttgtggtatgtttattttaaatcaaactctaacagattccatttatactaggttggttcaaacaagccagtgataaaactactttttagcaacagtgattgtgattctgagaaaatacgtatataacactcaaacttttmatagtaaatactacagtttttccattaaaattatttgggtagtaaacacttcacgaaatgtaagaaaaagaagcctttgtgttgtagaagctgtaatggttatattgcaattaaattgcttataatcaaaaaggagctactgcaaaaaacaaaagaagccagacagaaaattctgatatgcataatatgacatatgcatagacattaaaagcccagatattcaaacaatatttactgagttgttaggtataaatatgcttataaaattggctgacaaaatgagaaggaacaaaactgccattacttaataaagttgttttaagtatatctctacatagatatac

SEQ ID NO: 170661 - DNA, 529 bp, Homo sapiens
atctcatttacatagctgttttttagaacccaatttactcacaaggttacaatggtaaatctagactttaacctaccttttgcaaatrtaagtcatgaagaatgaaccaactccaaacacacaacaaacacatcagcataagcaaattcaactattgttagaacctaagattaacttgagaatcaagacctatagaattttaacaagttgaggtttggaaaataactttttttttctataaaccccactatgcattttatcacctacaccattattgtaaatatggaaatgaaatcttgtgcattaagtttgcctttaaccgtaagttaaatttaattgaaaaaacagtgtgtactttcttcagactgaaagtttttcccccaaaattttaccttccttttttacttctctaagtggggccagaacaatttcaataactcctttagcctttggctactgctctttgtgctactctactaaagaagactgcagaagagtattttcactttcttttgttcaacaacaacca

SEQ ID NO: 170662 - DNA, 370 bp, Homo sapiens
gaaattctctgttattatacctttgaaaaagctttctatctgtatcactctacctcctcgttaagaccaataactcttagatttgcccatttgaggatattttctacatcctctaagcctgtttcttttttatttttattttttgcctccyctgattatgtattttaaaatagcttgcctttaagatcactaattatgtcttctccttgatccattctgctattaaaggactctgatgcattcttcagtatgccagttgtattattcagctccagtatttctgcttatttttaattatttccatctctttgttaagcttttctatttctgagttacttctctgtgttattttgaatttatttgagtttcc

SEQ ID NO: 170663 - DNA, 535 bp, Homo sapiens
tgacaactctcagttgtttgacctcagaaacattacactttgaatttagttcctcaaccatgtaatgagtaaatccccaaaataacataggaatattgtacagattaaccaggccaacatgtatgcagtccttaatatagtacattgtccatattcaggactcagtaaatgttatctctgtctctttagtacccaaattaaccttgaacktaattgtgtacttgatttacatcaagtgaaatgatagttaatatgttcaatgtactcaaaaagtccttaatatttaccaaatatgctccatagaaaaataatgtcttcaagtgttctgccaaaggaaaaaaaaaaacacattaaaaagcattatgtggccaaggaggtttatgaattagatggcagtagatagacaaatctagatgtagatttatcagtcccccatcttatatattcataatgttcaggggcatattaaagaatctgataaatcttgtgataaaaacaagtctgttgaacttatggagtgggtttttgacccctg

SEQ ID NO: 170664 - DNA, 535 bp, Homo sapiens
tgacaactctcagttgtttgacctcagaaacattacactttgaatttagttcctcaaccatgtaatgagtaaatccccaaaataacataggaatattgtacagattaaccaggccaacatgtatgcagtccttaatatagtacattgtccatattcaggactcagtaaatgttatctctgtctctttagtacccaaattaaccttgaacgtaattgtgtacttsatttacatcaagtgaaatgatagttaatatgttcaatgtactcaaaaagtccttaatatttaccaaatatgctccatagaaaaataatgtcttcaagtgttctgccaaaggaaaaaaaaaaacacattaaaaagcattatgtggccaaggaggtttatgaattagatggcagtagatagacaaatctagatgtagatttatcagtcccccatcttatatattcataatgttcaggggcatattaaagaatctgataaatcttgtgataaaaacaagtctgttgaacttatggagtgggtttttgacccctg

SEQ ID NO: 170665 - DNA, 542 bp, Homo sapiens
gtcctgtttctaagttcagcttgattacatggcatctaacacaattgactctataatgtatcagtttgttctatgggatcctagtgcaggatctcagtccaaaacaatggcctctcagtttttttaagcataatcacaatcaaagacttgaacaatgagaaataaaatggaaaggttgaggttacagggggaaaactcttgtaacctagtcaatagataagtatctataagaatttgagcttgatggtcatttgaatactacaatgaaaaaaaaccacaactgtggaatttatgggaatctcatatatacttgcataaatggagatcccaaaagaagaaacaaactttaaatgaggaaaggtacaataaagtagratatttgctcccaagtaatttctattcatctaccctcaaagatatattaccttgggttgtttctaaaatataattgagaatgaacttttgtttcagcagatttaaataaaacattataagaatgacttttaaaacatgtggataaggaagattcatttgcccagatc

SEQ ID NO: 170666 - DNA, 505 bp, Homo sapiens
cctgcttgggcatctgaggctgtgctacatggccatggccatgctggggcccttggagaggccagcagacagggtggtactcagattggactgaccccatctcatagacaagaccaccctattctttctaggtctgrtactcatcccaaggctaaagtctcttagaggagcatggtaagccttgggagatgggcatctctggccggccattctccactgcagacatttctgccccaaaccttctgagctctgcacagactggagtactgcccttactgcctctctgagtagctctccctaccagctcaagtttctgtggtgttcatgggatctgctgatgccaggattctagaggtctgcagcaatagtgggacattcctcacttgttcaactcacgccttccccatgagtctctagagaccaggaagaagttcttgtgctcagtagtcccatgcagggttccctgctacctctcttttcagctcagcatctgcatccttcctct

SEQ ID NO: 170667 - DNA, 488 bp, Homo sapiens
cacagtgtaggtccaagaaaaagagctggcagggaatactgactccttttgtttggggctcctgggaattytaagccactgtgccaacacctaagttagacttaaaagggtatttacaatgtattggatttctttttacctacctatctctggctggttcttcatcttcctatcttctgctgaggaggaaatcagccatagatctcatatcatctcctgagaaaaatttgtcattttatggattttatttcattatcttttcttgccacctcagctctctgatggacattaaaacacaaacccccccaaaaaaaaaaaaaaagactataatttgtcagtttcctttccttctctttttaggatataatttatgttttcttacaactttctccaccctaagcacaagctaaaactctattttatttttatttttagctgtgtccacatctactcaacctagaattcagtttcagaggttgtcatgataa

SEQ ID NO: 170668 - DNA, 525 bp, Homo sapiens
aggtaagaatagacatcctttctgcatttctgatcttagaggaaaagcattcggttttaatcattaaatgttttatcatatatgccctttatcaggttgagaaattttgttagtttgctgagagttttaccataaatggagattcagttctgttaaatgcttgagactactgttatgcatttttcttcattaatttaatggtatgattatttaaatatccttgcattcttgcacttaattatgatgcattatctatctgtcattggatttaattttmttaaactgttaacaaatttttgtatttatgaaacatgttgctgtgtacttttcttatgtcttgggtttaagtgtcaggataatggcctcatataatgagtttgaaaatgttttctgcaactctgttttctgaaaaagttgtaaaattggaaatgtttcttccttcaatgtttggtggaatttaccagggatatcatctgaaactggagttttctttgtatgaatgttttacctgaaattccaatttct

SEQ ID NO: 170669 - DNA, 575 bp, Homo sapiens
tggcttttttttaggccccatatataatctatcgctgttgattgtagaattaccacctgaatgactctcacttgttttctcccacttgttcaagctctaattattttcttcctgacctgactttcaagatcaacacttgcttcttctaatctggtttctccagcacaggcacaacaatcttcccattactcaaatatattcctctcctgctttacaccctccactgccttctcttttctctacagttaagtacaaagctttctgacataagtgagcacgatatagaatagaaagcctgaacaagtcyagatgtcacttgtttcttgtctctttttacatcaggtgccccttgtaggcagcactccagccttcttttagtctccagtattgacctgaagcttctagaaggtctgtttctcatgttgtggcctcttcttggaggtgcctcactttgctttttctcctggaagaaacctttcctcactctaccaacaagtccaattcctcctattcaccctgaaagtctatttatgtaacctttatcatgattgaccattatggagtttttactagat

SEQ ID NO: 170670 - DNA, 373 bp, Homo sapiens
tgcctgctcaccattcctaattaacaacatcctgaaagtccaaactagtgcaataaggcaagaaaaagaaataaagagcattcaaaaggagggaaaaaaactgcctctatacacagatgacatgactgcctacacataggaaaacacccaggaatctaaacaagaaagttcctacaactagtaattttaagactgcaaggttgctataaaaaaaaaaacaaaaaaaaacctgcatttctacacagtaacaaggaacaatcaaatattgaaatgaaaaaaaaaaaactatttacaatagcrccaagaaacatgagatatttaactataaacctaacaaaaatgtgtgcaggatctatttgccaaaaactacaat

SEQ ID NO: 170671 - DNA, 558 bp, Homo sapiens
ttactaaattacagagaaaagatacttacaatttttgcatttttcccacttttccttagttgctgaacagcaaaagcatgttcaacattatccattgaaactccgttaaccattgcaactcggtcattttccctaaggggaaaagggcacaaaataatatgttagagaaaaacattctggtaagtttatgatgatatttccaagataggtacttctaaaatgtaatctaattatgagccaattaattaatttctcttyagatcaatgataaaataatgtcaactgacttactttcagatttctctgcagaatgtttaacaagtaactaaccacaggtccttaatttttttaagtcattaacaaagtatttccccaaaagactgaacagatatcacatacacgaaatgattcttggtagtacagttacagggcattaaatgatactaagtcatacagctggaaaacttactcccttttaagtttttcatcttttaattctcttttaattcttctaattatagtgccactattttgctagtgtattttgtgtttctcttt

SEQ ID NO: 170672 - DNA, 612 bp, Homo sapiens
acacaacaatttgtcacagggtttgaggatatagrgataaaagatacagaccctgccctcaagaagatttttgtttagataggaaaaattattatcatccaataataccatgtcacaaatgctgggatagagtcaaagattcttgaaaccagtaaatgtttaaagtgagttttcaagatgaccagggttaatgtggtgaggcagaggaggggtgtttccaagggaagagcagtgtgtgggaaagcacggaagagtgagaaggaaacaactacattttatttactttctatgagtataagtccataggatctttatataaagtttccaattcagttgagaaatatataattttttcagttacatattatttttggtttctattgttttacagggtggcctcacaccacttttgcttgctgtacatggacaaaaacagcgaatggtgaaatttttaatcaagaaaaaagctaatttaaatgcacttgataggtttggaaggtatagttatttcttttaatctctgtgttgttctagattgatagcagtcactcaagtcataaatattaaattaataatactaacttatacttattgggacatagttatcagtag

SEQ ID NO: 170673 - DNA, 523 bp, Homo sapiens
agtatttaacataaacttgagagtgagtgccagtattatatttaggatttagggactagataggaaaactggatagaaatctaaagattgctgactcaaacacaatgtggtttctttgctttattttcacagctctgaattcacaactattagttatatttatatgcactataactttagaaagcaccttcccaaaccaaattttatgtgatttcttataatttagatgactttattatagaattgaatttccaactgttcataagaattattgagcatttgctrcatagtatcatctcagctgtgtccacatgagctacctatcaccttgtgttaatgaataatggttcaccaggaatattggttttggcatttaaagtgatctgtatttaatgcagataggaccagggaccactcttgaacattaatgtccaagcatcttaaaattacacagaatgctttcataatcagaattctgcctcactctccatctttagcccttttccccatgtgccctttctct

SEQ ID NO: 170674 - DNA, 373 bp, Homo sapiens
cctctgttactcagttccaaagtcacttccaccttttcacattatctttttaacaataccccactatccctggtaccaattctctgtattagtccattttcacactgctamaaagaaatatctgagatggggtaattcataaaggaaagaagcttaattgattcacagttacacatggctggggaggcctcagaaaacttacaatcatggtaaggtgaaggggaagcagacaccttcttcataaggtggcaggagagagagaagtgaaggggatagagccctttaagaaaccatcagctcttgtgaaaactcattcactatcatgagaacagcatgggggaaaccaaccctatgatctaatcacctcccacca

SEQ ID NO: 170675 - DNA, 636 bp, Homo sapiens
agagtacctggaactttaacgaaaagacttacttgtttttaaaagtagaacgaaaattaactgaataccaagaaaacacattgtcagactttcacgctaaattaaccaatactgaaattgtttaaatacacagtttgaatgaacgccttggtctaagtcaaattacctatgacaacccttcagttgttactgctataaacctaaattggagaaacaactggaattcaagactacataagttcaatgttaagcatggactcatggagaaccaggacagctgccttatccttcctgagtccatccttaaagctttcattattaaaagttctgcattccatgacttatcatagaaaagataaaatgatccaagttaaatatatattggtgtggtgaattctaaattgctaaaatagcttatgaccaatgtttggtttgtcaaactcatattcctggaaggacaatgaaagcttcagatacaatccactacctgatgggccatttaaacatttataaagggatttcattgaattatcattttcagtgcgtgttttctggttgtattaaagctttcccatgcragagagctgatgttataacagattattatgccacagtgtattttcaccaggtaaaaaa

SEQ ID NO: 170676 - DNA, 495 bp, Homo sapiens
ttctggtggactttgagggaatatccaagaaggcctgtctctctagattcttctaaacctttctgagttagcatttcttctttttagctatggggcacctataacctatagtacaacaaggaaggtcagataagttctttatggccagttcytagacagaaatttgaagaaaaaattagattaatactttaaaagttttatggctggctctgaacaaaaagttacagattctagggcccacctggaaaatgaagattctagtttctgtggccaggcttgagggaaactggaactgaggaacacaaggacaggagaaagccaaataaaaagttttatttctgagggtgcttctgaaggtttcattttggggtattgtttttttcagtccaacatatgtccaaagtgttcaatataattaggcaacttcccatgctgtggctaagagtcacatattctgctcaagacttctatgatatagtgtttgcatgttacact

SEQ ID NO: 170677 - DNA, 459 bp, Homo sapiens
tggaacttagaatatattagaactggatataagcagataatctatctagatacataacactatcatattacagtatagcatttgaagtagaatctaaaaattttcttctctttctaattggtgttcattttggcttctaataatttggcrtttgcctaccctacagttaatctttagaagtataaattcactgtaggggttcactatttatggtatgctgaggtaaaagtcttttaaagagagaaagcttttataatactacatatcttctgtgaacctatttctggtagatttaactcataatgaattaaatttagtcccaagaaacaacgagagttaagcttgatggttcatgtttttctcctgtgttagaccaaggcaaattagtttttacttcttagttataatccagtagcttaggggtagcaaaacatagaataagcttcacagttaaatttt

SEQ ID NO: 170678 - DNA, 450 bp, Homo sapiens
aaagatacaaggtctactttttctatgctacttacctcattttatttaagaagggactgggaggaagagatgtgtccatttggctccctaatatatgtgtagtgtctggtgtggttcctggcacacagtaggtattcaaagaatataagttgttggatgattcattacagttttagaattaatagaaggctggccctaccggacattctggttattaaaggagaatcagttatgattggtcagagtccaggccacactgaacagtaccccagataaaagcaatctttgctgcacagtgagagagtcaccaatcagragataattatcaagtgttgacattctgcccaaaactgtttcagacttcctggggataaaaaggaagaggtaagaagagacaaaataatcacacagaaaataattagaacaagcaagtatacccaacagttatat

SEQ ID NO: 170679 - DNA, 467 bp, Homo sapiens
aagtaattgctaaaagatacaaggtctactttttctatgctacttacctcattttatttaagaagggactgggaggaagagatgtgtccatttggctccctaatatatgtgtagtgtctggtgtggttcctggcacacagtaggtattcaaagaatataagttgttggatgattcattacagttttagaattaatagaaggctggccctaccggacattctggttattaaaggagaatcagttatgattggtcagagtccaggccacactgaacagtaccccagataaaagcaatctttgctgcacagtgagagagtcaccaatcaggagataattatcaagtgttgacattctgcccaaaactgtttcagacttcctggggataaaaaggaagaggtaagaagagacaaaataatcacacagaamataattagaacaagcaagtatacccaacagttatatgactc

SEQ ID NO: 170680 - DNA, 539 bp, Homo sapiens
ctgaagcctgccacaaactttcctggccttttcatcagttaaaattggtttacatacccattccttaaccaatgaatggcaagagtttggcgttgctattagatcaatgagaatcagactagtgaacttttccaggagcaaatggactgtttggggatatgaacagataaagaytcttaatttgggatctattagaagaaaagccaactctctcaagacaatcaacaatgtccactgtgtcagctgaagaatgatgaggtttgtaaatttagaaaggagagctttagttttcataaagggctgtagcctgcaggtggccattctgacaggctgggaagtgtagcctctggtcaggagctggagacaaatacttgagggaggggcaaagggaaaaggagtttatgctgggtggggtgagcaaatatattcaatataaatatattcaataaaccataggagtcacgaatacttatgaaaggagaagaatgtgcatatccagttgagcttcatgcctcttcatgggtcccatctacaaaaaa

SEQ ID NO: 170681 - DNA, 539 bp, Homo sapiens
ctgaagcctgccacaaactttcctggccttttcatcagttaaaattggtttacatacccattccttaaccaatgaatggcaagagtttggcgttgctattagatcaatgagaatcagactagtgaacttttccaggagcaaatggactgtttggggatatgaacagataaagactcttaatttgggatctattagaagaaaagccaactctctcaagacaatcaacaatgtccactgtgtcagctgaagaatgatgaggtttgtaaatttagaaaggagagctttagttttcataaagggctgtagcctgcaggtggccattctgacaggctgggaagtgtagcctctggtcaggagctggagacaaayacttgagggaggggcaaagggaaaaggagtttatgctgggtggggtgagcaaatatattcaatataaatatattcaataaaccataggagtcacgaatacttatgaaaggagaagaatgtgcatatccagttgagcttcatgcctcttcatgggtcccatctacaaaaaa

SEQ ID NO: 170682 - DNA, 243 bp, Homo sapiens
tgttttttaggtcatgaagctcccagactttgggctctaatgtaatttttttgtattttcaactattattcataacttttttcactttttatcacctgtgcctcctttgaggaagagagccaagtgaggcagagtaagargcaacaaacaaaaggtagaaaacaaaagaaggatatacaaggtagagacaaagaatgaagtattcagattagatgctctaatatgacccaggtcaatacaatt

SEQ ID NO: 170683 - DNA, 398 bp, Homo sapiens
actccttaaacaagatgaatcagttattatactggctggcaaaggttgatttttataattccaacactctttctagatgtatgagttggcagtcccttgtaagaaagagtttaccttgtcccccaattggcttgttttactcgagactcatgaagtttaatttactaatagagtaaaatcctttaatttactatttttattttgatactcaaattgtccctggttttgccaatgggagccccttcgagctrgctctttcatatttttggtatgtcctcatcatcctttggtatgatgaaatgtcccaggtttatcttattctttctgtaaactacccctgcttagccatttttattttcagagaaacctggctgtttttagtgaagaatggtatttag

SEQ ID NO: 170684 - DNA, 598 bp, Homo sapiens
cttgtctttgaactttggttatgatgtctttgttctttttggtctgaaactttcttcttcttataaaatrttgcttaatcttttaaaaagtttatgttcctaatccactcgtaattttattgtattttattttatttttgagatggagtcttcctctgtcgccaggctggagtgcagtggcccaatcttggctcactgcaacctctacctcccgggttcaagcgattcccctgcctcagcctcctgagtagttgggactacaggtgcaggccaccacacccggctaattttttgtatttttggtagagacggggtttcatcatgttggccagatggtcttgatctcctgacctcgtgatccgcctgcttcagcctcccaaagtgctggattactggtgtgagccacctcgcccggccacttgtaagtttttaatgatgtaaagaaccctaatttatattttccatatggaaagtcacttatcgaataatatatattttctctaccaatttttaatattaccactgtctttacactaagttccagaacctgcttgggtttgtgcatactttattctgttccattgatctatttatcttt

SEQ ID NO: 170685 - DNA, 466 bp, Homo sapiens
ggaaagaaagcatgacttaaaggaagtaatacaaaatttgaagtcaagataacagcattctagtctcgcttttacagcataacagtcataagaccttgtctgggcactgtggttcacacctgtaattccagcactttgggaggccgaggtgggagcatcacttgaagctaggagttcaaggccacactgggcaatatagcaagactctgtctctaaaagaaattgaaaaaaacttagcctggcataatagtgtgctccatagtcctagctactcaggaggtggagatgggaggatctcttgagtgcaggagtttgaagttacaatgagctatgatcatgccactgcactgcactcgagacwgggtgacagagtgaatctctgtctcttaaaaaaaaaaaaaaagagttatggagtcacttccaagatggctgaataggaacagctctggtttgcagctcccagtga

SEQ ID NO: 170686 - DNA, 577 bp, Homo sapiens
gaaatgatttcacaaaaataattgctgtgtggcatatgcgagacagctatataagctacagattaaaacagtctttgacgttttttcacctgaatagctctactccctccacacacatgcccgcccccaccccccccacccaatacacacacacgttgtaaaaatgaaaatgttaggccgggtgcggtgccttatgcctgtaaccccagcactttggtaggccgaggcaggcagatcacttgaggtcaggagttcgagaccagcctggccaacatggtgaaaacccgtctctactaaaaataaaaaaaattagctggamgtgttcacttgaacccaggaggcagatgttgctgtgagccgagatcacaccactgcattccagcttgggcaacagagcaagactctgtctcaaaaaaaaaaaaaaaagaaagaaaaaaagaaagttaggatgcttggagattaagtgacttggcaaaggttataaaattaacaagtggcaggggctgggaggacttcagtgtagtgctctcctgatctgtgttgtgaagactgattctgagcttgagcagtcactggt

SEQ ID NO: 170687 - DNA, 524 bp, Homo sapiens
tttcttcttcttctgctagtttcctgaagtgtaaaattagggtacttatttgaggtcttcttttttaatataggcatttatcactataaatgtccttcctagtactacttttgttctgtacatttttttctgcaatatttttatttttgttagtctcagggtattttctaatttccttattacttaaaaaaagtgtktgtgtgtgtgtgtgtgtgtgtgtgtgtgtatgtgtgtgtgtgtgttttagagaaaaaatattgctatattgcctaggctggtcttgaacccttgaacttgagtgatcctcctgcttcagcctcccaagtagcttggactacaggcacatgccactgcatcacctctgattattttctttgacccaattttgatcaaaagtacattgtttagtttccacatatttatgaatttttcagttttcattcagctattgattcctgagttcacttaatttcttcaaaaaagatacttattatttcaatatattaaaatttgttaagacttgc

SEQ ID NO: 170688 - DNA, 577 bp, Homo sapiens
ataaacaataatatttattataatttacagtaggaaaaatatgaaacaaacaaatgtacataagaatggaaattgtttaataaaatatattattttcataaaataaagtactgtgtttatatttaaaaataagatagggttgtatatgatgatatttaaaaatttttatgaattactatttaatagttaaaaattaaggtgcaatatggggtaattttatttaagattagtgtgattttatttaagaatacaaaaaggacattacatatatgggtttatgctaaaatattttcactgtctctgaggatgcttgtgaaattgttaactgtggtaatagttactgaaaatgattaggaaattagataagaagacatacttttcattgggtgcctctgttatactatgtgcctgataaatacctgctatacatgtattgtaaayattagatttgaacttgtagctgtctttggcaagtagcagatgttcaacaaccgcccatttcctttaccttacatgtatgtcaattcacagaatccattcaatacttcgacagacttttttttccaaaaatgtttat

SEQ ID NO: 170689 - DNA, 565 bp, Homo sapiens
gttctactcatttacattcccacccacagtacacaagtgttcccttttcttggcatcctcaccaacatccgttatttttttactttttcatgatagccattctgactgatgtaagatgacatctcatcttggttttaatttgcattgctctgatgattagtgatgtcaagcattttgtcatgtgtttcttggccactcatacgtcttcttttgaaaaaatacacacaatttttggtgagaagatttgaactggagcccagggctagactgagcttcctccagtctggttgacttgttcctctagggtgcttggtcaccagttgaatgacttaactctgactctttcccccccttgcttaatgttttatttccatgtctttatttctctttagccttaaaataaaggaaatactagcttctcaacctattttrtagggcattatggtcatcaaaaaagtaatgtattgaaaaatacaaaatactctcacagatatattattatttattccttttttgaaaataagaactaatttctcaattctaagaataaattacttaatttttt

SEQ ID NO: 170690 - DNA, 414 bp, Homo sapiens
atctgtcactctacttgaatccaatcagcaaaacaacagctctgcagttagctgacttgcttctaacctccatcatctaaagtagaatattaacctcttatatcgttattcaaaattgtcacctggggtttcagctcctattctaacaggtcaatagaagcatttcctgaagagaaacaggagtgtgtgtgttttgggagtayggaagatatttctactaagaaaaggagtttttctccacagtgttaacattagaaatctagcacctatcatttcacaaattgaatacctgaggcttagggaggtgaagtgacttccttgaaggagacaagtagcaaatgtggaggttcatgtctgcagcctatagaacccaggaaccctctttccactatgccagactaacctgggaaccca

SEQ ID NO: 170691 - DNA, 631 bp, Homo sapiens
atcagcaaaacaacagctctgcagttagctgacttgcttctaacctccatcatctaaagtagaatattaacctcttatatcgttattcaaaattgtcacctggggtttcagctcctattctaacaggtcaatagaagcatttcctgaagagaaacaggagtgtgtgtgttttgggagtacggaagatatttctactaagaaaaggagtttttctccacagtgttaacattagaaatctagcacctatcatttcacaaattgaatacctgaggcttagggaggtgaagtgacttccttgaaggagacaagtagcaaatgtggaggttcatgtctgcagcctatagaacccaggaaccctctttccactatgccagactaacctgggaacccaattagctgccatcaaaagtataagaattctttttatttgcctattatctctcatgataagtgaatmaatcacttactgagcacaattcctacaaagtgcaaaatgaccaaagtccccagagtagcttcctctacatcgtgagctgcaactccagtaaaagaggctggcaactctcaaagacaaaatgcactggactgtggagcatatgatttcattaggactatttgtaatagagagaac

SEQ ID NO: 170692 - DNA, 554 bp, Homo sapiens
cactcacagcatttttcaatggcgagtaagtgagctacatgatctaacaaaccattttcttactgaatttaaaattgtgttagttagacaytatcagtttccctccctgttcaccatgagcctgagttgtttccctaggcttggtaacatcctctcccctttccttgtccctgggttgctgttgtaaagtatgccatccctgtggttgttaattctaatgcaaatttattagtcaggccattctcagctccctatgatgggcgtagaaatggggaaggtacccttggtaggtaacttatctcattttgatttctaaatgatgtaaatgtaatagcttaaaaaaaaatctccatataactgttctctgcaccctctgattgggtaaatactcatgcaaattgaccatcttatcaaatatatttttatgaaagttaaagaacctgcaccacatacgtagcaagacaacttccagtcacttcttaccctctgagccttgggcttctctgcagctgggcaatgctgcacaaacagcataaatgctccagttgggcatt

SEQ ID NO: 170693 - DNA, 598 bp, Homo sapiens
aatatatgaagctttatacatacacatacatttttagtatgagggtatctctggcctattcacttaaggaaaaacataccaccagaaatggaattccctttcagtatcagaggttaatatgttaaatcccattgttagctaacatttttctaaaatayaccaactagaagtttgtcttataccctactctttactgctcctatcttacacgtatcattatgaaaacaaataaatgtccattttgtttccttttttaaaaacatatgataatcaaaacatttggtcaacgtctactccatctttttgtttatttaaagacaacttttatgaaatgatcatattggaagttatgatatccttcagctagttgcaaagactaaagaaaatatgctactcaaggtaaatgatttgtaacccctgagcagagtcacagtctctctctctctctctgtctctctctctctctctctcacacacacacacacacacacacacacacacattttagaatcttcaaaaaccacttccaatacaaactaggtatctgaagtaaagagatactcattttggctgaataaaaggcaaattcattttgtgt

SEQ ID NO: 170694 - DNA, 279 bp, Homo sapiens
cagcatttttcaatggcgagtaagtgagctacatgatctaacaaaccattttcttactgaatttaaaattgtgttagttagacattatcagtttccctccctgttcaccatgagcctgagttgtttccctaggcttggtaacatcctctcccctttcctygtccctgggttgctgttgtaaagtatgccatccctgtggttgttaattctaatgcaaatttattagtcaggccattctcagctccctatgatgggcgtagaaatggggaaggtaccctt

SEQ ID NO: 170695 - DNA, 598 bp, Homo sapiens
aatatatgaagctttatacatacacatacatttttagtatgagggtatctctggcctattcacttaaggaaaaacataccaccagaaatggaattccctttcagtatcagaggttaatatgttaaatcccattgttagctaacatttttctaaaatacaccaactagaagtttgtctyataccctactctttactgctcctatcttacacgtatcattatgaaaacaaataaatgtccattttgtttccttttttaaaaacatatgataatcaaaacatttggtcaacgtctactccatctttttgtttatttaaagacaacttttatgaaatgatcatattggaagttatgatatccttcagctagttgcaaagactaaagaaaatatgctactcaaggtaaatgatttgtaacccctgagcagagtcacagtctctctctctctctctgtctctctctctctctctctcacacacacacacacacacacacacacacacattttagaatcttcaaaaaccacttccaatacaaactaggtatctgaagtaaagagatactcattttggctgaataaaaggcaaattcattttgtgt

SEQ ID NO: 170696 - DNA, 598 bp, Homo sapiens
aatatatgaagctttatacatacacatacatttttagtatgagggtatctctggcctattcacttaaggaaaaacataccaccagaaatggaattccctttcagtatcagaggttaatatgttaaatcccattgttagctaacatttttctaaaatacaccaactagaagtttgtcttataccctactctttactgctcctatcttacacgtatcattatgaaaacaaataaatgtccattttgtttccttttktaaaaacatatgataatcaaaacatttggtcaacgtctactccatctttttgtttatttaaagacaacttttatgaaatgatcatattggaagttatgatatccttcagctagttgcaaagactaaagaaaatatgctactcaaggtaaatgatttgtaacccctgagcagagtcacagtctctctctctctctctgtctctctctctctctctctcacacacacacacacacacacacacacacacattttagaatcttcaaaaaccacttccaatacaaactaggtatctgaagtaaagagatactcattttggctgaataaaaggcaaattcattttgtgt

SEQ ID NO: 170697 - DNA, 548 bp, Homo sapiens
aaacactcacagcatttttcaatggcgagtaagtgagctacatgatctaacaaaccattttcttactgaatttaaaattgtgttagttagacattatcagtttccctccctgttcaccatgagcctgagttgtttccctaggcttggtaacatcctctcccctttccttgtccctgggttgytgttgtaaagtatgccatccctgtggttgttaattctaatgcaaatttattagtcaggccattctcagctccctatgatgggcgtagaaatggggaaggtacccttggtaggtaacttatctcattttgatttctaaatgatgtaaatgtaatagcttaaaaaaaaatctccatataactgttctctgcaccctctgattgggtaaatactcatgcaaattgaccatcttatcaaatatatttttatgaaagttaaagaacctgcaccacatacgtagcaagacaacttccagtcacttcttaccctctgagccttgggcttctctgcagctgggcaatgctgcacaaacagcataaatgctccag

SEQ ID NO: 170698 - DNA, 598 bp, Homo sapiens
aatatatgaagctttatacatacacatacatttttagtatgagggtatctctggcctattcacttaaggaaaaacataccaccagaaatggaattccctttcagtatcagaggttaatatgttaaatcccattgttagctaacatttttctaaaatacaccaactagaagtttgtcttataccctactctttactgctcctatcttacacgtatcattatgaaaacaaataaatgtccattttgtttccttttttaaaaacatatgataatcaaaacatttggtcaacgtctactccatctttttgtttatttaaagacaacttttatgaaatgatmatattggaagttatgatatccttcagctagttgcaaagactaaagaaaatatgctactcaaggtaaatgatttgtaacccctgagcagagtcacagtctctctctctctctctgtctctctctctctctctctcacacacacacacacacacacacacacacacattttagaatcttcaaaaaccacttccaatacaaactaggtatctgaagtaaagagatactcattttggctgaataaaaggcaaattcattttgtgt

SEQ ID NO: 170699 - DNA, 578 bp, Homo sapiens
tctctggcctattcacttaaggaaaaacataccaccagaaatggaattccctttcagtatcagaggttaatatgttaaatcccattgttagctaacatttttctaaaatacaccaactagaagtttgtcttataccctactctttactgctcctatcttacacgtatcattatgaaaacaaataaatgtccattttgtttccttttttaaaaacatatgataatcaaaacatttggtcaacgtctactccatctttttgtttatttaaagacaacttttatgaaatgatcatattggaagttatgatatccttcagctagttgcaaagactaaagaaaatatgctactcaaggtaaatgatttgtaacccctgagcagagtcacagtctcyctctctctctctgtctctctctctctctctctcacacacacacacacacacacacacacacacattttagaatcttcaaaaaccacttccaatacaaactaggtatctgaagtaaagagatactcattttggctgaataaaaggcaaattcattttgtgtttttcaacttatttttagagaaagctt

SEQ ID NO: 170700 - DNA, 578 bp, Homo sapiens
tctctggcctattcacttaaggaaaaacataccaccagaaatggaattccctttcagtatcagaggttaatatgttaaatcccattgttagctaacatttttctaaaatacaccaactagaagtttgtcttataccctactctttactgctcctatcttacacgtatcattatgaaaacaaataaatgtccattttgtttccttttttaaaaacatatgataatcaaaacatttggtcaacgtctactccatctttttgtttatttaaagacaacttttatgaaatgatcatattggaagttatgatatccttcagctagttgcaaagactaaagaaaatatgctactcaaggtaaatgatttgtaacccctgagcagagtcacagtctctctctctctctctgtctctctctctctctctctcacacacacacacacacacacacacacacacattttagaatcttcaaaaaccacttccaatacaaactaggtayctgaagtaaagagatactcattttggctgaataaaaggcaaattcattttgtgtttttcaacttatttttagagaaagctt

SEQ ID NO: 170701 - DNA, 554 bp, Homo sapiens
cactcacagcatttttcaatggcgagtaagtgagctacatgatctaacaaaccattttcttactgaatttaaaattgtgttagttagacattatcagtttccctccctgttcaccatgagcctgagttgtttccctaggcttggtaacatcctctcccctttccttgtccctgggttgctgttgtaaagtatgccatccctgtggttgttaattctaatgcaaatttattagtcaggccattctcagctccctatgatgggmgtagaaatggggaaggtacccttggtaggtaacttatctcattttgatttctaaatgatgtaaatgtaatagcttaaaaaaaaatctccatataactgttctctgcaccctctgattgggtaaatactcatgcaaattgaccatcttatcaaatatatttttatgaaagttaaagaacctgcaccacatacgtagcaagacaacttccagtcacttcttaccctctgagccttgggcttctctgcagctgggcaatgctgcacaaacagcataaatgctccagttgggcatt

SEQ ID NO: 170702 - DNA, 548 bp, Homo sapiens
aaacactcacagcatttttcaatggcgagtaagtgagctacatgatctaacaaaccattttcttactgaatttaaaattgtgttagttagacattatcagtttccctccctgttcaccatgagcctgagttgtttccctaggcttggtaacatcctctcccctttccttgtccctgggttgctgttgtaaagtatgccatccctgtggttgttaattctaatgcaaatttattagtcaggccattctcagctccctatgatgggcgtagaaatggggaaggtacccttggtagstaacttatctcattttgatttctaaatgatgtaaatgtaatagcttaaaaaaaaatctccatataactgttctctgcaccctctgattgggtaaatactcatgcaaattgaccatcttatcaaatatatttttatgaaagttaaagaacctgcaccacatacgtagcaagacaacttccagtcacttcttaccctctgagccttgggcttctctgcagctgggcaatgctgcacaaacagcataaatgctccag

SEQ ID NO: 170703 - DNA, 548 bp, Homo sapiens
aaacactcacagcatttttcaatggcgagtaagtgagctacatgatctaacaaaccattttcttactgaatttaaaattgtgttagttagacattatcagtttccctccctgttcaccatgagcctgagttgtttccctaggcttggtaacatcctctcccctttccttgtccctgggttgctgttgtaaagtatgccatccctgtggttgttaattctaatgcaaatttattagtcaggccattctcagctccctatgatgggcgtagaaatggggaaggtacccttggtaggtaacttatctcrttttgatttctaaatgatgtaaatgtaatagcttaaaaaaaaatctccatataactgttctctgcaccctctgattgggtaaatactcatgcaaattgaccatcttatcaaatatatttttatgaaagttaaagaacctgcaccacatacgtagcaagacaacttccagtcacttcttaccctctgagccttgggcttctctgcagctgggcaatgctgcacaaacagcataaatgctccag

SEQ ID NO: 170704 - DNA, 548 bp, Homo sapiens
aaacactcacagcatttttcaatggcgagtaagtgagctacatgatctaacaaaccattttcttactgaatttaaaattgtgttagttagacattatcagtttccctccctgttcaccatgagcctgagttgtttccctaggcttggtaacatcctctcccctttccttgtccctgggttgctgttgtaaagtatgccatccctgtggttgttaattctaatgcaaatttattagtcaggccattctcagctccctatgatgggcgtagaaatggggaaggtacccttggtaggtaacttatctcattttgatttctaaatgatgtaaatgtaatagcttaaaaaaaaatctccatataactgttctctgcaccctctgattgggtaaatactcatgcaaattgaccatcttatcaaatatatttttatgamagttaaagaacctgcaccacatacgtagcaagacaacttccagtcacttcttaccctctgagccttgggcttctctgcagctgggcaatgctgcacaaacagcataaatgctccag

SEQ ID NO: 170705 - DNA, 575 bp, Homo sapiens
caaaccaaccacataagatactctgcttctagttaacctacttccaacttccccttgccaactacatgcaatcagagcatacttgaagccttcccccacgctttccctcccgttttttgctcactctaaagctttcccactcmcaaactttgaattaatcacctgttctcatgtgggtagtctacctttatttctacagtaaggtgcatgcaagccttttctagtcacatttaaaatggtgaaaagcagcatcataccagaaatatttgattttctactttttgattaggtaagcagagagggatgatttctgagtcttacaaagagtacatatcacttcagaaacatatgagttgtggaaagtgatgtctgcttttctctatattatacataaaacatagcaaatatcttactttaatgagctggtgtgtggggatatggagatgaccaagctgaaaggattgacaataagataacaactagaaactgaatccctgaagtgacatctctgtgcttgcagccttttctctgaatataaaatgcacatttttacacaacccctgtgaaatcttagc

SEQ ID NO: 170706 - DNA, 496 bp, Homo sapiens
ataaccctaccttgtcaccataaaaaattcattcctattggacactgacatgaaagccttatgttacgttttgtgattaarcagttttctcttacagcttatttacaagggaaagagaaaggaaacaagaaatagtttcaaaaaaacagccaaaatttcagtaatcattaaaatcaacacaattaaatactctttttttggaatgaaatttcgctcttgttgcccaggctggagcacaatggcacaatctcagctcactgcaacctgtgcctcccgggttcaagcaattctgcctcagcctcctgagtagctgggattgcaggcgcctgccaccacgcctggctaatttttgtatatttagtagagacagggtttcaccatgttgaccaggctggtcttgaacttctgacctcaggtgatccacccgcctcggcctcccaaaatgctgggattacaggcgtcagctaccactaccagcaattaaatactcttttta

SEQ ID NO: 170707 - DNA, 496 bp, Homo sapiens
ataaccctaccttgtcaccataaaaaattcattcctattggacactgacatgaaagccttatgttacgttttgtgattaagcagttttctcttacagcttatttacaagggaaagagaaaggaaacaagaaatagtttcaaaaaaacagccmaaatttcagtaatcattaaaatcaacacaattaaatactctttttttggaatgaaatttcgctcttgttgcccaggctggagcacaatggcacaatctcagctcactgcaacctgtgcctcccgggttcaagcaattctgcctcagcctcctgagtagctgggattgcaggcgcctgccaccacgcctggctaatttttgtatatttagtagagacagggtttcaccatgttgaccaggctggtcttgaacttctgacctcaggtgatccacccgcctcggcctcccaaaatgctgggattacaggcgtcagctaccactaccagcaattaaatactcttttta

SEQ ID NO: 170708 - DNA, 496 bp, Homo sapiens
ataaccctaccttgtcaccataaaaaattcattcctattggacactgacatgaaagccttatgttacgttttgtgattaagcagttttctcttacagcttatttacaagggaaagagaaaggaaacaagaaatagtttcaaaaaaacagccaaaatttcagtaatcattaaaatcaacacaattaaatactctttttttggaatgaaatttcgctcttgttgcccaggctggagcacaatggcacaatctcagctcactgcaacctgtgcctcccgggttcaagcaattctgcctcagcctcctgagtagctgggattgcaggcgcctgycaccacgcctggctaatttttgtatatttagtagagacagggtttcaccatgttgaccaggctggtcttgaacttctgacctcaggtgatccacccgcctcggcctcccaaaatgctgggattacaggcgtcagctaccactaccagcaattaaatactcttttta

SEQ ID NO: 170709 - DNA, 431 bp, Homo sapiens
cttccctttaaatgtaaatagattaaactctgcagccaaaagatatagattggcagaatggatttttttwaaaaaatccacacaggatccaactctattctgtctataataaactcactttaaccctaagtacaagcacaggttgatagtggaaatacggcaaaatatattctatgcaaatagtaataaaaagaaagaagggtgcctatactatcagccaaaatagactttaagtgaaaaactcttataagagacaaggaagggcgttatataatgataatagaatcagttcaccaagaagacataacagttttaaacatatatggaccaaacaccagagcttcaaaatatatgaaatattttcctaaatcagagtcatggttattttctcctagattatcttgtaaagttttataattttacatttatgt

SEQ ID NO: 170710 - DNA, 431 bp, Homo sapiens
cttccctttaaatgtaaatagattaaactctgcagccaaaagatatagattggcagaatggatttttttaaaaaaatccacacaggatccaactctattctgtctataataaactcactttaaccctaagtacaagcacaggttgatagtggaaatacggcaaaatatattctatgcaaatagtaataaaaagaaagaagggtgcctatactatcagccaaaatakactttaagtgaaaaactcttataagagacaaggaagggcgttatataatgataatagaatcagttcaccaagaagacataacagttttaaacatatatggaccaaacaccagagcttcaaaatatatgaaatattttcctaaatcagagtcatggttattttctcctagattatcttgtaaagttttataattttacatttatgt

SEQ ID NO: 170711 - DNA, 431 bp, Homo sapiens
cttccctttaaatgtaaatagattaaactctgcagccaaaagatatagattggcagaatggatttttttaaaaaaatccacacaggatccaactctattctgtctataataaactcactttaaccctaagtacaagcacaggttgatagtggaaatacggcaaaatatattctatgcaaatagtaataaaaagaaagaagggtgcctatactatcagccaaaatagactttaagtgaaaaactcttataagagacaaggaagggcrttatataatgataatagaatcagttcaccaagaagacataacagttttaaacatatatggaccaaacaccagagcttcaaaatatatgaaatattttcctaaatcagagtcatggttattttctcctagattatcttgtaaagttttataattttacatttatgt

SEQ ID NO: 170712 - DNA, 570 bp, Homo sapiens
tgcaagcattaagataatattaagaattagactggtaaatgaaaatcatagaatcagagtacttactcaatgtcaagttttgctaataattgcaatgacacaagcagttatatgacacaagtgaagcagaaagtgttctgggaccccaatgtgacttattgggtcatttcttctcacatgagatgtgttctggtacagatcttgcacagaagaagccacttaggtcatgaattactgagttacatagtttatgtgacattttccttggagccatcccctgtaaacctaaagattccaggtctatttacacaggtgattctagataggcagctatattttactatatgtatttcatagttctctcttgctagccaaggtcacatactttgtttgccaggagagctgccattataatgtttacaaggcaattagacaagataatatgctttctttcttcctttgatgcatcacscaaactctgccatgagagagaagggcatgcaggtctacttcataagtcctttctttctagatattctggtacagtattttaatgtattttatgataca

SEQ ID NO: 170713 - DNA, 440 bp, Homo sapiens
ctaaaggacaaaagaaattttatgatattgttctgtgtctcaactacctgtttactctttatacagtaagggcagaaaggggtgatacctttccaaagttccccatcagaaaggtcacaaccagtactcctataacaaaaggcagtttaaagaaaagtatagcaaatcaatttaatcaaagttttacatgtcagaagagccttcaaaaatgaagaaccaaagacccagggaaatcatctatttttataggtaggcttcatgaagaagggacagcsatgtggaaatgtgattggacaaaaaggaatgatcccatggtaataggctgagaaagaacccagcaagacctgtcttcctggcctctaagctgcatttatttctcctggtgtgggacacacagtcttcaagggagaaggaaaagaatgacttttctaggttttatg

SEQ ID NO: 170714 - DNA, 537 bp, Homo sapiens
ttgcacattcccagctgatgttgaacaaaaccgtgttctgccttcttgtttcaactctcatactaaaatcaagtgtccttttcacaatctgtttagtgtcacggttttcatatttttatgcttttttggtgattttgatgtttacartggcccccaaacatagtgctaaagtgctctcaaagcacaaaaagaccgtgatgtgcattatggaggcacatgtgacataaactttgttcagatatgacctatagtgccattggctataatctcaatgctgatgaataaattttatatgttaaataaggtgtctttaaacagaaacacatataaaacaagattatgtcttgatcatttgatgaaaatgttgcagccagaggctcacagaaacttccccttacattttcccaagaagcaacaatttaatacttgctaatgttggagctctgaaaaccacatcctcaaaaatggcactttgacatgttgagtgctttgaattaaataaaattgaaaggcctcagaaataagcctcaggaccaa

SEQ ID NO: 170715 - DNA, 367 bp, Homo sapiens
ctagattttgtgttagtgagtactctctgaggtggccccactcacacagctccactgtgcatacctctggtggagacactctgaggcattctctgaaacctaggggaggaagctaagccttcaaagctcctgaactctgtgcacttgcagagttcgcactacatggrtgctgccaagtgctatggcctatacctcctgaagcagtgacttgagccacacctgggcctgcttgagccatagctgggacagccaaggagcactgtgccagaatgcagggagcagagatttgaggcggccctggatggtaagcctcaagttcccatgggcaccctgggcccctccctcaaacctgttctgcccccaaggc

SEQ ID NO: 170716 - DNA, 291 bp, Homo sapiens
ccttcaaagctcctgaactctgtgcacttgcagagttcgcactacatggatgctgccaagtgctatggcctrtacctcctgaagcagtgacttgagccacacctgggcctgcttgagccatagctgggacagccaaggagcactgtgccagaatgcagggagcagagatttgaggcggccctggatggtaagcctcaagttcccatgggcaccctgggcccctccctcaaacctgttctgcccccaaggccctagcactctgcctgtgaagaatgtggcggcctcaaagat

SEQ ID NO: 170717 - DNA, 367 bp, Homo sapiens
ctagattttgtgttagtgagtactctctgaggtggccccactcacacagctccactgtgcatacctctggtggagacactctgaggcattctctgaaacctaggggaggaagctaagccttcaaagctcctgaactctgtgcacttgcagagttcgcactacatggatgctgccaagtgctatggcctatacctcctgaagcagtgacttgagccacacctgggcctgcttgagccatagctgggacagccaaggagcactgtgccagaatgcagggagcagagatttgaggcggccctggatggtaagccycaagttcccatgggcaccctgggcccctccctcaaacctgttctgcccccaaggc

SEQ ID NO: 170718 - DNA, 528 bp, Homo sapiens
tagtttgctattctttttctagttctttgagatacaaaattatctccaattattgattggggatcttcttttaaaaatacaaacatttactgccacagttttggtgtgttgtgttttcattttcacctgctttaaaatactgttaaatagtgatttcttgactcatcaagttgttcaagagtatattgcttaatttccacatctttgtgaattttctagttcagagttttctagtccagatttctagtttcatgattattagaaaatatagttggttttctttcagtttttttttgaattgttaaaacttgttttgtgtcctaatatgtgttctgtcttggagactgttttatgtgcamctgagaagaatgtgtatattaacatagggtggaatattgtttatatatctattagagtcaattcacttttagtattgttcaagtcctttatttccttattatttttctttctggttgatctatttattattgaaaaagagtattgtaatctcctcctattattttttta

SEQ ID NO: 170719 - DNA, 616 bp, Homo sapiens
tctctccccttggcctttgactgtggggcagggtgtaaaaagtgggaggtgggttatatgcttctagttgggtaaatgctaagcgtttttatgtgggttgcattttattttcgctttctaacaacataattgaacattcagaaagggtragtaactttccaaaagtttcacagatactgaaagataagttagggttcatactttggtctgtctgatcacaagccagactaagatttgaacttctctgagactgtttcctcaaatttaaaatcagaatcatgttatctaattcactggctgaaccaagctcattcctcacccattttttattggtacttcttaaagaatgtggtcctcactctctaggttccatgttttgagcataaaattcctatccctgtaccccaggcagagaggactggaccaggcgtggacctctgacctacaagatccaaggcattacgtttgcctggttcatcacctccttcaattgtagatgctgcagatgctgccctctctgtagaggtttaagtaaacaggaaagaatgtttaatgaaaataaggggaacaaagaaaccatgtggagtaaaagcagagatgacacatcaggaggcta

SEQ ID NO: 170720 - DNA, 678 bp, Homo sapiens
actgccgtccattggtgcacaatacgacctatgcacactttggagagtgaagctttaatttgcctaatggctgctgtccacccaaactcttttatgtatttgtatcaaatatagcacaaatatgtatttattctgccaaaaggcttcaggttgaatagtcttattttgttgttgacattttcaaatcctatcttgaagcctttctacaaaaaaggaaagagatagcaaaaaacaagttttaatgcctagttatggctagtcttttaaataaaaatgaaaattcgaaactctaaaataaacatccttcttagtctctttatatgagctatagggaaaaaaaagaaagaaatatatctgaatctgtaaatgagtcagaaatgctcagaaatatgtttcatttcataatgcctagcatttttagaaatcaaattagtgaacacctgtgycatggaagatttatatattagagttcatgctgcaactacagtttccctacaatatcaatttcaaatgacaacctgtggttttgtgccacagcatttgtctcagcatttgtcaaaagtcatttcatttcctatgattcatttcatttatattctggtgtattaactggatactttattgatccttgctccatctaattgtggctttcacaacacagacaaaaatttgatttga

SEQ ID NO: 170721 - DNA, 562 bp, Homo sapiens
tcatgtttcttgttctgttgagttgatgtttgcacatttttctggagcagtcagctcttccagaccttacgaactgtttttggtgggaaaaaacccttcacctctgggtgggtaaaggggcgtcagctatgaggggtgcagtggtttcagtttcagtgaaggtacagaggcataatctctttttatttttattatactttaagttctaaggtacatgtgcacaacgtgcaggtttcttacgtatgtatacatttgccatgttggtgtgctgcacccattaactcgtcatttacattaggtatatctcctaatgctatccttctcccctccctctaccccacgacaggccccggtgtgtgatgttccccttcctgtgtccaagtgttctcactgttcaattcccacctatgagtgagaacatgcrgtgttttttttttttttgtccttgtgatagtttgctgagaatgatggtttctagcttcatccatgtccctacaaagacatgaactcatccttttttatggctgcatagtattccatggtgtatatgtacagtggcatg

SEQ ID NO: 170722 - DNA, 670 bp, Homo sapiens
gagtgagtgggtgtaatcctcctcttgtgagttgatcaggccacacctgggaactgctttcaggttttagcaatatgcttttctttcaaaaataacattgattatttttattacaaagtaatatcactgtagaaaatctagaaagcacagaaaaatacatcaattaaaaataatctataaccccgctgatcggatagaatcattaacattttgttatgtcttctttcagatatrtgcacacacacataaatacatatgtacatatgatcacattttgttttgtcatcttttatccccacttgacaacatatctcagtttctcagttaagtgacattctgttgtctattcaaacacttttaaaatttatcatataggtatactacactattattcttaaatattagaagtaatgctatgatgcacattattacagataaacatttgcttatattcctgaacatttccctaaagaaaattcttagatgtgtaaattctggataacaagagtattggcattactctttaagagagacatggacaaaccgaggtatgttcagaatagtgactttatttatggactggaaacaatatcatttgaggatagttgcaagagaaaaaaatggagattcaaaacttttcacatatttcagtgcttgtcattgaaaagaa

SEQ ID NO: 170723 - DNA, 491 bp, Homo sapiens
agttacaaaaatattcaaccaactgctgcagcatatactttcttttcatcagcacaatgaagagtctgcagaacagaccataccttaggctataaaacaagtctgaacaaataaaaaaacccaaatcttatcaaatatctttcctgaccacaataataaaactrgaaatcaataacaagaggaactttataaaatatgcaaacacacgaaaattaaacaacgtgctcctgaatgggtcaatgaaaaattcagaaggaaattaaaagttttactgagataaatgaaaatggaaatgcaatatactaaaatttgtggaagacagcaaaaacagtactaagaggaaagtttatagcaataaacgcctgtttcaagaaagtagaaagacttcaaattaacaacctaataatgcacttcaaggaactagaacaacctacaggagaggagaaaatatttgcgaactacccatctgacaagggattaacaagtcaata

SEQ ID NO: 170724 - DNA, 526 bp, Homo sapiens
aatattcaaccaactgctgcagcatatactttcttttcatcagcacaatgaagagtctgcagaacagaccataccttaggctataaaacaagtctgaacaaataaaaaaacccaaatcttatcaaatatctttcctgaccacaataataaaactagaaatcaataacaagaggaactttataaaatatgcaaacacacgaaaattaaacaacgtgctcctgaatgggtcaatgaaaaattcagaaggaaattaaaagttttactgagataaatgaaaatggaaaygcaatatactaaaatttgtggaagacagcaaaaacagtactaagaggaaagtttatagcaataaacgcctgtttcaagaaagtagaaagacttcaaattaacaacctaataatgcacttcaaggaactagaacaacctacaggagaggagaaaatatttgcgaactacccatctgacaagggattaacaagtcaatagcaaaacccccaaataatcccattaaaaatgggcaaaagatctt

SEQ ID NO: 170725 - DNA, 523 bp, Homo sapiens
aggaatatgagggaatgtttggaacttcctagagatttgttaaattgtggtgaccaaaatgctgacaatgatatggacaatgaagtccaggttgaggtggtcccagtaaaagtttggaaaatttgcaacccagccatgtggtagaaaagaaaaacccattttctggggatgaattcaagccagctgcataaattgtgtaagtagaggagagcaatggtaataacyaagacagtggggaaaatgtcttgaaggcatttgagagatcttctcagcagctcctcccatcacgggcccagagagctaggaggcaagaatggtttcatgggctgggcccatggccccactaccctgcacaactttgggacaatgctcccagcatccctgccactcctgctctagccatggctaaaaggaacccagatatgtctcagtctactgttccagaatgtgtgccagccataagccttggtggcatccatgtggtgttaagtttgtgggtgcacaggcagcaagagttgaggct

SEQ ID NO: 170726 - DNA, 483 bp, Homo sapiens
ctcccaccacaacctctggagtagcttggacttaacaggcgagcgccaccacacccagctaattttttttttattttttttttaagagatagaagtcttgctatgttgcccaggctggtcttgaactcctggcctcaagtgatgttcctgcctcaacaaagtctggaagcactggcattacagatgtggccactgtgctcagccaaagctccagttaaagcatcacctgcaaagtcttctcttccctaccacacatttggccactyaggttacaaaggcccattctccttttgtgtcttcttcatttcggcatcacgtagcacatcacaagtactgtggcagaaactactaattgcctcctaatatcaatatctgttttatttttatgctaaaatataactcgtggaatgcaaaaggagagaagaaaatagtatatcctgaagtgaataagtgacaagaaatagactgaaggatatattatag

SEQ ID NO: 170727 - DNA, 452 bp, Homo sapiens
tgaattctttgtcaggcagtttatatatctctatttctttggagtycattactgggagactatcgtgttcttttggtactgttatgtctttttcattttttatgtttcttattgcctttagttggtgtttgcacatttgaacaagtagagacttataagagtctttgcagactagctttttctgggaaattccttcaccagtcagcctgtccacagattctgagcaggctacttggcctggtccttaggtgggcttgcttctgaagtcctcaggcaggctggcctggtgcctgggtcggcagataggcaggcctggcacctggtgcagtgtatgtggtgactaccagtctaacaatccatcctattgtgacaagcctggaccctggatctaacaataggtcctactgtaacagacatggaccctgggattggcctggaccctgccacagagc

SEQ ID NO: 170728 - DNA, 440 bp, Homo sapiens
cattcaacatcagcacagaccttaagtctggtatgaagcatttacaatctattctctctgaagcctggtaactggagacttcatctgcatgataaaactttggtctccacaacctcttatcataacccagatactcctttctattgataataactttttcaaccaattgccagttagacaatttaaaaaatctacctataaccaggaaagccccacagtccccccatgtcgagttgttgtcttgattttctggaccgaaccaatgtatagcttaaatgtatttgattgatgtcttatgtcttcttaaaatgtataaaatcaagctgcaaccagaatacgytgggcacatgttcttagggtctcctgagggctgtgtcatgagccgtggccactcctatttcactcacaataaatcccttcaaatattttacagagtttaa

SEQ ID NO: 170729 - DNA, 596 bp, Homo sapiens
ttagtacagcgtgctggaggtaataatgcaagagtgttgggcttgagtcagcttaatttatgtctagcctgaacgtgtaaactgtctccttctgtcagatgtggtgatttcattacgagtgtagcactgaatggtgtgtgccatgcatcaagctaatgaatatataaatccaaacagtaattgaatttctgcattgatgataaacgttccttgtaaagaaaaaaaaaaaaacacattcagcagggacaaggaaaatagtctggggaaggtagcatgctggcacgatttgtattatcagaaggcaacttggtggcagtgtagagaaggattggatcaaggamaaagcccctagcatgtctcttccacagaggaagcaaggaacaaggagagcagatgttttctaagtaagattcttatccccccttctcaatataatttttcacctgcctggaatcttctttgcctgagagacaatagagtgtggtgaatatgaaacaggttctgtagacatggtgacttggatttgcccagctctgtcatttcctagctatatacccttgagtaggttagtttctcatcattataattgggataat

SEQ ID NO: 170730 - DNA, 596 bp, Homo sapiens
ttagtacagcgtgctggaggtaataatgcaagagtgttgggcttgagtcagcttaatttatgtctagcctgaacgtgtaaactgtctccttctgtcagatgtggtgatttcattacgagtgtagcactgaatggtgtgtgccatgcatcaagctaatgaatatataaatccaaacagtaattgaatttctgcattgatgataaacgttccttgtaaagaaaaaaaaaaaaacacattcagcagggacaaggaaaatagtctggggaaggtagcatgctggcacgatttgtattatcagaaggcaacttggtggcagtgtagagaaggattggatcaaggaawaagcccctagcatgtctcttccacagaggaagcaaggaacaaggagagcagatgttttctaagtaagattcttatccccccttctcaatataatttttcacctgcctggaatcttctttgcctgagagacaatagagtgtggtgaatatgaaacaggttctgtagacatggtgacttggatttgcccagctctgtcatttcctagctatatacccttgagtaggttagtttctcatcattataattgggataat

SEQ ID NO: 170731 - DNA, 505 bp, Homo sapiens
tatttgcttgtgtattttaacaattagaagtgacatattgtttatcaattctccrgttgtcgtttgtcctccaaaacattaataatcattcctagtagtcagtttctgtattctatagcagtcgtgtaggaataagtctttgaagagctaggggctcttgattctcttctaatgtgggcttgggaaagcacatctttataatacctgacttctcttacctttcctttccttccttatcaatctctttctctgtcccctcagaacaaattctcatctctacagtgagacctccgatgggatgcagcagtgcctggctggcccctcatcctcctcactcctctctatcaaacatggtcccccttcttcctcaaatgctttaaaaatcacctcctttgtaattctcctgtgtaaagcccatgtcacagtcttccattgtgtctccagcatctagtacagggcctaccacataataaacattgatcacgaatgtttacaggttgtcagt

SEQ ID NO: 170732 - DNA, 505 bp, Homo sapiens
tatttgcttgtgtattttaacaattagaagtgacatattgtttatcaattctccggttgtcgtttgtcctccaaaacattaataatcattcctagtagtcagtttctgtattctatagcagtcgtgtaggaataagtctttgaagagctrggggctcttgattctcttctaatgtgggcttgggaaagcacatctttataatacctgacttctcttacctttcctttccttccttatcaatctctttctctgtcccctcagaacaaattctcatctctacagtgagacctccgatgggatgcagcagtgcctggctggcccctcatcctcctcactcctctctatcaaacatggtcccccttcttcctcaaatgctttaaaaatcacctcctttgtaattctcctgtgtaaagcccatgtcacagtcttccattgtgtctccagcatctagtacagggcctaccacataataaacattgatcacgaatgtttacaggttgtcagt

SEQ ID NO: 170733 - DNA, 569 bp, Homo sapiens
cttaacagtgcacccagagcatctcttccattgtcatcttgacttacttagtttactgcatacctaagcctgtttcttctagataactgtataaggagagccagggatgttgggtgatatgtgatttcttgctagtattttggctccatatactgtagtcatgtgctggcatgctctgggtggggtcgctcaggtaccagtctgcctctcggctccatcctagacaggtaggctggaagagtagcccgattgcattctaactagatatgagccttccttctattgggtaaactcatagcacattgtttgtaaatctgttatattatttatttgaattatccttgaatggtactatgtgcctcatataaggccttacaygttccataaagatctcatacagagttagagaatatggaattaaatgaataaatgcatgatgaggagaaaatacaaagttctgtcttcttggtaggtattggtcaaagtaaaagaaaattagaaacattttgtattgaaatcagcatatcaactgagagacattcagattcaattcagatttagttccaatt

SEQ ID NO: 170734 - DNA, 434 bp, Homo sapiens
gaattctttgaaactaattgtttcgatgaagttatataagcaatttgatggataraaaaagactttggacttgctgtgatttgctttagcctcctttcctaaaaaaatagaatttatgttacatacataactatgataattatttccatcctcctaatgtagagtgagcatacaccattctttcagctagacattcccatcctaacccttttccttggcccaggctatttaggctcaccttaccttatcctattagtttgccagggctgccataatgaagtgtcattaactgggtggcttaaaacaatagacatttattgtttcactaacctgcaggctagaaaggaggtcgaaattaatgtgttctcagggccatgctccatctgaaacttacagggaaatcctgccttgcctcctcctacattctggtggtt

SEQ ID NO: 170735 - DNA, 471 bp, Homo sapiens
ttcagtagtaggtcctttctcatggagctctcaattcatttttctctgagcaatatttttttctgctcactgaatgaatatctttgtcccaggaggccaggctttctcattacttggaaaaatccttcaaactccaaataaaaaagaaccacaagttaaccatatttctatctattttcaccatataagcacaaaaaaaggcattagggaataaaactaaaatgtcatgcaggcctgacagttttccacactgattgcttttaatgctagttgatgcaggaaagattgccagacagactggagctctggataccagaggcctggtatcttcttgtcgggtcttccccactgggctgttaaagttggttcccctgccctatttggctgattcaagcttcatgtgtctttctgtgagtctaaaaggaaggtcctgygagctgcggctgtttggcaagggaattgtgctgttgg

SEQ ID NO: 170736 - DNA, 513 bp, Homo sapiens
catgtctaccttgccacccgtggttcatgctgctataacaaagcaccaaagactgcatataaaagcagatttttttacccacagttctggaggatggaagtctgagatcaggattccagtacagttgggttctggtgagggtccccttctgggctgcagactgctaacttctcattgtatcctcatgaggtgggaagagatcaagctagtactctggcataggattagggtctcaatgtatgaattgtggggcaacacaaacatccagtccattgcactcccttgatccattgttcttgggacagggcacaacttaggcatggatcctgggtcctactgcctcccagcagaagcaaagaaacatttattttcaaaaaacaaaatgaatatacacaacctcaaaacaagaggtttgtagcacaatttttctgaaatgatccttcttccagtttttaaatttttgrtatggaagtcagcgatttatttgatgtagagaaacagaaacccattcag

SEQ ID NO: 170737 - DNA, 600 bp, Homo sapiens
ctttttcacacttagtatggccccatatgattacaagtgataacaatagtaccaatacttagaaattacaggagttataggaagttgttaagacatcctaataatcagaaaagttcaaagatggaataggctccctctgccttatcatcagaggtattaaatcaaggcaaataattacatgtcctttgttttggagttactttaaatccttcctgaaaaaggaaggcaaagcaataataaatattataaacataattttgtctttgtatccctaatcactagcaagttgcctagaacatggtaggtgccaaaatcatatttattgaaccagctcaattaatagacaaaaaactacctgaagaaggggagcaaagttgcagaggggattcaggttttgaaaggatggttagattgatgaacttggaatctttktcctctgaccaaaagattccatgattgtatatgtttatgtaaatattcttctagtaataaaataacagtgggcactctgtatttctgtcagacagttttaagttaaccaagctcttttatatacatataccactttatcccccatactaacacttaaagacataaaag

SEQ ID NO: 170738 - DNA, 550 bp, Homo sapiens
ctttgacacgtgggggttatggggattataattcaagatgagatttttgttgcattttccaaagttggctcaaatatcctctcccatctcacagtctcttcttataatataactttgactctcccatccagtrgcaagatctatatcccctccccttgaacccaatcaaagctttgcacctgctcaatcaagagggtgtaacagaaatgaagctctgttactttcaagattacaaaataacatgccctgaattttcacatttttctcataggactttttttcttttgaaaaccagcttccatgctgtgaagcagcccaaactatcttccatggaaacactacacagaaaggcctcataaagaggcaacatttaggtgttctggcaaatagatgacctgaagtcccagccaacagtccacaccatcgtacatgtaagtaaaaatgtttctttggttggtaggctattaattactgcctcaatttcagaacttgttattggtctattcagggattcgacttcttcctggtttagtcttcagagggtatatgt

SEQ ID NO: 170739 - DNA, 541 bp, Homo sapiens
aaatcatccagtcccggttctcatctaaagttccccatcttcaacacaaycctcaactcaacatatcactttccctgatatactagccaaccatgcatttctaactactcaaaagattataaatcacaaatctcaggaacaactttggtgaaaggagaaatctttttagaatacagaggaggaaaagaagttgaataagcaaagactgtatatcaatcttgggaaatgataaggggtataagactagtaacacatgcatgttaatatttatcttcttataaaatatatatttctattcaacatatacaactttcatccaaagtttccacatgattcagttacagtcaccatattttacctagcaccactgtatttctccaaccctcaggccctgtggctgagtttagcttatcttcactcagggttgatagtttcccactggtcccacagtccaccacagcaatctggcttcctgcaggtgccattcagtcagccagtcatgccattgtaggtcagtattccaggtgtcaacccttttttg

SEQ ID NO: 170740 - DNA, 458 bp, Homo sapiens
gattttgtgtgttgtcagaatctgcagtgaattcaaggatgaacagagtaatgctggagatcagcaaggacatgaagaaaaatcttctctgttagcctggatctgacagttctataataaactgtcactgtctgctgcttcaaagatgctgtcaactaacagaaagggcagacagacctttaaacgtcaccaaaaacccaagtacaagtgatgtaaccaaacagctaatatttactgagcgtcacctatgtactaggcatagttccaaatgccttatgtatagtaatttataacatatctttgggktaggcactattattaccctatttttagagaaaaggaaactaaggcacacagaagttatttgcccatgagtgaagacagtcatcagttcccacaatttgcctccagagctgttactcttaaatactgcagcacaagcttacacacacacacac

SEQ ID NO: 170741 - DNA, 608 bp, Homo sapiens
aaaatgtgtacagcagtcacacccaaagggactgaggaaaaaaaatacaccctgcagattacctaataattacagcattttagatttatgaaggaccacatatatatatgtatgtgtgtgtgtgtgtgtgtgtgtactctcatccaagatcatgcagctatttagccctttccatttttaaattcaaaacctagcattggttcttgacacatgataggtatttaataagactgaacaaatgattgaataaatgtctaaaacaaatgtgttatgactacctacctaatatatatttatcactygaaaagaaaagggaaaatttgtctctaccttaaacactttatcaaaagacagttctcttctaaatgtgttcctttaattattaatagtatgatgccaaaaattcatattgagactaagaataaaagttcttagacatttaaatgggttgagcacaactgtgacactggtgcataaagcaagataaaatgggcaggtagtagcagctcttagggtaaaatgaataccaagatattttctcaaaaatcaattagcatcacatatgagaaaaggactccttcccccaattttataaagtacagtatcaa

SEQ ID NO: 170742 - DNA, 598 bp, Homo sapiens
agaatttctagaccttattctaagtgtgtatttaactttataaaacactgtcaaacttttccagggcagctatactttgtatctttgttttaaaattaaaatgagatatacatctatgataatggctacaattaaaatgctgacaatttcaagtgctgacaaagatgtggagcaactggaactctcatattgcgagtgagaatacaaaatgacacagctgggtgaaaaaaatgggaatctcaattcaattaattatagagacaaggtcttgctcggttgctcaggctggagtgcagttgtgcaatcatagatcactgcagcctcaaactcttggactcaagtgytcctcctgcctccacctctcaaagcgatggaattacaggcatgagccattgcctccagcctttaaaattttttttttgagacaaggtcttgctatgttgctcaggctggtttcaaattactgggctcgagcaatcctcccatcttagcctcccaagtatctggaatggcaagcatgcaccaccactcccagaattacaatctttgataacttaatcacggaagtgagatttcttcattttgccatattctacaa

SEQ ID NO: 170743 - DNA, 390 bp, Homo sapiens
tgccagatgaggaatcagacaacagggggaaaaaaaagagagagagaagagtmcaagaaagaaatggttagggcatctgatagatattggtcttggtgtgatgacctgatgttgaagttaaaacaccaccaccagccctaaagttaggttcatgtaatttttagttgtgttcagtctttatgggacaaattccaaatcctacaatggcttcactttgacaggccttttgtctattcaaaccatatttctttctactacaggttaatattattgaaagatcatattttgatgtttctggtttctggaaagtttgtgagatcaaagtaaatgaaaaccaggacttttagctatgttcttaccaccttttcaaggtaagggcacaaaggaatt

SEQ ID NO: 170744 - DNA, 487 bp, Homo sapiens
tccaaatcactaagaaaatagtgagccattagcaagtacttattgatcatctatgatgtcccaacaaccaagtaagcttggtatgtttagctctgttttagagatgagagaactcaggtgcagtacatttcaagaatgtgctcaagatcacacaactagtaaatgatgaaggaagtagttgtaccaaagtttggaaagtttagaaagtttggaaaataaaagtaaattttttttttaacccagagtttaacttttttcaaggagttgacaatctggatggaaggatgactaatacagtttaaaaatagagaataattaaacycagaatgctatgctatagtagggactatgggtacaatatttagaggatagtttaatggaggtactaataattagacttcaagcagagtgttagatttgagttaggtcctgaggaaatttcatagacaaagtggagagaaaatacttggtcatggagtagcagagc

SEQ ID NO: 170745 - DNA, 502 bp, Homo sapiens
tactttaaagatttagttttatgtgaataaaatctttaataagtattgtccattttagactctgaactgggcacttaaaaccatgtgattggttattagaataaaaataaaatgatttttaaaaataaataaaacctcctaagtggggcagaaaaatgatgtcattgaaatctgaaaactgtctttaacagtttatgtttatacagtgatatcctgctgatgtctgatgtaaaagaaaaagaaaaaaaacttcttagagaaaattagytacttgaactaaggctgctgaatgcatttaaatcctgcaattttggcagaatatcacatcatctaaatggggggagataaactcgaggtgtaaaggatatgaaatgcagtttgcattcttgacttcccagacagtagattgcagaaggtgataagttaaagcttctgaggaaaaaggtaaactaattctggagctgccagtgatatatcctggctggactaaaatcaaagtatt

SEQ ID NO: 170746 - DNA, 528 bp, Homo sapiens
agtgagtacaatatcgattaaggatcactactgccttaaggacacttatatcattccattgtccatcaaaaaaggaggacttgatatctcaagaagtaattacaatttacttctaatggagaagtgattttatttttgtgtcactgctccattgaatctttcaggcattttacagggagaagagcacaactggtaaagacagaaaagaaatgggtgaaggtgctggccgyggcttctcgcttcacaatgatgagcatggcattttatctctgatcttcaggtcctcattggttataatgggataataatgataatacatactgcacagtgttgttgtggttgtgaacagtcactgagttaatgcagagcttgggaaattgctaggttgggaggctctctcaaattttaagtcctttctttctcagtcctttcttctccttttaagccataggacacctggcacttgagatccagactacacactggacctagatagaccttgcataatcttgatttttttccatttga

SEQ ID NO: 170747 - DNA, 434 bp, Homo sapiens
gtgtcagtacctcatttctttctatggctgaatagtattccgttgtatggatataccacattttgtttatccattcatcagcrgacagacatttgagctgtttccaccttttgactgctatgaaaaatgatgctatgaagatttgtgtaccagtttttctatgaacacttacttttctcttgggtatatgttgacgaatggaattaatgctaatattttaatatttgactgtaagtcagaagacaaattataatacttcattttaatagagagtagatgctgtgaaataaatttctatttagttttctaaagctaattatcacatcacttggaagtacatatagcttttactgtgataatacattacaattaacattacatttattcttgtgaccactataatcaaatttgttcaactggaatatatgaatttc

SEQ ID NO: 170748 - DNA, 657 bp, Homo sapiens
tttttgtctaattgactctccttgatgctgtttggaaatggcaggtcatttctcaaagccaagctgtcaggtagccctttagcaggtcacgatctaaagacaaatgcaacaggcattcatccaagggcaccttgaccacctccactccccaccctgcaggtcttgcctggtacaatgaatggcacagttcatgtggagcacaaagatctagtttccagttccaattttgccaacaacttcctgtatgatccaaaggaaagccacaaactygctctcatttcctagtgggaataaaaaatagaagtcctactggctttccaagatagcaaggataacagaaagcaacacgggtttgaaagcccttggctcattttgtacataaatgcatccctaagacccagaatgtgtctgggacaaaggagatgctgaataaatgtttgttaactaaggaatgaatgcatctggggaagcgtaagccatgaaaatcagagtaaaactgtcatagtagatattaaaacaaaaccaagatgggtagtgctaagaatccactatctctgagagggaaatggactggctttaggatatggcaggtatttctttctcattggagcaattaacctctatgttctgtaaccacccccacctcagtctcatgca

SEQ ID NO: 170749 - DNA, 610 bp, Homo sapiens
atgtcaatactgtaaaaaggagatgtatatgtaatataaaattgggaaattatcatgttttaccagtgaactccaatttcacattgctattttcttctctgccaaaaagggatgaattctactcctttccctcagagaagttttcacatataagtcgatgtgacttatatgaagaattagctgaaatttaagagaggagtttagggtcatttttttcactggggaaatatatagtcacggagaaggcaactcaaccagttattatgtatawtatatatatatatatatatatatatataaaatatatatgtaaaagtcataaccccattaacactcattgttggcctatttccccagatattttacagatacagtttttagaaagtatagactgtgttcatagcattttgtatcagcaggttatttaacccattttgcacctatgggtcctccaagcaagacaggcacatcagtatcttcttcatagtgtctcttgaggacagccaacagaaggggcctacagtatagaaatacatgctgtttggatattaataaatagtttttagaggaagcaagaccttccaagtcaccaatgatagcactgggtgac

SEQ ID NO: 170750 - DNA, 610 bp, Homo sapiens
atgtcaatactgtaaaaaggagatgtatatgtaatataaaattgggaaattatcatgttttaccagtgaactccaatttcacattgctattttcttctctgccaaaaagggatgaattctactcctttccctcagagaagttttcacatataagtcgatgtgacttatatgaagaattagctgaaatttaagagaggagtttagggtcatttttttcactggggaaatatatagtcacggagaaggcaactcaaccagttattatgtataatatatatatatatatatatatatatawaaaatatatatgtaaaagtcataaccccattaacactcattgttggcctatttccccagatattttacagatacagtttttagaaagtatagactgtgttcatagcattttgtatcagcaggttatttaacccattttgcacctatgggtcctccaagcaagacaggcacatcagtatcttcttcatagtgtctcttgaggacagccaacagaaggggcctacagtatagaaatacatgctgtttggatattaataaatagtttttagaggaagcaagaccttccaagtcaccaatgatagcactgggtgac

SEQ ID NO: 170751 - DNA, 534 bp, Homo sapiens
ttttggagaagataaacccatttgtccacaaatagaaaattccaaaccaagaatctctaaaccatgggtttacagtagccccatraggttcaatagtcattgaagagatctttattaacatgctcttgagagcagagtggttttaatcatactttttcatgaaagttaatattaaaacagaaacatgccaccttactgagttgcactgagagtcagtggcaagggcagaatgaaaaatgaggatttttcttttctcctaaagcaggagtttccctgtataaatttaatggcattaaaagcaagtctaaactcaaagcctcatagacttccagttaaacatggtagattgaacatgtgtttatctcttcttcttctcccaatcccaccaaagtaatgagaataaaaaaggaataacagtaaaagactaaaaaatgcataaacacacaaggaaaaggaaactgggaacaaagacaacaatggattagaaatgtcaacaaatctttaaggaaaaaaagccatgataagagtattaat

SEQ ID NO: 170752 - DNA, 534 bp, Homo sapiens
ttttggagaagataaacccatttgtccacaaatagaaaattccaaaccaagaatctctaaaccatgggtttacagtagccccataaggttcaatagtcattgaagagatctttattracatgctcttgagagcagagtggttttaatcatactttttcatgaaagttaatattaaaacagaaacatgccaccttactgagttgcactgagagtcagtggcaagggcagaatgaaaaatgaggatttttcttttctcctaaagcaggagtttccctgtataaatttaatggcattaaaagcaagtctaaactcaaagcctcatagacttccagttaaacatggtagattgaacatgtgtttatctcttcttcttctcccaatcccaccaaagtaatgagaataaaaaaggaataacagtaaaagactaaaaaatgcataaacacacaaggaaaaggaaactgggaacaaagacaacaatggattagaaatgtcaacaaatctttaaggaaaaaaagccatgataagagtattaat

SEQ ID NO: 170753 - DNA, 370 bp, Homo sapiens
ctggggcctgcaatggaactggagcattcagtgaaagtttgcaagctggacattgatgctccccaggcaagaaattacaggaggtttctctagggaaactcaacagtatccaaaaagagaattatcacttggtggtctccaagtgaaaacagtcattccctgcctcatcctacagtagayaaacatacccaatcaactttttagtgccttgctctcgaacacagcaagtcaaataacggaagatatttggaggaagctgaatcacagggacagaaataaactgcaaaaaaaaagaaagaactcagtcaaaaacaaacaatgcagagaacaaaagaaaaacttcaagtagaagtaatatttttagaaaggt

SEQ ID NO: 170754 - DNA, 527 bp, Homo sapiens
ggtgggtgaacatttgagtctcaagaactcataatatttgatatcaccaagggaaaattagtaactttgcaaggaagaaacccaatagttaccatcttaaccaagaaaccaagataacgtcgtcagtaataagacatattgctgtcacacacctcatcatatgataggctaagaaggcgcatcacctccagggtattcctgccaaaattatattacctcaatgtaatcatgggtaaacactggaagaatccaagttgaggaggcattctacaaagtaaccaatcagtactcattraaactgtcaaggtcatggaagttaaggcctgaggaaatgtcacagatagaaggagactaaggagactaaggagtcacgacaacttaatgcaacgtagggtcctgcactgggttctggatattagtggaaaaaaccaatgcaattcaaatacagttttatttttgtttgtttgtttgtttgtttgtttgtttgtttttctgagatggggtcttcctctgtagccaggctggag

SEQ ID NO: 170755 - DNA, 459 bp, Homo sapiens
gggggtgtgtaaggaaactctctctgctacgttacaacttttctctaagtctgaaattatttgaaaataaaaagaaaaaaatagatataaaattgaatataaaatgacagatgaacatatttcccaaaaataaaagaccartgttttgtggactgcctgtctgtctcagtcatgtccccagtggtgtgtgtttctctattgtttttactttgaaaagcttttcatatagggcaaaatttagatcgccaagttttttgttacacgactttaattaaaaatttctgtcaatatctatccagggaaaacagtcatattctgtatttaagaaaacaaacacactagctagcatttattaagtacttactctcccaaatgccattgtaagtgtattaattcatttaatctgctcaacaaccctatgaagctgacactgttattattcctattttcacagatgag

SEQ ID NO: 170756 - DNA, 459 bp, Homo sapiens
gggggtgtgtaaggaaactctctctgctacgttacaacttttctctaagtctgaaattatttgaaaataaaaagaaaaaaatagatataaaattgaatataaaatgacagatgaacatatttcccaaaaataaaagaccagtgttttgtggactgcctgtctgtctcagtcatgtccccagtggtgtgtgtttctctattgtttttactttgaaaagcttttcatatagggcaaaatttagatcgccaagttttttgttacaygactttaattaaaaatttctgtcaatatctatccagggaaaacagtcatattctgtatttaagaaaacaaacacactagctagcatttattaagtacttactctcccaaatgccattgtaagtgtattaattcatttaatctgctcaacaaccctatgaagctgacactgttattattcctattttcacagatgag

SEQ ID NO: 170757 - DNA, 532 bp, Homo sapiens
caagaattattaacctaaaaggcactgaagtgactccattgttaattatcttaccttaacaacaaaacttttaaggcatttcttatgaaaaagatgatcagtaaagtgaatagaacagttgtcacaagtgctaacagaaaggactgagaaaaatgtaaactgaatgtacagaactagagaaagaagcagggaaagaagggaarctatattcgtttataagtgaaacaaccatccaggtttcaatattcctttgaaataagtttgcctaaaaccgtgttataaatggtacctgtctcatttaactacttggcaacatatatagacagcaagtgagtttcttgctctagagatcagtttttgacacagtgtaaaacattttccggtaggtaaggttgtaaaagttttggaggtcattggatactatttcctggtatactacaaacatttgtgaatgaattgggcttgcataaccttcagagaaccaagacatgttactaaagcacttagtatctaaaagagttgattatgagcc

SEQ ID NO: 170758 - DNA, 600 bp, Homo sapiens
aggttacttataatgaatattgctttcttttcctaggctgtagcaatctaagaatctttttgacattccactgggtaagggtagaaacagaaatttgagcttggaatttctttcttaatagatggtccaagagaaggcaacgaggtaggaaattcggaacagaaaacaagctaaaaattaatggcacttttgtgaaataatgttatccatttttatttctgcaatatgtatagagaatatttatgctgtatcgtttttgaaaattcaaagctatatcttgatgtgaactgaggtaaaattgtccagtcagtttttttgactttctattttcaaaatcaaaacttgatatacataaactaataccctgtcaacactgtgcccatcagataattcacttcgattcctttctgtaaaaaaatagaatacttgagaatggataagcctcttttttttgtcaaaatgtcaggataactgagaacttcatttttcttttttaataaagtaaaaatakcctttcctcccacccatactcttttatggaactatgatttgcatattaggcatataagtcaatgatgtttgaaataattacaccagtgt

SEQ ID NO: 170759 - DNA, 575 bp, Homo sapiens
caatttgccaatattgagttgaagatttttgcatctatgttcatggagatattgctctgtagttttcttttatggtaacgtctttgtcttgtcttggtattagggtaatgctggtctcatagaatgagtttgaaagtattctttctgcttccatcttctaaaagagattaagaaaactggtataatttcttgcttaaatgtttggtagaattcatcagtgaacctgtgtgggcctggtggtttctgctttgaaaggttattaattttggattcaatttctttaatagacaattttaatagaaaattcagatggtgtayttcttcttaggtaaattttgacagactctgcctttcaaataatttgtctatttcatctgggttattgaactcgtgagcaaaaagtttttcataatattcctttattatccatttgatgtccatgggatttgtacttacgtcccttgttcatttcatgttttaattattatttttatttaactcataattgtacatatttatagagtacagagggatatttcaatacatttatacaatgtctaataatcaaatcaggg

SEQ ID NO: 170760 - DNA, 520 bp, Homo sapiens
gtttagttagcctatgtttgaggattttcagggtcagaacagaaagtgatcaaggggtgaacagaatctgtgaggatgcaggtgagcataactaaacacaccaacagtgggtatagatatggggaaaagtgacatcaaatgagaaactcacaactgcaggttttaataagttcaaagagtaggtttgggatagtcaagtggggaaaacgtggttatgtagtttgttcgaaggatggaattctaaagtttaagatttcacatgtggaacagtcccaaggaacaaaagctagtatatgtccttgaagacaaaagtaactggactrtaaggcaaagaggagctgtctgtatggactttgaagttattctcttaagttgtgttccacttgatgtagatcctgaaacaaggattagagcacaagtttatttggcagataaattccacggttttggctcatatgcttttataatagtgtgtcattaagtcactaagtgctcggctcaccattgctgtacagtcaac

SEQ ID NO: 170761 - DNA, 504 bp, Homo sapiens
cttgaaaactaagcatgcattgagcaagtgaaaataagggaaaggtactttactctggggcagagaaaagataccacgtcaaagagggtttaatgggtggttcaggagcagaaatgatgtatatgatrtgaaagagtaggggacagaaggatttctggcaaggttaaaaatgtaagttgacatatgattaaaagaaagctatctctcatttagtcttgcaaaattgttacaggaaacacttggtatctcattccttcctattacttaaagtgaattgcattggagaattttccaggaagaggcttcactgctctctttagggttttattgtcttggtcatctactgagaaatacaccccaactaaaaaacattaaaacaaaattctcaactatatactgaagacttctgattaggtaagtaattcctactagctgattttaaaatcactatttaccaactttcttcagattggatctgatgaaagtttgcctggtatagaattc

SEQ ID NO: 170762 - DNA, 473 bp, Homo sapiens
gtggagggtctgcgggggttacaccaataagttttataatttaaggcaaaacccctgaatgttatgttacttctttcaagtgaaggttaaaatatttctataatgaatctattttatacagtgattttatttatagagcccctttatatcttgctaggcatattaagtattagagtgtgttttcaaatttcttcttaaggtcctatttawatttaaaaaaaggaaaagaaaaatagaaaccagatggttttgttattgtcctgcttcacaaaacacaatcaaacaaaactattgcgacaaacagaattaaagaaaaagtgcataatatcaaccttcccaacccatatgttccagatacccgagttttgccagaggtttcaaacaatatagcaactccaagaaaacgcttttaggagggaagccaacaagccccccacccctagtggctatggcacaggctcacaagccctgtc

SEQ ID NO: 170763 - DNA, 235 bp, Homo sapiens
ccattttggcataaggattattttgagctgaagatatttgcgatttaccagatggcagaaagaagcctttcttggagcttcccttaactgactaaaagcagaaacttctgagaaatgtggacyaccataaatcccgtctcccagggaagttttatggccatgaagaagatgggaagtgagtgctgagatggatttaaataaaccttactctattacttatatttatataccttcc

SEQ ID NO: 170764 - DNA, 235 bp, Homo sapiens
ccattttggcataaggattattttgagctgaagatatttgcgatttaccagatggcagaaagaagcctttcttggagcttcccttaactgactaaaagcagaaacttctgagaaatgtggaccaccataaatcccrtctcccagggaagttttatggccatgaagaagatgggaagtgagtgctgagatggatttaaataaaccttactctattacttatatttatataccttcc

SEQ ID NO: 170765 - DNA, 635 bp, Homo sapiens
gactcactgtatcctacaaagctatagtaaccaaaacaacataatatcaacataaaaacagacacttagatcagtgaaacagaatagagagcccagaaataaatccatgtacttagagccaattgatttttgacaaaggtgccaaaaactcacaacggggaaataacagtctcttcaataaatagagatgtgtctgggcatggtggctcacacctgtaatcccagtactttgggaggcagatatgggaggattgctgagaccagcctggacaacacaaggagaccctgtctctataaaataataataaataaataaataaaaataaataaataaatggaaacgtgaaaactggatattcacatgcagaagaatcaaactgaactcttttttttttttttttaagatggaggaagggcatcaaggaagacaggcagcctctctcaacactggaaaaatgcaaggaaacacattctcctctagagcctctggaaggaacagagccccactgacaccttgaayttagcccagcgagacccattttggacttctgacctccagaaccgttaagataatcaacttttgctgtcataagccactgagttggtatactagttaatttgttgcaacaacaaca

SEQ ID NO: 170766 - DNA, 399 bp, Homo sapiens
gtttttatggacacaggatagggttttatgggcacaaaatgggggtagggcaggccatgggtggttttggaaaaggcaacatttaagtcagaaaacaggaatgtatgttctcactttgggtggcagttccagacttgagggtagggccgtcactggggacctgccctgtctgcccagaatttccctgcctcctgtccgtatcgaaattactttgacattttggaatgaagaaaattaattatgctttttaaaaatataagttagctgtctttattttctaagaaaaaatgtagtttttactcaaaatkgtgcttaactgagcagcatttatgcagagtgacatctatagataaggactagctgtttctaaaatcaagtttatttttgaagatagttgtc

SEQ ID NO: 170767 - DNA, 336 bp, Homo sapiens
aaacaaaacaccatttaaaattgctccaaagaaaataaaaagatttaggtataaatcttacacaatatgaacatgatctgcatactgaaaattaaagtgttctaatgaataaaattggaaaagaccttattaaatggggagacacactgtgttcayagattgaaagaaccaacctataaatatatcatttcccttcaaactgatctgtagatttaatgcagttccaatcaaaatctcagcaagatttgtgtagagataaattaattctaaaatgtgtatggaaaagcacagggcctacaatagttaaaagtagtttgaaaacaagagtgaagtggg

SEQ ID NO: 170768 - DNA, 654 bp, Homo sapiens
tgtgctgctataaacaggcatgtccaagtatctttattgtataatgacttcttttcctctgggtagatacccagtagtgggattgctggaccaaatggtagctctacttttagttctttaagaaatctccacactgtttttcatagtggttgaatttttcctgagaactggaacaagacaagcatgctcactctcaccacttctattcaaaatagtactgaaagtcctagccagagcaatcagacaagagaaagaaataaagggcctcaaaataggtaaaaaggaagtcaaactgttactgtttgctgatgatatgattgtattccaagaaaaacctaaagactcctccaaaaagcccctagaactgataaatgaattcaggaaagtttcagaatacaaaactaatgtacacaaattagtagttctgctatatgccaaaagcaaccaagctgagaatcaaatcaagaactcaaccccctttacmacagctgtaaaaaatatatatacttagaaatatacgtaactaaggaggtgaaagacctcttcaaggaaaactacaaaacactcctgaaagaagtcacagaagacacaaacaaatggaaacacctctcctgctcatggatgggtagactcaatattgtaaaaatgtccata

SEQ ID NO: 170769 - DNA, 423 bp, Homo sapiens
aaaaagcttctacccagcaaaagaaacaatctgcagagtaaagagacaacctgcagaatgggagaaaatcttctcaatctatacatctgacaaaggacttatatccagaatctataaggaactcaaacaaattagtaaagataaacaatctcatcgaatagcggactaaggacgtgaatagacgattctcaaaagaagacatacaaatggccaacaaacatatgaaaaaatgatcaatatcactaattatgagggaaatgcaaactaaaactgcaatgtcataccaccttaatcctgcaagaatrgcaataaaataataataataataatacatgttggcagggatgtggtgaaaagggaacaatttaacactgctggtgggaaagtaaactagttaaatgcattttttaaagaaggcaaaat

SEQ ID NO: 170770 - DNA, 548 bp, Homo sapiens
ttagacacctatgaagccatcaccagggtgagataatgaacatatcaataaccccccaaagtttccctttgcttttttgtactttctcctccctgcccctctatgactctcccttattgtcctaggcaaccacgtgtttgatttctgttactatagattagtttgtattttggaagctctaaataagtagaattagactaaaatacaaaaaatgtgcaaaagatacaatacatgtacagacacccrcacatgcagtccccagtttatgatagtttgacttacaatttttcaacttatgttgttgcaaaaccattgcaatttgaaagtaatatacagtattcaatacagtacataagatattcaacactttattatgaaatactctctgtgttagaagattttgcccaattgtaggctactataagtgttctgagcacatttaaataaagctaggctaagctatgatgtttggtaggttaggtgtattaaatgaattttttacaataatattttaagcttgtgatggctttgttgagatgtaaccccat

SEQ ID NO: 170771 - DNA, 548 bp, Homo sapiens
ttagacacctatgaagccatcaccagggtgagataatgaacatatcaataaccccccaaagtttccctttgcttttttgtactttctcctccctgcccctctatgactctcccttattgtcctaggcaaccacgtgtttgatttctgttactatagattagtttgtattttggaagctctaaataagtagaattagactaaaatacaaaaaatgtgcaaaagatacaatacatgtacagacacccgcacatgcagtccccagtttatgatagtttgacttacaatttttcaacttatgttgttgcaaaaccattgcaatttgaaagtaatatacagtattcaatacagtacwtaagatattcaacactttattatgaaatactctctgtgttagaagattttgcccaattgtaggctactataagtgttctgagcacatttaaataaagctaggctaagctatgatgtttggtaggttaggtgtattaaatgaattttttacaataatattttaagcttgtgatggctttgttgagatgtaaccccat

SEQ ID NO: 170772 - DNA, 383 bp, Homo sapiens
gaattcctgccatcacctccttactctaccctcccggatgtccacaccctagtccctggactatgtaataatgttaggctacaaggcaaaagggattttgagaatgtaattaaggttgcaaaccttaaaayagtgagattatcctgaattgttcaggtagcccagtcgatccgtgtgagctcttaaaagcagagaactttctccagctggagttcaaatgatgcagcagaaaaagagatatcacaagcatgagacagacttgacccaccattgctggagggcaccatgtggaaaacagcaaaaatgaatgcacgcagcctctggcagcaaaagacagggccctggatgatagccagcaagggaagagaggccttagtcctaca

SEQ ID NO: 170773 - DNA, 379 bp, Homo sapiens
ggcctacgttgaaaaacgaaatatcttcccataaaaagtaggcagaagttttggagaaatttattttgatgtgtgcattcatctcacacagttgaaatattcttttgattgwgcagtgtggatacactcgttttgtagagtctgcaagtggatatttggagcactttgtggcctatagtgaaaaaggaaatatcttcacataaaaactagatagaagaattctgagaaacttcctttgaatgggcgcattcatctcacactgttgaactttttttttgattgagcaccttctaaacagtcattttgtagaatatgcaaaggaatatttgtgagcccattgatgcctctggggaaacaggaaatatcttcacataaaaac

SEQ ID NO: 170774 - DNA, 381 bp, Homo sapiens
attggcaaataagtgtagaagggaacagtcacaccctaatatagaactataaaygattataacaatttggaaaacaatatggcaatatctaataaatgagaaagctaactcatggctgtcagcttaccaattcctctgctgtttacataacttggaaaaacatctgtatacatatttaattgaaacaaaaaagactggcacatcaacaagataaattataattaaattttggtggactcttaaatacaatggttcccagcaatgaaaacaaatgatttagatctatgattatcaacaaccataaatctcataatcattctagggagtaataaaagcaggttgcaaaaatgtatgtatagaatgattctgtttaaaaatata

SEQ ID NO: 170775 - DNA, 482 bp, Homo sapiens
gcagtctatctcttccttcagatcctttaatatttgttctatatatttagatgatccaatgtttggtacatatataattgttatatccttttgataaattgacccttttatcattatatgatgtccttctttgtctctttgtacagtttttgacttaaaatctattttttctgacataaatatagctaatgctgctgtcttttggtttctatttggatgaaatctcattctccatcccttcactttctatataaatgcatcaccaaaagcgaggtragcctctctctctctctctctccctctctttggtagagacagggtcttgctttgttgcctaggctaggctggtctcaaactcctgactttgagggatcctttcacctcagcccaccaaagtgctaggattataggcatgagccaccatgcctggccaaaaatgaggtgagcatcttacagacaaaatattgttgggtcttttaaaa

SEQ ID NO: 170776 - DNA, 455 bp, Homo sapiens
ccggagaagcagcggtctcacccagagggagggaacttggtcatgagcttatcagaaacatctccaagatactcccagcaatgttgaggagggaaaatgtagaaggctggcaacccccatcagtggttcagatgatgtgtcagtggactgggagagataggtttcaataggacctcatcaggacatctagggtggtgggtcctgtggaaattctgttgatggaccaggtttcttaaagcaagactgacctatacctatgctggaaaatgaaatttatgtaccacacccacccacacaaacacaacttaagctctgtcccctgtttccaagaataaatggaaaacatgagtcctgatccctttattgcctcagattaatccctcttggccatggaacaaatcacagygccatggctgtggctcacattagacctgaccagcatggagtgattcaac

SEQ ID NO: 170777 - DNA, 537 bp, Homo sapiens
cgcaccactgcactccagcctgggtgacagagtgagataaattaaataaataaataaataaaaatgttttaaaagatataaaaggcatacaaattggacagaaataagtaaaattatctctgttgcagttgacattatcttatatgtagaagactacattttttctcaaaatagaattaattgaattaagtaaagttgcaggattcaaaatcagcacaccaaaaaaaaaaaaagttgtattttaatacactaacaatgaatgatcttcaaaagaaattcagcaaacaattccatttgcaatagcatcgaaaagactaaaacccttaggaatatatttaaccaagaaggtaaaagacttgtacactgaaaactataaaatatgctgaaagaaattaaagacacaaattaatagaaatcccatgttcatgaattggaaaatttaatattagtaagatatcaatatgacccaagatgatataragattctgtgcaacccctatcaaaatcccaatgatgttttttttgcttaaacagaaa

SEQ ID NO: 170778 - DNA, 625 bp, Homo sapiens
taaaatatttttaagtaaatgaaaatgaagataaaacttaaaaaaatgaaatgcagtaaaagcagtgcttagaaatttacagtactcaatgaatayattagaaaagaaggaagagctaaaataaataaaataagcttccaccttggaaaactagtaaaacaagaacaaattaaattgagagtaagcagaagaaaataaataataaaaatcagagcagaaatccattaaattgaaaacagaaaatcaatagagaaaagcaacaaaatcaaaagctggttatttgaaaatatcaataaagttgataaaccccttgtcaggttaactaaaaaaaatagatcacaaattattaatatcataagtaaaacgtaggaatttacctcagatcccatagtcattaaaagtagaatcaaggaatactatgaacaaatctgtgctcacgaatgggataatctagataaaatgtaccagttccctgaaagacactatctgccaaaattaatacaagaaggaatagacaatctgaatggacctatatctattaaagaaatagattcaataattaataatattccgcaacagaaagcaccaggcccagatgggttaactggtaaattctaccaattca

SEQ ID NO: 170779 - DNA, 625 bp, Homo sapiens
taaaatatttttaagtaaatgaaaatgaagataaaacttaaaaaaatgaaatgcagtaaaagcagtgcttagaaatttacagtactcaatgaatacattagaaaagaaggaagagctaaaataaataaaataagcttccaccttggaaaactagtaaaacaagaacaaattaaattgaragtaagcagaagaaaataaataataaaaatcagagcagaaatccattaaattgaaaacagaaaatcaatagagaaaagcaacaaaatcaaaagctggttatttgaaaatatcaataaagttgataaaccccttgtcaggttaactaaaaaaaatagatcacaaattattaatatcataagtaaaacgtaggaatttacctcagatcccatagtcattaaaagtagaatcaaggaatactatgaacaaatctgtgctcacgaatgggataatctagataaaatgtaccagttccctgaaagacactatctgccaaaattaatacaagaaggaatagacaatctgaatggacctatatctattaaagaaatagattcaataattaataatattccgcaacagaaagcaccaggcccagatgggttaactggtaaattctaccaattca

SEQ ID NO: 170780 - DNA, 608 bp, Homo sapiens
catacaaaagaccattatacaccatggccatgaaggatgtatcccaaatggcaagactgatcgaacatccaaacattaagtaatgttataaactgtattaatagaatggaaggaaaaaccacacctgattatctcaatagtcgcagaaaacacatttgacattatgcaacactgatttatgaccaaaaccctcaacaaacttggaaaagaagaaaactttctcaacctgataaagggcatctgtgcaaaacctaaagaggacattatacttaatggtgaaagactgaaagctttcactctgatactaggaacaaagacaggwtggcaactctcacctcttctattcaacaatgtactggagtttctatacaggggaattacgcagggaaaagaaacagaaggcattcgtattggaaaggaagaactaataatgttcttctacatacaagatgatgtatgtatgtagaaaaatcctaagaaattcacaaacacacacatacacatacagaaacatgtagaactgtacttttacaaggaaagcatggttgaaagatacaatatcaatttacaaaaattagctgtattcctccaatacataagtaaatata

SEQ ID NO: 170781 - DNA, 608 bp, Homo sapiens
catacaaaagaccattatacaccatggccatgaaggatgtatcccaaatggcaagactgatcgaacatccaaacattaagtaatgttataaactgtattaatagaatggaaggaaaaaccacacctgattatctcaatagtcgcagaaaacacatttgacattatgcaacactgatttatgaccaaaaccctcaacaaacttggaaaagaagaaaactttctcaacctgataaagggcatctgtgcaaaacctaaagaggacattatacttaatggtgaaagactgaaagctttcactctgatactaggaacaaagacaggttggcaactctcacctcttctattcaacaatgtactggagtttctatacaggggaattaygcagggaaaagaaacagaaggcattcgtattggaaaggaagaactaataatgttcttctacatacaagatgatgtatgtatgtagaaaaatcctaagaaattcacaaacacacacatacacatacagaaacatgtagaactgtacttttacaaggaaagcatggttgaaagatacaatatcaatttacaaaaattagctgtattcctccaatacataagtaaatata

SEQ ID NO: 170782 - DNA, 597 bp, Homo sapiens
aatatatatatatatatatatatwttttttttttgagatggagtcttgctctgttgcccagggtggagtgcaatggcatgatctcggctcactgcaatctctgcctcctggattcatgtgattctcctgcttcagcctcctgagtagctgggattacaggtgcatgccaccacgcctggctaatttttgtatttttagtagaggaggggtattaccatgatggccaggctgatctcgaactgctgacctcaggtgatctgcccgcctcggcctcccaaagtgctgggattacaggtgtgagccactgagcccagcttgatggaattatactttctatcaaattaattcttggaagtgtctgtctggttaacaaagctagggtgcactataactgctctcatttatgttagatgaagctggaatacatactattctgagagattttcaatggacacacatcaaaataaggccaatataaaagccaaaattattagttagaaaagactagattttatactcctaaaatagaagggaacttaggtctggagttggacagggatagaggtaggtggcccaggaagtaaagtgaaaagtgga

SEQ ID NO: 170783 - DNA, 409 bp, Homo sapiens
cttccttccgtatttaggactctatgactatatattggcagtgacgtacttagtgtatccgccatcagaagcggtcaatttttacattaatatgagaaaataaattttagtaataatcataaartaagacaaataataactttgctcttttggttagtctgataataatatttcatgtaaatgtcaagttaataagaaaattttaataaaactgaaatgtctgcaaaagaaatgtattagtccattctcagactgctataaagaaatacctgagaatgggtaatttataaagaaaatagttttaactggctcatgtttctgcaagctgtacaggaagtatagcggcttctgcttctggggaagcctcaggaagctttcaatcatggtggaagacaaagtgggagcaggc

SEQ ID NO: 170784 - DNA, 587 bp, Homo sapiens
aatttcaaatggattacacatattttctgtaattgtttttgcatttagtgttattatgtacatcttttctgtatcaccaaacctagttttctagtactccataaaatttcatcgaatgcttgtactatatttaaccagtgaattacttaaaatatttaggttttttcacctttacacacaatgctstaataaacatccttttatacaaatctttgcatacttttatattataccaatataaattttaaaaagtgggatttttatgtaatggaaatatgcattttttttccagatttcaggcctgttttttattaacgaatattccttattgcagtacaacttgcatacagaaaagtagatatatcataattatatagcttgataatcatatgctctaggccctgactcacagggggcgaggaggaggtggttagtcatgcagatttgcctatggaaagactgagcccagcagggaagggcctggctaagtcagggctggagggaacatacttgtgttaccaagtggaacacagctgtgtaacaaagtgttacaaagtgaacacacctttgtaacccacccaagtcaa

SEQ ID NO: 170785 - DNA, 587 bp, Homo sapiens
aatttcaaatggattacacatattttctgtaattgtttttgcatttagtgttattatgtacatcttttctgtatcaccaaacctagttttctagtactccataaaatttcatcgaatgcttgtactatatttaaccagtgaattacttaaaatatttaggttttttcacctttacacacaatgctgtaataaacatccttttatacaaatctttgcatacttttatattataccaatataaattttaaaaagtgggatttttatgtaatggaaatatgcattttttttccagatttcaggcctgttttttattaacgaatattccttattgcagtacaacttgcatacagaaaagtagatatatcataattatatagcttgataatcatatgctctaggccctgactcacagggggcgaggaggaggtggttagtcatgcagatttgcctatggaaagaytgagcccagcagggaagggcctggctaagtcagggctggagggaacatacttgtgttaccaagtggaacacagctgtgtaacaaagtgttacaaagtgaacacacctttgtaacccacccaagtcaa

SEQ ID NO: 170786 - DNA, 570 bp, Homo sapiens
tctccttactccagactttctctgcacatgccttaaaagggtcagaaacagtgttaaaagttgagcaattatatccaacatagttagctggaagatgaaagtaagaaaatagtataagagcaatttggtaggaacaaaaatctttcaaatatggggtctgttttggaggtgcgggtgaaggtagaaaattcagaatgtaacgagataagggaataattatttacaaactgttccaagctgcttaagaggccaattagcataatgactagtagtataggctttgcaatccaacaaacccatgttctgatcatgatttggccacttagagcctgcatgactttggtgactcataacacctctaagcaagaattcccacaacaaagcaataccttatccctcaccaggattaagttatatacatctcatatttggtacaattattagcacatagttaaacrttaaatgtcaggcaaattatcattaggaagaaaataaggctataataatattgctatatatcaagcaggattaactcatgcttaagcgatgctaaacataattagcgtcctt

SEQ ID NO: 170787 - DNA, 449 bp, Homo sapiens
gccctcaatatatttaagattttttgattatcctcattattggttgtattttatacttctttgcatgcctggtaatctttgatttgccatcagacattgtgaattaaactttgtcaagtactgaatatttttatatttatatgactattctggcactttattctacaatgacattaaattatttggaaacagtttaatttgggtcttgttttttatgatttggtagtcattttcagaaatgtcttagtcttgggctaattttttttttttgagacgcagagtcttcctctgtttcacaggctggagtgcacaggcaccatcactgcttactgcaaccttgaccttcagtgctcaaacaatcctcctacctcagcctcctgagtagctgagacyataggcatgtgccaccatgctcggctagtttttaaatctattgtagagatgaggtg

SEQ ID NO: 170788 - DNA, 541 bp, Homo sapiens
atagtcctaaaattttcatttgactcacccctcggctgatttgtcagtttactaagaagtatcaaatccattttaagatgcagttctctccctgctgagaagtggcttatcagacatggacttgagatattctcagaggataaagaggtggctaattagaaggttaagacccatagaagagaagggagaaattcyttatgattattttaagcagaggcacgtcttactagttcagttgtggagccttccctcagagagttgctgtctgtggactattctgatccggagaaatagccttgctaacactcctggggcacacccatggcgaatccagctactgaacggacggactctctcagttggtctgtctgccagttggtagatgcaattgagtggaaaatcaaatggcagttcatgttttttccttctcaacagagaccaccaaagggggggaaaagtcataaatctttcctgtgttaattgagaacactggatgccattattaaagcatttccctcagggtcacactactcatttgaat

SEQ ID NO: 170789 - DNA, 453 bp, Homo sapiens
caagtcattctcttctgtaactcttgttcataaagacaaaatgcactgcttgtggaattcaagcactgaccaaactttgaccaatgtcttcatctgaagaagaagagtactgaggttttaattgataacagaatgcaaatatcatccaaataaacacttggtaatagttgttcactgtttacagagataaagtcaagttcagtttttactgccttaaactatcttagaatgtattttgtctatactttccaaaaaaaatcctgcccataattttcccaaaaataaataaatgttttaaggttaaagaattgaaacacatgtgagcatttattaagaaataaataaatatttattgaatcaatccaattcatagaaaattaaatgaatgcaggtatrgcatttaaaaggcaagaagttaatgaaaaaagaaattaagggggagaattaataatg

SEQ ID NO: 170790 - DNA, 588 bp, Homo sapiens
tgcagcacattgcctggatattaaaaacagattgttaaacacttgctggcaaaatcccagaggatctatgtggatgtatttgttttaaaatttattaaaattctctggctacagattaattttgcttgttcaatattttttattgtttcacctgctgttgagtagaagctgcaactggaaaagtttttgtttcrtttaagttaccaagttctatcaaaattgtttgaaagttcctaaacattttttttttattggaatgatttgctttgaaataacccaccaccctcaggagggggttactcacacaaggtatccagatgtcttgggtaaggagcaaatattcagcatccttaaggaagggcaagagcacttggaacttggcaggagctcagcccattaagagaagagactccactcctctgttgatgaccaaggaaaatggtctgctggattccgagtgtgagaaaaggcagctgagccttgtatttgatggaataagccaggcaaaacaatttgcctagtgctgtaagggcgagccagatcagagcatcctgtgaaaggaagtctgagagggacagggattcattc

SEQ ID NO: 170791 - DNA, 592 bp, Homo sapiens
tatgaaaatgggcctatcctgctcttcctctaagatttaccacataattctcctgcktttctattatgagaccagaaattctaaataagccccttctagtgtgctcagaggttggatcaatagacacgaactaaaagaagcctgaattctataaagcattttgttatccaacggcacagatccattgatatgaatctatatgttgccaatatattaatatgagaatggaaaagccacagaattagggctacaaaactttagttggaatcactgttcctcagttaatagctgagtgaccattagtctctttaagcctcaattgctttatttttacctctgtttcctcatctgcaaattggggataaaatattatctgatgtagttcaacaatcaactgagacatatgaatatatcatatatatgctacaatgtgtcacatatatatacatatatatatatgaaagctcttcataggtaacaaaacataaaatattaatacttacattaactagaaaatatccttaaacatttttaatccaaatttacaaagccaggatttgaacatagggccacatgacttcacagttttttt

SEQ ID NO: 170792 - DNA, 592 bp, Homo sapiens
tatgaaaatgggcctatcctgctcttcctctaagatttaccacataattctcctgcttttctattatgagaccagaaattctaaataagccccttctagtgtgctcagaggttggatcaatagacacgaactaaaagaagcctgaattctataaagcattttgttatccaacggcacagatccattgatatgaatctatatgttgccaatatattaatatgagaatggaaaagccacagaattagggctacaaaactttagttggaatcactgttcctcagttaatagctgagtgrccattagtctctttaagcctcaattgctttatttttacctctgtttcctcatctgcaaattggggataaaatattatctgatgtagttcaacaatcaactgagacatatgaatatatcatatatatgctacaatgtgtcacatatatatacatatatatatatgaaagctcttcataggtaacaaaacataaaatattaatacttacattaactagaaaatatccttaaacatttttaatccaaatttacaaagccaggatttgaacatagggccacatgacttcacagttttttt

SEQ ID NO: 170793 - DNA, 592 bp, Homo sapiens
tatgaaaatgggcctatcctgctcttcctctaagatttaccacataattctcctgcttttctattatgagaccagaaattctaaataagccccttctagtgtgctcagaggttggatcaatagacacgaactaaaagaagcctgaattctataaagcattttgttatccaacggcacagatccattgatatgaatctatatgttgccaatatattaatatgagaatggaaaagccacagaattagggctacaaaactttagttggaatcactgttcctcagttaatagctgagtgaccattagtctctttaagcctcaattgctttatttttacctctgtttcctcatctgcaaattggggataaaatattatctgatgtagttcaacaatcaactgagacatatgaatatatcatatatatgctacaatgtgtcacatatatatacatatatatatatgaaagctcttcataggtaacaaaacataaaatattaatacttacattaactagaaaatatccttaaacakttttaatccaaatttacaaagccaggatttgaacatagggccacatgacttcacagttttttt

SEQ ID NO: 170794 - DNA, 587 bp, Homo sapiens
agctgatagtctagaggaagaagacagatgttgatcaaataaacscaaaatcacaacatttataagggcttaaaagcaaagatacttggaaagtggtggatgactcagagaagaaagactacctccaacagataataaagaagaatgctttatagaatagagctcatcagagctcagcttttgaagataggtaagattcagatttacagagtagaagggaaagttgtctcagagggtacatgcagtatgagacaaagaataggtttagtcaagaaatgagtctttaaaagtgtttgaaggaattgaaagtaaatccatttgtctaagaggtttagaaaactaaaaattgacaagtatgttgcaaccaaattgtgagggttttgaatgcctgggaggcagaggttgcagtgagccgagatcacgccattgcactctagcctgggcgacagagtgagactccgtctaaaaaaaaaaaaaaaaaaaaaaaaaaaaaaaaaaaaatgggccaacgggaaaatttttttttttttttgacttctgttaagggcttacttgattaggttagactgtcccatgacaaacttcat

SEQ ID NO: 170795 - DNA, 583 bp, Homo sapiens
agctgatagtctagaggaagaagacagatgttgatcaaataaacgcaaaatcacaacatttataagggcttaaaagcaaagatacttggaaagtggtggatgactcagagaagaaagactacctccaacagataataaagaagaatgctttatagaatagagctcatcagagctcagcttttgaagataggtaagattcagatttacagagtagaagggaaagttgtctcagagggtacatgcagtatgagacaaagaataggtttrgtcaagaaatgagtctttaaaagtgtttgaaggaattgaaagtaaatccatttgtctaagaggtttagaaaactaaaaattgacaagtatgttgcaaccaaattgtgagggttttgaatgcctgggaggcagaggttgcagtgagccgagatcacgccattgcactctagcctgggcgacagagtgagactccgtctaaaaaaaaaaaaaaaaaaaaaaaaaaaaaaaaaaaaatgggccaacgggaaaatttttttttttttttgacttctgttaagggcttacttgattaggttagactgtcccatgacaaact

SEQ ID NO: 170796 - DNA, 583 bp, Homo sapiens
agctgatagtctagaggaagaagacagatgttgatcaaataaacgcaaaatcacaacatttataagggcttaaaagcaaagatacttggaaagtggtggatgactcagagaagaaagactacctccaacagataataaagaagaatgctttatagaatagagctcatcagagctcagcttttgaagataggtaagattcagatttacagagtagaagggaaagttgtctcagagggtacatgcagtatgagacaaagaataggtttagtcaagaaatgagtctttaaaagtgtttgaaggaattgaaagtaaatccatttgtytaagaggtttagaaaactaaaaattgacaagtatgttgcaaccaaattgtgagggttttgaatgcctgggaggcagaggttgcagtgagccgagatcacgccattgcactctagcctgggcgacagagtgagactccgtctaaaaaaaaaaaaaaaaaaaaaaaaaaaaaaaaaaaaatgggccaacgggaaaatttttttttttttttgacttctgttaagggcttacttgattaggttagactgtcccatgacaaact

SEQ ID NO: 170797 - DNA, 583 bp, Homo sapiens
agctgatagtctagaggaagaagacagatgttgatcaaataaacgcaaaatcacaacatttataagggcttaaaagcaaagatacttggaaagtggtggatgactcagagaagaaagactacctccaacagataataaagaagaatgctttatagaatagagctcatcagagctcagcttttgaagataggtaagattcagatttacagagtagaagggaaagttgtctcagagggtacatgcagtatgagacaaagaataggtttagtcaagaaatgagtctttaaaagtgtttgaaggaattgaaagtaaatccatttgtctaagaggtttagaaaactaaaaattgacaagtatgttgcaaccaaattgtgagggttttgaatgcctgggaggcagaggttgcagtgagccgagatcacgccattgcactctagcctgggcgacagagtgagactccgtmtaaaaaaaaaaaaaaaaaaaaaaaaaaaaaaaaaaaaatgggccaacgggaaaatttttttttttttttgacttctgttaagggcttacttgattaggttagactgtcccatgacaaact

SEQ ID NO: 170798 - DNA, 543 bp, Homo sapiens
gctacccattaggtgaaaaaacacattgtatgtaaaaatggactttgaaaatatcaataaaatgattgattaataagtgacctcatgaatcaagcaaataaacatgggaatgaattcaagtaggtgagaaaaagaaatgtgatataaagaaagtgggcttatgaaaaggatggaagatgatagtgtggagaaaggcagtgcatccacacagtcttctgattccttctcatgacttctgaataggccttgggtctgaaacacttctttaccaagagatagagtcctcactgcctgtgcaagattcatcaccttgagtggaagtatcatttcctgtttcagactcaatgcatactccttctttctgaayaagtgtgtgtcctatgtcacctgaccaaccttactagcatatctgcctctggcaggaaggggatcgagtccttctgacacagcacaagagggtatgtgcaggccagttgcctcatgttggctactgggagggggcccgctggccatggaagactcaccactgattctgtttttctt

SEQ ID NO: 170799 - DNA, 580 bp, Homo sapiens
gtctttgcttccataacatgtggatttgagttatgacttagtgacttgagggatcccagagtttgactttggcgggcctgctgcatcattcatagatggtgagaaagattgcttggcatttgtcctgatactaggaataactaaaaacctgttctcaagtgaatgttattttgtcccatcctctaattcttctcgagcttgggctaagggtggacatcattcctgaggatgwcacagagagtaatgactcctgtaaatatccccttttattttgaagggcaagtagatcatcaaaactagaaagaaatctcctgtaccttggaaatgaagtaacctgggactcccatacttcctagaaaattagagtttaggtcaaacgaggacttttcagtagactgaaagctctgaaagaatctcatgtttccctactcagtccctttcatcccatcccttagatttttcacttaagccccagggaaaacactgcatatatttatttcttgtggccacccttaaacttgaagaatcaggaggagttccttcaccttagaaatccaaaatttctgtggaggagaaaagt

SEQ ID NO: 170800 - DNA, 392 bp, Homo sapiens
gctttgagggattgtatttagttaactttgaaagtttgaatgcgatcaaagtagctatctgaatgtttaaaagacattatttactggaatatatataaaaatctgtgttgaaacagactgaggtgatggtgcagagaagcagggtgggtctggggtcagagacaarcaagaagattgataatctctctccctttctccttggaaaaagcataggtcaaagtttaccaatgatgccaacatcctgtctggccaagacaaagctcagtaatgagggcagtgaggacactgtgagccatacaaagctgtttgtttctgctggcatgctaatgcaacaagttgctgatgaaagtgcctggaaaaaaaaaatcctattccttattctttgctcttgc

SEQ ID NO: 170801 - DNA, 584 bp, Homo sapiens
gtcacccaggctggagtgtagtggcacaaacagagctcacttcagccttgacttcctgggctcaagcgatcctcccacctctggctccaagtagctgccaccatgtccgggtaatttttttgtattttttgtagagatgggattwcactttgttgcctggcttgtctcgaactcctgagccaaggtgggaggatctctagagcccaagagtttgagaccagcctgggtaacatggtgagactccgtttctatttttttatttaaaaaattaaaaattaaattaaatgttaaaaataaatacatgtaaatatttcgagaaatagtgaccaaaaactttccaaattcaatgaagaacattaatgaaagcaataaaaagtacaatgaactcaaagtaggatacagagatccactcgtagacacatcagagtcaaactgctaaaagccaaagatgaaaaaaaaatcatgaaagcagcaagagcaaaaaacactcatcacagaatggttagagcatctgaatctggagttaatgtttttaatcaataaaggagagagaccagtaagggtcaatagatacagcaaccagc

SEQ ID NO: 170802 - DNA, 584 bp, Homo sapiens
gtcacccaggctggagtgtagtggcacaaacagagctcacttcagccttgacttcctgggctcaagcgatcctcccacctctggctccaagtagctgccaccatgtccgggtaatttttttgtattttttgtagagatgggattacactttgttgcctggcttgtctcgaactcctgagccaaggtgggaggatctctagagcccaagagtttgagaccagcctgggtaacatggtgagactccgtttctatttttttatttaaaaaattaaaaattaaattaaatgttaaaaataaatacatgtaaatatttcgagaaatagtgaccaaaaactttccaaattcaatgaagaacattaatgaaagcaataaaaagtacaatgaactcaaagtaggatacagagatccactcgtagacacatcagagtcaaactgctaaaagccaaagatgaaaaaaaaatcatgaaagcagcaagagcaaaaaasactcatcacagaatggttagagcatctgaatctggagttaatgtttttaatcaataaaggagagagaccagtaagggtcaatagatacagcaaccagc

SEQ ID NO: 170803 - DNA, 547 bp, Homo sapiens
agggaaaaccaaattaaagctgcccaccagcccatagcaaacagaacagaaaatgtcagtcttacgatgggaagtgtaacaagatggaaagtttctctatgcgtttgcctttctaaaccaggcttcggcctcggcaagcattgaaaggtgccaggtctgagtaaataaacagagctttacaagatgaagtatgctaatggccgctccagcatctgtgggattgccctggatggaaaacgactgaccctttactttgttcagctcctattccttgtacctcattactcttctctcttagcttcaacctctctctagattttatcgcaaagggaaaagtctggtgtgaccattccacggcctgctcaactgaggctatgttacagccactctttgtcgtgttgtgtccaggaatgtygcctttgcctctcaggctctttcctccaatttaggtttccaactgactttcaactcacagttacagtgatttcaattcactgacctgagtgtaatggaggaggggttcatgtactgtggaagccccttggag

SEQ ID NO: 170804 - DNA, 594 bp, Homo sapiens
ttatttgtgtgcttatagctgcattgctattcccacaagctccattgcttcatacatagaacaaccataactagacctgcaaamtggtctcagcggtaggctctgcatggtaaagacagtgtttacacaaagcagttagctatcatcttatgagaggcctctaaatcaaatttgcacatacaagcaagggtttgcaaggactaatcagataattataccccaggcaaccaatttgcatggcaagttgcacagttttctttgctttacatttcatctttggtaaaatagggtaccacgtaaaaatctcagtctgtgtggtgtttcgtttgtattaccggtgttcactaaaacaggttatgagtttataaggatcatgttgtgctctgtgacttatagtgcaaaatgacctcacactgtagcaaccagcagggtacccgggccatctagaattgttttgctccctacccctcctccaacataaaagatacagagtttctttgaaaagtagacaagaaaaactcaatctccagcctatgaggcttattactctatcatcagatgtatggtttgtaacataaaatgtatgtaagccag

SEQ ID NO: 170805 - DNA, 420 bp, Homo sapiens
cctcttgacttaatttgaaaacctgtgttggtggtgtattaaagaccaggtgtgctattagcaaacaaagggattgttttgtttttagggtgaaaaatacttgataattcaggcacaaagggaaacgaaggttttgccttagaagttggaagggttttgtttttttcaaattaaagttctaataggttttgttgtcacaaaggtagatgcttactccttcaactttaagatgaagattactcttaaaactgcaagtaggaagggtttgagccactagaacacattgtcatcaggataatgtgaaattactgaaccgatacttcttaaagatagacagacatrgtacctgatgtggtattctagaaccggttagggtttcaaaggatattaaatggtatcctctcaccacatgtttagatc

SEQ ID NO: 170806 - DNA, 663 bp, Homo sapiens
tggatgtactattcattagcagccctagtttatgatattccaatgttttaagcaatggtagattcaggaggcttataaacctcatcttttatcaacacacatgttaactggtatccttctgtgctgtcaaacatgtggatttggggaaaatgtaagagaggggatgaggaagagagattttaatgggtggtattttacagaattcagggggaaaaatagtataccatgtccatttactagaactaaatgactactagaaccaaagtcatttactttaaataactactcaaccattgaggacactgatttggggggaaaaaagtgatttatataacgaatagtttaatagaaagtaagccttttaggttctgctatggaaatagcagaaataggattagagagtcagcaacttaaatacacataatccatgattatgtcttttyagatgcatgaattatgaatgagtcagtctgaacagttgtttggcatgaagtgtgttgacaggtcaagttgacctgtgctttgggccaggggtggtctaactaacagcaactttacagtttaggagttaacccatttatgccagagattgcaatttatttttgtaaaaaatcagaccttggtgatgaccttgagcaataggatataaataactcccacaag

SEQ ID NO: 170807 - DNA, 413 bp, Homo sapiens
gaattctttgatgtctaataagagctgaacttactcggaaaggccttccacactcatcacattcatagggtttttcacctgtgtggattctctgatgctgaataagacctgtgcgcccactgaagtctttcccacattctttacatttatagggttttactcccgtgtgtactctatgatgtccaatgagatgtgagcgctgaatgaaggyttttccacactcatcacatttatagggcttctctcccgtgtgagttctcctgtgtttactaaggtctgagctatgactgaaacttttcccacattcatcacatttatatcgtcttctttccctctgttgccattctgatctgccctcattttcaataatatctttggacttaggatgctgaggagtatctttgttcagtctg

SEQ ID NO: 170808 - DNA, 461 bp, Homo sapiens
actttacttagtttgtttatcagcactaacagtttttttggtgtagtcttcaggtttttcgaggtataagattatatcatctgcgaacagactaacctgactttttgctatccggtttggatgccatttatttccttctcttgcataattgctctggccaggacttcgggtattatgttgaacaacagtggtgagatgggcattcttatcttgttccagtccttagagaaaaggccttcagtttgatgttagctgtaggtttgtcatatatggcccttattttgaggtatgttccttttataccaattttgacaagggtttttatcaaaaagcaatgaattttatcaaatgcttttcagcatctattgaaataatcatatggtgtttgttcttgattatattaatgtgatatrtcacatttattgatttgcatatgttgaaccatccttgcatccctggag

SEQ ID NO: 170809 - DNA, 483 bp, Homo sapiens
atgtaggagaagcagagacaaataacactgaaaaactaggtactgtctagtgcctgccattagtgaggcagtttccaagtgccaattccaatattcattatgtctttcctaagcaacaagaacatttattggaaatccccaccactaccatcaccatcaccaccagatgtctaccaatgacatgtataaataaaaacgttatgtgacctcacatctgttagaatagcatatatgtatatatgagagagagagagagaattgtacacacacttgttactttcatatatattatatatatgctattctaacagatatgatgtctatatctatgtatctatctatgtatctatctatgtatctatgtatctatgtatctatctatstatctatctatctatctatctatctatctatctagatatatacacatacacatatatacctatatatgaaaataacaagtgttggtgagaatgtagggaa

SEQ ID NO: 170810 - DNA, 270 bp, Homo sapiens
ggaattcttgtgcattgttggtgggaatgtaaaatggtgcagccactataaaaaacagtatggtggttcctaaaaaactttcatgtagaatsaccgtatcatccggcaatttcatttctgggtatacacccaaaagaattgaaagaatggtcttaaagagatatttgtacacccatgcacatagcgatgttgttcacaatagccaaaaggtaaaagcaacccaggtgtccattgatagatgaataatgaacaaaatgtgatatatgcaaa

SEQ ID NO: 170811 - DNA, 394 bp, Homo sapiens
gagtcttctatctgtgaaattgtcaagaggaaaaataaattcatgcatagtatatatagggtttggtgctatccacagtttcaggcatccactgsggatcttggaatgtaccacctgcaaataagtggagactattgtattttattataattaaatattaaaaagttatgtgagaattccaataagtggccctcctgttttcccccttcctagaacagatatgtggactgaggttctagaacttcattggactatgaggtgatactgagaaaaagagctacaaaccatggtgtggcagagataaagggagaatgggtccctaatgctcctagagcgattgacccacccctggactgctttcctctcagcgtctgatatggtttggatgtctgtc

SEQ ID NO: 170812 - DNA, 498 bp, Homo sapiens
caattaagactttggcagccttcacgatggagaacctgtataccctcttacctctagattctgaaagcaaattaaggggcgttgaatggactggttttcaagcgcagaatgtagcagttcccgattcccttttccttagttcattgattctcaaaccttataatacatacaaatcactgaggagcccgttaaagggcatattctgggtctccctgtacttctctccacctcccaattcagattccccagatgtctgccatagggcctttcaagctggaattcagctgctgcgctgtgcttcctggcattttggagacacacattttgggaacacccccatgggtttcaggkgcttcctgcgtctgtggagaaaacttttcccttgggcttctttggcttcttaggattgtcctcaaaaagaagttgaccttgggcaatctacttaactttccctggcttccatttcttatctagtgaaataattattataataaaacc

SEQ ID NO: 170813 - DNA, 575 bp, Homo sapiens
aagctttgctaactttctcaaaacactctcataatgaacaggtgttatcattctttggcactccagaaggtcagcaagcaaaatgctttgttcatcctaaaaaacttttgccctgagctttgctcttgactggtcctcttttgctttgactggaccacttccacctcttggtagccattgctttggttgtgctttgtcttcaggatcacactggtgaagccatgtttcatctcctattacaattctttgaaaaaacgctttagaattttgatgacacttgtttgaaatttccattgaaagttctgcttttgtctgcaactgatctgggtgcaaaggctttggcatccatcaagtggaaaatctgctcaacttttaaaattttagtcagcatttcataagctgcaccaattgagatgtctgtggtgtcagctattttttctgttaattgtcctcttcaaaaacaagatgactttttcctcgaaaattaatgtgaatggtctgctgttgcaggcttcatcttcaacattgtctagycccctcttaaaatgagttctacatttgtaaactgcttactt

SEQ ID NO: 170814 - DNA, 585 bp, Homo sapiens
ttgaattacaaaatctcccaacaatgccaaagaaaattcaatacccaaatccaaaagatattttacaggattattgggaagattatttttattattgcttttactttaatcttttaaaattttgttcagttataaggaagcctgattgtgtagaacaattcctcatttggacccttcattaagtaaacgtggagtagaacagatcaatatccttaaataatataagacaaaactacttgtactacacagctcttggaggaatgatggaacaaaatatcctttccatcagtacatcttggatatatctagcactgggacaaaaagggaaaggctttgatgcctcaagaaaacagatgagaatatttgtcataccctagcagcagtatctggagttaggaatgaaagagtttttctggagtaacaggggtggacatttgtagtgagcatgatagtaactactccttaaagagtgctgccttttgtgayggtacaagcatcaaagagtgattgtgaagatgagtgaaagaatgtacatgaagcacatagtatagtttagggggcatttagggggcttcttaaagagta

SEQ ID NO: 170815 - DNA, 456 bp, Homo sapiens
agaactgtcagaattggatgacataataaattccccttcttctttccctacctgcctgaacacttcgaaaatttcaaattctaaattgtggaaaagagtgtatttgttatatccatcatgattctataaacatctctcttaaagatttaaggatgagttttttaaagtcatgaaagtagagaaaggaattatcagggacaatctcaatgtaaatctggaaaaaccagtaagatacaggacctccctgaagtttccctggggtttccttcggtctactgtttgctgcgactgcttccagagcatgctctcctgaatgtctgaaaagagatatgacagggagggggaaccttgagaaagagaaaaaaggcaggcactcaacgaaatcaagataatggaaggtttatgtctcttcccctaggaatgacagaatygggtatgtgagacttcctcagaact

SEQ ID NO: 170816 - DNA, 582 bp, Homo sapiens
ctttgtcccttcattattagcaagcatctagcaatttagaagcacamatcctttccatcttaggaaagcctatcctgcttttctgcttcatttttcccctcattattgtttatcactacgtaactatacattttacttaccttgtttgtcggcttcctcactagaacatatgtcccacagggtcagacatttttctctgttttgttcacaactttattcgagcacctagaacaggaccactcatgtagtatttgttgaaaatttgaagaaattgattttattaattgaatatatttgagtaaccaaacatattgccatccaatatttttaaaggtatttggggagaaatatggcagaaatctagtttaaacttatgccagacctgggaaagataccatgcagtagtaaccttacccattatactcaagaatgagatctccaagaatagcgttttcttcgttgcaggccactggccagcatccagccagacgcctcattgccaatgaaaagccagcttcatgaccctaaggataagaaaaccagtgctcacaactaccaagcgaggcatcacagacagggtgg

SEQ ID NO: 170817 - DNA, 389 bp, Homo sapiens
gcttcctcttactttgtcatttctgcaaatttgtataatattcagaaatgataaacaagggtcattgctttgatcagagtctaacagaaatcactgatagaaagccggcctgcctattgtttaaagaatcttccgaggatgggagacgacgaagtagaaaacagaaccaaatattgaccgaaggcagccacagaagtcagaatgccacmctatctaatcaggacttaaaagaaacagcaaaatgggtaaaattgaacttgagagatgcaaaggctcagagatgaggagtaatttgaaaatgtgtgcattgagggataaaagggaccagtgtcttctcattaatatccaaattcgctttatatttttcaggatcaatcacataattaaat

SEQ ID NO: 170818 - DNA, 389 bp, Homo sapiens
gcttcctcttactttgtcatttctgcaaatttgtataatattcagaaatgataaacaagggtcattgctttgatcagagtctaacagaaatcactgatagaaagccggcctgcctattgtttaaagaatcttccgaggatgggagacgacgaagtagaaaacagaaccaaatattgaccgaaggcagccacagaagtcagaatgccacactatctaatcaggacttaaaagaaacagcaaaatgggtaaaattgaacttgagagatgcaaaggctcagagatgaggagtaatttgaaaatgtgtgcattgagggataaaagggaccagtgtcttctcattaatatccaaattsgctttatatttttcaggatcaatcacataattaaat

SEQ ID NO: 170819 - DNA, 592 bp, Homo sapiens
agatccttatgtgttcctgcttgagatcattccctgatatgggagcatccttatcagttgacctagaccttcctagagtattgtaacctaagaaaagtaaggcccatattcttcagaaatgcagtctgaaaaaagctaatgtctctgattatttacctaagagaggacagaattatatgctgggaaggttaaagtcagtgacaggccaccttccggtcatgatgtcaattatattcttgccagaatgccygtaaagccttctcaaaggagatcttgaaaaacaaggtgaagaaataacacataagactatattcccgtttttaggaagtcacaatacaccttagttttatacactgttggttggcagaccaatacccattccctcttcctctcttaactaaaagagccttgattttgctttaggacagcaatgcatcaattaaaaatattgcttattccagactcacttacagctagtgatagctgcatgacctattatttcctggcagtgagacataagcacaagttaactaagtggacaactgagaaaaatatatttctttccagaaataaagggacatatttcctgttc

SEQ ID NO: 170820 - DNA, 592 bp, Homo sapiens
agatccttatgtgttcctgcttgagatcattccctgatatgggagcatccttatcagttgacctagaccttcctagagtattgtaacctaagaaaagtaaggcccatattcttcagaaatgcagtctgaaaaaagctaatgtctctgattatttacctaagagaggacagaattatatgctgggaaggttaaagtcagtgacaggccaccttccggtcatgatgtcaattatattcttgccagaatgcccgtaaagccttctcaaaggagatcttgaaaaacaaggtgaagaaataacacataagactatattcccgtttttaggaagtcacaatacaccttagttttatacactgttggttggcagaccaatacccattccctcttcctytcttaactaaaagagccttgattttgctttaggacagcaatgcatcaattaaaaatattgcttattccagactcacttacagctagtgatagctgcatgacctattatttcctggcagtgagacataagcacaagttaactaagtggacaactgagaaaaatatatttctttccagaaataaagggacatatttcctgttc

SEQ ID NO: 170821 - DNA, 543 bp, Homo sapiens
gtgaggatgcctaacatacccaatacacaaccagcaataatgaaaccaacagagaaacatccagtttatacgctgattgcaaaaaaacatgcattggcccaagctgaacttaaacaccaggaagaagtagaaagaaaagatgcagaattagtcatcgggaatgagaaatgcaaaacctcactcaacatggtagaaaaaataattggccacttcttcttagcaattttcctatagaaccttgtttctatyaggatttttctgttgacattcctatagaattccaaaagacagtaaagcttatatactacttgtggatgttccatgctgtaacactatttctaaatatcttcagatgcttgtcttggttttgtgttgattttgcaagagtggttgattttagtttgagtatcctgtggttcttgctttttactccttgttaatttgtctgttggtacagatcactttatggagctttcaggagtggcagttcattcagactctttgtattcttcttcgtctatatttgttagtttgctgtacatg

SEQ ID NO: 170822 - DNA, 562 bp, Homo sapiens
tgcaaaaaaacatgcattggcccaagctgaacttaaacaccaggaagaagtagaaagaaaagatgcagaattagtcatcgggaatgagaaatgcaaaacctcactcaacatggtagaaaaaataattggccacttcttcttagcaattttcctatagaaccttgtttctattaggatttttctgttgacattcctatagaattccaaaagacagtaaagcttatatactacttgtggatgttccatgctgtaacactatttctaaatatcttcagatgcttgtcttggttttgtgttgattttgcaagagtggttgattttagtttgagtatcctgtggttcttgctttttactccttgttaatttgtctgttggtacagatcactttatggagctttcaggagtggcagttcattmagactctttgtattcttcttcgtctatatttgttagtttgctgtacatgcattccaggcatatgaaattggggtaattgtggttgagtttcaacccttactgttctcaaccaaaatattcctattggaatcaggatgataatcac

SEQ ID NO: 170823 - DNA, 601 bp, Homo sapiens
tgattttagtttgagtatcctgtggttcttgctttttactccttgttaatttgtctgttggtacagatcactttatggagctttcaggagtggcagttcattcagactctttgtattcttcttcgtctatatttgttagtttgctgtacatgcattccaggcatatgaaattggggtaattgtggttgagtttcaacccttactgttctcaaccaaaatattcctattggaatcaggatgataatcacagcagcacttttcgcagcatcagcagccatctcactagttatgtttttaaaagatgatggcctccagctgcatctatgttgctacaaaggacataatttcattttgggggctgtgtaatattccatggtgtatacataccacattttctttatccagtctaccattgatggacatttaggttgattccatgactttgctattgtgaatagtgctgcaagaaayatacaagtgcagatgtctttttgaaaaaagaaggtactaattaacattcccactaatggtgtacaagggttcccctttgtctacattctcaccagtatctgctattctctgtcttttttgtaaaagtcat

SEQ ID NO: 170824 - DNA, 431 bp, Homo sapiens
tagtttgtggtggaagatttagagaaagaagatcatggatattcaggtaggcctattgaattcgagcaccaaagttggagtagacatgcccagagaaaggacatgagtatgtgcacgtgatgaagaagaaagaaagggatagggatagagagacagagagagaccgaagcttgagatcccattaaatatggcgaaaagctaggttttttgtttgkttggttggttggtttttgcagtttggttccatatgtctacaaatctttccaataattcttattctccagtttgtacctttccattatttgcaaccaaagaatcctggaataacaatcaagatgtctttccctcactagttcctcaaagtcaaaatattcatatatcatttgtaataggaatgtttcagtaacaagtgacaaaaaatgaaattaagt

SEQ ID NO: 170825 - DNA, 410 bp, Homo sapiens
attacagccattatggaaaatagtataaaacttccccctaaaattagaaatagaactaccacatgatcctgaatctcacttctagatatacagccaaaggaaataaaatcagctgtggcctatctgtactctcatgttcactgmagcatccctcacaatacccaagatatggaatcaatgtaagtgtccatcagtagataatggataaagaaaatgtggtatagacacacgataaaatattatccagccttaagaatgaaggaaatcctgtcatctgtgataacatgcaggaacctggagaatattaagtgaaataagctaggtacagaaagacaaatactgcaggatctcacttatctgtagactctaaaaaagttgaactcacagaagcagaaattagaatggtgatt

SEQ ID NO: 170826 - DNA, 402 bp, Homo sapiens
gcacaaccgactcgcctcctcctcctcctctattccctcttctgttgctctttgccacttctccatatttatgagaggggaaggatgaggggtggctgtcatggccttattatctgtttctwccaagtatgcctctgccttttacactctctcattgtttctttttctgccagcccaaaccccatttttgtgtgtaccaagctaactctgccagactttggggttgacgaccttaaattggaaaagagaaatacaagcacatgccaataccacacgtataattgtgacaatctatctttctgcacctgagaccaatatctaggcttgcatttgcaaaaatatggtagttgcttatcagctgtgtgaatttggccaagtttcttaacctctctcagcatcagt

SEQ ID NO: 170827 - DNA, 397 bp, Homo sapiens
tcctttttttgctgtgactgtgtcattccctaaggtcttatggtcctctgatccatgcagaagtaaaattgaaaacagagaaggcacaatgaccaactaagtgctktggtctagaggtgacacacattgctttcacttacatccagaaccaaccacattgctccaaatagaagcaggggtgtaggtccagtgggaggggacagtgagatcttcgctgggcagcttctttccaagcccagctataatagaagaaacagcacaaattattggtggacatttagctatttttgtcaaaactaaagtttgaccataaaagaaggcaaaacctgtcccaatcagattggaggatcagcaaactatgcatgagccaaatacagcctgttgtttgttttttata

SEQ ID NO: 170828 - DNA, 397 bp, Homo sapiens
tcctttttttgctgtgactgtgtcattccctaaggtcttatggtcctctgatccatgcagaagtaaaattgaaaacagagaaggcacaatgaccaactaagtgctgtggtctagaggtgacacacattgctttcacttacatccagaaccaaccacattgctccaaatagaagcaggggtgtaggtccagtgggaggggacagtgagatcttcgctgggcagcttctttccaagcccagctataatagaagaaacagcacaaattattggtggacatttagctatttttrtcaaaactaaagtttgaccataaaagaaggcaaaacctgtcccaatcagattggaggatcagcaaactatgcatgagccaaatacagcctgttgtttgttttttata

SEQ ID NO: 170829 - DNA, 383 bp, Homo sapiens
cattatcctaaccttccttctatctagataaccaattatttttgtttttcttctgagcctgcctccctcccactacaggcatttgcccttcctattccatccacatgaacttatayttctccccaccccttgctgggaaaacacaccatgggtttgatttttaaaaaccaaaagtgtctccagtataatagttgcactgtaggaaccattggtggtcaaggcctggaccaccacactaggtatcccaacccatagaaagagaaatttccatcaacatttaagtataaccaaggctctctcccatattttccttgtgtccactagggaagatggcaccccatgactctcaggaagcaatagtgtctttccacaaactcactgac

SEQ ID NO: 170830 - DNA, 383 bp, Homo sapiens
cattatcctaaccttccttctatctagataaccaattatttttgtttttcttctgagcctgcctccctcccactacaggcatttgcccttcctattccatccacatgaacttatacttctccccaccycttgctgggaaaacacaccatgggtttgatttttaaaaaccaaaagtgtctccagtataatagttgcactgtaggaaccattggtggtcaaggcctggaccaccacactaggtatcccaacccatagaaagagaaatttccatcaacatttaagtataaccaaggctctctcccatattttccttgtgtccactagggaagatggcaccccatgactctcaggaagcaatagtgtctttccacaaactcactgac

SEQ ID NO: 170831 - DNA, 383 bp, Homo sapiens
cattatcctaaccttccttctatctagataaccaattatttttgtttttcttctgagcctgcctccctcccactacaggcatttgcccttcctattccatccacatgaacttatacttctccccaccccttgctgggaaaacacaccatgggtttgatttttaaaaaccaaaagtgtctccagtataatagttgcactgtaggaaccattggtggtcaaggcctggaccaccacactaggtatcccaacccatagaaagagaaatttccatcaacatktaagtataaccaaggctctctcccatattttccttgtgtccactagggaagatggcaccccatgactctcaggaagcaatagtgtctttccacaaactcactgac

SEQ ID NO: 170832 - DNA, 645 bp, Homo sapiens
ttcacagatgactttttgttgtttaccagctactggctccatttttcttcatttgacctaaaatacttctaaacctagctgtctcagcycttataaaaacttgagctatgcctacaggcataattggcagtaaactaattactaccaaataatatttggaatgatgtgtctttttgggttatcagaaatgcccttctgatgttaataagagaatgtcattttacccacaacccctgtacatatcatgcaccccaattacctttactatcagatttatttccactggaacagtgtttttcaaattacagttcttagactaccagtatcagaaagttcatggtgctattaaaaatgtcaattatcaaatctgtctcagccttatggattaagaatctcagtgtgtaacctggtattctgtaccttaaaatgttcaagtgcctaacaaattttgagagtcactgttcgaacataattctcattcttttctccttgccacacacacctgtgcctgagggtttgtttggctacataacagaaacattctcaggctggcagaagcataaggactgattaggattaggaactggtgttgcagaataactcagaaacatgtatgtagctattttgcagaacgtttaatagtct

SEQ ID NO: 170833 - DNA, 611 bp, Homo sapiens
ccacatcaatctattaagtaattatgatcacataaaacttatacagctgaagacctcaaccttcccaggcctgcttcttttgacagttttactagagtatccatgttttttgaaagtgaacattatmttgaatgaatatatcatggaaatattttttttaaattatactttaagttttagggtacatgtgcacaacgtgcaggtttgttacatgtgtatacatgtgccacgttggtgtgctgcacccattaactcatcatttacataaggtatatctcctaacgctatccctcccccctccccccgccccacaacaggtcctggtgtgtgatgttccccttcctgtgtccatgtgttctcattgttcaattcccatctatcatggaaataatttattctttttaatcactattgaattgcagcttctttatctaggaatgaaacttttcagtttaacagaaatttttttgacttgataaggagtacatgttattaactttgatatatacatttttcatgtcaaaatatactggctttaaaacatgttgcaactatctttgtatattttatttataatatgaattatatatttaagtttataaaaaatacaa

SEQ ID NO: 170834 - DNA, 573 bp, Homo sapiens
tataattagtatatattcctgcatgtwttattaaaaaatacagtataatttttatgtttatatattaccttctgagagtttgaatacaaaacaatttatatatctgctttatttacgtatcccttagaatcagcagcaaaatttcttgcacatataatcagtaaatatttgctgagtaattgaatgaatcaagcaggtgaacacacttcctcataacgacactggttgctatagatcaaatagtttaattaaacgcaaagaagaccaatttgcatcagcctatatataataggcaagaaacaaaagttcactgttctgttctctattaggctttcaacccttattcatcagccctggaagagtaatcacatcaaacaagaacctatgagttttttacctcagtcctttcctagtgtggctgcttgcatgaagtgcaagaccacattcccaggttgactgaaatccctcccaagagagctgcagcccaggccatgactctgatgttgtgaagtctgatgctcctgattctgatcactgtttcactcccgcttcatcaaatttgcctcttacgtg

SEQ ID NO: 170835 - DNA, 478 bp, Homo sapiens
taaaagtcaggagcaacatcaggtaagttgtcagaatattagaatatgtatgttgatattgtttggctctgtgtcccgacccaaatctcatctcaaattgtaatccccatgtgttgagggagggaggtgagtggatcctgggggcagttctcccatgctgttctcatgatgctgagtgggttctcatgagaactgatggttttatgtttgacagttcttccttcgcatgctttctctagccygccaccgtgtaagatgtgcctgcttccccttctgccatgattgtaagtttcctgaggcctccccagtaatgcagaactgtgagtcaattgagcctcttttctttataaattactcagtctcaggcagttcttacagcagtgtgagaatggactcatacatatgtatatatctggcatttagtctcttgcatgaatgacatcaatagtaggacctacaacatggttctgtgaacttg

SEQ ID NO: 170836 - DNA, 422 bp, Homo sapiens
acagcacaatttgtattaatttagaactttgtattgtaagaagtaaattttaagtgcttctttgacatctttaagccccactaggccccagaggccttgccatgagttttcctgctctcgtgagacatgtccttacacaacaagacagactctctacccagctcaatcaactgtatctcacctggtcctcaacaaaatgggtttcacttccttgccaccatataaaattatttaaataaacaaatttcattcttctaagagaatcaagggtcatttcaccctcttgttactacaaagcctgcctcccatagccctgatgattcattctgcatctgaatgaacttcgtggctctgcayggtatatagcatccgtctcccatagcctgttagtatatgtcattaataagacatcaccagtgccc

SEQ ID NO: 170837 - DNA, 556 bp, Homo sapiens
gtagccagtcagagatcacctctcctttgccatctggagattgttatctgcttttcaaagatactatttttaccaatgccaagcttggtaaaattcttaagatgtaattcagtctaatcatagatatcgctagacaagactggtcctatgcagtttataacagaaatgtggccattattttagtaaggatggttgagataacgctgcattataaaattaatgctagagttctagtagattaaaaacaatttgtttgtttgtttatttgtttttctagttcatgcttcatttttcattgacattggcttaagggcctcattctgcactagcactcgggaactcaggatcatggagacttccacaatattgtagctgtactatctggaatatgtgacctcttttgtttgtggatcagaagagataagcyttttcttatactatctagcttagaagtgaagtgaaggcatcccttctaactgcagttctttggccagcgctcatcacacggcctcagctgaatcttgcctgggagatgtaatcccgcagactagatgtg

SEQ ID NO: 170838 - DNA, 556 bp, Homo sapiens
gtagccagtcagagatcacctctcctttgccatctggagattgttatctgcttttcaaagatactatttttaccaatgccaagcttggtaaaattcttaagatgtaattcagtctaatcatagatatcgctagacaagactggtcctatgcagtttataacagaaatgtggccattattttagtaaggatggttgagataacgctgcattataaaattaatgctagagttctagtagattaaaaacaatttgtttgtttgtttatttgtttttctagttcatgcttcatttttcattgacattggcttaagggcctcattctgcactagcactcgggaactcaggatcatggagacttccacaatattgtagctgtactatctggaatatgtgacctcttttgtttgtggatcagaagagataagctttttcttatactatctagcttagaagtraagtgaaggcatcccttctaactgcagttctttggccagcgctcatcacacggcctcagctgaatcttgcctgggagatgtaatcccgcagactagatgtg

SEQ ID NO: 170839 - DNA, 472 bp, Homo sapiens
tttaagtcagttacattacagattagcaagccttttatataggaaaaaaaagacaatatgtatcgaaaatgggcaaattattttccccctttgctgctgtcttggtaattttatcatactaaatgttttaaattttaaatagcaattaaataagccagaataaaatatttsaagctatgaactatactgagtttgatgctttaaaaataatatgtccttaggaaggaaaaccgagtccaaattaaaagcacattgaataatactattcatagcagtatgaaatgcaaagataaaggtatctggagtgaataatggaaattaagttcattagatgaatgtaaaagaaatgattatttggatctgtttttaaattcccctaagcatttttaagttatatatttgagacatttttaattcacaattttaaattactttctaacacagaaaggacagtttaaaggaagaaggataa

SEQ ID NO: 170840 - DNA, 584 bp, Homo sapiens
atctctcaccgtggtttaatttgtgtttccatgatgcttcatgatgttgaattttttttaaatgtgcgtattggccattcttatatcttttgcgaaatgtctgtccaagattttccttctcygaaggttgtagcctctccatttcttttgcctattgtttttagtcactctccagtgccttctaagagtttttgtattttttccattgtatataatcattacttgcaggtggggtggtctaatttaagctactcagaccttactgaaactgtaatgtaatcacatctctttgactcattctttatagttgtgtcaacctgtccctgccttgttttctcctaacattcttgtgtaataaaactttatttctcagggtggaaattactgttttaatataaaaaaggaaagatcggaaggctgagatggaggacttgcttgaggccagcctgagcaacataacaagactccatgtctaaaaaaacattagttgggcgtggtggtacacacctgtaatcttagctactctggaggctgaggcacggggatcacttgagcctaggaggtcaagactgcagtgagttatg

SEQ ID NO: 170841 - DNA, 639 bp, Homo sapiens
tgcctttttgacatctacatacccattgttctttctaagcttttgttcactagctcaggctgagaatggataattatatgtaatggaagacagctgtgatgtaccaagtgtgtttttttccycttttatgctgtgcttgagtgcataattcccttcctgcttcagtgttatataaggctcaattttcctgtgtttattttatcctgaaattttagcatgcggattttaacaatcaaaatcaattatagttttgtctctacctttggctagtgccttaagttatggattaaagtgtgtgatctctaataccagactatgttgttaaagaaggtgataattcttctgtgtatattaaaagcgatgccactatttaaagaaaagacaataacattttaaacacatattaaatttatttctgttattatttaagtagggtattgggtaatgtcaacttttttggtagtctttttttttctttttcaattccaaattagaacttgaatttattttttcattaagacctccaaggtttgcactgacatcattcatagtatttaaagtaatcttgttactgagtatgttgcaatgtttaccatattcattttcttctgtgctctgatcttttcagtacattactga

SEQ ID NO: 170842 - DNA, 592 bp, Homo sapiens
gggtgtaagaaatgtctcattgaacagaataatctttctttgtactcatgattcatttttgatatgctacaactctatcagcagggaaactttcctccctgtcgagattctaacaggcctttaagacaagaatagacggagaggttctgttattagtctcaattctgaggcaaattgtgttattcttctatagtcacattttctgccccacagtatgagattttmggagatggcagaaaagtcttctgttgagggttttatgaatcacaagataagggttctattgtgggccacttgaagaaaatttgtagctgatttggcttttaaaaaagctggaaggcatttctggaagtctgaagagctcactgggttatttggtttcaactccattttgatgcagtgtatagatatccggagcaaaatgcccttccgtggagaaaattctgtttctggctatcagttgcatcatgattcccaagcaaatagctgagtaaaagaaaacatcccttaaagactctactgcattcttgtaataaatcacaaaaacattggtatcagctttcttagtcattctgtgagactatagttaaga

SEQ ID NO: 170843 - DNA, 196 bp, Homo sapiens
cttttattaagataacagtgaacaaatgataacaaaaagygtattaactaaatgatgaatatgctaccagaagctgcagaagacatcaatgaaatgtcaggaaggcaatacgggactgtgtcttacctgtcaaaagttatttccaaaataaatggaccttaggcagcatggccaatgctttcattttggctgtctt

SEQ ID NO: 170844 - DNA, 550 bp, Homo sapiens
ttgtctttgtgtcatttaaaaataagttttatatatatatataaaatcacatcatatcattttccttttgtagctatggtacataagatgtaagagtaaagagatttgacaggaggttcaaagcatgttctcggagtaacatctaacctttactgtttaattcatgattttcaaatatctttcagacagataagactagaataggcctttcatgtttttgtttacagtcagtctctctctcccattacacayacacacacacacacacacacacacacacacacactcttatagtcatgcactgcataacaatgttttagtcaatgacagaccacatatacaactgtggtctcaaaatattataacgtagtttactataccttttctgtgtttagatatgttcagataaacatatacttaccattgtgttacaattacctacggtgttccatacagtaacatgctgtacaggtctgtggcctagagcaacaggtcatatcataaagccttgatgtgttccaggctatatcacctaggtttgtataagcac

SEQ ID NO: 170845 - DNA, 550 bp, Homo sapiens
ttgtctttgtgtcatttaaaaataagttttatatatatatataaaatcacatcatatcattttccttttgtagctatggtacataagatgtaagagtaaagagatttgacaggaggttcaaagcatgttctcggagtaacatctaacctttactgtttaattcatgattttcaaatatctttcagacagataagactagaataggcctttcatgtttttgtttacagtcagtctctctctcccattacacacacacacacacacacacacacacacacacacacactcttatagtcatgcactgcataacaatgttttagtcaatgacagaccacatatacaactgtggtctcaaaatattataacgtagtttactataccttttctgtgtttagatatgttcagataaacawatacttaccattgtgttacaattacctacggtgttccatacagtaacatgctgtacaggtctgtggcctagagcaacaggtcatatcataaagccttgatgtgttccaggctatatcacctaggtttgtataagcac

SEQ ID NO: 170846 - DNA, 581 bp, Homo sapiens
aatgaaggcagtgtctaagagtgactgttattacctcagcacatattctgtgaactgctttgatctcaaacctccttttttctcaacgtgcgtaaatcactcatyaattccacaactctctgttgaactcttgtcctatgccatgcagggtttccaagtggactacagcagggagactggaaagagacccctgaagtaccgcaggaggaagtgagtcatgccagggtgacagtagtggaggtggagagaaatattaccgatagagctggagtgtgtttagaagtaaagttctgccaatagaataaatgtaagaaaagacagtttgaagcttaggttttgaagaaagtatagttgttggtacaggttgagtatcccttattcatggaactagaagtgtttcagagtttgaatttttaaaagaaattatggaatatttgcattaaccttactggctgagcatcccaaatctgaaaatcccaaatctgatttaggctgcacgtaggcactcaaaaagtttcatattttgaagggtgaagttcaaaatatgaactttcatattgtgaagttcagatttttgaatg

SEQ ID NO: 170847 - DNA, 455 bp, Homo sapiens
aaggagaggaaagtttaatagacagaagaacggagagaggagagcaattcctttccagagagacacctccaaaaaagcagggaggcagggaccacagcagattttataggcaggctggagaaggtggtgtttgatttactacgwagggaacacagattggtttgatcagtgatgatgtttacatagcatggggaaggctggccgccgtgccctaatcttaacacaaatgggctttccagttgatcggtgccatcttgtctgctttttactctacacgtggctgacaaagaggagggaagatggagccgccatcttgaacatgtctaggccctggttccttctggcattcacccgtgcaagctgagagcttgcttgtctatgtctgcagcttgattttacaagctgctcattgttaggaaacgatttggggctgcttttcattaaagagaaaagtc

SEQ ID NO: 170848 - DNA, 441 bp, Homo sapiens
tataacattcctgattgttcaacatatatttcattcattacaatctgcattcatttatgaatttattacataacatttaaaaacaaaactgagaaaaaaatatgtatttgacaaaaaaacttacagaaaaaggatatctaaaacaaaattgtaatttaagagctcaacacaattcattgttattttctattgtaatgaaagagattttcrtaataaaaatgagattttgcattggttcctctatatgcgtacgtatatatgttcatgagttagtttggtttttccttccctctcaaatttttcttccttggctgatataacaaagagataacttgataaaatgagttgtagggtttttgtaagattttccaatttttgtttcttatgaaggcattggaatcatttgaggcttgaatgtttgctaaagctgaccttaaaaac

SEQ ID NO: 170849 - DNA, 468 bp, Homo sapiens
aagataacggcctcttgaaatgaatgccagatttagtgcttacttaccactagatgcacagttttcacatcacacttttggactttgacattttttyttgttttagttcaagctctgtaatgcatttagaaaagattattaaaatgttaccaagaaatattagttgttttggagtggaaagtttgtttagactattaattttttaaaaaattacacatgtgcttgaaggtcatgtgggctctctgttggatccacaattctacactattagcactttacacatttatttttgttttgccttgcttggctgagagctattctgaggataatggttcttttagtaaaatatgttataatttcagtagctagagtataatagtaattctgtcattgccccttcccttctttctctcttaaaattaagggaaaatttgaagtaccaaattctttacacagaacgaatgcacc

SEQ ID NO: 170850 - DNA, 327 bp, Homo sapiens
tgctagagggtgaggataaaaatgtgaaaaacaaaattaatgcaaatttatcaacattatcgaacaaaggttaactcaatgatgcctccctagtgatggacctagagctaaactttaatgtaaatactgcagcattaccagtaaatcagcatcacttaagcctcagcaacatgcagttgagccatgtaacagacytatgtgggtatccgctgaacctaaaatgaaagtaggaaaaaaaaggaaaaaccttagtcacatatatagatataacttcaaattggttttaaaataagccaaagccagagtaatactgtctaacctgtaagc

SEQ ID NO: 170851 - DNA, 532 bp, Homo sapiens
gccccacttcttctttgtacttgtttagaatctcattttaatgaggccaaagtcacagagactatctcctgagggctataaaccatccttcatcctggccatagttctactaacaagcatcattgcaaaatcattgtattatttgctagagggtgaggataaaaatgtgaaaaacaaaattaatgcaaatttatcaacattatcgaacaaaggttaactcaatgatgcctccctagtgatggacctagagctaaactttaatgtaaatactgcagcattaccagtaaatcagcatcacttaagcctcagcaacatgcagttgagccatgtaacagacctatgtgggtatccgctgaacctaaaatgaaagtaggaaaaaaaaggaaaaaccttagtcacatatatagatataacttcaaattggttttaaaataarccaaagccagagtaatactgtctaacctgtaagccaagagatgcttataattcctgttttcttggtgacataacaaaacagtaatgataattcaga

SEQ ID NO: 170852 - DNA, 502 bp, Homo sapiens
attcatattgcaaaagaaaatacactacmcctggagagagtatagttttagtatttcaggattgttttagactcatttggatcctgatttattgaaatctgttttgaaagcctttagtagctgggtccagtatttgaaaaggataaaattaagaaagaaatgacctggtgtttttattattggttactcttaaagaaaaaacagttcacttctatttacatttaaaacagcagtcttaaacatgaattaccttaacttccgatcttttgccaaactcttttatactttggatgaaacgatttttgttccagaattattatattgactataaacctttattacttcatttctcatctgccttggttttattgatcacaattatagagcaaaacaaaactttataattaaatgtagagtagcacatattgttaaaacattgagtagagataatccaaaaagataatttgtttgcctttatttaggccaaaattaaatgtgccag

SEQ ID NO: 170853 - DNA, 617 bp, Homo sapiens
aggtcttctttcacatgctaaagtccaataatgactacactagagatggctttagaaccagctygatgaccacatgcatgggagaaaagaccactgtgcaaaagaggaatgagactatatcttgccttcttcattttgagtcttaaatattttactcctatgaaagttagattgacccttaagaaccatacatgcagtaatgaggtatatatggacttaagctctttggtaatcctccccatagtttgccaattatatctttctcttacaaattatttttctttctatattccaatttagaaaatcaaatttagatgtgaaaaccaatgcctatgaacccaggagaggtgactatccaactattaatacaattctagtgcctgaaaaaaagactgtccttaaatgagtctgccctagttatatagaccctgtttacataaactggcttctctacctggatcactccctcacttgggtcatttccaagcattccaggtttatacatgtgtatcaagttcagaaagcatattcattcacaagaagctatgtgttaagttacttggtcttccaaaagtccaagaacccaagtgtacctgtgcttcacatggttacaaatt

SEQ ID NO: 170854 - DNA, 617 bp, Homo sapiens
aggtcttctttcacatgctaaagtccaataatgactacactagagatggctttagaaccagcttgatgaccacatgcatgggagaaaagaccactgtgcaaaagaggaatgagactatatcttgccttcttcattttgagtcttaaatattttactcctatgaaagttagattgacccttaagaaccatacatgcagtaatgaggtatatatggacttaagctctttggtaatcctccccatagtttgccaattatatctttctcttacaaattatttttctttctatattccaatttagaaaatcaaatttagatgtgaaaaccaatgcctatgaacccaggagaggtgactatccaactattaatacaattctagtgcctgaaaaaaagactgtccttaaatgagtctgccctagttatayagaccctgtttacataaactggcttctctacctggatcactccctcacttgggtcatttccaagcattccaggtttatacatgtgtatcaagttcagaaagcatattcattcacaagaagctatgtgttaagttacttggtcttccaaaagtccaagaacccaagtgtacctgtgcttcacatggttacaaatt

SEQ ID NO: 170855 - DNA, 502 bp, Homo sapiens
ttttaaacactttgataggttcaacatttcgatcatctttgggtcttattcaagtggctattttctttcttgattatgagtcattttacttgcttgtgtatctcataattttcattaaatgctaacattgtgtataaaggaatagagatgaaagcaaataaaactttcacttagaaaagggtaccttcttttcagtcaggctgttaatgagagaagkttaaactatctgtaattgagatgagtatagactttctgatgctctagatttagttcagcacagacttcaaaggtttgagggtaggattagaatattccctttagcacagcttgagatttgagtaattggagagtttgcctaagttctctttccctgactttagcctttggtatgcctagtgcacctgtttttcaggggattatctgtcagctctttaatttatctctcagctccagtaggctgctgctttaaacttgtgaggcctgaaatgcctggaagttttct

SEQ ID NO: 170856 - DNA, 502 bp, Homo sapiens
ttttaaacactttgataggttcaacatttcgatcatctttgggtcttattcaagtggctattttctttcttgattatgagtcattttacttgcttgtgtatctcataattttcattaaatgctaacattgtgtataaaggaatagagatgaaagcaaataaaactttcacttagaaaagggtaccttcttttcagtcaggctgttaatgagagaagtttaaactatctgtaattgagatgagtatagactttctgatgctctagatttagttcagcacagacttcaaaggtttgagggtaggattagaatattccctttagcayagcttgagatttgagtaattggagagtttgcctaagttctctttccctgactttagcctttggtatgcctagtgcacctgtttttcaggggattatctgtcagctctttaatttatctctcagctccagtaggctgctgctttaaacttgtgaggcctgaaatgcctggaagttttct

SEQ ID NO: 170857 - DNA, 606 bp, Homo sapiens
gtcaatacttctgcaaactgagtgattagatattaatttgtagcttgaaaattcaatttggcatacagctcatgtatgtatttacaatttatgattatgctgagttccaaagatgagttgaaaattgattactgaaaaattggaatgaaatgtttccatcaaaatcgttttagtcaagttttccaaactgattcttttaaactctaatgctggtgacctgcaatatattagtaccattaataagtagatcaatttcaggatcctgggaccagagtgccttcgatgttaaaggaagaragaagagaaaggagaatagtttcctcttgcaatctttgctggttggtaataagcaatatttcaatactgcaaattttgccagcagcactcttctactccctatatttctctttctttcctatccagttccatcatcagggtcttgccctaaaagcctctttttcagtcccctgcttgaaatgcactaaagaatgtatttcaggctttgatattacttaaagccatcctgtctcttcaaaattgccttcccatccagctggacaaaaatgtagggaacaaggactctggtggggagaagagcgagagtaa

SEQ ID NO: 170858 - DNA, 632 bp, Homo sapiens
tatatttatgtaaatataaataattatttatttgaaaaatataattctcaaatgcaaaatgtaaataatttaaataatgttaaataatctttaaaaaataaacctcacatatctcttacaaccagaactgccccgcatttcctaggttcctatcattaactgctccctattaaatgctgccttcactggagccaaagttgatgtaaacattgcctttcttctagcatgctgttaaaacataacatacatgcatacaagcaaacatcatagaacctatgaattgtcacgacgtgaacgtgtcccatgtagctagcatcaagatcgacaagattaccaaaaccccagatgccttctcatgcccccttataatcattacctgcctcaagggtaaccactaccctgacttttgataccatgggttatatttgcctgtttttaaacttcctataaatgcagttatgtagaatttattcttttgtgagttttgtctgtgttgctgggtataactgtaaaytatttgttttcatttatgtaaagtattgtgtttttatgaatatatcattttatgaatattttataaatatatcatttatttatctagtctactatcaattgatatttgagtatttttc

SEQ ID NO: 170859 - DNA, 446 bp, Homo sapiens
atggaagtattagtgtgcaagagggcagttgagaacatacagaagtgtgtgtacgtgtgtgtgcgcgtgtgtgtgtgtgtatacacatggatgcatgcrtcaggggcctgcatatatcatgtgaatgatcacatgtaaaagaaaaacaagtaacaaacagtgcagggaaatttctgcatatctgtttacaacgtgagcctcttggatatttcttatgaatagatggatggtctctttattctgtgctgtactttagacagtgtgcgttcatttatttaacaaatgcatattgagttctagtgatggttgtaagaactttgaacaaaatagttttatatgtgttatattgattgttagatgttatagtgattgttctaagaactttgaacaaaatagtgaataaaacaaatccttattttcatggagtttacattatagttgttgtg

SEQ ID NO: 170860 - DNA, 446 bp, Homo sapiens
atggaagtattagtgtgcaagagggcagttgagaacatacagaagtgtgtgtacgtgtgtgtgcgcgtgtgtgtgtgtgtatacacatggatgcatgcgtcaggggcctgcatatatcatgtgaatgatcacatgtaaaagaaaaacaagtaacaaacagtgcagggaaatttctgcatatctgtttacaacgtgagcctcttggatatttcttaygaatagatggatggtctctttattctgtgctgtactttagacagtgtgcgttcatttatttaacaaatgcatattgagttctagtgatggttgtaagaactttgaacaaaatagttttatatgtgttatattgattgttagatgttatagtgattgttctaagaactttgaacaaaatagtgaataaaacaaatccttattttcatggagtttacattatagttgttgtg

SEQ ID NO: 170861 - DNA, 449 bp, Homo sapiens
tttcacatcactattaaacatatggcatatactcacttctaatctgtttcacaatgggttttaggagatccagccacacctagaagggaaaaaagaacagattaagacctaagttctcaatgaaagagtgcaagtattttgagattttgtttaaagctgtttaaaatcaaaatatttttgaggatatgaggccgtctgttccatttttctccagaatgccgtatcttacgttgtctaccacttttataaaacrgatcctaatttgctgatattatccctgagcttgaaaattaaaattgctcctagactcagatacacatggttaactaagaagttttctattctcatttatacatttatcatatttacctatttggaaaatattaatgaatgatttcatttgtgactatcagccgagtgaaatacgtacattccttattgaaacagaa

SEQ ID NO: 170862 - DNA, 366 bp, Homo sapiens
aatactgcatttaggagctaaaagagagagcaattggaatattaataaaagtcatgatttacactgtgggctttaaacaccaagtctgaggaccattctaaaagtgcatgtgggtttcaaaatcaaagcaactaagtgagaaagcaaatgatgtttaagtgcccrttagactttttttgaaactataaagaataaaaagttaaaataccaagaattctatgagataatatttaaagagtgatacaataatcaacaacactaaaggctggctctttaaaacaactgataaaaactaaaaaataacccatgacacaattaatcaagaaaaagaaaattctaactaaataatattagaaatgaaaaagg

SEQ ID NO: 170863 - DNA, 366 bp, Homo sapiens
aatactgcatttaggagctaaaagagagagcaattggaatattaataaaagtcatgatttacactgtgggctttaaacaccaagtctgaggaccattctaaaagtgcatgtgggtttcaaaatcaaagcaactaagtgagaaagcaaatgatgtttaagtgcccgttagactttttttgaaactataaagaataaaaagttaaaataccaagaattctatgagataatrtttaaagagtgatacaataatcaacaacactaaaggctggctctttaaaacaactgataaaaactaaaaaataacccatgacacaattaatcaagaaaaagaaaattctaactaaataatattagaaatgaaaaagg

SEQ ID NO: 170864 - DNA, 263 bp, Homo sapiens
tagctgaaatactattcctaccctactccacctcttccccaccacatacatgcaaactaatattctcagaatgttttatwggtgaattagatcagaaaatcaagaaatggataatttcaatatttaaaatttctagcaaagaatttaaaagtggggaatattccctaattatgttatggagctaatacaaccttgaaagtaaagccatacaaagcagtataagaaataaaattacatgctaatctcacttagattgttgttgt

SEQ ID NO: 170865 - DNA, 550 bp, Homo sapiens
gatcacttgaggtcaggagttcaagaccaacctagacaatatagcaagacatcatctgtaaaaaaaaaaaaataataawaaaataattatctggatgtggtggcatgcccctgtaatcccatctactcaagagggtcaaggttgcagggagccatgatcatgccactgcactccagcctgggcgacagagaagaccctgtctctaaataaataaataaagctatctactttattgcacaatagtcaatactaaactcttcttcccattaaaaattattctaatttatttttgtcacatgtttgttttaggcaaaaattttctaaattttgtattcttagttatttgtgaaatattcatcttctttcttgaaaaatccacatatatttttcacttagtaaaagaataatagaatcgcagaaatgaaaaaagtctcagaaatgaacaaaaggcaattaaatgatttactcaaaggtacaccactagtgaggctagtaagtgccagaatctaagatttttgctgcataatttggggcgtgtttaactacatta

SEQ ID NO: 170866 - DNA, 580 bp, Homo sapiens
tgtatctctgatgctaataataaccataaagtgaagaatccggcaagaaaaaaatgttcatgaaaatagaaaaaaaaaaagtgaaaaactacattgtgtaagatggctaaacaacagctgttctctagtttatcaatgcttcatctgtgtttctgtaaaatgcctgaaagtaaaacaactggaattcatttatgagccccactttccataatctcatattttgtcattatgtcagtattacagtgatataaatctgaattatttggctcactgtcaacataaaattcaaacaggaaaaaaatgcaacagaatgaaaagtttcaaaaagtaaaataaaacttcttttctgcgtacaaaagctcagtgtccaatccaccccttgcaacaatctctgattatacaatttgatgaaatttatgtggactttgtttatggtaccagtctccccarcaacattttaattactacaattttgaattcctccctacaatatttgtgtaaaattcttatgatttctttaattgacagccgtcattggcttgttttttcaaacctatcactttgaattcctagtcttgct

SEQ ID NO: 170867 - DNA, 505 bp, Homo sapiens
ataaaatgatgttcttgtgaatgaaatgtggtggttcttccttcctaaaaatcaaaaaggagtgatccagcctacctaacctgtcactttcatcccatttacaagtgggaaaggagcctccagggcctccaaaacaattaaagctgggtctgctttstcaggaagggaggtctggaagtgagagcctgcgggcaaggcaaaccccttccaccagccaagttctggcaaaagggctaagctaggacattacatgctagaggacaaagtcacaaaagcaacgtggagaaaaatttaaaccctgccctcctttttcattcctcctttttcatccttccaaaatctagccttcagtttcccaaagcggagtcttcaaaaccccctcctccccaaaacatattaaacaagaagaagaggcaagcaatgagataagcccaccattgagtgtgcacatgaagatgggccagaagggtatgttgtttctttgagctcatctcacatgcagcca

SEQ ID NO: 170868 - DNA, 437 bp, Homo sapiens
tgaaagctcataggagcttatccaaacaaaggacagtgagcacatctatattacgattccttaaatcttccatagagtttatgatgcaagcaagaaacatgctttggtagctatattagtcattggctcccaaacctcataactgttaactmtacccagaataaagagtaaggaaaactttctgtaaatacagggagattcttaatcggtcacctgacacagcaaatgacaatagcttatattcatacacatgaacaaaaaggtttggcagtcaatgcttataggttttaccttttcttggtgggttgtttcccctattcccttctgcgcaaaaaagtaatattggtagtaaaatatatataagaaagactaatacatatgttaagtcatgattgaaagtttgccatttctccatcaaaaatttaatcgtgcagttt

SEQ ID NO: 170869 - DNA, 437 bp, Homo sapiens
tgaaagctcataggagcttatccaaacaaaggacagtgagcacatctatattacgattccttaaatcttccatagagtttatgatgcaagcaagaaacatgctttggtagctatattagtcattggctcccaaacctcataactgttaactctacccagaataaagagtaaggaaaacttyctgtaaatacagggagattcttaatcggtcacctgacacagcaaatgacaatagcttatattcatacacatgaacaaaaaggtttggcagtcaatgcttataggttttaccttttcttggtgggttgtttcccctattcccttctgcgcaaaaaagtaatattggtagtaaaatatatataagaaagactaatacatatgttaagtcatgattgaaagtttgccatttctccatcaaaaatttaatcgtgcagttt

SEQ ID NO: 170870 - DNA, 285 bp, Homo sapiens
aaattgaatctgtgaataagtcaataatgcattctgaaattaaggcagtaataattagcctaaccmccaaaaaaaaaaaaaaaaaaaaaaacagctcaggaccagaaagatttacagctgaatctaccagaggtacaaagaagagccagtaccatttatactgaaactatcccaacaaactttttaaacttttgattgaaaaaatatatgtaaagacatgtccttttgagtcaagttataaaagccatcaaccacaaaagtgctcatttattcattcatttgttc

SEQ ID NO: 170871 - DNA, 547 bp, Homo sapiens
tagctcccacatatgagtgagaagatgtaatatttgtctttctgagctttgcttttttcacttaatataatgaccttcagcattgctgtaactgacagcgtttcattagtttttatggctgaataatattctattgtgtatatgtactacatattatttcccattagggacactgatgggaacttaggttgattccatattttgtctattatgaataatgctgaagtaaacatgagagtgtagatatctctttgatattatgttggaatatatacccagaagtggaattgttggatcatatggtggttatatttttagttttttgaggaacctccatactgtattccacagtggctttaccatttacattttcaccaaccgtgtacaagagttyccctttctccacatcttcaccagcacccatgattgcctgtcttttttataaaaaccattttaactaggaggagataatatttaattgtagtccttatgtgcatttctgtgatgtttagtgatgttgagcatttttcatttatttattggacat

SEQ ID NO: 170872 - DNA, 491 bp, Homo sapiens
tttgtccctacctcactgtcaatcttgatatccattttcaccactgtgcaaaaccactgtacagtgcattgtaagcacttacaatatattgttgacctactacatgcaggacagttttccaggtggccttggaccyacccagttctccctccttttttgtgtgtagttctcaagaggaactgtagaatgttctgggaatgcaacatcctgagataaggaggggctgacctgaacagtccattgtgccagtcccctctataaacagaaagtcactttggcccagtatgtcatactgtccctacagtataaaacccaaggcaggctacctgttgggggtccctcggctgtggtgcaagtggggcacatactgatgagattttgtcttccccaggcagctttcctgagccttgaggggacaggctcgtcatgaatcctaggcattttttttttctcttgctgcttatctgtaagtaataaatccacttatgtaa

SEQ ID NO: 170873 - DNA, 605 bp, Homo sapiens
tcacgtctcctttgtctgatttgtccctacctcactgtcaatcttgatatccattttcaccactgtgcaaaaccactgtacagtgcattgtaagcacttacaatatattgttgacctactacatgcaggacagttttccaggtggccttggacctacccagttctccctccttttttgtgtgtagttctcaagaggaactgtagaatgttctgggaatgcaacatcctgagataaggaggggctgacctgaacagtccattgtgccagtcccytctataaacagaaagtcactttggcccagtatgtcatactgtccctacagtataaaacccaaggcaggctacctgttgggggtccctcggctgtggtgcaagtggggcacatactgatgagattttgtcttccccaggcagctttcctgagccttgaggggacaggctcgtcatgaatcctaggcattttttttttctcttgctgcttatctgtaagtaataaatccacttatgtaacttgttgtatgtgtgggtgttctgtctcactggactcagacaaatggtagccagtgcacagtgaacctgcttcacacacattcccgtgatctaat

SEQ ID NO: 170874 - DNA, 605 bp, Homo sapiens
tcacgtctcctttgtctgatttgtccctacctcactgtcaatcttgatatccattttcaccactgtgcaaaaccactgtacagtgcattgtaagcacttacaatatattgttgacctactacatgcaggacagttttccaggtggccttggacctacccagttctccctccttttttgtgtgtagttctcaagaggaactgtagaatgttctgggaatgcaacatcctgagataaggaggggctgacctgaacagtccattgtgccagtcccctctataaacagaaagtcactttggcccartatgtcatactgtccctacagtataaaacccaaggcaggctacctgttgggggtccctcggctgtggtgcaagtggggcacatactgatgagattttgtcttccccaggcagctttcctgagccttgaggggacaggctcgtcatgaatcctaggcattttttttttctcttgctgcttatctgtaagtaataaatccacttatgtaacttgttgtatgtgtgggtgttctgtctcactggactcagacaaatggtagccagtgcacagtgaacctgcttcacacacattcccgtgatctaat

SEQ ID NO: 170875 - DNA, 522 bp, Homo sapiens
tacggggacttctgaattggctagaaagccaaatcatctaatttggcaggggacaaaaatccactctagagtttaaaccattttggttgactatctagagagctcatatgacttaagcaagtgcatgatttagcgaattcatgccaggcttgagaagaatgtgtaaatgtgggttgcagtcttgcttctcttaccagctgcttgagtaggcaacttcatttatctgggcctcatttttctcttgtgatacaggtttactctagattatttctgaaattaaaaattgtcattgaattttttcctaggataggaccagattctgagcagaaataatttttcatatacagactcaaaatgtactatataaaatcatcttttttcatgacattycttagaaattctttgttggattgcagttgtccaacaaaagttgttctctttgttttccatgtgcccttattcagggcaaagactaagctgcacagtaaggagacccatcaacacagtgacaaaaaacaaaca

SEQ ID NO: 170876 - DNA, 410 bp, Homo sapiens
gtttatgaatgctttgtcaggatggattagttaaccaaaccagtatatatgcctgacaaaggatcacagattatggggccatgtttgtgataaatgttaatcaaaaactgtatttgctgtatgtcctggatatactttttttmctttaccagaaccttatatagcccttattataggctgttttaagcacatcctgcctgtactaactcatttaatcctaactacatgcttattttatccatgagaaaacaggcacagaggacttatgtaacttgttgaagtttgtatagctagtagaggtggagccagagctttacccagggggtctgagaagcttgttcttcatcactgtgcatcactgcctctcaagtaccaagggattagaattggggtaattatatggtacagtc

SEQ ID NO: 170877 - DNA, 410 bp, Homo sapiens
gtttatgaatgctttgtcaggatggattagttaaccaaaccagtatatatgcctgacaaaggatcacagattatggggccatgtttgtgataaatgttaatcaaaaactgtatttgctgtatgtcctggatatactttttttcctttaccagmaccttatatagcccttattataggctgttttaagcacatcctgcctgtactaactcatttaatcctaactacatgcttattttatccatgagaaaacaggcacagaggacttatgtaacttgttgaagtttgtatagctagtagaggtggagccagagctttacccagggggtctgagaagcttgttcttcatcactgtgcatcactgcctctcaagtaccaagggattagaattggggtaattatatggtacagtc

SEQ ID NO: 170878 - DNA, 589 bp, Homo sapiens
tcccatttctccacagtctcactgtattagtctgttttcacactgctataaagatactacctgagactgggtaatttataaaggaaagaggtttagttgactcacagttccacatggctgggaaggcctcgggaaatttacaatcatggcagaaggcaaaggaaaagcaagcactttcttacatggcagtaggagagaaagagcaggcaggggaaactgccacttttaagctatcagatcttctgagaactcccttcctatcatgagaacagcatgggagaactgcttccatgatccagtcacctcccacagggtccttcccttgacatgaggagattacagtttgagatgagatttgggtggtgacacagagccaaaccatatcactcaccckctgttgctttttgacttttaaataatcgccaccattctgactggtatgagatgatatctcattgtggttttgatttgcatttctctgatgagtactgatgttgagcattttttcatattttttttggccacttgtgtgtcgtcttttgagaaatgtctgttcatgtcctttgcccattttttaattggattgttt

SEQ ID NO: 170879 - DNA, 617 bp, Homo sapiens
gtcaaaacattttagcatgcattctctcattaaatcctgacaacaaccctgatgaaggagagtgcagctattattatctctctgttcttaatgagaaaatatgtttcagcccattctttaatgtggctcaggttgcagataagggaagctgagagctcaggttttgaaatttatctcttgaattctggatctatgctgagaaacagttctctcttcaacagttgggaaaatgtagatttaccagcatatagtgcttgcaatcaatttagatactgagattagayagtcaatagtcaggactgctgagggagagtttttctgtagctacaaaaaagaaaaagaaaagaaggaaaaaaaaaacaggctttaaacagagatatgaaacaagatttggactgacattcagaatcaaggtccccaaaatttgttccacctgcccaagccctgaagcccagcaccccaccccattcctacacacacacacacacacacacaaacacacgcacacacgtgcgcgcacacacgcgcacacatacacacacacacgcacacacgcacacacgcgcgcgcacacacacacacacgcacacacacacacgtcattggccctgcagaca

SEQ ID NO: 170880 - DNA, 617 bp, Homo sapiens
gtcaaaacattttagcatgcattctctcattaaatcctgacaacaaccctgatgaaggagagtgcagctattattatctctctgttcttaatgagaaaatatgtttcagcccattctttaatgtggctcaggttgcagataagggaagctgagagctcaggttttgaaatttatctcttgaattctggatctatgctgagaaacagttctctcttcaacagttgggaaaatgtagatttaccagcatatagtgcttgcaatcaatttagatactgagattagatagtcaatagtcaggactgctgagggagagtttttctgtagctacaaaaaagaaaaagaaaagaaggaaaaaaaaaacaggctttaaacagagatatgaaacaagatttggactgacattcagaatcaaggtccccaaaatttgttccacctgcccaagccctgaagcccagcaccccaccccattcctacacacacacacacacacacacaaacacacgcacacacgtgcgcgcacacacgcgcacacatacacacacacacgcacacrcgcacacacgcgcgcgcacacacacacacacgcacacacacacacgtcattggccctgcagaca

SEQ ID NO: 170881 - DNA, 589 bp, Homo sapiens
ggggaaatacctaaatcttctaaatactactgtatgagagaatccactgaagtccaagttattatttttaaaatgatttttaaataaaattcatatcaagtagtcttctagattatgtaactaaaacaagattcagttcaggaaataaattacctttaatacaatcataaattcaacagatatttaagctatattcaaatattttatttaaagaaaactcagcagaggcagagtcaaatacactgttcattcttctaataggacagaccacctaggagaagtgagaagtggagggaggagagaaaattaatctgttccatatttccaaaggccaaagtttttatgtaataggccaaaatagcaagggaaaaagaacgtggctgcctagttgtcgtttgaataatagagatttacaggtcaaaaaatagatgargttggacgcatggttctgggattgagccaggtagattgaatagaggcaaattcttctcttgaatgcacgttctcatgttgcaccagagagcggaaactgatatgccaacatttccccctctaaaacagttgtccatcctgagcttcttattaatgc

SEQ ID NO: 170882 - DNA, 589 bp, Homo sapiens
ggggaaatacctaaatcttctaaatactactgtatgagagaatccactgaagtccaagttattatttttaaaatgatttttaaataaaattcatatcaagtagtcttctagattatgtaactaaaacaagattcagttcaggaaataaattacctttaatacaatcataaattcaacagatatttaagctatattcaaatattttatttaaagaaaactcagcagaggcagagtcaaatacactgttcattcttctaataggacagaccacctaggagaagtgagaagtggagggaggagagaaaattaatctgttccatatttccaaaggccaaagtttttatgtaataggccaaaatagcaagggaaaaagaacgtggctgcctagttgtcgtttgaataatagagatttacaggtcaaaaaatagatgaagttggacgcatggttctgggattgagccaggtagattgaatagaggcaaattcttctcttgawtgcacgttctcatgttgcaccagagagcggaaactgatatgccaacatttccccctctaaaacagttgtccatcctgagcttcttattaatgc

SEQ ID NO: 170883 - DNA, 563 bp, Homo sapiens
tatttgtaaaatgtagaaaagtgtgctggggaaaataaggaagactagtaactggtgttaacaagggctgaaaaaaaacatayagaaagactggtaacttcatgtaattaagctacaatctaccttcagtagttctcacaatgttgcttaagttatagaggaagataatcttttcaccaacagtaacaaactaagagtaacttgtagggataaacaatttccaaagaaaaactcctgccttttaaaaatgtaccattagcccaatcctgatgtctacccttgtttaaaaagtagattacttaatctctggatagtctatcatctaaaataaatagttgaatatatatttttggtctgaacctagtagaggttccataaacacatggttcactgaatccaagtcctttaattgtgcttattttcctttctgccaccaactttgcacgattattttgctttaatacatttccatcagggtaaaccccaaaaaatgtagagatgaaaatgttccaagagggtaaaggtaacgaggcatgtgaaaatgtttttcaacaaagttgaaa

SEQ ID NO: 170884 - DNA, 428 bp, Homo sapiens
gagatctaatcactgaatgcaatgtgagatcctgaactggatcttgaatttgggaaattaagatattatttgtgtaactaataaatgtgactatgttaaacattagcactgcttcaaaattaaatttcctgaatttgatcatttttactgtgtttatgtaaaagaacttcgtcattyctgaggacaggtggaagtttttaaagatgaagggaaatgacatctgaaacatattctaaagttgtttagcaaaaacataacagtaataataatatgtgtgtgtggaaagggaaaacaataaagcaaaagaagaaaaattataaaaattgataagctaagggaaaagtatacagtagtttattgtattacactttcaaattacttaagtcgaatttttttataataagtaattttttaagtgggcatttttt

SEQ ID NO: 170885 - DNA, 428 bp, Homo sapiens
gagatctaatcactgaatgcaatgtgagatcctgaactggatcttgaatttgggaaattaagatattatttgtgtaactaataaatgtgactatgttaaacattagcactgcttcaaaattaaatttcctgaatttgatcatttttactgtgtttatgtaaaagaacttcgtcattcctgaggacaggtggaagtttttaaagatgaagggaaatgwcatctgaaacatattctaaagttgtttagcaaaaacataacagtaataataatatgtgtgtgtggaaagggaaaacaataaagcaaaagaagaaaaattataaaaattgataagctaagggaaaagtatacagtagtttattgtattacactttcaaattacttaagtcgaatttttttataataagtaattttttaagtgggcatttttt

SEQ ID NO: 170886 - DNA, 410 bp, Homo sapiens
tgagatcctgaactggatcttgaatttgggaaattaagatattatttgtgtaactaataaatgtgactatgttaaacattagcactgcttcaaaattaaatttcctgaatttgatcatttttactgtgtttatgtaaaagaacttcgtcattcctgaggacaggtggaagtttttaaagatgaagggaaatgacatctgaaacatattctaaagttgtttagcaaaaacataacartaataataatatgtgtgtgtggaaagggaaaacaataaagcaaaagaagaaaaattataaaaattgataagctaagggaaaagtatacagtagtttattgtattacactttcaaattacttaagtcgaatttttttataataagtaattttttaagtgggcatttttttctgtc

SEQ ID NO: 170887 - DNA, 428 bp, Homo sapiens
gagatctaatcactgaatgcaatgtgagatcctgaactggatcttgaatttgggaaattaagatattatttgtgtaactaataaatgtgactatgttaaacattagcactgcttcaaaattaaatttcctgaatttgatcatttttactgtgtttatgtaaaagaacttcgtcattcctgaggacaggtggaagtttttaaagatgaagggaaatgacatctgaaacatattctaaagttgtttagcaaaaacataacagtaataataatatgtgtgtgtggaaagggaaaacaataaagcaaaagaagaaaaattataaaaattgataagctaagggaaaagtatacagtagtttattgtattacactttcaaattacttaagtygaatttttttataataagtaattttttaagtgggcatttttt

SEQ ID NO: 170888 - DNA, 517 bp, Homo sapiens
atgtgtgatatttgtctttctgtacttggcttacttcacttaacgtaatgatctccagttccatccatgttgttgcaaatgataggatctcattctttttttatggctaaatggtacttgatatgctttggctatgtccccacccaaaatctcatcttgaattataattcccataatccccatgtgtcaaaggcaggaccaggtggaggtaattggatcacgggggtggtttcccctatgctgttctagggatggtgaataagtctcatgagatctgatggttttataagtgtctggcatttcccagcttgcactcactttgtcctgcygtcctgtgaagaaggtgcctgcttctcctttcccttcctccatgattgtaagtttcctgaggcctccccagcaatgtggaattctgagtcaattaaacctctttcctttataaagaacccagtctcagttatttcttcatagcagtgtgagaatggactaatacagtactccactgtgtgtaagtacc

SEQ ID NO: 170889 - DNA, 517 bp, Homo sapiens
atgtgtgatatttgtctttctgtacttggcttacttcacttaacgtaatgatctccagttccatccatgttgttgcaaatgataggatctcattctttttttatggctaaatggtacttgatatgctttggctatgtccccacccaaaatctcatcttgaattataattcccataatccccatgtgtcaaaggcaggaccaggtggaggtaattggatcacgggggtggtttcccctatgctgttctagggatggtgaataagtctcatgagatctgatggttttataagtgtctggcatttcccagcttgcactcactttgtcctgctgtcctgtgaagaaggtgcctgcttctcctttcccttcctccatgattgtaagtttcctgaggcctccccagcaatgtggaattctgagtcaattaaacctctttcctttataaagaacccagtctcagttatttcttcatagcagtgtgagaatggaytaatacagtactccactgtgtgtaagtacc

SEQ ID NO: 170890 - DNA, 531 bp, Homo sapiens
tttatgaataatatattcattgcaaattatttgtagtaatgataaactgaaaacgacctatcaattaaagaatggattagaatctgtcctgtagaatatccacatgggatgaccgtaagtcattaaatttatatttatagaaagtttacaatagaattcyatgcttatataatatttggggtataaaaaacataatatataatctataatacataatttaatacatattaaaataacataaaaatataatacataatttttgcataatcacaactattaaaagtcaaatataattagctaaactacaatttttttaagaaagttatcaaggtaatgagattataagtaattatttttatttttattacagttttttgagttttccaattctaccagttttactttgagtttactttgaaaaccagagaatcaatctttaagatatttaatgtttcttgaaatttattaactaattaaattattaatttaaaataactagaagtaggttttcaaatgtgtaaaaattgacac

SEQ ID NO: 170891 - DNA, 531 bp, Homo sapiens
tttatgaataatatattcattgcaaattatttgtagtaatgataaactgaaaacgacctatcaattaaagaatggattagaatctgtcctgtagaatatccacatgggatgaccgtaagtcattaaatttatatttatagaaagtttacaatagaattccatgcttatataatatttggggtataaaaaacataatatataatctataatacrtaatttaatacatattaaaataacataaaaatataatacataatttttgcataatcacaactattaaaagtcaaatataattagctaaactacaatttttttaagaaagttatcaaggtaatgagattataagtaattatttttatttttattacagttttttgagttttccaattctaccagttttactttgagtttactttgaaaaccagagaatcaatctttaagatatttaatgtttcttgaaatttattaactaattaaattattaatttaaaataactagaagtaggttttcaaatgtgtaaaaattgacac

SEQ ID NO: 170892 - DNA, 531 bp, Homo sapiens
tttatgaataatatattcattgcaaattatttgtagtaatgataaactgaaaacgacctatcaattaaagaatggattagaatctgtcctgtagaatatccacatgggatgaccgtaagtcattaaatttatatttatagaaagtttacaatagaattccatgcttatataatatttggggtataaaaaacataatatataatctataatacataatttaatacatattaaaataacataaaaatataatacataatttttrcataatcacaactattaaaagtcaaatataattagctaaactacaatttttttaagaaagttatcaaggtaatgagattataagtaattatttttatttttattacagttttttgagttttccaattctaccagttttactttgagtttactttgaaaaccagagaatcaatctttaagatatttaatgtttcttgaaatttattaactaattaaattattaatttaaaataactagaagtaggttttcaaatgtgtaaaaattgacac

SEQ ID NO: 170893 - DNA, 531 bp, Homo sapiens
tttatgaataatatattcattgcaaattatttgtagtaatgataaactgaaaacgacctatcaattaaagaatggattagaatctgtcctgtagaatatccacatgggatgaccgtaagtcattaaatttatatttatagaaagtttacaatagaattccatgcttatataatatttggggtataaaaaacataatatataatctataatacataatttaatacatattaaaataacataaaaatataatacataatttttgcataatcacaactattaaaagtcaaatataattagctaaactacaatttttttaagaaarttatcaaggtaatgagattataagtaattatttttatttttattacagttttttgagttttccaattctaccagttttactttgagtttactttgaaaaccagagaatcaatctttaagatatttaatgtttcttgaaatttattaactaattaaattattaatttaaaataactagaagtaggttttcaaatgtgtaaaaattgacac

SEQ ID NO: 170894 - DNA, 589 bp, Homo sapiens
tgattgtaagaaatagcaatagcggttctgatcatgatacatcctttggtggtgatatactttatccaataatgaaagaaaatgtcccagaaggatatatctattctcctgaaagagactttaccattacaacatcagattttagtattccaatgaaaaataatgtaaatcctgctctggaaggtactgcattactcagtaaaggaactttcagcaatcattattcatcctatactgatgagaaaagtgatccagcaacaggaaaagacaaaattgctacaggtatcataacaaactctcatacaggcatcatacctgtgacttccttcactactgttccttctaaagacataaataaggaaaactattaccatatatctgaaacaggcactcctctctcactggaatatgaaaacaaaataagagatgattcccttatttttcagcttgggactactctggcraaggaaaataatgtggataatatggatttggtcatcatggaacctgatgaaagtagctctgaatatatttcaaacaagtatgtctttgaaatagaaaatgaagaaaatagccctattgtaaatgc

SEQ ID NO: 170895 - DNA, 616 bp, Homo sapiens
cctcttgcctggaatggtctcaaactactggcctcaagcaaccctcccaccacagcctccctaagtgctgagattatagtgcctgctgttctcccagtgccacagtctcatgtggtaaatatcgtctttcatattcacctcacatgctatcttctttaaccacccctcggtatgattacctgttgtgtatctcactatatacattctttaatcacactacctataatatttcattgtatttacttgataaaagatcctcctgtgtcacaagataatcctacccatagtttcctctgacacatatatctctgtccaaagttccytctgtcctagtgtaacccctgtttataatccccactgtaccccttccctacagataaccttaccctggggcacagcactatcctccaagtcacagggagcttctgaccacaaaaagagagggagagaagccaatcttaagaggcaaagactcctgaccatgaagaaagaacgttaccctgaggagattcccaaagttaaactagctctacatgaggatgcattaaagaacactcataacttcaaggcaccaagaacagtgggaaattaagccagtgtctttgtagtatatgtg

SEQ ID NO: 170896 - DNA, 558 bp, Homo sapiens
taaaagattcagtttcaaccaccaatacccttgttgttgtgacctccttttcacctctttcctgcaaagcaaagctctatgaaagagtattctaaatttgccaaccccacttctcacttcccatttgctcttcaacctggcttttgcccttaacatgccggtaaaagttttattcatatcaccaatgaaacaaacaaaaaattccaaggcacttctgtgggaccagccttgcatttgtcttctctagctagtgatggttcamgttgttatgcagggtgtttgacccaagggctgccaatccaaggactagtcaggttatgtggaagttcaggatttgattttttattgtcaagaaaacaaatccttagtatggaaaaatatttcacacatttttattgttgagacaattaaaaaattagctgaaagtaccttttcctaaagatataccgatgttgatctaaatattatgtaatgaaaaatcttcatagtaaatatctattcttttcctgttctcttaacccaatcgcagtgataagctccctttccacaactggctaa

SEQ ID NO: 170897 - DNA, 611 bp, Homo sapiens
ttctattttatttaatgggccatcttttgtattttctataggaagttcccttttgtcagtgaagaactgagaacaaccgtgttttaaaaatcatgtggtccctgytgttattaacttgagagttttaattaaatgaaaatatgatgacatgcaaagatttgattatgggaaaattatacagatatttttactttgaagtggatgtctaatggaaatttatagccttgtctttttgataaatctaggcactgaggataatttttcctatgctggatgatcttatactctcgttttaatacattattatataatcataataacagctattatttattgagcctctagcatattccatgtggcaggttaaaatgagttctattatcatctcagttttatacagagatgctaattagctgagcggaacttgaccttaagtcagcccacttcaaggcctaagtgattttttaaccagtattccatattacctccctaatcttaacaatcaccatacactttactaacattgtgttacagtacatcagagagatgaatcaagtgaacttaatagttcattccacttcaaagcacagtaacaatacttccttgttggg

SEQ ID NO: 170898 - DNA, 616 bp, Homo sapiens
tgtagatctgtgggaatttaacttacttttttctgtgctttttgaaaatgtctcacttagactatgatccctttgagagtaggactgccatttcttcacctttttttgtagctctcatatgtgtaattttatattgtgcatttatgtaaaatataattgtatgtttatagatgtgttttattatgactacatgtacttatgttttatatcaaaaagaaaattgatttgtaagatttgtaatatattaacattatatggggtggtttttaaacacctttttttttagtctgtgaagagtttmcttttttttgacacctactttgtgtgttacagaaacatttgataggataaatgtgctggtattagcactgtcattctacaggaataaagaagagatcaatacacatataatcaaatgcataaatcaggtttatctttgaaagattttatggtgtagcaagatgaaagaaaaaacagaaataatcatatctctgtatttttatacctcttcctatatttttgttaaaacaaaatgctgagagaaggtgatcacaaatatatcaatattcagtttttcaggatctgtaaaaacagaacaaaatatcatgagccatta

SEQ ID NO: 170899 - DNA, 358 bp, Homo sapiens
gaatcacagacactaaaagcgggaattaccttgagtcrgtgcatttctaccctgtgaaagtcttaattaaataacacaaaggacactttgatttaattcgtttcagttacagacttttgacatgacattccctgagcatttctgattagactcagttctctcatttcgtcttcactggcagaggctaattcttgaagttcaaatatgatgcttcaccttcctctctatgaagcattagttctcatctatttttgtgttgtacatattcctaatgccaatatcttttagactgaatttggagtgtctgatagtgtggactactgggggaagactcattcctcgggctctggtgctccca

SEQ ID NO: 170900 - DNA, 592 bp, Homo sapiens
cagctctgcaagtaatctactgtgccactaatctactatctaatctaatctatcccacttttttgtttcattaaaagtctttgacatctctccttaactctcagattagagcttttattttatctgcctcattttatgtcacaataactttctgaagaaaaaacaactctggcatttacttttaactactagatttgtttctattaaaattaatcaactatttcccccacccagtgaatttgggcattattcttgaatactgtaattagaaaacaacagggagtatctgtgtatttacatacagaaaaatacagtaaaatgtggtataaaagattttttaaaatgataccactatatacrgtacttataccctatataggcctctaggcctggaatttgctctgggtgagtcagtaagtgagtggtgattaaatgtgaaggcccaggacattactgtacactactgtgaaccttataaatactgcaaacttaggctactctaaatttatgaaaacatatttttctttcttcaataatgaattaaggtacaaaaatatctttagaatataaagatacaaaaaaagacacaaaa

SEQ ID NO: 170901 - DNA, 661 bp, Homo sapiens
gattgttgaaggtttaacacagtgggactagtagtgccataaaatcacttactggggctgacaatgtggctcccaggaatccaagaagaattataattttcattttcgtatgatatatctagaaaataagttgtgatctttagctttataaagacattacttaaaattcatgacaaaataattagtattgttcaatcaaaggaatagctgggtgaattctatagtatttacttacattttgcaatttaaaatttaaaaagttatgtttgtaaatttctgatataactctttattttctctcagacaagctgtttataaaaaccaagattgtttgcttgtccttttagcttgaacaaaatactcatttggagacatatgatgtggttgaatgcattaaagaacaagatgatctcctcctagtgctgccctacaaggagaggagcaggcccatcagaccatgggaggtcatgactaaggctaaccaactagggacttattactgcagcaattttaatgtctatrttgaaaagtacttcaatagagatttgacaataccagtccaataccagataatttccacttagtagtctaataacagaataatatactagaactaagcaactgagtcaatgtttttgtaatttatggcaatagattataa

SEQ ID NO: 170902 - DNA, 373 bp, Homo sapiens
acacatatgacagaagcaagtgaatgtgacctatacttgagagcaaaatcagtcactatagattcacagacaacctacatattgaaatcagcagataaaaacttcaactaggtttcagttccaagatggctgaataggaagagctccggtttgcagcatccrgtgtgatcaatgcagaagacaggtgatttctgcatttccaactgaggtacctgattcttctcattgggactggttggacagtgggtgcagcccacggagcatgagctgaagcagggcggggcgtcacctcacctggaagtgcaaggggtctggggatttccctttcctagtgaagggaagctgtaacagactagctggaaaaacaggacat

SEQ ID NO: 170903 - DNA, 577 bp, Homo sapiens
tgatccattggtatgtattctaaaacttccataaaaatctgagtttaaggtattagtgattttcagctatttctatgtaaggcatggtgcaacaatacttttatcagacaatgtagagactcagttggaacttaattggcttgttatcccttcccatttcawtacagcaaaaatttaacttatagtatatgcaacttttaaaaaacccatatacttctttcacataatgtaaccctaaaatttattaatgattgcatatatggatcttaccagctagaaaagcaaatgaggtcgaacattttgtcattttttttaaggcttcttcaattttccctatcttctggctcatcttaatacctttctgtagtttaccttcttttattacacattagaacaaataccatatctccaaaattatatgcaagccagtcactggattgttttttcaatcaggcacctataaagcatctatgtatataataatcaccttcagatcaaaggtaatgtgttatgagttgaacaattataatgttattactttagtagcttggaaataccattcccatgacattaaata

SEQ ID NO: 170904 - DNA, 577 bp, Homo sapiens
tgatccattggtatgtattctaaaacttccataaaaatctgagtttaaggtattagtgattttcagctatttctatgtaaggcatggtgcaacaatacttttatcagacaatgtagagactcagttggaacttaattggcttgttatcccttcccatttcattacagcaaaaatttaacttatagtatatgcaacttttaaaaaacccatatacttctttcacataatgtaaccctaaaatttattaatgattgcatatatggatcttaccagctagaaaagcaaatgaggtcgaacattttgtcattttttttaaggcttcttcaattttccctatcttctggctcatcttaatacctttctgtagtttaccttcttttattacacattagaacaaataccatatctccaaaattatatgcaagccagtcactggattgttttttcaatcaggcacctataaagcatctatgtatataataatcaccttcagatcaaaggtaakgtgttatgagttgaacaattataatgttattactttagtagcttggaaataccattcccatgacattaaata

SEQ ID NO: 170905 - DNA, 574 bp, Homo sapiens
agtggaagatacaatggttatcctcaaagaatttataatctattctaggaggaaaggtttgcatatgatagccatattcattgccatttattcattcatttgaatactaattgagtgcctattaactttaaggttcagctccaagaacccaagtgcagtatttgggagcaagacaggcaaaatatgaccaaygagttacataatcaaaacattttaatttgtgggtttcaacagaggtagaaatcactattattttggaaatgttcttaattttgaaatttgggtaagttttgagacctggagttgggttagaaagaactttttatgtgtaagtaaaaggcaacaacaacagcacagagacaagaactcttcagtgctaattaggtttaagaagagggaatgtctgattccccgcttcttgctaacatcaattgcctggtgtcaagagtaagataagcagggctctaaaggaagccctgagaattctgattcaagtaaattctccctcttccatgtcactgtactcactggggtcaaaattgagttttatacacttggagtaagactgacaatt

SEQ ID NO: 170906 - DNA, 597 bp, Homo sapiens
aatttatgtgtggattttctgttctcaaaaaaatttatggtattctattgatatcataatttaaacacacaaaaarcctaagaaatttccactaaaatgatcttctgactctaattttcaccttacatacttaaaacactggacagaaaaatttaatgttaactcataacctaaaatacatatattgttagaaatatgaaatactcatttaattttaccatcagcattaattttattatcaacaaataactcttaaaatttagtatttctgttaaactttcatttttttgatacaatcattacttctgaattctctcatccaaacaaaatgtaaaaaacaaatccatctcaaatggtaattatttgaagactattataaaaatattctttcttcataattttgcaatcacatgatacttcaataatgaatctctctctctcttttttcttttttgctaacattcatttttttcccaaagaaaagtagctaagagctttagttgccaaatcctggtcatattacctaaactatcagaggcctatttttctaatttttaaaataaggtgatttattttttgattgatgaagtggtcaga

SEQ ID NO: 170907 - DNA, 597 bp, Homo sapiens
aatttatgtgtggattttctgttctcaaaaaaatttatggtattctattgatatcataatttaaacacacaaaaaacctaagaaatttccactaaaatgatcttctgactctaattttcaccttacatacttaaaacactggacagaaaaatttaatgttaactcataacctaaaatacatatattgttagaaatatgaaatactcatttaattttaccatcagcattaattttattatcaacaaataactcttaaaatttagtatttctgttaaactttcatttttttgatacaatcattacttctgaattctctcatccaaacaaaatgtaaaaaacaaatccatctcaaatggtaattatttgaagactattataaaaatattctttcttcataattttgcaatcacatgatacttcaataatgaatctctctctctcttttttcttttttgctaacattcatttttytcccaaagaaaagtagctaagagctttagttgccaaatcctggtcatattacctaaactatcagaggcctatttttctaatttttaaaataaggtgatttattttttgattgatgaagtggtcaga

SEQ ID NO: 170908 - DNA, 597 bp, Homo sapiens
aatttatgtgtggattttctgttctcaaaaaaatttatggtattctattgatatcataatttaaacacacaaaaaacctaagaaatttccactaaaatgatcttctgactctaattttcaccttacatacttaaaacactggacagaaaaatttaatgttaactcataacctaaaatacatatattgttagaaatatgaaatactcatttaattttaccatcagcattaattttattatcaacaaataactcttaaaatttagtatttctgttaaactttcatttttttgatacaatcattacttctgaattctctcatccaaacaaaatgtaaaaaacaaatccatctcaaatggtaattatttgaagactattataaaaatattctttcttcataattttgcaatcacatgatacttcaataatgaatctctctctctcttttttcttttttgctaacattcatttttttcccaaagaaaagtagctaagagctttagttgccaaatcctggtcatattacctaamctatcagaggcctatttttctaatttttaaaataaggtgatttattttttgattgatgaagtggtcaga

SEQ ID NO: 170909 - DNA, 458 bp, Homo sapiens
ttttgctaacattcatttttttcccaaagaaaagtagctaagagctttagttgccaaatcctggtcatattacctaaactatcagaggcctatttttctaatttttaaaataaggtgatwtattttttgattgatgaagtggtcagatttcaataccccaaaaataagaatagaaaaccaaattaacaagtgtattgcttccatatgaaacagtcataatctcaagcaaaatatgagacacatttcaaaattaatatgtaggtccctttgtaacaaaagagataaataaaatagaggcaatcaactaatataaaatcaggcccaatgatttcctgcatcatttagtacattgatttttctgccactgagaacattttcatttttataggttcaaaactaaaatatggcattatgtctagaaagggccattttaaagattctgagattctggaggacag

SEQ ID NO: 170910 - DNA, 555 bp, Homo sapiens
actttgaatttgagaaagatgatttagtgtatctggtggaagaaatttccaagcagcagagcattcaagatgtgcctggctgcttttaaaaacttacactcaattgcatragcaaatgtttaaaagggaagcaaagggtaaaagtttgaaaaatgtgtagcctgaatatgtagtagaaaagaaaaacccattctggggagaaattcaagctgacttcagaaatttgcataaataaagaggagctgaatgttaattgccaagacaatggggaaaattactccaggacagttcagagactttcacagcagcccctcccatcacaggcctggaggcctaggagggaaaaatgcttttgtgggcagggctcagggtcctgctgctctgtgcagcctcaggttatggaaccctgcatcccagtcactccagctccagctgtggctaaaaggggccaaggtacagtttgggccattgcttcagagggtgcaagcctcaagccttggcagattccacatggtgttgaacctgcaggtgcacagaagggaagagttgaggttt

SEQ ID NO: 170911 - DNA, 555 bp, Homo sapiens
actttgaatttgagaaagatgatttagtgtatctggtggaagaaatttccaagcagcagagcattcaagatgtgcctggctgcttttaaaaacttacactcaattgcataagcaaatgtttaaaagggaagcaaagggtaaaagtttgaaaaatgtgtagcctgaatatgtagtagaaaagaaaaacccattctggggagaaattcaagctgacttcagaaatttgcataaataaagaggagctgaatgttaattgccaagacaatggggaaaattactccaggacagttcagagactttcacagcagcccctcccatcacaggcctggaggcctaggagggaaaaatgcttttgtgggcagggctcagggtcctgctgctctgtgcagcctcaggttatggmaccctgcatcccagtcactccagctccagctgtggctaaaaggggccaaggtacagtttgggccattgcttcagagggtgcaagcctcaagccttggcagattccacatggtgttgaacctgcaggtgcacagaagggaagagttgaggttt

SEQ ID NO: 170912 - DNA, 648 bp, Homo sapiens
ttttggccataggtatatcatctttggagaaatctctattcaatttcttttcccattatttatttgctttttttttttttttgctgttgtgagttactggagttttttatctaatctgggtattaactacttattagatatwtgagtgtcaacaagatattgtacacccatgttcataacagcattattcacaaaaaccaagaggcggaaacaacccaagtgcccatcaatagataaatggataaaagctggtatatatgagataccattcaggctacaatatgaatgaaccttgaggatcttgtgctaagtgaagtaagtccatcacaaaagaaatgaatttgtatgattccacttatatgagggatctaaaatagtccccttcatagaaatagaaagtagaatggttgttgtcgggggggtgggagaaggaagaaatggggattactgtacacttaagaatggttaatgaggcaaattttatagttttttaacacaattaaagttttaaaaacatataaataacagaatgttgaacaattgtttgcatttagtcaaggtcagtgcttagatgtttcagagagggggactccaccatattgtgacagagtgagcactgtgtgtgaccaactcttaatcagaggcctc

SEQ ID NO: 170913 - DNA, 466 bp, Homo sapiens
ttttggccataggtatatcatctttggagaaatctctattcaatttcttttcccattatttatttgctttttttttttttttgctgttgtgagttactggagttttttatctaatctgggtattaactacttattagatatatgagtgtcaasaagatattgtacacccatgttcataacagcattattcacaaaaaccaagaggcggaaacaacccaagtgcccatcaatagataaatggataaaagctggtatatatgagataccattcaggctacaatatgaatgaaccttgaggatcttgtgctaagtgaagtaagtccatcacaaaagaaatgaatttgtatgattccacttatatgagggatctaaaatagtccccttcatagaaatagaaagtagaatggttgttgtcgggggggtgggagaaggaagaaatggggattactgtacacttaagaatggt

SEQ ID NO: 170914 - DNA, 648 bp, Homo sapiens
ttttggccataggtatatcatctttggagaaatctctattcaatttcttttcccattatttatttgctttttttttttttttgctgttgtgagttactggagttttttatctaatctgggtattaactacttattagatatatgagtgtcaacaagatattgtacacccatgttcataacagcattattcacaaaaaccaagaggcggaaacaacccaagtgcccatcaatagataaatggataaaagctggtatatatgagataccattcaggctacaayatgaatgaaccttgaggatcttgtgctaagtgaagtaagtccatcacaaaagaaatgaatttgtatgattccacttatatgagggatctaaaatagtccccttcatagaaatagaaagtagaatggttgttgtcgggggggtgggagaaggaagaaatggggattactgtacacttaagaatggttaatgaggcaaattttatagttttttaacacaattaaagttttaaaaacatataaataacagaatgttgaacaattgtttgcatttagtcaaggtcagtgcttagatgtttcagagagggggactccaccatattgtgacagagtgagcactgtgtgtgaccaactcttaatcagaggcctc

SEQ ID NO: 170915 - DNA, 648 bp, Homo sapiens
ttttggccataggtatatcatctttggagaaatctctattcaatttcttttcccattatttatttgctttttttttttttttgctgttgtgagttactggagttttttatctaatctgggtattaactacttattagatatatgagtgtcaacaagatattgtacacccatgttcataacagcattattcacaaaaaccaagaggcggaaacaacccaagtgcccatcaatagataaatggataaaagctggtatatatgagataccattcaggctacaatatgaatgaaccttgaggatcttgtgctaagtgaagtaagtccatcacaaaagaaatgaatttgtatgattccacttatatgagggatctaaaatagtccccttcatagaaatagaaagtagaatggttgttgtcgggggggtgggagaaggaagaaatggggattactrtacacttaagaatggttaatgaggcaaattttatagttttttaacacaattaaagttttaaaaacatataaataacagaatgttgaacaattgtttgcatttagtcaaggtcagtgcttagatgtttcagagagggggactccaccatattgtgacagagtgagcactgtgtgtgaccaactcttaatcagaggcctc

SEQ ID NO: 170916 - DNA, 591 bp, Homo sapiens
tgactgtgaagatggagaaagaggccataagccaagaaatgtgagtgacctatagaatatggaaaaggcaagaaacagaacctcccctggagtctccagaaataacccagccataacaacacttttatttttgcccagtgagacccattttggacttctgacctccagaaatttaagataaattcttgtttcattccactaagttcatggtaatttgttatagcaacaacaaaaaaaactaatacagtcaattccttgtttttgtttttaatcttcataggtacatgacagttgtacatatttatgggatacatgtgatattttgatcaagcatgccatgtgtaaggatcaaatcttgstaattaggattttcatcacctcaaacatttatgatcatttctttgtgctgagaacattccaaatctacttttataattatttattttgaaacatacaaaataaattattgttaagtatactcaccctatctactctgggcccaaggagatggggttccttggggtctcagaaaaaactttaagagcgggatttgatctctaagaaaaggctgtggagcccaaaaagaaactt

SEQ ID NO: 170917 - DNA, 591 bp, Homo sapiens
tgactgtgaagatggagaaagaggccataagccaagaaatgtgagtgacctatagaatatggaaaaggcaagaaacagaacctcccctggagtctccagaaataacccagccataacaacacttttatttttgcccagtgagacccattttggacttctgacctccagaaatttaagataaattcttgtttcattccactaagttcatggtaatttgttatagcaacaacaaaaaaaactaatacagtcaattccttgtttttgtttttaatcttcataggtacatgacagttgtacatatttatgggatacatgtgatattttgatcaagcatgccatgtgtaaggatcaaatcttgctaattaggattttcatcacctcaaacatttatgatcatttctttgtgctgagaacattccaaakctacttttataattatttattttgaaacatacaaaataaattattgttaagtatactcaccctatctactctgggcccaaggagatggggttccttggggtctcagaaaaaactttaagagcgggatttgatctctaagaaaaggctgtggagcccaaaaagaaactt

SEQ ID NO: 170918 - DNA, 557 bp, Homo sapiens
gaatattccttagtttttccttttaaacccaaatttctgattcagaaaggtactctcctactttattaagcagagtaatacatctctttattgactatgttttataacaaaagtcttttttaatgaaaaatcagttgtctctgtactccagatgaattctacagccccaacaaatagtttttaaaatataatattttttaacctactcagataattgcctctcagtgtaacaaatactatagtggaggtaagtgcaaagtgaaagctgttaaagctggattatagggtctgagwccaggctgtaaacagctggagatgagcccccagcaaagagtttctggataatgtaatatgaattttgaaggataagtaagagtcaacaaataaaaagagaagggaatagtggaaggaataaatatggtgactaaatgtggaatatgctggctttgaaagactatggaatattcaagtggagtaaatgtccaaatatctatgataattgaaatcacgggaaagagtaagtttagcaagagtgagaggaaatagggctaaaatgt

SEQ ID NO: 170919 - DNA, 548 bp, Homo sapiens
ttaaaccaagatggttgtgtaatttaaacatcacacccttaacccttatccaattaaataagcttaaagaaatatccaccaactggaatacagaaaaatattcttcatagagagagttttgaattttaggtaaagaaaatgtaaagaacaaatcatacatataaaaatctgcatgactatgatatgactcatttttatattgataaaaataactatgtttaatacattggagttgtagtaaagtattaatgatttctattttagtattcakattaaatatcatacagaaatggagcaaagcaactatacctcatgggtcagaaaatgattttcatgagttaataaaaaattgtatcttctaaaatttttcaaataacacaaaactagactttcttgcttagggtaaaaggatggattctgataagaaccatctttttgtttcctaatatttaaacatcctcttttgtccctcatggaaattaacaaagaattcttgagtctgtctggtagataaaaacgtcaacagtgaaaacacagtttcaagaaaa

SEQ ID NO: 170920 - DNA, 549 bp, Homo sapiens
attttcacataccatatcctgatttcaataaaaaattatcagtcatattaagaagcaaaataaatgatcaaaagccaagaggaaaaaaatcaagtaaaagaaacgagccaacaggagacaggacacggtggctcacgcctgtaatcccagcaccacaaggtgggtggatcacttgaggtcaagagtttgagatctgcccggccaaaatggtgaaaccccatctctactaaaaatacaaaaattagccgggcatagtggtgggtgcctgtaatcccagctacttgggaagttgaggcatgagaattgcttcaacccgggaggcggaggttccagtgagctgaggttgtgcctctgcactccagcytggctgacagagcaagactctgtcaaaaaaagaaaaagaaaaaagaaaagaaagaagccaacaggagatccagatgttgaaagttttcgatatggatttttaaattactacagttaatatggtcaagaaatttgctggtagtatgaataatttcaaaaaaggactggaaatttcagaacagaatc

SEQ ID NO: 170921 - DNA, 562 bp, Homo sapiens
tggcatcctgtcttttcacttcctacgtatgagagttccatgtgggggttatcagtgtgcatttgtgagttcccatgtgaaggactgtctccaagtgtctgtaggtgccaggatggagatggacagagaagatcctctcgggctgctttagtgacacctagaggctgtggggttggacacttcagccccaggggcctgggcagcactgtccagcacctgcctgctcctgtcttcttcacgggggctgacttccctgccatctttctccaaatacggtggcaagagctatcccatccacccccatctggagctcagctgcccagccagacaagatgrcaaacagtgtgcagatggcttcaaagctttccccagctccttctgcaaggggcctgcagatgaaatggaagccctcatcctcaccgcctcccccttccagaaaacccaggcaacagccacctctgaatgctgctttagaagcttctccctcctggtgattaaaccactccagacaaataaaaaactgcatttccaccataggtttgttcacatgcatgcagccaat

SEQ ID NO: 170922 - DNA, 483 bp, Homo sapiens
tatttttatacacatcaatcaacctcttttcaaacccctcctattcccagcctctggtaactatcattctactctttatctccatgatatcaattttatatagctccagagcacacaagtacrtaactgcggtctctatccctgacctactgacctgaaacctggcccccactttgatttccaggagcataaaccgctcatataagtgagaacatgcaatagttttctttctgtgcatggcctagttcacctaacattatgacctttaattccatccatttagctgaaaatgacaggatttcattcttctttatggctgaatactattctattgtgagtatattcccattttctttatccattcatccattgattgacatttagattgattccatatcttggctattgtaaatagtgctgcagtaaatatgggggtacagatatcccgttgatacactgatttttttttggatatatacccag

SEQ ID NO: 170923 - DNA, 211 bp, Homo sapiens
aaaacctgagcatatgtcctattaatacaacttaccctcatcagctctgcatgagaagaagggggaattccctcagtaaaacagtcagaatggaatcacagacttgttttgagccagtcactggtaagkgggggtaggctaaaatgataagctcagaatctaaaccttagactagggaatggcaaactttttccataaagaggcaaacggt

SEQ ID NO: 170924 - DNA, 519 bp, Homo sapiens
ttattctttttcccatctcattataagtgctttgtaaaaagtgattgctactcctatgaatcactgagggtaaaataacttaccagaattgagatttggaagagaatttcccaagaacaacrtagtattcttggatttcaatgttttgaatactcctagtcatagatgggtcttttcagtaaaatactgaagggaagcaattgttgatttcctattatgattatcatattaaattaagcaagaactaggaaggcctagcaagacgtagcaaggcctagcaagaccctaaaggaatgggagaagggacagatgagtttttccaagtggaaaagtatgaagcatgaaacattgcttagagaacggacaagtcagaagagtgagtactgtcacagtgatagaaaggcttaggggtaaaggatggtttttggaagcatcagggaattcattggggaacttacacagggcaaagtgcagtgggttgtttttgtttgtttgtttgtttgtttttgagacagagtt

SEQ ID NO: 170925 - DNA, 587 bp, Homo sapiens
tattactgacaagtatttctttgtaggaatgcatcatatatttctccattctcttactgatggacatttgtgttgttttcagttataggaaattatgaagagagctgctatgaacattattacacaagcattttcctgcagatatgggaatgtgrtattgctttgttataggagagttccgtgtttacatatgtaaagatttggcaaattgcttttcaaaatggttgtaccattgtacattcaccctaataatgtatgaaagttctaattcctccacatttagtgatgttagcccttttaattagctattctagtagaataaaaatatatctccttgtgattttatctttctctcatgaataatgatttctttttttttcctctttttttaaactgttgttttaggttcaagggtacatgtgcaggtttttatacagataaactcgtgtcatgggagtttgttgtacagattattttgttacacaggtactatgcctagtactcaatagttattttctctgatcctctcccttttcctatcctccaccctcaagcaggccccagtgtcttttgttcccctctttgtg

SEQ ID NO: 170926 - DNA, 587 bp, Homo sapiens
tattactgacaagtatttctttgtaggaatgcatcatatatttctccattctcttactgatggacatttgtgttgttttcagttataggaaattatgaagagagctgctatgaacattattacacaagcattttcctgcagatatgggaatgtgatattgctttgttataggagagttccgtgtttacatwtgtaaagatttggcaaattgcttttcaaaatggttgtaccattgtacattcaccctaataatgtatgaaagttctaattcctccacatttagtgatgttagcccttttaattagctattctagtagaataaaaatatatctccttgtgattttatctttctctcatgaataatgatttctttttttttcctctttttttaaactgttgttttaggttcaagggtacatgtgcaggtttttatacagataaactcgtgtcatgggagtttgttgtacagattattttgttacacaggtactatgcctagtactcaatagttattttctctgatcctctcccttttcctatcctccaccctcaagcaggccccagtgtcttttgttcccctctttgtg

SEQ ID NO: 170927 - DNA, 596 bp, Homo sapiens
ctctcccttttcctatcctccaccctcaagcaggccccagtgtcttttgttcccctctttgtgtccttgtcttctcatcatttagctcccacttataagtgagaatatgcaatatttggttttctgttcctgcattagcttgctaaggataatggccrccagctccatccatgttcctgcaaaggacataatcttgctcttttttatggctatcctttatcttctttatcaagtctaccatttagacttgataaagagacaatgtggcatttaggttgctgccacgtcttttgctattgtgaatagtacagcaaggaacatacacatgtatgtgtttttatgattgaacgattcatattcctttgggcatatatccagaaataggattgctgggtcaaatggtagttctgctttcaattctttgagaaattgccacactgcttttcataatggttgaactaattgacactcccactggcaatatataagcgttcctttcctccaaaacctcgccagcatctgttttttaaaaatttttcattaatagccactttgactggtataagatggtatttcattgtgtttttgatttgcat

SEQ ID NO: 170928 - DNA, 425 bp, Homo sapiens
ttgatgacaaatcttaactgttaagtgcccagtgctgatatcctcctgggcatggagacagagatcaagtgcttggtacagacaaatcaaagatttcctctgccactagctgatatgctcatgctttcttgatactatgcgaatccacttggaaaaaagaaagcaagacttgttaatgcaggaagatattagacatacaggcaaatcaaagatagaggggaattgataaagcatgttggcttagagtatamttttgatgcgatgtattcccaggaaaagtaaacacattgataaactcattgctcttgatcttcctacacagtttctattgacatttctttcagctccaggcacagattagagagtatatggcccattgattgcatttaggactcttaatgacaggaaagaagattgaattcctc

SEQ ID NO: 170929 - DNA, 425 bp, Homo sapiens
ttgatgacaaatcttaactgttaagtgcccagtgctgatatcctcctgggcatggagacagagatcaagtgcttggtacagacaaatcaaagatttcctctgccactagctgatatgctcatgctttcttgatactatgcgaatccacttggaaaaaagaaagcaagacttgttaatgcaggaagatattagacatacaggcaaatcaaagatagaggggaattgataaagcatgttggcttagagtataattttgatgmgatgtattcccaggaaaagtaaacacattgataaactcattgctcttgatcttcctacacagtttctattgacatttctttcagctccaggcacagattagagagtatatggcccattgattgcatttaggactcttaatgacaggaaagaagattgaattcctc

SEQ ID NO: 170930 - DNA, 545 bp, Homo sapiens
tgaaataaacccagacagatctactactactatttaaagaaggagagagagagagagtcaaataagactttgagagtttgaaagactgcccaataccacaattcctatgggataagttaagaggatgtaatgtttttctcccaaaactacagagactcttgaagcatttaaaataaaagagtggcatgcctggttttgtgttttgaaatatgcattatggtagcagagtggagaattaaagggcgactttgtataaaacctttctgatttatgatagtccactaatctctcatgtatactccatgcccagagcctaacacagtgtctggcatattaacagacatttaataaatattctagaaaaagctttcccagacmaatactctgcagctcttctgaggattgttagaactataattgttgcttttgaaatgctaaagcttgaacagcatagagactgccgaaatgctactcaaaaaatcagcaaaaatgactgttcagaaaaagtgagggcaatgttaaaagactaaagtttaaaagttagt

SEQ ID NO: 170931 - DNA, 573 bp, Homo sapiens
agtgcaatgtgaatgaagcctatgaggtagttaaaagtattgtaccaatgtggatttctaagttgtgacaaatgtgccatagtaatgtgagatgtcatgaatggggaaactcaatgagaggtatatggggactcagtaccatctttgttagttttctgtaaatctaaaactactctaaaatttgtcgttttttaaaattggaaaaactggtacttggaaatgattaataaaatcaataaagttaaaagcaagaaaaagagaaaacaaaaattatcaatatccagtgtgaaagagaggctgtcacttcaaattccactagaatttaaaaggtaatatgtcatggaatgaccatagggctcagcaattgcagcctcgggcatttatcttggagaaatgaaaatttacattttcaygaaaaggaatgttcatggcagttttattcgtaattatcctaaaaaaaaaaacacagaacaatccagacacctttcaatgggtgaatggttaagcaaactgcagtacattcacactgtgaaatactactcagcagttcaaagttacatactgtgggccggg

SEQ ID NO: 170932 - DNA, 612 bp, Homo sapiens
gactctgtctaaaaaaaaaaaaaaagttatatactgtggtataaccttagagaatattcttcaagtgataaaaatacagaaacgacgaagaaattagtgcttaccaggagttaaggatggaggagatggctacaaaaagatcctgtcatggtgagaatgttctgcctctggactggtggggaagacacragcctgcacatgtgataagttgcatagagctgaaagtacacacgtgtatgatagggacatattataagcaactttacaccaataaattcatcaacttttaggaaaaaacacctaggagggttttgtaaatatattgaaggagaccttcccacttcttttttaaaaatttcaataatacattttatttgagcccttatgtcaaaaatattgctatgttaaggatataatccacataaaaattactgagatattttactttttattaaccaagttattgtaatctgttgtgtatgtgacttttacagcacctcttaatccatgccatgcatttcaaacgctcagtagccatgtgtggctggtggctaccataatggacagcacaatcctgcccaaattaataaaaaaaaaatatggtgcctgctc

SEQ ID NO: 170933 - DNA, 519 bp, Homo sapiens
tctgtttcttcatatgtctttcaagaagtttgtccatgtcatgtaaccagtaaattttaatggcataaaggtgtttataatatgcttccctattgtttgtatgatcaatacttatatcctccattttattcctaatattggtaactggtcacttttatgtttcttgaacagcattgctagtcatctaacaattttaataacattttcaaggaaccacttattggttctgttggtttcctctattgtttgttttctatttcatcgattattactctcctctttattattttatttttttctacttcctttgggtttaatttgctttttttcttggtttcttaatatggaagcacagtcattgactttaaaacagttctrttttctaatataaaaatccaacaaatacttttttttctgaatactgacttagctgcagcctataaattttgatatgctatgttcataccaccattcaaagtattttctgatttctctgtgatttcttccttgaagagtatt

SEQ ID NO: 170934 - DNA, 477 bp, Homo sapiens
ctcacccagtggaagactgatgactcgctataataaagagagagacagatgctctggtagcatgtgcttccagtcataagaagttttagctgggcttccaacatctttcttgtgtttttggtcacaaatagaatatggaaaaatagaattgaatctccaggcagaagacagcttgcagctccrgttctttctgccccaaaccatgttatttatgacgctgcatcacctttcacaactggtattgctgcctgtcattaattgatccgtgcccggatttcatgacaaatgtgaaataggccccagatggcagagttcaattctctgatgtttggcttttcatctcattgtatgtgaacatgtctcatcccctgcccttttttggagactgagaaggatctacagggtttacagttgctagaacctctgccttgtgtcttaacaatgtgaattgtgcaccataaaggcagtcaccagagc

SEQ ID NO: 170935 - DNA, 571 bp, Homo sapiens
agaagccctgtagatgcagaataaacgtgttcacactctggtcagctttctctccatgaaccctattaggcattcgggaaagtttgataagaatcctgagaaagcatccttgatggagctggcagggggaggggaaaggtagccatcctcaatgtgtacacacctaatagagattcaaattacataaagagaacactaataggactgaaaagagaaataggcaaatcccagctgtacttaagagacttcaacactcctctcycagtaattaatacagtaagtaggcagagaataagtaaggatatagatgatttgaacaacactaactgccaatttgatctaactgacctttatggctcattccacccaatagcagcagaatagacattctcaagtgcactgggaccattcaccctaataaaccacatcctgtggcataaaacaaatcttgacacatttaaaataatagaaatcatacaaagcatgttctcaggtcataatgggattaaactctaaatcagtaacagagagatataagaaaaattcctaagaatttgaaaattaagcagta

SEQ ID NO: 170936 - DNA, 606 bp, Homo sapiens
agcagtgtcccaagaggaactgtgttgggtgttgctaaaacacagtggtaatgtaatgtgtgccatgaaacaaatggaggcaagctttctgcttccaccctgggctctgtttcttcagaagcaagttaagaagaaggggagatggagctgtcaactctctgtacataaattcagaaggatgagcaaaggctggcaggatgatggataattctctacaatagatgtacatattcttatccaagaaagcaaccaytgcagcagagtaaaatatggaatatggaacagtggagaagaatgtcagcaagtagtaccagctcagtgaaagattataatccagcagaatcagcactagagtgacaaatagattttaccctatcccaaagctcaccatttggtcttttttatcgggaacaaagccttgagaaagattttaaggtactctgagattgtcaggaaagagctgcaattagcaatacctgctgccggccacaaaaggggaaatgttggctcatttgccttatattgtcaaccgtggcttctaacattctcagcaaatgaattcacacctccccagggatcagcgtttctaaagtgttgagaagggtg

SEQ ID NO: 170937 - DNA, 568 bp, Homo sapiens
ctctgatacctctttcataaacagcttactccttccttgaactttgattctggtcatccaggctagggctgcttcattaagtgatkgaattggccccagcgaagtagccagcagttcacaaaagaggtttcagtgcttgctggctttacatgtccttagtcctgaattgactccagtcaattcctggggcctcctccatctgtcctgggctcagccatcccaggaatcccctgcatatgggccgctcctgtccattgctgcacctcaccctttgcctaattatctctttcactacaaactctgctcctgtccataagtccactctgaatagactccttcaggctgcttctgcaattcagtaccctgtcacccagcaaaatagcccactagccctgactcacttccaagcctagtaaaaggacccagatacctcctggtctaacgccatccatgcaattgtttacatcctataacaatgggtattgtgctttgcaagttaaatagacacaattactgtgatttttataaatgtacttttacattattagctgtcctagttccaactgaa

SEQ ID NO: 170938 - DNA, 516 bp, Homo sapiens
tgtcctgggctcagccatcccaggaatcccctgcatatgggccgctcctgtccattgctgcacctcaccctttgcctaattatctctytcactacaaactctgctcctgtccataagtccactctgaatagactccttcaggctgcttctgcaattcagtaccctgtcacccagcaaaatagcccactagccctgactcacttccaagcctagtaaaaggacccagatacctcctggtctaacgccatccatgcaattgtttacatcctataacaatgggtattgtgctttgcaagttaaatagacacaattactgtgatttttataaatgtacttttacattattagctgtcctagttccaactgaatgtctttccccactcttaaattctctaggagtttaccttggatgtatgtttatctagataacctatttccaatttcgtaccagtcatggacagggagtggttgacattttgaatggagaagaattctaactctacagcctgacattaa

SEQ ID NO: 170939 - DNA, 516 bp, Homo sapiens
tgtcctgggctcagccatcccaggaatcccctgcatatgggccgctcctgtccattgctgcacctcaccctttgcctaattatctctttcactacaaactctgctcctgtccataagtccactctgaatagactccttcaggctgcttctgcaattcagtaccctgtcacccagcaaaatagcccactagccctgactcacttccaagcctagtaaaaggacccagatacctcctggtctaacgccatccatgcaattgtttacatcctataacaatgggtattgtgctttgcaagttaaatagacacaattactgtgatttttataaatgtacttttacattattagctgtcctagttccaactgaatgtctttccccactcttaaattctctaggagtttaccttggatgtatgtttatctagataacctatttccaatttcgtaccartcatggacagggagtggttgacattttgaatggagaagaattctaactctacagcctgacattaa

SEQ ID NO: 170940 - DNA, 566 bp, Homo sapiens
tcctcctgacgcttcatttggccgcttaatacttgccacaagaagcttctgattctttgctcttctggtaaaacacctccctgttctcccttggggtctgcaggatatctgtgttcaatttgggagcatttctcacactttcgcagatgaggtctgtgctaatatcaaggccctggaactgaccctcccatgggccagttaatgtcacctaccttgtggccctggatccaacaggagcagggggtctcrccagagccagtgagtctattaatgtcccatgagccagtaaatgtcacctgccttatggctctggatccaccaggatcaggggtctcaccacagcgactccctctgtgctgcactgcactttatacagtactgacatatctattattacattgacttctatcaactttgtaaagtagtcactaacattgcatctaatagaaaataaaattcttagtaaggattcttcattgtaagcaacaaaaagctcactcaaattaagtcaaacatgaaacaaaatttatggacataagaactgaaaatttcaggggtatttggct

SEQ ID NO: 170941 - DNA, 566 bp, Homo sapiens
tcctcctgacgcttcatttggccgcttaatacttgccacaagaagcttctgattctttgctcttctggtaaaacacctccctgttctcccttggggtctgcaggatatctgtgttcaatttgggagcatttctcacactttcgcagatgaggtctgtgctaatatcaaggccctggaactgaccctcccatgggccagttaatgtcacctaccttgtggccctggatccaacaggagcagggggtctcgccagagccagtgagtctattamtgtcccatgagccagtaaatgtcacctgccttatggctctggatccaccaggatcaggggtctcaccacagcgactccctctgtgctgcactgcactttatacagtactgacatatctattattacattgacttctatcaactttgtaaagtagtcactaacattgcatctaatagaaaataaaattcttagtaaggattcttcattgtaagcaacaaaaagctcactcaaattaagtcaaacatgaaacaaaatttatggacataagaactgaaaatttcaggggtatttggct

SEQ ID NO: 170942 - DNA, 566 bp, Homo sapiens
tcctcctgacgcttcatttggccgcttaatacttgccacaagaagcttctgattctttgctcttctggtaaaacacctccctgttctcccttggggtctgcaggatatctgtgttcaatttgggagcatttctcacactttcgcagatgaggtctgtgctaatatcaaggccctggaactgaccctcccatgggccagttaatgtcacctaccttgtggccctggatccaacaggagcagggggtctcgccagagccagtgagtctattaatgtcccatgagccagtaaatgtcacctgccttatggctctggatccaccaggatcaggggtctcaccacagcgactccctctgtgctgcactgcactttatacagtactgacatatctattattacattgacttctatcaactttgtaaagtagtcactaacattgcatstaatagaaaataaaattcttagtaaggattcttcattgtaagcaacaaaaagctcactcaaattaagtcaaacatgaaacaaaatttatggacataagaactgaaaatttcaggggtatttggct

SEQ ID NO: 170943 - DNA, 285 bp, Homo sapiens
atgatgagggagctatagggaggaagggaacagtaaggccatctctaagagcagggctggaagagtgtaytggtttcttatggttgctgtagaaaattatgacacaggcagtaccttaaaacaacacaaatttattattgctatgatttgaatgtttgtgtcctctccaaaatccatgttgaaacttaatccccaatgcaacagtattaataggtggggtttaggaggtgattagaccaggagggttctgccctcctgaatgggagtagtgccttataaaagagc

SEQ ID NO: 170944 - DNA, 285 bp, Homo sapiens
atgatgagggagctatagggaggaagggaacagtaaggccatctctaagagcagggctggaagagtgtactggtttcttatggttgctgtagaaaattatgacacaggcagtaccttaaaacaacacaaatttattattgctatgatttgaatgtttgtgtcctctccaaaatccatgttgaaacttaatccccartgcaacagtattaataggtggggtttaggaggtgattagaccaggagggttctgccctcctgaatgggagtagtgccttataaaagagc

SEQ ID NO: 170945 - DNA, 520 bp, Homo sapiens
ctgactgaagaagggtggaaaagcatctcagatggagagggccccctcagcaagctgtggaaatgcctctgtgcatggagctggcaggaaacgatgagctatctaatcccaagcaatcaaacctgacttggggggaacacagaaaagggtgtgtggctgggatcaagattgaggcccggttgtcaggggatggagtttcaacttcaggctgaagcatttcagaacttcattctgaaagctgtgggatttgaaacaggagatgatgtggtctcatgtgcgtctttgacagtttgaacaagcagctgtgtgggcacagagtagatgtcggaaaagctgaagactgagatctgcgtaaaggattcttagaactgtctaggtcaggtgcaatagagacytagcatatcagaggcagaggggaagggcaggaagaccacagtgcatcattggttatttaattaggattaataacattcatcatcttatcaaaattctttatagcccagacagttatgcttcaaag

SEQ ID NO: 170946 - DNA, 560 bp, Homo sapiens
tcttgctgaaggcaggttaaggatttacatatcaagggtagagaatgaggaacttcatcagatatgagggttgaggattttcactaaactgggcttagcagaccaaggtcagggtgggcaagccaatggcctagtcaagaagatggctcagaggagccagactaaagcttggtcaaggatgaagtctttattagaagtccctgtaggattttgagcagagaagtgaggtgatctcatttataattgatcagattggctgctatttccatatttattacaaggagacaagagtagaaatggggaagtagttaggagagaggtgttggtgacttagacaagaggtatatcagtgaaatggacaaaagcatatgggttaggaggtgtttagaaaggtggttaatggaaacttccaactggttggacataggagttgaatamaaggacaaatccaagattagccctagaatttggattgagcacatggaaggagtgctgtgatcttactgaaatggagaagccttggggaggaacagctttgtagggcaggaaggaatagaatt

SEQ ID NO: 170947 - DNA, 632 bp, Homo sapiens
ctctacagcatgggaaggacttcactaggtaaaaacaccaggaaagaacctccatgcagagagaccagcctgtacaaaggtgctgcggctggagggagcctggagaaatgagttcaggatgtcttgagcaagacagtgaagaaaaggattgagatgtacagaagaaaagggagccacatctcctggggcattttagkctgtgctaagcacatttgcatttgtcccaggcataatgaaaagtcaattaagtgttttaagccaagaagtgacatagttttgcatttcaaaatgatcattttgactgctttgtggaaaatcgctttaagggggccaagctgagagccaggtgaagggagtatggcattgctcagataagagacaacgatggtttaagctagaatggtggctgaagaaatagagtgaagtggataaatgtaaaacatacttcaaagataacatggtcaaggcttggatatgggctgatgagagggagagaggtattaaggaggacactttgattctggattgctcaaccagatgacagggtagttcactgagcccagggtcctggaaaagatctagttgtctataaaatggggataaccttgccaatcctgcttttctcacaaatt

SEQ ID NO: 170948 - DNA, 424 bp, Homo sapiens
acaaatgttcagtacatttacattaactctaagggccaaattggaaagaggcatcagagagggacagcaatgaggaagtgaaaaatcacaagaaaccagtgaatcaactttctctctctctgctctttgtctctgcttctcctatctttgctgcttcawcttgttctctgcaggtcagctgtccagctttgtgctctacgtgctgggtggatgatggctgctcccacacttccgagttacagttccatccacaaggaggccacactcaaatctctcttaggtctgatctcacacttcagaatgagaaattcatttcagtttaagccatcaccggttcaatcagctatgttcaggagattgaggccatatgataaagcatagctaacagtaagaggtagcctagggaatttcttggagagcagag

SEQ ID NO: 170949 - DNA, 455 bp, Homo sapiens
tgaaaagttaatattgaatgtataaagtttaaaaataaagttgtgttctttctcaagcttttactttcagcttataaatattattcttatgtttgtaaaagtctagcaaaaattaacaatcacttaaaaggagaccttgattaatatatacgtcccatttataaactttaaggttttcaattgtctttataattttgatacattctatttttagtactttaacaaaatttctcatgtgctcaagtcttatcactctaatagattacattaaactcataaacatagtgatkcttatggtattgaaaatattcaagtactgtatataaatccagtaaaaattcaacttaagtccaaatcaattactaaattattcgttttaattgtgatcacaaagtttaactgctattccaataaaccaaactctcttaagtacaagaatttctatatgagtcata

SEQ ID NO: 170950 - DNA, 597 bp, Homo sapiens
taaactacatagagacaggactttgctgtctacgcctttactgatagatacttagtgccttraagactgcctgggacataataggtgtgcaatatatatattttaagttgtcctgaaggtaatggctaatcttcttagtacagccttcccctatttgtgcaatttctttgctggccatcctaccttcttcttcctggttttaacccaggatttctaaattacaatctggacaatgcccatcctgccagcatagatacgttttaaaaatgtttgggaaatacttcatattcttgaccctcccaccaccccacaaaattggctaagtttcataatacataatggcataatggaaaattcaagaagtactgcaaaatgtttaattttgtttctaagcttacctgttagtgaaatccttttagatgatttgtagtagtatcctgtgcaattatagttccagtgtgtggcttttctgctgtattggatcttttagttatcagaatgtatcatattacttatttcgtctcattgtgttttctcattcttgaattttcaaatgcctctatgctacacgcatatacacacacacccatgcacaca

SEQ ID NO: 170951 - DNA, 597 bp, Homo sapiens
taaactacatagagacaggactttgctgtctacgcctttactgatagatacttagtgccttaaagactgcctgggacataataggtgtkcaatatatatattttaagttgtcctgaaggtaatggctaatcttcttagtacagccttcccctatttgtgcaatttctttgctggccatcctaccttcttcttcctggttttaacccaggatttctaaattacaatctggacaatgcccatcctgccagcatagatacgttttaaaaatgtttgggaaatacttcatattcttgaccctcccaccaccccacaaaattggctaagtttcataatacataatggcataatggaaaattcaagaagtactgcaaaatgtttaattttgtttctaagcttacctgttagtgaaatccttttagatgatttgtagtagtatcctgtgcaattatagttccagtgtgtggcttttctgctgtattggatcttttagttatcagaatgtatcatattacttatttcgtctcattgtgttttctcattcttgaattttcaaatgcctctatgctacacgcatatacacacacacccatgcacaca

SEQ ID NO: 170952 - DNA, 476 bp, Homo sapiens
ggtaatggctaatcttcttagtacagccttcccctatttgtgcaatttctttgctggccatcctaccttcttcttcctggttttaacccaggatttctaaattacaatctggacaatgcccatcctgccagcatagatacgttttaaaaatgtttgggaaatacttcatattcttgaccctcccaccaccccacmaaattggctaagtttcataatacataatggcataatggaaaattcaagaagtactgcaaaatgtttaattttgtttctaagcttacctgttagtgaaatccttttagatgatttgtagtagtatcctgtgcaattatagttccagtgtgtggcttttctgctgtattggatcttttagttatcagaatgtatcatattacttatttcgtctcattgtgttttctcattcttgaattttcaaatgcctctatgctacacgcatatacacacacacccatgca

SEQ ID NO: 170953 - DNA, 553 bp, Homo sapiens
ctactcctctaaactactttttttctctcgtgcctgcatcatggcctggacagttgctgatcagagcatcccacttagttaattccaggtatgtaatcacttgtctgccttcctgattagctgtagcttcccaaaggcatgtgtggtatcatttcatcattatatgcatggcatgcaacctgctacctcccacatagaagggtgaccttcatcaatagaaacggcaaccttatgggtcttctggagttaggccrtaagaatccttgaaagcttctgcctggttctcttgcatctcttgctgtcaatactttccctttccaaatccgtccacatccaccatctgtgagaagcccaaggcatgtaaggaagccttttgtaggtattctgataaagaatcccagctgaactcccagctgacagccagtagtacctggcagccaggggatgagccatgttgggcgtccagacatgtttggccttcagatggctgcagtcccagccactctctgcctgtcacacatggagaccccaagtgagaaccattcagctgagt

SEQ ID NO: 170954 - DNA, 553 bp, Homo sapiens
ctactcctctaaactactttttttctctcgtgcctgcatcatggcctggacagttgctgatcagagcatcccacttagttaattccaggtatgtaatcacttgtctgccttcctgattagctgtagcttcccaaaggcatgtgtggtatcatttcatcattatatgcatggcatgcaacctgctacctcccacatagaagggtgaccttcatcaatagaaacggcaaccttatgggtcttctggagttaggccataagaatccttgaaagcttctgcctggttctcttgcatctcttgctstcaatactttccctttccaaatccgtccacatccaccatctgtgagaagcccaaggcatgtaaggaagccttttgtaggtattctgataaagaatcccagctgaactcccagctgacagccagtagtacctggcagccaggggatgagccatgttgggcgtccagacatgtttggccttcagatggctgcagtcccagccactctctgcctgtcacacatggagaccccaagtgagaaccattcagctgagt

SEQ ID NO: 170955 - DNA, 553 bp, Homo sapiens
ctactcctctaaactactttttttctctcgtgcctgcatcatggcctggacagttgctgatcagagcatcccacttagttaattccaggtatgtaatcacttgtctgccttcctgattagctgtagcttcccaaaggcatgtgtggtatcatttcatcattatatgcatggcatgcaacctgctacctcccacatagaagggtgaccttcatcaatagaaacggcaaccttatgggtcttctggagttaggccataagaatccttgaaagcttctgcctggttctcttgcatctcttgctgtcaatactttccctttccaaatccgtccacatccaccayctgtgagaagcccaaggcatgtaaggaagccttttgtaggtattctgataaagaatcccagctgaactcccagctgacagccagtagtacctggcagccaggggatgagccatgttgggcgtccagacatgtttggccttcagatggctgcagtcccagccactctctgcctgtcacacatggagaccccaagtgagaaccattcagctgagt

SEQ ID NO: 170956 - DNA, 615 bp, Homo sapiens
ttttaatcattataaagatatatccaaagggataaagaagaaaaggaattgcagcagcaaagccaactatttcttccccatgtgtacccatcttggatcatccacttcccacagttctgggacccctgtttgtatgggcactggaagccactcctaactggtcacacctggttggaccaaaggtggacgagtgaccccagacaaatcaagccaccaactaccgactgggttgagctgatccytcccttttgtacatgcattctctctctctctctctctttttcatcataatttgagctatgtgatacatccacaaagttaggcagtattagatgcttgcattgtaagatcatgaggaatcagggtgacaatttcaaccttctgcttcctcaaccaagaaaatcagagacaagtcactatgatgaccccccgtaatagaaagttgctcctagttccttgtgaaactttcagcctgagtgtgtgagttgaatattttttaatttgggaggggggttgttatttataggtttctgtttcttacaaccaagaaatctctaacagaaagaggaaggcagatcaaagtaggtttgaaatgtcaaaaagctacagtaaagt

SEQ ID NO: 170957 - DNA, 398 bp, Homo sapiens
gctgggataattggcaaaccacatgtagaagaatgaaattgaatcctcatctctcaccttgtacaaaagtcaactcaagatggatgagagacttagatctaagacctgaagacataaagattatagaagataacatctgaaaaactcttctagactctggcttaggcaaagacttcaygaccaagaacccaaaagaaaatgcaacaaaaacaaatgtaaatagtttaattaaactaaaaagcttctgcacagtaaaagaaataatcagcagagttaacagacaatccacagagtgggagaaaatcttcacaatctatacatccaacaaaggactaatatccagaatctataaagaactcaaacaaatcatcaaggaaaaaaaatcaaaaagtgactaa

SEQ ID NO: 170958 - DNA, 468 bp, Homo sapiens
atcacaaatttcggtaagtacttgtttgctcagaaatattccaacttgtctctttcctggcatgtggaagaattgctgttccttgccctgttgaagttaggcctggcaatatgctctgcttttaccaactagataggagcaaaaatggtatgtgtcccttccaggtgacacttttaaaagccagtgtatgggccacaggttctctttgctctgcccaagtgatcatggaagcatgagttgagatkgaggctccattggcacagttccctgactgaccaagatgaatagatcactctgcccactatgatgttcatgtagcaaagcagtgtgtttgctgtcaagccacttggatctggggattgctatcaaagtgtagtctagcctgtcctgacaaaactagttaattccattggtcaatgcagattctcttttattaggaatgtgggggagctttaaggatcattctgg

SEQ ID NO: 170959 - DNA, 578 bp, Homo sapiens
cgaggcaccattcttggctctcttggtcaggtgaggttctccttgttgcttccataacaccatccctcaatgtgttccttccttgtattgcaatgatgtttagatgtgcctgcctccctcacaagacttggagatacatattattaccaccattgccctcagttaagaggcaagactgttggggctcagagaaattaagtcacttctctaaggtcacagagmtagtgtgtaatagagctaagatttaaatctatctcacctcggtttcactccaaagcttgtaattttttttcatttcagactgtttctacaacaaatagatttctaaagtgcctctacagaaaatgtgttttctctaaaatgaacaccaaactggacacttatgagtgcccccaagggtcttgaggtgatggaatagtctgcctttcaaagagaatgatcttacaatttacaagtttgcctctcaattaactgagcactgtggctctttatttaatgttatttctacataatctaattttggctgcaggttaatggacccatagggagttactgctagttcagtttcaaacgaattc

SEQ ID NO: 170960 - DNA, 502 bp, Homo sapiens
tttgcctgcctctcaggaatgtggcatgctgtgagacccagataataacacaaataaggagactactatttactgagcagggtatgtgctactgaatctyatcaaattcctaaaatcacccagaagttagatattacttttctcaaatgaagaaaattgccaggccgggcacagtggcttacacctgtaatccctcggccttgggaggcggaggaaggcagatcacctgaagtcaggaattcaagaccagcctggccaacatagcgaaaccctgtctctactaaaaatacaaaaattagccaggcatggtggtgggcacgtgtaatcccagctactcaggaggctgaggcagaagcatcacttgagcccaagaggcggaggttgcagtgaggtgtgatcgcaccactgccctccagcctgggtgatggagtaagactcaatctcaaaaaataagtaaataaataaaaaagatttagaaaatgtctgaggcctccagattcat

SEQ ID NO: 170961 - DNA, 502 bp, Homo sapiens
tttgcctgcctctcaggaatgtggcatgctgtgagacccagataataacacaaataaggagactactatttactgagcagggtatgtgctactgaatctcatcaaattcctaaaatcacccagaagttagatattacttttctcaaatgaagaaaattgccaggccgggcacagtggcttacacctgtratccctcggccttgggaggcggaggaaggcagatcacctgaagtcaggaattcaagaccagcctggccaacatagcgaaaccctgtctctactaaaaatacaaaaattagccaggcatggtggtgggcacgtgtaatcccagctactcaggaggctgaggcagaagcatcacttgagcccaagaggcggaggttgcagtgaggtgtgatcgcaccactgccctccagcctgggtgatggagtaagactcaatctcaaaaaataagtaaataaataaaaaagatttagaaaatgtctgaggcctccagattcat

SEQ ID NO: 170962 - DNA, 502 bp, Homo sapiens
tttgcctgcctctcaggaatgtggcatgctgtgagacccagataataacacaaataaggagactactatttactgagcagggtatgtgctactgaatctcatcaaattcctaaaatcacccagaagttagatattacttttctcaaatgaagaaaattgccaggccgggcacagtggcttacacctgtaatccctcggccttgggaggcggaggaaggcagatcacctgaagtcaggaattcaagaccagcctggccaacatrgcgaaaccctgtctctactaaaaatacaaaaattagccaggcatggtggtgggcacgtgtaatcccagctactcaggaggctgaggcagaagcatcacttgagcccaagaggcggaggttgcagtgaggtgtgatcgcaccactgccctccagcctgggtgatggagtaagactcaatctcaaaaaataagtaaataaataaaaaagatttagaaaatgtctgaggcctccagattcat

SEQ ID NO: 170963 - DNA, 567 bp, Homo sapiens
ctatcattgcacatggttcgcaggacacaaaataatagtgatttggcgtggctctttgtaaaagtaagatatgatacgtaacagtggctatgggttttttattgttgttgttttcgttgtgattgttgctgttgagcaatttttctgatccaggtctggtgagctttggtagtagcaagttacttgaaagtgtataagcttttgttggacaaatgaggggacatcagcagaatttaatgaggagaacttgagctctgaattcatacaggcatgggtctagacccccagctttgcctattcctaggcatgtaacyttgtgaaaaatcacataaacctctctgggcctgggcatccttacctgcaaattgggaaaagaaatacctaccttttttgaccctaggaggattacagaaaatcccacattccaagcaccttgcacagagactggaagatgtctttccctttccctgattcattcagtgaagtctcctgacacctcctcaggcatgtcttgcatattggagataagaataaaacctcaaagtccaaagggtcataaggtccacg

SEQ ID NO: 170964 - DNA, 465 bp, Homo sapiens
tatttaatgagttaaataaagatgcacatatattactatactaccacttccatttttaatattttgatagctacattttaacgtaattgatttcctttataatcttaaatttattttttwaaaatattgttctgagaaagggtctgtagaattccatagattgccaaagaggttgatggaacaaaaagattaagaatctttgctcagggccaactctgtgctctggcaccaggcatagggactaacatgcagtaggaactcaataaaagtttgatgagtgaatgagacatcttctgggatggttgtctcttcattaatacacaaaatatttatggagcacttaataagtgttaggcatataaccatgaataagcaggcccacttcctgctcctcaagcatttataatccacccaggaacatctatagagaagcaaccagatgacatgaagcctggaggccacgca

SEQ ID NO: 170965 - DNA, 492 bp, Homo sapiens
tttcctttctcccgatacccaggtgctggactaaaaggagctagctgggagaaaaaggaaaggaggggttgacatttttagaggcaggatggttttcaaggaagagtttttttttctccaattgcaggtgaagtaaagcaagtgaaagggtaagtggggaaatgattgaggaggggggaggggaccagtcacttttgtctacgagttaagaatatcttcctgagttttcctttctaaagacatctgtgcatcagcagaaaatgatctgttaaaaaaaaaaaacataaaaaattcttttagcttctagtcagagctatgcaatgtgcatactcagttgcttgtgggaaactggagaggctctctggaaatgagtgtgtggccattcmgtcttaggaaactggggccttggtatagaaagttcttagactatagtagaaaattggtaaattcattaattcattacacagacctttattgagttcctgtctgagc

SEQ ID NO: 170966 - DNA, 506 bp, Homo sapiens
ccctctgtatctgcagattctgcacctgcatattcaaccaagcacagatgaaaatatctggggaaaaatacaacaataaaaaataatacaaataaaaataatacrgcgtaacaacaatttacataatgtttaattgtgttaggtattgtaaagaacgtagagataatttaaagtacatgggaggacatgtatagattatatgcaaatgctccaccatttgatttaagggacatgagcatctgtggatcttagtatctgagggggtcctaagaccaatccccatggatctcaaggaataactaatcatagggtcttcataaggaggcaggaaagtcagggttagagaaggagatgtaatcacagagacaaagatcagagagagaaagagagagagagggagagagatctgaagatgctacactgctggccttggagaaggaggaagaggtcttcagccaaggaatgaaggcagcttctaggagctggaaaaagcaggagcacattct

SEQ ID NO: 170967 - DNA, 623 bp, Homo sapiens
ttggtccattcaaacatccctgcccaagaacatctttccactttccttcccttagccaatgcctactcagccatcaagactgctggcaggctacctcctccgtgaagcctttccttttactgtccctcaattcaggctagactaaatgcctctctccatcagtgtttagctataagaaacagaaccactcgtagttgcaaggagtctgggaaacatagcttttgctttccagcttcagcagcacacaaaggaacagcaagagaaaatggagaggatcctgaaggttcatccaccatttctcatttcccatttctggtcgtgtcygcactgcacagtgcatagcattgcattcaggaggccaggttataagtgcctgcagggtggaactggagactgggacggggtgggaaaggaagccgacatcagagtgaaatgtctgagtcaagaggaagaagagctgagggaaacaaagcccagggtgtggcctgaacagagagtaaagtagcatgaatgagaaggccactgagacaagggattccaaggtgaggggaatcaggatggtcttcaagaactttaacatcttgttcatagcagaaaataagacaaagaggaagacattgagc

SEQ ID NO: 170968 - DNA, 622 bp, Homo sapiens
catgtcattcccagagctgatggaggccctggcaggtggctcagacagccagtgatgggcatggccttggaggactgtgagtgttggggaatgggggctttcctatggcacatgggaccgctgtgcagggcactaacacagagactgttgcaggtttgggagctgtgaggacacttcaggatgtgcagagcagcaccctgggccctggatggtacccagaggcagggagcatggagctgacactctcagtgcactctggcactgctctgaagggaaggaggtaatagaaacccaccacactgcttatgtcttcccagcccagcccctaggaaggcttggaaatcatcactgaacctccaccaggggtgttccctccacttgaccttctgaaaactgaaccaaagagaagaggatgccgctacctccacctccacctccatcaacagcacttattkggaatatttgccctttaggaaagcctcatagcaacccagaatctttttaggccttaaagaagaatatgataatggtaatgtttctgaaaatttggcaaagaaatggagatattttagaacaaagagttgttcctggagattctttcctagacagccactttctcccc

SEQ ID NO: 170969 - DNA, 659 bp, Homo sapiens
aacaggctcacaagcaggcatgggaaaccagcccagttgttcccagaacattgggacagatgtttacaatctttttaagtaaacatagaaattgaccctcctgctcttaaagcttgaaacttccatttgtcttatctgaattccttcctcagaaacccagccctcaggacccagatagtatcaaggaactaaaactcaccaggtcaccacatccagacaatgagaagtcagacccctcatccttcatgatttccttagcccctccttcctgtttacccacatgtagttgcatttcttccctgctatatgaacccccaattttaattggtcrgggagatggatttgagactgatatgtcatctcctcagctgcagcacccaaataaaaccctgctccccggtgataataattgtctcagtgattggctatctgtgcccaagcaacaagacctagactaaacccttggcattttagtaacacacgcacacctacacataccttataatatataaagtactttacagtttctggccactctgggtgctgacacaggaacaagttctgtgcaggacctatggccagaccaggcatgtcacctcaaggggaacgtggtggcacccaggtgagggtgcttgagatcgcaaagccccagagggggt

SEQ ID NO: 170970 - DNA, 659 bp, Homo sapiens
aacaggctcacaagcaggcatgggaaaccagcccagttgttcccagaacattgggacagatgtttacaatctttttaagtaaacatagaaattgaccctcctgctcttaaagcttgaaacttccatttgtcttatctgaattccttcctcagaaacccagccctcaggacccagatagtatcaaggaactaaaactcaccaggtcaccacatccagacaatgagaagtcagacccctcatccttcatgatttccttagcccctccttcctgtttacccacatgtagttgcatttcttccctgctatatgaacccccaattttaattggtcagggagatggatttgagactgatatgtcatctcctcagctgcagcacccaaataaaaccctgctccccrgtgataataattgtctcagtgattggctatctgtgcccaagcaacaagacctagactaaacccttggcattttagtaacacacgcacacctacacataccttataatatataaagtactttacagtttctggccactctgggtgctgacacaggaacaagttctgtgcaggacctatggccagaccaggcatgtcacctcaaggggaacgtggtggcacccaggtgagggtgcttgagatcgcaaagccccagagggggt

SEQ ID NO: 170971 - DNA, 356 bp, Homo sapiens
aatggaatggaatggaatggaatggaatggaatggaatggaatggaatctaccagaatcgaatggaatggaatggagtggaatggaatggaatggaatcaaatggaacggaatgggttgtacccgagtggaatgtaatataatggaattttatggcgtggaatggaatgaaacggaatagaatggaatggaatcaaatcgcgtggaatggaatggaatggaactgaatcaaacagagtggaatggaatggaatggaatggaatggaatggaawggaatggaatcaccccgaatggaatggagtggaatggaatggaatagaatggaatggaatggaatggaatggaatggaatgga

SEQ ID NO: 170972 - DNA, 665 bp, Homo sapiens
tgacagaagcttggagatttagaggaagagggggaatcaaaagaggaagatggtaagggagtaaagtagtggagagagggaggagtaagacccaggaaagcttattgttccagagaccaaaggaggaaggagtttaaggaggcaaggaggcaagcagcagatggattcaaatctcacagaaagacaaggaaaaaccatgaggaaaaagaaaagcctactttgattaacaagaaaggctttttcagtgaattttagagtagtagcattcaaagggtagagaataaaacattgtggatatttcagaaataaatttccaaaaaagaagaaaayggagcaatgggtatttaagtactaaagaaggagcaaagattggtagtcaagctgatggaaaagtgtatacgtatgtgtttgttgtttttcattttgatgttagggcaatcttaaattaaaaagatatggttttgcacaagtcagttaatatctgtagaccttccaactgtataaggaaggcattaggctaaatgctgctggaaccttctcacatctctgatcacctacaatcctgtaagggaaggagtctatagaaagaaaagggtttgaggcacttgagagagagagtgtgtagttgtcacagaaggaaggtcacagagtcctttgtctagaat

SEQ ID NO: 170973 - DNA, 565 bp, Homo sapiens
tctctatctatctatctatctatctatctatctatctatctatctatctaattcctccatccaactagctagctgacccttgttaatttacagayatcacaacacttacttctaagtattaatactttagcatgactcttctaaaaataaggatcttcttcataacatcatctcactagtacacctaaaaaattataatttctaaatattatctaatatccaatctatgttaaaatttctccttttatagttgtttttccccttgaactggtcaaggctcactcattgcatttagtttttctatctctttagtttctttttttttagtgcacttattttttcatggtatcgactttgtaaagagttcattccagttgtattttagcatgtcccatattctggatttgtctaatccagacaaaatttgttaatttgattaatttgttgatctccctcacgtaattcctgtgaattgatcagcaaggtcttaggtttaattagaattggattgaacatttgtggcagcagcacatcaaaagtgatgcgtgatttatgttgcatcata

SEQ ID NO: 170974 - DNA, 433 bp, Homo sapiens
agtttttcactttagtgttgttaatttaaamccaatatgttctcaaagtaaccagatatccttgctatgtgttgcatagagccaaagagttttacttcagggttttggacttaaaatgactgtaacccaaaaggtttgccagattatttgcagccactaagataagcaattgtctttattagaatgatttttgtctgatttttgtgtttagaattttataccatcatctattccctataagtgattttaggaactggcagacttatggtgtcagttattgaaatctgttccaaaatccgcctcctcacaggactccatttttggccatcaaagtagtctattttataaatgtcttgatgtgttgtcttttgtctttgccacatatactctaagacacacagactgggaagtgggtcagcaaatatatgtatgg

SEQ ID NO: 170975 - DNA, 442 bp, Homo sapiens
agtgttgttaatttaaacccaatatgttctcaaagtaaccagatatccttgctatgtgttgcmtagagccaaagagttttacttcagggttttggacttaaaatgactgtaacccaaaaggtttgccagattatttgcagccactaagataagcaattgtctttattagaatgatttttgtctgatttttgtgtttagaattttataccatcatctattccctataagtgattttaggaactggcagacttatggtgtcagttattgaaatctgttccaaaatccgcctcctcacaggactccatttttggccatcaaagtagtctattttataaatgtcttgatgtgttgtcttttgtctttgccacatatactctaagacacacagactgggaagtgggtcagcaaatatatgtatggctacttacaaagtgttttctat

SEQ ID NO: 170976 - DNA, 433 bp, Homo sapiens
agtttttcactttagtgttgttaatttaaacccaatatgttctcaaagtaaccagatatccttgctatgtgttgcatagagccaaagagttttacttcagggttttggacttaaaatgactgtaacccaaaaggtttgccagattatttgcagccactaagataagcaattgtctttattagaatgatttttgtctgatttttgtgtttagaattttataccatcatctattccctataagtgattttaggaactggcagacttatggtgtcagttattgaaatctgttccaaaatccgcctcctcacaggactccatttttggccatcaaagtagtctattttataaatgtcttgatgtgttgtcttttgtctttgccacatatactctaagacacasagactgggaagtgggtcagcaaatatatgtatgg

SEQ ID NO: 170977 - DNA, 497 bp, Homo sapiens
tttatgctctgttggccctactctgaggcaatggatgctttacagtgaagctgcctgaatgggaaagtgataatggagtaacaagaaacacctggaatgaaagcacacattggtttaatatgccaaaaataatccccctcaaactcaaaggcttttacctaatcaaaccccaagcatattcattggtaaaaaggagtggtcttaggggaaaaaggaagtagatacggstccttgctgctgaacccaggtactgaaaaaccatccccaaaatgacttgttttgcaggagcatcatctttgtaataaaaatgcagtatatcaattagcctatttctcctcccccgtctcctgatagttttgctcagaaaacaggataggtgtggtggagaaagtttaggaaagaatgtggtttttggctcaatattataattagcatcctttagtcatgttttagattatctccccatttactaaagaacattgaatctgctaaaatta

SEQ ID NO: 170978 - DNA, 497 bp, Homo sapiens
tttatgctctgttggccctactctgaggcaatggatgctttacagtgaagctgcctgaatgggaaagtgataatggagtaacaagaaacacctggaatgaaagcacacattggtttaatatgccaaaaataatccccctcaaactcaaaggcttttacctaatcaaaccccaagcatattcattggtaaaaaggagtggtcttaggggaaaaaggaagtagatacggctccttgctgctgaacccaggtactgaaaaaccatccccaaaatgacttgttttgcaggagcatcatctttgtaataaaaatgcagtatatcaattagcctatttctcctcccccgtctcctgatagttttgctcakaaaacaggataggtgtggtggagaaagtttaggaaagaatgtggtttttggctcaatattataattagcatcctttagtcatgttttagattatctccccatttactaaagaacattgaatctgctaaaatta

SEQ ID NO: 170979 - DNA, 543 bp, Homo sapiens
gatctcctgttgaacatacacttgggtgtaaggacacatactgtgctagggcaggggcagctctgagcagcattttccactggaacaggaaagtgaccacagctttcattgtgaacatgttaccatagctgaccaagttaaccataggtagttttcaggacatctgattatatagaacttgaatatctaaaatattaccctggtaccttgtggttctcaaacttcttttaccagagaactctcttatcacactgtatactartgacaaaaaaaaaaaaaatgctccagtgttcttctgacaatgctttgagaaacgctagttcaggataccaattcagcaaatattaactaagtacctaatttgcactgggacaaagttctaggaatgaagatacagtaatgaacaaaatagacaaaaatctcaactcaaaaaggctttcatacttgtagaaacgaatttttttaagattgaggcaatttcaatgcttgataactaaaactatattaaattcagtcttctgaagtatgtatgagtttataatt

SEQ ID NO: 170980 - DNA, 543 bp, Homo sapiens
gatctcctgttgaacatacacttgggtgtaaggacacatactgtgctagggcaggggcagctctgagcagcattttccactggaacaggaaagtgaccacagctttcattgtgaacatgttaccatagctgaccaagttaaccataggtagttttcaggacatctgattatatagaacttgaatatctaaaatattaccctggtaccttgtggttctcaaacttcttttaccagagaactctcttatcacactgtatactagtgacaaaaaaaaaaaaaatgctccagtgttcttctgacaatgctttgagaaasgctagttcaggataccaattcagcaaatattaactaagtacctaatttgcactgggacaaagttctaggaatgaagatacagtaatgaacaaaatagacaaaaatctcaactcaaaaaggctttcatacttgtagaaacgaatttttttaagattgaggcaatttcaatgcttgataactaaaactatattaaattcagtcttctgaagtatgtatgagtttataatt

SEQ ID NO: 170981 - DNA, 543 bp, Homo sapiens
gatctcctgttgaacatacacttgggtgtaaggacacatactgtgctagggcaggggcagctctgagcagcattttccactggaacaggaaagtgaccacagctttcattgtgaacatgttaccatagctgaccaagttaaccataggtagttttcaggacatctgattatatagaacttgaatatctaaaatattaccctggtaccttgtggttctcaaacttcttttaccagagaactctcttatcacactgtatactagtgacaaaaaaaaaaaaaatgctccagtgttcttctgacaatgctttgagaaacgctagttcaggataccaattcagcaaatattaactaagtacctaatttgcactgggacaaagttctaggaatgaagatacagtaatgaacaaaatagacaaaaatctcaactcaaaaaggctttcatacttgtagaaacraatttttttaagattgaggcaatttcaatgcttgataactaaaactatattaaattcagtcttctgaagtatgtatgagtttataatt

SEQ ID NO: 170982 - DNA, 543 bp, Homo sapiens
gatctcctgttgaacatacacttgggtgtaaggacacatactgtgctagggcaggggcagctctgagcagcattttccactggaacaggaaagtgaccacagctttcattgtgaacatgttaccatagctgaccaagttaaccataggtagttttcaggacatctgattatatagaacttgaatatctaaaatattaccctggtaccttgtggttctcaaacttcttttaccagagaactctcttatcacactgtatactagtgacaaaaaaaaaaaaaatgctccagtgttcttctgacaatgctttgagaaacgctagttcaggataccaattcagcaaatattaactaagtacctaatttgcactgggacaaagttctaggaatgaagatacagtaatgaacaaaatagacaaaaatctcaactcaaaaaggctttcatacttgtagaaacgaatttttttaagattgaggcaatttcaatgcttgataactaaaactrtattaaattcagtcttctgaagtatgtatgagtttataatt

SEQ ID NO: 170983 - DNA, 448 bp, Homo sapiens
ctattgtaatttttattgggcagacatgagactgaaatgggatcaaacattaatccaaaccccaagaaaaaaaaatccacctagaaaagtgattttagattaatgtaatgtctttcttcttatcttttcatattttctaatacgtattttcttccttaaaaatgaggaaaaaggaaacaccaactgtttaccactgaacaaaaagcagtgagattaacctggattttctccttccctccctcctcatttcctttgtgagtgatcagatatttcctccagccarctacaggctggaatttctcaactctctttatttaaatcctgaggaatgtgaagaaacatgcaccccaggggggtttgcattttgtatcttttgttgccaaatctaatccaaaccaataactgatttctatgaccacagaagtacatggccatttcaaagtcagat

SEQ ID NO: 170984 - DNA, 477 bp, Homo sapiens
gctttatgttccctgcctcactgtaactggctctgaagccagtaatttcaatgagggccacttaatagacttgagttaggtcctctcaagataagttgcatcatattgtttcataggaaatgagtgaagaaatgaataaaagtaaaatttcaagatctgctaaaaatggcaaggtaatttaggtcttcatattcaaacttttggtacatatatcaccaaatttgtaaaaaatcgtatttgaggcttctgatttccagtctggcatgtaagacatttgggagtcatctctttatcctgacaaaaagtcaaaactgaacaaactgaaagtcaacaacttctcttagatccatcagagaaggagggccacaggacaaaccattgtctccaraactggagactgatagggggacatggggaatcccagcttgccagcagccaaaacccataaccagtcccggggaaggaaaaagtaaacgt

SEQ ID NO: 170985 - DNA, 579 bp, Homo sapiens
atccttggctcagcctctctggggcttctcttctagccctgcctacctgcagagtgcatgccctccaacctgttttcctacacacaccactgagagaggtgatgtttcagtaaaactgtgtctgactggacgggtatacctgtttcttttaggggttagatcacaacttcattgtatccatgttgtgtaatcatcacacttcaattcagccttatctataaccagtatcttamactccactcactcctctatttttcttgtttggagagaggaaaggaggattaggcaaacagagtctcaccaaacccgagtgttttacacatacacatacttttattaataattcatatagtattgtatttatcactttaaagtgtacaactggtatattcacaaaattattgtgtattaccattatcaaattccagaacatttttactacccccctcccctcaagatgcatatgcgtagtcattagaagttattcccattctgctttcttcccttccccttggcaactactaatctactgtctggctataaacttgctcattttggatattttacataaatggaata

SEQ ID NO: 170986 - DNA, 579 bp, Homo sapiens
atccttggctcagcctctctggggcttctcttctagccctgcctacctgcagagtgcatgccctccaacctgttttcctacacacaccactgagagaggtgatgtttcagtaaaactgtgtctgactggacgggtatacctgtttcttttaggggttagatcacaacttcattgtatccatgttgtgtaatcatcacacttcaattcagccttatctataaccagtatcttaaactccactcactcctctatttttcttgtttggagagaggaaaggaggattaggcaaacagastctcaccaaacccgagtgttttacacatacacatacttttattaataattcatatagtattgtatttatcactttaaagtgtacaactggtatattcacaaaattattgtgtattaccattatcaaattccagaacatttttactacccccctcccctcaagatgcatatgcgtagtcattagaagttattcccattctgctttcttcccttccccttggcaactactaatctactgtctggctataaacttgctcattttggatattttacataaatggaata

SEQ ID NO: 170987 - DNA, 513 bp, Homo sapiens
agtaatattaatcaaaatcaatgatcatagatctcttcttcctttatctaattccacattctctttaccttacctasccccttagtatgttgagatattttatactttttggggcaaaccaaaattgtattcttatagaatccatgctcatgttgattctgaccttattgttctagtttctcactgacatgattatattaggtcagtgcaaaaggtaactgtggtttttactactacttttaatgtcaaaaactacaattagttttgcaccaacctaatacaatatagaattaccaggaaattccttaggaagcatccaggtctaagcctagtccctcactactttgcctaggagtaacccaattttctcttggtaattttgataaaacaccacagtttacaagttgatcctttcatttgcttgtgagttcagtgaaagggaagtccaaaatgacaagttggtagccttatcttccagtttaatggaatgaccttgacacagatgtgtctgtc

SEQ ID NO: 170988 - DNA, 513 bp, Homo sapiens
agtaatattaatcaaaatcaatgatcatagatctcttcttcctttatctaattccacattctctttaccttacctagccccttagtatgttgagatattttatactttttggggcaaaccaaaattgtattcttatagaatccatgctcatgttgattctgaccttattgttctagtttctcactgacatgattatattaggtcagtgcaaaaggtaactgtggtttttactactacttttaatgtcaaaaactacaattasttttgcaccaacctaatacaatatagaattaccaggaaattccttaggaagcatccaggtctaagcctagtccctcactactttgcctaggagtaacccaattttctcttggtaattttgataaaacaccacagtttacaagttgatcctttcatttgcttgtgagttcagtgaaagggaagtccaaaatgacaagttggtagccttatcttccagtttaatggaatgaccttgacacagatgtgtctgtc

SEQ ID NO: 170989 - DNA, 575 bp, Homo sapiens
gctacaattactatataaccacaaataggttgtgcacagtaaatgaattctgtatttcttgaaatatttctgtatttcaagactttagaaactcttcttctacagtatggcatggaagttccaacatatcaaacttactgattttgagaacaagtggtaagtccaggcttctattaatcagccttaaatatattgccaaatacacagtcaaacataytggttcaagtacctgagacaaagttaattttcagagtgctaatattgcttcaggcaatattaactttcagagtgttaatattactctaggtactcgaaccaatatactcacaataaattctgattaagtgcatctaaactgatcaattcttcgagaccaagttttatatttagctctctttgatataaaatcatcagaatacattttaatgcatgcctttcagccgcttggtgatcaattttggcaagatttttcattttcattgccttgtgtcctttcttttctaaaatgaggtattgcaattctttctctgatccatggacaataactagaaaaactgaataaaacaataactggt

SEQ ID NO: 170990 - DNA, 575 bp, Homo sapiens
gctacaattactatataaccacaaataggttgtgcacagtaaatgaattctgtatttcttgaaatatttctgtatttcaagactttagaaactcttcttctacagtatggcatggaagttccaacatatcaaacttactgattttgagaacaagtggtaagtccaggcttctattaatcagccttaaatatattgccaaatacacagtcaaacatattggttcaagtacctgagacaaagttaattttcagagtgctaatattgcttcaggcaatattaactttcagagtgttaatattactctaggtactcgaaccaatatactcacaataaattctgattaagtgcatctaaactgatcaattcttcgagaccaagttttatatttagctctctttgatataaaatcatcagaatacattttaatgcatgcytttcagccgcttggtgatcaattttggcaagatttttcattttcattgccttgtgtcctttcttttctaaaatgaggtattgcaattctttctctgatccatggacaataactagaaaaactgaataaaacaataactggt

SEQ ID NO: 170991 - DNA, 582 bp, Homo sapiens
attcctccactttctctgtaatgttttatcaggtaaggactcgtccagagtcaagacttttgccactactcagtaataatgagaccatatccttccctgtggtgttggtggaggccccacatgcggaataataacraagagctacccttgctcccaggcaggatggtatcacctgaagtttaatagggagcttgaactataagagtggaccagatcgcttaagtgtgaaaatattcagtaaaaagcagaggtctaaaaagcctgacttcaaaatttagtcaggctacacccaacctgtggtaacaaggatcttctcttcatttcagatgtgagtggaggctgtgaaaaacttgtacttgtatgctcacctgacagtaataatagggtacacatgcgtacccactatctactacagtgtcatcagacaagggctgctaaacacaagatttaaatagccagagtcttataatacctcaaatgtccaggttcagttggaaaatcattcatcatacatagaatgaataaaagctctagctgaatgagaacagacactcaacatactctgacaccaaaattacaagg

SEQ ID NO: 170992 - DNA, 489 bp, Homo sapiens
gcattacaaatttgttcaggtagacatgccttctcctcaatgattttattaatggcatctgagaactctgttgcttcttggtcagcagatatggcttctcctattatcttaayattttttaagccaaactgttttcttaaattattaaaccatcctttgctggcattaacttattcagctttagatacttcaccttcctttagctctgagttgttgcaaaatgactttattttttttgagctatattagattctataggtatgcttatagcaatcttgcagactccattgccactcgcgtgggcagatctggaagtgggatggtccttctaaattgagacaaaggattcagcctttgtcacctcatatccaccagtcataaataatgagttagctctttttgggtgaacccatttctgaagaggaaattcgctcattatccatcagcaggtaatactctcaacagctgaggaaatgattagttcactcc

SEQ ID NO: 170993 - DNA, 582 bp, Homo sapiens
attcctccactttctctgtaatgttttatcaggtaaggactcgtccagagtcaagacttttgccactactcagtaataatgagaccatatccttccctgtggtgttggtggaggccccacatgcggaataataacgaagagctacccttgctcccaggcaggatggtatcacctgaagtttaatagggagcttgaactataagagtggaccagatcgcttaagtgtgaaaatattcagtaaaaagcagaggtctaaaaagcctgacttcaaaatttagtcaggctacacccaacctgtggtaacaaggatcttctcttcatttcagatgtgagtggaggctgtgaaaaacttgtacttgtatgctcacctgacagtaataatagggtacacatgcgtacccactatctactacagtgtcatcagacaagggstgctaaacacaagatttaaatagccagagtcttataatacctcaaatgtccaggttcagttggaaaatcattcatcatacatagaatgaataaaagctctagctgaatgagaacagacactcaacatactctgacaccaaaattacaagg

SEQ ID NO: 170994 - DNA, 619 bp, Homo sapiens
aaatgatagaagttactcaagctgagaaacagagagaaaataggaaaaaaaaaaaaaaaaccttagagagatgtaagagtattagaaagacctaacatctgtgtaattaaaatacggagaggagaggagagaaaaggcacggctcaaaaagtactcagagatgaaatatgaaaacttcacaaattttacaagagacattaacttatacattcaaaaagccaggacaaacccaaacaagatgaagccaaagaaatctatggcaagattcacgacagtcaaacttctgaaaaaaaaaaaactaagaaaaaatatttcatgtagcayagaagaaatgacattttacttacatgaaataattcaaataccactaactatataatcagaaaacatgaaggccagaagtaagtggcagaatgctttcacctactgacggaaaacaaaacaaaacaaccaagcaaacaacaaaaacactgtcaatgcagaatctttagcaaaaatatctttaaagagtgaaggaaaactcaacatatcttactcttgacctacacaacatattgtaagaatatacccatgatagctgctcatgaaagtgtataaatttcaaaagtgaaatatgcca

SEQ ID NO: 170995 - DNA, 619 bp, Homo sapiens
aaatgatagaagttactcaagctgagaaacagagagaaaataggaaaaaaaaaaaaaaaaccttagagagatgtaagagtattagaaagacctaacatctgtgtaattaaaatacggagaggagaggagagaaaaggcacggctcaaaaagtactcagagatgaaatatgaaaacttcacaaattttacaagagacattaacttatacattcaaaaagccaggacaaacccaaacaagatgaagccaaagaaatctatggcaagattcacgacagtcaaacttctgaaaaaaaaaaaactaagaaaaaatatttcatgtagcatagaagaaatgacattttacttacatgaaataattcaaataccactaactatataatcagaaaacatgaaggccagaagtaagtggcagaatgctttcacctactgacggaaaacaaaacaaaacaaccaagcaaacaacaaaaacactgtcaatgcagaatctttagcaaaaatatctttaaagagtraaggaaaactcaacatatcttactcttgacctacacaacatattgtaagaatatacccatgatagctgctcatgaaagtgtataaatttcaaaagtgaaatatgcca

SEQ ID NO: 170996 - DNA, 668 bp, Homo sapiens
atttctttatccacatgtattaaatatgcttcatatttctgttcataccatttggcaattctgagtaaacagggtagggtctcccaggttccctgctttttctggatcctgaatgaaaaatcaagaaatgcctaaaacactgtgtgacccagacagctacaagtttttcccagcgaacttgaacccaaaccagggacctgaacatttccaggcactggtaaatctgtctaggttgtagctcaaaacactgatactggcttcagccctgagccaaattttcataaaccctcatataaatttcatcctctgaccwcctggctggggacatacctaggtagaacatttctttctcttgctatccgtcctaaggctgtgctgcatcattcggtaacaaatttcccctcaatgaatcctttggcctgaacacccaggtgtttcttccctctttcttggaaatcccaaccagctccatcgtccaccgatttggggcattccttgtaggaatccctctgccactgcttttgggggaagggcagctatgggttccttgggatgaagccataggttagaaaaaaacataaaatccattttgaaattgtaattaaaatgcttttgcatacctacattaaaggaagacaattttttttttttttttttgagacagagtc

SEQ ID NO: 170997 - DNA, 419 bp, Homo sapiens
agacattctaaaaaggcaaaactatgaagacaaaaaaaaatcagtggttgatagggttataggaaagggaaggatgaacaggttatttaggacagtaaaactattttgtacgatactatgatggtagatgcatgccattataaatttgcccaaatccatagaatgtkcaaaaccccaagtgaaaccaactgtaaattatggactccatgtaggaatgatgtgtcaatgtaggttcataaattgtaacaaatgttacaatcccctctgtcaggggaggctgataacggggaaggttatgtgtatgtgggaacagagggcataagggcaacatctgtaatttctcaattttactgaggaacaaaaatgttataaatagacttgagtctatttaaaaactgtatcagaaatgaagaatgcct

SEQ ID NO: 170998 - DNA, 465 bp, Homo sapiens
agggaaggatgaacaggttatttaggacagtaaaactattttgtacgatactatgatggtagatgcatgccattataaatttgcccaaatccatagaatgttcaaaaccccaagtgaamccaactgtaaattatggactccatgtaggaatgatgtgtcaatgtaggttcataaattgtaacaaatgttacaatcccctctgtcaggggaggctgataacggggaaggttatgtgtatgtgggaacagagggcataagggcaacatctgtaatttctcaattttactgaggaacaaaaatgttataaatagacttgagtctatttaaaaactgtatcagaaatgaagaatgcctttcatgattcattagtattgaacatggatgaggaaacatcatcagagtttcaggaggccaatagaaacccgcaaaactgaaaagcaaagagaaacaaaaagctgaaaaaaa

SEQ ID NO: 170999 - DNA, 465 bp, Homo sapiens
agggaaggatgaacaggttatttaggacagtaaaactattttgtacgatactatgatggtagatgcatgccattataaatttgcccaaatccatagaatgttcaaaaccccaagtgaaaccaactgtaaattatggactccatgtaggaatgatgtgtcaatgtaggttcataaattgtaacaaatgttacaatcccctctgtcaggggaggstgataacggggaaggttatgtgtatgtgggaacagagggcataagggcaacatctgtaatttctcaattttactgaggaacaaaaatgttataaatagacttgagtctatttaaaaactgtatcagaaatgaagaatgcctttcatgattcattagtattgaacatggatgaggaaacatcatcagagtttcaggaggccaatagaaacccgcaaaactgaaaagcaaagagaaacaaaaagctgaaaaaaa

SEQ ID NO: 171000 - DNA, 465 bp, Homo sapiens
agggaaggatgaacaggttatttaggacagtaaaactattttgtacgatactatgatggtagatgcatgccattataaatttgcccaaatccatagaatgttcaaaaccccaagtgaaaccaactgtaaattatggactccatgtaggaatgatgtgtcaatgtaggttcataaattgtaacaaatgttacaatcccctctgtcaggggaggctgataacggggaaggttatgtgtatgtgggaacagagggcataagggcaacatctgtaatttctcaattttactgaggaacaaaaatgttataaatagacttgagtctatttaaaaactgtatcagaaatgaagaatgcctttcatgattcattagtattgaacatggatgaggaaacatcatcagagtttcaggaggccaatagaaacccrcaaaactgaaaagcaaagagaaacaaaaagctgaaaaaaa

SEQ ID NO: 171001 - DNA, 288 bp, Homo sapiens
taccattatattgttttctgcttccactgtgtgtttttctctcactttataatgmaatatagctgatgtgcataaaacaatgaaacataactgtccagtataatgggtaactagaagtgcaaatcttctgatcacataatagatatttcttgaatgaatgaatgaatgagtaaaatatgcaagtctccctgctttactctccatttttctaggtgttagttggggtagaaacacattaaagtagcagtctgcccaaaatgattgactctgagcaccttatatgggtca

SEQ ID NO: 171002 - DNA, 288 bp, Homo sapiens
taccattatattgttttctgcttccactgtgtgtttttctctcactttataatgcaatatagctgatgtgcataaaacaatgaaacataastgtccagtataatgggtaactagaagtgcaaatcttctgatcacataatagatatttcttgaatgaatgaatgaatgagtaaaatatgcaagtctccctgctttactctccatttttctaggtgttagttggggtagaaacacattaaagtagcagtctgcccaaaatgattgactctgagcaccttatatgggtca

SEQ ID NO: 171003 - DNA, 407 bp, Homo sapiens
atgaacttaaatcaataggttaactctttcataagaccttattattttaatatttttttttctaaaatagaaaaaagaaaaaacttgactagaaagggggcatggatgaggacacgctctgaagccctggagctacttcatcgtccagtaaccttcttgggcacgtgggatggtcttagattagaagacaatttatatccattttactctcgagacacttatttactaactgttgatgcaagtctcaggaacgctaatttctcttggcagcttaataaggtgtttttgatttgcatatttagaatttggatgactgtatttgaaattaccattgtatacttmtatgactttagaaaaaaatgaaagaaaataaaaaacagaagactataatatagcattacatttga

SEQ ID NO: 171004 - DNA, 473 bp, Homo sapiens
ctggttactgcttattatctttccatttttttaagtgaatatgaatatgcatattaacatataattacaattgtactaacaatactttatataatataaaacaaatatattaagctgtccgcctcctaaaactacttttgaaatacagacaaaaatacggctttaattcttggttaacaaaataattgccttttcacctgccaaaataccttgtggcaccaacaacacagcacagactatccggacaggtagtatctgttaaatccaggttagttttcaacaactacttagtggaggtttatgtggtctagctgaacctattatgcmtggcaggttctaatatcaagaacctgaaagtagaaaataacagcaacacagaacaatttgttctggccataaattgtttcttatctcttgtgttagtccattttgctgttgctgtaacagaatacctaagattgtgtaatatatac

SEQ ID NO: 171005 - DNA, 473 bp, Homo sapiens
ctggttactgcttattatctttccatttttttaagtgaatatgaatatgcatattaacatataattacaattgtactaacaatactttatataatataaaacaaatatattaagctgtccgcctcctaaaactacttttgaaatacagacaaaaatacggctttaattcttggttaacaaaataattgccttttcacctgccaaaataccttgtggcaccaacaacacagcacagactatccggacaggtagtatctgttaaatccaggttagttttcaacaactacttagtggaggtttatgtggtctagctgaacctattatgcctggcaggttstaatatcaagaacctgaaagtagaaaataacagcaacacagaacaatttgttctggccataaattgtttcttatctcttgtgttagtccattttgctgttgctgtaacagaatacctaagattgtgtaatatatac

SEQ ID NO: 171006 - DNA, 473 bp, Homo sapiens
ctggttactgcttattatctttccatttttttaagtgaatatgaatatgcatattaacatataattacaattgtactaacaatactttatataatataaaacaaatatattaagctgtccgcctcctaaaactacttttgaaatacagacaaaaatacggctttaattcttggttaacaaaataattgccttttcacctgccaaaataccttgtggcaccaacaacacagcacagactatccggacaggtagtatctgttaaatccaggttagttttcaacaactacttagtggaggtttatgtggtctagctgaacctattatgcctggcaggttctaatatcaakaacctgaaagtagaaaataacagcaacacagaacaatttgttctggccataaattgtttcttatctcttgtgttagtccattttgctgttgctgtaacagaatacctaagattgtgtaatatatac

SEQ ID NO: 171007 - DNA, 518 bp, Homo sapiens
ataatagcagtaaccaaatcagcctggatgcgaaagtacctcttgtacaattcatacrtagccctcatacctcctgtcatggtcactgtataaataggctcattgagaaagcacctggatggctgccaccttcagcgtaattcatatgctctatctcatttgggagagctttatccatagtggcagcttgctagtcagcatttataggggtcaaaatagttttaaatatttaagctgtttgagaagcccatatttccgaattccctgtcaccaatcttcctattttgttctttccatttcccttataagtcagtcaacccaatagccactgcccgtgaatcaacatagatctatatttcaggccacctcttcttttatatgaagtgatgtactctaatttctcaaaagtctgttaattaaagagatgtctctatgtgactatttttgaagatcgttcctgaatggggctttaatgtaacaactaatcagacagttgattgcatatggtacacattgtt

SEQ ID NO: 171008 - DNA, 571 bp, Homo sapiens
caatttttactgtaacaaaatctatctaataaacatctccaagatataaagtacccaaactagtcaacctattgttagatggccagttagtaccttccagggaataaaaccaaattgggaggtatctacttttgtctggttgagaataatagcagtaaccaaatcagcctggatgcgaaagtacctcttgtacaattcatacgtagccctcatacytcctgtcatggtcactgtataaataggctcattgagaaagcacctggatggctgccaccttcagcgtaattcatatgctctatctcatttgggagagctttatccatagtggcagcttgctagtcagcatttataggggtcaaaatagttttaaatatttaagctgtttgagaagcccatatttccgaattccctgtcaccaatcttcctattttgttctttccatttcccttataagtcagtcaacccaatagccactgcccgtgaatcaacatagatctatatttcaggccacctcttcttttatatgaagtgatgtactctaatttctcaaaagtctgttaattaaagagat

SEQ ID NO: 171009 - DNA, 518 bp, Homo sapiens
ataatagcagtaaccaaatcagcctggatgcgaaagtacctcttgtacaattcatacgtagccctcatacctcctgtcatggtcactgtataaataggctcattgagaaagcacctggatggctgccaccttcagcgtaattcatatgctctatctcatttgggagagctttatccatagtggcagcttgctagtcagcatttataggggtcaaaatagttttaaatatttaagctgtttgagaagcccatatttccgaattccctgtcaccaatcttcctattttgttctttccatttcccttataagtcagtcaacccaatagccactgccygtgaatcaacatagatctatatttcaggccacctcttcttttatatgaagtgatgtactctaatttctcaaaagtctgttaattaaagagatgtctctatgtgactatttttgaagatcgttcctgaatggggctttaatgtaacaactaatcagacagttgattgcatatggtacacattgtt

SEQ ID NO: 171010 - DNA, 532 bp, Homo sapiens
aatacacaactatgcaaagcttgcaatttacatcccacaggaggacctctcagcttacccccatatcctagcctccctatagctgcccttcctattaatgataatcctgctctaatctcccccgcccagaaggaaataatcaaagaaatctccaaaagaccacaaaaccccctgggctatcggttatgtccccttcaaactgtagggggaggggaatttggcccaacccaggtacatgtccctgtctccctctctgatttaaagcagatcaaggcagacctggggaagttttcagatgatcctgataggtacatagatatcctacagggtctagggcaaaccttcgatctctcttggagagatgtcatgctgttgatagatcaaatcctrgcctttaatgaaaagaatgctgctttagctgcagcctgagagtttggatatacctgatatcttaatcaagtaaaagatagaatgacagccaaagaaagggataaattcactactggtcagcaagccatctccagtatggatc

SEQ ID NO: 171011 - DNA, 435 bp, Homo sapiens
aaaaaatgagagagggaagccaagaaacctcacattcaaatgacttaattatctctcagctggcttgtgcaatgctgaagtgatttttctgtccaacttggactataagcagccaaagaaacactctgtcyccttcctaataaatacaaattttgcactctacaaatgattgaataagtttgacaatcataaaagtggtcaaagaagtaaaaagatgtgcttgaccatgttccaatctaaatgtaatggatgtgattgatgatttttgtacatttaataaactttccctctgccaaccatttaatctcgtttttaaaatttataaagccttggggttgaaatgctagtaaagcacaataattgatattctgtaatataaaactacagcacctgtcccattttctttgcaaaactcaaaataactgtgaagggcta

SEQ ID NO: 171012 - DNA, 605 bp, Homo sapiens
ggtttggggcctaaataacttaaactttttgattaatacctcaaaactggtttaccatgcctctagcattctttggaagtaggataaagtttcagacatgtgttttgggttttttgtgtgttttttagtgatgaggtaaaattaatataagtggaatcctggttgtttagtaacttgtcatctcaatagccaaaactaaacccaagaaaatgtgtcttagtaaaaaatcaagatctttatgtggcttgctctttataaatgaacaaaaactaaaatataaaaaacttttyacttgaaattggcaagaatgacaatgagaatagaaaatgagaagaaaaagaaaatacaagcatagctcagagagttgcaggtttggttccagaccactgcaataaagcaaatattgaaataagtgagtcacacatattttttggctttccagtgcatataaaacttacgtttacaccatagtctattaagtgtgcaatagtgttatgtctaaaaaaacaagccttaatttaaaagtgctttataattaaaacatgctaatgaccatcagagccttgagcaaaacctcatcttactgctggagagtcttgtctcca

SEQ ID NO: 171013 - DNA, 430 bp, Homo sapiens
caagcatagctcagagagttgcaggtttggttccagaccactgcaataaagcaaatattgaaataagtgagtcacacatattttttggctttccagtgcatataaaacttacgtttacaccatagtctattaagtgtgcaatagtgttatgtctaaaaaaacaagccttratttaaaagtgctttataattaaaacatgctaatgaccatcagagccttgagcaaaacctcatcttactgctggagagtcttgtctccatgttgatgattgctgacctatcagagtggcagttgctgaaggttaagtggctgtggaaatttcttaagccaccctacattcaagccattcaaaaacattaaaatgtgccaccccacattaaagtcattcaaactacagtgaaggttgccacatcaaattattctgtctttc

SEQ ID NO: 171014 - DNA, 430 bp, Homo sapiens
caagcatagctcagagagttgcaggtttggttccagaccactgcaataaagcaaatattgaaataagtgagtcacacatattttttggctttccagtgcatataaaacttacgtttacaccatagtctattaagtgtgcaatagtgttatgtctaaaaaaacaagccttaatttaaaagtgctttataattaaaacaygctaatgaccatcagagccttgagcaaaacctcatcttactgctggagagtcttgtctccatgttgatgattgctgacctatcagagtggcagttgctgaaggttaagtggctgtggaaatttcttaagccaccctacattcaagccattcaaaaacattaaaatgtgccaccccacattaaagtcattcaaactacagtgaaggttgccacatcaaattattctgtctttc

SEQ ID NO: 171015 - DNA, 582 bp, Homo sapiens
atttctggctattctacattttaattgaaaagcagtatgaacattctgattcagtggtcatttaataaaagataataatcactgaacaatgattctgattagctaatggcaatttaaaggtttatagaacctttcacaattctgcctgcttattccagaatattaatagaagaccttgaactaatagaatttctgttcttatcttggtaagaagaggaaaattttgaaaaaaatgtaggagtttctcctcctgcatctttgatagcatggctagcttatactataaactgataactctgagtgtctcaacaatcagaaccaacatgagaggagcctttgtctctttagctttgctggatgtgaacaccagtcatcctattagcctggtttcatgtttcaaagaattgtttcactgtttctgcctggtatctcagcatatactttctattaagtgtgagwtgatacctctagggctgtgtgaggcacattccaggggccactctttctcataaatagtatagaaacctagcagcatgctatgattttggaacctgccccctaatgtgtccttcaccattctct

SEQ ID NO: 171016 - DNA, 541 bp, Homo sapiens
agctaatcaagggtacaaggtatctaggtcgaaggcccagctttgcctacagcagttcaaatatctaggcctaatcttagccagagggaccagggccctcagcaaggaacgaatacagcatatactggcttatcctcaccctaagacattaaaacagtttcaggggttccttggaatcaccagcttttgctgactatggatccccagatacagygagatagccaggcccctctatactctaatcaatgagacccagaaagcaaatattcatctagtagaatgggaaccagaggcaaaaacagccttcaaaaccttaaagcaggccctagtacaaggtccagctttaagccttctcacaggacaaaaattctctttatacatcacagagagaacagggatagctctcggagtccttactcagactcgtggaacaaccccacaaccagtggcatacctaagtaaggaaattgatgtagtagcaaaaggctggcctcactgtttatgggtagttgtggcagtggccatcttagtgtcagaagct

SEQ ID NO: 171017 - DNA, 530 bp, Homo sapiens
actcagtgagaaggaatggatggaggccctgcttaaagaggcattatggccacaatctggcaaagccactgtgttgcactgctggggggagcctcctcatctgtttggactctccaaagcccacaggctggaatggctgagtgaaccaaacagcagagatggtgcctgcccctctccacagggctccatccagtctcagacaggctttaccctgttgctggtggctggctcaaattccaagctggtgggtcttatgaggtgctaaggaagcccacaaaatgacactgcttggctccctggattctgccacttcctaggggtatgtgtgtaattcttgccatgcctgaattgcagactcatttgttgcagatcccaggtctagagtatttaaagctcctgggtctctgtgtgtgcctgagcagctgccctgagaagactccatagagacatccaactytatgtgtcggatccaaggctctggtggcaggggctcacaaggggatctcctgatctgcaagctgtaaagatct

SEQ ID NO: 171018 - DNA, 573 bp, Homo sapiens
ttgttccttcaaatcttcagacatgttcagagtttctgccttctggtgggttcgtggtctcactggcttcattccctttgcggtgagtgttacagctcaaaaagrcagcacagacccaaagggttaccagcccctagatttattgtgaagagtgaaagaacacagcttccacagcttggaatgggacaccaccccagttgctgctcctggctcgggcagcctgcttttattcccttatccgaccccacccacatcctgctgattggtccattttacagagagctgattggcccattttacagagagctgattggtccattttacagagagctgattggtctgtttttacagggtgctgattggtacgtttacaaaccttgagctagacacagagtgctgattggtacatttacaatcctttaggtagacacaaaagttctccaagtccccactagattagctagacacagagcactgattgatgcatttacaaaccttgagctagacacagggtgctgattggtgcgtttacaaaccttcagctagacacagagtgttgattggtgcattcaa

SEQ ID NO: 171019 - DNA, 573 bp, Homo sapiens
ttgttccttcaaatcttcagacatgttcagagtttctgccttctggtgggttcgtggtctcactggcttcattccctttgcggtgagtgttacagctcaaaaaggcagcacagacccaaagggttaccagcccctagatttattgtgaagagtgaaagaacacagcttccacagcttggaatgggacaccaccccagttgctgctcctggctcgggcagcctgcttttattcccttatccgaccccacccacatcctgctgattggtccattttacagagagctgattggcccrttttacagagagctgattggtccattttacagagagctgattggtctgtttttacagggtgctgattggtacgtttacaaaccttgagctagacacagagtgctgattggtacatttacaatcctttaggtagacacaaaagttctccaagtccccactagattagctagacacagagcactgattgatgcatttacaaaccttgagctagacacagggtgctgattggtgcgtttacaaaccttcagctagacacagagtgttgattggtgcattcaa

SEQ ID NO: 171020 - DNA, 547 bp, Homo sapiens
gctatctttaaaattgtgcctcaggaagtgaagacaccctgtggagaagcagttggtgctgtcacaccgtctggtccacttgccaaacaccctcctccatcactagttctgtttttttacgagggtgtgagccagaagacagcagccttgccggaaggcagagtttgtggtcagaccgtgtctacagcacctcatttcatccttcccaccacctggtgagatagaaacctttataaaggaagaaaatgaaggtcagagtggtaaagtgatttttcagcttaaatgtggcagaaccaggatttgaacttagaactacctgactccaaagcccttggttgttagattgtycctccaattctttcttaggagtcacagtgggtttttatctttcagagtcagaacagtaaaatcctcgaagactcgaggctctctaattcaatttcctacccagggtaggaatctctaacttcactgaaagatataactcattcgtgtgtcctgcacaagcttctcccatgacagggactcatccctgcttgaggcagta

SEQ ID NO: 171021 - DNA, 550 bp, Homo sapiens
gaattcaaaggagaggagctgttggggggcagggaggrgctttatgaggcctaggatgtgtaggtcagcaaaagcagcatgtacattccctttctccaactgttggggaaattctaccaggtcttcagggccttgctcagtgtgcggtctcccccacatctctctggctcggagtcctcaaagcttgtttttgttcttgcagaggctgttgtgctcaaagggtggtctcagaccagcatcatcagcatcacctggaatttgttagaaatgcaaattctggggacttactcctgacctactgagtcagacactggggtaggaggccagcattctgtgttttaacaagccctccacacagctgattctgatgcagcctcgagtttgagaaccactgccttaggccgcggatgaccactttagtgtttggaatgcacacagcatctcccccttctgactgctagcagcctaaaggcaagggcattatcagattctttcctgaaacctcccagtctcccttgaaagtgttcagagaaaagttggatttttctga

SEQ ID NO: 171022 - DNA, 520 bp, Homo sapiens
agggaggagctttatgaggcctaggatgtgtaggtcagcaaaagcagcatgtacattccctttctccaactgttggggaaattctaccaggtcttcagggccttgctcagtgtgcggtctcccccacatctctctggctcggagtcctcaaagcttgtttttgttcttgcagaggctgttgtgctcaaagggtggtctcagaccagcatcatcagcatcacctggaatttgttagaaatgcaaattctggggacttactcctgacctactgagtcagacactggggtaggaggccagcattctgtgttttaacaagccctccacacagctgattctgatgcagcctcgagtttgagaaccactgccttaggccgcggatgaccactttagygtttggaatgcacacagcatctcccccttctgactgctagcagcctaaaggcaagggcattatcagattctttcctgaaacctcccagtctcccttgaaagtgttcagagaaaagttggatttttctga

SEQ ID NO: 171023 - DNA, 538 bp, Homo sapiens
gaattctagtccctggctctgatactggggaggtgtgatttgatgacctttaggcatttggcaccctgagatgctgaggccttggacaaatctttcctctccctttggggataggggcttggtttgatcatctgtaaagtgtcctgagggagtaagtggtcaggaggggtgaacttcaagctctccaccagttctaacattctgsctctgtgcttaatctctgtcacccgggctggagagcagtggcatgacctcagctcactgcaacctccacttcctgggttcaagccattcttccacctcagcttcctgagtatctgggactacaggcatgcaccaccatgcccagctaatttttgtctttttagtagagacggggttttgccatgttggccaggctggtctcgaactcctggactcacaggatctgcctgtctccggctcccaaagtgttgagattacaggcgtgagccattgcacctggcccctagagtcttgatttatttaggcacctatgactccagggtagacaggaagt

SEQ ID NO: 171024 - DNA, 539 bp, Homo sapiens
aggtgtgatttgatgacctttaggcatttggcaccctgagatgctgaggccttggacaaatctttcctctccctttggggataggggcttggtttgatcatctgtaaagtgtcctgagggagtaagtggtcaggaggggtgaacttcaagctctccaccagttctaacattctgcctctgtgcttaatctctgtcacccgggctggagagcagtggcatgacctcagctcactgcaacctccacttcctgggttcaagccattcttccacctcagcttcctgagtatctgggactacaggcatgcaccaccatgcccagctaatttttgtctttttagtagagacggggttttgccatgttggccaggctggtctcgaactcctggactcamaggatctgcctgtctccggctcccaaagtgttgagattacaggcgtgagccattgcacctggcccctagagtcttgatttatttaggcacctatgactccagggtagacaggaagtatctaatatttaacaagggccataagaattc

SEQ ID NO: 171025 - DNA, 580 bp, Homo sapiens
ttgttgctacaaaaatgggaagaggaaagacaattttcagaacccagaggattctctggaacacctgttagaagttccacatccaatagtaaaagttaatgtaaaactacagtagcaacaacagcaaaggctgggccactgaaaattcagacacttcagaaatgaagattggggtcactccacaaggtaaagaatattgaacagtatgtcgaagctaaagaaggatatatgggtagtggaagaaggacatcatgaataccaactatggccttgtgaccacctacagaaattagaattgtactattatttttcctttcttcccctttccttttattcttttatataagaattgttgtggctggttaactttcaagttagttttttattacagatattgaaatggaacaatgactaaacttaaggagtaattaacatcatgtagggatggatagcgtggcttccctgagatggatgctgtaacctttgggacattgagccttctatttggagayagagcaagagagatggagagagagagagagagagaatgaatcttcctttttatgaaggttatttgcac

SEQ ID NO: 171026 - DNA, 562 bp, Homo sapiens
aagactaaggtcaattttcttttgatgccattcctaatttatggacaattacatcatattgttagaattttcaaaaatatctattttattttctatggtatgaaccaagtatctacatcattccaaagctactaagaaatatgtgcctctataaattgtttctgattcctcaggaaaatttgtgacctgcttttcctctggcagtggtattaaatagcaggttggtttgaacatcagtaaccaaaaacctttattgacttcatgcagaatatcctacaaataggctgggggtggtggctcacacctgtaattccagcactttgggaggccaaggcagacagatcacttgagctcagaagtttgagaccagcttgggcaaaatggcacaagcccgtctgtacaaaaaatacaaaaatcagctaggcatggtggtgtgagcctgtagtcccagctactccagaggctgttktgtgaggattgcttgagcccaggaagtcgaggctacagtgagcagtgattgcggcactgcactccagcctgggcaacagagccagactacccc

SEQ ID NO: 171027 - DNA, 386 bp, Homo sapiens
atttattttaaatgctaaattcagtggaaagggaccacatctaattgagtggtaaactacaccgtctctacagaaacaagagaaaaccgtgaaccagagtttcctgcacctgagttaccccctcattataagttaagtaaccttrtaagttcagttctacagagatattttccactgtctaccagatcaactagaaaaacaccaagctttagaagtatttatatcttcataaatgtcaagcaacatctacagctatctagcttacccactgactaggatagaaagagaaattatatcgataaatagtattcaacattcaggtttccagaaattctaacttcaaattttgcttcttattcaacatctcctaacattcccttgtggaa

SEQ ID NO: 171028 - DNA, 614 bp, Homo sapiens
aacctaaacaacaaattaacagattgttgtggcataagtgtctggtagtgtggccagctctcaattatccatggtattggaagccagagatacatgaataattgacatctactcctagtccaaaagcctcagtttaatgaacggtttccacatcctcttcgtgaactaccaacaaggagcagaatmggctgatttctgttccagcagactatttctcctgctcagctttgggtggggttgctaatgagcaatatgctgtccaaaaggccatgagccagagagaaaatgaggggaaatcagttgctggtagagtccacaattggataatcagcctcagaataatacagagttgactatatgtcaattaaaaagaaggagacaaatattatcccttgtgaatatttgattgttaaaaaaaaactgccctcttcccacaatcttttcattagaaacatgtattctatgtatcccagtgagttgataactagtaatagatctgtagtgctatgcttaattggaatagcaacttacttttagaagttcactgcactgggattctgcaccttcctgtgtcagcagcccacatcatggctggtttggtatggtttcgatac

SEQ ID NO: 171029 - DNA, 614 bp, Homo sapiens
aacctaaacaacaaattaacagattgttgtggcataagtgtctggtagtgtggccagctctcaattatccatggtattggaagccagagatacatgaataattgacatctactcctagtccaaaagcctcagtttaatgaacggtttccacatcctcttcgtgaactaccaacaaggagcagaatcggctgatttctgttccagcagactatttctcctgctcagctttgggtggggttgctaatgagcaatatgctgtccaaaaggccatgagccagagagaaaatgaggggaaatcagttgctggtagagtccacaattggataatcagcctcagaataatacagagttgactatatgtcaattaaaaagaaggagacaaatattatcccttgtgaatatttgattgttaaaaaaaaactgccctcttcccacaatcttttcattagaaacatgtattctatgtatcccagtgagttgataactagtaatagatctgtagtgctatgcttaattggaatagcaacttacttttagaagttcrctgcactgggattctgcaccttcctgtgtcagcagcccacatcatggctggtttggtatggtttcgatac

SEQ ID NO: 171030 - DNA, 624 bp, Homo sapiens
ctctctgtttgaagtaatcaaaacaaagggctctgaacagaagggagctatgcctcttaacagtcaaaaagcctgagaggatattcaatgaacactcatacccactctttccatccagtaggccatcttaactctggaactttttgaaggaacacttttcaaaagcacaaatcattactcatatatttcacactcagagtttactgacagtttaggtgcccaatagagttatatgatctgcctcaattttgaaatgatgaggtttaagaattttatcataatcttccaacatcatttctctactaaatacatttgacaagtcaaggccytacttaatacattacaaagaccatagaaattaagtgatcaccttctaatacaaatgcagagcattcagtctttctcacatattgtaactgctaacatggagtcatctgttaatgtcacgtcctccagaagaacatttaaaaatttacaaaaacttgtccagtccttgttcagaaaaggatattatctaaatggaaagtaatatcatgagtgtttggttacgtctcaactccaccagttagatacgaggtcttgagaaagttaatcactactgtctttagtttctgcaaatgtaaa

SEQ ID NO: 171031 - DNA, 280 bp, Homo sapiens
ggaatacttatttgcctgccaattagcaaacaagccttctaatatgtcacttgytattttgcagtcacaaaatcctcattcaatatctcatttttttaaaaaaaccaaaacaccagtgttacaggctagaatagaataaactccctcttttgtagttcagaggaattgtttttctcttgaaattaaaacattgatgagaccttagattattacgtagaatagaccaaccttctactcagtgcaaggatcccttttatagaatccatgatagttgatatcc

SEQ ID NO: 171032 - DNA, 417 bp, Homo sapiens
aacagaaaaccaaataccacatgttctcacttataagtggaagcagacaatgggtactcatagacataaagatggcaaaaatagacaatgggkactattgggggaaagagaagggagagaggaaagagttgaaaactattgggtactattctcagtatctaggtgatgagatcaatcataccccaaacctcagcactgtgcaatatactcaggtatattgcacatttctataataaaatgtgaaattactttaaaaaataaattgagcaagaaccagcaacttggaaggaataaaaaaatgtcacaagcaccacaaagaagcagtcaacaaaaaaagtgagagttaccagattttagccaatgactgatgcttacaatggtagaaagctggagtgtgtgactcaggaactagaattc

SEQ ID NO: 171033 - DNA, 417 bp, Homo sapiens
aacagaaaaccaaataccacatgttctcacttataagtggaagcagacaatgggtactcatagacataaagatggcaaaaatagacaatggggactattgggggaaagagaagggagagaggaaagagktgaaaactattgggtactattctcagtatctaggtgatgagatcaatcataccccaaacctcagcactgtgcaatatactcaggtatattgcacatttctataataaaatgtgaaattactttaaaaaataaattgagcaagaaccagcaacttggaaggaataaaaaaatgtcacaagcaccacaaagaagcagtcaacaaaaaaagtgagagttaccagattttagccaatgactgatgcttacaatggtagaaagctggagtgtgtgactcaggaactagaattc

SEQ ID NO: 171034 - DNA, 569 bp, Homo sapiens
ttgccattgtaagtgagatttattccagggatgcaaggatggttcagcatgaacaaaccagtaaatgatayatcacatcaacagaataaaggattaaaaccatatgatcatttccttagatgctgaaaaacattcaataaaactcaatatccttcatgatataaaacccttaaaaaattgggtatagaaggaacatacttcaacttaattacaactatataaaaaagcccacagctaacatgctgaatgggggaaaattgaaagcctttccactaagatctggaacaagacaaagatccactctcacttttattcaacgtagttctggaagtcctaggtagaacaattaggcaagagaaagaaataaaaggcatccaaactggaaaggaagaaatcaaattatccttgtttgcagatgacattatcttacactttgaaaaacctgaagactctgccaaaaaactcttaagactgataaacaaatttagtaaagttgcaggatgcaaaatcaacatagatttaattgaattcacctcatgcaagtactgacttaggagaacactattcat

SEQ ID NO: 171035 - DNA, 309 bp, Homo sapiens
tggttttataaaggggagttcccctgcacaagctgtcttgcctgccaccatgtaagatgtaactttgctcctcatttgccttgcaccatgattgtgaggcctcwccagccatgtggaactgtgagtcagttttacctctttcttttataaattaccctgtctcaggtatgtctttattagcagcatgagaacagactaatacagcaaattggtaccgggagtgaggtgctgctgtaaagatatcccaaaatgtggaagcaactttggaattatgtaactggcagacattgggacagtttggagggctca

SEQ ID NO: 171036 - DNA, 469 bp, Homo sapiens
tgtactctggctcatcctactctttttaggatctgaattagtgaccattcccactcacagtcattgtcatctcctccttttaacattcaccaagtgcttgctttgtaacaagcattggattaaatgtttacacaaaatgggtaacttaatcctcatgataattctgtaaattcagcagcatttttatcttcactttacacgtgaagacagagaaatttaaattgcctccagtgatarggcctgcaagtggcaaagtagggattggagcccaagtctcaacggttcccgagtccaggatggaatagtgctgccattaggttctttgtaactacttcattcataccagtttcttctccttcccccagatcactgtagtttccccagagaaatgacttagtggagtgagctgatcattgactaggagtccatgtgatggtgcttgttctcttgcagactcattctcagcaca

SEQ ID NO: 171037 - DNA, 624 bp, Homo sapiens
ttagtaaccaaaagaggaggtgacaacttttaagggatcatgcaagcttttccaaatatgggcttgtatgttcaggaaatacatttattaaaaaatgatgaaatttggttatttgtaatacttgtatgatccaaatgtccattggcttaaaagacaacagccaactgaragcagaacactccccatataaaggactgcccagtgtttctggagtccccacggtatgtacttctttaccagtctcttgcctcattctcccactccatctgtggccctcatgtgaccacgttttctgcttccctgctatgcttcttggggtgatgaactatagccattgatccacgtctaggtaagcaatgctgtctctggaagggcccagagtcccagctgtggggttccaggtgctgtgggagtcagggattaggtctgtcttccccaccctgtgccccattttggacctgctttgctgagctaagggcactacagcagctctcttgaacaatagtgtatccatctgctagggctgttctaatggaatactgtagagtagcttatacaacagacatttgttttctcacagctctaaagctgaaactccaagtttaaggtgttagcaggtttcgt

SEQ ID NO: 171038 - DNA, 547 bp, Homo sapiens
tgtaagcttcctgaggtcctcaccagatgcagatgccagcactatgcttyctctacagcctgcagaaccaagagccaattaaacttcttttctttataaattatacagcttcaggtattcctttttagcaaagaaagaatggcttaattcagacttgagctacattttagaccaaatgaaccccacacacaaatagagaacatttcgtttaacagcagcagaatacacatttttctgaaattaacatgcaaaattctttaggatacgtcacatattagactccaaaataagtcttaacaagtttaagatgattggaatcatatcaaatattttttccaatcgcagtagtatgaaactagaaatcaattacaggaaaaaccttgaaaattcacaattatgtggaaattaaacaccattctcctaaacaatcaacaggtcaaagaagaaatcaaaaaggaaattttttttaaatcttaagacaaacatagaaacacaacatgcccaaactaatgtgatgtagcaaaagcagttctaagaaagaagttta

SEQ ID NO: 171039 - DNA, 563 bp, Homo sapiens
aggtgatgttatttagcgtgattgtggtgattattttgcagtgtatacatatgtcaaaatatcccattttttgtatattctagatagatgcaaaattgatgcaatttttcaccccatcaatcatagagaataaaggatgcatacttcatttgttaatcatatctcaataaagctggaaagaaaataaattcaacacaataatgaaaaaaggtttaaaatactgggaaaataccatgaaacaaatttgagaaatatttctaacacacakccctgtaacacagggcctaagcttttttagtatacaaagagctttcacaaacaaggaagacaaagataagtaacttaataaaaacaaaacaaagtacacaataaggcatttcacaaaaaaaaatgcaattggccaataagtgtttgtacctttaagaatttaaatcattaaaatacattttctacctattagcataatatagatttaaaggtttaatgatacccagtattgactagcttgtgagacataaaccacaaagggaaataggattgtcagaaaatattgcttgcatatt

SEQ ID NO: 171040 - DNA, 519 bp, Homo sapiens
atacaaagagctttcacaaacaaggaagacaaagataagtaacttaataaaaacaaaacaaagtacacaataaggcatttcacaaaaaaaaatgcaattggccaataagtgtttgtacctttaagaatttaaatcattaaaatacattttctacctattagcataatatagatttaaaggtttaatgatacccagtattgactagcttgtgagacataaaccacaaagggaaataggwttgtcagaaaatattgcttgcatattggtggaaatgtaaattggtacattttaggaaaatacaagtctcccctacttcatctaatttcactttctgcagtttcagaaaattacctgcagtcaactgtggtccgaaaataccaaatggaaaattccagaaataaccaattcttaagctgtaaagtgtgtgtgcagaatagcatgatgaaatcatacactgtaccattccctcccgactgggatgtaatccatccctgtgcccagtggacccatgttctctac

SEQ ID NO: 171041 - DNA, 522 bp, Homo sapiens
aatttcctgagagccgaatccagaaactccagactaagtaaggcctcttgcctccctttccacgagggaggcktgggcaccctgctgtttgtctattacattacacgttagttttcagtgcaagcagttcaaaattcaggtggatacagagagtttcaactctgtaatgattaatctattaaaaaaataagtgaagcgaacataagtgttaatacttaatagaacatgtgcctgttacatattcctgtctgtcagaagtatttttacataattacttgaaataatgatctaagtaaaacttcaaaaacaacaatgaaaacacgtgaaccaacatgaatcaggatataaatactaagagtcatgacaaattttaaggtcaaagttccagttaggcagtaagaaaacagaacatggaaacacgctgggcagaaagaagtgggcaagagaataaaagagcctctatcagtgccaagaccaccttagatttcccagtgaaaaaattgccatgaacacctttcctga

SEQ ID NO: 171042 - DNA, 590 bp, Homo sapiens
ccagtggacatgtactgtcataagctgagtgaccacatagcagaatgtttatggagaggattcaaagataagaagtaaagctaactagaacattttgatcttttctacaacatgaatgactagcgattatctagcctttcttggagtatttcagatgaaatgatgtttgctacattacaaaataatatactataaggtaactctagttattcattatttactaaacagatttctccatccaaatgcacactgaccctcattcaactctctctatgtcatcagagcaaattgacggctctgtctgtaatgcggcttttcagatactgaaagacatccatcacattccrctaagcgatttccccaccctccaccgagatgattttcactaagtattttagtcattcctcatagaacgtggtttccagatttggacccctaggttcatcctctagattttttctaattgctaagatatgcatttacctaaacagaattgtattagtaaatttttgcatcactaccaagaaatacccgcggctgggtaatttataaagaaaaggggtttaattgggatacagttctataggctg

SEQ ID NO: 171043 - DNA, 566 bp, Homo sapiens
cttctaattagagtaacaaaagaaaagagaagattcaagcaaacacaatcagaaactaacattataactgatcccacagaaattcaaaagatcctcagagatgattagacagcacatttataattacaaaaacgtttctatgcaaacaaactaggaaatctagaggaaataagtaaattcctagaaacacaatctcctaagattgaataaagaaaaaattgaaacaatgaacagaccaatattgattctgaaattgaatcagtaataaaaaatctaccaaccaagaaaagccctgggccagatggattaaaaactgaattcttccagacatacaaaaaaaaaactggtaccaaatttactgaaactattccaaaaaaatcaaggatgagggacgccttcctaactcactctatgaaaccagcatcacccygataacaaaacctgacagagatacaacaaaaaaagaaaactacaggccaatatcccttatgaacgtagacacaaatatgcccaaaaactattagcataccaaattcaacagcacatcaacaagttgattgaccaca

SEQ ID NO: 171044 - DNA, 576 bp, Homo sapiens
aaaactatgctaaaagtatacagatcaaaaaaagagcccaaatagccaaaggaatcctgaacaaaaagaacaaagatgaaggcatcacattacccaacttcaactattctataaggctacagtaaccaaatcagcatkgcactggcacaaaaacagacatgtagaccagtgaaatagaatagagaacccggaaataaagccacacacccacaggcatctgatctttgacaaagtcaacaaaaataagtaaaagggaaaggactccctgttcaataaatggtgttagaatagctggtgagtcacatgaagatgaatgaaactggacactacctttcacaatatgcaaaaattaacttaaggtggagtaaagatttcaatataagacctcaaactatgagaatcctagaagaaaacctaggaaacaccattctggacatcagccttgggaaaaaatttattgttaagtcctcaaaagcaattggaaacaaaaacaaaaattttcaagtgagacctagttaaactaaagagcttctgtgcagcaaaagaaactaccaacagactaaacagacaacctac

SEQ ID NO: 171045 - DNA, 590 bp, Homo sapiens
gcttcaatgttggggaagaaaatttgcctcttctgccagggaagtcgtggtagatgtgtagtgtcagggtattgtgtggattatagcttccaatatttccctattccaatgccattattccctaccaatactttaacttctctaaagagaccaggtgaattcattggacattggacaacagaccaggtgaattcattggacattataactatttcaggaaactgtagggtgaaaagctgagtttgatttcttttaaaactatcttagccctgcagctgtaacagataaaagattattttaatacagctttagagagttcctgattttttttttttgcctgtgccttgaatcaagattctaatattttragcttgacatactatttctttaagtttccaacactcttaaaagcatcctctctacccccactcccaaatcaacagtcgtttagtttctcaagctctggggtaaaagagtggagcgagatggccaaatagaaccctccaccagtcatcctccctgcaggaacatcaaatttaacagctatctacatgacaaacaccttcataagaatgcaaaattaagtgagc

SEQ ID NO: 171046 - DNA, 390 bp, Homo sapiens
agtgggtagttgttctggcttacattgattgcctcaaggcttgtggattgaacctgcatgtggctgacagcccagtagctggtgggattgagtttgagaaagccaggtactggcgaaggcttgtaaccatgatttctcactgaagaaactcaggtgccctggtcagaggtagacaaatgcattagatggactggagtaatttgtggaataagcattttggggtggttgtggtcacaattgtgctggtggttatagtgtctgggaagwgtttgtaaatagtttctaccatgtgtgatgactttgatgctcttataaaatcccttgagaaggtttccttaaagaagtgcaccagagtgactcagtatttactaggtagagttagttcttatc

SEQ ID NO: 171047 - DNA, 585 bp, Homo sapiens
ttttcttccttcattcctcataacttaattcatactctaattccaattactagtatttatgttgctcattataggttatgaagtgtttttttttttttcatagccttactgcatttgatcctcatagcagttctggagagagctgccattattattctcattttagatatggagataatgggacctggcaaagtcacactgctcataaatggtgggcatcacctgcattattagatattgggaattagagactgtattagtttcttagggctgctgtaacaagtgaccacaaccaggtggcttaacaaacataaatttattctctcatatttctcagaggctggaagtttgaaatcagggtgttggcagggttggctccttctggagattctgagrcagaatctgttccttgcctctctcccagcttctgttgattgctggaaacccgtggcattttttggcttttaactgcatccctcccatctgtgcctctgtcttcatataacattgttccttgtgtgtgtgtgtctgctatgtttccctgaatattcctttcctttttttaaaacatagaagcatcattaa

SEQ ID NO: 171048 - DNA, 635 bp, Homo sapiens
ggtgggttagtgtgcagttggacctctaccatacgtgggttggaggatgctcttcatctgggcctgaattcccaatcagcacactcaaatccgctaggtgtgctggacaggggctagcctgcctcatctttgctggtcacggcaaaattccagagctgctccatttgacatgttttcagcacatagctctgtctgcactggacactcggttgccagctctgcttctctttctcctgtctgcccacatgttgccctttgcattagactcatggtttgcttcccagatggaatttacctccctctactctgcttcagccttgcatacttaagagtcttgaacccactcaggctacagacaccatacctcaatagtatctttacctggatatccctggacatgggtgggatacaagcccatataatagagggttagacacatgaacctgttttaaagggaagaaaaaagaggaagccattgarttttgttttgggaaaattagtctgtgtgtttaaaagatcagtattgattagtagggttttctatttgtcatctcttccatactgaaataatgtggtatcattgataccgaaaatgtaatccttaagagcaccataggacttgagttttattttta

SEQ ID NO: 171049 - DNA, 635 bp, Homo sapiens
ggtgggttagtgtgcagttggacctctaccatacgtgggttggaggatgctcttcatctgggcctgaattcccaatcagcacactcaaatccgctaggtgtgctggacaggggctagcctgcctcatctttgctggtcacggcaaaattccagagctgctccatttgacatgttttcagcacatagctctgtctgcactggacactcggttgccagctctgcttctctttctcctgtctgcccacatgttgccctttgcattagactcatggtttgcttcccagatggaatttacctccctctactctgcttcagccttgcatacttaagagtcttgaacccactcaggctacagacaccatacctcaatagtatctttacctggatatccctggacatgggtgggatacaagcccatataatagagggttagacacatgaacctgttttaaagggaagaaaaaagaggaagccattgagttttgttttgggaaaattagtctgtgtgtttaaaagatcagtattgattagtagggttttctatttgtcatctcttccatrctgaaataatgtggtatcattgataccgaaaatgtaatccttaagagcaccataggacttgagttttattttta

SEQ ID NO: 171050 - DNA, 572 bp, Homo sapiens
tcatttgctccctgcatgcctataggaaaggatgtgttaggcagagggcagattgtttgatgtctcagcagttttgattcttattacaaattaataaactggtgtcttggttatattttgcatcctgggtaagaatgtgttggttggcatttaaaattgactagttccttctgcagttatttttttataattaaatgaaaaaatctccctctgattttatacatcagtctcacaagcttgctaaatatgagttaaaccctgaaaccctgataggtttactcagtcactaaaaamatccaaaactcaaaatagcaaaaccaaaaagcatcctgaaaacatgaaggtgtgggcatccaatataggacctctgaccttggagattatcaggttttcctgcagacccctgcaacttcctcagtgttgtgcttaatgaatcttttacagtatctaaagcttcccctattaatctggagataatttgtacagtttattatttgattttcattttgtgtatagtgttaaaattactcaaatatgtgcaatgtaggatacaattatgtattcataatttt

SEQ ID NO: 171051 - DNA, 470 bp, Homo sapiens
gtttaattgaaaattacattattttctatacctgagtttttaatttgaaaataaaaaaaatggattagatgcaaaaaaatcaaaactaaagaatatatcatctctccttgatgaatcaagtttatccagcgccttaaggtatgtcartgatgaactatagaatatgctgtttatcttcaagccatgttgttccttagactttcgaatatgtccattcctcttcctactcttctactgccccatcttctcctgcttccgtctcatatcccattgtccacatgtttttcctttgtccccatgtatttatttattcattcagctaatacttcaactataggttggtgcaaaataatgtggtttctgccattaattttaatgacaaaaactgcaactacttttgcaccaacctaatattacttgggcattcttgtctgcctttcctctgctatctgagaactgggcactacatc

SEQ ID NO: 171052 - DNA, 502 bp, Homo sapiens
accctcaatcccacctcttactcatccactgatgtagtgtccagtttcatgcacgctttaacagacttcatgcaagtaccaattagaaggtgttttgtcccagcctatctttaatacctctcacttctgccttagagctttctgaccccacaactggtgcccagaggaatgttctctgcactcatacttgttcawcctgaaagtgtcaaagagtgaaggcctgtggaccaccttggaccaggggggtacaaagacctagggacaactgcctttgtcttgccagtcaacagttctgggtcttatttcataagactcctcaaaagtgcctgggaagactaagcaccagtatgggtggacatctggatagctcatccctctactgcctttcctttcttccctgcttccttcccagttctgcattcctgctccctggggtcatattcacaaatagcctatatgcacactgactttcatctcaggttgtgtctccagggtaacctca

SEQ ID NO: 171053 - DNA, 502 bp, Homo sapiens
accctcaatcccacctcttactcatccactgatgtagtgtccagtttcatgcacgctttaacagacttcatgcaagtaccaattagaaggtgttttgtcccagcctatctttaatacctctcacttctgccttagagctttctgaccccacaactggtgcccagaggaatgttctctgcactcatacttgttcatcctgaaagtgtcaaagagtgaaggcctgtggaccaccttggaccaggggggtacaaagacctagggacaactgcctttgtcttgccagtcaacagttctgggtcttatttcataagactcctcaaaagtgcctgggaagactaagcaccagtatgggtggacatctggatarctcatccctctactgcctttcctttcttccctgcttccttcccagttctgcattcctgctccctggggtcatattcacaaatagcctatatgcacactgactttcatctcaggttgtgtctccagggtaacctca

SEQ ID NO: 171054 - DNA, 353 bp, Homo sapiens
gggtgtggattctgcatttgaaagtgctgaagctgagagactgggtcttggtggaccccaagaggtctgtttctcctctactcattgttcctttttttcccagcagctggcattgctgtttaaatgggttgttctttgctgttttaagttgtttcatagtggtgtgtcaggatttgggttttctkaatactttccaagctggtgacttgagtggtggttagggaggagctgttttagggctgttctggagctattgaggtcaggtatctagatactcccagcttgtctgttgaggagaatgctgttctcattgtgctgcctttggtggtgctgtgtgtggctctttagatgtg

SEQ ID NO: 171055 - DNA, 353 bp, Homo sapiens
gggtgtggattctgcatttgaaagtgctgaagctgagagactgggtcttggtggaccccaagaggtctgtttctcctctactcattgttcctttttttcccagcagctggcattgctgtttaaatgggttgttctttgctgttttaagttgtttcatagtggtgtgtcaggatttgggttttctgaatactttccaagctggtgacttgagtggtggttagggaggarctgttttagggctgttctggagctattgaggtcaggtatctagatactcccagcttgtctgttgaggagaatgctgttctcattgtgctgcctttggtggtgctgtgtgtggctctttagatgtg

SEQ ID NO: 171056 - DNA, 554 bp, Homo sapiens
tgggcttattataaaacagagttcagccccttttgccctcttgctttcttgcactttcttttccttctgccttctgtagtgggatgatgcagcaagaagacccttaccagatgcaggcccctcaaccttcgacttcctaacatccagaactgttaagaaataaaatttattcctttccttttcttcctcctttcccttctcctcccttttcttcccttcccctccctccctctctctctccctccctccctccctccttacttcccttcctccttccctctttctctctttcccttccttcctttccttccttcccttccttcctttccttccctccttcactttttccctccttccttccttttttctttccttccttttttccttttyataaattatgcagtctgtggtattcttttatagaagcatgaaatggacaaagacagactccattttcaagagcaagcacttttgtagtttctgagcgaattatgactgcaaaggaagttctataggtagcctcagatccactacctaggaagcatgctaccaag

SEQ ID NO: 171057 - DNA, 554 bp, Homo sapiens
tgggcttattataaaacagagttcagccccttttgccctcttgctttcttgcactttcttttccttctgccttctgtagtgggatgatgcagcaagaagacccttaccagatgcaggcccctcaaccttcgacttcctaacatccagaactgttaagaaataaaatttattcctttccttttcttcctcctttcccttctcctcccttttcttcccttcccctccctccctctctctctccctccctccctccctccttacttcccttcctccttccctctttctctctttcccttccttcctttccttccttcccttccttcctttccttccctccttcactttttccctccttccttccttttttctttccttccttttttccttttcataaattatgcagtctgtggtattcttttatagaagcatgaaatggacaaagacagactccattttcaagagcaagcacttttgtagtttctgagcraattatgactgcaaaggaagttctataggtagcctcagatccactacctaggaagcatgctaccaag

SEQ ID NO: 171058 - DNA, 386 bp, Homo sapiens
atagttctgcctcactcttacaaagattgatctcttgagagttttgtgctctacycccagatgtggtctttctggttctgaagcttttgcttcagtcaccctgaattttgccagccctatgcatgctataccttggattgccaacttgccctcactgaagccagtttctctggttagaatagttgccccaacccatgcctaatactctagtaaacaaggttctacctgggcttaggttaacttttgctcctttgggccctgtgttctaccagcattccatttatctgaaactctccgtcaccttaagaacttatctgttctttaatgatttgctgctgcttcctgggttcgaaagaacccagttcaggagtttctgttttagtttg

SEQ ID NO: 171059 - DNA, 386 bp, Homo sapiens
atagttctgcctcactcttacaaagattgatctcttgagagttttgtgctctactcccagatgtggtctttctggttctgaagcttttgcttcagtcaccctgaattttgccagccctatgcatgctataccttggattgccaacttgccctcactgaagccagtttctctggttagaatagttgccccaacccatgcctaatactctagtaaacaaggttctacctgggcttaggttaacttttgctcctttgggccctgtgttctaccagcattccatttatctgaaactctccstcaccttaagaacttatctgttctttaatgatttgctgctgcttcctgggttcgaaagaacccagttcaggagtttctgttttagtttg

SEQ ID NO: 171060 - DNA, 386 bp, Homo sapiens
atagttctgcctcactcttacaaagattgatctcttgagagttttgtgctctactcccagatgtggtctttctggttctgaagcttttgcttcagtcaccctgaattttgccagccctatgcatgctataccttggattgccaacttgccctcactgaagccagtttctctggttagaatagttgccccaacccatgcctaatactctagtaaacaaggttctacctgggcttaggttaacttttgctcctttgggccctgtgttctaccagcattccatttatctgaaactctccgtcaccttaagaacttatctgttctttaatgatttrctgctgcttcctgggttcgaaagaacccagttcaggagtttctgttttagtttg

SEQ ID NO: 171061 - DNA, 196 bp, Homo sapiens
cgagaaagacctgcccccataattcaatcatctcccaccaggtccctcygacaacacatgggaattatgggagttacaagatgagatttggatggggacacagagccaaaccttatcagtgttcaaggatgatgtgactgtcttgccatctgttgatgtgtgtaaactacagccagataaccatttattgtgaaaa

SEQ ID NO: 171062 - DNA, 196 bp, Homo sapiens
cgagaaagacctgcccccataattcaatcatctcccaccaggtccctctsacaacacatgggaattatgggagttacaagatgagatttggatggggacacagagccaaaccttatcagtgttcaaggatgatgtgactgtcttgccatctgttgatgtgtgtaaactacagccagataaccatttattgtgaaaa

SEQ ID NO: 171063 - DNA, 196 bp, Homo sapiens
cgagaaagacctgcccccataattcaatcatctcccaccaggtccctctgacaacacatgggaattatgggagttacaagatgagatttggatggggacacagagccaaaccttatcagtgttcaaggatgatrtgactgtcttgccatctgttgatgtgtgtaaactacagccagataaccatttattgtgaaaa

SEQ ID NO: 171064 - DNA, 460 bp, Homo sapiens
ctggggagataattcaatctaaacaaaaggtcatctgtacaaacacagtaaaaatctgggagtaactgaagacagagttggtaagtgaaataagaaacagttataagaaattaaactatgrtatcaataggcacctggtataaaaggtcagttgatgttagctgctacttttttgttgttttgagacagggtctcactctgtcacccaggctggagtgcagaggcctgatcatgactcattgcagtctcagcctccctgggctcaagtgatcctcccacctcagcctcccaagtagctgggactacaggaacatgccaccacactaggctaattcatgtatttttctgtagggatggtgactccccgctttgtttccaaggcctatcgcaaactcttggcctcaagccatcctcctgcctcagcctcccaaagagttgcgattaccagtgtgagccacca

SEQ ID NO: 171065 - DNA, 460 bp, Homo sapiens
ctggggagataattcaatctaaacaaaaggtcatctgtacaaacacagtaaaaatctgggagtaactgaagacagagttggtaagtgaaataagaaacagttataagaaattaaactatgatatcaataggcacctggtataaaaggtcagttgatgttagctgctacttttttgttgttttgagacagggtctcactctgtcacccaggctggagtgcagaggcctgatcatgactcaytgcagtctcagcctccctgggctcaagtgatcctcccacctcagcctcccaagtagctgggactacaggaacatgccaccacactaggctaattcatgtatttttctgtagggatggtgactccccgctttgtttccaaggcctatcgcaaactcttggcctcaagccatcctcctgcctcagcctcccaaagagttgcgattaccagtgtgagccacca

SEQ ID NO: 171066 - DNA, 596 bp, Homo sapiens
tgtagtagtttaaaaaatatctgatgctgggaaatcactccacctactccctgcaaaatgccccaaaccttttgtttctgatgtacatggtaggcattcagtaagtttagtaaatgtacttttctgaaggtgactgtaagtttactcatctatggctgttacggatttacactagtagtgcttatgaagaccactgaacttctttcttaagatcaggcagaaggttttttcaaggtgatccagagaaggaaattcactttatgttgcatttctgtagtgttctaccaaatccaaatgcatttactctttatgatgaggtagtttgagtttttaatttatatttattgagtgcctactatggccagattttggggatatctcagaaaacaaagttccttttcctatgattgaaactaatagcaaacaaatatgtaatattgttagtagtattacagtaaacaaaaatgaagcaggataaaagggtagagaataataagaataatarttcagatagggtcagggtgtctttgacgaggtgatattttagcacaatccagagggggaatagcattccagctagagagaatagtaagcac

SEQ ID NO: 171067 - DNA, 380 bp, Homo sapiens
gtgatccagagaaggaaattcactttatgttgcatttctgtagtgttctaccaaatccaaatgcatttactctttatgatgaggtagtttgagtttttaatttatatttattgagtgcctactatggccagattttggggatatctcagaaaacaaagttccttttcctatgattgaaactaatagcaaacaaatatgtaatattgttagtagtattacagtaaacaaaaatgaagcaggataaaagggtagagaataataagaataataattcagatagggtcagggtgtctttgacgaggtgatattttagcacaatccagagggggaatagcattccagctagagagaatagyaagcacaaaggcattcttgaattc

SEQ ID NO: 171068 - DNA, 605 bp, Homo sapiens
caaactgacttcattttataacatttccacttattcaatgggataaccattcttctggtccctgctaaccaaaacaytggaatagtctttgatttctctctctttcttcatcctccacatcttatcagttcccaggaactgtggtcttggtttcaagtgtccattctggttgctactattctgatgaatggatttcatcacttgatacctgaactttttcactggtcttctattgagctctatgtattctctcctcatccttcagtccccacactgttttaaccctccaacatcttagagtcatgtgaagtgacttatcaaaaccagagactcaggcagtcacagcccttcatcattttatcttatcctatatatccaagatcatcatgtgcttttaaaactctcccttgtccacaagccaggattctccagccttttcctatgcttctcttcttctctccccgttacaacaacttgaagttcctccaaggccccattggagccccatctccttcaccaagtctttcctctttactccaactcattccagctcatcgttgcattcctatggtgtttgccactgcacctatgtactgacttgtgcc

SEQ ID NO: 171069 - DNA, 605 bp, Homo sapiens
caaactgacttcattttataacatttccacttattcaatgggataaccattcttctggtccctgctaaccaaaacactggaatagtctttgatttctctctctttcttcatcctccacatcttatcagtycccaggaactgtggtcttggtttcaagtgtccattctggttgctactattctgatgaatggatttcatcacttgatacctgaactttttcactggtcttctattgagctctatgtattctctcctcatccttcagtccccacactgttttaaccctccaacatcttagagtcatgtgaagtgacttatcaaaaccagagactcaggcagtcacagcccttcatcattttatcttatcctatatatccaagatcatcatgtgcttttaaaactctcccttgtccacaagccaggattctccagccttttcctatgcttctcttcttctctccccgttacaacaacttgaagttcctccaaggccccattggagccccatctccttcaccaagtctttcctctttactccaactcattccagctcatcgttgcattcctatggtgtttgccactgcacctatgtactgacttgtgcc

SEQ ID NO: 171070 - DNA, 605 bp, Homo sapiens
caaactgacttcattttataacatttccacttattcaatgggataaccattcttctggtccctgctaaccaaaacactggaatagtctttgatttctctctctttcttcatcctccacatcttatcagttcccaggaactgtggtcttggtttcaagtgtccattctggttgctactattctgatgaatggatttcatcacttgatacctgaactttttcactggtcttctattgagctctrtgtattctctcctcatccttcagtccccacactgttttaaccctccaacatcttagagtcatgtgaagtgacttatcaaaaccagagactcaggcagtcacagcccttcatcattttatcttatcctatatatccaagatcatcatgtgcttttaaaactctcccttgtccacaagccaggattctccagccttttcctatgcttctcttcttctctccccgttacaacaacttgaagttcctccaaggccccattggagccccatctccttcaccaagtctttcctctttactccaactcattccagctcatcgttgcattcctatggtgtttgccactgcacctatgtactgacttgtgcc

SEQ ID NO: 171071 - DNA, 605 bp, Homo sapiens
caaactgacttcattttataacatttccacttattcaatgggataaccattcttctggtccctgctaaccaaaacactggaatagtctttgatttctctctctttcttcatcctccacatcttatcagttcccaggaactgtggtcttggtttcaagtgtccattctggttgctactattctgatgaatggatttcatcacttgatacctgaactttttcactggtcttctattgagctctatgtattctctcctcatccttcagtccccacactgttttaaccctccaacatcttagagtcatgtgaagtgacttatcaaaaccagagactcaggcagtcacagccyttcatcattttatcttatcctatatatccaagatcatcatgtgcttttaaaactctcccttgtccacaagccaggattctccagccttttcctatgcttctcttcttctctccccgttacaacaacttgaagttcctccaaggccccattggagccccatctccttcaccaagtctttcctctttactccaactcattccagctcatcgttgcattcctatggtgtttgccactgcacctatgtactgacttgtgcc

SEQ ID NO: 171072 - DNA, 538 bp, Homo sapiens
ttccaacctcagtgtaattggtagctgtgactggctatgactcacatgccaatcacagctatccacactaccacaagatccttacrtgaaaacctggtaatacttacaatttgttagggtgaattctccaagcttggtggtggatttccaagaggtacaaatggaagaaggcagactaccactctttgggtgggcgggtaggtatcttggcatttgtatcccaggcacttcagctaccaaggaactccatatgaacaataaaaccaatcccgaacagtcccaatactttcccttcccagacccctctgcttccaatatcctcagcccaccttccaggccccctgccccagaccctgccctagagggttcctttctagttcccgcatccccaagcaatggatggaaaggaaatctcttttcacacagacctcaatctctgggaactggtacccaagaggagtctaattgattattgattgttgattgattgattgagacggggtctcactctgtcacccaggctgaagtgtaatggcat

SEQ ID NO: 171073 - DNA, 538 bp, Homo sapiens
ttccaacctcagtgtaattggtagctgtgactggctatgactcacatgccaatcacagctatccacactaccacaagatccttacatgaaaacctggtaatacttacaatttgttagggtgaattctccaagcttggtggtggatttccaagaggtacaaatggaagaaggcagactaccactctttgggtgggcgggtaggtatcttggcatttgtatcccaggcacttcagctaccaaggaactccatatgaacaataaaaccaatcccgaacagtcccaatactttcccttcccagacccctctgcttccaatatcctcagcccaccttccaggccccctgccccagaccctgccctagagggttcctttctagttcccrcatccccaagcaatggatggaaaggaaatctcttttcacacagacctcaatctctgggaactggtacccaagaggagtctaattgattattgattgttgattgattgattgagacggggtctcactctgtcacccaggctgaagtgtaatggcat

SEQ ID NO: 171074 - DNA, 433 bp, Homo sapiens
attctcccttagagcctcccaaagaaaccagccctgctaacaccttgactttagccgagtgagactcattttaggactcttgacctccagaactataagatttttaaaaccgggccaggcgtggtggctcccgcctgtaattccagcactttgggaggctgaggtgggtggaccacttgagcccaggagttcgagaccagcctgggcaacatggcgaaaccccgtctctactaaaaatacaaaaattagctgggcrtggtggagcgtgtctataatcccagctactcaggaggctgaagcaggagaattgcttgagcccaagaggcggaggttgcagtgagccaagattgcaccactgcactccgcctgggcgacagagggagactcagtctcaaaaaaaaaaaaaaaaaaagtataaaaattgcgttttagg

SEQ ID NO: 171075 - DNA, 433 bp, Homo sapiens
attctcccttagagcctcccaaagaaaccagccctgctaacaccttgactttagccgagtgagactcattttaggactcttgacctccagaactataagatttttaaaaccgggccaggcgtggtggctcccgcctgtaattccagcactttgggaggctgaggtgggtggaccacttgagcccaggagttcgagaccagcctgggcaacatggcgaaaccccgtctctactaaaaatacaaaaattagctgggcatggtggagcgtgtctataatcccagctactcaggaggctgaagcaggagaattgcttgagcccaagaggcggaggttgcagtgagccaagaytgcaccactgcactccgcctgggcgacagagggagactcagtctcaaaaaaaaaaaaaaaaaaagtataaaaattgcgttttagg

SEQ ID NO: 171076 - DNA, 594 bp, Homo sapiens
gcactaatggtctttacatacagcctacmttttaactaactcttgcatgggcttgtttcacagcaggaaactatattcatcatatccttattatgatagagaatgacaacattcaaaagggtgtggtgcttctgaaaatatacacaataaatggcatgatttgacctctgtcaaattcttctttcctgctttcctcatatgtgggcttgagtgggtgtatttagctcctttaaaggaaactctttcacaggcagggccacactcttactcgttttgatctcatgaggttacatctgccagtggcgttcagggccagttagataaagttcatcttgtttggattggagagactttttttttttttttttttgagacagggtcttgctctgtaacctaggctcaagtgcagtgcagtggtgcagtcatggctcaccgcagccttggtctcctgggctcaagtgatctttctacttcagcctcctcaatagctgggactacaggcacacaccaccacccccaggtaattaaaaaatttttttttgtagagacagggtctcactatgttgcccagtctgggagaccacattctttaac

SEQ ID NO: 171077 - DNA, 605 bp, Homo sapiens
actttatttagcacaatattgtacctgaaaaaggggaaacacacattcaagacaaactttatttagcaccatattgtacctgaaaaaggaagtgctaatttgcacttcagagtaggagttggaggagtacctatttaacttttattgtgcccaggtattaaaggaaacattcaaatgcacttcattgcaacagttgatattcaaagttaaacacgaacacaaattttatacaaccatgatttgtccacaagtacccaaacatagagttcagtgaaatcaaattaatataaaatcaaacagtgyttaatgatactaaaatttaactttgtgttgaaaattgctttctatgcaacagacacaaaggaatataattgaaaattttagcttaattttgccctaatttacactaatttagaacattaaaaagtatattttgaagtttgcatgatacagataaaaaatatttaggataaaatttatacttttaaattctcatattgaagtacaataatatttgaaaataaattagctaagcattcagttaaagaagctagaaaataaacaatgaaatcatcccaaagaaaaagaaagaagtaaagattaaa

SEQ ID NO: 171078 - DNA, 540 bp, Homo sapiens
aatattatttaactcatatataatatatactatataatatattaattttattaatatttaactaatataataatacattaacattatttaactcatttgatcttcctacaacaccttctgatgtaaatagtaataataccatttatcattttataatatatactatataatatattttatatatataatatggagtctggggagatgaggcatggaggcatggagtccagggagtctggggaatgaggcatgatattatatataatatatgatttagtatatattataaaatgataaatagtattatatattatatactgtattaatatattatatataacataaacagtgttatatattatattaatatgttaatataatgtatagtatattaatatattaattaatataattaataagttaattaattataatatattgatatgtttatataatatatcatatatcttatacagtataatagtattatatattagtattattatatataatatataatrctataatcattttacagat

SEQ ID NO: 171079 - DNA, 432 bp, Homo sapiens
aatattgaatttttgttttmgtaggcagctaatttggctggaataaaactccaggcactgtctctcttgtggtgggcagcagctacagtctcagttcaggtcttctagctttagctgtgctatgtggagtctggccggcctgtcttattcttagatttggccctagtctctaagaattcccagagattcttgagatatatgcagaatttgggagtcactctctgtggctccctcctttctggagtttttccttctcagtttccagctgctatgggtttccctgaatattctcctctgatggcttaaccagtaaaagatggcgggtaactatcagagttttagctagtctcaatgcaactagggccttcctttggttgaagagctgtcaacatgggtaattcaattccatgccattctattcctccatttctc

SEQ ID NO: 171080 - DNA, 432 bp, Homo sapiens
aatattgaatttttgttttagtaggcagctaatttggctggaataaaactccaggcactgtctctcttgtggtgggcagcagctacagtctcagttcrggtcttctagctttagctgtgctatgtggagtctggccggcctgtcttattcttagatttggccctagtctctaagaattcccagagattcttgagatatatgcagaatttgggagtcactctctgtggctccctcctttctggagtttttccttctcagtttccagctgctatgggtttccctgaatattctcctctgatggcttaaccagtaaaagatggcgggtaactatcagagttttagctagtctcaatgcaactagggccttcctttggttgaagagctgtcaacatgggtaattcaattccatgccattctattcctccatttctc

SEQ ID NO: 171081 - DNA, 434 bp, Homo sapiens
agaatattgaatttttgttttagtaggcagctaatttggctggaataaaactccaggcactgtctctcttgtggtgggcagcagctacagtctcagttcaggtcttctagctttagctgtgctatgtggagtctggccggcctgtcttattcttagatttggccctagtctctaakaattcccagagattcttgagatatatgcagaatttgggagtcactctctgtggctccctcctttctggagtttttccttctcagtttccagctgctatgggtttccctgaatattctcctctgatggcttaaccagtaaaagatggcgggtaactatcagagttttagctagtctcaatgcaactagggccttcctttggttgaagagctgtcaacatgggtaattcaattccatgccattctattcctccatttctc

SEQ ID NO: 171082 - DNA, 414 bp, Homo sapiens
ttttagtaggcagctaatttggctggaataaaactccaggcactgtctctcttgtggtgggcagcagctacagtctcagttcaggtcttctagctttagctgtgctatgtggagtctggccggcctgtcttattcttagatttggccctagtctctaagaattcccagagattcttgagatatatgcagaatttgggagtcactctctgtggctccctcctttctggagtttttccttctcagtttccagctgctatgggtttccctgaatattctcctctgatggcttaaccagtaaaagatggcrggtaactatcagagttttagctagtctcaatgcaactagggccttcctttggttgaagagctgtcaacatgggtaattcaattccatgccattctattcctccattt

SEQ ID NO: 171083 - DNA, 554 bp, Homo sapiens
atgtcttactttttctttcttcagtctcaatcagcactttgcaacacaggctgagagatgatgacatgaaaacagctcagaagaggggtgcctgaggaagatcagccaccttgagtttaagtttaacccaagacaggaacatgggattaaagctggcagaagggcaggggccacagcatgttccaagccaggaaggtaggagcagaggcaccctctgggcaccctgctgtctccacttctgtgtccaactgagaactccaaccaccttggggctcaagtcctgggctgacctttgctggggtcgtctgggaattgggccaaggataccctcagaaggtcttctctggctaggaagggrtttatcagaatggctttgctcctgcatagttaggaaaactagtccagaatagaacccaagtctacggaaagatgcaggtgtttgtgcttgaagtcaatggagctggccactaggaatttgggatacacagaccttagtgaaattggtatccttctgggtttccattagacttaagattgttgttctttttccagct

SEQ ID NO: 171084 - DNA, 507 bp, Homo sapiens
ttgtcagggcttagatggcatatggatacacgtcttagatttttttttttaaattatttcatacatgtggtgtttgcttagttttacataaacatttatcatttttttctcaccatttcttccccacatcagaccattcttctgatatctttttttcttccttaaatccatgtgaaggtcctttagtgtaggtctcttggttgttgtaaactctctggctttatctataaatgtcttcattgacattctcttggctttgagaaatggtgttcttgggcatttgattctaaattgsttgttattgtcctttaacacttgaaatacatttttccactgtcttcccttatgatacagagaaggcaaccatccttctacgtgtcgttcctttctaagtggcccatctgtctcagcagtattccttcaacacttgaaatacacttttccgctgtcttcccttatgatattgagagggcagccatcattctaagtgtccttcctttctgtctc

SEQ ID NO: 171085 - DNA, 507 bp, Homo sapiens
ttgtcagggcttagatggcatatggatacacgtcttagatttttttttttaaattatttcatacatgtggtgtttgcttagttttacataaacatttatcatttttttctcaccatttcttccccacatcagaccattcttctgatatctttttttcttccttaaatccatgtgaaggtcctttagtgtaggtctcttggttgttgtaaactctctggctttatctataaatgtcttcattgacattctcttggctttgagaaatggtgttcttgggcatttgattctaaattggttgttattgtcctttaacacttgaaatacatttttccactgtcttcccttatgatacagagaaggcaaccatccttctamgtgtcgttcctttctaagtggcccatctgtctcagcagtattccttcaacacttgaaatacacttttccgctgtcttcccttatgatattgagagggcagccatcattctaagtgtccttcctttctgtctc

SEQ ID NO: 171086 - DNA, 507 bp, Homo sapiens
ttgtcagggcttagatggcatatggatacacgtcttagatttttttttttaaattatttcatacatgtggtgtttgcttagttttacataaacatttatcatttttttctcaccatttcttccccacatcagaccattcttctgatatctttttttcttccttaaatccatgtgaaggtcctttagtgtaggtctcttggttgttgtaaactctctggctttatctataaatgtcttcattgacattctcttggctttgagaaatggtgttcttgggcatttgattctaaattggttgttattgtcctttaacacttgaaatacatttttccactgtcttcccttatgatacagagaaggcaaccatccttctacgtgtcgttcctttctaagyggcccatctgtctcagcagtattccttcaacacttgaaatacacttttccgctgtcttcccttatgatattgagagggcagccatcattctaagtgtccttcctttctgtctc

SEQ ID NO: 171087 - DNA, 581 bp, Homo sapiens
atgtaatctcttatgacttattaatttcctctatactttatttccctattctctattattttacatatttgtactttcctacccccatttggttcattaaatgagaaaacagtggagctgtatactatttagttggatttcttcatcctgtcccctaccaataaattctagttgttatttttgttttatttaatgttcttccataggcccgtatatttatacttctattgtgtaacttatsagatgcaattttgtccctggatattacaaaataaggaaatgagaataattatggtgcatcctactttctcacatcccatttcaacttttattatatcattttgacattgtattagtttgtcatatttactttttactctctaaggtaattcctatagttgttttagttttcatcctaaaaaggaatttaatgtttgttatgcatttttctgccagtttctctaataaattcttgctggtctcaaatgtgttccctttgagatgggcttatgggaattccattttctgaaatatgatactgtacagcaaaaaataactgttcattgtccttatccttgaat

SEQ ID NO: 171088 - DNA, 459 bp, Homo sapiens
aattccattttctgaaatatgatactgtacagcaaaaaataactgttcattgtccttatccttgaatgtcaatttggctgctgtaacatgttgaggtcatacttgctttctctgaggctgttgtatgagtggctccataaaatgtgaccgtggagaagtctgaggactgctggttactgccctattattaggttctctaaaatttagatgggatgctcaaaagagtctyacctttaatgtctaataactattaggctattcatagctttgtgccaacttttcctgggatacaaggctatattatctgtacacatatcttttttctgatctatttgcttggttttcttttgggggggatatcaaagtatatacatttgtctcctttgccttctgcagtgctcatttgatcttttatcctgggactttttgtttatttccattttccactgctgtttttct

SEQ ID NO: 171089 - DNA, 530 bp, Homo sapiens
ctccataaaatgtgaccgtggagaagtctgaggactgctggttactgccctattattaggttctctaaaatttagatgggatgctcaaaagagtcttacctttaatgtctaataactattaggctattcatagctttgtgycaacttttcctgggatacaaggctatattatctgtacacatatcttttttctgatctatttgcttggttttcttttgggggggatatcaaagtatatacatttgtctcctttgccttctgcagtgctcatttgatcttttatcctgggactttttgtttatttccattttccactgctgtttttctcaatcctgtcctccaggtttcttactgcactctcatagtgctgattttctctgtctgcttccacgtagacctggtttctgtgatggattcagtgacctctcctacgtatgtcctcaattctgctaagtcacgtttcatctctctttcttgcttcattgtatcactgtttctttcttgaggttttgtatcttagctatgaattc

SEQ ID NO: 171090 - DNA, 530 bp, Homo sapiens
ctccataaaatgtgaccgtggagaagtctgaggactgctggttactgccctattattaggttctctaaaatttagatgggatgctcaaaagagtcttacctttaatgtctaataactattaggctattcatagctttgtgccarcttttcctgggatacaaggctatattatctgtacacatatcttttttctgatctatttgcttggttttcttttgggggggatatcaaagtatatacatttgtctcctttgccttctgcagtgctcatttgatcttttatcctgggactttttgtttatttccattttccactgctgtttttctcaatcctgtcctccaggtttcttactgcactctcatagtgctgattttctctgtctgcttccacgtagacctggtttctgtgatggattcagtgacctctcctacgtatgtcctcaattctgctaagtcacgtttcatctctctttcttgcttcattgtatcactgtttctttcttgaggttttgtatcttagctatgaattc

SEQ ID NO: 171091 - DNA, 530 bp, Homo sapiens
ctccataaaatgtgaccgtggagaagtctgaggactgctggttactgccctattattaggttctctaaaatttagatgggatgctcaaaagagtcttacctttaatgtctaataactattaggctattcatagctttgtgccaacttttcctgggatacaaggctayattatctgtacacatatcttttttctgatctatttgcttggttttcttttgggggggatatcaaagtatatacatttgtctcctttgccttctgcagtgctcatttgatcttttatcctgggactttttgtttatttccattttccactgctgtttttctcaatcctgtcctccaggtttcttactgcactctcatagtgctgattttctctgtctgcttccacgtagacctggtttctgtgatggattcagtgacctctcctacgtatgtcctcaattctgctaagtcacgtttcatctctctttcttgcttcattgtatcactgtttctttcttgaggttttgtatcttagctatgaattc

SEQ ID NO: 171092 - DNA, 459 bp, Homo sapiens
aattccattttctgaaatatgatactgtacagcaaaaaataactgttcattgtccttatccttgaatgtcaatttggctgctgtaacatgttgaggtcatacttgctttctctgaggctgttgtatgagtggctccataaaatgtgaccgtggagaagtctgaggactgctggttactgccctattattaggttctctaaaatttagatgggatgctcaaaagagtcttacctttaatgtctaataactattaggctattcatagctttgtgccaacttttcctgggatacaaggctatattatctgtacacatatcttttttmtgatctatttgcttggttttcttttgggggggatatcaaagtatatacatttgtctcctttgccttctgcagtgctcatttgatcttttatcctgggactttttgtttatttccattttccactgctgtttttct

SEQ ID NO: 171093 - DNA, 530 bp, Homo sapiens
ctccataaaatgtgaccgtggagaagtctgaggactgctggttactgccctattattaggttctctaaaatttagatgggatgctcaaaagagtcttacctttaatgtctaataactattaggctattcatagctttgtgccaacttttcctgggatacaaggctatattatctgtacacatatcttttttctgatctatttgcttggttttcttttggggggratatcaaagtatatacatttgtctcctttgccttctgcagtgctcatttgatcttttatcctgggactttttgtttatttccattttccactgctgtttttctcaatcctgtcctccaggtttcttactgcactctcatagtgctgattttctctgtctgcttccacgtagacctggtttctgtgatggattcagtgacctctcctacgtatgtcctcaattctgctaagtcacgtttcatctctctttcttgcttcattgtatcactgtttctttcttgaggttttgtatcttagctatgaattc

SEQ ID NO: 171094 - DNA, 432 bp, Homo sapiens
atgtaatgaattgagtacccaggtcacctgccygtctcctgaaactccaggttagccttctactgacatagggatatatattagccaggtcaagctggaaagcccaagtgttaaacccatgcaggtgcactatgaaaaaaagcttgaaaaattacaatggattattgtttaaacttaatttgctgaaaataaagatgagaactctttactggaacaaattagcacataaactagaagatggtatgcagctattaatcaagaaggggaaaatttttgaaaggacaaccatacacaaaagacttatcaattctgtctttatgtcacaattcagtttgcaaaagcttcaatcatctaactgtctcatggattatattcctctagtatggtgatgtcatcacattactaggatttagagagtgagtgatagcaggt

SEQ ID NO: 171095 - DNA, 432 bp, Homo sapiens
atgtaatgaattgagtacccaggtcacctgcctgyctcctgaaactccaggttagccttctactgacatagggatatatattagccaggtcaagctggaaagcccaagtgttaaacccatgcaggtgcactatgaaaaaaagcttgaaaaattacaatggattattgtttaaacttaatttgctgaaaataaagatgagaactctttactggaacaaattagcacataaactagaagatggtatgcagctattaatcaagaaggggaaaatttttgaaaggacaaccatacacaaaagacttatcaattctgtctttatgtcacaattcagtttgcaaaagcttcaatcatctaactgtctcatggattatattcctctagtatggtgatgtcatcacattactaggatttagagagtgagtgatagcaggt

SEQ ID NO: 171096 - DNA, 432 bp, Homo sapiens
atgtaatgaattgagtacccaggtcacctgcctgtctcctgaaactccaggttagccttctactgacatagggatatatattagccaggtcaagctggaaagcccaagtgttaaacccatgcaggtgcactatgaaaaaaagcttgaaaaattacaatggattattgtttaaacttaatttgctgaaaataaagatgagaactctttactggaayaaattagcacataaactagaagatggtatgcagctattaatcaagaaggggaaaatttttgaaaggacaaccatacacaaaagacttatcaattctgtctttatgtcacaattcagtttgcaaaagcttcaatcatctaactgtctcatggattatattcctctagtatggtgatgtcatcacattactaggatttagagagtgagtgatagcaggt

SEQ ID NO: 171097 - DNA, 432 bp, Homo sapiens
atgtaatgaattgagtacccaggtcacctgcctgtctcctgaaactccaggttagccttctactgacatagggatatatattagccaggtcaagctggaaagcccaagtgttaaacccatgcaggtgcactatgaaaaaaagcttgaaaaattacaatggattattgtttaaacttaatttgctgaaaataaagatgagaactctttactggaacaaattagcacataaactagaagatggtatgcagctattaatcaagaaggggaaaatttttgaaaggacaaccatacacaaaagacttatcaattctgtctttatgtcacaattcagtttgcaaaascttcaatcatctaactgtctcatggattatattcctctagtatggtgatgtcatcacattactaggatttagagagtgagtgatagcaggt

SEQ ID NO: 171098 - DNA, 533 bp, Homo sapiens
  misc_feature (1)...(533): n = A,T,C or G
tagttaaccatagtactcaaatcaatatcaattttgtatatgaaaagcaaatgcacaacttaaaaagaaagttccattttaatttctcagaaaaaaagtttaaaaaaaatctttattctaagactttaaattttcagtagttaatctgagatgcagacagaatttgattcccatgtcaaaaacaattaaaatagaaaacaaatctttccatttttttcataatacaggtggtcattttaatcatttakgtattttcctgacattggttcagtctttggtcacataattcaagtctacaaaacctttggttagcttgaattgcatttaaatatcacaaagctggttgctaagctcttcattctagggtagaaaccctcacatatattcatagttttttatatacctgtgtnttgttttcaaaccagtttttgttttaatcaaataaggtatgatttgggacaagtaggctccaaactaccaaagtagcatgtatatgaatttatactcaccatactgtaactctacaaagattc

SEQ ID NO: 171099 - DNA, 539 bp, Homo sapiens
aatggtgtggaggttgctgcaggtgctctctgaggaggccttcatgagcatctctcattaccttggtgaatggaccaaatttcagggcctgaccctcagcctttggcttcagaagctgtttctggaacaccacgagtggattcagctttgaggatgcactttyatgaactcacaatcagttgcaaaaatgaatattacacaatagtacattattgtactctgtattgagcctgagattatctgaaaatagatgacatgagcagccaaatcattgttagagtggttcctgatgagaatagaacaagaatctggggagttaggtgaactgaatgtttaattgcatccttctcaccattggggtagtctgaccaatgggttggggatattggaaatttgctggctatagccaccagcatctgttttcacattaaaggtatgcttgccaatgggagcagggacttgaaagctattcataatctattgcttatcaaactcttattatataccaggcatctgtcctaaaagcttttcatgcttta

SEQ ID NO: 171100 - DNA, 537 bp, Homo sapiens
tctcaacaggacccacagggccaattgtaaaatcaaatctggggagatgttaaagactaccaaagcaaaagaattgcacaattttggtaatgtacataaacaaaaatctaaggaatatgtaagaatgaattctgaaatccaagaagagagaaacagcattttagatcagattgaatttagcagtggatggacacatagcagaattctgattcaaaagctagttcaaggggccatttgctttgctggttgacacaacactggktttaatggtgtcccacatggaaggaagttatgagaaatcaatttttgtaaaatattaaaattctcaggtaattttattcagccatggttaaaattccagttaaaagctttgaccacacacttcaagagtacttaataaaaaaatagtaaagttactggcacaagtgcttttgagaatgtaaagccatttctccaggtaagggggggcattgagagattatttacaaaccaatcattataaaagctaagtttaatctgcacttattaactagtcat

SEQ ID NO: 171101 - DNA, 605 bp, Homo sapiens
ggctatatccaattataaatatatctggagatttatggggaagagtttaaatctatacactagaacatatttaaataagagtaaatcattgagcactggtttaatttttctttataaacattttagaattaaaatgtaatacagaaaaattcataatcacaaatgaatatattgatgaattactacaaaatgaacacaataatcatgaatcatcacccacacctggaaatcagcatttccaatatcctataagctgctctgttgccttttcccaatcactgtcttctcctcagaatctttatcctgatttaaaaatgtctacattagttgtatctctttttraactctgcataaattcaatcttttctgtctagcttctttctttcaatattatgttggtgagattgattatgccattacattatagctgtatttcattcattttcatgctgtacattatttcattgtgcaaatgtaccagaagttaattttaatcatgctgttgtcaaatatttggattgtttctgtgtttgaggacattggcaatacaggtgcccctctatgtgtgatggagttatatctcaataaacctatcataacaatgg

SEQ ID NO: 171102 - DNA, 608 bp, Homo sapiens
agttaatctaacatctataaaaacaatgctaatgactggtttgctgttaataaatacatgggtaaatctctgttcaaggctctcagctctgaaggctgtgagaygacacccctgatttcccacttcacacctctatatttctgtgtgtgtgtctttaattcctctaacgctgctgggttaggatctcgctgaccaagctggtctcggcaagtggtgtccataatgggggctcaaatccaggtcaaagagtcaccggagtgatggttggagaatgtggaactaagctggaggacacctgagtactcaagcaatccccatggtgagtaagaaggggagctcagaagcatcagggtaacaatgggacaaacatggggtctggttcgttccaccttggaactttctcacactgataatgaggaggaaggagagtataatgaagtaacagaagaggttacagagcaggtttatttgccagccaaagctaaagcggcaaaggagggagaggttcatccctacccttctagacgccctcattattattttgaagaaaaagaccctccagatctttcttttctggaggacactgggcgaaaactagttaccccggt

SEQ ID NO: 171103 - DNA, 612 bp, Homo sapiens
atgtcaagtctgacagtgaggaggaccccaactgtcacgagaaacacctgtcgaacacagccacccacctggggacagatcaagaagctgtcatagatggtggaagaaaacctgaggacagtgggacaaccagtcacaatgagtaatttaatggtagctgtgatagcggtaatcaccactgctgtgagtgattccttcaacaagggctgacacagagaacaattatacttattgggcatatttatcaaatttggctggcaataatgcctggatgtaatcactctatgatgcagttacgcatgctttctgatctcartatttaccataataaatctactcctataattgaggcatactgctctcaagaatctatttgtaaacaaaattgaacctggccagaaaaaatcaacatacttgtttaggaagattgcattgcagaacagatagaggtgctgcatagcaactcctatggaatcattattgattggttccctaaggggatgtttagcttgaattgcacctctcagtctgcatgctacagccacactatgttcagctgatctgaacaaaacagtcggatggtagacatgataagaagtaaggcaagagttc

SEQ ID NO: 171104 - DNA, 612 bp, Homo sapiens
atgtcaagtctgacagtgaggaggaccccaactgtcacgagaaacacctgtcgaacacagccacccacctggggacagatcaagaagctgtcatagatggtggaagaaaacctgaggacagtgggacaaccagtcacaatgagtaatttaatggtagctgtgatagcggtaatcaccactgctgtgagtgattccttcaacaagggctgacacagagaacaattatacttattgggcatatttatcaaatttggctggcaataatgcctggatgtaatcactctatgatgcagttacgcatgctttctgatctcagtatttaccataataaatctactcctataattgaggcatactgctctcaagaatctwtttgtaaacaaaattgaacctggccagaaaaaatcaacatacttgtttaggaagattgcattgcagaacagatagaggtgctgcatagcaactcctatggaatcattattgattggttccctaaggggatgtttagcttgaattgcacctctcagtctgcatgctacagccacactatgttcagctgatctgaacaaaacagtcggatggtagacatgataagaagtaaggcaagagttc

SEQ ID NO: 171105 - DNA, 575 bp, Homo sapiens
atcctaacaataccactgcttggtatttacctgaaagaaataaaagcatgtgtgcattcattacctttcattaaaggtgtgttcataattaccagaaaccacaaatattccttatgtccatcaactggtaaattgacaaactgttgcaccagtacaatagaatgatactcaaaagaagaaacaaactactgatagatgcaagaacagggtgaatctcaaaagtagtgtaaaaactgaaagaagagaaatacaaaacaataattactcatttgttctattcatyggacattttggaaaaaaatatcacacaggcagaatgtataccaatggctgtcatggtctgggggtgaggggaatgggtttactgcaaagaaacacaagcaaaaaagacagtcgtggtctatcaataagtcaccaaatgataatgccttaagcccttttctctaagtttcaaaatccctatgaaacataactctatttttttcctttcaaatactgatatctgtagatgtgagatgatttttgcagatacgataatactggggaaaaaactgccatgtttttccattatgtag

SEQ ID NO: 171106 - DNA, 638 bp, Homo sapiens
tatgtctagggagtgaataataaaaagtggtgaataagtatataattataacaggtttgatttgctttttaatgcttaatttacattagtaaatattcatgttaagtaagtaatatctgctttgttaatgaagtgagcatctccatttttacctgataaatatgatttgttaacacgtttaattctcactcaaatgtgtgaaacttgttttgttttaccctcattgtacagattaggggtccaacattattaacttgcccaagattctgtgtattataacaggaatcaaatatttctgacttaggtatccttaatctttctttcacactggttgcaaactcakacaagcagtcagataagggtaaatcagtgaatcataaagtgtgtataaaaatagaagacaaaaatttggcaaatcaagagtgtgtgcccagttcataagcacagataagcttaaattcagttaattattgcattgcagtattgtgggttcagaattgcaggattttccattttgagccagatcatggatttgtaaatacacaacagcttttgtaaatattgtagcatatatctaaaaatgtgtaggctgattatgaactgcagtttttaaatgttgcactataccatgttctccc

SEQ ID NO: 171107 - DNA, 533 bp, Homo sapiens
ttttggtagcaccgcacatttgcatgtacaccttccattattaagagaaaacttcgccttcatctaagccttatggaacttaaaccttcaccctttacatttaatccatatcccttttgagtcagcttcaattcttcaggtgaaggttgaatttgaataacttgctgaaaatccactgttttgccccacctgacaatagaaaagtcacaactttttatctcttggacttggaaatatgatacatgaaatgaaaatttggctttctaaggattgtacamttttgaaagccaatgatccaagttgaggtttaagttggactttttctttgtcatctccagacacagcctttatctagtctctaaaaataattaaaaattacattctaaaataggtggtcttttccagctactacaaactattttgtttgggctggtagcaagacgaaaagccctactcagataatagcaggtctgttcagagaggttaacatggactacctgacacccttttctctcttccctgctttatttttc

SEQ ID NO: 171108 - DNA, 619 bp, Homo sapiens
taagctcccaggtacttattatccacctctaataattattaagttgcaatcaatgtagtttcatttatatccacaaccactacatccttcaatcatttcattttatttgtaatatctcagtgagaatctctataagttaagaacttaaaataccacaataaacattagggtcacaattaaaaataattactgaacattataaaatttattggccaggtgcagtggctcacacctctaatcccggcactttgggaggccaaggcaggcagatcacaatgtcaggagttcaagaccaacctgaccaacatggtgaaaccccatctctactaaaaatacaaaaattarccaggcgtggtggcgcccacctgtagtcccagctacttgggaggctgaggcaggagaattgcttgaacctggaaggcagaggttgcagttagccaagattgccccaccgcactccagcctggctgatagagtgagactccgtctcgaaaaaaaaaaaaaaaaaaaattattgtgctcaagtatgcatttgtcttataaattttaaatattatcttgcttcagtgtttatgattttattttactttaattagggttaaaataatatttatacatt

SEQ ID NO: 171109 - DNA, 546 bp, Homo sapiens
tttgcttatgtattttgcaaaatgtgtgatttaaagaaaagtagaggtttaaatgtttatctcattctactcttaagatttgtatagtcatagaaatttaacctttctgaagctcactaatttttttctctgaaataaagatgatgttcctaactcaaagtgtgaatatccatacaactcctaataaaatgtttgagacaggcaggtgttacacaaataacatttaccgttatttaacatcaaatatagttttagcttaatgtatttatgaattttaacatactgaaaagttaggttttatttttactctctaacattcgggaagtgataagaaaaagagaaatgttcagttctaactgtgtwtgtgtgtgtgtgtgtgtgtgtatttctaatagcaagtagaactgtacctagctatgtttttaccacttacataacaaaaataacgtgttatcttgattcagtgattgttatctttagttactgataattgcaaaaatgaaaaatatgctcatttccttgggggaaaacatttaaatgattgac

SEQ ID NO: 171110 - DNA, 581 bp, Homo sapiens
tctgggtaaattcctggatgaatttttttaatgatttaaaaaatatgtgtaatagatcaactggcaggagttaatcaggttacattagagaaacttgtctataaacactcattgctggtttttttttttttttwtttttcttccttgagacagggtctaactctgtcacccagcctggagtgcagtagcttgactgtgtccagatgcagccttgaccccttgggctcaagtgatcttccacctcagcctcccaatagttgggacaagggcaggccactacccctagcttattattattattattattattactactactattattattattatttgtagcaacaggatctcattacgttgcccaggctgactcacactcctgagatcaagcaagcctcacacctcaggctccccaaatctggaattataggcacgagccaccacacctggcctgttttccatttttaataggcagaagattatttggggaaagaagaccagtaacttcacaacaccttagaagttcctttgttcttcaaaataattcaagtcctctgagtcttagggtgtttttcagattc

SEQ ID NO: 171111 - DNA, 505 bp, Homo sapiens
tcacagacataaagatagcaacaatggatgctggggagtactagaagggaagggagagggacaagggttgaaaaactgttgggtactatgctcactacctgggtgatgggatcaatcatacaccaaaccttagcatcacrtaatatacccatgtaacaaatctgccacgtgtacccattgaatgtaaaataaaagttgaaattataaaaaaaaaagtcacagttggatgatgatgcctaaggtaatttgcaaaattttaagaactaagaatactgaattaaataaaacagagcagaactgaggtatgggttggtagtaaatttaatgcattattctttctaattttctatttccaatttaacatcctggttagtattcacacaggatatccaatagaaatagaaatgattgcaaagctagaaaataataaaacatatttaagttttctggtatctgtatattctttcataatattgggataacaaaatttccctctatgacgtgt

SEQ ID NO: 171112 - DNA, 505 bp, Homo sapiens
tcacagacataaagatagcaacaatggatgctggggagtactagaagggaagggagagggacaagggttgaaaaactgttgggtactatgctcactacctgggtgatgggatcaatcatacaccaaaccttagcatcacgtaatatacccatgtaacaaatctgccacgtgtacccattgaatgtaaaataaaagttgaaattataaaaaaaaaagtcacagttggatgatgatgcctaaggtaatttgcaaaattttaagaactaagaatactgaattaaataaaacagagcagaactgaggtatgggttggtagtaaatttaatgcattatyctttctaattttctatttccaatttaacatcctggttagtattcacacaggatatccaatagaaatagaaatgattgcaaagctagaaaataataaaacatatttaagttttctggtatctgtatattctttcataatattgggataacaaaatttccctctatgacgtgt

SEQ ID NO: 171113 - DNA, 353 bp, Homo sapiens
acccacccagagtaagtacacactagaatcagtaaatacttgttacctccgcattagggaatctctgagaagtccacttgaagatcttcaaaaggagctgctccataggcttgtatgctgggaggaacagaggggccttgctttgcattgtgctgttgacaggtaatgcatcgctgcactactgttttagtaagagctggcaagtgtgagatgtagaagtaccggcttaacagcttttcaagtgactcttggcctaaatgggtagtttcatgtacagctagcacgactgsggctcctagcagctattctcccatctggtaactttatccatccttcttttattgtttgtcctc

SEQ ID NO: 171114 - DNA, 620 bp, Homo sapiens
tgaaataatttacattcccaccagcagtgtataagcattcccttttctccacaatcttgccagcatctgttattttttgacttcttaggaagagccaatatgactggtgtgaaatggtatctcaatgtggttttgatttgcattcctgtaatgattggtgatgctgagcattttttttcatatgcttgttagccttatgaatgtcttcttttaaaaaatgtctgtttatgtcatatgccaactttttaatggcgttagttgttttttgcttgtgaatttgtttcacttccgtatatattctggatattggacctttgttggatgcatagtttgaaaatactttctcccattctgtatgttgtttgtttactctgttgatagttttattttgttgtgcagaaaccatttagtttaattatgtaccatttgtcaatttttgttttcactgcaattgcttttgkcatcttcatcataaaatctttgcagggttcctgtgttcacaatggtatttcacagttatcttccagggtttttgatcattttaaggttaacatttaagtctttaatccatcttgagtagatttttgtatatggtgtaataaagtggtccagtttcaatc

SEQ ID NO: 171115 - DNA, 528 bp, Homo sapiens
aagtggtcatggcatccctgaataactggggaagagccatcaagcctcaagtatacagctgaattcagcactgaagtgctagaaarcctaactgaagcttgattaaagggattgtgtcaagtggtgagcttgctgagtgtttggatatccagaggcccgaacttggttctccaaagtctgtaaactcagcaatacagctactcggacatttgttattttctgagaaaagaaacagtgtatttgaaaacacatgtaggtttctccaattccatacatgtgcagaatgagcagatgatatgtcaaacagaggtggctgattatagcccttttagatatggattacaaagctctaagctgaaggcctaaagtgaccaagggtctgcatgcaatcagattcagtgttaactaactaaggagccagctttgtgataagcaggactttttgaatttgaggttattaaaaacagtacaaacaaaacatacaacatccagtgaaagccaggagatctaaaattaatgtgattaaac

SEQ ID NO: 171116 - DNA, 528 bp, Homo sapiens
aagtggtcatggcatccctgaataactggggaagagccatcaagcctcaagtatacagctgaattcagcactgaagtgctagaaaacctaactgaagcttgattaaagggattgtgtcaagtggtgagcttgctgagtgtttggatatccagaggcccgaacttggttctccaaagtctgtaaactcagcaatacagctactcggacatttgttattttctgagaaaagaaacagtgtatttgaaaacacatgtaggtttctccaattccatacatgtgcagaatgagcagatgatatgtcaaacagaggtggctgattatagcccttttagatatggattacaaagctctaagctgaaggcctaaagtgaccaagggtctgcatgcaatcagattcagtgttaactaactaaggagccagctttgtgataagcaggactttttgaatttgaggttattaaaaacagtacaaacaaaacatacwacatccagtgaaagccaggagatctaaaattaatgtgattaaac

SEQ ID NO: 171117 - DNA, 661 bp, Homo sapiens
gtcagtaacagtgggcaaggaggtattaggtaaaggaagagggatgaggccaaaaagggctgagtccctttcagtatcatcatcaagtctgaagttctttaaagtattaaaatttggtggcttactcatgttggtgctccagagactttaaacttctgacctagaatattttgacattgtggggaaacaaacaagcaaacaaacaagtttttttttgtgttgaaacatctgcaaatgaagccagcagctctgttgatgctacagcttattaaagatgcaaattaaaaatatcaaaaagcatggaaatttgcttaaccttttacagaatgtaaatctttaatctgatcttaatatgaacttcrttgatttgctttaagtttaataacacgctgaacctcagaggtgttaatagtacctttagtggtcaagtattgcattttagaattgatagaaaaaggttaatttgaaatccagtcaggaaagtatatcatactgcgcaacatatatctgctttagtgaagaactgacaaactgcaaatgcctcagaggaaaaattctactgaattaaaagcaagattaatgtacttgggaatgaatttacattcaactataaaataacgccattatgccaattttttggtgtaaccagtcgtttctgagg

SEQ ID NO: 171118 - DNA, 661 bp, Homo sapiens
gtcagtaacagtgggcaaggaggtattaggtaaaggaagagggatgaggccaaaaagggctgagtccctttcagtatcatcatcaagtctgaagttctttaaagtattaaaatttggtggcttactcatgttggtgctccagagactttaaacttctgacctagaatattttgacattgtggggaaacaaacaagcaaacaaacaagtttttttttgtgttgaaacatctgcaaatgaagccagcagctctgttgatgctacagcttattaaagatgcaaattaaaaatatcaaaaagcatggaaatttgcttaaccttttacagaatgtaaatctttaatctgatcttaatatgaacttcgttgatttgctttaagtttaataacacgctgaacctcagaggtgttaatagtacctttagtggtcaagtattgcattttagaattgatagaaaaaggttaatttgaaatccagtcaggaaagtatatcatactgcgcaacatatatctgctttagtgaagaactgacaaactgcaaatgcctcagaggaaaaattctactgaattaaaagcaagattaawgtacttgggaatgaatttacattcaactataaaataacgccattatgccaattttttggtgtaaccagtcgtttctgagg

SEQ ID NO: 171119 - DNA, 561 bp, Homo sapiens
gagatcttacactactttccagctatctatttatgtcacagtttcgtgaatgctggcagtaaaaatgagactctagagtcagagtcaaagaaatttaytactcacagcaatagcagtaaccagagcatcagatttttcttgtgctggttccctaaactccaatactcacagaaaaacatgaagaggactagatgatagctatacaggcagtaggctgtattacaggcaagggaaactgatactatgtaattgaatattttataatgtaagttagcatgcctacctttgctccagaggaagatattacctttattaaaactggaaaataagtaaactagctttctgcttcagagggagacactattttttaaggctgattgctgcacaaacatttctgtgaagatagtcacaaaaaaggcagtcagtgcttctgtgtgtaaaacattcaaatatgtgagagatccagagagaattatctctcatcataaaattgcatgaatactaattagcaaaatttcagatcagaatgagaaataattagtatatctattaagcattata

SEQ ID NO: 171120 - DNA, 429 bp, Homo sapiens
tcagctagcatgtgctgagcattgttataaatgtttcaggttgcaactgatatttgaaaaaaattgtttttcagtattgtctttagatttagacaagaggattgggtttcttagaagtctccacttattacaaagaaataaaaataaatatattaaaaaacaaatgkttaacttttttttttaactcggaatctggagcttatatctggtacagaaaacacttaagactctaaacagctgctctcatcagtaacaatgagtaggcctcagtgaaataattcttcctagctctatccctgtattgtcaaataaaagggtgtgatatggtttggctgtgtccacacgaatatcatcttcagttgtagctcccataattcccacatgtcatgggagggatctggtggggggtaattgaatcatgggggcatg

SEQ ID NO: 171121 - DNA, 589 bp, Homo sapiens
aagcaatagagacagaatggtaaattcaaattacgattcacattgacttttgttttgagctaattggtcttgtagtcaattagaataaaatagatgtcttacaaggtcatacttatttataataaacaacaagaaaagaatcaggtaagagggttagatctggctttgagccactgtggcagacaatcatggtttcttactcaattctcagatccagcataatgacttatggctatttatcaatttcacattgcactatgaaaagaaaataccttaatgtttcccagatattgacattaatttctggagaaccaaagaccactacttgctactttccactggttaaaataatggagtatggcaattggatccaacagaataccaagcatcttgctttgaaatttcctgagtattcagcctaggtatcttcatcaaatgaagggtttgacctactggctttctgattccttcaagaaattctacatrtaagtaaagaggtaagaggatgattggttgacacaaacagttttgggaaagacatacttaaaaattaccatttggcataaatacagagtaggatagtatttac

SEQ ID NO: 171122 - DNA, 362 bp, Homo sapiens
gaattccatgccaacacttctgggataactccagccatgggttcagacagacaaaacaaagtttaaacttctatttccaattggccttcagaattatgtgactcctaatttatctcatcaktcttatatttctatttctatatttccacacaaaaagaatttaatttcttttttccttttttcacttgtttttaaatttaaatttctttaaattttactttaagttctgggatacatgtacaaaacatgcaggtttgtaggaatggataaattcctggacacacacaccctcccaagactaaaccaggaagaagtagaatccctgaatagaccaataacaggctctgaaattgaggcagtaa

SEQ ID NO: 171123 - DNA, 585 bp, Homo sapiens
gcttcaggtatttccccccgaccctggaatcaggttcatcagatcctaaatgtgcagggacaagaggcatggattcctccggtgggtcactgggaatggtgctaagaagggctacctcttctgccagcccttggtcttcagacccatgtatttaagtcactggggatacaacaccrcaaagtagtcattagttcaaacagtatgctgcatcttgactagtgtcccaaccccatggatgttattaccaagctggtgcttagctgaaccttcatgaggccaacccaaagctctatcagattggtggcttctgagagatggatgtattggatgtatgacgggactactgggccctgtggttgtgtgctgactgccacacctctctcgctgcaaggtgcatcttttggcccacagtgatatactgcaagatcccatatagtaaaccagatactctatgagcccttggacactagttctattcaagacactgcaggtccaaaaggcaaagcctttcctagaatatgtgtcaatgcagtaagaacaaaacacattttccagggtgaggaattctgacatcatcaacttgcc

SEQ ID NO: 171124 - DNA, 597 bp, Homo sapiens
agctaagatggcgcatctgattcctagcagaggctgcttttcctttyatttcttaaaaataaaccaatccgccccccacatctgaacgaattgtctcctccagccagctgccttatttgactggattatttgagcttcccgatgtctctgcagagacgtgggctttggtgtctgcaaccccctgggatccagttgttacccaccatgtctctgtcgtagccctggttctggatgggaaagagggcactgcagaatggctggggcggaggacacacatggtgggccggctctgcctctgtcacttgtcctctgggaggcttcaagggagagttctgagtctttgcttactctttgcctaaaactggctttttcctgctgtcaccaaagggatgtcctcaagtctctgccacccccacttgctagtccccgaccctctcagcccccaccttcctcagtaagagccaccctgtgaggcagctctctagaccctggagtaaatgaatgagagctctggcttcccattccctgccctcttttgtgactcatggctgggggtttagaaatatttagaaggcattatttaattagttagcaaat

SEQ ID NO: 171125 - DNA, 597 bp, Homo sapiens
agctaagatggcgcatctgattcctagcagaggctgcttttccttttatttcttaaaaataaaccaatccgccccccacatctgaacgaattgtctcctccagccagctgccttatttgastggattatttgagcttcccgatgtctctgcagagacgtgggctttggtgtctgcaaccccctgggatccagttgttacccaccatgtctctgtcgtagccctggttctggatgggaaagagggcactgcagaatggctggggcggaggacacacatggtgggccggctctgcctctgtcacttgtcctctgggaggcttcaagggagagttctgagtctttgcttactctttgcctaaaactggctttttcctgctgtcaccaaagggatgtcctcaagtctctgccacccccacttgctagtccccgaccctctcagcccccaccttcctcagtaagagccaccctgtgaggcagctctctagaccctggagtaaatgaatgagagctctggcttcccattccctgccctcttttgtgactcatggctgggggtttagaaatatttagaaggcattatttaattagttagcaaat

SEQ ID NO: 171126 - DNA, 596 bp, Homo sapiens
agacatggtcccctaatagctatgtttgttcctgggaccctgtctccacccttcctcaatgccctatttctggccagaaaccaattagacctggatggacacctgacccaggctggggaaatcagagattgtcttacaagattttgaacttgagtgtaagaggcaccagccagtctctgtttctcctttgaattaaggatgtaaaattttcatgcactttgcacaggataattgtttcatcaacctcaaattttcatagatccagaggagttgaattgaggggagagcgagagcaagagggagaaggaaatgaaacagagaacaggaacacgagagcaaggccagtcaatggatgagaagaactgagcacccagaggaggaggcacagaaagtggggcatgaagcctacttctgatttgggactgtgagatcctgtcttcttatgtgacctgaataaagtgtggcattgtgtttcttcctttattataagaacacattggaagaaaaaaacagacrtcacatagctaacactaaaaagtctagagatttaaaaaatagctcttgactgaagatcctcttgaggaactaggggagga

SEQ ID NO: 171127 - DNA, 378 bp, Homo sapiens
tctgttagacagcacgattcctaaagatggtaatctctggtgacagatgggttggttcactgaactgcctcatacaatgccaccttcctcmagcagcaacgagaccctgggcatgaccacattgcatcagaccctggagcatgtagcccactgctatctccagcaatagcctcaagggctggtgccacatagagaagcacatggggcaatttgctgcattatccagagggcagggcccctgcctgtgctgccaccaacagccacaagcatctgctgttctcctgcattagaccaaggaccagcacctgctaattccccatctggccatcccaggacagagcttaaaagtaagacaaagagtgcaagttcaacagcaag

SEQ ID NO: 171128 - DNA, 378 bp, Homo sapiens
tctgttagacagcacgattcctaaagatggtaatctctggtgacagatgggttggttcactgaactgcctcatacaatgccaccttcctccagcagcaacgagaccctgggcatgaccacattgsatcagaccctggagcatgtagcccactgctatctccagcaatagcctcaagggctggtgccacatagagaagcacatggggcaatttgctgcattatccagagggcagggcccctgcctgtgctgccaccaacagccacaagcatctgctgttctcctgcattagaccaaggaccagcacctgctaattccccatctggccatcccaggacagagcttaaaagtaagacaaagagtgcaagttcaacagcaag

SEQ ID NO: 171129 - DNA, 433 bp, Homo sapiens
ctgctttctggcttgcattgtttttgatgagttatctgctcacatagtatcctgttctgctgtacccaamatgtgggcttctttttctggctgctttcaaagttttctctctattgttggttttgtgcaatttgactattagatttggaaaatttctagccattattttttcaaatatttttctgtcttcccttttttcctctccttctttgactccaattacacatacgtgagagcacttggagttatcccataacttagtaatgctgtgtttatttgtaaagttatttgtctccctgagtttcatttagaatagattttattgatatgtattcaaaatttgctaccattttcttccgaaatgtctaatgggattttaatcccacactgtgtaattttatctcacacattgtagtttccatctatagaattc

SEQ ID NO: 171130 - DNA, 433 bp, Homo sapiens
ctgctttctggcttgcattgtttttgatgagttatctgctcacatagtatcctgttctgctgtacccaaaatgtgggcttctttttctggctgctttcaargttttctctctattgttggttttgtgcaatttgactattagatttggaaaatttctagccattattttttcaaatatttttctgtcttcccttttttcctctccttctttgactccaattacacatacgtgagagcacttggagttatcccataacttagtaatgctgtgtttatttgtaaagttatttgtctccctgagtttcatttagaatagattttattgatatgtattcaaaatttgctaccattttcttccgaaatgtctaatgggattttaatcccacactgtgtaattttatctcacacattgtagtttccatctatagaattc

SEQ ID NO: 171131 - DNA, 433 bp, Homo sapiens
ctgctttctggcttgcattgtttttgatgagttatctgctcacatagtatcctgttctgctgtacccaaaatgtgggcttctttttctggctgctttcaaagttttctctctattgttggttttgtgcaatttgactattagatttggaaaatttctagccattattttttcaaatatttttctgtcttcccttttttcctctccttctttgactccaattacacatacgtgagagcacttggagttatcccataacttagtaatgctgtgtttatttgtaaagttatttgtctccctgagtttcatttagaatagattttattgatatgtattcaaaatttgcyaccattttcttccgaaatgtctaatgggattttaatcccacactgtgtaattttatctcacacattgtagtttccatctatagaattc

SEQ ID NO: 171132 - DNA, 578 bp, Homo sapiens
gtgactttataagaagagacaccacagagcctgctgcttttttctctaccgtgtgaagacacagtgagagggggactgtctgcaagtcaggaagagaggtttcaccagaaactgaccatgttggcaccctgatctcagacttccagcctccagaaatgtgagaaaataaatttttgttgctttagccacccagtctttgacattttgttatagcagcagcttgagtggactacgatatatgccaatcaatcagtgtgttgtgatttaggaggattggcatgagggagtcatatcccgggagagaagatgcatgtgrcttctcttgctcaaccttgatgaagaaacagatagtgctgatacctgtgagagtcaccccagtctattgtcttgttgctccatctcctttcttggttgaaccatgggagggccaacctgcatcgtggctcttcccagctcccttgctgtagcatgggagccatggtcaccctgattgggctgttaaaaatggattggatgcccccagctttgctcctggcagctcttaggggacagtgtcctccttttactagattatggac

SEQ ID NO: 171133 - DNA, 578 bp, Homo sapiens
gtgactttataagaagagacaccacagagcctgctgcttttttctctaccgtgtgaagacacagtgagagggggactgtctgcaagtcaggaagagaggtttcaccagaaactgaccatgttggcaccctgatctcagacttccagcctccagaaatgtgagaaaataaatttttgttgctttagccacccagtctttgacattttgttatagcagcagcttgagtggactacgatatatgccaatcaatcagtgtgttgtgatttaggaggattggcatgagggagtcatatcccgggagagaagatgcatgtgacttcycttgctcaaccttgatgaagaaacagatagtgctgatacctgtgagagtcaccccagtctattgtcttgttgctccatctcctttcttggttgaaccatgggagggccaacctgcatcgtggctcttcccagctcccttgctgtagcatgggagccatggtcaccctgattgggctgttaaaaatggattggatgcccccagctttgctcctggcagctcttaggggacagtgtcctccttttactagattatggac

SEQ ID NO: 171134 - DNA, 578 bp, Homo sapiens
gtgactttataagaagagacaccacagagcctgctgcttttttctctaccgtgtgaagacacagtgagagggggactgtctgcaagtcaggaagagaggtttcaccagaaactgaccatgttggcaccctgatctcagacttccagcctccagaaatgtgagaaaataaatttttgttgctttagccacccagtctttgacattttgttatagcagcagcttgagtggactacgatatatgccaatcaatcagtgtgttgtgatttaggaggattggcatgagggagtcatatcccgggagagaagatgcatgtgacttctcttgctcaaccttgatgaagaarcagatagtgctgatacctgtgagagtcaccccagtctattgtcttgttgctccatctcctttcttggttgaaccatgggagggccaacctgcatcgtggctcttcccagctcccttgctgtagcatgggagccatggtcaccctgattgggctgttaaaaatggattggatgcccccagctttgctcctggcagctcttaggggacagtgtcctccttttactagattatggac

SEQ ID NO: 171135 - DNA, 578 bp, Homo sapiens
gtgactttataagaagagacaccacagagcctgctgcttttttctctaccgtgtgaagacacagtgagagggggactgtctgcaagtcaggaagagaggtttcaccagaaactgaccatgttggcaccctgatctcagacttccagcctccagaaatgtgagaaaataaatttttgttgctttagccacccagtctttgacattttgttatagcagcagcttgagtggactacgatatatgccaatcaatcagtgtgttgtgatttaggaggattggcatgagggagtcatatcccgggagagaagatgcatgtgacttctcttgctcaaccttgatgaagaaacagatagtgctgatacctgtgagagtcaccccagtctattgtcttgttgctcyatctcctttcttggttgaaccatgggagggccaacctgcatcgtggctcttcccagctcccttgctgtagcatgggagccatggtcaccctgattgggctgttaaaaatggattggatgcccccagctttgctcctggcagctcttaggggacagtgtcctccttttactagattatggac

SEQ ID NO: 171136 - DNA, 322 bp, Homo sapiens
gtgtcagcaacaaggagcctgttggcatggtggctgcagtwgtcctctcacagggatggcatgtctactaaccatcggtccctggaggagctgttctggcctcctggctgaagatgccaagagctgggggatccccaaggtggagcctctctcttaaaagatccggtgatactggtagcagaactggagacttgtccagaaatgagccaagaaggatgactgcgctgctcatctctttgtgtcactggcattgttttggtgccccagcaaaggctagagacacagggacatgctgcacattctggtgatgaaagaaccagct

SEQ ID NO: 171137 - DNA, 486 bp, Homo sapiens
gttagcttcctgatcctttcccttcctcttgggtcctgatctggagtggtacatttgagtaagagccctccatgggtacattattctcacttcttcatctttatctcctacagctcccaaagctcaaggactttttttttcccctgcagttgtcctctctctctctcctgcatcattaatttttacctctctacattctattggagtgttcgcatcagaatacaaacatgccataatatcttcaatcttaaaaaaaaactcccttgacccccacgtccctcttcaattactgttcaatttctctgcttgctttgacagcaaaacttgtcgatactttctgtatctactttctcacctctaattctcccgtgaacscattcccatcaagctttcattcctactacctcactgaaatagctcctagcaaggttgcccattactaatttgactggtcaactcagagtcctcctgttgacctgctggctg

SEQ ID NO: 171138 - DNA, 594 bp, Homo sapiens
ctcaaaattcaaggtgggcagaatgatctgggggggtgtgtcaatggtaccctccatagacttgctgcccagagttgccttgggtcactgctcctcacattggatgcagtgctccttggctgccccagccataactcaaatgggcccaagtgctgctcaacccatcactccagaaggcacaagccataaattctggcggcattcacatggtgctaattttgcaggcacacagaatgcaagagttgtggtagcgtggcttcttccacctagattttaaaagatattgtagactgcctcactctccatttcctctgctgtaaattgagatcagtagcacctagctcatagtgtcrttgcagaaatgaaatggagtacccatgtaaagcttgtcctggttcacagtaagcactcaataatgctagctattattataacacgttgaacttcatttaatttaatacaacaataaactgatgtgataggtgtgatgggctaaaagaagttaagtatgatggccaaggtcacaccctgctgtgtgacgaagctgggaatccatcccatatctacgtggcttataagaaatcaagagagatc

SEQ ID NO: 171139 - DNA, 580 bp, Homo sapiens
ctcaaaattcaaggtgggcagaatgatctgggggggtgtgtcaatggtaccctccatagacttgctgcccagagttgccttgggtcactgctcctcacattggatgcagtgctccttggctgccccagccataactcaaatgggcccaagtgctgctcaacccatcactccagaaggcacaagccataaattctggcggcattcacatggtgctaattttgcaggcacacagaatgcaagagttgtggtagcgtggcttcttccacctagattttaaaagatattgtagactgcctcactctccatttcctctgctgtaaattgagatcagtagcacctagctcatagtgtcattgcagaaatgaaatggagtacccatgtaaagcttgtcctggttcacagtaagcactcaataatgctagctattattataacacgttgaacttcatttaatttaatacaacaataaactgatgtgataggtgtgatgggctaaaagaagttaagtatgatggccaaggtcacaccctgctgtgtgacraagctgggaatccatcccatatctacgtggcttataaga

SEQ ID NO: 171140 - DNA, 440 bp, Homo sapiens
ccagcctgaacttttaaaaccacttataaaactacactttactgagagatgcttgtgttatacacaaacatggaaagaatttataaaactttgagactatgctggagaagctgggatatttatagcctatctatgttttctatctgtctatctatctatctatctatctatctatctatctatctatctctccctgtctctctctatatatgtatatatatatacayacacacacttagagatatatagaatgattaaatatatttaatctcttagagatacataaaatgattaaatatatatatatgtatttatttaatatatattacccatccctgcttctttaatgagagaaagacggtgccttttggggcttgttaattaaaaaaaaaatacttgtttggtagatgtggagactcatttgtgcattatgctcaggc

SEQ ID NO: 171141 - DNA, 440 bp, Homo sapiens
ccagcctgaacttttaaaaccacttataaaactacactttactgagagatgcttgtgttatacacaaacatggaaagaatttataaaactttgagactatgctggagaagctgggatatttatagcctatctatgttttctatctgtctatctatctatctatctatctatctatctatctatctatctctccctgtctctctctatatatgtatatatatatacacacacacacttagagatatatagaaygattaaatatatttaatctcttagagatacataaaatgattaaatatatatatatgtatttatttaatatatattacccatccctgcttctttaatgagagaaagacggtgccttttggggcttgttaattaaaaaaaaaatacttgtttggtagatgtggagactcatttgtgcattatgctcaggc

SEQ ID NO: 171142 - DNA, 440 bp, Homo sapiens
ccagcctgaacttttaaaaccacttataaaactacactttactgagagatgcttgtgttatacacaaacatggaaagaatttataaaactttgagactatgctggagaagctgggatatttatagcctatctatgttttctatctgtctatctatctatctatctatctatctatctatctatctatctctccctgtctctctctatatatgtatatatatatacacacacacacttagagatatatagaatgattaaayatatttaatctcttagagatacataaaatgattaaatatatatatatgtatttatttaatatatattacccatccctgcttctttaatgagagaaagacggtgccttttggggcttgttaattaaaaaaaaaatacttgtttggtagatgtggagactcatttgtgcattatgctcaggc

SEQ ID NO: 171143 - DNA, 549 bp, Homo sapiens
cttttgggtatatatctagaagtggaattgtgggattgtatggtaattctatggttagttttttgaggaagcaccatactgttctccacagtagctacaccattttacattcyaccaacagtgcacaagagttccaatctctccacattcttgccaacaattgttattttcaatttgtgtgtgtatttctttctttttctaaaatatctaaaatgtgtttattggggtggcttcccatttatcttgattcaaagtgcttttactgctgcttcctcctgaaggagcatccttctgtcagccttgctttgcctcctgtagactgacagagaacggtagaccagtgatatggtttggctatgtccctacccaaatctcatcttgaattgtagtttccataatccccatgtgtcatgggaaggacctggtgggaggtaattgaatcatgcgggtggttaccctcatgctgttcttgtgatggtaagttctcatgagatctgatggttttataaggcactttcccacccctctttgctcagcacttctccttcc

SEQ ID NO: 171144 - DNA, 578 bp, Homo sapiens
gattttctctcttcttttgatgattattactagacccattaagtatttcattaggggttacaaatgtgtagtaggctaaatttataattccttcttaatttattagctggaaattttatttaaagagaacacttcwttaagaatttgttcacctcaaggtccagtatgttcaaaacaggcagagtaactgctagattcttttcctttgttttcaaaataacaagtgtgattctatatcacaatccaaaggtgactggccaatgaattgttaatcttcatagactcatggatttaaacacataatgtatttactacattgcagttactcttattgattcccaaaatatcttggccagtgaaaggcccttcaaattgccttcaagttagtagtctccgcgtgcattcttgctttctagcataacaacatgttccaggctcatttttcatttcctgcctcagatctgaaaccaaccatttatctaagaagctctgatgcctttgagtgagaaatagcatttaggaagcataatttgtattcttctattttatttctgaaacaaaaatatctgaagcaagca

SEQ ID NO: 171145 - DNA, 546 bp, Homo sapiens
agggtactctgtccaaccaggcaaagctcgctaatcaattaatgacaatcagattgaggggacaggtcctggccagatcacacacatgttccactgctcagcattcctcactccaataccttattataatcaggttcatgcacaaaccaagtgtagtctgtgggattttacaggacagcaacatagccagccttcattgttaacccacatacgtggctaacaaaatgacatgtcttagcaccaccaccaccttgaaccaaatagtcaaagtragggcaacgatagaaatctgttccatttttcacaaataggtgtgcctcctgctcctggaacactgccagtttggccctccttgtgggtttgacacagtaaataatgatgaatattctcgctaagcctgtacagtcctgcacacttgttctttgcacagccagaaaaaaaaaatcctcacataaaacaaagcattgttgtagatcccgcatattgtttggaatacaaactttatacaaattcgctaatttcacaggtgtatgtgtaattttccaa

SEQ ID NO: 171146 - DNA, 546 bp, Homo sapiens
agggtactctgtccaaccaggcaaagctcgctaatcaattaatgacaatcagattgaggggacaggtcctggccagatcacacacatgttccactgctcagcattcctcactccaataccttattataatcaggttcatgcacaaaccaagtgtagtctgtgggattttacaggacagcaacatagccagccttcattgttaacccacatacgtggctaacaaaatgacatgtcttagcaccaccaccaccttgaaccaaatagtcaaagtgagggcaacgatagaaatctgttccatttttcacaaataggtgtgccycctgctcctggaacactgccagtttggccctccttgtgggtttgacacagtaaataatgatgaatattctcgctaagcctgtacagtcctgcacacttgttctttgcacagccagaaaaaaaaaatcctcacataaaacaaagcattgttgtagatcccgcatattgtttggaatacaaactttatacaaattcgctaatttcacaggtgtatgtgtaattttccaa

SEQ ID NO: 171147 - DNA, 378 bp, Homo sapiens
aagagtcaaaatgcatttaccaaatctgttgaaggggaaaagttgtaaagttcttatttcaatgttaatttaatagcttctacttaatgaagacccagaaaggttctcatcagcagctactcaaccaatagccctctcttacttgaactgaaaaaaatgcacatccctttcctcaagataattccagaatattagatttgycaggacttacttaaccttcagtgcattggcaacaagtatgggggatttcgcaccttcctggacatttaattcatgttgctcttaaatccatggtttctaagacctcagagacagacaaatacatttaactggaatagatctatgactaaacattttcctattttcaaatagttgcct

SEQ ID NO: 171148 - DNA, 607 bp, Homo sapiens
agtggtattcccatgtagtccacttcagatcggtctgaacaactccagccctccctttcctttcaataaaataggtccattaatgtagcrcacctcactctcattctctccaagggagttgtatttttattactgaaaaagtatcacataaatacaaattacattttttcattagaaaaccacttttcatttcagaaaaaattcaattaattatgaatagggttatgctttcatcagggagagaaatatgtaatttttcttcaagcctcaaacacatataatgaaatcttttctcagaatccactcttaagatggatttttaaaagtatagactttattaaaatctcagttcaattaaaatgcattcaattactttaaatctttattaaaatctcaggtaaaattgtacaacagtgtaaaagagacttgtactctttaccagatagttaattctaacaaatgaacataaagtgcacagttttgctcttaaagagcgaatcaaaaaaataagtttggggcttgaggttgggggtggggacgcaatggagatgcaggttgctttctgtgttataacttctgacactggtttccttggatctttcatcat

SEQ ID NO: 171149 - DNA, 520 bp, Homo sapiens
gccaggcacagtggctcatgcctgtaatctcagcattttgggagggtgaggtgggagggtcacttgagctaggagttcaggtctaacctgggcaacatagggaggccctccccgtctctaccaaaaaaaaaaaaaaaaaaacaaaatccaggtgtggtggtacatgcytgtggtaccagttacttgggaggctgaggtgggaggatcacttgagcccaggaggttgaggctgcaatgagctttgatcataccactgcactccatcctgggtgacagtgagaccccatctccaaaacaagaacaaaaacaataaaaaatccaacaatttaaggcattcattctttatctactcacatattgatatataacatgtatgtaagctctgtattcatagcttgtcataatgaagttggttatatttaagaagaattttcagtggaatttctaattgattcttttttaattaatttatttagacatgtgctgattgatcacctacaatgtggctagtgttgtgtca

SEQ ID NO: 171150 - DNA, 520 bp, Homo sapiens
gccaggcacagtggctcatgcctgtaatctcagcattttgggagggtgaggtgggagggtcacttgagctaggagttcaggtctaacctgggcaacatagggaggccctccccgtctctaccaaaaaaaaaaaaaaaaaaacaaaatccaggtgtggtggtacatgcttgtggtaccagttacttgggaggctgaggtgggaggatcacttgagcccaggaggttgaggctgcaatgagctttgatcataccactgcactccatcctgggtgacagtgagaccccatctscaaaacaagaacaaaaacaataaaaaatccaacaatttaaggcattcattctttatctactcacatattgatatataacatgtatgtaagctctgtattcatagcttgtcataatgaagttggttatatttaagaagaattttcagtggaatttctaattgattcttttttaattaatttatttagacatgtgctgattgatcacctacaatgtggctagtgttgtgtca

SEQ ID NO: 171151 - DNA, 520 bp, Homo sapiens
gccaggcacagtggctcatgcctgtaatctcagcattttgggagggtgaggtgggagggtcacttgagctaggagttcaggtctaacctgggcaacatagggaggccctccccgtctctaccaaaaaaaaaaaaaaaaaaacaaaatccaggtgtggtggtacatgcttgtggtaccagttacttgggaggctgaggtgggaggatcacttgagcccaggaggttgaggctgcaatgagctttgatcataccactgcactccatcctgggtgacagtgagaccccatctccaaaacaagaacaaaaacaataaaaaatccaacaatttaaggcattcattctttatctactcacatattgatatataacatgtatgtaagctctrtattcatagcttgtcataatgaagttggttatatttaagaagaattttcagtggaatttctaattgattcttttttaattaatttatttagacatgtgctgattgatcacctacaatgtggctagtgttgtgtca

SEQ ID NO: 171152 - DNA, 461 bp, Homo sapiens
tcattgcatacgttgtgtagctccagagatgaagatatgggagatgtagatgtatttgatgtgtactgaccccaatttcttacaaaagcaatataaacaaaaaatacatctaactaccatgatatatcacttgtttttctatatttttatgtaatatacatgtaatcatagtatagatataatttcattgtgattataactggaaatatttttcatctttctacatggccttcttgactttcattttgtattyctgctctgtagtctctcagttgatttgttataatttatttaaacattatactataaggcacttgaatagcttccaatttttgtaactaacactgaaatgactcaattagtgcaatagtttttttacgtttttaaggttttcttgaagggtaaatttcaaacagtaagattagtggattaaatgatatatactttttaaggggtgatgg

SEQ ID NO: 171153 - DNA, 444 bp, Homo sapiens
tgagcctgatgtaaataggagttagccaggtgaggkggtgcgggtcaggagtgaggaagacttccaagctgaaggaacagcactttcaaggttcggagttgtgagggaatgtggcacatccagggcactgaaaaaaaaagtttactgtgtgtgtcaggagacacacacagtaaagtgtgtgagagtgaggtgggtggtgggggagaggactgagaagtaggcaggggccatgataagaggtttggctttaattttaaaggcaatgaagaattttaagcagggaggtcgtgagatcagttctgtaggtacattagacaatgactccgactgcggtgcggacaatgtattgaagggtgtggcatgggagagaataagaccagagggtcacctggtgggaaccagggaagaggggatatggctctaagtcagagtaatagtgttggg

SEQ ID NO: 171154 - DNA, 445 bp, Homo sapiens
ataggagttagccaggtgagggggtgcgggtcaggagtgaggaagacttccaagctgaaggaacagcactttcaaggttcggagttgtgagggaatgtggcacatccagggcactgaaaaaaaaagtttactgtrtgtgtcaggagacacacacagtaaagtgtgtgagagtgaggtgggtggtgggggagaggactgagaagtaggcaggggccatgataagaggtttggctttaattttaaaggcaatgaagaattttaagcagggaggtcgtgagatcagttctgtaggtacattagacaatgactccgactgcggtgcggacaatgtattgaagggtgtggcatgggagagaataagaccagagggtcacctggtgggaaccagggaagaggggatatggctctaagtcagagtaatagtgttgggcgtaaagagcagtgg

SEQ ID NO: 171155 - DNA, 360 bp, Homo sapiens
ttcaaggttcggagttgtgagggaatgtggcacatccagggcactgaaaaaaaaagtttactgtgtgtgtcaggagacacacacagtaaagtgtgtgagagtgaggtgggtggtgggggagaggactgagaagtaggcaggggccatgataagaggtttggctttaattttaaaggcaatgaagaattttaagcagggaggtcgtgagatcagttctgtaggtacattagacaatgactccgactgcggtgcggacaatgtattgaagggtgtggcatgggagagaataagaccagagggtcacctggtgggaaccagggaagaggggatatggctytaagtcagagtaatagtgttggg

SEQ ID NO: 171156 - DNA, 584 bp, Homo sapiens
ctcaatgcccatagatacccttctgtagcattaaatttaagagattcaagttggtgatttttttagtggatgtactataaattatttatccttttttctactatcgggtagctacattgtttacacatgttactattatgatattctgtggactgttttaaaaataaaataaatgaatggggttacagtagggaggtataatggccagtgtgggaaagacacagctaccaggtgaggtggctcacgcctgtaatcctagcactttgggaggcagaggtgggtagatcactcgagcccaggagtttgagaccatcctgggcaacatggcaaaaccttgtctctacaaaaaatasaaaaattcaccaggcatggtggcacacatctgtggttccagctactagggaggctgacacagaggatggctcgagcccaggaggttgaggctgcagtgagcccagattacgccactgcattccagcctgtggcacagagtgggaccctatctcaaaacaaaacaaaaaattaaataaataaaaaagaaaaatgcaacatactacagaaaagcggtatgagggaaaatagtt

SEQ ID NO: 171157 - DNA, 541 bp, Homo sapiens
atctcacaaaatgtcagccggggtgctcattggtacattgtttgttgtatatttcctcataccttggaaaggactagttgaatttgttccaaaccaagcaattgacctaggactttgcatcctattagtgtcggccacaattcaaatccaactccttttcaaagttgtattttttacgaaaggtgacctgatagcgagacaagagtaatgacgggtgaggcactctcaaatcaggccagggtggcaggccgggacatcttgttttcatcagattctcgtagttactcttgacttttctgtgtgtttgctgaacttgtgagattctattgtgctctttctagctggatattttccagagggttatcaagaaaaaggagtatcttctgcattaataacctcgggaakgattttagcagtaaaattagagaccagatgatctgctggacagcaggatgggggagcatttcttcccctttcccaggagagtgtcaagttcagcatgacctagcaccagacctttcactcagtaactctgagatct

SEQ ID NO: 171158 - DNA, 465 bp, Homo sapiens
gttatatagcagcctgaactgactcagacatatgagtagctcaatctacatatagagacagaaagtagattggtggttaccaggagctagagggaggaacggggagttggtgtktaatggatacagttttgctttgggaagatgaaaaagttctggagatgaatagtggtgatgtttgcacaagagtgtgaatgtatttattgtcaccaaactgtacatttaaaatggctaaatagtaaattttatatcatataaaataacatatatgttaccacaactttttttttaaagaattggtactgtgtaactaatagacattcccctcaccaggaaatctctgaccaaaccgctcaattaggttaagaactatgtgctcagtaagtgtatctactggtgtgttttgttgccattttggcttcgcctccactctcattggaattgaacatgcccagcctgtcagctgag

SEQ ID NO: 171159 - DNA, 612 bp, Homo sapiens
cccctgcgcagtcaggacccaggcaggggccttctcctctctgagcagaggctggtccccgtccccaggcccctcccgctgcgcacatctggaaagaatctgagggcggttgggggcgggggctggagtgggaggacgccggcgggcgacagggaatgtggggggcaggtggaactgcgtaggggcggggacccctgtcatgagagcytgggcccgaagtatccccgcgtctttccacgtcaactcatcaggccccctagcgactccaacctccacctctttatagatagagaaactgaggcccagagaggggcagaggtctggccccagggcgcgtcggacgccgggtgggtcccctccggggctcggcttccccggccactgtgccgccccagcttagtgccaaccactagttgagctaaaggtctcagctggcggtctggagtccgtctatctgtctacgcggctgcttcccagccgggacagctggagggaggaaggggtgggggtccgcgaagcgcgaggagcgagatccgcgccttcctgcgaatgaggcagaagccccaggttccaggtccccgagccacagcccggcctggggcgggggacgag

SEQ ID NO: 171160 - DNA, 596 bp, Homo sapiens
ggacccaggcaggggccttctcctctctgagcagaggctggtccccgtccccaggcccctcccgctgcgcacatctggaaagaatctgagggcggttgggggcgggggctggagtgggaggacgccggcgggcgacagggaatgtggggggcaggtggaactgcgtaggggcggggacccctgtcatgagagcctgggcccgaagtatccccgcgtctttccacgtcaactcatcaggccccctagcgactccaacctccacctctttatagatagagaaactgaggcccagagaggggcagaggtctggccccagggcgcgtcggacgccgggtgggtcccctccgggsctcggcttccccggccactgtgccgccccagcttagtgccaaccactagttgagctaaaggtctcagctggcggtctggagtccgtctatctgtctacgcggctgcttcccagccgggacagctggagggaggaaggggtgggggtccgcgaagcgcgaggagcgagatccgcgccttcctgcgaatgaggcagaagccccaggttccaggtccccgagccacagcccggcctggggcgggggacg

SEQ ID NO: 171161 - DNA, 633 bp, Homo sapiens
agtctaatgggaatgacaagtgtgtcaggagataggactgtgacacccaaacatcttggctgtgggtttatgtgggaaggcacaagaagctgggtaggacgttcatcaattagaataagggtttggagtcaggcrcacccggctacagccttttataggttatgtgaccttggaaagatcacttaacctctctgagcctctatttcccaatctgggaagtggggataattatagacaccccccctcctccacacagggttattgttagatttagataggctgggggcttggtgggagttttgtaagctgttaagtgctttgcacaggtgggagtccctgactcccttggtcacccctgcagctgctggacatcgccgggaatcagctcacagagatccccgaggggctccccgagtcacttgagtacctgtacctgcagaacaacaagattagtgcggtgcccgccaatgccttcgactccacgcccaacctcaaggggatctttctcaggtaggagcccactcgcggccctgtacacacccccgtggggcccaccctggctccaacgggacagttgatgcacgtgggaacagcttggctccactgctgcctgtgtaaccacggctcagatct

SEQ ID NO: 171162 - DNA, 557 bp, Homo sapiens
gtctgggccccagagctggttgggcctgtcccccgatgctagcaaggggcaatcaaatatgccacatactgatttattcattcccagagatcaagacacttgccagcaaggacagtcatatgcaggctctggccagagcctctctgtgggcttaccatgcagggaacccactggtgaaatctgcttgctggtgggtacatttagttatttaactgtataacccggcgtaactccaggtttgcsgttttcagtttatttcagccctcccaccacccccgccttatagtggagtcccatcatatgtgcatttaacttaagtgaattcaattacatgtgctctgaaaaagggagaaaatcatttaaatgagacaggagactcctccttccaagggctcttccccaggtgagggccacgagagaggagggcctgaattgcctccaccagccgctgtgcccaggcacctcctgaacagtgagcacctccctgaagccagagagtttctagggcctgcagaggggtgggtgttttagatcacggcctctgagtgtatgctgat

SEQ ID NO: 171163 - DNA, 557 bp, Homo sapiens
gtctgggccccagagctggttgggcctgtcccccgatgctagcaaggggcaatcaaatatgccacatactgatttattcattcccagagatcaagacacttgccagcaaggacagtcatatgcaggctctggccagagcctctctgtgggcttaccatgcagggaacccactggtgaaatctgcttgctggtgggtacatttagttatttaactgtataacccggcgtaactccaggtttgcggttttcagtttatttcagccctcccaccacccccgccttatagtggagtcccatcatatgtgcatttaacttaagtgaattcaattacatgtgctctgaaaaagggagaaaatcatttaaatgagacaggagactcctccttccaagggctcttccccaggtgagggccacgagagaggagggcctgaattgcctccaccagccgctgtgcccaggcacctcctgaacagtgagcacctccctgaagccagagagtttctagggcctgcagaggggygggtgttttagatcacggcctctgagtgtatgctgat

SEQ ID NO: 171164 - DNA, 402 bp, Homo sapiens
gtcaactttttttttgttgcaattgcttttgttttttgtttgtttatttgtttttgttgttgttgttgttgtttgagatggagtctcgctctgtcacccaggttggagtacagtggtgcgatcttggctcactgcaacctccgccttcctgggttcaagcgattctcctgcctcagcctcctgaatagctaggattacaggcacatgccaccacacccagctaattgttctctatgtttactagagatggggtttcaccatgttggccaggctgatctcgaactcctgacctcaagtgatctacccgccttagcctcccaaagtgctgtgattacaggcrtgagccacagtgcccagcctgcaatcatttttgtagtctttgtcatgagatctttgccaagg

SEQ ID NO: 171165 - DNA, 534 bp, Homo sapiens
acccactccagcagggccttcggtcttcagtctgacagacagagctatgtagagtctcagcagagcagccactcaggcatgcatggagtccctggaggcttagatactagggctttccagcaaaagtagctgcagctatggcaaagtaggatgttagactcctgtacatacccctagaaaagaggctgaatctayggggctgaacagcaacagcccacaggccccatttccacagcacctcacaagttaagacccacttacttggaattctagccagctaccaatagcggcattgcacctccctaagaaggcactcctgggaggaggggcgggctgccatctttgctattcaggcaccttagccattctagccttcaggctttggagagtctgagtccacccaaggcagaagggattcccacagcatagcacagccgctctatcaaaacatggccagactgctgctttaagcaggtacctgatcccattctttttcgctgggcaggacctcccaaccagggcctccagccaccc

SEQ ID NO: 171166 - DNA, 533 bp, Homo sapiens
gggtagtatttttctttttgtacctttgtcagtttggggctttatctgtttctttttttttctttttttttttttttttttttttgaaatggagtctcactctgtcccccaggttggagtgcagkggcgcaatgttggctcactgcaactgcaacctccgcctcctgggttccagcaattctcttgccttaaactcctgagtagctgaaattacaggcatccgccaccacgcccagctaatttttgtatttttagtaaaaacagggtttcgccatgttggccaggctgatctcgaactcctgacctcaggcctcggcctcccaaagtgctgggattacaggcatgagctaccgcacctggcctttttctgtgctccaggagagtttaagtacatagtagtgaaattatctgacctttaaatgtttggtagaattatcctgtgaaaatactgaacctttagtttctagtgacagtcacacatctttttactagagcttcactgttgcttattaataatgtggtcctgtgagtta

SEQ ID NO: 171167 - DNA, 566 bp, Homo sapiens
agtgatcaaaaactgtcagattgacttttcttcaagaaatttaacttagcttgctagtttacatccagaatcaaattcttactgaaaaacctttctagttttctactttttactgcaagggttcttggtggatattatctctgtccctactgcattttatgttatttttttcaaagttggcaagtaggcaagatcaactggccaatgaatacatgaggactgaggcagattttaaccttctatttatgcaactttcactgaacaaaactcttaagtgctgttatttatatagagttgaactctgtcaaatgtcttttcactagctagcttaacaaaggttttgcttaaaatattacatgttaatattgaaaacarttgggcttttctgacttcataaaagtggaaattgaaaaccacattcatcaggaaattaaatgttttatccaggctttagcttaatgagaatttatattttgagaaaagattatttactactagtcatttttaaaatgtgtctgtttttgattctttttgtcagttttccccttaaatctttacacagattc

SEQ ID NO: 171168 - DNA, 599 bp, Homo sapiens
caattgctcttcactttctttcccaacaatcctcatgtttaattcattatcttcttctcccaatataatactgactagaaatagtgacaacacatatactttctttgtttcagcttatgatgttgctattggtttcatgtcaatttctctgagatgaaggagttttacttctwgtttaagaattctattatgaatgaaggtcggatttcacaaaaaaatgtttaatgtcttgagaaaatcatataaggtttctttttgaatttgctgatactgtgaatacggtcgaatttggggctaaaatttagtatgcattagtatgtaaattattcttaaagtcaaagcaattcataagctcatatatggaagagtgcagagacagaggagaaaaagtcaaaggccgagccctgaagaaattcagggttttgtaaactagagggagctggcaaacaatactgagaatgcatattttacaagaaatatcagagagttaagcaatctaataaaatatctactggttggcaacatgaaggtttttggtgtttttttgtttattcatttgtttgttttttgaaatggagtctcattgtgtcacccaggct

SEQ ID NO: 171169 - DNA, 616 bp, Homo sapiens
aactttaatatttaagcatatggcatgtgggcctccttttatactcttggcctgggccctgagaatactagaggcagaagactttgtgagttagagccacaggaccctgtagtcatggtagcacggctttgtttttgtctttatgtgataagaaaccattagagcatgttaaagtagamgagtgatgtcagctgaatttggatttaaaggaatgattctcaacattatgtggaccttgtttttactttaaaatatctaattattaaataaagattggatacatccaagatgtacaacatgatggctagatatatgtacatattgttcaatgattatcacagtcaaattaattaacacattcatcaccacccatgctgtatgttagatcccaagagtttgttcagcttataactcaaagttcataccctttgaccagcatcttcccatttcccccattcaccagcctctagcaatcaccattttactttactcttagcttctaagtgtttggcattttcaggttctacatataagtgcaaccacacagggtttgtctttgtatgtatggcttattttgcttagcataatgttctccaggtttacccatgttgttgca

SEQ ID NO: 171170 - DNA, 548 bp, Homo sapiens
tcctgtagatcagtagaaccaaactcgaagtgactcaggggagagtaaagacaagctgaacctggtgtgggggacgaattggaacttacaaagatacctgcaatctgtgtctctcaccacctctgaacttgacagtgtcagtgacctgcaacagaaataagggtactttgctgcagatttgcatacatacacctgatttgtggtccaaagaagcaaaaggaccagatccagtggaagctggaaaagctgggtgagctgaaaccaagcactgccccacactaatacagtcagctgatcagagatccatcaagggacctggcaccctgcatctctggactgcaatggggacttcatcactatcaccttccaataaaaatgctcaaacaaaaggtrgttgtgctctgtttatatagttgaaggcaggagaagggcacacattgattaaaatctgatgtctctagtcataattcacacaatggactttttattatgagaccaaactctaagaggatatggaatctcttgatgtaatggtttcctcagaattc

SEQ ID NO: 171171 - DNA, 585 bp, Homo sapiens
gggcttgagggataagaaattccttaatgaatacaatgtgtattatttgggtgatggttgcactaaaggcttagacattatgcagtatatccatgtaataaaactgcacttgtactccttaaatttatgcaaaggaaaacataaaattatatattgttcagtgtgatcttgctctgaagaggttttctcagttttctgatgtgattcatagcttgtcagctgtactgtctcagaatcaagaaattgtccaagaagctcccccaggggctggctctaggataaagtatgacatcagaacaacaagaataagaattattttggttttacacatctcagaccatcaagaagtgtcaagttaacagagtcaaaagaacccwtggtaggagaaaaaaatgattccaaggaagggagaggtatgcaatcagcagtttaagggctttgcctggctttgaagtcagccacctttatttactaaactattttgacattcatctgcttattaagtatttattaaatacctaacgtatgttaggcactgcatgtataatgatgaacaaagtagaatttatccctaatgaatgagac

SEQ ID NO: 171172 - DNA, 585 bp, Homo sapiens
gggcttgagggataagaaattccttaatgaatacaatgtgtattatttgggtgatggttgcactaaaggcttagacattatgcagtatatccatgtaataaaactgcacttgtactccttaaatttatgcaaaggaaaacataaaattatatattgttcagtgtgatcttgctctgaagaggttttctcagttttctgatgtgattcatagcttgtcagctgtactgtctcagaatcaagaaattgtccaagaagctcccccaggggctggctctaggataaagtatgacatcagaacaacaagaataagaattattttggttttacacatctcagaccatcaagaagtgtcaagttaacagagtcaaaagaacccatggtaggagaaaaaaatgattccaaggaagggagaggtatgcaatcagcagtttaagggctttgcctggctttgaagtcagccacctttatttactaaactattttgacattcatctgcttattaagtatttattaaatacctaacgtatgytaggcactgcatgtataatgatgaacaaagtagaatttatccctaatgaatgagac

SEQ ID NO: 171173 - DNA, 159 bp, Homo sapiens
agtttaagggctttgcctggctttgaagtcagccacctttatttactaaactattttgacattcatctgcttattaagtatttattaaatacctaacgtatgttaggcactgcatgtayaatgatgaacaaagtagaatttatccctaatgaatgagac

SEQ ID NO: 171174 - DNA, 614 bp, Homo sapiens
cagcttgaaacggtgacttttcagagattgtgtacaagtgctaagtgtcactgaagaccattgtaatttgggtgtagtaataatatgaatagtagaggctatctccttaggcttgtgtatacatccacaacaatagctatcaaaaaagccagcaggaaaagttaatcaagtgttttacgtgcacagtgcccaaaatgaacgwggtgatcttttgttttcaaatttattttggcattacccagacatagagcaataacttctttggaagcatataaatgtgttcttcctgtcttccacaatattcaagccagccagtgtcctcactgacctatggagttgtcatatgctaaatgtgagcttcaaagggtcctggagattctctttgtggatcttacgcctggtccgctttctagtcctttaagaaagcaggacaggtcttttcgtttttctttttatctagtcaagtaagatctagaaaatgcgcaaagggagacaccgtggggaaggtacctcactaggaaattaagttagagactctccttatattttaattcattcattcacttactcgtttatccactcatttatttaatcaatatttattaaaggtgtgt

SEQ ID NO: 171175 - DNA, 614 bp, Homo sapiens
cagcttgaaacggtgacttttcagagattgtgtacaagtgctaagtgtcactgaagaccattgtaatttgggtgtagtaataatatgaatagtagaggctatctccttaggcttgtgtatacatccacaacaatagctatcaaaaaagccagcaggaaaagttaatcaagtgttttacgtgcacagtgcccaaaatgaacgaggtgatcttttgttttcaaatttattttggcattacccagacatagagcaataacttctttggaagcatataaatgtgttcttcctgtcttccacaatattcaagccagccagtgtcctcactgacctatggagttgtcatatgctaaatgtgagcttcaaagggtcctggagattctctttgtggatcttacgcctggtccgctttctagtcctttaagaaagcaggacaggtcttttcgtttttctttttatctagtcaagtaagatctagaaaatgcgcaaagggagacaccgtggggaaggtacctcactaggaaattragttagagactctccttatattttaattcattcattcacttactcgtttatccactcatttatttaatcaatatttattaaaggtgtgt

SEQ ID NO: 171176 - DNA, 608 bp, Homo sapiens
gtttaatccattgcaagagatttatgtagaagagcccaaagaaagacaataaatagtaaatatctatggactaccattttagttatttaacttatcaaaattatgattctatttgatacagaagtacaatttaagaacacttcagataattttcatgaatattcagtgcacatgtggtaattatagaaatagtgttaaattctcaacaaaatatgtatgcatcatcattgatttaatgaacaaactttttgaggcctttcaaaagtatataattatgacttttctttgagtgtcatagtcttgtcttttctgagctaaagtccttataaaattaaaagtaacgaaatcagctccacagataactttaataaagagagatgatgtgtcatgctatctggtggcatggatttgaaacagaaagctggagagygagtggtcagaaagcagcaataatgtacaaacagaacatctgcccctcctctaagctagctgaaaggaatcagctggagtacaaagcatctctgctcttgagactgtaggaagagcaaaacttaccaaaagtcagcttccactcagatcaattaatgaaaagattgcttagagggaag

SEQ ID NO: 171177 - DNA, 608 bp, Homo sapiens
gtttaatccattgcaagagatttatgtagaagagcccaaagaaagacaataaatagtaaatatctatggactaccattttagttatttaacttatcaaaattatgattctatttgatacagaagtacaatttaagaacacttcagataattttcatgaatattcagtgcacatgtggtaattatagaaatagtgttaaattctcaacaaaatatgtatgcatcatcattgatttaatgaacaaactttttgaggcctttcaaaagtatataattatgacttttctttgagtgtcatagtcttgtcttttctgagctaaagtccttataaaattaaaagtaacgaaatcagctccacagataactttaataaagagagatgatgtgtcatgctatctggtggcatggatttgaaacagaaagctggagagtgagtggtcagaaagcagcaataatgtacaaacagaacatctgcccctcctctaagctagctgaaagraatcagctggagtacaaagcatctctgctcttgagactgtaggaagagcaaaacttaccaaaagtcagcttccactcagatcaattaatgaaaagattgcttagagggaag

SEQ ID NO: 171178 - DNA, 599 bp, Homo sapiens
ggccccaatacaataatagatggagaccttcaccacaccttcagcattggacagaagcatcaacaaagaagcatcagatttaatttgcactattgatcaaatggatctaatagatatttacaaaatgtttcatccaagagatgcagaatacacattcttttccgcaatatatgaattactctcaaggatagaccatatactgggtcacaaaaagatcagagcagaaataaatgaaattgaaaggaaaaaatacaaaagatgaatgaaacttgggaggctgaggcaggagaattgcttgaacccaggaggtagagattgcagtgagccragatcacaccactgcactgctctccagtctgggagacagagcgagactctgtttcaaattaaataaataaatataaagatgaatgaaacaaattttttttaacattaaacaacatcagcaaagttttaacaagactaactaacaaggaaagagagaagatgaaaataaataaaatcagaaatgaaaaaggagacattccaacttatactgtagaaattcaaaggctcattagtggctgccatgagcaactatatgccaataaattggaaag

SEQ ID NO: 171179 - DNA, 468 bp, Homo sapiens
gataatgagccctaaggatagttgaactaaagccatttcatttaagacaattctgctttcccagatgacatgctaatgaaccaagtaagcagttctaagtcattgatatcacattattcagcacacaatttccaaaaacaagttaatgaaccagtttttgaaaatcatttagaagagacacagtttgacacataccaatgaagccagttcatttgcttgctaaaatagactgtatcttgggtcctttctaaactaaagctagcttgactttggctgtcatcagaaayagtataaaaataaaaatgaataagtgcattcctaggccattgagaggactgtttttttctattaacgtaataaactatattcaaatgaccacttatatcaccataagaactaaatgcctgatgaaaaagttgaaacaaagcctgtgtccctcatttacttaagtgtcctggaagtaattca

SEQ ID NO: 171180 - DNA, 506 bp, Homo sapiens
tttttctcttgcctccaataatgtttttctttttaccattgaggtgtccatgtactgtcttaaaagtcttccagcatccactaaaattcttcttaagatcttttcagattccgaccattatctagtttcawaaccaaaactatttttgcttttatcatggtggaacttcactatcggtttccaaattctgttagggctatctattgctgcctagcaagctacctcaaaacttgatgcctttaaacaacaacaatataattatatttaataatgtaggagtcagagattcagacaagacttggctggtggattcctctgctcaatgtagcaacaatgctgtcacttggcagtattcagttgacagccttttggtctcgtgacttggtgaaggtggctagaagaaagcttccatttgtacaccttcctctctatgcattctagagtcttccacacatgatgctgccagcagcataattagatttaatacacggcatcttagagctccc

SEQ ID NO: 171181 - DNA, 577 bp, Homo sapiens
gttcttactccagatgtgacagcttagttttcctccacttgagtgtaggccagcttaatgatgctcctctaaccaatagaatgggaagggaaaaataaagtgggacaatgtagtagacaccaccatgaccaagtggtcaaatttaactcatccataaaaagccatcattctcgctctgagatgatgcattgaaaagatcactttagttctgyggtattcttccataaattatgaaacttcaatctaatcataagaaaacatcagtgatatccaaattaagggtcattgtgcaaaatacctaaccaatactctacaaaagtacattagtggaaaaatagtgaatcagaataaagtctgtgatttatagtattgtaccaattttagtttcatagttatgataaatgcatcatgattacatatgatgttaactttaggagaattaggggaaggctgtatagaagctctctgtattgtatttacaactcatctctaaatctgaggttatttcaaaacaaaagtttaaaaatatagaaattcctatggtaatcaagtctccaaagttaggaaataaacaacc

SEQ ID NO: 171182 - DNA, 577 bp, Homo sapiens
gttcttactccagatgtgacagcttagttttcctccacttgagtgtaggccagcttaatgatgctcctctaaccaatagaatgggaagggaaaaataaagtgggacaatgtagtagacaccaccatgaccaagtggtcaaatttaactcatccataaaaagccatcattctcgctctgagatgatgcattgaaaagatcactttagttctgcggtattcttccataaattatgaaacttcaatctaatcataagaaaacatcagtgatatccaaattaagggtcattgtgcaaaatacctaaccaatactctacaaaagtacattagtggaaaaatagtgaatcagaataaagtctgtgatttatagtattgtaccaattttagtttcatagttatgataaatgyatcatgattacatatgatgttaactttaggagaattaggggaaggctgtatagaagctctctgtattgtatttacaactcatctctaaatctgaggttatttcaaaacaaaagtttaaaaatatagaaattcctatggtaatcaagtctccaaagttaggaaataaacaacc

SEQ ID NO: 171183 - DNA, 556 bp, Homo sapiens
atattgctgcctctggctagcttctggtgggggccatgtgctaggtcaaacatgacagaaaagtgtaacagccactggttatgcataaagaaatcacacggtaagaaaggaagcaagagagaaaaaccaaggagccagaatctttttaacaacccacttgcccctctggtatggcaatctactcatgacccaaacacctgctactaggcactaccttccaaaactgcmccactgaaaatcaaattttaacatgagttttggtggggacaaaccacatccaaagcacagcaaggagaaatgtactttcaattggctgtgaagcacacataatttataattatgtcctaacaagctgcattattctgccatccagaacagaacatatagttttcaacatataaaaaaattgcaaaaaatgaaattaaactacattttataaaagtaatatttaatattaagagatttaaatttaggatcatgtgctttctcttttatgttcctctaaatgtttgaaactttataaagcaaatgttcaaaataatttaagggttctgtg

SEQ ID NO: 171184 - DNA, 551 bp, Homo sapiens
caagcagcttcaccagctgggagcaaggaatgctgcagtgcttggaagcttggagacaccaggaaccacagggctccaaagagggagtcacagccctggcttggggagctcccaggtctgagacccctgaagggccatagctcatctatcctttcctttaccggcaacagggtgagcaaggagcatgtttaagccctgtgtgtgttacagcaastcttttagctttgccattcagcaggttccaagttcttctcctgcaaccaggaagaatgaggtatgtagacaagtggagggtgagcagatggagatgaactttattgagcaatagaacagctcagagaatacctacattgggcagcttttctccatagccagggtgtccttacaagtgttcagctcctagcagagagggtggctcctctctgcaggcaggtcatcccaacaagtgttcttttctcaggagagagggtagctcctctctgcaactggtcattctgacaagtgttcagctatcatcagagagggtagctcctctctgcagcttgtcatca

SEQ ID NO: 171185 - DNA, 551 bp, Homo sapiens
caagcagcttcaccagctgggagcaaggaatgctgcagtgcttggaagcttggagacaccaggaaccacagggctccaaagagggagtcacagccctggcttggggagctcccaggtctgagacccctgaagggccatagctcatctatcctttcctttaccggcaacagggtgagcaaggagcatgtttaagccctgtgtgtgttacagcaactcttttagctttgccattcagcaggttccaagttcttctcctgcaaccaggaagaatgaggtatgtagacaagtggagggtgagcagatggagatgaactttattgagcaatagaacagctcagagaatacctacattgggcagcttttctccatagccagggtgtccttacaagtgttcagctcctagcagagagggtggctcctctctgcaggcaggtcatcccaacaagtgttcwtttctcaggagagagggtagctcctctctgcaactggtcattctgacaagtgttcagctatcatcagagagggtagctcctctctgcagcttgtcatca

SEQ ID NO: 171186 - DNA, 578 bp, Homo sapiens
ggcagcccaaattgactaataaaccaatcatgatctctcttctaaatatttttacatttgtacccttgctctccaaatttcatttatactagtcttctatcatcctctttccctccatagaccatggtgcacgcgtgcacacacacacacacacacacacactcacagaatgtatccattcattgatgcagagggtatatctgtcttactctcttttctatcccatatataatagaatgttaacacatagtaatggttcatagtatgtgtttctttactgtcagatatcctargcaaagttggaatgtatgccaatatatttgtggttttacctaaacatggagtttgaggtggctgcataggttaaatttctatggcattctaagccacatagccatgcaatgtgacttgggagtctaagtaataaaagggcatgcagctactgtcttgttcattggaacacccactcttggagtgctgagacaccatgtgagaagtctgactatcctaatgctgccatgtagagaggccacatagaaattcttctgttgagagtttcacctgaactctttatctca

SEQ ID NO: 171187 - DNA, 614 bp, Homo sapiens
tttattaaatcaatttaaaacatataatgataagcaggggaaaatagaagtagatacacataattaggaaagggtgcaatgatagaagaatgccataatttctgaaatagacaatgcccaatatttttagactttgccttactctcgctactttgacctttcctgatgaagttgtggttttgtggatcagcgtagaggtttgaacaagggtgctcagaaaacagaaggcgcctggaaccaaaatgttttgttatattagacaacatggggagcagcatgccttgccaataactgtagttcgcccatagccttatgagcgaatgtaaattttatttgcatttcttagaatactcatggsatcataatggctactgccatgtgataatcaatctatcatcttataaattttgagtgactgatctatagtaagtatatgaatattaggggctttttggtcatttcatctcttttacaactttgttcagcaacgatattatctacttaatttatcttggtttaatcatgtctcaattacccatttactttaattaatacctaacatctcttactgtgtactaatttacattgtctaagcataacatgtcttacagttt

SEQ ID NO: 171188 - DNA, 614 bp, Homo sapiens
tttattaaatcaatttaaaacatataatgataagcaggggaaaatagaagtagatacacataattaggaaagggtgcaatgatagaagaatgccataatttctgaaatagacaatgcccaatatttttagactttgccttactctcgctactttgacctttcctgatgaagttgtggttttgtggatcagcgtagaggtttgaacaagggtgctcagaaaacagaaggcgcctggaaccaaaatgttttgttatattagacaacatggggagcagcatgccttgccaataactgtagttcgcccatagccttatgagcgaatgtaaattttatttgcatttcttagaatactcatggcatcataatggctactgccatgtgataatcaatytatcatcttataaattttgagtgactgatctatagtaagtatatgaatattaggggctttttggtcatttcatctcttttacaactttgttcagcaacgatattatctacttaatttatcttggtttaatcatgtctcaattacccatttactttaattaatacctaacatctcttactgtgtactaatttacattgtctaagcataacatgtcttacagttt

SEQ ID NO: 171189 - DNA, 615 bp, Homo sapiens
ctgatttttccccaatatagaatgacttgttaaatgacagcagaattctaattcttaaatacataaaagaaaataaatgatagtgctgaaattttagtttatgtcatgcagcctgaggccataacatgaaaaatacatgaagacatagtgaaacaagcaaacaaaacaatgtgcatgtgagtataatgttggctgctatagcaaataattaccaaactaastggctgtcaataggaggctttattcttaacttatataaatagtccacagagattccaagttgttatttttggtggtgggcaggggagaagttatgttccttagtcattcagaatgaggctgatggattctgtgcgacctgcaatggggcaaaagttgctggcattcttgggctctatccctctagctagcagaaaaggaagaaattggataatcacacatgggagcttttgatgggtaagatctcgatgtagtgaacatcacttccactggcaagaactcagtaggagttcttgcatctcctatgcattcaatggaatgcatagtttcatctcctatgcattcagcggaatgcttaggagaccgggagatccaggaatatgagggagaaattgc

SEQ ID NO: 171190 - DNA, 615 bp, Homo sapiens
ctgatttttccccaatatagaatgacttgttaaatgacagcagaattctaattcttaaatacataaaagaaaataaatgatagtgctgaaattttagtttatgtcatgcagcctgaggccataacatgaaaaatacatgaagacatagtgaaacaagcaaacaaaacaatgtgcatgtgagtataatgttggctgctatagcaaataattaccaaactaactggctgtcaataggaggctttattcttaacttatataaatagtccacagagattccaagttgttatttttggtggtgggcaggggagaagttatgttccttagtcattcagaatgaggctgatggattctgtgcgacctgcaatggggyaaaagttgctggcattcttgggctctatccctctagctagcagaaaaggaagaaattggataatcacacatgggagcttttgatgggtaagatctcgatgtagtgaacatcacttccactggcaagaactcagtaggagttcttgcatctcctatgcattcaatggaatgcatagtttcatctcctatgcattcagcggaatgcttaggagaccgggagatccaggaatatgagggagaaattgc

SEQ ID NO: 171191 - DNA, 593 bp, Homo sapiens
tctgtgaggcaaagggtctgaaaaattcagattagtttttttatcttgtttgtctagaaaacttcagaaaacatatttatctcaattttatagatttatgcaattgatagatatttataactactgagcaatacrtctatcttagagatgagagtatgttaatattaactatttattgttcatcaggtcttgtgctagagacatttcctatgtttttcatttaatacttaagtaaatacaattattatatttaataattatgtaacagacccgaagatataggttttgtggggcttgcagtttatgcaatatatgtggccatgcattttgcaatttttttaaaaaattttgtatacaggaaggatccggtacaagtgagaagcactgaagcttaagcttctgtagcttcatggtaaatctgtctctaccaaaggtagagatgagaaaactgagtttttgaaaaggtaagtaattttcataataagtagtaaaactgactttaaatccacacacttctgaatctgtgcgccataatctctcaattcaaagcatggatgatttgaaaattgatctgaaaaggaagagaatgtgca

SEQ ID NO: 171192 - DNA, 450 bp, Homo sapiens
tcaacactcccaaatcagttgcatttctatacattaacaatgaacagttttaaaagaaaattatgaaaataattgcatttatawtagctttgaaaaaataaaatacttagcaatcaacttaagcaagtaggtaaaatacttttacaaagaaaactacaaaacattactgaggaattaaagaaaagaaagcataatgaaaacacatcctatgtatgtggattggaaatcaatattattaaaatgccagtacactacaaagcaatatatagattcagtgcaatccctatcaaaatcccagtgaatttttttgcagaaatagtaaaacccatctgatatgtgattatatatacagtaggccctccacatcaatcaaaaatactccaaaaaaaatccacaaagtttcaaaaagcaaaacttgaatttgttgtgcactaaacattacattgaatt

SEQ ID NO: 171193 - DNA, 609 bp, Homo sapiens
aatgtgagaattagtttttactttataaatattctgtattgttgttttatcattttttattccaaaatacttctttaaataggaaaaagaataagtacgaaaaatatttgacttctaattaagaataaaaaactgtctcatagtcttgtcaaactgctttaaaattcttccacctaactttttctctttttccttcactcaggatcaaactctcattaatcygacagttcttccagctttgtctgattacttccctattttctcttactcaagtattctcattaacaaaatctttgcacattttattttgtcttgatatctacttatcagaggatctagtctaacaatctaacttttggggtctacattctcagaaccactaggtataagaatcatatgttaatctatcacagcaaatattccaaaagtggtaagatgcccattgggaatataaaaattgtaggtatataaagtatgcattcattaaaacattagctgtcttctatgactatcaatcacttgattctcctggagaatgcagagatctctactgaacactcctccaggccagaaaaagtgcccttcctgcttcttccacacattaagacc

SEQ ID NO: 171194 - DNA, 609 bp, Homo sapiens
aatgtgagaattagtttttactttataaatattctgtattgttgttttatcattttttattccaaaatacttctttaaataggaaaaagaataagtacgaaaaatatttgacttctaattaagaataaaaaactgtctcatagtcttgtcaaactgctttaaaattcttccacctaactttttctctttttccttcactcaggatcaaactctcattaatccgacagttcttccagctttgtctgattacttccctattttctcttactcaagtattctcattaacaaaatctttgcacattttattttgtcttgatatctacttatcagaggatctagtctaacaatctaacttttggggtctacattctcagaaccactaggtataagaatcatatgttaatctatcacagcaaatattccaaaagtggtaagatgcccattgggaatataaaaattgtaggtatataaagtatgcattcattaaaacattagcygtcttctatgactatcaatcacttgattctcctggagaatgcagagatctctactgaacactcctccaggccagaaaaagtgcccttcctgcttcttccacacattaagacc

SEQ ID NO: 171195 - DNA, 652 bp, Homo sapiens
acatgttgaagaataaaactatatcctcatttctcagtgtataataaaaccaactcaagatggatcaaagacttaaatctaagacctgaaaccacaaaaattctagaaaataacatcrtaaaaacatctctggacattgtcttaggcaaataattcatgactaagacccgaaaagcaaatgcaacaaaaatcgataaatgggacctaaataaactaaaaagcttctgtacagcaaaagaaataatcagcagagtaaacagacaacccacagagtgggagaaaatactcacaaactatgcatctgaccaatgactagtatccagaatcaacaaagaacgcaaacaaatcagcaagaaaaaaacatataattccatcaagaagtaggcaaaggacatgaatagactattatcaaaagaagatatacaaacagccaacaaacatatttaaaaatgctcaccatcacgaatcatcagggaaatgcaaactaaaactgcaatgagataccgccttaccccggccaaaaaacaatagatgttggcatggatgtggtgaaaagggaacacttttgtactgctgatcaggaatgtaaattagttcaaccactgtggaaaacagtatggcaattccttaaagaaataaaagtagaactacc

SEQ ID NO: 171196 - DNA, 652 bp, Homo sapiens
acatgttgaagaataaaactatatcctcatttctcagtgtataataaaaccaactcaagatggatcaaagacttaaatctaagacctgaaaccacaaaaattctagaaaataacatcgtaaaaacatctctggacattgkcttaggcaaataattcatgactaagacccgaaaagcaaatgcaacaaaaatcgataaatgggacctaaataaactaaaaagcttctgtacagcaaaagaaataatcagcagagtaaacagacaacccacagagtgggagaaaatactcacaaactatgcatctgaccaatgactagtatccagaatcaacaaagaacgcaaacaaatcagcaagaaaaaaacatataattccatcaagaagtaggcaaaggacatgaatagactattatcaaaagaagatatacaaacagccaacaaacatatttaaaaatgctcaccatcacgaatcatcagggaaatgcaaactaaaactgcaatgagataccgccttaccccggccaaaaaacaatagatgttggcatggatgtggtgaaaagggaacacttttgtactgctgatcaggaatgtaaattagttcaaccactgtggaaaacagtatggcaattccttaaagaaataaaagtagaactacc

SEQ ID NO: 171197 - DNA, 652 bp, Homo sapiens
acatgttgaagaataaaactatatcctcatttctcagtgtataataaaaccaactcaagatggatcaaagacttaaatctaagacctgaaaccacaaaaattctagaaaataacatcgtaaaaacatctctggacattgtcttaggcaaataattcatgactaagacccgaaaagcaaatgcaacaaaaatcgataaatgggacctaaataaactaaaaagcttctgtacagcaaaagaaataatcagcagagtaaacagacaacccacagagtgggagaaaatactcacaaactatgcatctgaccaatgactagtatccagaatcaacaaagaacgcaaacaaatcagcaagaaaaaaacatataattccatcaagaagtaggcaaaggacatgaatagactattatcaaaagaagatatacraacagccaacaaacatatttaaaaatgctcaccatcacgaatcatcagggaaatgcaaactaaaactgcaatgagataccgccttaccccggccaaaaaacaatagatgttggcatggatgtggtgaaaagggaacacttttgtactgctgatcaggaatgtaaattagttcaaccactgtggaaaacagtatggcaattccttaaagaaataaaagtagaactacc

SEQ ID NO: 171198 - DNA, 560 bp, Homo sapiens
gcattgttacagaagaaaaggaaaggaaaaataagaagaaaggctgaatgacggaagacaatggccaggctaaaaagttaatattgacacaggcaatacaagcatctgcaaaaggaaaaaattgagaactacatctggaggctctgaaatagatactactaaacctcaaaagcaacctttaaaggtaaagaaaaattgagaaaaacctgaaatattcagctttcctgaagtcagaacagggaaaaagagaaatagctctgaaaatgcagaattcctggcttccaaaccaaaagcaaataaaatgtctcaaaayacacattttaaaatctttaaaagtttacaaagaaaacagaggtatagcaactttaagattataattagataaacaaggttatgttttacccatttcatagccacaaatgtcttaactgggtttttaattgctcaagatttagaaatctctactgaagaggaaaaggatactgaagatataaaagatgacgctctctttaaaataaggaagcattaaaaaaaacataaaaagaaatataatatgggaa

SEQ ID NO: 171199 - DNA, 558 bp, Homo sapiens
atatgtaacaaaattgggagtggagacatcaagaagtataaaatggatcaaatggtagttctacttttagttctttgaggaatcaccatactattttccacagtggttgcaccagtttacgttcctaacagcagtgtaaaagtgtccctttgcaccacagccaccccaacatctgtttgtttttgttttaatattttyattataaccattgcaatgccactactgggtatctagcaaggaaaagaagccattatatgaaaaagagacttgcacgtgtatgtttatagcagcacaattcccaattgcaaaaatatggaaccagcctaaatgcccatcaaccaacgagcggataaagaaaatgtggcatatattaatacatcccatggaatactactcagccataaaaaggaatgaaataatggcattcacagcaacctggatggtgttggagaccattttgtaagtgaagtaactcaggaatgaaaaaaaccaaacattgtatgttctcacttataagcaagagctaagctatgaggatgcaaaggcagaagaacgata

SEQ ID NO: 171200 - DNA, 570 bp, Homo sapiens
gaggtgtatttgctaattgattgcgtgtttcctctttgaactgaaatgagcaacagaagacacatcttatctatggcagctgtggcacaaatgacatgccgaatgtcaagcaaaaaattttgaaataatccaaataagatttgaccagaagaaatagtttgccttgacataaagccyttcctaaggagatcacaggctttcagtctctcaggctactggctaaaatgtcactactgatataatgcagcacccaggcatgagaaattggttcggtctgggaggataggccatgttactacatcaggacccattccctgggtttgttttacaaggttactggatccaaattagaaagagatacagatgggtttttgtgttgccagacgcagtagagcttaacttgtgaatataccaagatttaaaaccacaaaaggaaataaaaccccttagatgtgaggttggaattcattacaggtctgacttcgcttgattaatacagatccttatgagaaattagactgttttaagggaatcccattgttttttctcattaatacagatttgatgtga

SEQ ID NO: 171201 - DNA, 570 bp, Homo sapiens
gaggtgtatttgctaattgattgcgtgtttcctctttgaactgaaatgagcaacagaagacacatcttatctatggcagctgtggcacaaatgacatgccgaatgtcaagcaaaaaattttgaaataatccaaataagatttgaccagaagaaatagtttgccttgacataaagcccttcytaaggagatcacaggctttcagtctctcaggctactggctaaaatgtcactactgatataatgcagcacccaggcatgagaaattggttcggtctgggaggataggccatgttactacatcaggacccattccctgggtttgttttacaaggttactggatccaaattagaaagagatacagatgggtttttgtgttgccagacgcagtagagcttaacttgtgaatataccaagatttaaaaccacaaaaggaaataaaaccccttagatgtgaggttggaattcattacaggtctgacttcgcttgattaatacagatccttatgagaaattagactgttttaagggaatcccattgttttttctcattaatacagatttgatgtga

SEQ ID NO: 171202 - DNA, 544 bp, Homo sapiens
tcgcgtggtttggtttgaacgtgattcactcaaggatgttagtcaaaaggcttgtactgttcctagagttgaccttgaacttcctaatggtttcctccctcttgtaaatatctctgcccctttaaagctcttgctattcagatkaccaccccactcatcttgattgttgtcatcctccgacctcccagtcaatgtaatcttttccctgccccttccgatgcctgctggcaccatccttgaacttcatccttgggtgagttcaacatccatgttcgtgacctattcagtatcctgatctcttaatccttttaccttctcacgtccaacaactttctcctcaattaaaccaacacttctgagctcacactgtcaacactttaatcacccaaaaagtacttcatctttgaaatatgaaaatgtaataccccactgtccattcaccaacacctagcctttcagttccttgtgctaataccctatttgctgtaattcttcaacctcactgagaccactaatctgctaataccaccaatttgtctttatc

SEQ ID NO: 171203 - DNA, 523 bp, Homo sapiens
tgattctaggggctgcctgattcatgaatcattcattgctcaattaaactcctttaaatttaattcggctgaagtttttcttttatcacatatctgatgaaggacttgaattcagaatatatacataaatatatatataacctcttatagacaactcaataggcaaaatatttcaacagacacttcacaaaggaagataatactaatggccaataaacacattaaaagatactcaacataattcatcagagaaacatcaattaaaatcatgacataccaccaatacccagcagaatggctraaattaaagagactgacaatagcaagtcttgctgaggatatgaagcaaacagaacactcatgcattgctgattggtgtgtacaatggtacaaccactttggaaaacagtctggtggtttcttacatagttaagaatataccaacaatattactgagcaatttaactcttatgtacttacttaggggaaatgaaaatatgtccacacaaaacttgaatactaa

SEQ ID NO: 171204 - DNA, 337 bp, Homo sapiens
tttctgcatttattgtgatgatcatgtgatttttgtttttaaatctgtttatgttgtatgtcacatttattgacttgtggatgttaaaccctctctgcatccatggtatgaaacccacttggtcattgtggattatctttttgataagctgttggattcagttagctagtattttgttgaagatttttgcatctatgcgcatcagagatattggcctgaaattttctgtttttgttaygtttttttctggtttcagtattagggtaatactggtttcatagaatgatttagggaggattccctgtttctctatcttttggaatcctgtcaataggaa

SEQ ID NO: 171205 - DNA, 556 bp, Homo sapiens
tcaggctcacaaattaaatgggatatgacagggaaccaccatcatttctttaaatcttcaaaggtggagttatcatctactatttcccttgggacatggtaattttaataatttattagttttattggagggagccaatttccagcatttccacttagctttcaccactargatagttcttacctcacagatcagggaattatttaggggttttatgaacttcttgaaagcttcatggacaacatatccaatcattcttgaaatatcttgatattatttttccccaattcttggttacctaaaaataaaatgtcagagaccttgatgttttagagtctttccttaaaaagacagttttgagtgtagacagcctggaacttagctcactaatgctagtggaaaactctcagtatgaaatctgccttgccaagtgtgtgggagcttctctctggaacactaccccaggggccagggaaccacccccacccctacttccacaggggctgctgcttgcccttcacacagaaactcagagtatggacctgccaggcccagc

SEQ ID NO: 171206 - DNA, 436 bp, Homo sapiens
ttagaagtacagtttcacagtatgacacaaaatttggctatcactctcctagaaagttatcctaagaatatttaagagaagtwtgcaagaattcagaacatttggatctaagaaaatactaagatgcatagattacatatttcataacaaatcccagcagtctggtcagtaactcacaattaaatatcttaatatttctctaacaaatatataaagtgtaaaactgagcaggataaataaagactataaacagcctcctatgagttctagacaggtggtgacacaaaatgaattttcaccaaacactggaaaatgtatgtggtttacatacctttttaattgtcagaatgatagaaaagagaatgcagacctctgcatcaagagatgttcatgagagcatcatttattattcaattaaatgtatattaataatgga

SEQ ID NO: 171207 - DNA, 436 bp, Homo sapiens
ttagaagtacagtttcacagtatgacacaaaatttggctatcactctcctagaaagttatcctaagaatatttaagagaagtatgcaagaattcagaacatttggatctaagaaaatactaagatgcatagattacatatttcataacaaatcccagcagtctggtcagtaactcacaattaaatatcttaatatttctctaacaaatatataaagtgtaaaactgagcaggataaataaagactataaacagcctcctatgagttctagacaggtggtgacacaaaatgaattttcaccaaacactggaaaatrtatgtggtttacatacctttttaattgtcagaatgatagaaaagagaatgcagacctctgcatcaagagatgttcatgagagcatcatttattattcaattaaatgtatattaataatgga

SEQ ID NO: 171208 - DNA, 436 bp, Homo sapiens
ttagaagtacagtttcacagtatgacacaaaatttggctatcactctcctagaaagttatcctaagaatatttaagagaagtatgcaagaattcagaacatttggatctaagaaaatactaagatgcatagattacatatttcataacaaatcccagcagtctggtcagtaactcacaattaaatatcttaatatttctctaacaaatatataaagtgtaaaactgagcaggataaataaagactataaacagcctcctatgagttctagacaggtggtgacacaaaatgaattttcaccaaacactggaaaatgtatgtggtttacatacctttttaattgtcagaatgatagaaaagagaatgcagacctctgcatcaagagatgttcakgagagcatcatttattattcaattaaatgtatattaataatgga

SEQ ID NO: 171209 - DNA, 593 bp, Homo sapiens
tgcaagtatgttccacacagcaccatttatagtagcaaaaattacaacaacttaagtatccaaataggaagtatcttaaaaataaatatttatagaaatattataattaaagctaaaatttactggatcatttctgtctttggggaatcrtgctagaagaaaagactttagccattaaaaataatatttgtgaagaacatttaacaaaacagaaatatggtcataatataataatgagtgaaataaagcaacaagctatgacatatatacagtataattaagtttttataaatatatctttattcatctataaaatataattacatatgtttatatatttacaaaatggaggtttaaaacacatgtgcatatgcaaaagaaacacactggcaaccaatgtaacaaacactgacagtaataatccctggttggtataaggttgatatttagtatttaaattatattcttttatttttctataattttctgaaattccaacaaaaagatgttacttttatcctctcagttattaaaagagtaacttcaaacttgctagagcacaaatgtgtaaacaaaaagtggtttgagactgt

SEQ ID NO: 171210 - DNA, 399 bp, Homo sapiens
ctctcagcactcctattcagtatagtgctggaagttctagtcagtgcactaaaacaagaaaaataaataaacagcatgtaaattggaggggagacataatgtaaaatagtacagtcactctggaaaatggyttgacagtttttaaaaaaactgaacttgcaaataccgtaagacctagcaactgcattccttggtatttaccctagagaaattgagatttatgcttataaaaacatctgtaaacaaatgtttgtggcaaaattattagcaccagccaagaactggaaacaacccagtccttcaaggagtgactcattaaagaaactgtggtacatccatgtcattgaatatcagtgaacaataaaaaggaatgaactgttgatacatgtaggaacaagc

SEQ ID NO: 171211 - DNA, 399 bp, Homo sapiens
ctctcagcactcctattcagtatagtgctggaagttctagtcagtgcactaaaacaagaaaaataaataaacagcatgtaaattggaggggagacataatgtaaaatagtacagtcactctggaaaatggcttgacagtttttaaaaaaactgaacttgcaaataccgtaagacctagcaactgcattccttggtatttaccctagagaaattgagatttatgcttataaaaacatctgtaaacaaatgtttgtggcaaaattattagcaccagccaagaactggaaacaacccagtccttcaaggagtgactcattaaagaaactgtggtacatccatgtcattgaatatcartgaacaataaaaaggaatgaactgttgatacatgtaggaacaagc

SEQ ID NO: 171212 - DNA, 459 bp, Homo sapiens
acaaaggttacactctgtatcttttcattcatgtaacattcttgaaatgacaaaattatagaaatggcaaacatattagagttatcaggaggggagtgaggtgggagggaagtgggtctgtaaaagagcagcatgagggatgtctgtggagacggaaatgttctatagcttgactatcaatgtckgtatcatagttgtgattttacaagattttgcctttgagataaacaaggagaagtgtatatgcagtctctctgtagtatttttcccaatcacatatgtatctacaattatatcccccaaaaattaattaaaaatgatttttaaatgcagtcatatacttttatttatggaaaattaaatacatctgtatacccatatgtgtaatcaggtggtccagatatatgctcaccaagctgttgacagtaattttccttgggtgtagtatttcaggagatt

SEQ ID NO: 171213 - DNA, 459 bp, Homo sapiens
acaaaggttacactctgtatcttttcattcatgtaacattcttgaaatgacaaaattatagaaatggcaaacatattagagttatcaggaggggagtgaggtgggagggaagtgggtctgtaaaagagcagcatgagggatgtctgtggagacggaaatgttctatagcttgactatcaatgtctgtatcatagttgtgattttacaagattttgcctttgagataaacaaggagaagtgtatatgcagtctctctgtagtatttttcccaatcacatatgtatctacaattatatcccccmaaaattaattaaaaatgatttttaaatgcagtcatatacttttatttatggaaaattaaatacatctgtatacccatatgtgtaatcaggtggtccagatatatgctcaccaagctgttgacagtaattttccttgggtgtagtatttcaggagatt

SEQ ID NO: 171214 - DNA, 601 bp, Homo sapiens
cttttaaatgttatatgagtaatgtgcataatgcataaatatattcttactgtaaaataatataagtagaaattaaaagcaaaatattctgccagataaaatctcctcccaaggataataattattagcattttggcttatatccttccagtcccaattctataattgcatacaattttgtattgtgtatatgtgaatatatacatcttttcagaatcacttacaataaatagaattatagccaacctttgtaacttctttattcaaaaatatgacttgataatatttctatgtctgcaaatacttataactacttaattttttaaccagagcatgrttgttcataattaacctaattcattcctataggattggattattttctatttttgactgttataaataatgccacataagcatccttgctaattgttttgcagatagagaaatacttctgtagaatagatggttagagatgaaatttctagggcaaaggggttattcatttcaaaacttgaaagaagctaccaaattgtccactaaaaaagtagacaaaaatatataccttccaactgtgtatgtatttgtttcaaaacatact

SEQ ID NO: 171215 - DNA, 511 bp, Homo sapiens
ttgtaacttctttattcaaaaatatgacttgataatatttctatgtctgcaaatacttataactacttaattttttaaccagagcatgattgttcataattaacctaattcattcctataggattggattattttctatttttgactgttataaataatgccacataagcatycttgctaattgttttgcagatagagaaatacttctgtagaatagatggttagagatgaaatttctagggcaaaggggttattcatttcaaaacttgaaagaagctaccaaattgtccactaaaaaagtagacaaaaatatataccttccaactgtgtatgtatttgtttcaaaacatactaacacataacactatcaatccaatttttattttaattttaaaatttttaatcaagaatattcaaagataaactacattaagatattttttcatacccaataagacaaaaaaattattggcttcattttacttttctcctaccctactcaaaccaccct

SEQ ID NO: 171216 - DNA, 403 bp, Homo sapiens
gcttcacttatatgaagagggaaattgaacattcatgaatcattgaactctcagagaaacaaaactgttaggccaatwagctatgctctatgttcacctgcgtttccactcagaacattcttccagctctccatcatctcctgcaaatctctttctcactagccatcactggcctgcatgttctttaaatgtcaccttagtcccccctctttcctagctccccctgtgagatggcagcttgatttcagactgttgtgctgggtcttgattaatatccctttgaggtggtgtttttgtaaatacctccatgaaaaggccacagggccatgacaccaatgatggctttggtttccttacaactttagataccaattgaatatgtgttcttttgctggttaactaa

SEQ ID NO: 171217 - DNA, 428 bp, Homo sapiens
cttcacttatatgaagagggaaattgaacattcatgaatcattgaactctcagagaaacaaaactgttaggccaattagctatgctctatgttcacctgcgtttccactcagaacattcttccagctctccatcatctcctgcaaatctctttctcactagccatcactggcctgcatgttctttaaatgtcaccttagtcccccctctttcctagctccccctgtgagatggcagcttgatttcagactgttgtgctgggtcttgrttaatatccctttgaggtggtgtttttgtaaatacctccatgaaaaggccacagggccatgacaccaatgatggctttggtttccttacaactttagataccaattgaatatgtgttcttttgctggttaactaacaaacatagggttgacagtcatatgg

SEQ ID NO: 171218 - DNA, 370 bp, Homo sapiens
ccttgcttgtagcatcttgctgaaggtattcacagaagactggtgccagacttatgtctgagcaaactaaaacatcctgtgtcctctttgtcagtacaaagaaatgagtagactctgctgtggagcagatgtaggtcagacagaaaagatagcaaggatgatataatcttaggtcctgtccaatatggctacctggaaaagagtaggtscctagttgtgagaagttccaggtgagccctgaaatcctaggggctgaagaatgcatttcaagggatcacccaaaatagacatacatctacccaggtcaagagaactgcaggagagggaacctgagtgatggaagctgccaaatctccactgaaaaaagctt

SEQ ID NO: 171219 - DNA, 653 bp, Homo sapiens
gcatggtggcccacgcttataatcccagcactttgggaggccgaggtgggcggatcacctgaagtcaggagttcgagaccagcctggccaacatggtgaaactccgtctctactaaaaatacaaaattagccgggcatggtggcacatgcctgtaatcccagctgcttgggaggctgaggcaagagaattgcttgaacttgggagatggaggttgcagtgagctgagatcatgccattgcactccagcctgggtgacaagagcaaaacgccatctcaaaaaataaataaataaaataaaataaaataaattttaaaatgttaaggactgttacttttcaggaaatggttctatgctaatgaaatgaatcaaaagtgtttggagatgaaaagaattctaatatgccatccagtcamatctcacacctatttctcagtttcctctatgctcagaccctgtttaacactttagaacaagggtacccactgcctcacaaggcaccatatcttgctgttagaaagctagcgttatcacactgaactgaaatatgctaagatgcctgcagaaaccaggtgaataacagttccatgaagtctgccaggagtagtgaggattgtggcaaatgaacaagctcttgcctggactaaaagaata

SEQ ID NO: 171220 - DNA, 653 bp, Homo sapiens
gcatggtggcccacgcttataatcccagcactttgggaggccgaggtgggcggatcacctgaagtcaggagttcgagaccagcctggccaacatggtgaaactccgtctctactaaaaatacaaaattagccgggcatggtggcacatgcctgtaatcccagctgcttgggaggctgaggcaagagaattgcttgaacttgggagatggaggttgcagtgagctgagatcatgccattgcactccagcctgggtgacaagagcaaaacgccatctcaaaaaataaataaataaaataaaataaaataaattttaaaatgttaaggactgttacttttcaggaaatggttctatgctaatgaaatgaatcaaaagtgtttggagatgaaaagaattctaatatgccatccagtcaaatctcacrcctatttctcagtttcctctatgctcagaccctgtttaacactttagaacaagggtacccactgcctcacaaggcaccatatcttgctgttagaaagctagcgttatcacactgaactgaaatatgctaagatgcctgcagaaaccaggtgaataacagttccatgaagtctgccaggagtagtgaggattgtggcaaatgaacaagctcttgcctggactaaaagaata

SEQ ID NO: 171221 - DNA, 653 bp, Homo sapiens
gcatggtggcccacgcttataatcccagcactttgggaggccgaggtgggcggatcacctgaagtcaggagttcgagaccagcctggccaacatggtgaaactccgtctctactaaaaatacaaaattagccgggcatggtggcacatgcctgtaatcccagctgcttgggaggctgaggcaagagaattgcttgaacttgggagatggaggttgcagtgagctgagatcatgccattgcactccagcctgggtgacaagagcaaaacgccatctcaaaaaataaataaataaaataaaataaaataaattttaaaatgttaaggactgttacttttcaggaaatggttctatgctaatgaaatgaatcaaaagtgtttggagatgaaaagaattctaatatgccatccagtcaaatctcacacctatttctcagtttcctctatgctcagaccctgtttaacactttagaacaagggtacccactgcctcacaaggcaccatatcttgctgttagaaagctrgcgttatcacactgaactgaaatatgctaagatgcctgcagaaaccaggtgaataacagttccatgaagtctgccaggagtagtgaggattgtggcaaatgaacaagctcttgcctggactaaaagaata

SEQ ID NO: 171222 - DNA, 581 bp, Homo sapiens
taggccctgcccaggcagcctcggaccccctcctctgccctgcctcctgatccctgtcctgcactgagcaggtcttcggtggactttatgcgcagccacctcaggatgaaaataccacgtctgcctcctgctgaggtccagcccaggaaaggaagaaggggaacgaaagatgccaatgcgattgcttttaaatcacctcattactaaaagaatcctcctttacctacggcactcagatcatcaagccctcccaaatcacttttcttttttcaaaaagtaaaaacccaaggccgtcttcccagtgaagccgagtcttggggcatcccgtcattcgtcccccgcgcacgggtccttccctccctgggcgccgcagttcggagcaggccgagggggccgggctgcagggccgcgccgggccagaagggcgcgccctgggcagcgcggacgcacgcagccggctcctcccgcgccccgctgcaccccggcagggagttcgcccccgctaatgtttaacctcccgaatcgctgatccctcggactscagccaagctacccacccgccccgctcccgggacgaattc

SEQ ID NO: 171223 - DNA, 595 bp, Homo sapiens
agggaggtcacccacaatgtcccactagggcaaaggatgacacttgctgggccctccccaaccttcaccccaggccccccaaactcagagctggttctgtagagaattccagagtaaactctaagcatcctacatcctacctgaggcttccttcctggtgtggcagccctctgtggcccagcattgggcataaaaaacagactgacccctccagcaggcttctttgctggagcttctagctgcttctccaggtttttgaccatcgactgcaccagtgttcctggaaggtgaaaaagtggctgtgtcagtgggagaagcctagaaaatgaacatctcagttttgtggctcatgtccaggctccagtgtggayagagggaatgagcagaagggccaggaggaagaaggctgagcaaccacaaaaaaggagacagagaaggccaggccaacaggtacccagtgaacagaggcttggcatattctgaaaatgtgactgtgcaaacttaatgacatggctagtgacagaggcttaggaagctgtgcttccctctaatgagaggctgaggcaggacctctgctcagtgtggggaatgaact

SEQ ID NO: 171224 - DNA, 589 bp, Homo sapiens
cagcccactcacccaaaggtgccagctcacctgagccctggccagggggctgggcattctcctccgaggtctctgtgtcagaccagtcccagtcatcctygggccggggcaccatcctggaaggaacttttgggggctgtagagacacacgctgcacacggtctccctctgagtcctcttcagaactgaacgggggcgtgctgccacgaggaggagaagaaatgagggatgcatgggccagaaagaaaacttcaaaagccaaacttcaccacgcttcaagctggtttggtttgctcagggccagccctgctccctccctcaggcccagaagacagccaggagacccctggagtgcagcagccacaccagtatctcccttagtagagccctgcccatctgaggatccagcccctctggagggggaacgggtttgggggaggagatgggtaaggggagggtgggtttgtcttggctgggagcacaggttctcaagtccagagctcagactggaccccacctgaggcaccttctattcacatgtgtctgcccccctcctatctgcagaagcctggagggagcccagaacagg

SEQ ID NO: 171225 - DNA, 539 bp, Homo sapiens
tttgatgtggagaattcctctttacagaagttttccagctagtaaatgtcaaaggaataacaaacagactattaaacttttagagatttctaattaatagattgggctgggcgcagtggctcacacctgtattcccagcactttgggatgccgaggagggcgaatcacaaggtcaggagttcaagaccagcctggccaatatggtgaaaccccgtctctactaaaaatacaaaaaattagctgggcatagtggtgggcgcctataatcccagctactggggaggctgaggcagaagaatcacttgaacccgggaggcggaggttgcagtgagccgagatcrcaccactgcactccagcccaggtgacagtgcaagactctgtctcaaaaaaaaaaaaaaaaaaagatggatttaggcaatggtcatcaatgtctatcaccaatgccatcaccaacatcacaagaaaggagaaaaagatattctgtgtctcctgatggagatgcacaaaaccaccaatgaagagtcctgccaaaacacaa

SEQ ID NO: 171226 - DNA, 488 bp, Homo sapiens
  misc_feature (1)...(488): n = A,T,C or G
ttagcaaaataaagtatacacccatcaatgaaaaaccatgcaaccatgaaaaagaatgaagggactggccgtggtggctcatgcctgtaatctcagcattttgggaggctgcggtggggggatcacttgaggtcagcagtttgagaccagcctggccaatgtggtgaaaccccgtctctactaaaaataaaaaaaattagaaaggtgtggtggcgggcacctgtaatcccagctactcgggaatctgaggcagtagaatcacttgaacatgggatatggagatttcagtgagccaagatcgccccattgcactccagcctaggcaacaagagcaaaactctgtatcaaaagkaaataaataaatgaaggggtactacatgtacagacataaaacaatctccattgtattttattaagtgtgggacaaaagacaaaatggcacaaattnnnnnnnnnnnnnnnnnnnnnnnnnnnnnnnnnnnnnnnnn

SEQ ID NO: 171227 - DNA, 510 bp, Homo sapiens
aatgcaacagtactaagaggtggggcttttaggaggtggtgaggccrccctcatgaatgtgattagcgccttatgaaagggatagagggggcgagtttaccccttccatctcttccaccatgtgaggatgcagcaagaggcaccatcttggaagcacagagcagcctccaccagacaccaagatcaaatcttgatcttgaacttctcagcctccagaaccttgagaaaataaatttctggtttttataaattactgagtctcaactattttgttatggcggcacaaatgaacggagacaagcagttatggtaaaatgcacatccgtataactgctacccaggtcaggaaagagaacattgctgaaagggccagcttcagggacttgcagtggcacaggaccccaagctcagaagccaacatgctccactctcctcctccttcctgcttgacatttaatgccctgcaatcaccatcatgtaattctcaataattttatctttgaatttgtg

SEQ ID NO: 171228 - DNA, 604 bp, Homo sapiens
acaatattcatggcgtgaagatcggatgggattttttgttgttgtttttaaacaacaacaacaggggcctccttatggtaaacacagtaaagagtttcactgtgctgttttccataaagacttcaatggagaccaatggcattgtaccaaggtgcaagtcagtaaaaaacagttgtgcagagaacaagttggraatttaagttcaacacagatttgaaaatcacactttacaaacattccttaaaatgtttattgagtcatctctcccaatccatgtttcatcactcagtgagtgattatatgccttctcgatgtactctaattacaatgaggaaatgacatcaaccatatggaggacttacatttccaaaagcaaatttcaacactgttaatgactgaagaggtacagtcttacagtagcagcatgataactttaggctggagttagtaaataatttctcaaaagagaattgttagatattacaggattggttgcaagacaggttgtaatatttacttacagaagtcttaaacattgatagtaatggccctatagcaaaatgaagagatgtactagatcgttttttgaagaccctctccactg

SEQ ID NO: 171229 - DNA, 583 bp, Homo sapiens
ttggcctcccaaagtgctgggatttacagatgtgagccaacatgctcagctcatttgatagaacttgtaagtgaagcaaaacatgctgagaattttatttgtgggaaggytacatacaaactcaatttgctaatagacagaggaacattcaggttttctatttctttatctgtcagtttcattaagatgttgatatggtttggatctgtgtccctccccaattcccatgttgaattgtaatccccattgttggaggtggggcctggtgggaggtgactggatcataagggcagtttcttatgaatggtttagcaccgtcccctggctgttctcatgacagtgacttctcacaagatctggttgtttaaaagtgtgtaacgcttcccctttccctctctctctcgcttctgttcctgccacataagacaactgctccggcttttccttccactatgattggaagcttcctgaggcctccccagaagtagaagccactacgcttcctgtacagcctgcagaaccatgagccaactaaacctcttctctttataaatatcccagtcttaggtatttctttatagca

SEQ ID NO: 171230 - DNA, 583 bp, Homo sapiens
ttggcctcccaaagtgctgggatttacagatgtgagccaacatgctcagctcatttgatagaacttgtaagtgaagcaaaacatgctgagaattttatttgtgggaaggctacatacaaactcaatttgctaatagacagaggaacattcaggttttctatttctttatctgtcagtttcattaagatgttgatatggtttggatctgtgtccctccccaattcccatgttgaattgtaatccccattgttggaggtggggcctggtgggaggtgactggatcataagggcagtttcttatgaatggtttagcaccgtcccctggctgttctcatgacagtgacttctcacaagatctggttgtttaaaagtgtgtaacgcttcccctttccctctctctctcgcttctgttcctgccacataagacaactgctccggcttttccttccactatgaytggaagcttcctgaggcctccccagaagtagaagccactacgcttcctgtacagcctgcagaaccatgagccaactaaacctcttctctttataaatatcccagtcttaggtatttctttatagca

SEQ ID NO: 171231 - DNA, 595 bp, Homo sapiens
ttataaccggtgataaaagaggaagttggatagtaactttatatttaagcttaaacctgaagtgaaagagccagccacgatgagagagaagataagagcattaaacacagaagcaatagtatgtgccaaagtcttgaggcaaaaaatattttggtgtttgacaaactaaaaaatagttctatatagctatagtatagggagtgagagtgaaagtggtaggggatgcagtcaaagagataggaagagggcaggctatgcagrgcattgtatgcaatgataatgtattacattttatgtggaattggaggccattgaaagattttatgctggaaagtggattaacctgtttcatgttttgagatcactctggctattctgtggaggatccaatgttaaagtcaaaagtccctggaatcaggtagaccagttcagagtctattgtggcttgagcttgtgtgatgatagtagagatggagataagtggatggtttcaaaatatattctggtgagagaacaggagatgtgtttttttgagtaagcaaagtggctctgcagaagatcacatacataactggacaagcgactttaacttgta

SEQ ID NO: 171232 - DNA, 392 bp, Homo sapiens
ggaataaaggttaaattccttaacctggccttaaagaccacatgcaatgtgttggcatctacttctgtagcctcatctcctgtcaaacataatgttctctctacaattttgtcttgcgaatactttccatagttgttatttttactatttgattgattagtcaattaaatatatatttttctcattggagactttgagtttcctgatggtagggagaggtgatcttttttatatctcacataacaagcactgtgctttgcagacctcaagtacttaataaatatttgttaaatgaataaasagtttagtaggtaggcctgttttttaactgtgtattgagattgactttttaagaggtgcaataaaggcacaaaaaccataaatattaatgg

SEQ ID NO: 171233 - DNA, 392 bp, Homo sapiens
ggaataaaggttaaattccttaacctggccttaaagaccacatgcaatgtgttggcatctacttctgtagcctcatctcctgtcaaacataatgttctctctacaattttgtcttgcgaatactttccatagttgttatttttactatttgattgattagtcaattaaatatatatttttctcattggagactttgagtttcctgatggtagggagaggtgatcttttttatatctcacataacaagcactgtgctttgcagacctcaagtacttaataaatatttgttaaatgaataaacagtttagtaggtagrcctgttttttaactgtgtattgagattgactttttaagaggtgcaataaaggcacaaaaaccataaatattaatgg

SEQ ID NO: 171234 - DNA, 526 bp, Homo sapiens
ttgatttgcatatctctgctgactagtgatgttgcacatcttttcctatatctgttgatcacttgtatgtattctttggaaaaaaatgtctgttcaggttctttgctcattttttaattgagttatttgktttttttttttctaatgacttgtgtcagtttttaaaatgtattagatattaatccttcatcagatatatggtttgcatatatattctcttattttatagcttatcttttcatttcattgattgtttgctgtgaaaaaaaatccatcattaaggggaaataaacaagggtgatttttttctcactttgtgttgatttttttttgagacataatttgagttgtacatcactaattagaattgagataaaaagatggaagaaagccacttccacagcacgttttatatgaactcgcaggaagcagaagtatgcagaagttagaagaggcaccttgagctcaaaatgaaaaaattctgtcttttaaacatcactgcttgtcttcatcagaaaccaaatgt

SEQ ID NO: 171235 - DNA, 590 bp, Homo sapiens
caagtaagaaagaagtggactggagatagagctgccatctattgtccacactgtgcattcacctcctactatgaccctagtgcttctgcctatgtcctcccttaggatattttcagcaccgcaacaagagcaaaccttttaacatagaagttaggtcacctcactcccctgtctgaaacctgccaagggctccctgttacactcaggtcaaaagtcaacatactttcaaggttccgcaggccctccatgacctgccagccccttccccatgggctttctggtctcttattttaaactctcctggccccttcattccatggycccttcgttccattcccaagtgttatctggcttacttatctgccaatataccggggagcctcttgccttagcccttctcagtggcaaggctattctctctaaaatattattttcccagaaagtaccatgtctttctctctttcctctctcagatctgtgcttaaaggttgaccatgcatcaagtgttggttgaccatattttagtaactcaattctctaaccaccaaaaatgggactttttagttctatgttctgctttatcttactcc

SEQ ID NO: 171236 - DNA, 585 bp, Homo sapiens
tcttagcagtgcttaacatttaaatgttaccatttaaatgatttttgagaaatccttgtacttttctccaataattacaaaacttgttatggcaacaatgcctttctggattagagaacacaaaaaacttattaccatgatattctttatattatttattgttccatattaaaactggataggctagacaggggctaccatgaatttgtgcagaaatgatatagtctgagttttcttatatgcagaaagataataaaacacagactcacttcttatgaacccaaattcatcttgaaragactacatatctcctttgtattctcagtatacattacagccattattctagcaatccatcactctgagtttcttagttggaaaatcagttttccaagaagtatttttccactcagctctgatactttaaagcctcagaaaacaacctaaggataaatcaaatgtgtcctgagtctgacataaaacaaaaatcagttctagaataaaagtcatctagtcaaagaaagtctggcttttacacattcttaaaaaatattcttttaaaggtctaaaatgacttgtaaatga

SEQ ID NO: 171237 - DNA, 585 bp, Homo sapiens
tcttagcagtgcttaacatttaaatgttaccatttaaatgatttttgagaaatccttgtacttttctccaataattacaaaacttgttatggcaacaatgcctttctggattagagaacacaaaaaacttattaccatgatattctttatattatttattgttccatattaaaactggataggctagacaggggctaccatgaatttgtgcagaaatgatatagtctgagttttcttatatgcagaaagataataaaacacagactcacttcttatgaacccaaattcatcttgaagagactacatatctcctttgtattctcagtatayattacagccattattctagcaatccatcactctgagtttcttagttggaaaatcagttttccaagaagtatttttccactcagctctgatactttaaagcctcagaaaacaacctaaggataaatcaaatgtgtcctgagtctgacataaaacaaaaatcagttctagaataaaagtcatctagtcaaagaaagtctggcttttacacattcttaaaaaatattcttttaaaggtctaaaatgacttgtaaatga

SEQ ID NO: 171238 - DNA, 561 bp, Homo sapiens
ttgagtttactaatttcaagctttactaactcgttgattgttactacagtttagatgccattaaaactatgaatgtttatcatgggatcctgccaagtttgactgcacttaaaccgcacagttgcattagyattttgtatcattatcattttttccccatttcattcatgaaaatatcaatttgggatgcctatccttcaaaaagtactgtttcttagggatattattttttggattgagtttgctgcactcctccactttaaactgaataggttgggacattaatccttgtcttctaggctttaagaactcaatggaagcccgtcacccgggccgtatgctcaggagaacctgagaagccctttcccactagtgaaaagaatatgaaatgtggtccccaagactgacagctgatgtgcctcagggaaaccccaggactcttgccttaacccatgttgtgtggatgggtcttgaggccatttttatcttgatgttttaatcacctgatgtcttgatggaatgggcaatgactcattcatcttggtctgtagccctgaattt

SEQ ID NO: 171239 - DNA, 405 bp, Homo sapiens
tacaacttgtaaatgctggagtgaaggtatgagctcagcactgttggactccaaagtcagttccagttccactgttccatgttgttgacaggttgcccagtgtgagggctttgtcttgcactcacccaatgccatccaagagctgcatgtgtaaaatttaaatgtatttcttttaaatggcccaaagcatgattgtccgctgattgtgctctctggtgctgaccacacgccttctgcctggattccagaccattgcttcttagatacctcttttctgctttctgcctgygcttttgggttccaggatgctttttgttttaattaattaattaatttatttatgttttactgctgtctccttcttcatgcttattacctgcctgaactgtacgctgtctatgtctt

SEQ ID NO: 171240 - DNA, 548 bp, Homo sapiens
ctcttgaataactgcaaccaaaaaaagtagaaattagaggaacaaaataataaaacgttggaaaactattaaccaaagcatagaactggcaaataaaagtcactcattgctttgagatgaagagtccagaatcaattgaagatataggtgtcactagaaggaagctgatgatgagcaaattcctgagcagcagcttcagccttctgcaaaaataagccatcagcatgtgcctagagacatttgtttatttactaacaaacctattatgtctcaaacactgggctagggactggtgctgcaagagtttacaagataaaatcctcaggaaatttgtcccctttcctgggggttagaattttcagcaatwacagtaaagaagtgaggacttcagatggtagattgaacacaaaaggcagttgtctagcacatcaagttcttcaaaacaatatcaaagaagtaactatgctgaatccaataaattaagttataagcatttcctttttctatatttccccaactatgaaccctcacatatttcaatgtgacag

SEQ ID NO: 171241 - DNA, 189 bp, Homo sapiens
gaccagccaaagcaaaaggacttatcactgctgctataactcaattaacccctatatccagggtttccaatctgcttttttactgcttttaaataaaaatggttagtcaaggatcaaacatttgggaaattctcgtgtgtgtgtgtgtgtgggtgtgtgtgkgtgtgtgcgcgtgtgtgtcagagacag

SEQ ID NO: 171242 - DNA, 594 bp, Homo sapiens
aatcacactccaagggattcctgaaatacactttttttttttttcttttgagacggagtcttgctctgtcaccaggctggagtgcagtggtgcgatctcagctaactgcagcttccacctcgcaggttcaagtgattctcctgccttagcctcccaagtagctgggactacaggcacgtgccaccatgcccagctaatttgtgtattttyagtagcgacagggtttcaccatgttggccaggatggtctcaatctcttgacctcgggatcctcccgcctcagcctcccaaagtgctgggattacaagtgtgagccactgtgcccggccacatatttttttttaatcttctatcatataatcattaggtcgttgagcctttcaaaatcttctgtttgaaaacatccccttcaactctgtcgttgccatgtgaaaagatcaaattgaataatctactacccagtgtctctttatgtatgaaggctttaagccaaacacaggataccattgtcttaatcttcctgctgtataacaaaattacttaaactgggtaattaataaacaatagaagttttttgctcacagttgtggaggtt

SEQ ID NO: 171243 - DNA, 414 bp, Homo sapiens
gtggcacatgatatcgctgtttatcttccccatttctgaccttgggttctgagagtgtcattcatccccataatcagggactttggtgccctcttaacagtgtttgtttggttccttgctatttgaatattctttttcwtgatgcattgctagaagccaactcacaactggcctgttctgccatccctgccctctgggaacctgccagctgtccccagtcatgggctggcctcttttttgttctgagggagttttaaaagagcagatggctttccccagccatttcccctcaccttggcttatcttccatctttggggatagccccgtctcctgggtctcagtagggagccccatgtagccatggggcctctgatagatgtgcacacctgcctccttggccccatggctgtcag

SEQ ID NO: 171244 - DNA, 448 bp, Homo sapiens
ctccccacaatcctcctccaactcctcctctctgcatgcgcctcagagtcggtaccaagaactggaagtagccctgaactcaagctccgcaataatcaatcaactaaatgaaaacatagaatcattggtaagagtccagtggrgtcccgtgattccacgctgccaatcctggcctttagttccccttggggccctgaagaaaggagctgggggcccctggtgccaaggacaaatggggagctggagcacccaggcctcacctggagggaccccagagcaaggagcacacagcatggctcttctgtcactgccctctttgccgactctcttctccagacaccccactccaatccttgccacacatgccctggggttgtcacctctcagggaagcactagcctgactggttgtcaggggccccgtatttctgccctgactcagtccctaa

SEQ ID NO: 171245 - DNA, 448 bp, Homo sapiens
ctccccacaatcctcctccaactcctcctctctgcatgcgcctcagagtcggtaccaagaactggaagtagccctgaactcaagctccgcaataatcaatcaactaaatgaaaacatagaatcattggtaagagtccagtggggtcccgtgattccacgctgccaatcctggccttyagttccccttggggccctgaagaaaggagctgggggcccctggtgccaaggacaaatggggagctggagcacccaggcctcacctggagggaccccagagcaaggagcacacagcatggctcttctgtcactgccctctttgccgactctcttctccagacaccccactccaatccttgccacacatgccctggggttgtcacctctcagggaagcactagcctgactggttgtcaggggccccgtatttctgccctgactcagtccctaa

SEQ ID NO: 171246 - DNA, 448 bp, Homo sapiens
ctccccacaatcctcctccaactcctcctctctgcatgcgcctcagagtcggtaccaagaactggaagtagccctgaactcaagctccgcaataatcaatcaactaaatgaaaacatagaatcattggtaagagtccagtggggtcccgtgattccacgctgccaatcctggcctttagttccccttggggccctgaagaaaggagctgggggcccctggtgccaaggacaaatggggagctggagcacccaggcctcacctggagggaccccagagcaaggagcayacagcatggctcttctgtcactgccctctttgccgactctcttctccagacaccccactccaatccttgccacacatgccctggggttgtcacctctcagggaagcactagcctgactggttgtcaggggccccgtatttctgccctgactcagtccctaa

SEQ ID NO: 171247 - DNA, 448 bp, Homo sapiens
ctccccacaatcctcctccaactcctcctctctgcatgcgcctcagagtcggtaccaagaactggaagtagccctgaactcaagctccgcaataatcaatcaactaaatgaaaacatagaatcattggtaagagtccagtggggtcccgtgattccacgctgccaatcctggcctttagttccccttggggccctgaagaaaggagctgggggcccctggtgccaaggacaaatggggagctggagcacccaggcctcacctggagggaccccagagcaaggagcacrcagcatggctcttctgtcactgccctctttgccgactctcttctccagacaccccactccaatccttgccacacatgccctggggttgtcacctctcagggaagcactagcctgactggttgtcaggggccccgtatttctgccctgactcagtccctaa

SEQ ID NO: 171248 - DNA, 449 bp, Homo sapiens
ccttaaaattttatgtgtcttgaaaactatagtattaagagtattgagactgtgaaaatgctggggacagttggcatgagataatcagtttttatttttatgaaattgyaatgtaactatgcaagtgtgtttattaaaggaacaaactaaaaagaagttacgggaattttaaaaagttgtgggatgaaaaagttatgggataaaaaatgctgtggaaaagttgtggcaaaagaagttgtgaaaaaaagtagaaaaatgttttatgaaaagtattttaaaaagttatgaaaaggaagttacgggatttttttttaagtcatgggataaaaataaaagcaggtctctgtcggcacaagcctggagaagtgggactggagacttcgcccccgccatggaccaaccaccccttcccagtcacccctttaccattagggtggcaagacaagatc

SEQ ID NO: 171249 - DNA, 449 bp, Homo sapiens
ccttaaaattttatgtgtcttgaaaactatagtattaagagtattgagactgtgaaaatgctggggacagttggcatgagataatcagtttttatttttatgaaattgtaatgtaactatgcaagtgtgtttattaaaggaacaaactaaaaagaagttacgggaattttaaaaagttgtgggatgaaaaagttatgggataaaraatgctgtggaaaagttgtggcaaaagaagttgtgaaaaaaagtagaaaaatgttttatgaaaagtattttaaaaagttatgaaaaggaagttacgggatttttttttaagtcatgggataaaaataaaagcaggtctctgtcggcacaagcctggagaagtgggactggagacttcgcccccgccatggaccaaccaccccttcccagtcacccctttaccattagggtggcaagacaagatc

SEQ ID NO: 171250 - DNA, 449 bp, Homo sapiens
ccttaaaattttatgtgtcttgaaaactatagtattaagagtattgagactgtgaaaatgctggggacagttggcatgagataatcagtttttatttttatgaaattgtaatgtaactatgcaagtgtgtttattaaaggaacaaactaaaaagaagttacgggaattttaaaaagttgtgggatgaaaaagttatgggataaaaaatgctgtggaaaagttgyggcaaaagaagttgtgaaaaaaagtagaaaaatgttttatgaaaagtattttaaaaagttatgaaaaggaagttacgggatttttttttaagtcatgggataaaaataaaagcaggtctctgtcggcacaagcctggagaagtgggactggagacttcgcccccgccatggaccaaccaccccttcccagtcacccctttaccattagggtggcaagacaagatc

SEQ ID NO: 171251 - DNA, 434 bp, Homo sapiens
tctagattaaaacagtccaatgagtgctccctcaaattaaaatagaccaaggcatatactgtaaaatttaaaatcaccaaaaagagagagagaaagagagagagtcctaaaagcttccagattttttaaaaggtcacattcaaatcacaatggtatgggacctctacagagcaatrttggaaactagaagacaacagaaaaatgccttcgacattctgaagaagagtcacttccaacccgaagttgatatcaaatcaaaatatcaatcagatgtgagggaaggataaagacactttgagacaggcaaaccatttacctccatgcactctttctcagaaagctgcttgaggatgtgctccaccaaaacaaattaaaaaaaaaaaaaaggtacctccccataaaaaaagtagcatgggatccaagaaacaggaaga

SEQ ID NO: 171252 - DNA, 510 bp, Homo sapiens
atacctccactctgccctcatcacctggcacatctcttcttcactccataagatcaagtatgcactgcagacccagggcactggggacacagctgtgaacagrtggataaggtctctgttccctggagctcccactctggaggaggccatggacagcaagcaaatagacagatggataaacaattcagaccaccatataaacaagaccagctacagagaggtgctttgaagaaaataaaaccggaagtgactagagtctactttccatggggtggtcagggaaggccttcctaaaaaggtgacatttaagctgtgataccagaatgacaaaaaggagccagtcatgtgaaggtgaaagggagaagatgtgagccaggcatgggatgcatgcctgttgtcctacctgctcaggagaatgtggagggaggatcctttgaacccaggagatcgaggctgcagtgagctctgattgcaccactgcactccagcctaggcgagagaatgagagac

SEQ ID NO: 171253 - DNA, 590 bp, Homo sapiens
gaattcttttttttggaaaaagtttttcttaatttcctgcattattaagatttttttttttwaaaaataagaaacatgtctaatatctttaaaaacacaaagcttttgtgccgggtgcagtggctcactcccgtaatcccagcactttgggaggcctaggcgggtggatcaccttaggtcaggagttcaagaccagcctggccaacatggtgaaaccccgtctctactaaaaatacaaaaactagccaggtgtggtcatgggtacctgcaatcccagctactcgggagactgacgcaggagaatcacttgaacctggaagccgaagttgcagtgagccaaggtcacaccactgcactgcagcctgggtgacagactgagactccatctcaaaaaaaaaaaaaagtaaaaaattaataaaaacacaaagctttcaatttaataagcactcaaagctctttactggtttaaagcatatacaaggcctatttttctagaatcacctggcctctctaagccttgcaaatgaaactgaatttctcacttgatacttggctatgacttgcaatcatgaaaaccaagaattgtgtta

SEQ ID NO: 171254 - DNA, 354 bp, Homo sapiens
ctgttatactcatagttatggcttgattacatggaaaggagacagattaaaatcagccaggggaagaaaggcatagtgctgggtccaggagagcaccaggcatggagtgtccattatcccttccccatgcagtcagagtgcattaccctcccggctttgctatgtgccaatacacatggagtattctcagccagtgaggctccctcmagcctcagtgttcagggtttttattggaacttcatcaaagaggcatgattgattgtccatgtggctgctctcagtttccagtctccagtccttttaggggtgacctaaagcctggactctaaatcacatagtcacttttcctggctt

SEQ ID NO: 171255 - DNA, 597 bp, Homo sapiens
cattcacttgaattatttctactctctaggaagcttgtctatcttctatgtgacaaaaaattgtttataaatttagcaaaagaatycaaggacagtaaaattaattcatagaaaagcattaacaaatttccctttaggtggcaaatgcggaaagcaacacttatgtacataagacattacttttacttatcatacttttgagctcttagctgaaatattatttttattgttattttgtctactcatagtaacgtttaaggacaatatttaaaatacttaagaactattatgagaaaccaatgtttataaaattgcagatacgtaaggtgagtctctgatttagtaagtttgtaagtttatttttaaaaagacccaagcctccatttatctccagtttctcttacaaatattattatttcccagaaaattatccagctttttatataagattcatctattgtattgccatttaaattactactttcataaaagtactgccccacctagtctctccaaaacagattaaaatgttttaaaaaatgcaaggagaaaaagaaagaaaataaaatgaatatttaaatactcaatttatgatgc

SEQ ID NO: 171256 - DNA, 597 bp, Homo sapiens
cattcacttgaattatttctactctctaggaagcttgtctatcttctatgtgacaaaaaattgtttataaatttagcaaaagaatccaaggacagtaaaattaattcatagaaaagcattaacaaatttccctttaggtggcaaatgcggaaagcaacacttatgtacataagacattacttttacttatcatacttttgagctcttagctgaaatattatttttattgttattttgtctactcatagtaacgtttaaggacaatatttaaaatayttaagaactattatgagaaaccaatgtttataaaattgcagatacgtaaggtgagtctctgatttagtaagtttgtaagtttatttttaaaaagacccaagcctccatttatctccagtttctcttacaaatattattatttcccagaaaattatccagctttttatataagattcatctattgtattgccatttaaattactactttcataaaagtactgccccacctagtctctccaaaacagattaaaatgttttaaaaaatgcaaggagaaaaagaaagaaaataaaatgaatatttaaatactcaatttatgatgc

SEQ ID NO: 171257 - DNA, 548 bp, Homo sapiens
taaatcctggttttctgttgctttcctcattttaagagagttcttaattcaatcttgtgaggaagtaggattaacatgcrcagttatgcctggagagtcaagaaacccgcatttctggatccccagcttagaccactgactcacagtttctagatacagaagctgcatttcagaccacaaccctaggtaatcacggcgcatgtggaccacactgcacattgtggacagcacaactccaagacaataatgagatcccaataattttgatacttccaagtaaagaacagaagtccattatttaaacttataattgttaaattgtttgactttgtaaatagtttttggaaactgtcccttcctgccctcttcctgtgtccttcttctctcttcacttccacacagcattctccctgaatacctcttttttgcatgttcttctgcctggagtcactaatccaatgtctttgttccccaggaattcatccttgattcatatattttatcactatttttggaccttcctattacatctgtcttcaactactgct

SEQ ID NO: 171258 - DNA, 548 bp, Homo sapiens
taaatcctggttttctgttgctttcctcattttaagagagttcttaattcaatcttgtgaggaagtaggattaacatgcacagttatgcctggagagtcaagaaacccgcatttctggatccccarcttagaccactgactcacagtttctagatacagaagctgcatttcagaccacaaccctaggtaatcacggcgcatgtggaccacactgcacattgtggacagcacaactccaagacaataatgagatcccaataattttgatacttccaagtaaagaacagaagtccattatttaaacttataattgttaaattgtttgactttgtaaatagtttttggaaactgtcccttcctgccctcttcctgtgtccttcttctctcttcacttccacacagcattctccctgaatacctcttttttgcatgttcttctgcctggagtcactaatccaatgtctttgttccccaggaattcatccttgattcatatattttatcactatttttggaccttcctattacatctgtcttcaactactgct

SEQ ID NO: 171259 - DNA, 623 bp, Homo sapiens
ttctctcatcttaatgtgattaastgctggaggaagtcacttagaggatttcagggccgattaaaaatatgtggccaggaggtggcagcagcaagcacgaactttacttcagtaggcatgaaggcagggaaagtacctcccagcatgatacctcgagagggtaaggtgtgggagccaccatctagaaaaggagtgggggaaggggactcctcggggtgaggggatcaagaggaggtttatgcatctaggcaaagttgctcagtagcctggcagggcacttctgagtcagaaagctccgaaggggagcagtggtttggaaattgctctagtcccatggttttatcgtatccatgggtatgagatacgggtatgggtagcagatattgggtgtagtattgcaggatataagaaaccggcagattctaaatggctaaaaatctgcttcactgggtgatagttaaaacaattggatgtgtgaaaatttgagtttggtactggtgggcttttgagtaaataaatggatctcaggctgctgtgaagaaataaataatctagtgaccaatatagacgtaccatatttatttggtgcatttatatgacagatgcctctgtgaggcaacact

SEQ ID NO: 171260 - DNA, 569 bp, Homo sapiens
cacaagcaaatctgacatcttccatgctgttcccatctgcttcagatattcatactggacagttttcaaatgacagcagatgtcccagctagaaaaaaaaatttaatcagctgaaaagtatgtcattacctagctaattttatagtttcagaagccagaaatggtattgcttttggttatcaccctgattcctcarattataatcagctcttttaaaaaatgaatggtgtttgcttagacacctagagtttattttataaatacatctttacacataggttccagatgaggatgctgcactgaatgtttggtctttaagtaagcttaggagaaaattcttcaaatccgtaaaaaattgtgtataatgacaaaagaaggcagtgtcagatgtaaaagacaataacttttgattatttagtgtagctcatgcctaataatcaactatagaaaacgtcctctttctttctttttgtttatttatatttagccaccattaatcaatatctttcatttgtgttttgtgtaaaatgaaagtgatcatcaataggcaaagctgatatatcctctcc

SEQ ID NO: 171261 - DNA, 546 bp, Homo sapiens
catagaagtgcttttgaggaatctcagttaattgctgaagttagtttggaaaggaaaagggaaacaatgtgaagacccttgaatatacatgaaggcccagggctcatgcttagtgatttgagtaccaggctgattggaaaattaactcagacctcttcagttgatgggggctaaagtggttcctggcctggtcaggattggtttagcaccaggggaagattaggcctggggctgaaagtcaccagttrccagagctgcaaattttttaatgtactagcatcaacagtaagaatatctctttttataaagcataattactgtctaaaatggaaaggggggctttatagtaaattagtcctgtgacagtctcaattcaaaacattcaaacatcttaagcatatttaagtaaattttcttatactgacctctgaagataaaagataacaatttcattaatattcctaaaagtgaatgccatatgatttttgacctaggctacatgtctagtatttaaataatttgttcttggagagtctagatgccagt

SEQ ID NO: 171262 - DNA, 561 bp, Homo sapiens
aattggttcccaacatcaaacctttagcaaggcctacaggaaagactttctyttcttaacaaatgactcataggacctgtgggatttttgttttaaccagacttcaactataagaaaactggtggacctccctcctacccagccaccaaactttgagaatttactttcccttatgtaatgtagtcatttcagagatgaaactcttgagtgaaccccatttgcctttccctcagttcagcacattagttttctctaaaaggcctttctgttcaaaacctgtctcaggatttgaaggccatgcttacaagctgcagtggagctaataggtaggtcttccatcatcactgggttgttgagtttaatccattaaatgtaagcattaatcactttatttcatcagctgtgctcccatctgctaataggtcaagcttgcccttgaagcaatcctttgttagatataattccatgagttgtaggagcaatttaatttttgcaagaaatcctaaacatgtttgaagctcagttgagaattttcgtctctgcaaatggacatgtgagtca

SEQ ID NO: 171263 - DNA, 561 bp, Homo sapiens
aattggttcccaacatcaaacctttagcaaggcctacaggaaagactttctcttcttaacaaatgactcataggacctgtgggatttttgttttaaccagacttcaactataagaaaactggtggacctccctcctacccagccaccaaactttgagaatttactttcccttatgtaatgtagtcatttcagagatgaaactcttgagtgaaccccatttgcctttccctcagttcakcacattagttttctctaaaaggcctttctgttcaaaacctgtctcaggatttgaaggccatgcttacaagctgcagtggagctaataggtaggtcttccatcatcactgggttgttgagtttaatccattaaatgtaagcattaatcactttatttcatcagctgtgctcccatctgctaataggtcaagcttgcccttgaagcaatcctttgttagatataattccatgagttgtaggagcaatttaatttttgcaagaaatcctaaacatgtttgaagctcagttgagaattttcgtctctgcaaatggacatgtgagtca

SEQ ID NO: 171264 - DNA, 561 bp, Homo sapiens
aattggttcccaacatcaaacctttagcaaggcctacaggaaagactttctcttcttaacaaatgactcataggacctgtgggatttttgttttaaccagacttcaactataagaaaactggtggacctccctcctacccagccaccaaactttgagaatttactttcccttatgtaatgtagtcatttcagagatgaaactcttgagtgaaccccatttgcctttccctcagttcagcacattagytttctctaaaaggcctttctgttcaaaacctgtctcaggatttgaaggccatgcttacaagctgcagtggagctaataggtaggtcttccatcatcactgggttgttgagtttaatccattaaatgtaagcattaatcactttatttcatcagctgtgctcccatctgctaataggtcaagcttgcccttgaagcaatcctttgttagatataattccatgagttgtaggagcaatttaatttttgcaagaaatcctaaacatgtttgaagctcagttgagaattttcgtctctgcaaatggacatgtgagtca

SEQ ID NO: 171265 - DNA, 561 bp, Homo sapiens
aattggttcccaacatcaaacctttagcaaggcctacaggaaagactttctcttcttaacaaatgactcataggacctgtgggatttttgttttaaccagacttcaactataagaaaactggtggacctccctcctacccagccaccaaactttgagaatttactttcccttatgtaatgtagtcatttcagagatgaaactcttgagtgaaccccatttgcctttccctcagttcagcacattagttttctctaaaaggcctttctgttcaaaasctgtctcaggatttgaaggccatgcttacaagctgcagtggagctaataggtaggtcttccatcatcactgggttgttgagtttaatccattaaatgtaagcattaatcactttatttcatcagctgtgctcccatctgctaataggtcaagcttgcccttgaagcaatcctttgttagatataattccatgagttgtaggagcaatttaatttttgcaagaaatcctaaacatgtttgaagctcagttgagaattttcgtctctgcaaatggacatgtgagtca

SEQ ID NO: 171266 - DNA, 640 bp, Homo sapiens
gtgacttaagactcatactacttatagttcgggtggccaaatttaataataataacataggacacacagttaaattcaaattccagataatgaatatattttagtataagtatgacctgtgcaatatctgttatagtaaaaaccattttttgttttttatctgaaattcaaatttacctgagtacttygtattttatctaacaagtttctttagagtagaacaaagcctctttcttatgtgtgttatgatagttatgatataatttactgcttcttgaatacaaaaatcaaaataatgtcaaggacagacatgaaaaggttacttgtagtggtgaagtgcagaagggaaggaaacaggtgtgcagcagctggcaatgagggctctgctatggccattggaggacatctgtccagatggccagggaatgatgttcaagaatacgatacaatgaaaatggaaggcaggaaaggcaaattggaataaaaacatacagccacaatggaggcatctacatggcaggcagagtatgacactgaggacgggcatctcagtctgtttctgactcatttgacttcaccatgaatggaaagtagcactttaggtagtggggggaaaaatagactcctagatgttcagaac

SEQ ID NO: 171267 - DNA, 640 bp, Homo sapiens
gtgacttaagactcatactacttatagttcgggtggccaaatttaataataataacataggacacacagttaaattcaaattccagataatgaatatattttagtataagtatgacctgtgcaatatctgttatagtaaaaaccattttttgttttttatctgaaattcaaatttacctgagtactttgtattttatctaacaagtttctttagagtagaacaaagcctctttcttatgtgtgttatgatagttatgatataatttactgcttcttgaatacaaaaatcaaaataatgtcaaggacagacatgaaaaggttacttgtagtggtgaagtgcagaagggaaggaaacaggtgtgcagcagctggcaatgagggctctgctatggccattggaggacatctgtccagatggccagggaatgatgttcaagaatacgatacaatgaaaatggaaggcaggaaaggcaaattggaataaaaacatacagccacaatggaggcatctacatggcaggcagagtrtgacactgaggacgggcatctcagtctgtttctgactcatttgacttcaccatgaatggaaagtagcactttaggtagtggggggaaaaatagactcctagatgttcagaac

SEQ ID NO: 171268 - DNA, 468 bp, Homo sapiens
ccatttagctggctctatatgtattaaactctttattgcaattcctctctcttgataaatcgactctatctgagcagctggaaggaagaacctgttgggcagctacggtaatgaaaatgtctactaygtagccagaaaagttgaatgcaaagttacaggttgaggcagacaaagagcaaggctgcaagtgattcgcggttctgactgtattagaatgataatctgtggtggttttagacattccagaagctaaggcccccccaccttgagagattctgatgtagtaggcaaaactcagaaatacacactttgaaaaacttttacacgtttccagtgcacactgatttggaaacccctgaggttggaaggattatccgaacaaaccccgaagtctccagatgacagcagaatttgggaagaatagaaatcaaagtcttcactgaaagtaagatagtgaggagaaagtca

SEQ ID NO: 171269 - DNA, 468 bp, Homo sapiens
ccatttagctggctctatatgtattaaactctttattgcaattcctctctcttgataaatcgactctatctgagcagctggaaggaagaacctgttgggcagctacggtaatgaaaatgtctactacgtagccagaaaagttgaatgcaaagttacaggttgaggcagacaaagagcaaggctrcaagtgattcgcggttctgactgtattagaatgataatctgtggtggttttagacattccagaagctaaggcccccccaccttgagagattctgatgtagtaggcaaaactcagaaatacacactttgaaaaacttttacacgtttccagtgcacactgatttggaaacccctgaggttggaaggattatccgaacaaaccccgaagtctccagatgacagcagaatttgggaagaatagaaatcaaagtcttcactgaaagtaagatagtgaggagaaagtca

SEQ ID NO: 171270 - DNA, 630 bp, Homo sapiens
gaattctataattgacagttacattttttatctcatataagactttattacacacactcctgacttccattgttgcctttgagtattcagacgtcgacatatctgttgttccttgaaagtaacatatcctttctctgattaatgactggttttggtattccacaatcttatcatgtgtctaggcatggatttattttcatttatcccatttgggattagtttggatgcttcaatctgtggtttgatgtctttagttaattatcaacaattctctgttaaggtctcccctaatattctctctgtcctccgtttttctctgtagacttctgggacttcagttaaacatataatagagtttcccactctaccctctatgtttttacctccccccaccacaccatttttcatctctccatgaagctttacatgtagttttctcttatcagttataagataatctgtccatcaagctcctaagttcctaagttcaggtatcttatttttcatttgcataaattctatttctttctttctcaaawctgtctcagataaacatagaagcatagtcaatctagtcataagtttttaattaactttgtatcaaaatatcatatacatacataagtgcag

SEQ ID NO: 171271 - DNA, 623 bp, Homo sapiens
gcacatatgaagcactcctctggggactctcagaaataactggggaacatttgcaggttgcaaggctgagactctgcttctacgcagytggaagttcgtgagtcaatgaacaactgggttacagttggtaaagcttttcctcatactagcatacaaagcacaaagtatagagaactacaactcaacatgctttggcctcaaaaagagtttaggcttctaactaaccacatggccacatggaatgttaactctccagccattccttatggaacccaaaccccgccgcaccctcaccccaacacatatgtacacatatctaatcttgtttaatataaaaacagctcccaaggctgcattgtctttgtgtgcacccatacccctccacaactctccctttgctcgcatgccccctctcccatccaaaatgcacttgctcttttgaaacatttggtttctgctataaagttagaccttttcttcatagcctacaggaagaagaatctttcaccattcagtttctcagtttgttttagcaccctccaaagcctccttttcatccctttctgtcttcttttcactctccaccttgctgggaagtgcctagtaacttaattcctctagga

SEQ ID NO: 171272 - DNA, 623 bp, Homo sapiens
gcacatatgaagcactcctctggggactctcagaaataactggggaacatttgcaggttgcaaggctgagactctgcttctacgcagttggaagttcgtgagtcaaygaacaactgggttacagttggtaaagcttttcctcatactagcatacaaagcacaaagtatagagaactacaactcaacatgctttggcctcaaaaagagtttaggcttctaactaaccacatggccacatggaatgttaactctccagccattccttatggaacccaaaccccgccgcaccctcaccccaacacatatgtacacatatctaatcttgtttaatataaaaacagctcccaaggctgcattgtctttgtgtgcacccatacccctccacaactctccctttgctcgcatgccccctctcccatccaaaatgcacttgctcttttgaaacatttggtttctgctataaagttagaccttttcttcatagcctacaggaagaagaatctttcaccattcagtttctcagtttgttttagcaccctccaaagcctccttttcatccctttctgtcttcttttcactctccaccttgctgggaagtgcctagtaacttaattcctctagga

SEQ ID NO: 171273 - DNA, 545 bp, Homo sapiens
caccccactctctgtggtaccaatttactccattagtctgttctcaggcttctatgaagaaaagaggtttaattgactcacagttccacatggctggggaggcctccagaaatatacagtcatggcagaaagggaagcaaacacgtccttcttcacatgatggcaacaaggagaagtgccgagcaaaagggggaaaagccccttrtaaaaccatcagatgtcatgagaactcaccactatcacaagaacagcatgagggtaagcgccctcatgattaaattacctcccactgggtccctcccgtggcacctggggattataggaactacaattcaagatgatatttgggtggggacacagccaaaccacatcaggagtcttactcttatcatgttaattctggaactaagtgcttcatccatgtgtatgatagaaaacaccagagcaagcttcatagcttcattcacagaacaaaagaaaaaaaaaaaagatggatccacaatctaatgctttgccagcacagtagtatgctatttttctagagt

SEQ ID NO: 171274 - DNA, 480 bp, Homo sapiens
gtcattgatgaagataatatgaaactcataatagttccactacaacaagcacattgactcaaaactggttaatgagtatcatctattcatataatatttaatattactcactgtacaaaaaaaatttgaagtactctgaactcatgcttcacataaattaaataaatttgataggtttcccaaattcaacaaaaatgctgaaactgtacatgacattaccaataacatgttgtgaagctgaaaaaaaagtgtgaaaactaasagtaataaaaaattgagtaaccatgctagaaagaatattgtctttttttcaaagaatatgcagacaaaaactatagaaaaaaataggatactggtgtactaggcagttaattaataaaagtattatgttatgttcttagatttgtgtcagcttttttaaaaataaatgatttattttgatatcatgtgtcattctgtaacagttgtctatcacaaatt

SEQ ID NO: 171275 - DNA, 496 bp, Homo sapiens
taggggccatctggaaggcaggccactacacattcaaaagaaatatttactttcatactttatttttatatgtaattttgtattcacaacttgtataattttcagtttccaccacacctggatttcctcaaactcagaccaaaactctggacttctctcctcatctcatactccacagttgatctgttagtacaccctactaggactaccttcaaactgtatctccaattcagtcccatgtcacaacctccactgttaacacattccaaatcataatcctttctcactgatattattatttttctttttttgagatggagttttgctcttgttgcccaggctggagctcaatggcacgatctcagcacactgcaacctcygcctcccaggttcaagtgattctcctgcctcagcctcccgagtagctgggattacaggcacccgccaccaggcccagctaattttttgtattttttagtagagacggggtttcacc

SEQ ID NO: 171276 - DNA, 541 bp, Homo sapiens
acggatgtaatccttgtggaccaacttgcaattgttcactatctaaaaattgagtggggaaatatgtactgaatacttttttgcttcctgattccagcagtaaatggattaaatacccatgttatattccaatcctagccttctcttcatgtgagcaacacaactttacaaggttctggagcagacatcctattaaaactggaatttgagagttgctctcyaccaaaattttcatttggtatggagtctgatgaccctgaattctatcacaaaatgttgactgatggtactagtaccactttgttcagcctacttatacaacagggatgttctgcatttgtaatgataaggtcaaaaaaaggtgtaagtggatctgaagctctactattaaatctagaatcagtaggcacattaagtgaacattaattttagttttatctgttttattaaaattcttaaagcatatagagtttatgcctatttttatatttaagcaacactatattaaaagtaagtctaagtcgattactggggacccaaa

SEQ ID NO: 171277 - DNA, 582 bp, Homo sapiens
aacctagcaatcccattactgggtatatacccaaaggaatataaatcattctaccataaagacacatgcatgcgaatgttcactgcagcactattcgcaatagcaaagacatggaaaaaacctaaatgcccatcaatgacagactggataaagaaaatgtgatacatatacaccgtrgaatactatgcagccttaaaaagaacatgcagccataaaatggaatatgcagccattaaaaagaacgagatcatgtcttttgcaggaatatggatggagctggagggtattatccttagcaaactaatacaggaacagaaaaccaaatactgcatgttgtcatttataagtgggagctaaatgataagaacttatgaacacaaagaaggaaataagagacactggggtctacttgagggggaggatgggaggaggaagagaagcagaaaagataactatcaggtactgagcttaatacctgggagatgaaataatatgtacaacaaacccccatgacatgtgtttatctatgtgacaaaccttcacgtataccctcaaacctaaaataaaagttaaaaagagaga

SEQ ID NO: 171278 - DNA, 552 bp, Homo sapiens
aattagaccccctaaaaaatatattaagatcctaacccccaagacctatgaataygagcatatttggaaatgcagtcttttcatatgatcatgttaagttgaggccattagggtaagtcctaattcaatacaattggtattctcataaaaagggaaaatttgcacacaaggacagacacctacagagggaagatgatgtaaagacactgggaaaatgacatctacaagccaaggaacacatgatgctactggacgctaggagtgaagctagaaattggacagattatttcctcacagctctcaggagaaactaaccctaaaaataccttgattttgaacttctagaccccagaactgtgagacaacagatttctgttgtctgagccaccagtatgagatactttgttacagcagcctcagggctctaacacaatatcaaatataagacgcttttatactctaagtcacctggaacactatatattaacaagtccaaatggtatgcctttttattttattgatgttatttatgttcattctatttaatgataa

SEQ ID NO: 171279 - DNA, 552 bp, Homo sapiens
aattagaccccctaaaaaatatattaagatcctaacccccaagacctatgaatatgagcatatttggaaatgcagtcttttcatatgatcatgttaagttgaggccattagggtaagtcctaattcaatacaattggtattctcataaaaagggaaaatttgcacacaaggacagacacytacagagggaagatgatgtaaagacactgggaaaatgacatctacaagccaaggaacacatgatgctactggacgctaggagtgaagctagaaattggacagattatttcctcacagctctcaggagaaactaaccctaaaaataccttgattttgaacttctagaccccagaactgtgagacaacagatttctgttgtctgagccaccagtatgagatactttgttacagcagcctcagggctctaacacaatatcaaatataagacgcttttatactctaagtcacctggaacactatatattaacaagtccaaatggtatgcctttttattttattgatgttatttatgttcattctatttaatgataa

SEQ ID NO: 171280 - DNA, 370 bp, Homo sapiens
agaatggagaagacagaaaagaatcagttcacaatgaaagtcactgaatgtatacaacagagagaacatagactaaaagatttaacagagcctcagggacttgtgggattataacagaagacccaatattgctatcaytgaagtccaaaaagagaaaactccaaaagaagaacgtcgggttgaaaaagtattcaaagaaattatggctgaaaacttcctaaatttggagaaatacataaacctacagattcaagactaagcaaacctcaaataaaataaatccaaaataaatctatgctaagacacatcataattaaacttctaaatactaaagaaaataaatgatctttaaatcagccaaagagaaaca

SEQ ID NO: 171281 - DNA, 634 bp, Homo sapiens
atcctatagttgtcttatatattacatgtatatacattgaaaattccagcaaagttttagttttagctttcaactttcaaatagattttaaataactcaagaagagctgatagtctattatatttaccttgacttttaccagtttttttctttcttatttcttggtgtcattgtcctttagtgcaaagaacttctattagcaattttttttttagagtaaatctgttttctgtgaattgttttagttttcctttatctgagaatgtcattattttactttcattcctaaagaatattattactgaatatggaattatgggttaacaattcattctttcagtcctttaaaatgttatgccacatccttctagactctacaatttatgatgagaaatatgcaatcaggccaggcgtggtggctcacgcctgtaatcccagcactttgggaggcagaggcctgccaatcacttgaggtcagaaatttgagaccagccttgccaacatggtaaaatcccatctccactaaaaataacaaaaaattattcctgtaatcccaggtacttggraggccttggtgggaggattgcttaaaccccgggaggcaaaggctgcagtcagctgagatcactccatg

SEQ ID NO: 171282 - DNA, 635 bp, Homo sapiens
tattatattttaataatataaatagaaatatatttttataatactgaataaaatttgaagttaattccacaatttgattatcaattgataatgagtacttattttctttcattgtgcattgttcaatattgcctcctttatttcaataatgacattttcaccctttaccttccaactctgttctctttgctaagatcagcaytctctctgccatcaatgttctctctaagatactataatgcaggagaacattatattcagcaacctttaatagaaagagttactttgttgagtcttaaatacattctcaagtacctctttcattacacagtacgtagtgctgttgtagaaatattacatcaagccttctctcataactgaatactttttatttgttcattaaaagtatttgtcacctttttatgttaatataacttatttttcttagttttcactagctcctgcaaataggcatttaaagacttttcacacaggcagcaagacctgccagtaagtctaaatcctcatagtgaattcagcttcagttaacatcatgtctctcatccctttcttcttctagttcattttctctgaagcacatcaatatgatgataataatcaacaggtgttaattc

SEQ ID NO: 171283 - DNA, 635 bp, Homo sapiens
tattatattttaataatataaatagaaatatatttttataatactgaataaaatttgaagttaattccacaatttgattatcaattgataatgagtacttattttctttcattgtgcattgttcaatattgcctcctttatttcaataatgacattttcaccctttaccttccaactctgttctctttgctaagatcagcattctctctgccatcaatgttctctctaagatactataatgcaggagaacattatattcagcaacctttaatagaaagagttactttgttgagtcttaaatacattctcaagtacctctttcattacacagtacgtagtgctgttgtagaaatattacatcaagccttctctcataactgaatactttttatttgttcattaaaagtatttgtcacctttttatgttaatataacttatttttcttagttttcmctagctcctgcaaataggcatttaaagacttttcacacaggcagcaagacctgccagtaagtctaaatcctcatagtgaattcagcttcagttaacatcatgtctctcatccctttcttcttctagttcattttctctgaagcacatcaatatgatgataataatcaacaggtgttaattc

SEQ ID NO: 171284 - DNA, 635 bp, Homo sapiens
tattatattttaataatataaatagaaatatatttttataatactgaataaaatttgaagttaattccacaatttgattatcaattgataatgagtacttattttctttcattgtgcattgttcaatattgcctcctttatttcaataatgacattttcaccctttaccttccaactctgttctctttgctaagatcagcattctctctgccatcaatgttctctctaagatactataatgcaggagaacattatattcagcaacctttaatagaaagagttactttgttgagtcttaaatacattctcaagtacctctttcattacacagtacgtagtgctgttgtagaaatattacatcaagccttctctcataactgaatactttttatttgttcattaaaagtatttgtcacctttttatgttaatataacttatttttcttagttttcactagctcctgcaaataggcatttaaagacttttcacacaggcagcaagacctgccagtaagtctaaatcctcatagtgaattcagctycagttaacatcatgtctctcatccctttcttcttctagttcattttctctgaagcacatcaatatgatgataataatcaacaggtgttaattc

SEQ ID NO: 171285 - DNA, 543 bp, Homo sapiens
taaagcatggtgactgcagttaatgataatctatcgtagtcttgaagagtgcaaaaagggcagatgaggtgttttaccacaaaaatgataacacaaaaataccatgtgagataatgtatttgttaattagctagatttaaccattttacaatgcatatacacttcaatacatcatgttatagttatcaatatctgtcagttaataagtaaacataagtaaacaaataaaaatgatataagaggtcctgtttctgcctaggatgtagaaacctgtgaaaaaaccttacctcccaaaataatagcatggaagcgatagatgayatataaaatgataacctatcttaaacccactagttagctgaagtaacaaggaaaacaattacatagttgagatccatgaagaaacaagatcaaaatactgactcatctcttgataagtttgggaagaggtgctggggatgatacaactgggaaagaaaaatatgggaaagttttaatgagttactgaaagtttagtctggtctagtgtacagacttagaacc

SEQ ID NO: 171286 - DNA, 567 bp, Homo sapiens
ttcagcattaagtccagtgtttgctgtaaattctttgtagataatgtttatcatgttaaagttgatcttttatcattctaattggctaagggcttaaaatgaatgtattgaactttatcaaatgctttctctgtctcttcatgtggtcatatgatattttttttctctaaaatgttgagttacagtattaaaacatctattatagaacatacttgcatttctgtaataaaatccttctgtcataataattatatgtatgtatatacacatgtacacatatgatcttyatataataaaattgttggctgaattaatttactgttattttttagaacttttgcatctatgtttattagtgcaatttgcttgtaaatgttttttgtgagggttaggtttctagatcacgctgacttcatagaataacttggagaggttttatttccctgtctgtgtgtgtgcgttttcctttttttttcttttttttgagagaaggggaagtctttacagtatttctttctgaaattttaaagaattttatcacaaaatgcattttggccttgagttttc

SEQ ID NO: 171287 - DNA, 602 bp, Homo sapiens
ttttgcatctatgtttattagtgcaatttgcttgtaaatkttttttgtgagggttaggtttctagatcacgctgacttcatagaataacttggagaggttttatttccctgtctgtgtgtgtgcgttttcctttttttttcttttttttgagagaaggggaagtctttacagtatttctttctgaaattttaaagaattttatcacaaaatgcattttggccttgagttttctgtgccgggttattttttaaaatcatctttatgaagatataatttacatataataaaatagacccattttaattatgcatttaatgacttttggacaaatgtatacacctattttatcaccacaaaattaatgtatacaatatttccgtcagcctaaaaatgtttctctccatcccttgccatatgatgaacaaaacaagccagttgccaatgaacagatacagtataaacccattcattggaaattcccaaatagtcaaaacataatcaagtatcaggaaaaagtaatttaatggttgcctgggtcagtgtagagaaattgactgttataatatttttaatgatgatttcaatttagaaaatatcccca

SEQ ID NO: 171288 - DNA, 575 bp, Homo sapiens
ggcatggtataggactaggacccaaacttggacagggatctgtgagctggcagcaaggctatggccaggctaacagactaagtctgtctggcttattcctctctgccttctcatagcagtaactggttaataacttgatctaatgaacaatgcctgtacagaaggaaattgtagctattattgtagaaattcttctaacctgacccaggcaagtggctcaaggcaggcacccgggaaaggtccctggccatgctgataactcaaaacatatgcctgacttagcaactgaattcattggaatttaattactcaacatgattgtatactgacagcaaactcattattggaaggattgattattaytatgcaaacatttttattattcatttattgaaaacttgggcaaacttcccagactagaattgcatcttccacttcttttcacttcattacctttttagttgaatatgtttaactttccgaggtggttattttgactcatgtcatactttaatataattaagccattaaaacttattcaggaaactgatgttttctcaaattaaaaaaaaaaa

SEQ ID NO: 171289 - DNA, 575 bp, Homo sapiens
ggcatggtataggactaggacccaaacttggacagggatctgtgagctggcagcaaggctatggccaggctaacagactaagtctgtctggcttattcctctctgccttctcatagcagtaactggttaataacttgatctaatgaacaatgcctgtacagaaggaaattgtagctattattgtagaaattcttctaacctgacccaggcaagtggctcaaggcaggcacccgggaaaggtccctggccatgctgataactcaaaacatatgcctgacttagcaactgaattcattggaatttaattactcaacatgattgtatactgacagcaaactcattattggaaggattgattattattatgcaaacatttttattattcatttattgaaaacttgggcawacttcccagactagaattgcatcttccacttcttttcacttcattacctttttagttgaatatgtttaactttccgaggtggttattttgactcatgtcatactttaatataattaagccattaaaacttattcaggaaactgatgttttctcaaattaaaaaaaaaaa

SEQ ID NO: 171290 - DNA, 477 bp, Homo sapiens
gtttagtgaattggttgacagcaatgccagggtcctctgaggacagggccttcctggaggtcacttgagccacttgccccaaggtggttttcaggagagtgtggctcaaggctgtggctggagccagtggctgctgcctgtctgcagctgggcagagcagcccctgtgtccacatccagctccacctggctgccctgccacggccccagcaggcacccccttgtctttgacacccccttagtgcctgctgyggttgggtaagtgtagaccacagtgtgagtaatcagcgcccacactcccagggtgttggcaatgtttaaaagttgtcttaaccaaaatgtgttgctaaggttggacttttggacaaccgcaggtgctgtgaagctcctttcccagtcaggcatcgggggtggagtctgtgctgcttaaattggatctgagcaggcgggtgtggggtttccatgggtttgtttgtga

SEQ ID NO: 171291 - DNA, 477 bp, Homo sapiens
gtttagtgaattggttgacagcaatgccagggtcctctgaggacagggccttcctggaggtcacttgagccacttgccccaaggtggttttcaggagagtgtggctcaaggctgtggctggagccagtggctgctgcctgtctgcagctgggcagagcagcccctgtgtccacatccagctccacctggctgccctgccacggccccagcaggcacccccttgtctttgacacccccttagtgcctgctgtggttgggtaagtgtagaccacagtgtgagtaatcrgcgcccacactcccagggtgttggcaatgtttaaaagttgtcttaaccaaaatgtgttgctaaggttggacttttggacaaccgcaggtgctgtgaagctcctttcccagtcaggcatcgggggtggagtctgtgctgcttaaattggatctgagcaggcgggtgtggggtttccatgggtttgtttgtga

SEQ ID NO: 171292 - DNA, 555 bp, Homo sapiens
agtgtggagagatattggttaaaaatgttcactggaaggttgtttgaaacagcgaaaaaccgaaaaaatccaaaggctcactgataggaaaatactaaaatataatgcagtccttttaagagtgagtgtgcccaaaatataatgtcaactgagaagataccattttttttttttttagactgagtcttgctctgtcgcccaggctggagtgcagtggtgtgatctcrgctcaccacagcctctgtctcctgggttcaagtgattttcctgcctcagcctcccaagtagctgggactacaggcgtgtgccaccatgcccagctaattttttgtatttttagtagagacggggttttaccatgttagccaggatggtctcgatctcctgacctcatgatccgcctgcctcagcctcccaaagtgctgggattacaggtgtgagccactgcgcctggccgagaagacaccatttttatgaaaaggtaaatcacaataacacacatagaataggtaccaaactcctggtcactgtcatctctgggaaacaggatctggg

SEQ ID NO: 171293 - DNA, 555 bp, Homo sapiens
agtgtggagagatattggttaaaaatgttcactggaaggttgtttgaaacagcgaaaaaccgaaaaaatccaaaggctcactgataggaaaatactaaaatataatgcagtccttttaagagtgagtgtgcccaaaatataatgtcaactgagaagataccattttttttttttttagactgagtcttgctctgtcgcccaggctggagtgcagtggtgtgatctcagctcaccacagcctctgtctcctgggttcaagtgattttcctgcctcagcctcccaagtagctgggactacaggcgtgtgccaccatgcccagctaattttttgtatttttagtagagacggggttttaccatgttagccaggatggtctcgatctcctgacctcatgatccrcctgcctcagcctcccaaagtgctgggattacaggtgtgagccactgcgcctggccgagaagacaccatttttatgaaaaggtaaatcacaataacacacatagaataggtaccaaactcctggtcactgtcatctctgggaaacaggatctggg

SEQ ID NO: 171294 - DNA, 555 bp, Homo sapiens
agtgtggagagatattggttaaaaatgttcactggaaggttgtttgaaacagcgaaaaaccgaaaaaatccaaaggctcactgataggaaaatactaaaatataatgcagtccttttaagagtgagtgtgcccaaaatataatgtcaactgagaagataccattttttttttttttagactgagtcttgctctgtcgcccaggctggagtgcagtggtgtgatctcagctcaccacagcctctgtctcctgggttcaagtgattttcctgcctcagcctcccaagtagctgggactacaggcgtgtgccaccatgcccagctaattttttgtatttttagtagagacggggttttaccatgttagccaggatggtctcgatctcctgacctcatgatccgcctgcctcagcctcccaaagtgctgggattacaggtgtgagccactgcgcctggccgagaagacaccatttttatgaaaaggtaaatcacaataacacacatagaataggtaccaaactcctggtcactgtcayctctgggaaacaggatctggg

SEQ ID NO: 171295 - DNA, 383 bp, Homo sapiens
agttgctgtgctttccttccccaaaatgcataaattctctctcagtgttgcttggttgctaacgaaggatgagggcagggtggtgtgggtaactcaagatggtctcccttgccttcatcaatgcctcttttagtaatasgaagttaaaatcagctactgtgattgctcatctggtttttgtttcttgtgaggtacttttttgtgtgcagatagctgctaaaatttggtgtttccccagtgcggggaagaatggtgtagtctcttattccaacatcttgttctgacactgtctttttttaatgtggcaagaatatttaacatgagattttttttaagcaaatttcaggtgcacaacaaagtattgtttactataggcagaatgc

SEQ ID NO: 171296 - DNA, 383 bp, Homo sapiens
agttgctgtgctttccttccccaaaatgcataaattctctctcagtgttgcttggttgctaacgaaggatgagggcagggtggtgtgggtaactcaagatggtctcccttgccttcatcaatgcctcttttagtaatacgaagttaaaatcagctactgtgattgctcatctggtttttgtttcttgtgaggtacttttttgtgtgcagatagctgctaaaatttggtgtttccccagtgcrgggaagaatggtgtagtctcttattccaacatcttgttctgacactgtctttttttaatgtggcaagaatatttaacatgagattttttttaagcaaatttcaggtgcacaacaaagtattgtttactataggcagaatgc

SEQ ID NO: 171297 - DNA, 446 bp, Homo sapiens
tagggaattccaatgtgtattagtatttgagaaagtcagtttagcttaatttgtatatatcacttgaagtttctctggtgacttattcaacagaaattccataagactctttgtctagctagtttagaatcataagttggcctctccagtaatcttcacttttctcttcagtaatctgcaatatctttaatattccaggcacaagaataacattctttcctttttcaaaaattctaatatttgttgttatataaatttgttacttctaggttgttagtgaatttttgatatttttggttttctctaaaacatttttataaacctataatgattaacatatgcrtattattgacacataatattcttaaagttcctagtccttccagtaaattgtagcctttttgcatttttctgatctttaactttcttcatcagttattttaagc

SEQ ID NO: 171298 - DNA, 487 bp, Homo sapiens
ccacatgaactttaccatttaggtaactctagcaataagatgttctctttgtggtaagtatcatgggaagaggttagaaatgactaatctggcttcttccctccagttattttcacatgaatttgaacttgccagtcatgttcattaaaaaaatagatcatagcccatggcaacccagtgggtgatcaattaattaaaattaattacattggactgaattagaatggcttgaggaaaggaggctgtggttgctctgatttcaaggcccacaaaacttctctgacaactctcagagtaactacagtatagacttttccagtaatcaccagagagccctgccctgttgcattagttcttcagttccagactatatgtacattcacacacacacacacacacacacacasagagagagagagagagagagaaaggagaatctggaagagagagagagagagagatcctgacttaggttttatgttgctat

SEQ ID NO: 171299 - DNA, 395 bp, Homo sapiens
ttggtgacataattagagaacagttattcaaaggcagccattaccagtactgtgctggtaaaccagttctgtgggggcagggggaaagagccctgagttgtrgcatttgcctatttctattttgcaaatacatcctccatgactgtattagtaagggttctctagagggacataactttgtatatatataaaggcgagtgtattaagtattaactcacataatcacagggctccacaatcaggcgtctgtaggctgaggagcaagaagagccagtacaagttccaaaactgaagaacttggagtccaatgttcaagggcaggaaggatccagcacaggagaaagatgtagactgggagtctaggccagtctctctttttacactgtcctgtcttc

SEQ ID NO: 171300 - DNA, 395 bp, Homo sapiens
ttggtgacataattagagaacagttattcaaaggcagccattaccagtactgtgctggtaaaccagttctgtgggggcagggggaaagagccctgagttgtagcatttgcctatttctattttgcaaatacatcctccatgactgtattagtaagggttctctagagggacataactttgtatatatataaaggcgagtgtattaagtattaactcacataatcacagggctccacaatcrggcgtctgtaggctgaggagcaagaagagccagtacaagttccaaaactgaagaacttggagtccaatgttcaagggcaggaaggatccagcacaggagaaagatgtagactgggagtctaggccagtctctctttttacactgtcctgtcttc

SEQ ID NO: 171301 - DNA, 395 bp, Homo sapiens
ttggtgacataattagagaacagttattcaaaggcagccattaccagtactgtgctggtaaaccagttctgtgggggcagggggaaagagccctgagttgtagcatttgcctatttctattttgcaaatacatcctccatgactgtattagtaagggttctctagagggacataactttgtatatatataaaggcgagtgtattaagtattaactcacataatcacagggctccacaatcagscgtctgtaggctgaggagcaagaagagccagtacaagttccaaaactgaagaacttggagtccaatgttcaagggcaggaaggatccagcacaggagaaagatgtagactgggagtctaggccagtctctctttttacactgtcctgtcttc

SEQ ID NO: 171302 - DNA, 448 bp, Homo sapiens
agccaaaggaatctccaaaattgagaaagaaggggaaaaaaaaaaacaggcagcttatatgaccatgatagaccaggaactgagagtgaatccccactatgagagagggtgagtgagtgtctttctgcagtccacttttcccctggggaattgtaaaatccagccaccagaatgcaacttgactctttcaaccctgaatctaacttagtgagtggctggctcatgccctgaaacctaagcagctacagtaagacatttttcttgatcctagctgttaacaaactctgtatggtccagggaaccagtggtgctattccaggcattagaaaaacttgagcaccagcttatgaagcctgggcttgagtggaggatggaatctyacaaccaggactaagaagcaaacatggcatgcaccccagctgctagcatatccccatgaactgagcag

SEQ ID NO: 171303 - DNA, 594 bp, Homo sapiens
atttatttgtctaaaaaagactttatctgtccttaatttctgaaacttagtttccctagatacaaaattcttggctgacaattattttgtttaaggaggccgaatataggaacccaaacccctctggcttgtrgggtctctgctgggaaatctgctgttaatttgatagattttccattataggctatctgatccttttgtctcacatctcttcagattctttactttgtcttgactttagataacctgatagccatgtgtctaggtgatgatatttttgtgaataatttcttgcgtattctttgagatttttgtatttggatgtctagatctataacaaggccagggaagctttcctcagttattccccaaaacatgttttttaaatttttagctttctcttcttcctcagaaacatcaattattcttatgtttgtttaacagaatcccaaattttttgaagtctttatttttatttttgctgtgtcttagctggtcaggttaatttgaaagccttgtctttgagctctgaagttctttcttctacttcttctagtctattgttgaaacattacattgtattttgtatttctc

SEQ ID NO: 171304 - DNA, 594 bp, Homo sapiens
atttatttgtctaaaaaagactttatctgtccttaatttctgaaacttagtttccctagatacaaaattcttggctgacaattattttgtttaaggaggccgaatataggaacccaaacccctctggcttgtggggtctctgctgggaaatctgctgttaatttgatagattttccattataggctatctgatccttttgtctcacatctcttcagattctttactttgtcttgactttagataacctgatagccatgtgtctaggtgatgatatttttgtgaataatttcttgcrtattctttgagatttttgtatttggatgtctagatctataacaaggccagggaagctttcctcagttattccccaaaacatgttttttaaatttttagctttctcttcttcctcagaaacatcaattattcttatgtttgtttaacagaatcccaaattttttgaagtctttatttttatttttgctgtgtcttagctggtcaggttaatttgaaagccttgtctttgagctctgaagttctttcttctacttcttctagtctattgttgaaacattacattgtattttgtatttctc

SEQ ID NO: 171305 - DNA, 424 bp, Homo sapiens
tgtctcagcccaaaatctccttaagcttataagcaacttcagcaaagtctcaggatacaaaatcaatgtacaaaaatcacaagcattcttatacaccaataacagacaaacagagagccaaatcacaagtgaactcccattcacaattgcttcaaagagaataaaatacagaggtagaactttcaagagagcaccagctgcagtagtagaagggaaatacaagcttgccctatgttggccagagtaagtattgaggyttctcaggcaatgggcaggaccatagagcttccacaagtttttgtcttttgccttaggctaccagagcgagtagagaaaaaccacaaggtgggagcagagtcaggtgggtctgagctcagactctccttgggaagggcttgctgcggccactgtgggggttgaaggg

SEQ ID NO: 171306 - DNA, 386 bp, Homo sapiens
tctcaaaccctgtctcctgataagatgttatcaatggcaatgcgtgcccgaaacttcattagcaattttaatttcgccctggtcctgtgatctcgccctgcctccatttgccttgtaatattttattaccttgtgaagcatgtgatctctgtgacccacaccctatttgtacactccctctcctttgaaaatcactgataaaaacttgctggttttgtggcttgggggtcatcacggaacctgctgacatgtgatgtctcccccggatacccagctttaaaatttctctcttttgyactctttccctttatttctcagactggccgacacttagggaaatagaaaagaacctatgtgaaaatacaatgaattatcgggggcggttc

SEQ ID NO: 171307 - DNA, 521 bp, Homo sapiens
tggctctttgtccccacccaaatcttatcccgaattgtaatcctcataatccccatgcgtcgaaggaggaatttcgtgggaggtgattagatcatggaagcagttttccccatgctgttctcacaatatttaatgagttctcacaagatctgatggttttataaggcagttttctctgctctctcttgcattatttctctgttctgcttccttgtgaagaaagtgcctgcttccccttctgccatggttgtaagtttcctgaggcctccccagccatgcagaactgtgaatccattatgtctcttccctttatgaattacccagtcytgggtatttctttatagcagtgtgagaatggactgatacagaaacaaacgaaaatagagatgcaacacaaacaaactttgggatatagcaaaagcattgttaaggaaagtttttagcacttaacgcctacatcaaggagatagaaagatctcaaattaacaacctaacattgcacctaaaggaattagaaaatg

SEQ ID NO: 171308 - DNA, 405 bp, Homo sapiens
ggattcgaatggaatcgaatggaacaatatggaatggtaccgaatggaatggaatggaatggaatggaatggaatggaacagaatggaatggaackgaatggaatggaatggaatggaatgcaatggaatggactcaaatggaatgaaaccgagtggaatggaatcaaatggaatggaattgaatggaaatgaaagtaatagaatggaatggagtgtaatggaataatatggaatggagtggaatggaatgcagtggacacaaatggaatggactggaatggaatggacacgaatggaatggactggagtggaatggacacgaatggaatggaagcgaatggaatggaatggaatgaaatggaatggaatggaatgaaaaggaatggaaaggaagagaatggaat

SEQ ID NO: 171309 - DNA, 405 bp, Homo sapiens
ggattcgaatggaatcgaatggaacaatatggaatggtaccgaatggaatggaatggaatggaatggaatggaatggaacagaatggaatggaactgaatggaatggaatggaatggaatgcaatggaatggactcaaatggaatgaaaccgagtggaatggaatcaaatggaatggaattgaatggaaatgaaagtaatagaatggaatggagtgtaatggaataatatggaatggagtggaatggaatrcagtggacacaaatggaatggactggaatggaatggacacgaatggaatggactggagtggaatggacacgaatggaatggaagcgaatggaatggaatggaatgaaatggaatggaatggaatgaaaaggaatggaaaggaagagaatggaat

SEQ ID NO: 171310 - DNA, 475 bp, Homo sapiens
aaacttatttgtgatatgtgcattcatctcacagagttaaacctgtcttttgattgagcagttttgaaatctctttttatagaatctacaatggayatttggagtgctttgaagcctttggtggaaaaggaaatatcttcatataaaaattagataaaaccattctgagaaacttctttgtgatgtgtgcattcatctcccagatttgacacttccttttgatggaccagttttgaaatagtctttttgtggaatctgcaagtggatattttgagctccttgaggcctgtggtggaaaatgaaatatcttcacatacaaactagacagaagaattctgagaaacttctttgggatgtgtgcgttcacctcacagagttgaacctttcttttgattgagcagtttggaaacactctttttgaagaatctgcaagtggacatttggagcgctttgaggcctatggtagaaaaggaaa

SEQ ID NO: 171311 - DNA, 475 bp, Homo sapiens
aaacttatttgtgatatgtgcattcatctcacagagttaaacctgtcttttgattgagcagttttgaaatctctttttatagaatctacaatggatatttggagtgctttgaagcctttggtggaaaaggaaatatcttcatataaaaattagataaaaccattctgagaaacttctttgtgatgtgtgcattcatctcccagatttgacacttccttttgatggaccagttttgaaatagtctttttgtggaatctgcaagtggatattttgagctccttgaggcctgtggtggaaaatgaaatatcttcacatacaaactagacagaagaattctgagaaacttctttgggatgtgtgcgttcacctcacagagttgaacctttcttttsattgagcagtttggaaacactctttttgaagaatctgcaagtggacatttggagcgctttgaggcctatggtagaaaaggaaa

SEQ ID NO: 171312 - DNA, 288 bp, Homo sapiens
tctttgtgatgtgggcattcatctctcagagttaaactttttcttttgatagtgcagatttgaaactcactttttgtrgaatgcgcaagtagacatttagattactttgcagcccatggtagaaaaggaaatatcttcacataaatactagacagaagcaacctgaggaacttctttgtgatgtgtgcattcatctcacagatttaaacttttcttttgatagagcagttttgaaactctctttttgtaggatctgcaagtggacatttggagtgctttttggcctat

SEQ ID NO: 171313 - DNA, 288 bp, Homo sapiens
tctttgtgatgtgggcattcatctctcagagttaaactttttcttttgatagtgcagatttgaaactcactttttgtagaatgygcaagtagacatttagattactttgcagcccatggtagaaaaggaaatatcttcacataaatactagacagaagcaacctgaggaacttctttgtgatgtgtgcattcatctcacagatttaaacttttcttttgatagagcagttttgaaactctctttttgtaggatctgcaagtggacatttggagtgctttttggcctat

SEQ ID NO: 171314 - DNA, 288 bp, Homo sapiens
tctttgtgatgtgggcattcatctctcagagttaaactttttcttttgatagtgcagatttgaaactcactttttgtagaatgcgcaagtagacatttagattactttgcagcccatggtagaaaaggaaatatcttcacataaatactagacagaagcaacctgaggaacttctttgtgatgtgtgcattcatctcacagatttaaacytttcttttgatagagcagttttgaaactctctttttgtaggatctgcaagtggacatttggagtgctttttggcctat

SEQ ID NO: 171315 - DNA, 470 bp, Homo sapiens
ttcatgtccattctattccagtccattctattcgagcccattccattcaagtccattcgattcctatccattcctttctattcgagtccattaygttcgattccattccattccagtccattccattccatttcatttcattccattgcaatccattccattctattccattccattcgtttccagtgcattcgagtccattcccttccagtccaatccattcaagtccattccattccagtccagtccattcgtttccattgtatttgattccattccattctattctattccattccattccatttaaatcgattgctttcccttccattccattccactccattcgattctattccattcgataccattccattcagttcgattcctttcatttctattccattccatttgattccattccattcgattccattacatacgattgcattccattcgagttcatacca

SEQ ID NO: 171316 - DNA, 470 bp, Homo sapiens
ttcatgtccattctattccagtccattctattcgagcccattccattcaagtccattcgattcctatccattcctttctattcgagtccattatgttcgattccattccattccagtccattccattccatttcatttcattccattgcaatccattccattctattccattccattcgtttccagtgcattcgagtccattcccttccagtccaatccattcaagtccattccattccagtccagtccattcgtttccattgtatttgattccattccattctattctattccattccattccatttaaatcgattgctttcccttccattccattccactccattcgattctattccawtcgataccattccattcagttcgattcctttcatttctattccattccatttgattccattccattcgattccattacatacgattgcattccattcgagttcatacca

SEQ ID NO: 171317 - DNA, 470 bp, Homo sapiens
ttcatgtccattctattccagtccattctattcgagcccattccattcaagtccattcgattcctatccattcctttctattcgagtccattatgttcgattccattccattccagtccattccattccatttcatttcattccattgcaatccattccattctattccattccattcgtttccagtgcattcgagtccattcccttccagtccaatccattcaagtccattccattccagtccagtccattcgtttccattgtatttgattccattccattctattctattccattccattccatttaaatcgattgctttcccttccattccattccactccattcgattctattccattcgataccattccattcagttcgattcctttcatttctattccattccatttgattccattccattcgattccattmcatacgattgcattccattcgagttcatacca

SEQ ID NO: 171318 - DNA, 341 bp, Homo sapiens
ggaatggactcgaatggaaaggaaacgagtggaatggaatggartggaatggcttgaaatggataagaaatgaaaagaatgtaatggaatcggatggaatggaattgaatgtattggagtcgagtagaacagaattgaatggaatggcatcaaatggaatggaaacgaaacgaatggaattgaatggactcaaatgttatggaatcaaagggaatggactcaaatagaatggactcaaaagaaatggtcttgaatggaacttattcgaatataatttaatcgaatggaatgcaatagcatggaatggaatcgaatggaatggaatcgaatggattggaacg

SEQ ID NO: 171319 - DNA, 341 bp, Homo sapiens
ggaatggactcgaatggaaaggaaacgagtggaatggaatggaatggaatggcttgaaatggataagaaatgaaaagaatgtaatggaatcggatggaatggaattgaatgtattggagtcgagtagaacagaattgaatggaatggcatcaaatggaatggaaacgaaasgaatggaattgaatggactcaaatgttatggaatcaaagggaatggactcaaatagaatggactcaaaagaaatggtcttgaatggaacttattcgaatataatttaatcgaatggaatgcaatagcatggaatggaatcgaatggaatggaatcgaatggattggaacg

SEQ ID NO: 171320 - DNA, 341 bp, Homo sapiens
ggaatggactcgaatggaaaggaaacgagtggaatggaatggaatggaatggcttgaaatggataagaaatgaaaagaatgtaatggaatcggatggaatggaattgaatgtattggagtcgagtagaacagaattgaatggaatggcatcaaatggaatggaaacgaaacgaatggaattgaatggactcaaatgttatggaatcaaagggaatggactcaaatagaatggactcaaaagaaatggtcttgaatggaacttattcgaatataatktaatcgaatggaatgcaatagcatggaatggaatcgaatggaatggaatcgaatggattggaacg

SEQ ID NO: 171321 - DNA, 641 bp, Homo sapiens
gggcagtcttgcccatcagacagggctaggttgacctgagcagaccttggtctgctggcctctcctggggccccagcctggccacacctgtttgcagggcagtcttgggtgccctagggacctgcaccataacttgtgctagtggattgtgcctgaccaggaccatgtggctcctatggccatacaccagcccacccacttgctacccatattgcagcttccctcaggcccaaagaaactacccaactcactcttgctgatgtgtgtctgcatgggtgagttttgcctttcttgccccaccaggatgcaggagtgcagtctgccttycctccccctgccaaccaccatttcagacagagccttggcaggcacagagccatccagccctgcctgcaacagtgcccagcccttatcctatcactacagagaacagcagatcctcccctaccctgagcaatcactctttcttgtgggaaacacagaaggcacatagtcctgtgtccacaagttccccactacaagccaacactacctccagcatgactgtacagacaatcctcagcagctaggcccattcactgtcaagctgcattgcctccaccaccatggtgaatgcccccagggagtcaggcacccagtcc

SEQ ID NO: 171322 - DNA, 608 bp, Homo sapiens
tgtaattccaacagctcaagtgccaaccctcaataaatgtcaatagaatgattggaggcttactaataatagtgataaaaagattttgcaaaatatccattgaaatcttaaattargtaaaattcccatgccaaatatttcataccaattaatcatcaatggctttgttttgatttttatcagtaatactacgtctccttaacagcaaaaactcaagcaagatattctcaatattgtccaaagagaacttgcttttaagcatttttacattatctttgactccaactaaagtgcaaaattattgaggctcccttgtcattttacccctttccattaacagtgaagtgctcagcaccattttttttttttgacattaaaagcccagggagttcccagacagtgtaaataaagggaaacatactgatatagtaaacaatatgcaaaatgtaccatgttaggttacttgcaaaataaatttattctaatgggtttgttcctagaccattctgcaagtgtatgtgtgtctacacagtgtgtgtgtgcatcacaatgacaatttctctgtaaagtattgaaaatatatattgtatagtgattactcatgtctc

SEQ ID NO: 171323 - DNA, 587 bp, Homo sapiens
  misc_feature (1)...(587): n = A,T,C or G
nnnnnnnnnnnnnnnnnnnnnnnnnnnngctaaactgggctattccatgaccagggacaaaataggcttttagcctctaagaaggacaaggaatgtgggggccgggggtctgtcagtcttcatgcagccctgctgctgtctggaargatgggggtcgtttacctttgggatctcagtacaattagaacagtaaagtaaactgtatatttaattgaatattagactctgctgatacaaactggagacaaaagcaaaaataatctagctgccattgtgctgctgtaattcattttctgtaacttcagttctggggtttttcctctagtggatttacttggcttctcatggttcttctcaccccaaccactccagcatgctaagacactgcagcacacgcccggacctatatcttttaaatcctggtaaaagaaaaattcaacctagaattctataccagagaagatatctttacaaaataaaagttaaaaggcattgtagacaaacaaaagctgaagaaagttcaacacccggagacccacgctatatgaaatattaaaggaaactctttatgagggagaaaaaatgat

SEQ ID NO: 171324 - DNA, 595 bp, Homo sapiens
gaaacagtgaaatgtgaacgtgcacaatgtgcaaaacatcagaagcaaaggacaacagtgtcctaggttacaaaaggccaggaaagttttgatgcattttgcttcaaactagcatataggggaagcatgttagtacaactcctgtgacaatgaaactggccaagaggcatttctgcaggctggaaacagcactgtattacttccytattgctgcagtgacacattgccacaaacagtggcttaaaacaacatgcatttagtatctcacaattttggaggtcagaagtctgaaataggtcatgcaggataaaaataaaatattaacagagctgtggtctggatcctctagaggaaaatctattccttgattttctaacttctaggagtggcccacattccttgacttgaggctacatctcttggacttctggtgctgtcgtcacttcttaatctgcctctgcctcttctgcttccctctttcacttgtaaggaccctagtcatctcagtggatacatgtaaataatttaggatcatcccctctggatcatctcaggattcttaactttatcacatcttccaagtctccttttccat

SEQ ID NO: 171325 - DNA, 595 bp, Homo sapiens
gaaacagtgaaatgtgaacgtgcacaatgtgcaaaacatcagaagcaaaggacaacagtgtcctaggttacaaaaggccaggaaagttttgatgcattttgcttcaaactagcatataggggaagcatgttagtacaactcctgtgacaatgaaactggccaagaggcatttctgcaggctggaaacagcactgtattacttccctattgctgcagtgacacattgccacaaacagtggcttaaaacaacatgcatttagtatctcacaattttggaggtcagaagtctgaaataggtcatgcaggataaaaataaratattaacagagctgtggtctggatcctctagaggaaaatctattccttgattttctaacttctaggagtggcccacattccttgacttgaggctacatctcttggacttctggtgctgtcgtcacttcttaatctgcctctgcctcttctgcttccctctttcacttgtaaggaccctagtcatctcagtggatacatgtaaataatttaggatcatcccctctggatcatctcaggattcttaactttatcacatcttccaagtctccttttccat

SEQ ID NO: 171326 - DNA, 595 bp, Homo sapiens
gaaacagtgaaatgtgaacgtgcacaatgtgcaaaacatcagaagcaaaggacaacagtgtcctaggttacaaaaggccaggaaagttttgatgcattttgcttcaaactagcatataggggaagcatgttagtacaactcctgtgacaatgaaactggccaagaggcatttctgcaggctggaaacagcactgtattacttccctattgctgcagtgacacattgccacaaacagtggcttaaaacaacatgcatttagtatctcacaattttggaggtcagaagtctgaaataggtcatgcaggataaaaataaaatattaacagagctgtggtctggatcctctagaggawaatctattccttgattttctaacttctaggagtggcccacattccttgacttgaggctacatctcttggacttctggtgctgtcgtcacttcttaatctgcctctgcctcttctgcttccctctttcacttgtaaggaccctagtcatctcagtggatacatgtaaataatttaggatcatcccctctggatcatctcaggattcttaactttatcacatcttccaagtctccttttccat

SEQ ID NO: 171327 - DNA, 608 bp, Homo sapiens
actgtttgtgaaactcctgttctatgacaagagctttaatagcactggtgatataatggtgagtaggtataaaggatttttatggttagagaatgcaggtaggaagtctatatgataccaaatatctgctactagtttatttactttatttataaaatctggccctagttaactycagaaaagaaggaaaatatgttgaggacactcaaatgtctgctggaataggttagggacatcagtcacctggaaaggaaagaaaccagggagactccaggacatgggagaggtaaagtgattggattctctacctggaaagctatcatcagtgtgacgaagctttgataactttcagtctctctgtctttccctgcacttggttggatatttgggtggatcagactgtgttaggtgcttgcttttgattcattacctatggcccctatggcatctatggccatgaaggggttggttataaaaacagtgccatggccacagccatgtgagagctacttccagaaagggcagaattattgtgaactgaacagccacttcaagaagactctacggaacagatgaaatggctattttgtaggtcaaaatagtagact

SEQ ID NO: 171328 - DNA, 498 bp, Homo sapiens
aatgctgttttctatattcctcaccctcttggaaatacacatcaaggtctctaaatggtcactgggcctgaataaggtaagcatctctcatctgattattcacttttttattgactgatgartcacagcactctagcaatgaacctcaatgaaatcttgtcataagttactgtggtttttttcccttcagtgaaatggatgttttcttattaatgattttacttcttaattctacgctgggatgacctggttgaaacaaatcattctatgcttgtgaccagagaggagaatattttgtatttttagtagcactaacataggatttcagcctaagctgctactgacatcttagaagggcaatgcccctctttttaggttttagctggatagagcctgatagagtttggatgtttgtcctctccaaatctcattttgaaagtcgattctcaatgttgcagtagggcctaatggaaggtgtttgcactgtgagggcaggtg

SEQ ID NO: 171329 - DNA, 498 bp, Homo sapiens
aatgctgttttctatattcctcaccctcttggaaatacacatcaaggtctctaaatggtcactgggcctgaataaggtaagcatctctcatctgattattcacttttttattgactgatgaatcacagcactctagcaatgaacctcaatgaaatcttgtcataagttaytgtggtttttttcccttcagtgaaatggatgttttcttattaatgattttacttcttaattctacgctgggatgacctggttgaaacaaatcattctatgcttgtgaccagagaggagaatattttgtatttttagtagcactaacataggatttcagcctaagctgctactgacatcttagaagggcaatgcccctctttttaggttttagctggatagagcctgatagagtttggatgtttgtcctctccaaatctcattttgaaagtcgattctcaatgttgcagtagggcctaatggaaggtgtttgcactgtgagggcaggtg

SEQ ID NO: 171330 - DNA, 498 bp, Homo sapiens
aatgctgttttctatattcctcaccctcttggaaatacacatcaaggtctctaaatggtcactgggcctgaataaggtaagcatctctcatctgattattcacttttttattgactgatgaatcacagcactctagcaatgaacctcaatgaaatcttgtcataagttactgtggtttttttcccttcagtgaaatggatgttttcttattaatgattttacttcttaattctacgctgggatgacctggttgaaacaaatcattctatgcttgtgaccagagaggagaatattttgtatttttagtagcactaacataggatttcagcctaagctgctactgacatcttagaagggcaatgcccctctttttaggttttagctggatagagcctgatagagtttggatgtttgtcctctccaaatctcattttgaaagtcgaytctcaatgttgcagtagggcctaatggaaggtgtttgcactgtgagggcaggtg

SEQ ID NO: 171331 - DNA, 549 bp, Homo sapiens
acaatcattacatggtgagaggtatgaggtttcattcgagtacttttccagagattactctgtaatataatattaagatagaatttctttcyacacagacgttgcttcttattcatgtacaatgtgcggtattttcccctttagatactttgaggcattaatgtgataactcaagcaatgtggttgtgcttttgatagcccctctttaattctggttttggaggaaactttgacttcatcacagagaaatccaataaaacttagatacaattaggactattagcactaaaaaggtccacagaattctcagcattctattaatccaacaataacaacaacaaaacccttacaagtctacatgggcatttttctctaaatgcattagataattaggttgcatcatttagataaaggaatcatttaattataattatgcataaggacatttactaagttattgcaactatcagtatagacacattgatgagataagacatttgctatccaggagttcacggagaaattaagaaaaaaaatccttatatatgt

SEQ ID NO: 171332 - DNA, 549 bp, Homo sapiens
attaatgtgataactcaagcaatgtggttgtgcttttgatagcccctctttaattctggttttggaggaaactttgacttcatcacagagaaatccaataaaacttagatacaattaggactattagcactaaaaaggtccacagaattctcagcattctattaatccaacaataacaacaacaaaacccttacaagtctacatgggcatttttctctaaatgcattagataattaggttgcatcatttagataaaggaatcatttaattataattatgcataaggacatttactaagttattgcaactatcagtatagacacattgatgagataagacatttgctatccaggagttcackgagaaattaagaaaaaaaatccttatatatgtattgttcattgtaagtaactagagatatgattcttaattaaataaaacctctcttttcaactataatagtctgactattttttgatgacaacttttacatctaactccctcttttcccctgtccctcatatctgggctagctgagattaaagccta

SEQ ID NO: 171333 - DNA, 496 bp, Homo sapiens
gagggggagctgctgaaggctttgggagcccaccccttgcatcaatatgccctagatatgagacatagaatcaatggagatttgggagctttaagatttaatgactctcctgccaggttttagacatgcatgggccctgtggtccctttgttttggccaattacttccatttggaatgggaaaatttgcccagtaaatgtacgcccattgtatcttggaaggaactaacttgcctttgattttataggctcataggcagaacggacttgccttgtctcagatgagactttggacttggacttttgagttaatgctggaatgagttaagactttgggggaatgttgggaaagcattattgattttgaaatgtaaaaaggacatgagatttggsaagcaccatgggctgaataacatggttttgctctgtgtctccacccaaatctcatttctaattgtaatccccaggtgttgagtgagagacttggtgggaggtga

SEQ ID NO: 171334 - DNA, 592 bp, Homo sapiens
tggcctctccccaatttcctgcattggtctatagttttccttaagaacttgaaaagcaaaaattagactttgttgtatagaataagtggtgaatgagcacatgcaccagaaatcaacataagaataagtccttttgagtgttcaaaactggtgtattatttgtgactcagactccttaaatttcgtttacatgtagcaatttactttagaactcagtattcatatgttcaaacgattttttgtcctctctgtgttctctccaacccccactcccatcctattaacaagcacttcccaaaggyccgattttattgtactcatctaattgataagcgtgctcaatttatatcagtgacagtttagcatattttagaaaattttacattacatgatttcatgaattggaacaagacagggttcattcagcattgtacaaatgaacaaggggtgggtatatatgtgtgttgctcacattactaaactattacagtgttattcaaacttgaacatgcatcaagctcacctagaggttcttatttccagagtttatcatgcaggaggtctgggatagggcctgataatctgtatttct

SEQ ID NO: 171335 - DNA, 608 bp, Homo sapiens
tgacctcaaatgtgcctatttttgttcaagattcaggttataataagcccatgttcccacattagttttgcaatcttttgtgttttatttaatctcagttcatgttgaactggaaggtgaaagggccttcttccagttaaaaatagtaaactcctatatggtgggtggtaacattatcaaaagagaaaggttaaatcattttgctaccattatcttcaccttctgtcatggaaatttatatcattgcaatcagtacagaagctgaactttttggtggattctacttatatgtccagataaaaagcaacattatatagatcccacttatggttttatgaactatggaaagaattgtgataagcgscttgaaataatgatttggggcatcactgaggggttctcttttatagacaaggaaattcaaaatgtcaactgaacattaattaatatggagcatctacgatttcagctgttttccccaaattgctgaagcttcccaaaatatatcagcatttaacattgtctgccaaccctccctgtgaacctgtggcagaacattgtctcaaataattttgtagtgaagtaccacaagatgaatgtgtacacat

SEQ ID NO: 171336 - DNA, 378 bp, Homo sapiens
actatgtgaagctactatttggagttggacagtagtgcatgtgwctttgtgtcacagcgggaatgtgagctggatgacaaatggagatttggacttgtgataattggcctctgtgtcattgtgtggaagactgactggtccctttatttcctgtagcttgactaccacacaaatgaatccattcaaatgttggcaagtggagcagagtcccaggacaggtaaggcactttccctgctttttcttaagatcaatccccatgcgtagaaattaaagtcacatcccacacgatcattaaagtagagagtgcattctgcaggatgagtgaaaaggcatttatgattcttgggggcagatgttctacagttgcctgtgctagt

SEQ ID NO: 171337 - DNA, 408 bp, Homo sapiens
tgggagagtgctgacatactatgtgaagctactatttggagttggacagtagtgcatgtgactttgtgycacagcgggaatgtgagctggatgacaaatggagatttggacttgtgataattggcctctgtgtcattgtgtggaagactgactggtccctttatttcctgtagcttgactaccacacaaatgaatccattcaaatgttggcaagtggagcagagtcccaggacaggtaaggcactttccctgctttttcttaagatcaatccccatgcgtagaaattaaagtcacatcccacacgatcattaaagtagagagtgcattctgcaggatgagtgaaaaggcatttatgattcttgggggcagatgttctacagttgcctgtgctagttcatgtatttctg

SEQ ID NO: 171338 - DNA, 408 bp, Homo sapiens
tgggagagtgctgacatactatgtgaagctactatttggagttggacagtagtgcatgtgactttgtgtcacagcgggaatgtgagctggatgacaaatggagatttggacttgtgataattggcctctgtgtcattgtgtggaagactgactggtccctttatttcctgtagcttgactaccacacaaatgaatccaytcaaatgttggcaagtggagcagagtcccaggacaggtaaggcactttccctgctttttcttaagatcaatccccatgcgtagaaattaaagtcacatcccacacgatcattaaagtagagagtgcattctgcaggatgagtgaaaaggcatttatgattcttgggggcagatgttctacagttgcctgtgctagttcatgtatttctg

SEQ ID NO: 171339 - DNA, 378 bp, Homo sapiens
actatgtgaagctactatttggagttggacagtagtgcatgtgactttgtgtcacagcgggaatgtgagctggatgacaaatggagatttggacttgtgataattggcctctgtgtcattgtgtggaagactgactggtccctttatttcctgtagcttgactaccacacaaatgaatccattcaaatgttggcaagtggagcagagtcccagracaggtaaggcactttccctgctttttcttaagatcaatccccatgcgtagaaattaaagtcacatcccacacgatcattaaagtagagagtgcattctgcaggatgagtgaaaaggcatttatgattcttgggggcagatgttctacagttgcctgtgctagt

SEQ ID NO: 171340 - DNA, 378 bp, Homo sapiens
actatgtgaagctactatttggagttggacagtagtgcatgtgactttgtgtcacagcgggaatgtgagctggatgacaaatggagatttggacttgtgataattggcctctgtgtcattgtgtggaagactgactggtccctttatttcctgtagcttgactaccacacaaatgaatccattcaaatgttggcaagtggagcagagtcccaggacaggtaaggcactttccctgctttttcttaagatcaatccycatgcgtagaaattaaagtcacatcccacacgatcattaaagtagagagtgcattctgcaggatgagtgaaaaggcatttatgattcttgggggcagatgttctacagttgcctgtgctagt

SEQ ID NO: 171341 - DNA, 408 bp, Homo sapiens
tgggagagtgctgacatactatgtgaagctactatttggagttggacagtagtgcatgtgactttgtgtcacagcgggaatgtgagctggatgacaaatggagatttggacttgtgataattggcctctgtgtcattgtgtggaagactgactggtccctttatttcctgtagcttgactaccacacaaatgaatccattcaaatgttggcaagtggagcagagtcccaggacaggtaaggcactttccctgctttttcttaagatcaatccccatgcstagaaattaaagtcacatcccacacgatcattaaagtagagagtgcattctgcaggatgagtgaaaaggcatttatgattcttgggggcagatgttctacagttgcctgtgctagttcatgtatttctg

SEQ ID NO: 171342 - DNA, 408 bp, Homo sapiens
tgggagagtgctgacatactatgtgaagctactatttggagttggacagtagtgcatgtgactttgtgtcacagcgggaatgtgagctggatgacaaatggagatttggacttgtgataattggcctctgtgtcattgtgtggaagactgactggtccctttatttcctgtagcttgactaccacacaaatgaatccattcaaatgttggcaagtggagcagagtcccaggacaggtaaggcactttccctgctttttcttaagatcaatccccatgcgtagaaattaaagtcacatcccacacgatcattaaagtagagagtgcattctgcaggatgagtgaaaaggcatttatgattcttgggggcagatgttctacagtwgcctgtgctagttcatgtatttctg

SEQ ID NO: 171343 - DNA, 595 bp, Homo sapiens
tgcgtgcttgtaatcccagctactcaggaggctgaggcaggagaatcgcttgaacccaggaggcagaggttacagtgagccaagatcgtgtcactacactccagcctgggagacagagtgagactccatctcaaaaagagagagagagacagactgagagagagaaaatagcatcttttttgcttaaatgcttaatttattatagtcttccagatacagcctatctggtcattctattgtttcattttactgttccctttttcttgtctcatatctttaaacgtgggttctcctcaaagttattgtctttacttctgtaaatgytcatgcctttggaggtattgtcctatcttgggagtcatcccttttgaccctaccagaaaatggtttctctttcttctgtactctggcagttttattctgccttttaaagattacagcatttaagcatgtgggtctcttccccaagagaaaacatagctcttcaaaaccagatgctctgtctttactccttcccataaaccacagtgcttctgtgctccagtatttccacattggggctcagtaaagactgaggaactaattatgagtaaac

SEQ ID NO: 171344 - DNA, 595 bp, Homo sapiens
tgcgtgcttgtaatcccagctactcaggaggctgaggcaggagaatcgcttgaacccaggaggcagaggttacagtgagccaagatcgtgtcactacactccagcctgggagacagagtgagactccatctcaaaaagagagagagagacagactgagagagagaaaatagcatcttttttgcttaaatgcttaatttattatagtcttccagatacagcctatctggtcattctattgtttcattttactgttccctttttcttgtctcatatctttaaacgtgggttctcctcaaagttattgtctttacttctgtaaatgttcatgcctttggaggtattgtcctatcttgggagtcatcccttttgaccctaccagaaaatggtttctctttcttctgtactctggcagttttattctgccttttaaagattrcagcatttaagcatgtgggtctcttccccaagagaaaacatagctcttcaaaaccagatgctctgtctttactccttcccataaaccacagtgcttctgtgctccagtatttccacattggggctcagtaaagactgaggaactaattatgagtaaac

SEQ ID NO: 171345 - DNA, 536 bp, Homo sapiens
gtataaaccagccgagcatggtggctcatgcctgcaatcccagcactttgggaggccgaggtgggataactgcttgagctcaggagttcaaggctagcctaggcaagatggtgagatctcatctctacaaaaataaaaaacaataaattacggaatgtggtggtgcatgcctgtagtcccagttacttgtgaatctgaggtaggaggatcacttgagcctaggtgttcaaggctgcagtgagctaagatcacaccactgtactccagcctgggtgacagagagggaccctgtctctattaaaaaaaaaaaaaaagtatgaactttatctgatcaggagtcatggaaaattcaactaagaaagttaaatcctttagcagatatttcrttttgttgccaatacgctgccaaatacactgaactttgttgctctggaagagttcctaatgagtagaaaatgggccaaaacaagcggcggggttgggggtcggagggagggaagaagtaccaatcaggataagccataactgaataatca

SEQ ID NO: 171346 - DNA, 536 bp, Homo sapiens
gtataaaccagccgagcatggtggctcatgcctgcaatcccagcactttgggaggccgaggtgggataactgcttgagctcaggagttcaaggctagcctaggcaagatggtgagatctcatctctacaaaaataaaaaacaataaattacggaatgtggtggtgcatgcctgtagtcccagttacttgtgaatctgaggtaggaggatcacttgagcctaggtgttcaaggctgcagtgagctaagatcacaccactgtactccagcctgggtgacagagagggaccctgtctctattaaaaaaaaaaaaaaagtatgaactttatctgatcaggagtcatggaaaattcaactaagaaagttaaatcctttagcagatatttcgttttgttgccaatacgctgccaaatacactgaactttgttgctctggaagagttsctaatgagtagaaaatgggccaaaacaagcggcggggttgggggtcggagggagggaagaagtaccaatcaggataagccataactgaataatca

SEQ ID NO: 171347 - DNA, 536 bp, Homo sapiens
gtataaaccagccgagcatggtggctcatgcctgcaatcccagcactttgggaggccgaggtgggataactgcttgagctcaggagttcaaggctagcctaggcaagatggtgagatctcatctctacaaaaataaaaaacaataaattacggaatgtggtggtgcatgcctgtagtcccagttacttgtgaatctgaggtaggaggatcacttgagcctaggtgttcaaggctgcagtgagctaagatcacaccactgtactccagcctgggtgacagagagggaccctgtctctattaaaaaaaaaaaaaaagtatgaactttatctgatcaggagtcatggaaaattcaactaagaaagttaaatcctttagcagatatttcgttttgttgccaatacgctgccaaatacactgaactttgttgctctggaagagttcctaatgagtagaaaatgggccaaaacaagcggcggsgttgggggtcggagggagggaagaagtaccaatcaggataagccataactgaataatca

SEQ ID NO: 171348 - DNA, 475 bp, Homo sapiens
atccatagcaacagataggtagataattttttatttttaaattttttttgcccaggctggagtgcagtggcatgatcatggctccctatagcctcaacttcctcagatcaagtggtcttcccacctcagcctcttgagtagctgggactacaggcatctgccactacgccaggctcattttaaatttttttgtagagatgggatctcactatattgccaaggctggtctaaacttctgtgctcaagcaatcttccagcctcagcctcccaaagtgctggtaatacagscgtgaactactgttcccaactgagctctttgtatattaacctgttatatattgtatgctttgtaaatatttttcccaatcaatagtacttttaaactttattcatggaatcttttttccatacaaaatgaaaaaaaaatttcaagtattcaaatatactttctgttcttttacaggtctccccaatc

SEQ ID NO: 171349 - DNA, 500 bp, Homo sapiens
cgaattcatgggaaaaaataaaatycccttttggatacagacaagttaagtataaatataaataaaataaatggagagaacttctgcttttataaaagttgaccccttctgtgattgatgtctgcatttttcccattactatgaagtaccattaaacattttcctcgacccaatctcaaggagtaggtatatatgttttccttgaagtttaaatatattttgataaataaaaattttttggttggtttctttagcaatcattcaaactataatctgatgaatgcttcaatctggtacaactgtttaatggaaaaaatagtggtgtattatgtttttccatataacatatcatttatgagaaaataaaaatagctaaatgttcaatattattttataatatcttcgataaacctttgacaaacaaacataaaataaaatttttaggataatttaaccaagatagtcatattctattatttaaaaaatgttttatgaatcag

SEQ ID NO: 171350 - DNA, 399 bp, Homo sapiens
catgagaacacaggggaaaaactacacaacattgatctgggaaatgatttgttttagatttgacaccaagagcacaggcaacaaaagcaaaaatagacaaattggattatatctaaatraaaagcttctgcataacaaaggaaacaacacagtgaatatacaacctacagtatgggagacaatgtttgcaagctgtagatctgttagagattaatatccaaattatataaggaattcaaacagttctacagaaaagaaacaaataatccaatttaaaactggtcaaaggttctgaatatacatttctcaaaagaagacatacaaatggacagcagatgtaggaaaaatgctcaacatcactaataattagtgaaatgcaaattaaaatcacaatgatat

SEQ ID NO: 171351 - DNA, 476 bp, Homo sapiens
gttctgcttttaattcttttgggaatatccctagaagtggagttgctgaatcacatgtttattgtttattgctagattctttttttttttttaacttttttatttccataggtttttggggaactggtggtatttgcttacatgagtaagttctttagtggtgatttgtgagattttggtgaacccaccacccaagcagtatacactaaaccaattttgtagtcttttatacctcactyccttcccaagctttcttcccaagtacccaaagtccattgtgtcattcttatgcctttgcatcctcagagtctaactcccgcttacgagtgagagtatacgatgtttggttttccattcctgaggtatttcacttagaataatagtctccaatgccattcaggttgctgtgaatgccattaattcattcatttttgtggctaagtagtgagtatacacacacacacacacacacacac

SEQ ID NO: 171352 - DNA, 476 bp, Homo sapiens
gttctgcttttaattcttttgggaatatccctagaagtggagttgctgaatcacatgtttattgtttattgctagattctttttttttttttaacttttttatttccataggtttttggggaactggtggtatttgcttacatgagtaagttctttagtggtgatttgtgagattttggtgaacccaccacccaagcagtatacactaaaccaattttgtagtcttttatacctcactcccttcccargctttcttcccaagtacccaaagtccattgtgtcattcttatgcctttgcatcctcagagtctaactcccgcttacgagtgagagtatacgatgtttggttttccattcctgaggtatttcacttagaataatagtctccaatgccattcaggttgctgtgaatgccattaattcattcatttttgtggctaagtagtgagtatacacacacacacacacacacacac

SEQ ID NO: 171353 - DNA, 520 bp, Homo sapiens
gagtttgaatcagaggctcttcctttcttcagtttacatgtaacttgatctgaactagccactttaggcatgaggctaccagttttctaattttaatgaccagtagagttttagaaaaaaattagaaattgatataggattgccaactttttaaactgccaagaaagacatgaaaataaaccctgctgtcttctattactatccttttatttttattttttaaagtacactttaatagcaataacaacgaaatgcaggaaggatgtaatggccagtctttcccattggatatatttagctttctgaaaactcattatgttgaatatggcatttgggartttctactgtaagggatacaggctcagcttcaattttactaggaatgcaagcctaaaacagtgatcggtgacaataatccaatacaagcctttagctctatagagagcttccccggagggagtcctggtgtctgaagaatgatcattaatcttcttccttcttttctgatgggcagatctga

SEQ ID NO: 171354 - DNA, 615 bp, Homo sapiens
taaattctcataagttttctaagagttttattgccttatacacatttttgctatgttactcagtacataaagtttatgactattgtaggttttatatgattctaccttttattatttttaatatcattttgtctcatttagacccttttgtttttttattttgttttgtgtaataatcttgccatcctcctgtgttaataatactttctcggcatatctttccccatccctttttttaaaccttactttgactttttacttttaaaatgcaaccttagatattcaactaaattgtcttttaaaactacatgagaatctttgaaaacaacataagagtcttgttttggcagcaatttcaacccactcacattgatgatggcttttacttatacttactgttggaaatatagtacaaatatcttgggcytatgaggtgtcaggctcatatattctataaaccatttttctcactcatacatattttatctagaaccagtcctgaagaagatgagcaattctgcactgaataaacatagggtcttggtgaaattcttgcggcaacccgctggatgttaactgtctcaacttagacctattatcgggagcctatactta

SEQ ID NO: 171355 - DNA, 615 bp, Homo sapiens
taaattctcataagttttctaagagttttattgccttatacacatttttgctatgttactcagtacataaagtttatgactattgtaggttttatatgattctaccttttattatttttaatatcattttgtctcatttagacccttttgtttttttattttgttttgtgtaataatcttgccatcctcctgtgttaataatactttctcggcatatctttccccatccctttttttaaaccttactttgactttttacttttaaaatgcaaccttagatattcaactaaattgtcttttaaaactacatgagaatctttgaaaacaacataagagtcttgttttggcagcaatttcaacccactcacattgatgatggcttttacttatacttactgttggaaatatagtacaaatatcttgggcttatgaggtgkcaggctcatatattctataaaccatttttctcactcatacatattttatctagaaccagtcctgaagaagatgagcaattctgcactgaataaacatagggtcttggtgaaattcttgcggcaacccgctggatgttaactgtctcaacttagacctattatcgggagcctatactta

SEQ ID NO: 171356 - DNA, 441 bp, Homo sapiens
gtgttcagtatactcttcacatctagctccacagtccaggttttgtttttttttttttttagttgggtttacttaaactgaaatgcatcttttatttgtgttgtctcagtgccttaaattataacttttcctgcatggaaaaaaaaaaaagtgatttctttagaagtttctctcattaggagtccaaaactgttagctattcataatcccaaagccatcattttgggatctgaggtaggtcgcggtgctgatttgctttctccctcagtgcctgactttgggcttctcatgtgcctggagcgctttctwtttaggattgcagacgtccaaaaagcagaggggcagcttgggaggtcaaatagctaatctctgtctctccatttgcgctccaaagtgctcttctgaggagcggaccaagcccttctcctccctcctgcctgg

SEQ ID NO: 171357 - DNA, 456 bp, Homo sapiens
aatcacataggcccctacttgtcccaggaagtcaagtatctccctctagggacctccacttctcattcaagaaaatactcttccattccagtctggctcagcacaaaggggctgatgatcacttctggtgtcaaggccaggcatctggaaactgaaaactgttagtagttaactgtatctcttgcatggctgtgccacacagtattgtggatggagcttcatgtgatcagtccctggatgcttgccctctctgtggcaatactctgggtttctgcccaggccaagtggtgttccgctcctgagctcagataygcagccgccagcagcagccacatgatgtgcagaaacaaatcctccctcaagttcagggactctcaggccagggattgaaagtcacatgcctatacagcaggcaggtaacagaaatgagtggacaaaatttaagaaaagttggca

SEQ ID NO: 171358 - DNA, 556 bp, Homo sapiens
cctgagtaattttttgattttctgtagagacaaggtcttgctttgttacccaggcttgtctccaaccactgggctcaagcaatcctctggacttgaccttccacagtgctgggattacaggcgtgagccaccactcccagcctgtgataacagtttcttactactactactaccactgtcatcactactattaccaacaagtaagtacctagacacatcatctcacataatccccacaagaagcccatgaggttcacaggcttactgtacagataaggagaaggtagattagggaattatgtcacttggtcaaggtcatgtgatgtgattacagaggagccgcttttaacccctcctctacatgcctgatgttttcagtgcttgatggtacttcaggctcacaacagctccatcccccttcttaaagataaggaaataaaatggaggcctagagagcttaggaggtgtttcctacagtgacgcctctgaagtgataacamtaagattcacgcccaggtctacctaatgcagagaacagtggcctggctggggaaga

SEQ ID NO: 171359 - DNA, 533 bp, Homo sapiens
agaattccttggttatttcttctaaaatatattggttctatggtggattataaatatttgaacctcatatcttaaagatttattgcttatgacatacccagtgtattttaggtactcaagattttgttgaatgaatgaagatgacttgtgctaaactaatacatcaatgatacatttaagttaaaaaaatgtggccgggcgcggtggctcacgcctgtaatcccagcactttgggagtccgaggcgggtggatcacgaggtcaggagatcgagaccatcctggctaacatggtgaaaccctgtctctactaaaaatacaaaaaattagccaggcgtggtggcgggcacctgtagtcccagctactcaggaggctgaggcaggagaatggcgtgaacccgggaggcagagcttgcagtgagccaagattgtgccactgcactccagcctgggtaacagaaaaagactctgtcccccccmaaaaaaaattagctgatgtgttaagctaaaattaagaagtgaaatgcaacagaaa

SEQ ID NO: 171360 - DNA, 500 bp, Homo sapiens
gccttgataatacagataaatttagaaagtatgtaccttttttatataagcagatttgggcatttttcaatggttatttcatggttaaggatagtaaatgtaattctagggaatttcagttgaaggaaaattaattacagttattgaaaagtaggtcaagacttactactgatcacatgcctcttattttaaacggagtaatgcaaagtagcttatagagacctacatgtgaattttccctttattgtgctatttattttacttggagttttaaaatatctatcttgaccagtactttycaatagaactttctgtaatgatggaaatgctccagttctgggcagtccaatatatagccactagccacatgtgcctaacaaatgcttgaaatctggctagtgcaaatgtgaaaatgatttttaaattttttatagatcctgtgtagatgtagatgtgtagattatatgtagacacatctatatgcagctactgggtaccac

SEQ ID NO: 171361 - DNA, 525 bp, Homo sapiens
ggccactctggagacggtaatagagtttcgagtcctttgtctcactgagatttcttcccccattacctgcttatcaaaatcctttttatccatggaggcaaattttggaaatcaaaaaataattcttaaatatattaataaaaatttagttaaaaattaatttgaaaacrgaggccacactttccaaatataagaatgaatatctgagtaaaaaaagcggttgataatgagtgcaacacactaatgtagccatgatcctttatttgtaaaacaaagacagtttagaaaatatctacttaccacttatacaatttaagtaagaactatatgctgtatctattagttacatagttgagtttctcacttgatttcttttccaaaaagaaagaaatttccaataaattagagagatgtgtttaaaagcctcctaccctaaactgggtacttactgctttgagattatatttgttatagaaaatatttttggcagataattatatttcttcatttaaagtcaaagaaaat

SEQ ID NO: 171362 - DNA, 634 bp, Homo sapiens
tttaatgattcacagacactttaaaacatatttttggacttgcctcactttttctaaaagttcctaattctagagaatgagctccttcttcctgtttccttgtgtactaaatcgctattcaggcttctctttattcatcaaagataaacagatggactccccaacggggaagctgctttgaaaattgaagccccatgggaagaatttcctatatgaaccttaaaaaaattgagttgcctccaccgaagaaattatgatgtgtatgtgctccccagttttgcaatctcggttcaaagagctatgtttggcttttgagtaatcattctagtaagaaaaatctgcatctgaaaaatacattccatttcttcttttctaggctagaaaaacctcactgccccccacccccacaaaatgcaatgattcattcattgactatgtccccacrgtggaagtcaggttcctttggggcccagacaggtaaagaagataagagaagcagaaaggtataatccttcagaggtggtggttactgtggtaatctgcccaaaaccattcacatttggaaaataaaataataatggtcaaccagtatgtgatctactaaaaagcttaatttaaaattgtagataaaata

SEQ ID NO: 171363 - DNA, 516 bp, Homo sapiens
acatctgcacatgttcccctgaacttaaaataaaaattaaatttaaaaaatagtggaggcattatggcagacaaggggcaggactagattgcagctccgacttggacggacagagcagcgtgcagaggctcacatcatggatttttagctccagaacgactgcaggaataaatcaggaaacctgagaggacccacagasccccctgaaggaagccaactgcgcctgcaggaccctggagacaccccaaatacagtgagtgcccaaactgcagaagtggaaaagggagatcctctgccccggaacacacacccttacaggggaaatcgaaggtctagtttacaggagaagattctgaacttacctggagctgagtcgatgtagagagccaagtgaaatacacaggtagaggaagaagtgggaaaggccctgtgagctcactgggtccccaagcaggtcattcctgcctggcaccatagggatccttccggagggtggccagaggtgcagggaaaacg

SEQ ID NO: 171364 - DNA, 589 bp, Homo sapiens
gttctttagcttctttcagtttgcagtgagagtcaccaacaggagatcaggaatcaataggacagagaggtgaccatatcttttatcctggccaccaacaagggctggctgtggtttggtagttgtatttctcaaaggacaggaaggatggggatctctgatatcttcagctctcttcaagtgctggcaattattttccctctttcttctccaggtctaatgttgctggcatctgtgtgtttttcccttaatcytgtccacatttttgtaaataatctcttctttcaattcttttcaattatgtgtgctttcaattggttcctaataaaattctgactgatacaataatcttacttcccaactaggtactttgaagtgtcttcttatgagttccattttcccatgcctggtccccattaaatatagtcctaatctatctgtcttgattaatttctattgctcagttacatgaacccttttctctagccagactacataactcactctgtctgccacatatcccctgtattcccataaccagacttgacatgggggactcaatttggctggattgaccagccccttttct

SEQ ID NO: 171365 - DNA, 589 bp, Homo sapiens
gttctttagcttctttcagtttgcagtgagagtcaccaacaggagatcaggaatcaataggacagagaggtgaccatatcttttatcctggccaccaacaagggctggctgtggtttggtagttgtatttctcaaaggacaggaaggatggggatctctgatatcttcagctctcttcaagtgctggcaattattttccctctttcttctccaggtctaatgttgctggcatctgtgtgtttttcccttaatcttgtccacatttttgtaaataatctcttctttcaattcttttcaattatgtgtgcyttcaattggttcctaataaaattctgactgatacaataatcttacttcccaactaggtactttgaagtgtcttcttatgagttccattttcccatgcctggtccccattaaatatagtcctaatctatctgtcttgattaatttctattgctcagttacatgaacccttttctctagccagactacataactcactctgtctgccacatatcccctgtattcccataaccagacttgacatgggggactcaatttggctggattgaccagccccttttct

SEQ ID NO: 171366 - DNA, 439 bp, Homo sapiens
ttttactacagtgaatgccatattatatggagttggtaccacatctctaataattaattgtagcttcaaggtaattaaagatggtttaaagtacaagttggaaaattgatatttcatatcatttccctgggtcagtgaagagaaacaggcccagctgctgcctgaatgggattamctttcagccaacacacatgtgcctatttggggatgaggttagagttcagttaatattcagagaggttatcccaccacaaatgtaaactgatgctatactgaagtcatttacaagagaaccatgaacactctagcaggaacacccacctcaaggggacggggtggggagttgtattaaggtggaggtttgtgcgggggcttgaaggatgagaggagatttcctcagaggacgtggtgggcatttccaaaaaggggatgatgtgta

SEQ ID NO: 171367 - DNA, 582 bp, Homo sapiens
aagcatgttagtaaatcaaccattttctctcatttttttctcactaatatgaaaataaaatcttttagataagttgtataagcaatgcaggaggtttaagagaaagatcttttggcatctggaatttttttcattctacatttgatttgcaatatcacctaatgtcacatgagycatgttctctaatatttaaagcaaatggtagaataaaatcatcagtatcccagcatgaaaaggtgtctaggcatggtgcttctgttttcctttagacatgattagatgcctttattgtgttctttgcaatctgcatcttctctcaatttgctaagaagtgttaattctctaagaggaaaatgtcatttctccaaaacaaaactttacgcaggtgattttttttaaaagccctgtcaggttgacaagtgctataagataataaaccttgtctattatccattctttctccttctctacataataacagattgatgtgatggaaggatatagagaaagaagatgcacttagcattgttaacattgttttctgaagaatgactacgcatgtagtttagaacagcattttac

SEQ ID NO: 171368 - DNA, 582 bp, Homo sapiens
aagcatgttagtaaatcaaccattttctctcatttttttctcactaatatgaaaataaaatcttttagataagttgtataagcaatgcaggaggtttaagagaaagatcttttggcatctggaatttttttcattctacatttgatttgcaatatcacctaatgtcacatgagtcatgttctctaatatttaaagcaaatggtagaataaaatcatcagtatcccagcatgaaaaggtgtctaggcatggtgcttctgttttcctttagacatgattagatgcctttattgtgttctttgcaatctgcatcttctctcaatttgctaagaagtgttaattctctaagaggaaaatgtcatttctccaaaacaaaactttamgcaggtgattttttttaaaagccctgtcaggttgacaagtgctataagataataaaccttgtctattatccattctttctccttctctacataataacagattgatgtgatggaaggatatagagaaagaagatgcacttagcattgttaacattgttttctgaagaatgactacgcatgtagtttagaacagcattttac

SEQ ID NO: 171369 - DNA, 580 bp, Homo sapiens
ttatgatgtattcaaaatgttttgcagtgaagaaaattttgatttgttctagtttattgacaataaagaaaaaatttacatttcaaataaatttatctacatagagggaggaataagcaaatagaggcacaagagaatagtgtaggtgtcagtcagggtagactcatttgtgctgtaaccaaaaatgaccccagatctcattggcatataacgaggaaccatgagttctcacttaygttacatgttcatactctcaggagcctggctcagtgtcaccatcacctgagacctaggtcgcaggaacagccccattggagacactgctaggctcaagggaaaggagaaataagaaggtggagaaccatgtgatggcttgaaatactgtttggaaatgatgcatgtcaattctcatagtccatttgccaaagccagtctcatgacaaactgaagtcaatgaggtgggaaggtatagttctctatagcaaggggccctgtaggtggagcaggaaacattttgaacaaatactactatgtactattgttttcaactacagtgtagttgaaagcttagcttttggaa

SEQ ID NO: 171370 - DNA, 580 bp, Homo sapiens
ttatgatgtattcaaaatgttttgcagtgaagaaaattttgatttgttctagtttattgacaataaagaaaaaatttacatttcaaataaatttatctacatagagggaggaataagcaaatagaggcacaagagaatagtgtaggtgtcagtcagggtagactcatttgtgctgtaaccaaaaatgaccccagatctcattggcatataacgaggaaccatgagttctcacttacgttacatgttcatactctcargagcctggctcagtgtcaccatcacctgagacctaggtcgcaggaacagccccattggagacactgctaggctcaagggaaaggagaaataagaaggtggagaaccatgtgatggcttgaaatactgtttggaaatgatgcatgtcaattctcatagtccatttgccaaagccagtctcatgacaaactgaagtcaatgaggtgggaaggtatagttctctatagcaaggggccctgtaggtggagcaggaaacattttgaacaaatactactatgtactattgttttcaactacagtgtagttgaaagcttagcttttggaa

SEQ ID NO: 171371 - DNA, 580 bp, Homo sapiens
ttatgatgtattcaaaatgttttgcagtgaagaaaattttgatttgttctagtttattgacaataaagaaaaaatttacatttcaaataaatttatctacatagagggaggaataagcaaatagaggcacaagagaatagtgtaggtgtcagtcagggtagactcatttgtgctgtaaccaaaaatgaccccagatctcattggcatataacgaggaaccatgagttctcacttacgttacatgttcatactctcaggagcctggctcagtgtcaccatcacctgagacctargtcgcaggaacagccccattggagacactgctaggctcaagggaaaggagaaataagaaggtggagaaccatgtgatggcttgaaatactgtttggaaatgatgcatgtcaattctcatagtccatttgccaaagccagtctcatgacaaactgaagtcaatgaggtgggaaggtatagttctctatagcaaggggccctgtaggtggagcaggaaacattttgaacaaatactactatgtactattgttttcaactacagtgtagttgaaagcttagcttttggaa

SEQ ID NO: 171372 - DNA, 595 bp, Homo sapiens
ccctttaaattatttggttttctgacagacatttacaattaaaatccattgtataattacaaaagttggagtaccacagaaggattttggtcatgtgtgtaacataatctgacagtttttagcagaatgactttagttgctgtgtggaaagtaaacttaaaaatgcagtgtgaaaggaagatgaatattaagatttttggtcttatcaagtagaataatggagttgccatatactgggtggggaaggctgtaaaagaagcaggtttggactggcgcagtggctcatgccagtgatcccagcactttgggaggctgagcctcgtggatcacatgaggtcaggaacctctgcytagatttcagaggatgtatggaaacacctgaatgtccaggtagaagtctgctgcaagggtggcgctctcatggaaaaattctactcgggcaaagcagagggggaatgtggggttggagcctcaacatagagtacccactggggcactgcctagtggagctgtgagaagacagccaccatcctccagaccccagaatggtagatccaccaacagcttgaactttgtgcttggaaaagcggcaggc

SEQ ID NO: 171373 - DNA, 595 bp, Homo sapiens
ccctttaaattatttggttttctgacagacatttacaattaaaatccattgtataattacaaaagttggagtaccacagaaggattttggtcatgtgtgtaacataatctgacagtttttagcagaatgactttagttgctgtgtggaaagtaaacttaaaaatgcagtgtgaaaggaagatgaatattaagatttttggtcttatcaagtagaataatggagttgccatatactgggtggggaaggctgtaaaagaagcaggtttggactggcgcagtggctcatgccagtgatcccagcactttgggaggctgagcctcgtggatcacatgaggtcaggaacctctgcctagatttcagaggatgtatggaaacacctgaatgtccaggtagaagtctgctgcaagggtggcgctctcatggaaaaattctactygggcaaagcagagggggaatgtggggttggagcctcaacatagagtacccactggggcactgcctagtggagctgtgagaagacagccaccatcctccagaccccagaatggtagatccaccaacagcttgaactttgtgcttggaaaagcggcaggc

SEQ ID NO: 171374 - DNA, 629 bp, Homo sapiens
caggggctgtaccctgcagagcctcagaggcagagctacccaaggacttgggagcctaccccttgcatcagcatggcctggatgtaagacatggagtcaaaggagattattttggagctttaagatttaatgagtgccctgccaggttttggactttcatggggcttatggcccctttattttggctgatttctcttatttggaaagggaacatttatccaatacttgtacccctgttgtattttggaagtaattaagtggtttttttaatttttttttttattttggaggctcataggcagaaggaacttgccttgtctmagataaaactttggacttgcacttttgagataatgctggaatgagttaagcatttggggaaatgatatagtttggctctgtgtccacacccaaatctcatctcaaatgttaatcccatgtgttgagggagcaacctggtgggaggtgattgggtcatgggggagatttacccatgctgttctcatgatagttctgtatctcatgacagagggagttctcatgaaatctgatggtttaaaagtggcagtttcccctgcactatctctctctctctctcctgtcaccatgtaagacttgccttgcttccc

SEQ ID NO: 171375 - DNA, 405 bp, Homo sapiens
tttttttaatttttttttttattttggaggctcataggcagaaggaacttgccttgtctaagataaaactttggacttgcacttttgagataatgctggaatgagttaagcatttggggaaatgatatagtttggctctgtgtccacacccaaatctcatctcaaatgttaatcccatgtgttgagggagcaacctggtgggaggtgattgggtcatgggggagatttacccatgctgttctcatgatagttctgtatctcatgacagagggagttctcatgaaatctgatggtttaaaagtggcagtttcccctgcactmtctctctctctctctcctgtcaccatgtaagacttgccttgcttccccttcacctcctgccatgattttaagtttcctgaagcc

SEQ ID NO: 171376 - DNA, 558 bp, Homo sapiens
aaataaataaataccacattaaattattttatttaattttattagttatacctcaaaactctttgttcctactaaatattattggaaatgcttcattgtactgaaaaatgaattttaattatttgtttttgaataacattctaaagttctggttccaagttcagtgtattttaacattttattttaaagggatggctgtcatagctcagaaaggtatattgacccaactggagaagttcacaactggccatatttgatcattttgatgcatatttttctgttcctattatgaaaagtgtttaattgaaattagctattaattttctaacctaactgatgttgatagattgttcttgaatcrtttgtaaggtgttgcatttttatattttaagcaaacagctcgacacctaataatactattatttggataatttaaaactgattacaaatttctatttttatatttaagattcgtgtaaataacttatcttggcaatacaatctcatactgacagaaactttaacaaatacacaatttcaaaggagtttctttcaaaa

SEQ ID NO: 171377 - DNA, 427 bp, Homo sapiens
ccagaatatatttttaaaaacttataaattaattcagtgacgataagtactacaataggaaatttattgaaaatcttgtcaaaatgtctaatggacatgatatgattctcatttccagtagtaattaaggaaatgaaaattaaaatatcaatgagctattattagagcatgaacattggcaaaatatcaatgttttatattaacaaatattaatgataacgcagtgatggggattctcatacactcttgayggaagtgtaaatggtagactattctggaaagcatcttgacaacatctaataatattgtagatgaaaaatattctaccaaccaaaaactctacttgtacatccacaaccaagagaaagtctcacacatatttatactagtattcaatgttaactgtgacattttaattgaaaaacag

SEQ ID NO: 171378 - DNA, 592 bp, Homo sapiens
aaccatcagatcactttgtggcagactggttgccctgcaccacattcatcgtggaaggagcatccttgtattatcagttgttttgtacataaatttgtcttttctgctctcaatgtttctactgaaattgacsagcttgtcattctgtaaatgacatattcatattcttggtattgtacatagcgttgcttctgaccaatgaactcattttataagcaaaggaattaaggtaatgagatcatgatcatgaattcaatggttttaccatgttctccatcagtctgaagtacctgaacaattagaactgtggaatggcctttggaatattcactttgaagatgcgccaagttattgacaacactttgcagggtcagggttatatctctctggatgtgttttataatttaaatcagtgatgaataaaagtgctgtttctcctatagccagcataaatgtgtctcagaatcaagtggtagaaatgctattgattcttcttatgtgtttgcctcccatttttttgtgcatttgtgctttgctgagtttgaagtcttagtttccaaaagagaaatatttttcaccagaagacacagca

SEQ ID NO: 171379 - DNA, 592 bp, Homo sapiens
aaccatcagatcactttgtggcagactggttgccctgcaccacattcatcgtggaaggagcatccttgtattatcagttgttttgtacataaatttgtcttttctgctctcaatgtttctactgaaattgacgagcttgtcattctgtaaatgacatattcatattcttggtattgtacayagcgttgcttctgaccaatgaactcattttataagcaaaggaattaaggtaatgagatcatgatcatgaattcaatggttttaccatgttctccatcagtctgaagtacctgaacaattagaactgtggaatggcctttggaatattcactttgaagatgcgccaagttattgacaacactttgcagggtcagggttatatctctctggatgtgttttataatttaaatcagtgatgaataaaagtgctgtttctcctatagccagcataaatgtgtctcagaatcaagtggtagaaatgctattgattcttcttatgtgtttgcctcccatttttttgtgcatttgtgctttgctgagtttgaagtcttagtttccaaaagagaaatatttttcaccagaagacacagca

SEQ ID NO: 171380 - DNA, 579 bp, Homo sapiens
aatgtgtatatatacacacacatatacacacacatatgtaataaactcccttttatatatacatatatacacaaaaataaaagggagcttattagagagaattggcttacatgattacaaggtgaagtcccatgataggctgtctgcaagctggggaagagagaaactggctcagtccaagtctgaaagtcttaaaccagggaatcctgacagtgcagccttcagtttgtatccaaaggcccgggagctcctggcaagccactggtgcaagtcccagtgtccaaaggctgaataacctggagtctgatgtccaagggcaggagggatgggaggaagcatccggcacaggaaaaagatggaagccagaagactgagaaagccagcttagcccaccttcttcctcctgctttgttctagccacactggcagccaactgggatggtgcccacccacattgaaggttggtcttcttctcccagtccactgactcaaatgtcartttcctctggcaacactctgacagacacacccagaagcaatactttaccagctatctagagatcctttaatcccatcaag

SEQ ID NO: 171381 - DNA, 348 bp, Homo sapiens
atatataataaaatacagtgttgaagtcagattcaatcaaattcacttcacattttgctgcaataattgatcatagtccctaaatcagaaagaactcagatgtcagatactttaacctttctcccaatgcacaaaacctttcaacagcatttctgagagactacatctagtatttgattgccacttccatgccattgatrttttgatacctttctctagtttctggtttgcttccagtcccttaaataacatgtaccagattgatgtactttctcatctcttttcactccttttcccttaatgtctttcctgctctttcttctttacccttcttttgtatagttttca

SEQ ID NO: 171382 - DNA, 348 bp, Homo sapiens
atatataataaaatacagtgttgaagtcagattcaatcaaattcacttcacattttgctgcaataattgatcatagtccctaaatcagaaagaactcagatgtcagatactttaacctttctcccaatgcacaaaacctttcaacagcatttctgagagactacatctagtatttgattgccacttccatgccattgatattttgatacctttctctagtttctggtttgcttccagtcccttaaataacatgtaccagattgatgtactttctcatctcttttcactccttttcccttaatgtctttcctgctctttcttctttrcccttcttttgtatagttttca

SEQ ID NO: 171383 - DNA, 588 bp, Homo sapiens
actttgttttttacattgtgttattgttttataggccctgtgagttttacaggttcaagaggttctattctggtgtgtattgacattttgtttcagaatatagaactccttacagcatttcttatattgctggtctggtagtaataaattctctcagcatttgtttatctaaaagtgactttatttctctttgatttataaaatttagttttactggatatgaaattcttggctgacaggtattctgtttaagggggccaaagataggaatccaatcccttctggctactaaggtttctggtgagaaatctgctattagtcgttacctggttcttttgtctcactgctctcagaattcttgtattcacattgactttagaaaacctgatgactgtgtgcttaggtgaagtcctttttgtgataaactgtccagttctttgaacttcttgtatttgaatatctaattatctagcaaggacrggaaagttttcctcaattattccatcaagtaagttttccaaaattcttactttttcttctccctcaggagcaccagttattcttaggtttggctgttttacatgatcc

SEQ ID NO: 171384 - DNA, 474 bp, Homo sapiens
gcactgaccctacagtgtagcaaattaccctcaggtcctgggagacaacacaatgactttcaggagcagtttccacatgttcaacatttagtaagtaatatggaccccatgggacataattccaaggaaagaaatggagcacgacttgaacttcccaaatttccccataattttcgaaaggctaagtgttaattacctcaggatctctgggtaatagctaagatagtttcatctctactctccttttgttgtgtacttgacggcatggaaaggagaaaagatcccttcccctttccaaaaaaaaaaaaaaaaaaaaaaaaccggacccaaaattttcttatctttttgttaagtttcaaactttttcagtcaataatctgtcaaactaaagggtctttyttttcctttaatcacaggcttgacccaaggaaagggaaaataatattcactttctctttgtgaatgttcactgac

SEQ ID NO: 171385 - DNA, 474 bp, Homo sapiens
gcactgaccctacagtgtagcaaattaccctcaggtcctgggagacaacacaatgactttcaggagcagtttccacatgttcaacatttagtaagtaatatggaccccatgggacataattccaaggaaagaaatggagcacgacttgaacttcccaaatttccccataattttcgaaaggctaagtgttaattacctcaggatctctgggtaatagctaagatagtttcatctctactctccttttgttgtgtacttgacggcatggaaaggagaaaagatcccttcccctttccaaaaaaaaaaaaaaaaaaaaaaaaccggacccaaaattttcttatctttttgttaagtttcaaactttttcagtcaataatctgtcaaactaaagggtcttttttttcctttaatcacaggcttgacccaaggaaagggaarataatattcactttctctttgtgaatgttcactgac

SEQ ID NO: 171386 - DNA, 548 bp, Homo sapiens
atgggaattttctggttatttttctgtggctgatttcttgctcaactgtattgaagtcagtaacatgctgtatgtttacattcctttgaaatatttgaatcatagtctaaaatagtgtctcttgtaaatagcatatgatctgaaaatatttttaattgatacattaatctctttttatttaatgcaagtactgatattcatggttcaagtatattattttactaattgtttttctgtttgttttgcccattctattattatttttctcacactttactttcaagtgcattgatggattcacttctttaaatttttttatcatggtaaatacatgtatcataacatttaccatcataaccattttaagtgtacagttaatgrtattaagtacattcatatagttgtgcaaccttcatcactatccatctccagaactcttatcttgcagaactaaaactctatgcccattaaataataacttttctgctctcctccccttatgcccttacaaccaccattctactttcagtatctatgattttcactat

SEQ ID NO: 171387 - DNA, 585 bp, Homo sapiens
caatctacagactcaatgctatttctatcgaactatcaatatcattttattcagaagtagaaagaactattttaaacttcacatggaacccgaaatgagatgaaatagccaaggcaattctaagcataaagaaaaaaggcatcatgttacctgacttcaaactgtactacaagtctgcagtaaccaaaacagcatggtatcggtacaaaaacagacacatacaccaatggaacagaatagagagcccagaaataatgctgcacacctacaaccatctgatattcaacaaagccracaaaaacaagcaatgggggaaaggaccccctattcagtaaatggtgctgggataaccagctagccatctgcagaagattaaaactggaccacttctgtattagtccattctcacactgctataaagaactacctgagactgggtaagaagaaaagaagtttaattgactcacagttccacaggctttacagaaaacattaacgggtagcctcagaaaacttacaattatcatggaaggtgaaggggaggaaaacacatcttcccatgacagaagaggagagaaagagaga

SEQ ID NO: 171388 - DNA, 373 bp, Homo sapiens
cttacacaggtaactctttgagtgctgtgaaatgatccaaattagaaggcaaagaagtgaaaacgggtgcttgcttaaaagaccgtgtatgctcataaaaatgagctgttacagtggtctttcatcccaatccctgcagataaaaagcaatctccacatgatttgctaaagctctcttacctcactttcacagagcaaaaaaatcatgattgaaaacagggcaggtgttttgtcaagttgctatggtgagaagatagaaaaaygaatgtttgtgatattgaaatttctctttcttcagacatttcccgtcaaactacatatatgtattttttaaaagtataagtgaattcatattccattaagagaatgtccc

SEQ ID NO: 171389 - DNA, 535 bp, Homo sapiens
ttcccgtcaaactacatatatgtattttttaaaagtataagtgaattcatattccattaagagaatgtccccctaccacggctaggtttctagataccttggacaaatttctaatataaatctgcctttcttagtttacaataataagcaaatgcattttgatattatmatatcaataaaaatattctttatccattatattataaagtttacattaattttgttccactctgctaagtatctcatttgttagttcaatcatggtagcgaactgagaaatgctcccatgtgtcaccaagtatttgtcatcccaagtattctctagcctgattcatgtttcctctaaatgaatttagattcctttgaaggatgaaaagcatattttatatcttttcaggtttattgttttaaattttatttgtttatgtagtgttctttgagatgcctatgagtctggatgtatatgcaaaaaataaaggaaggcctgttttggacttttctcttaaattgtatgccaaacactgggggatgggga

SEQ ID NO: 171390 - DNA, 535 bp, Homo sapiens
ttcccgtcaaactacatatatgtattttttaaaagtataagtgaattcatattccattaagagaatgtccccctaccacggctaggtttctagataccttggacaaatttctaatataaatctgcctttcttagtttacaataataagcaaatgcattttgatattatcatatcaataaaaatattctttatccattatattataaagtttacattaattttgttccactctgctaagtatctcatttgttagtwcaatcatggtagcgaactgagaaatgctcccatgtgtcaccaagtatttgtcatcccaagtattctctagcctgattcatgtttcctctaaatgaatttagattcctttgaaggatgaaaagcatattttatatcttttcaggtttattgttttaaattttatttgtttatgtagtgttctttgagatgcctatgagtctggatgtatatgcaaaaaataaaggaaggcctgttttggacttttctcttaaattgtatgccaaacactgggggatgggga

SEQ ID NO: 171391 - DNA, 535 bp, Homo sapiens
ttcccgtcaaactacatatatgtattttttaaaagtataagtgaattcatattccattaagagaatgtccccctaccacggctaggtttctagataccttggacaaatttctaatataaatctgcctttcttagtttacaataataagcaaatgcattttgatattatcatatcaataaaaatattctttatccattatattataaagtttacattaattttgttccactctgctaagtatctcatttgttagttcaatcatggtagcgaactgagaaatgctcccatgtgtcaccaagtatttgtcatcccaagtattctctagcctgattcatgtttcctctaaatgaatttagattcctttgaaggawgaaaagcatattttatatcttttcaggtttattgttttaaattttatttgtttatgtagtgttctttgagatgcctatgagtctggatgtatatgcaaaaaataaaggaaggcctgttttggacttttctcttaaattgtatgccaaacactgggggatgggga

SEQ ID NO: 171392 - DNA, 467 bp, Homo sapiens
gcctaaccaactaacctgtttaataaaatataaacagaactcattccctgtttagggtaatgataatcaaattatatcttaattatatactgcacaaagatattttgatgacatttaaaaaatatatctgcacagctagtaccagaactagaagtacagaaaacaaagtctttcaaatctgttctcacaaayctctgatagacaggaatccaaagtacaaaagcagcagagtactcatagtcttccaccagaggcatgggggggggaaaaacgaaattttactctctcatggctcaaggtgaaactgctcaaatctgaaggtaacatgaaaaatggttgagggaagggttagcaaagaagagtagcctgagcatcattttctcctgaagccttctctttttcacaatgacatctcgtccagaataaaactggcaaacctaatagccactgacacaagccacatttgc

SEQ ID NO: 171393 - DNA, 562 bp, Homo sapiens
aactctaacttctttgcacagacttcctctgaaatctgaaaaggagcatctggaagaattgctgtagtaacatgactggagctgccatctctaaaatcatcaattcaacattcccactatggctggttgtctcttgtcctcactgctactgcacatgttctttgactttaaaatatcttaaggtccttgaccttttaaaaatcttattcattggcttgkcacggtggctcatgcctgtaatcccagcattttgggaggccacggcaggcggatcacttgaggtcatgagttcgagaccagcgtcgccaacatggtgaaaccccatatctactaaaaatacaaaaatcagccaggcatgatagcatgcgcctgtagtcccagctactcaggaggctgagtcaggagaatcacttgaacccgggaggagaaggttgcagtgagccaagatcacgccattgcactccagcctgggcaacagagtgagactccatttgaaaacaaacaaacaaaaaaaacaaaaaaccttgtttattatcttatttccaactttatctccttacct

SEQ ID NO: 171394 - DNA, 562 bp, Homo sapiens
aactctaacttctttgcacagacttcctctgaaatctgaaaaggagcatctggaagaattgctgtagtaacatgactggagctgccatctctaaaatcatcaattcaacattcccactatggctggttgtctcttgtcctcactgctactgcacatgttctttgactttaaaatatcttaaggtccttgaccttttaaaaatcttattcattggcttggcacggtggctcatgcctgtaatcccagcattttgggaggccacggcaggcggatcacttgaggtcatgagttcgagaccagcgtcgccaacatggtgaaaccccatatctactaaaaatacaaaaatcagccaggcatgatagcatgcgcctgtagtcccagctactcaggaggctragtcaggagaatcacttgaacccgggaggagaaggttgcagtgagccaagatcacgccattgcactccagcctgggcaacagagtgagactccatttgaaaacaaacaaacaaaaaaaacaaaaaaccttgtttattatcttatttccaactttatctccttacct

SEQ ID NO: 171395 - DNA, 562 bp, Homo sapiens
aactctaacttctttgcacagacttcctctgaaatctgaaaaggagcatctggaagaattgctgtagtaacatgactggagctgccatctctaaaatcatcaattcaacattcccactatggctggttgtctcttgtcctcactgctactgcacatgttctttgactttaaaatatcttaaggtccttgaccttttaaaaatcttattcattggcttggcacggtggctcatgcctgtaatcccagcattttgggaggccacggcaggcggatcacttgaggtcatgagttcgagaccagcgtcgccaacatggtgaaaccccatatctactaaaaatacaaaaatcagccaggcatgatagcatgcgcctgtagtcccagctactcaggaggctgagtcaggagaatcacttgaacccgggaggagaaggttgcagtgagccaagatcaygccattgcactccagcctgggcaacagagtgagactccatttgaaaacaaacaaacaaaaaaaacaaaaaaccttgtttattatcttatttccaactttatctccttacct

SEQ ID NO: 171396 - DNA, 478 bp, Homo sapiens
agaaacacatttgcaagctctatagcccaatccttcaaatgaaacrtgtctacttagaagaatgttaatttaatgaatgcaaataaattaagacatgttttttcccttgaatataaaattgttttaccacaatgtattactctactcttctgtttcatgaaccacctacatgtgggtaacagccctccaggaacagaatgcagtccagtctgttcaataacctaaaaacatcttaaagccatctgctattaaacatgttcagggaagatggaagcaaaggggtaaaaagaaaacacaatattcaaaatgttactaattgattataagattttatttctgcaaatgttcagtttcaaaatttcatactaaagaatctaaaattaataattatagcctgtctattttcacctattcttttgggaaactctttaatagtgcttattcaactaacatcccaaagagaaatgggaaacagtgt

SEQ ID NO: 171397 - DNA, 562 bp, Homo sapiens
gctataatgctaaacagcccaagagaagtgctatttgaatgacagaaactaaatacctaagagaatttcagagttttaatttggctttggaatgatcaagtgaccttataaacactagagtgcagccaaggtcaaggctccttagatgaggmgagctctttgtttcgaaggtcctagaatggaaatttcttggtattgcagaaatactaggatttgtttactcttaaattgctttgactcagttacattgcaaagttaccgttgtcctttgctaaaagaccaaatactcactcaacgttaagagaacatctctttcttaacatgagggttttgtgaattaaatgctatgaagaatatttaagagaatccagaaagaaaaagttaactttacagatgagatgctgaagcccagataagtgaagtgagttatgggcagagaggacgtcggcgccttgttttctaatttctttttttttaattttattattattatactttaagttttagggtacatgtgcacaatgtgcaggttagttacatatgtatacatgtgtcatattgg

SEQ ID NO: 171398 - DNA, 562 bp, Homo sapiens
gctataatgctaaacagcccaagagaagtgctatttgaatgacagaaactaaatacctaagagaatttcagagttttaatttggctttggaatgatcaagtgaccttataaacactagagtgcagccaaggtcaaggctccttagatgaggagagctctttgtttcgaaggtcctagaatggaaatttcttggtattgcagaaatactaggatttgtttactcttaaattgctttgactcagttacattgcaaagttaccgttgtcctttgctaaaagaccaaatactcactcaacgttaagagaacatctctttcttaacatgagggttttgtgaattaaatgctatgaagaatatttaagagaatccagaaagaaaaagttaactttacagatgagatgctgaagcccagataagtgaagtgagttatgggcagagaggacgtcggygccttgttttctaatttctttttttttaattttattattattatactttaagttttagggtacatgtgcacaatgtgcaggttagttacatatgtatacatgtgtcatattgg

SEQ ID NO: 171399 - DNA, 556 bp, Homo sapiens
ttgacaactgaatgccatagaatagttaggacttaatctgactgtattgttaattataatttggagatcttcgtttgcacaycttgcccatgaaacactcccgaagttcacatgtcatttgcacatgaaaatcatctcaagtccactagatcaggtgtaagtattcttcaaacctgctcttcataaaaaaacagcctatgttaatctctcttatggcaccctatgtcatactattattcatgacacttaatgcgtgacaatatcataatttgaaattatatatacatatgtgtgtatgcatatgtatatttgttcattagtttaacatctgtcatatgatacactgtaagctctgtggagaaaaacaattagtcagctttgtgtcaattttattttcattctggcacctagtggttattcagtaaatatcttttgaatgaacaaatgattactgattgggtgctcttctgaaaatggaaattgatgaatattcttacattttggctaggtacaattaataacaaaaaaggagtaccattgcaatacacaccacgaa

SEQ ID NO: 171400 - DNA, 556 bp, Homo sapiens
ttgacaactgaatgccatagaatagttaggacttaatctgactgtattgttaattataatttggagatcttcgtttgcacatcttgcccatgaaacactcccgaagttcacatgtcatttgcacatgaaaatcatctcaagtccactagatcaggtgtaagtattcttcaaacctgctcttcataaaaaaacagcctatgttaatctctcttatggcaccctatgtcatactattattcatgacacttaatgcgtgacaatatcataatttgaaattatatatacatatgtgtgtatrcatatgtatatttgttcattagtttaacatctgtcatatgatacactgtaagctctgtggagaaaaacaattagtcagctttgtgtcaattttattttcattctggcacctagtggttattcagtaaatatcttttgaatgaacaaatgattactgattgggtgctcttctgaaaatggaaattgatgaatattcttacattttggctaggtacaattaataacaaaaaaggagtaccattgcaatacacaccacgaa

SEQ ID NO: 171401 - DNA, 613 bp, Homo sapiens
tccaatgtcatttgtaagatctccaacagtgttagtcccccgaataatccataaccttagagcctacaatagaagtcaactacacatcatcttcttccatttcagtttytacctgtaactcagatattcaacagccaaaaatttcagtagcttcagatacccctgacctaaaggaccattaagattgccagggaaaatacaagattacccatttattttgaactatattatttgaaagtaatattctgtaaacttcaaagcagcagcaaacaattgaaagagttcctagtgttagtataattcactgatagttgttacaggttatggtatgcatttctaggcactccacggctctaagaaaaatgctgaacataattgatgataaaaaattgcataatcgataattagaaaatctcaggttttatttaaggcatttaatacaaagtagttcaactttgaatatgctgtatcatgtagattcctttaaaaaaaagtcaatccaaactttaacttaagtaaccattataagggtactacctatattttgatggatgtatatctgatgaatagtattgcaactttagctctgtaatatcaggtgaggtaaaccaga

SEQ ID NO: 171402 - DNA, 613 bp, Homo sapiens
tccaatgtcatttgtaagatctccaacagtgttagtcccccgaataatccataaccttagagcctacaatagaagtcaactacacatcatcttcttccatttcagtttctacctgtaactcagataytcaacagccaaaaatttcagtagcttcagatacccctgacctaaaggaccattaagattgccagggaaaatacaagattacccatttattttgaactatattatttgaaagtaatattctgtaaacttcaaagcagcagcaaacaattgaaagagttcctagtgttagtataattcactgatagttgttacaggttatggtatgcatttctaggcactccacggctctaagaaaaatgctgaacataattgatgataaaaaattgcataatcgataattagaaaatctcaggttttatttaaggcatttaatacaaagtagttcaactttgaatatgctgtatcatgtagattcctttaaaaaaaagtcaatccaaactttaacttaagtaaccattataagggtactacctatattttgatggatgtatatctgatgaatagtattgcaactttagctctgtaatatcaggtgaggtaaaccaga

SEQ ID NO: 171403 - DNA, 539 bp, Homo sapiens
cagtctatttggtgtcatgttttttgcatctttgtgctttttgtcagtgatttttgtgtttaaaacagtgatagtgctgaagttctacaaagtgttcctaagtgcaagaaggctgtgatgtgccttatggagaaagtaacttcagacatgagttaaagctggccatgagttcaaagttcaaaattgacaatatatattcaatgaggtggtattaaatagaaatacatataaaacaaggttatatattgctcagttgctgaaatgttatgatcagaagctcataggaacctaatcttattttttctctrtgagcaatgcttctactgtttgctttacagaacccaactaccacaaataatgataatcaactgtataatcaaaatatggttcaaagtttactgacaaaagacgaaattctttccatttaatttataaagtcctttggcaaattaccacagttaaaacatggcttacaaatcacctggtctaccaactttaaaataatgaaaagttgaagataattttctgtccagttcaca

SEQ ID NO: 171404 - DNA, 563 bp, Homo sapiens
tttgtcttaaattaacaaattattctaaaaattaaaaatgctcttatttattaaatattgggggcttaaatctaaaaaaactactctaaaataatgatacactgactttaatatatataggctaattcctcttaaatataaatatgtgtctatatcttaaatatatatgtatatcatgaatatstcttaaatatatacacacgcatttatatacacaacacatatataaatagctctacaactaacctgataactcattttcaacaaaaagtatggctttaaaaaatagtatctactagatagtagaatctgaatgctttaatatttctattggaattgagatatctatttctaaacctacaaataaactctacttgtctgatttgagaattgctggttacaaaagagcagagaaaactcaatagttctttagaaagaggtaaaacacacacatacacaaacacaaacacaattctcctgtaaaaactatatttgatggcaaaaatcagattcttcctaaattctaaaaataaaacatatgcctgccagaaggccaagtatta

SEQ ID NO: 171405 - DNA, 463 bp, Homo sapiens
aaccaagtaatgaatgtactggtcaaattaacatgtagcttcaatgaagggaaaaatcggggagggctggcttaatcaagaaaggttagtcagcatcagtgtagattagtgcttaagaaaacaggctctggaattagaatgaattatgtttaaatccctgctgtgtaattagctgtgcratcttgggtaagtaacttaactgtttgggatgtttcttactctatataattgggaggattctatgaaaatttatgtagatgtaaaattatactgcgcagcagaaacttaacatggagtagttattttctcttctctcttactgtgcctaaggatgaatcagaaaaatcaaagaaaatatcagaaaatatactgtatatttctggctaaaaataatacatgtacttttatgaatttttgaaaagaacacaaaaaagaagataatggaaaagatcacctgtaattt

SEQ ID NO: 171406 - DNA, 304 bp, Homo sapiens
ccatccctagacatgtggggattatgggtattacaatttgagatgagatttgggtggggacacagagccaaaccatataawctcccgtgtctaggaactgaacaccgaggagatctcctattgggatcacatgagcaccccaagagaagcaacgtatggaagcctgccacacaagagaagcaatagctagccaatgttagccaagagataacctaaccagaacatctttctctctctctctttctggcttccattctataagataaaaaagagaggcatggagaaaataaatttggaatagata

SEQ ID NO: 171407 - DNA, 524 bp, Homo sapiens
atcatttgttgaaaacattatcacttatccatttaattacttgtccatctttatcaaaaatcggttgtccctatatttatatgaaactatttctggaatctcttctctgttctcttggtctatttgcctatctttatgccaatttcatactgtcttgattaatgtagctttataatgagtcttgaaatcaggtagtgttactcctccaactttgatatctgyttccgaatttgttctggcattctatatccctacattattttatgatgttacaatcaacttgtcaatttataccctcccaaaaatgtcttctgggattttgatagggattgtgttaaatctaaatatggagttggagagaattcacattttgacagtgtcgagtcttttgaactatgaacaatgtatgtctctcctccttttatttatttttctttgatttctctcaggaatattttgcagtgctcagtgtaaacatatttcacacgttttgccagattcttccttaatatattttatatttt

SEQ ID NO: 171408 - DNA, 474 bp, Homo sapiens
aagacaagtttgatatctaaccagttggagatactgttaatgctcatgatttacttgatatattaactgacttcagctgtctggaaagaaatgtttgtctagctatctgtttcctatatagggaaggttccaggtcaagtactaaaaatgatcatttcctaaaaatgattttccttcccyatagttaaagtaaaatgttaaataatcaggctgtagagaaagcagaacattggtaggccacaggaaagagaaagtctttgggcttggctaagctgaattatgacaaatagatcttgttattattatttttaaaaaacttttttaaaggagtctagttctttactaacttctgattttatcaatgtttactctcatttaaggtttaaggtgccatgtatttgtgtttctgaatctgctgtctttggacaagtgacttgctgtatggattagagtggataaaggaaacaattggag

SEQ ID NO: 171409 - DNA, 391 bp, Homo sapiens
taatagtgtaaataaaaagttcagtagataggctcaacagcagaatgatgaggacagaggaaagaataaacaaactggaagacagaacaacagaaattatccaatttgatcaaaacaaagaaaatagaatggaaaaaaatgatcagsgcctcagggatttgtgggatcataacaaagtatctaacattcatgtcacctgagttcctaaaggagagagacagagggcaaagcagaaaattcccacttagcaagagccataaacctacagattcaagaagctgagtgaaacacaaacagaataaattttaaaatgtccatgctaagacacatcgtaacttctgaaaattaaagacaaagaaaaaaatcttgacagtagccagagataacacat

SEQ ID NO: 171410 - DNA, 400 bp, Homo sapiens
aaaggaagtcatgtcatcctacaaaggaaaacagtaggcaaggcattcgatcttctgtttgtaaagagttgacaggtaaaatctgtgtcagcttagggggaaaaataaattcacataaagatttccttatggaaaatatgagattcctgagcttttctttcattttcctgaggtgtatataaaacaaaracagatatttttagtattctctcctttgttgataatttttatttacttagagaacctctttacagttgaacataaaatattaaacagagaacctggaagggcctatattaggcagtacgcagcaccaacgtagcctgtcactgcattctattgtccccagaatttaattttatagccttctggagtctatgcctcctctctgataaaacat

SEQ ID NO: 171411 - DNA, 247 bp, Homo sapiens
acttcacagctgaactgactagtaattaactgaaaagtaacattaattcctcgaaaaaggcagactgcccctcaagtatcctattttgcacctgtgaatctgttttataaagtaaatgaaaagagattagggatattttaaagaattgagacaatgaaaaaattctcaaaaaaaaaaaaaaaaaaaaagctgtgtacttacttgtttttcaatttcctttasccgactctgatctttttgaaattca

SEQ ID NO: 171412 - DNA, 599 bp, Homo sapiens
ctaaatggaatgataaatgtccttagaagaaggagagaagacacagacagagcaggagaccatgagaaaatggaggcagagataggaatgacacagtcacaagccaaggaaccccaggagccaccaaaaactgggagaggcagaggaggattcttcgatagtgcctctggggggagtgtgaccctgccaacacggtgatttggtacttctgttccccagaactgtgagagaataaatttttattgttttaagcctccaagtttgtggtaatttgttacagcaaccacagaaaactaatacagtggagtgaccatgggcaagtcagttctctgtcagtttcctcctgtttataatgagcatggtgatattagcgcttacctggtagtgttgttataaggataaataagtcaatacagtgcttagaatgacactgcaacatagtaagagcccaatrcacaatacggcttgtgttatgagtccatgctgattactattgataaggctacatggacttttaagggactgcttctctgcttctgttatgcaaaacttggggaaagtgtggcttgtggactccagggccctattaccttgcaccc

SEQ ID NO: 171413 - DNA, 539 bp, Homo sapiens
tatgtccttttccttggactgagtacaagaatagaagcaatagaccctctaaggagccaaagagaattaatggtgctttagaatagtgtagcagcagtggaaaggaagagaagtggaagtatgtggtatgtactctaaaggtagagccaacagatcttgttgaaggattacctatgggaggtgagagaaagagaataattatgggaaattcctaggttttggcctgggcaactgggagaaaggtgatactatttaatgggatgggaaaggacaagcagytttgtttttattttgtgtgtttgtgtgggtgtgtgtgtgtgtgcatgtaaacacgtgtggggtgaaattgataatcaaaagttctgttttggacaagtcaactttgagataggtgataaattagaaattagagttgtaagcctggtaactgagcacaacggttttgagctcaagtaagataccagaggtgggatattgaatttgggattcactgggtttgacatatatgatattagaaggcctgggagtgtttgcaatca

SEQ ID NO: 171414 - DNA, 522 bp, Homo sapiens
ctgaatatttacaaagatggcaggcatgaggaattggtaaaatgtgtttatgccattgccatattgttgccccattttaaccagaaatactaatacctgctattctttcttaagattggatttgcaattgtgccagttttgagttatgtcaagtcttcagaagtacatccctttcatgggtyccactgggtttcagggatggcaacttgaaacatgcaatcattgtcattggggggccccttagtccagtgagggagatgaagaaatatatagggtgagtggaataaggtgagatgtaaaatgatgaacatgagtagaatgtttccaaagtacagagaagggacacatgacacaactttgaaggcaggtaagacattctaagggaactattgtctgagttgactcatgcagtaagtggaagttagcccaggaaattgttggctagatgggtagactgtaggagggaaaggacattcaggtagaagaaacaacatacgcaaagacatggagataagcattttg

SEQ ID NO: 171415 - DNA, 591 bp, Homo sapiens
tgcgcttttcacagttcttcatacaggtgaccgaaacactgattattctagtgctatgaactgaattttgttcttccacaagtcctatattgaagtcttaacccccagtgtgactgtattggagatagatttgttggcaggtaactgaggtaaaatgaggttgtaattatgtgctaccaatccaataggagttgtgttcttataaaaggcracaccagagagctcgctttgtctcttcccatgagtgctcagagcatgaaccatgtgagtaaaaagcagccacctgcaagccaggaagagggacctcaccagaaactgaatttcctggaaccttgatgttggactttccagcctctataactgtgagaaaattcatttctgttgtttatgctgcccagtatctggcattctgttatagcagctctggcagattaatacaccttgtaatattcataattaccgtgagatattcttgttaccaggagaatgtgagagagacattctggagctgtgacattgtcattcaagtatatggtcgcctccagagtagcaatcaggaacataagacccaggtagcatcaaggctgtgga

SEQ ID NO: 171416 - DNA, 591 bp, Homo sapiens
tgcgcttttcacagttcttcatacaggtgaccgaaacactgattattctagtgctatgaactgaattttgttcttccacaagtcctatattgaagtcttaacccccagtgtgactgtattggagatagatttgttggcaggtaactgaggtaaaatgaggttgtaattatgtgctaccaatccaataggagttgtgttcttataaaaggcaacaccagagagctcgctttgtctcttcccatgagtgctcagagcatgaaccatgtgagtaaaaagcagccacctgcaagccaggaagagggacctcaccagaaactgaatttcctggaaccttgatgttggactttccagcctctataactgtgagaaaattcatttctgttgtttatgctgcccagtatctggyattctgttatagcagctctggcagattaatacaccttgtaatattcataattaccgtgagatattcttgttaccaggagaatgtgagagagacattctggagctgtgacattgtcattcaagtatatggtcgcctccagagtagcaatcaggaacataagacccaggtagcatcaaggctgtgga

SEQ ID NO: 171417 - DNA, 591 bp, Homo sapiens
tgcgcttttcacagttcttcatacaggtgaccgaaacactgattattctagtgctatgaactgaattttgttcttccacaagtcctatattgaagtcttaacccccagtgtgactgtattggagatagatttgttggcaggtaactgaggtaaaatgaggttgtaattatgtgctaccaatccaataggagttgtgttcttataaaaggcaacaccagagagctcgctttgtctcttcccatgagtgctcagagcatgaaccatgtgagtaaaaagcagccacctgcaagccaggaagagggacctcaccagaaactgaatttcctggaaccttgatgttggactttccagcctctataactgtgagaaaattcatttctgttgtttatgctgcccagtatctggcattctgttatagcagctctggcagattaatacacctwgtaatattcataattaccgtgagatattcttgttaccaggagaatgtgagagagacattctggagctgtgacattgtcattcaagtatatggtcgcctccagagtagcaatcaggaacataagacccaggtagcatcaaggctgtgga

SEQ ID NO: 171418 - DNA, 591 bp, Homo sapiens
tgcgcttttcacagttcttcatacaggtgaccgaaacactgattattctagtgctatgaactgaattttgttcttccacaagtcctatattgaagtcttaacccccagtgtgactgtattggagatagatttgttggcaggtaactgaggtaaaatgaggttgtaattatgtgctaccaatccaataggagttgtgttcttataaaaggcaacaccagagagctcgctttgtctcttcccatgagtgctcagagcatgaaccatgtgagtaaaaagcagccacctgcaagccaggaagagggacctcaccagaaactgaatttcctggaaccttgatgttggactttccagcctctataactgtgagaaaattcatttctgttgtttatgctgcccagtatctggcattctgttatagcagctctggcagattaatacaccttgtaatattcataattaccgtgagatattcttgttaccaggagaatgtgagagagacattctggagctgtgacattgycattcaagtatatggtcgcctccagagtagcaatcaggaacataagacccaggtagcatcaaggctgtgga

SEQ ID NO: 171419 - DNA, 456 bp, Homo sapiens
aaggaagatactgattttagaaactagcaatgtgccacatgggaaaagacgttcagttgccaacaggacaaaggcccagccgccttccagcatgagctccccaccctcctctacagagcctctgggatgtgcctatctgccccactccctttccccaagacacattctgcctttcccccctgcatgcttttgcttctttcaaagaacagaaacataatattttgccaagactttgcgtgcaccttatctatatgagttacattgtaaatagcattctattcaactttcaaaccatccccatgaggtagaaatctctattttacaaattaaaaaaaaaaaaaaacaggcacagaaagatttgtctacttgcccaaagtcacagagcaaataagtgacagaataacttttttaaagcaataaagcaytgtcatttttgtatatatactatatggtaag

SEQ ID NO: 171420 - DNA, 610 bp, Homo sapiens
aattaatttatcttttttcttacctaaaaatttccacctgtcaaatcttccacacactccaaagcataatctgtcgctgacactgtcagaaattcaacactgaaaatttcataagatttggtagtcacctttagtttagtagactgatagggtttggctgtgtccccacctaaatcttactgtgaattgtaataatcccatgtgtcgagggtggggccaggtggagataattgaaagatgggggtggttcccccatactgttctcatggtagtgaataagtctcgtgagatcwcatggtttcataaatgggagttgccctgtacaagctgtcttgactgctgccatgtaagacaagcctttgcttctcctttgccttccactatgattgtgagacctccccagccatgtggaactgtgagtccattaaacctcttttctctataaattacccagtctagggtatgtctttattagcagcttgagaacaaactaatacatagacacatggcaaaagatgtggagacgacctggctgttagtcacataaggagatggttagagtcacaggcactggtacattggagctgactcacgtgggctttgaagaatc

SEQ ID NO: 171421 - DNA, 396 bp, Homo sapiens
tgaattctttcctgtgtgaagcccaagaacccactcttgaagtgtggatcgggacctctttttccagtaacgctagtactgttataattaggtaaatgttactcacacctgaaacatggagcataaatgattgaatttcatttctacacaacattttttyccttaaactgacaatttttgaaaatttttgttttgttcatttttctatgtatgtatcaaagtaccaactccaaactctaccccagttttccaatgagtctcctaatgcattcagaagcattagacattttatcagatttatctttttgaaattttttttctagatagctctaatttacacaggttgctgtgtacacatactgtacatctaataaccaggagattccctgtacttta

SEQ ID NO: 171422 - DNA, 396 bp, Homo sapiens
tgaattctttcctgtgtgaagcccaagaacccactcttgaagtgtggatcgggacctctttttccagtaacgctagtactgttataattaggtaaatgttactcacacctgaaacatggagcataaatgattgaatttcatttctacacaacatttttttcmttaaactgacaatttttgaaaatttttgttttgttcatttttctatgtatgtatcaaagtaccaactccaaactctaccccagttttccaatgagtctcctaatgcattcagaagcattagacattttatcagatttatctttttgaaattttttttctagatagctctaatttacacaggttgctgtgtacacatactgtacatctaataaccaggagattccctgtacttta

SEQ ID NO: 171423 - DNA, 396 bp, Homo sapiens
tgaattctttcctgtgtgaagcccaagaacccactcttgaagtgtggatcgggacctctttttccagtaacgctagtactgttataattaggtaaatgttactcacacctgaaacatggagcataaatgattgaatttcatttctacacaacatttttttccttaaactgacaatttttgaaaatttttgttttgttcatttttctatgtatgtatcaaagtaccaactccaaactctaccccagttttccaatgagtctcmtaatgcattcagaagcattagacattttatcagatttatctttttgaaattttttttctagatagctctaatttacacaggttgctgtgtacacatactgtacatctaataaccaggagattccctgtacttta

SEQ ID NO: 171424 - DNA, 235 bp, Homo sapiens
cccatttcaaaaaattatttacatatatcatacttcattgtacttttttcttttcccaaatgcctktattttgttgctggccctataagaccaattatttaattcattaaactttccctttctcattcccaactctgtttacactaacttttctggagatgcagtcagctttaccttccaaatctcccattaagttatatatttctgcaataaatttcttaaattttaagaattc

SEQ ID NO: 171425 - DNA, 235 bp, Homo sapiens
cccatttcaaaaaattatttacatatatcatacttcattgtacttttttcttttcccaaatgcctttattttgttgctggccctataagaccaattatttaattcattaaactttccctttctcattcccaactctgtttacactaacttttctgsagatgcagtcagctttaccttccaaatctcccattaagttatatatttctgcaataaatttcttaaattttaagaattc

SEQ ID NO: 171426 - DNA, 481 bp, Homo sapiens
gagtacaatgtctttatgctactccaaagagaaggtttgcctccaaaagagaagcccaagaagtttgctttgagctataacaaaaataaggtttctgaagaaagaaatcagacaaaaagtggtttctctaggaattaaaaaagaagcagaaatagataaagaaaaattgttcttgtcaatttagtgcatagcaacgtattattgtttttagtgctgggtctcttttcccctaaaacctggatatgctgtattctttaagccaatttcaagaaataagtgaaaaatctcataggaaaaaagaaaggaaaatcgctctttgaatatacactaaaacctgaatgtacaaatggtacctatcagtgtactagggaaaatgyacaatacacttaagttgtttaacttgaatagaatataataaaagagcaattaaaaagctgtggatagtgtatagataaaccaaaagggataattctgtatgtac

SEQ ID NO: 171427 - DNA, 508 bp, Homo sapiens
gaacctggtgggaggtgattggatcataggagcagcttcccccatgctgttctcatgataattagttgagttctccagagatctgatkggtttataagtgttttacagttcctccttcacatgcttactttctcccttgcctgccaccatagaagatgtgtctgcttctcctcccaccatcatggtaagtttcctgaggcttctccagcatgcagaagtgtgagtcaattaaaccttttttcctttataaattacccagtctcaggaaagtcttttatgacagtgtgaaaacggacaaatacagccatgaaaaatgaataatggttaaatggtaggaagaagaaagaacattcttggcctagagagtacaaaaggaaagccatggggttggacctaaaaagaatacaaaggaagaggagagaagagtactaattgtacttaggagctgaattgggaaattttttacaaaaccaagaaataccaaacttagtgaactattttgggacca

SEQ ID NO: 171428 - DNA, 472 bp, Homo sapiens
agcagtctaaaagtaaaatctgaaggtaaaatagaaaccacaggaacttctaccagtaactgcagatttgtaattgatatcaactctcccatggaacacaacaacaaaattttcttcaagacactaagtgttaacaaagcaatggaaaattgcaaagcccagatccaagagatgagcttggcattgagcatcacttttcagctcaagatttttactgattctaggaagttaaaaaatagattgcaaaactaaggaatgcttttggcagccaaatgcatgyaactgtgtgagtgtgcaagggaatgtggtggggagaattggagcacagtaccctccaggctttgagttgggggcaaagactacactcgataaagcccagcccactcagggacataaaactagtgtctgattatctgtccacttatggatgcattaaagtaacctgctagtgtccttagcttactgcaaagag

SEQ ID NO: 171429 - DNA, 472 bp, Homo sapiens
agcagtctaaaagtaaaatctgaaggtaaaatagaaaccacaggaacttctaccagtaactgcagatttgtaattgatatcaactctcccatggaacacaacaacaaaattttcttcaagacactaagtgttaacaaagcaatggaaaattgcaaagcccagatccaagagatgagcttggcattgagcatcacttttcagctcaagatttttactgattctaggaagttaaaaaatagattgcaaaactaaggaatgcttttggcagccaaatgcatgcaactgtgtsagtgtgcaagggaatgtggtggggagaattggagcacagtaccctccaggctttgagttgggggcaaagactacactcgataaagcccagcccactcagggacataaaactagtgtctgattatctgtccacttatggatgcattaaagtaacctgctagtgtccttagcttactgcaaagag

SEQ ID NO: 171430 - DNA, 533 bp, Homo sapiens
tttgcctggaaaaaataatgaatctctttataattgcataattatagtacagatgttcctcaacttatgatagggttacatcctgataagcccaatataattgaaaatatcataagtagaaaatgcatttaatatacccaatctgccaagcatcatcgcttagcctagcctaccttaaacatgctcagtgcactaacattagcctaaagttgggcaaaattatctaacagaaagactactttatcagaaagtgttgaatctctcatgtaatgtattgaatatggtacgttatgttgaaattgtgattgttttgcagtattgtaaagtcgaaaaattgtaagtcaaaccatcattaagtcaaggactatccgtatatttaaattcttttatacagacacacacacacacatacatacacacagagaaagaggggaagagagtgacagaaagataaacagtgagacagaaagagagaycagaaattaccagtgtgagaaattaataaaagagaggacatcactacagtttctata

SEQ ID NO: 171431 - DNA, 605 bp, Homo sapiens
gtaaatttgttgcactcactcatcatccctcagcagtacaacacaatagagagaaagctccaaactcccagctcatctctaggaagagaaataaaagtctagaccatatgtccarcattttgactttttgggagggcactagcacctatctatgctgaatctaagtgctaaaaggaaaggatgccagattgcatgcctgctgataaagccaccgtttggactgtcactcaatccaccatcattcctcctgtgactcagtataacaagattgggagaatactctacagttcctgattcccccacagaagtgaaagagaatgctgaaacacacattcagtgttcagacttcaggggagtttccaagtgattgttttctgtcttgcctgaatttaagcgctaacaggaaagctttccaggttggggatattaagaacaaatgagttggggaagtttgggttagcatacattcacttatcataccatccttccttggatcaagacgcaatgagtgggagaaaaccctcaactcctggcttccccttggagaaggaaaaagctggagtgtgcatccagaattccaacttttcccagtcagcctgacagac

SEQ ID NO: 171432 - DNA, 605 bp, Homo sapiens
gtaaatttgttgcactcactcatcatccctcagcagtacaacacaatagagagaaagctccaaactcccagctcatctctaggaagagaaataaaagtctagaccatatgtccagcattttgactttttgggagggcactagcacctatctatgctgaatctaagtgctaaaaggaaaggatgccagattgcatgcctgctgataaagccaccgtttggactgtcactcaatccaccatcattcctcctgtgactcagtataacaagattgggagaatactctacagttcctgattcccccacagaagtgaaagagaatgctgaaacacacattcagtgttcagacttcaggggagtttccaagtgattgttttctgtcttgcctgaatttaagcgctaacaggaaagctttccagrttggggatattaagaacaaatgagttggggaagtttgggttagcatacattcacttatcataccatccttccttggatcaagacgcaatgagtgggagaaaaccctcaactcctggcttccccttggagaaggaaaaagctggagtgtgcatccagaattccaacttttcccagtcagcctgacagac

SEQ ID NO: 171433 - DNA, 585 bp, Homo sapiens
aatttacacacaattccagagacaatgcattcacagaaagatttgacatacttcagaatctctaactgggctgactggtgaaaggatttcccagtgaaaaccagtctgtaaagacagggagragtggttattttttttcaaatcctagaatcgcaacacaaaattaaaaggcacactaggaaacagggaaacatggcccaataaaaggaagaaaataagtttccaaatatcaacccttcaaaaatggaggtatataaattatctggcaaagtgacatatcctgacacattctccaggatagatcacatgttaggtcacaaaacaagtcttaacaaatttaagacaaaggaaatcaagaacctgttttgaccaaaagtaggatgaagcaaaaattcaatggtagaaggaaaactgaaacatttacaaatatatggaaattaaacaacatactattgaacaaccaatgagtcaaagaagaaatcaaaaagaatattagaaaacaagctgacaaaaaaataaaaaaacacaacatagcaaaacttagaaatgcagcaaaagcagtactaaagagggaaatttatagca

SEQ ID NO: 171434 - DNA, 584 bp, Homo sapiens
atttacacacaattccagagacaatgcattcacagaaagatttgacatacttcagaatctctaactgggctgactggtgaaaggatttcccagtgaaaaccagtctgtaaagacagggagaagtggttattttttttcaaatcctagaatcgcaacacaaaattaaaaggcacactaggaaacagggaaacatggcccaataaaaggaagaaaataagtttccaaatatcaacccttcaaaaatggaggtatataaattatctggcaaagtgacatatcctgacacattctccaggatagatcacatgttaggtcacaaaacaagtcttaacaaatttaagacaaaggaaatcaagaacctgttttgaccaaaagtaggatgaagcaaaaattcaatggtagaaggaaaactgaaacatttacaaatatrtggaaattaaacaacatactattgaacaaccaatgagtcaaagaagaaatcaaaaagaatattagaaaacaagctgacaaaaaaataaaaaaacacaacatagcaaaacttagaaatgcagcaaaagcagtactaaagagggaaatttatagca

SEQ ID NO: 171435 - DNA, 427 bp, Homo sapiens
caaaccttaatggcacaacttccatctcaggacttattaagatccggtggttgcttaaagagaaattagttcgtttgctataatttgttgaggaaatcaccatacaatatgccattagagtgcacatatttcttatagaatacctgtggttaagctcttcctgtcatcgtaaactggagaacgtactgaaattagcttgcatcatgaaagcttagatgcagctgaaaattcagagacaattgttttatcttaaaagttattttcacttttccattgccacatttaaaagttaaggtttatagagagatattctcaagtgattatagaacaagtacaggaatatagaaggataaaaatatgtatttcaagtcatcaattctaattctgcttctaraagtagtcagtgtgcaaagctgcagttgctgag

SEQ ID NO: 171436 - DNA, 448 bp, Homo sapiens
ttctcttctctgccctctatgcttctaccagtgtcaccatatgtcaccttatagaatgccttattcattgccataacatcccatactacattgcctttgacaaagaaactcattttatagcaaaacaattgttacaaaagatccatgcccatgaaattcatgtttccccacatgtcccatcaccagtaagcagctagcctgatagaatgatggaatggcttcctaaaggctcagtttcaatgccagatgtgacacaatattgtttgaaattgtggtgctggcctaacagattaaactattagccaatacataagccatatttccaaaagccagaacacgtaggatcaggaaataagaagtagaattattttacctaatattctatttacagaattttatttcccttcctggaaactcrtatttagtagctttggaggttctcttttcc

SEQ ID NO: 171437 - DNA, 518 bp, Homo sapiens
atgtgataaggaatgactagaggataggctgtaagaaagaaggagaaagaggaaaggtcagtttaggttcagttatttaagaaaatctctttgaggagtaggaatttgaaaccagttctgcagaaacttgggggtagaacattacaaacagagtaaaatagaagaacaaagactcagaggcaggctcaatcttgrcaataggctcaacaatcagacaaaaaaaaaagcagaataatgaggagatacagagtgataggagatgaaatgggagaggggttcagattacatgaattttataggacttggtgatttagattttattctagtatgttgagaatccacagatcattttaagcaaaaaaaaatggcatgatctcatttatattttaaaactcagttggctttctctgtataatatggatttttatggggcaagaaggaagggagttgttacaggtacatgagaggaaagatgatgtttgcttgactaggtcggtagcaatagaggtgggaagaag

SEQ ID NO: 171438 - DNA, 442 bp, Homo sapiens
agcagattctacaaaaggtgtctttcaaaactgctctatcaaaagaaatgttcaactctgtggttgaatgyacacatcacaaagaaatttctgagaatgcttctgtctagtttttatgtgaagatgtttccttttccaccgtaggcctcaaacctttccaaacatccacttgcagattctacaaaaatagtgtttcaaagctgctcaatcaaaagaaattttcaaccctgtgagttgaatgcacacatcacaaagtagtttttgagaatgcttctgtctagtttttgtgggaatatatttccttttcctccataggcctcaaagcgctccaaatatccacttgcagattctactaaaacagtgtttcaaaactcctctatcaaaagaaaggttctactctgtgagttgaatgcacacctcacagagaagtttctgagaattc

SEQ ID NO: 171439 - DNA, 631 bp, Homo sapiens
aaagggaaatgattggtttcaaatagaggaaaaacctattcaggctaaaatcctgttttcagcagattttaatgtggggtcttattgcaaagaatgacaagatttttaggcttattttctgcaaattttccctgtgtttgggtaacagtcacagaatgtggaggaatgggcttctaggctctgtggctggggattcgcatccaggagaactcmggtcccagggcaggcagagaaaaacagtgtaagagtgccaacagaatgctttgaaatggaaaatttcaaatattccctccaagggcgtcccagataaccacacaaaagaggactttgctgggcaggtcaattgcaattgttcaataatgagatacagacagactgggaaggaaagaagtttatttctgcagccacttacagggagaagcgccaggtaactcaccagatcaactcaaagttacaagttttcttttttttctagtgcttatatacatcttaagctccatgtgggatttcacctacaagcaggagtgtttcattccatcaacatctaatctttaactcgggtctagcgtctggaaagatttctctagagtcttggaaagtttctgaatcttaagacaggccgaggtgaatg

SEQ ID NO: 171440 - DNA, 631 bp, Homo sapiens
aaagggaaatgattggtttcaaatagaggaaaaacctattcaggctaaaatcctgttttcagcagattttaatgtggggtcttattgcaaagaatgacaagatttttaggcttattttctgcaaattttccctgtgtttgggtaacagtcacagaatgtggaggaatgggcttctaggctctgtggctggggattcgcatccaggagaactcagktcccagggcaggcagagaaaaacagtgtaagagtgccaacagaatgctttgaaatggaaaatttcaaatattccctccaagggcgtcccagataaccacacaaaagaggactttgctgggcaggtcaattgcaattgttcaataatgagatacagacagactgggaaggaaagaagtttatttctgcagccacttacagggagaagcgccaggtaactcaccagatcaactcaaagttacaagttttcttttttttctagtgcttatatacatcttaagctccatgtgggatttcacctacaagcaggagtgtttcattccatcaacatctaatctttaactcgggtctagcgtctggaaagatttctctagagtcttggaaagtttctgaatcttaagacaggccgaggtgaatg

SEQ ID NO: 171441 - DNA, 532 bp, Homo sapiens
tttctatcacagttaagatacatgaggtgttttagcatactaaatattagtttgcacatggatattaataaaaagattcttataaagtaatcttatgaggactcctacttctgaatacatcgtgtgtatgtgcatgtgtgtatacatattgtaatatatagtagtgttttgtagtttaaaattttatgtcgactttccttcaacaatatgatttagagagcttgcaatattggtacatatatctagatatgcccctrttactgctgcatagtgatctacagtatagaagtaccatagtttattcaatcatttctttattgacagatctttaaattgtttccaattttatctgtacaaaaaatactgtttaaggttatctcaaatcacgcacaaaaataaaatccaggtttactaaagtgattatcagtgccaattatcactttattgcccattatctccagctcctctttcactgttgctccacagaaaatggagctgggcctttaaaatatttttcctttgccaggtagca

SEQ ID NO: 171442 - DNA, 542 bp, Homo sapiens
ttgagtgactgccagtcacaaatattgcttgactcagtataaagcttctcttatagctattaacctgtgcatctattattcagaccccttacttaggttttgaagttctaatacatagtctgcttgcctgggttccaagccctgctatcctaatcattatagttacatatcttaaaatatgctgcctagtcgcttgatgtctccatttgtatgattcttggtgttatgtttgcctgctccttgtccatctgcttacttatgactcacagcttctcctcatttaggacacagttcaaatgtcaccttgatctctataatatgatcctcatttattttctgcartactgaaaatgttttttataatcttccccttccacctaacaagagtataagatccatgagaacagaagcctatatttctgttttattttgttttgattggctgctttgccttcagaggccagaagagtaggcattcaaaaattattaagtgtgtaaattaattttgtgtcctctcctcaaaatttatgtgcacttcagct

SEQ ID NO: 171443 - DNA, 513 bp, Homo sapiens
taggcttaaaaggtcagtggcagtgtgctcagccaatcaggaattaggattaaggaattgaagccttttatactaaaggcttcccttataaggggaccctaaattagaaaacctgttttgagaaagattttttccctaatttgtgaaactatatatatgaatgtttttatatatttagggaattagaatccctcaggtttattttaaacaattatctggcactaacaggaatacaatttatgatgttcatatcattccagaaaatctaggtcacaccaaagtcggttctttggaaatttgatttccttatataattttcaaggtgcttgaaacaataaattctyatgtgctgctttggaaaagtagaaagtcatttagcctgaattcagaagaaagccgactttatttcttttacttacattgtactttcattgtaaatggtaagtaaactggtgaaataagtatgcgttaatatttacaacagaaagcaatataaaaaaacccctctgtctt

SEQ ID NO: 171444 - DNA, 513 bp, Homo sapiens
taggcttaaaaggtcagtggcagtgtgctcagccaatcaggaattaggattaaggaattgaagccttttatactaaaggcttcccttataaggggaccctaaattagaaaacctgttttgagaaagattttttccctaatttgtgaaactatatatatgaatgtttttatatatttagggaattagaatccctcaggtttattttaaacaattatctggcactaacaggaatacaatttatgatgttcatatcattccagaaaatctaggtcacaccaaagtcggttctttggaaatttgatttccttatataattttcaaggtgcttgaaacaataaattctcatgtgctgctttggaaaagtagaaagtcatttagcctgaattcagaagaaagccgacttyatttcttttacttacattgtactttcattgtaaatggtaagtaaactggtgaaataagtatgcgttaatatttacaacagaaagcaatataaaaaaacccctctgtctt

SEQ ID NO: 171445 - DNA, 589 bp, Homo sapiens
tttatgtataaacttttttttgtatgagtgaattcttcagttatttcatatggttttaacatgtctttaaaacttaagtgggagcaagaactacgtctaaatactcactggaattactaattccagatcttttcatgtcgattacacaatttagacacttattgcaagaaaggtttgcatgattgtgtgagaaagctagggaaatgaatccatcttttatctttattttaaaagttctaagtaaaaattaactcaaatgtttataaagtactaatgatagcaaatgatcttgacataacaacataaaatctaaacaagctacttaaaagtaatcagtaggctaagatcctaaaacatagatttcaattctaagtaataaaataaaacattttaataccttctctattgcaaattctaaaatggarttggagtatacctaattctaattgtcctgatcttcataatattttgcaagaaagacactgctgactttcaattgttttatgtcttttttcagagaaagtgtttccattcatgatgatgctcactctacttcgatgttcccaatgtccaaaacagtgcctgatac

SEQ ID NO: 171446 - DNA, 569 bp, Homo sapiens
gacatacctgagactgggtagcttataaagaaaagaggtttaattgactcacagctccacatgggtggaggggcctcaggaaacttataatcatggcagaaggcatctcttcacagggtggcaggagagagagaatgagtgtcgaacaaagggggagaagccccttataaaaccatcagatctcatgagaamtcactgtcacaagaacagcatgggggtaaccactcccatgattcaattacctcccactgggtccctcccatgatgtgtgggaattataggaactacaattcaagcagagatttgggtgaggacacagccaaactatatcagaaatcattatatcattatgactttgagtccatggatgatttttgtaggtgtctctttagataccatgctataaatttttaatgatgaatgatgctagtagcaaaatttaacataattcaaaatcttattttcctcaacttgggcatgttattttcttcaaatacctctaggacctaccctaagaaaactttctgaaccattattgtgaagggattagtatatgccaaaacattgct

SEQ ID NO: 171447 - DNA, 569 bp, Homo sapiens
gacatacctgagactgggtagcttataaagaaaagaggtttaattgactcacagctccacatgggtggaggggcctcaggaaacttataatcatggcagaaggcatctcttcacagggtggcaggagagagagaatgagtgtcgaacaaagggggagaagccccttataaaaccatcagatctcatgagaaatcactgtcacaagaacagcatgggggtaaccactcccatgattcaattacctcccmctgggtccctcccatgatgtgtgggaattataggaactacaattcaagcagagatttgggtgaggacacagccaaactatatcagaaatcattatatcattatgactttgagtccatggatgatttttgtaggtgtctctttagataccatgctataaatttttaatgatgaatgatgctagtagcaaaatttaacataattcaaaatcttattttcctcaacttgggcatgttattttcttcaaatacctctaggacctaccctaagaaaactttctgaaccattattgtgaagggattagtatatgccaaaacattgct

SEQ ID NO: 171448 - DNA, 513 bp, Homo sapiens
ctggcaatctcactatagttccaagttcactcatgctttttctgtcctggatgactctttcacagcttctctcttctcaactctccaaaacttttaccatttgctgtttccctaaactcagctccatcacacgggcatcctcttattgtccctgaaacttactaaacacatttaatgttgtgtttttgtcttctgtctggaaaatgctttgtccacatgattcatggccttatttcattcacatatatttctctgagcatcccatgttaacgagcagctctgaaactgcaaaccatatggcctaattctcttactccactttattattcagcattacatttatcccataatggacttggttattkattttatttcctactactagaatttcatactcttgaaacacatagattcttttatgttcattagtttattgctatatttggaacctaaaccatacaaagtaatgcattacgtatactaaaaaaattaacttgcctttttttggtcagt

SEQ ID NO: 171449 - DNA, 517 bp, Homo sapiens
tcttacccaggaaacctcttcttcctcctcacttcttttattatttccttcaacaaatatttgataaatgcagaggtaaatgtgcagagttcctgactaaatgacttatttaccttactgtagagcggctgtggaaaaagacaaaatgcaaattaacaatacaagcatgcatgttatgtacaaagtgtttccctttctgcatgttgaaactgataatacataacatgatgatttcagcaaacatgttagagcatcagattgtgagtaccgacacagcccctgctcaggttttaataaagtattccttttcattcatgaagamccacaaaaacgagtttctgaattttgtgacttgtaattgtctgaatgccgaatccttaagaaaggcatttgattttttaacagtaatgataaacttgtgccataacactataccttcttagtacaaacttccctcttctcaacttgtcaacataaaggtctctatgtgttggactaaaactgttcaatgtcagct

SEQ ID NO: 171450 - DNA, 516 bp, Homo sapiens
tcttacccaggaaacctcttcttcctcctcacttcttttattatttccttcaacaaatatttgataaatgcagaggtaaatgtgcagagttcctgactaaatgacttatttaccttactgtagagcggctgtggaaaaagacaaaatgcaaattaacaatacaagcatgcatgttatgtacaaagtgtttccctttctgcatgttgaaactgataatacataacatgatgatttcagcaaacatgttagagcatcagattgtgagtaccgacacagcccctgctcaggttttaataaagtattccttttcattcatgaagacccacaaaaacgagtttctgaattttgtgacttgtaattgtctgaatgcygaatccttaagaaaggcatttgattttttaacagtaatgataaacttgtgccataacactataccttcttagtacaaacttccctcttctcaacttgtcaacataaaggtctctatgtgttggactaaaactgttcaatgtcagc

SEQ ID NO: 171451 - DNA, 612 bp, Homo sapiens
aataacaatgtaataatgtgaaggaagttgttgtatgcagacttccaggatggctgccaaagatattttccatttggtgttaatgcccttatagaatctgttcatttgagtgtgggctggacatagtgacttgatgctaccaataaaagacaacaatagtgctgagatttaatttgtatgactaaattacaaaagactgcaacttctttctgaatggcacattctctctttattgccatttttgctagcatgctttgaaaaagcaagctaccacaagagaagtcmacacgtcaaaaaactgggggtggtttccagccaaaatccatcgagaactgaggccctttgtccaacagccctttaggaattcaattctgtcgattaaatttggaactctatgtttctacagctgagccttcagctgggactgtagaccctgagctgacacattgattcattacagacttctgaaagaatatgaatcagagaatccaaataagccatgcccaggttcctaactcatacaaacatggagataataaattagtgttgtgttaagccactgaatttggggtaatttgttatgcagcaatagataacgaatacagaagaatt

SEQ ID NO: 171452 - DNA, 600 bp, Homo sapiens
aattggcatgaaatagaatatgcagtaatgaaagatgggtaaatatatatagatcccaatgctttggctcctgaatccagatgtagttcctgagaaatgtcctttgtacctttaaaataaattctccttttttatttaaactattataaatgaacttgtgtttcttaaaactaaataagacttacttgactagaaaactaatatagagaggattaaaattggttacatagataaaatgcttagcacaatatatagcatatagaaaatgtttaataaatcgtagctaaaattgttcctctaactccatctttatttagtttttctaacatttagctataattttgtcatttttatgttcagatattttatttccttaaaaagactcagtcatgatgcacccatcctgatctgtcaaacattctgcttctttgcytattcttaatttttctggcttctgaataagaaacatgttttctttgttatacccctcttatttgcctcatattcctggcacaacatgtacagcttaggtatactggaaaatcaattatattgttttgagacaaacaaccaaaataccttgcctaatcaaacccaaac

SEQ ID NO: 171453 - DNA, 641 bp, Homo sapiens
tattgctttgtaatgcaaaacaaaacaaagcaacaagaataagaacaatatactccctttcaaacataaaaatttaaactagtacagagcaaaaatcttgcattaaaaaagagattatgtaaaatttgtcagtactcccaactaccccttcataacttttaaaaatttcaatwttaatgttttaagaaataaaatccaaaataatatgaccacctttcttgcaaactcttggatttaattaaccagtaaaatgaattttcagccaacctatttaatgactgtatcccaaagcattgccaaaacacagtgcacgtaatataatcctcccatagtaacatcttgcttcagataacgttttttccagctccgtaaggaatattcatggaagattttctctgaattatatttatttgtactgaagcatgtcagtattaaaatgattgtgccattggttgagtttatgaatagtgccattgcatatttatgccctctggaataagaggtaaacctgaaatcaatatataggtattaaaaataactgtacacacagatacacaagaattcatcttacatgtgggaactgcatatttcagccttattacctttgagtttagaaagggtgaaaataaatgctgtcagta

SEQ ID NO: 171454 - DNA, 641 bp, Homo sapiens
tattgctttgtaatgcaaaacaaaacaaagcaacaagaataagaacaatatactccctttcaaacataaaaatttaaactagtacagagcaaaaatcttgcattaaaaaagagattatgtaaaatttgtcagtactcccaactaccccttcataacttttaaaaatttcaattttaatgttttaagaaataaaatccaaaataatatgaccacctttcttgcaaactcttggatttaattaaccagtaaaatgaattttcagccaacctatttaatgactgtatcccaaagcattgccaaaacacagtgcacgtaatataatcctcccatagtaacatcttgcttcagataacgttttttccagctccgtaaggaatattcatggaagattttctctgaattatatttatttgtactgaagcatgtcagtattaaaatgattgtgccattggttgagtttatgaatagtgccattgcatatttatgccctctggaatargaggtaaacctgaaatcaatatataggtattaaaaataactgtacacacagatacacaagaattcatcttacatgtgggaactgcatatttcagccttattacctttgagtttagaaagggtgaaaataaatgctgtcagta

SEQ ID NO: 171455 - DNA, 529 bp, Homo sapiens
atagataggatgtttacccctgaaaggcattaattcatctgtcttgccagcactaatgaaggatatgtactttctatgtagtccaacactgcatgttgacctgtgctttacctctttgcctcctcctaagctgagattcttgagagcatgggctgtgarcactgtgctgagtcacactggagcctgacacaaaaagagtaaatcagtcatactcaccttctatttatgtaatattttacatttacgtttatattttgtaaaaatactgcatttaaccattaattatattgagtacgattttattttgttggtgcttccttactgctacgttctagaagaggacttacctgtcttttcttaatcctggtccttgtgattctcatttatgtggcccagtgcctggcacaaggtcccccacataactggtgcttaaggaaacagcttatgattcaacaagtcctttataagaattgtgatgcagctctttcaaacagaacttaaaatgcccaatgaggacttaaaacaatcc

SEQ ID NO: 171456 - DNA, 529 bp, Homo sapiens
atagataggatgtttacccctgaaaggcattaattcatctgtcttgccagcactaatgaaggatatgtactttctatgtagtccaacactgcatgttgacctgtgctttacctctttgcctcctcctaagctgagattcttgagagcatgggctgtgaacactgtgctgagtcacactggagcctgacacaaaaagagtaaatcagtcatactcaccttctatttatgtaatattttacatttacrtttatattttgtaaaaatactgcatttaaccattaattatattgagtacgattttattttgttggtgcttccttactgctacgttctagaagaggacttacctgtcttttcttaatcctggtccttgtgattctcatttatgtggcccagtgcctggcacaaggtcccccacataactggtgcttaaggaaacagcttatgattcaacaagtcctttataagaattgtgatgcagctctttcaaacagaacttaaaatgcccaatgaggacttaaaacaatcc

SEQ ID NO: 171457 - DNA, 619 bp, Homo sapiens
acccctcgggctaacatacagtcagatgccctctatgctatttattttcaaacatatcatgttaaaaacaaaatgcttcctgaagcaggtattgattttttgcctttattatttgttagaatacaatatatttaacacttcctatgagtagctaataacatcaatattagagcattgtatattctaaaggctaaatttggataaatttcagtgtaaatattataaaataaccaygagcagcaagatagaaaaaatcttaaatttctttatttaattttatatttaaatcaaaattcaataacatttgaaatgctttatgccagtttggggtcccctattatttgctgtatacattttgttcatatgaaaacttgttgactatgccaatcaataaatttgccttaaattgaatcagaggatcttaatcaatgggagtccaaaattatgtttggcctagagaaaagatgggcactgtataagacagtagagtatcatatgcctgttgaaaaattagtctgtccaacagactaattgtaagtgtccaacacttactcattctaatctaacttagctatggtaaatttcttaaaagttttctctgtccatgcaatgaaaaaaa

SEQ ID NO: 171458 - DNA, 527 bp, Homo sapiens
acttggtggaaggagaacaaagcaaatgtggtgctttgcattggaactcagtgctgctgtatcaatgtggaaaggaacaccaggcagaactccgttgacatccacagagggagcatttagaccagccctagccagaagggatctgtygaccccaggaattggaacttgaggtctggcaagcctcgctactgtgggctaaacaactctgtgatctaaaataagcttcaaaggcaatctaggtcacaaggactgcacttcctgggaaagccatgatgcttggagccagtggacttgggggacaagcaacctagtgagacaccagctagggtgttcaagtgagtatttgtgctaccccttccccagtgccaggcagcacagctcacagctctgggagagacactttccctctgtttaaggagacgagaagggggagtaagaaagactctgtcttacaacatggataccagctcagccacaataggactgggcatgaaacaaagttgcaaggcccacattctgggccgtag

SEQ ID NO: 171459 - DNA, 527 bp, Homo sapiens
acttggtggaaggagaacaaagcaaatgtggtgctttgcattggaactcagtgctgctgtatcaatgtggaaaggaacaccaggcagaactccgttgacatccacagagggagcatttagaccagccctagccagaagggatctgttgaccccaggaattggaacttgaggtctggcargcctcgctactgtgggctaaacaactctgtgatctaaaataagcttcaaaggcaatctaggtcacaaggactgcacttcctgggaaagccatgatgcttggagccagtggacttgggggacaagcaacctagtgagacaccagctagggtgttcaagtgagtatttgtgctaccccttccccagtgccaggcagcacagctcacagctctgggagagacactttccctctgtttaaggagacgagaagggggagtaagaaagactctgtcttacaacatggataccagctcagccacaataggactgggcatgaaacaaagttgcaaggcccacattctgggccgtag

SEQ ID NO: 171460 - DNA, 602 bp, Homo sapiens
taagaaatgaaagaagagacatcaccattgagttcattgayattaaaagaataatgaaagaatactaggaacaattctctgcctacaagtttgataacttacataaaatagaccaattccttgaaagatacaaactaccaaaactcatacaaggagaaaaaataacccagatagtactacagctatgaaataaattgagtgaattactaataattttcaaaaaaagaaacaagtatagaggaacagatgagtttgctggtgaattctaacaagcattcgagaatcagtaatacaaattattcataatttctccaagaaactagaagccaaaagaacattccatactttccatgaggtgaatattgccttactccaaaaccatataatgacattacaagaaaggaaaaccatagatctcacatagatgcgaaatctctataaaaaatattagcaaatctagttcaaatcaaaggaattatatactgcaaacaggtggtattaattcctggctgattcactatttgaaaataaagcaataaaatctactacatcagaacagtaaaaaagaaaaatcatatggttatatagttgatgcaggtaaa

SEQ ID NO: 171461 - DNA, 529 bp, Homo sapiens
ttaggattctgtagaggaatagaactaacaggatatatatatataaaataagtaacagggtatatatattttcatatatattatttaagtgattttaataacacatatatataagtaaataaaggaaagtttattaagtagtgttaactcacacgatcacgaggtcccacaatagtccacctgcaagctgaggagcaaggaaaccagtctgagttccaaagctgaagaacttagagtccgatgttcgagggcaggaagcatccagcatgggagaaagatgtaggctgggagggtargccagtctagccttttcacattttcctgcctgctttatactctggccacactggcagctgattagatggtgcccagccagattaagggtgggtcttcccttaccagtccactgactcaaatgttaatctcctttggcaacaccctcacagacacacccaggatcaatactttgcatccttcaatccaatccagttaatactcagtagtaaccatcacaaaggtgaaatctaga

SEQ ID NO: 171462 - DNA, 206 bp, Homo sapiens
gaattctttctaattaaaatccctgattcactgcartggattatattctgtactgctttcgctcacttagtccacaggtttcattatgtaagataaagttatgacccattttattagtattaaacacaacatacatagcaatacttttattataaaatcagcttaatactacagtcattattacactgtgatcattagtaattcat

SEQ ID NO: 171463 - DNA, 590 bp, Homo sapiens
aaatgtctgaattatttataggtataataataattacaatatttacagataatagattagagactgtcacrtactttacctatattctattctattgtatttgtttttaaggtaaaatttacataacatattatttatcatttttaccattttgaaatatgtcattcagtggcactgagtacattcactgtgttatagaaccatcaccattatccatttcctgaacgtttcatcaccacaaaaggtcttccagtttcctgtaaacactcacttcccgttgctctccctgaaaatcactaacctgctttctgtttctgtggatttacatattctgaatatttcatataattgaagtcaaacaataggtaggtttttgtgtctggcttatatcactcagcataatgtctttaaggttcatccatgttgtagcatgtattaatatttcattttttgtggttgaataatattccattttacagatatcccagatttgtttatccattcatcagttgactgacatttgaggtatttccatcttttgtctgttttgaactgtactgttatcaacacttatgtacagattttatgaa

SEQ ID NO: 171464 - DNA, 589 bp, Homo sapiens
ttttttcatattacttgatgaatttataataaatatcaaaaattaattgagtagatgaagatttcacagtttttatgttttataaaacttctgatgaattgatatttagatgatttatcaaaattcatgaaaaggtgaacatatttgttcataaatttttaagtaggttttctgttttataatttccttagcaaggatgtctgaacttagctcctttgattgaattttataaatattttaaagactctttttacaaagtcctaaatgatgttccccaaattcctaccattttatgttccacacagtgaattctttttttcttttttttgttttttttttgagacgaatctcgctctgtcgcccaggctggagtgcagtggctctatctcggctcactgcaacctccgccttctgagctcaagcaattctctgcctcagtctcccaagtgggtgggattacaggcacccaccaacacacccggctaatttttttgtatttttagtagagacggggtttcaycatcttggccaggctggtcttgaactcctgacctcgtgatccaccagccaaagtgctgggattacaggc

SEQ ID NO: 171465 - DNA, 576 bp, Homo sapiens
ctcaggggtatatcaactctccagctttgcatcatagtttatttggaaagaccctgatcgctttttgcttctgtaagatatcacactggtccattacattggtgacattatgytgattggatccagtaagcaagaagtggcaagcatgctggacttattagtgagatatttgcatagcagcggatgggaaataaatctgactaaaattcaggaatcttctacctcagtaaaatttctagtggtccagtggtgtggggcctgtcgagacattccttctaaggtgagggatcagttgctgcatttggcctctcctacaaccaagaaagaggcacaacccctggtgggcctatttggatttttgaggcaacacattcctcatttgggtgtgataatatggcccgcttaatgagtgaaccgaaaggctgtcagttttgaggggtccagaaaaagagaagccctgcaacaggtccaggccgctgtgcaagcttctctgccacttgggccataggacccaatagatccaatggtgcttgaagtttcagtagtagatagggatgctgtttggagcctctggca

SEQ ID NO: 171466 - DNA, 529 bp, Homo sapiens
caagtatgcatattgccctgagaaattccctttttccaaaactttcttgtttgtgtgtgtttcacattagctctttcatgccatccttatattccaaaatgattaattattgttggtggttagattgcaaagcagaaaaaccagctgtaattgagaaattttaaattgattttgtgttgtgtattggttccaaatgcagtaagagacactggaccaattctataaagcagcagcatttctacatgccacagtattgcattctgagcatgactacaatagcatgctgtaatcattgagataattcaaacaccctcacatattccatatgcattggtggtattggagggagmtagtaccaacctgatagaaaacaactggactgtatatttagaacaatgaagaaaattttatcaaagttgctttaagcaatgagtttgtttttgaggatatattcaataacacctatggtctttttttttttttccttacagttctttaaattactaaagaccaccctctatgtttcaag

SEQ ID NO: 171467 - DNA, 565 bp, Homo sapiens
ggccagggggttcagcctactggagctctccaccagtcatgcacagtccaccagtactggaactatgatgcgggccccaagggcagctgaggctaccctgcaagcaggtgcagccaggctggaaccctgtgagaagccagcagaccaagcagtactcaggtcagaacagccccatctggtcaaggggaagatcaccttgcagagttcaggtctgacagttcccctagggccagtttcctatggaagaagtcgagcttaggaggataaatgtcactggctgtgccccgctatagaagttcctgtacmaaatcttctgagctcacgtcagctggcttgctgctcctaccacttctccaaacagtgcttcctgctaactctactgtctgtggtggtcgaggggtcacctcctgcctggattccagaggctcatggcaagagcgggttgctccttgctacttcaactcaccagttatcctggggtcataggggaccaggaatgagtcccagtgcaaggtagccctatacagagtttacagctttcttcccttcagcccagtttctgcgt

SEQ ID NO: 171468 - DNA, 565 bp, Homo sapiens
ggccagggggttcagcctactggagctctccaccagtcatgcacagtccaccagtactggaactatgatgcgggccccaagggcagctgaggctaccctgcaagcaggtgcagccaggctggaaccctgtgagaagccagcagaccaagcagtactcaggtcagaacagccccatctggtcaaggggaagatcaccttgcagagttcaggtctgacagttcccctagggccagtttcctatggaagaagtcgagcttaggaggataaatgtcactggctgtgccccgctatagaagttcctgtaccaaatcttctgagctcacgtcagctggcttgctgctcctaccacttctccaaacagtgcttcctgctaactctactgtctgtggtggtcraggggtcacctcctgcctggattccagaggctcatggcaagagcgggttgctccttgctacttcaactcaccagttatcctggggtcataggggaccaggaatgagtcccagtgcaaggtagccctatacagagtttacagctttcttcccttcagcccagtttctgcgt

SEQ ID NO: 171469 - DNA, 592 bp, Homo sapiens
ctctgttttcttttccaattactgcttttttgttttctagcatttgagttctcatagctgcatctttttcctaattaaagcctttttgtttgctgttttctcagccaacataaatcatccatccaacaagcttctcagttgaggaaacatttctcatttaggatacatacagtttaggatacatttctaaagttatttgtaagataatatgagytcttaaataacttgagaaaaaaatcatttaacatgatgtaaagcatgatagatatacctagaccatgaaaaaagagctttacacataatttctttgctatttaactttgggttttctaggctgctaaaaataacccaggcacacctgtgttattaattgatactttatactgtagagtttgggttatactgtgtttccacttaagtgttgatggctaggcagctgcttaaatttatctggtacatttgaatgatttcaagttagcagcattttccatgattagcacagtaataataatagtaactcatgaaatgtaaagctcttcatttagttctgtcagtgatagatcattattgttaatcttggcctttctgcttc

SEQ ID NO: 171470 - DNA, 379 bp, Homo sapiens
atttagagtaattctttagggccctaggattttcagaatggtaaatgagcattggcttcaacttaaagtcatgagctgccttagcacctcataaaagagtaagtctgtcctttgaaactttgaagccaggcagtgacttctcctttgtagctctgaaagttctagatggcatcttcttccaatagaaagctttttcatctacattgaaaatctgttgtgtattgtagccaccttcatcaaacatcttagctaggtctttctggacaatttgctgcagtgtctacgtcagcacttgctgcttcaccttacacgttgatgttacgcagacagttttattccttaaatcttaggacttatggwccaacctctgtcagtttcc

SEQ ID NO: 171471 - DNA, 575 bp, Homo sapiens
tttgctaaatttataaagtatttgtattagtcccttctcacactgctataaagagctacctgaggctgggtaattatgaagaaaagaggtttcatggactcacagttccacaggcttaacaggaagcatgactggggggcctcaggaaacttccaatcaaggcagaaggtgaaggggaagcaagcacttttttcacattgcagcaagagagggagatmgtgaaggaggaagtgtcacacatttttaagccatcagatctcatgagaactcactcactgtcatgagaacagcaaggggaaaatctgcccccatgatccaattaccttccaccaggtccctctgaccagtggggattacaattggacttgagatttcagtggggacacagagccaaacgatatcatatcatttatgatattccaggcactttagagattaagcacacactcaaaatagccctatgaggtagatatttactgaattttcccattttagaaatgagctttaacagaagcttagagtttaagtagctcataatggttatgcagcttgtgagaattgttctttggcagtga

SEQ ID NO: 171472 - DNA, 575 bp, Homo sapiens
tttgctaaatttataaagtatttgtattagtcccttctcacactgctataaagagctacctgaggctgggtaattatgaagaaaagaggtttcatggactcacagttccacaggcttaacaggaagcatgactggggggcctcaggaaacttccaatcaaggcagaaggtgaaggggaagcaagcacttttttcacattgcagcaagagagggagatcgtgaaggrggaagtgtcacacatttttaagccatcagatctcatgagaactcactcactgtcatgagaacagcaaggggaaaatctgcccccatgatccaattaccttccaccaggtccctctgaccagtggggattacaattggacttgagatttcagtggggacacagagccaaacgatatcatatcatttatgatattccaggcactttagagattaagcacacactcaaaatagccctatgaggtagatatttactgaattttcccattttagaaatgagctttaacagaagcttagagtttaagtagctcataatggttatgcagcttgtgagaattgttctttggcagtga

SEQ ID NO: 171473 - DNA, 571 bp, Homo sapiens
ggaattggtcaaatgcctagaagaggaagaactgaactgtcaagtagtcaggataatatgaaatcattcaatgtgagctctgaatggttgagaaagaggaaaaagtactgctctagtagttgggtaagggatttgggtttttagcctctttattatcaactaagtggttttggacaagacattcttaacctcgctgagtatcaaaagtgaagggattaggtaataaacaatagattatacagtcatcccttggtrtatgtacaggattggcgtcaggtcccttgcgtataacaaaatccttacatacccaaatgccacagttagccttgtggaactcgtgttataccaaagattgatcctctgtgtactcgggtttctcatcttgtaaatgctgtattttccatcggtgctttgttgaacagaatctacatagaagtgcacaactgcagtcctgttgtgctgttcaagggtcaactgtgtataaagtctgtgtggggaaagagaagatatcatgctagcttattatttatttatttttttaacaagacagttaatgtatattaagctcaag

SEQ ID NO: 171474 - DNA, 571 bp, Homo sapiens
agaacaccctacagttattgtacagtwaataagtacttctcattttattctggcatctgaaactatacctacatgtacatatatatatacacacacataaatacatatatataaacatgtaacaatttctcatgtctctaactttagttttcagcattgagagtatagtcagtgtgatgtttttaccagagactgttgtaatcccaaatgaaaaggaaatatgtggtgctattgtggatgaatacaggctgctatagttgagcatcagaaaataaatatacagggtgagtttaagaagaatttttaagagatatattactgccctagaataatgcttgagtgctcattttccagtgtcaaagtagacatatggcagaagattccagagaacatttttcctatttatataaaatgggataaaggatatttaaatatagcattatctaagatttcctaatctatttattcatttagttacattctacaaatcttccagatataaatgtgatacaaagagactcatatattgtctatactctagggctatatatagggaaaagacagatatatg

SEQ ID NO: 171475 - DNA, 571 bp, Homo sapiens
agaacaccctacagttattgtacagtaaataagtacttctcattttattctggcatctgaaactatacctacatgtacatatatatatacacacacataaatacatatatataaacatgtaacaatttctcatgtctctaactttagttttcagcattgagagtatagtcagtgtgatgtttttaccagagactgttgtaatcccaaatgaaaaggaaatatgtggtgctattgtggatgaatacaggctgctatagttgagcatcagaaaataaatatacagggtgagtttaagaagaatttttaagagatatattactgccctagaataatgcttgagtgctcattttccagtgtcaaagtrgacatatggcagaagattccagagaacatttttcctatttatataaaatgggataaaggatatttaaatatagcattatctaagatttcctaatctatttattcatttagttacattctacaaatcttccagatataaatgtgatacaaagagactcatatattgtctatactctagggctatatatagggaaaagacagatatatg

SEQ ID NO: 171476 - DNA, 492 bp, Homo sapiens
aacatatgtaccaatgctatttctgctcattagtaaagttttatactatgtccatggttctttcttccccacagaatctaaaccattgcttcatgaacaagttcaaaacacataatttgtttcccagtcattagtaagaattggtaaggtaatactgaatacctcaattgaacttttgatgaatattctggtctgtctacttattagacacaattacagtcaggttaacaggccttagtggttgcygagctcctgttgctactcattagaaaattctggagccagggcaatgtagaaggaaaggtgtttattaagtttcattttttatgctgaacaaagtcccattattagcatgcattgaggcatttccccttatactaaattaactgccttttaaaagacatctatatttaatgacattaaatcagtggttgaagggatgcttgcaggacttctgatgaaagactgtgtcttgctgtaaataaaatgcaa

SEQ ID NO: 171477 - DNA, 492 bp, Homo sapiens
aacatatgtaccaatgctatttctgctcattagtaaagttttatactatgtccatggttctttcttccccacagaatctaaaccattgcttcatgaacaagttcaaaacacataatttgtttcccagtcattagtaagaattggtaaggtaatactgaatacctcaattgaacttttgatgaatattctggtctgtctacttattagacacaattacagtcaggttaacaggccttagtggttgctgagctcctgttgctactcattagaaaattctggagccagggcaatgtagaaggaaaggtgtttattaagtttcattttttatgctgaacaaagtcccattattagcaygcattgaggcatttccccttatactaaattaactgccttttaaaagacatctatatttaatgacattaaatcagtggttgaagggatgcttgcaggacttctgatgaaagactgtgtcttgctgtaaataaaatgcaa

SEQ ID NO: 171478 - DNA, 525 bp, Homo sapiens
attatctagaagtggcagaaaattattgatggtcagatataaataacaagaaaaaaggaatacatttcttttttaatatttcctttcagtctaatagacttacaagagtctattaagcaaacatacctctatacttaggactggtttacaccatcctcatgtgaaaataagtaagagtaccaaagtatttctttttctccatctgttctgttcctttggctgtgccagactctgacgccaagttctgggttgaatatatcctaattaaactgaagtttttcaaatgtgattgtatagtaatcacttctattctgctctaatcatagaaaagatatcttggagtaattttttactattgagaattaggtaagagggacaacacaaatgagattttattatcttattaatacagtagctgtaaacttatccttctaacaatacatagtctttgatgggcaaattgtggggaggaaaggtaaactcacatttagctatagaawgtctcaatattattgcacataagtg

SEQ ID NO: 171479 - DNA, 493 bp, Homo sapiens
tgttgaacattttttatgtgcttattggtcttctttatatcttttctggagacatgtctattcaggtcctttacccatttttaaaacatgtgatttctcttttaattattgarttgtaggaatttatattctggctaccagtccttcatcagataaattattgatttgcaaagattttctcccagccaatgggctgcctttcactttcttcatggtatcatttgtagcaactttttaaaaagttttgatgtccaatttacctataaatttcttttgtcactgtgcttttggtatcagatctaataaaccattacctagaccaagttcatgaagatttattcctatttttttctaggatttttacattttcagctcttaaattagctctaggatccactttgtgttcactttttgtgtatggtttaaggaaggagtccgacctcattttttttgcctgtgggtattcagcttttacagcaatatttggtgtaaa

SEQ ID NO: 171480 - DNA, 574 bp, Homo sapiens
gaacacaataattgcaataggcagtaactgaagggcaacccatagggatttatggaacttgctcaatgaatatggtattccagggggcaagacaggtggaaagcaaacaaaagtattacgtaacatgtataatgaaaggatcaacaatggatgagcaaaaggctgaggacagctgttctctgtaaagtcaccacaggaacttcttaacaattaaataaggtagtattcatgaaaaatacttcagaaaactgtaaaataacttataatgggaatgaaaattccagttgcttttatgataastgctctactttggggctctaatatactctaatattatttctattacagtacgtaaatgccacacctggccaaattccaataacttatcactcctacccatggttattctaaggattacttattcaggattacttatatgagggattccttttaaagtcagaaggcagaattagatttttagatcaaatattctaaaatccaacaaatctattcaagtctgataaagcactctactatgatatggtcctagaaaattttttttaaaaaaaagctt

SEQ ID NO: 171481 - DNA, 617 bp, Homo sapiens
tcacacctttcatgctttaattctaaatctggtagtcctgggctgtgtcacaccaccaagactctctgaacttcagtgttttcatttacaaggtggcgattatgctggctgcccagctcgctacatgtggcttctgtgyacccaatgagagatgcatgagaatgtgatctgaaatctgccaagcacacacagatttaatgattatttaatcaggcgcctcaataagaataagcagagtttctcattttacatggtcacatttctagcaccacattcagcctataaaactttgttttaaatgtttcctggaattcaaaatatctcactacaaagtatttataacttttattattttttatttttttcttcatgacaatggcaatgtctaatgtgttcttacctacttcatattcttggagtgttctcacagtgtcctccagaaatgggaatagttgtgtcctttttttggtgggggagggtccatttttgagttaaagagcagaaagagtttcataaggtgcatcacagaacactgtagtgaaggagctggtcttaacacctaatggtttcctctttttactacaggctgtgatgtctacattggatacatctgcaca

SEQ ID NO: 171482 - DNA, 617 bp, Homo sapiens
tcacacctttcatgctttaattctaaatctggtagtcctgggctgtgtcacaccaccaagactctctgaacttcagtgttttcatttacaaggtggcgattatgctggctgcccagctcgctacatgtggcttctgtgtacccaatgagagatgcatgagaatgtgatctgaaatctgccaagcacacacagatttaatgattatttaatcaggcgcctcaataagaataagcagagtttctcattttacatggtcacatttctagcaccacattcagcctataaaactttgttttaaatgtttcctggaattcaaaatatctcactacaaagtatttataacttttattattttttatttttttcttcatgacaatggcartgtctaatgtgttcttacctacttcatattcttggagtgttctcacagtgtcctccagaaatgggaatagttgtgtcctttttttggtgggggagggtccatttttgagttaaagagcagaaagagtttcataaggtgcatcacagaacactgtagtgaaggagctggtcttaacacctaatggtttcctctttttactacaggctgtgatgtctacattggatacatctgcaca

SEQ ID NO: 171483 - DNA, 455 bp, Homo sapiens
aaccacccatttaagtctagtgctatgaaaataacccaaatcatcatctaactattgttagatgatccactgagcaagaccacctcgctccctggcttcagccccctttccaggggagtgactggttctgtcttgctggcattccaggtgccactggagtacgaaaacaaactcctgcagttagctcagtgtctgcccaaacagccacccagtattgtgtgtgtgttagtattgtgcagtggatctcccagcacagcactcgagctctgctaaggaacagactgcttcctcaagtgggtccctgacacccgtgcctcctgatggggagacacctcccrgcagggagtcaacagacaccttattcaggagagctctggctggcatctggcaggtgcccctctgggatgaagcttccagaggaaggagcaggcaacaatctgctgttctgcagattc

SEQ ID NO: 171484 - DNA, 563 bp, Homo sapiens
tgagaatgtctttttcttttaaatttgccttcattataaaggatcttttcatttggtrtagaattttggcttgacaggtttgttttctttcagcactttaaaaatgtttcatccttttctggccttaattgttttgatgcatagataaaatgtataattaacctaccaataatttctgcttgaatgcatttttaaaattggtataaacttcttgttatattattattggtagagttacattaaagtctaaaactatgattgtagcttgtctgttatttcagctctagtgtatcatttgtttagctaagttactagtccatacgaattcagaatcatttgatttttcaggtttactgacacttttattgtcatgctatactgtcttttatttctaataatgttttatatcttgaagtctactttgattttgcacaactatactttcttttgcttagtgctttcaaatgttctctgtctttatagttaaggtatgtctcttataagcaacaaatagctggactgtatttctttggtaattcagtccaacattttcagtcttcagg

SEQ ID NO: 171485 - DNA, 553 bp, Homo sapiens
tgcctagaacaatatctagaataaataagggctcactaggtattttgaatgaatgaataaaattatttaaccaaagcagttagtcatatcagtgtttgttttgccaaatttgtttattttctcaaaaggggttaatattctccttccgtaagtctgattgaaaactgttatttagtcacaacccattttttctaagtatactgtcaaaccccttagatacttcaattgcagggccatgaggcaggatcatactggctcccgcatgtatagacgcagatgtagtgtcttccatattttcagaccttgaccaactattcctaggaaaatktttaaaggtttttttgttttggaaagcaattagcaaaatagctttaagccaaattctggagtggatggtgcttgatggttgaataacatgaaggtacttactgccactgaactgtgcacttaaaaatggctagaatggtaaattttacgtaatgtatattttactgccattaaaaaataaataataaaaaattaattaaacaaatttaagcccacttgtattatg

SEQ ID NO: 171486 - DNA, 599 bp, Homo sapiens
aagtggtccaaaattcaaaaagcaagaggtctaaaaggaaatgagaaaaggaaagcatcagtgaaattattcgagaaaagtttccataatggaaagatacgttgaaacagcctgccaactgcctagaaaaataaataaaaatagactcatactgaggcaactcattgtgaaatttcaacaaagagaagatcctgaaagtttccaaagatgaaaaaacaattaggtcacatatgaaggatcgggaatcagaaagactctggacttcccagcaactctgaaaagaagaaatcaataaagcaacaccttcaaaattctgaaggaaaattatttttgatctagatatatgaaccctgacaaactatcaattaagtatgagagtaaaataaagagattgtcagatctgcaatgtctcaaaattctctctccatttttctcttgcagaaaactactggagcatgcggtcattcraagaagatgggtcactaaaagaagatgtgagatgcaagcactaggggactgaagaccagagaaaggcaaaaggaatcctcaggttgtctgtgcagagaccccaagatagagctatgtcccaggcatggaac

SEQ ID NO: 171487 - DNA, 573 bp, Homo sapiens
agggggtcacttgggcagatctacgactacaaaaattagttctgctaagagagtagaggacggaatgaagtaatgataagggttacagcagagagggaccttcagaagaggagggagagaaatyggaaactgagaaattaaacacaggaggctcctgcagcaatcaatataagtaagaaatcatgatgttcatatacctctgctgtatcagcctactatatgtttccacccattgtccagttggaaaaatcctatttagctatcaaaacctacttgtggtaaacagaattccaaaatgaccccaaaaagtcacacccttatataatcccctcccactgagtgctggtgagacctgtgactgtgagaggatattactcctgtgattacattatttcatatggcaaaatgggggggtttacagatataattaaagtctctactcagctgattttaagttagtagaaatgaagattttccgggtctggcctgacctaatcaggtgagccctgaaatcaaggttgaaaagtcagagatggaagcagcagcaccaaaccagcagcagcaaacgtttca

SEQ ID NO: 171488 - DNA, 589 bp, Homo sapiens
gagctctggattccaagtgatggaagtagtcatgtgtttttaaaacatgtatttacttttttgtgtgatattcaggaaggctgtctgaaacacagggcccaggccaggggctcctctttcccaggtccaagcacagaactgaaaaaagcccctaaacacgaaccagctctgattcctgaggcacagcaagaatcagtaacttattccagtgctgaaggagaatctgactgtgttgatcatgttatgagagagtagaaacatgcacaaatcaagacaaaatgagaattgtaatttttaaatttttcctctgacttagaggggtaagtggactcctttgtagaaaaccttatttgtctgcatttgacattggtaggatttttcaaccaatatgtatgtrtaaacacagtcactaaagttttattacaatgatgttttttgcttcttttttatgattttgttttggagattagtaagattggcacttctcaaaagatgtatataatgtctctattcatattccccatggaacatagcatagtgacttttattaaacactcagaatttaatataaattcattgagtttaaagt

SEQ ID NO: 171489 - DNA, 587 bp, Homo sapiens
atgatatcgtcttgaaattaaacaaagagaaccagtcacttcaaggagaacaactgacattatttgttgtctgataaaatttgagcattcaagcaaaaattagattttgagaaacctgtattcaccactgtaaacttggtagtcatcatgactyaaagactattctgaaactgggggtaaaattaacaagtatgattattttgatgtatataataatttgtgtcaacatttggaaattctgcataattcagtgaaccaatattttccaaaggctagtgaatcatattacaaaatcatgcatgagtaaaagatccattcaaagcataagatagagggaacaaagaatagatggaacaaatagaaacaaataacaagatgatagatttatacctaatcttaccaataatatcaaatataaatagtctaaaagcctcaattaaaaggaagagattatccttttctaaacttgtcttggtatcatctatctaatttttgtccgttgatgagtataaatagattactcaccgattttagtttgtattttctaattagtagtaagattgagatgccttccaaatacatgttag

SEQ ID NO: 171490 - DNA, 642 bp, Homo sapiens
catgttaaaatcacatatatagtctgggatctatcactagactttccatttggttctctggtttatttttctatttatacacaaatataatatagtaatttgtttaaagtatagacaaaaattaaatgtagcttaaactgttgagttattcaataaaactttaaagttcattttttatccttctgatactcttattatttccatatttaggtctccagaccaaatttcaagttctcttactttttccctcaatatttccacccctgtgtattttttcagactactaatttaactctcagtagtgawcattctcatcttcatggaccatattatttgagtttaaaaatcactgagtttgggatttttgtggttattgtttcagaaaatctgctttgaacttttcctgaatattctcctttatttgttccttttctattttctccagcagttctggtccagctgtgtttttcatgttgattgttccccctctctctggtctttaaattacttcagaaacagaacctttttcagaccaacagggttagactcagaggtggcaataaccactcctcccatgggtaggtaccacggtatcacacaagtcattgacctctgtggagagactgagtgaaatcctgcctg

SEQ ID NO: 171491 - DNA, 642 bp, Homo sapiens
catgttaaaatcacatatatagtctgggatctatcactagactttccatttggttctctggtttatttttctatttatacacaaatataatatagtaatttgtttaaagtatagacaaaaattaaatgtagcttaaactgttgagttattcaataaaactttaaagttcattttttatccttctgatactcttattatttccatatttaggtctccagaccaaatttcaagttctcttactttttccctcaatatttccacccctgtgtattttttcagactactaatttaactctcagtagtgaacattctcatcttcatggaccatattatttgagtttaaaaatcactgagtttgggatttttgtggttattgtttcagaaaatctkctttgaacttttcctgaatattctcctttatttgttccttttctattttctccagcagttctggtccagctgtgtttttcatgttgattgttccccctctctctggtctttaaattacttcagaaacagaacctttttcagaccaacagggttagactcagaggtggcaataaccactcctcccatgggtaggtaccacggtatcacacaagtcattgacctctgtggagagactgagtgaaatcctgcctg

SEQ ID NO: 171492 - DNA, 598 bp, Homo sapiens
cgtgctgcttaactggtgcataatttttccaggactaggttgcaacttaattttctaaaacttactcatgccatacaaacatgtacacacatgtacttggacaagcatacctacacacatgcagagacatcctaacaccgtgcatacatgcaacactctagctaaacaggtaatgtgctcacctccaaaatagaccaagagagctctacccctataccttggtctgttttgccacctctgccaggaaggccattctatctgtcccttttgggttcaaatctgtctgtctgtcccttgggttcaaatactttgaaaccaaggtttttttctgwttcattttgcagagttcttttctttcatggagagatggaaatagtctgatgtgaaacaaaggacacaggattggaattaggcaactcgtggtgtatgtctaagttccacacccaattatgaccttactatgaccttctaaaacaagtcactgcatcctctaaatgtcctcaatgtataagcctcattgtcctcatacataaaatggaatctcatggcctgccaggcaatgttattggctaagtacctgatgcttagtggacatgca

SEQ ID NO: 171493 - DNA, 598 bp, Homo sapiens
cctaacaccgtgcatacatgcaacactctagctaaacaggtaatgtgctcacctccaaaatagaccaagagagctctacccctataccttggtctgttttgccacctctgccaggaaggccattctatctgtcccttttgggttcaaatctgtctgtctgtcccttgggttcaaatactttgaaaccaaggtttttttctgattcattttgcagagttcttttctttcatggagagatggaaatagyctgatgtgaaacaaaggacacaggattggaattaggcaactcgtggtgtatgtctaagttccacacccaattatgaccttactatgaccttctaaaacaagtcactgcatcctctaaatgtcctcaatgtataagcctcattgtcctcatacataaaatggaatctcatggcctgccaggcaatgttattggctaagtacctgatgcttagtggacatgcaataaagcgtggggtgcttgctacacatcggcttagcaggtgcatgttttgtactggtggatgcatgacacagtggtgtttaacagattctgaaaccttagaagcaggacgaagagacagctttaaggtca

SEQ ID NO: 171494 - DNA, 436 bp, Homo sapiens
gggtggcaactacagtagatcattgggtataaaaaagagaggagggaccatttttgacaccacggaaccaatatttagtttagatttttattttttatttttttatttttggcttttggctgctagggctgctggggagctgttagctgttagagactttgagcaagtacaagatattggtgccatgttgttttataaatgcagcaggcataaaaggaggaatcattttaagtatttggaatttttcacatagccacctgtattagtccttgtgtattattaaaaaggaatacctgaggctgggtaactgataaagaaatgaggtttaattggctcatggttctacaggctatataagcatggcaccagcatctgctcagcttctggtgaggcctcaggaagcttttagtawtggcagaaggtgaagggggagacc

SEQ ID NO: 171495 - DNA, 532 bp, Homo sapiens
gattcaagctgctatcatttccaacatgtatgctcatgttggaacaagaaaggtggacatgattgaaatttgcatttaaatggaaatggttaaaggtaaaggcccaatgtttagagaaatgagagtatccatttttctaagagggacgccgagtgttattgtataccattaargtgtcactgagccgaaatatgtttagaaatattagatgctggtactgcacacagagtggagactggcatttggaaatgactccatgccacaaatgaatctaagtgaaccctgcatcaagcacaattgcttataatgtgcctgccaccattacctaattccagccctgttcactaaacaatagaagttttattagacagctttctgctacttttcaattgtaataaatgccagtactggttcatcagcatacaacttggcaacacaggccatcttccataggatacacacagagagacctgaaaatgtttggctgaggttttaccaaaaatgtcacatggatttcatccacagtacgtga

SEQ ID NO: 171496 - DNA, 532 bp, Homo sapiens
gattcaagctgctatcatttccaacatgtatgctcatgttggaacaagaaaggtggacatgattgaaatttgcatttaaatggaaatggttaaaggtaaaggcccaatgtttagagaaatgagagtatccatttttctaagagggacgccgagtgttattgtataccattaaggtgtcactgagccgaaatatgtttagaaatattagatgctggtactgcacacagagtggagactggcatttggaaatgactccatgccacaaatgaatctaagtgaaccctgcatcaagcacaattgcttataatgtgcctgccaccattacctaattccagccctgttcactaaacaatagaagttttattagacagctttctgctacttttcaattgtaataaatgccagtactggttcatcagcatacaacttggcaacacaggccatcttccataggatacacacagagagacctgaaaatgtttggctgargttttaccaaaaatgtcacatggatttcatccacagtacgtga

SEQ ID NO: 171497 - DNA, 561 bp, Homo sapiens
gacaaacaggcccttggcaaagatgtttattgcataccttaaatttgcaaggttatctcttctcatcttactgagctctcaccttaatcttcctgatcatctccttcttaccccgttaagtgcccactcacctaaaacacactggataatgatgtttattacccaacaatgaaaatattgttatttatggttataatcaggatgtcatcaaatatgaatgctcacatttggtgagggcctttcaactgattgtttatgtaaatgaaagtgttcgctcatcatcacatccattttgggaagaaacaatcagccaggcgggttgtttctctctataatatcyttttagtattcagttcactgaaaaccaatctgcaacaaaagaaaaaaaaactacaaatttaaggttagatgtaaacctatagcaaatgttagcatgccctggaatgacacaggcagaagctcaattgcaattcctcttcactgggaaacttagaatgggcctccaatctggatgcagtttccaatagagaactagcctttccatcccagtttctcccactt

SEQ ID NO: 171498 - DNA, 544 bp, Homo sapiens
attctgtaatctgtaaaatctgtgtaaaattaagttatttattacttgactctcaggtaaagcctactagtgaggtcactgggcctggactgttttgtaggaagtttttaaaaaaagatttttaaagttttcttacttgtggtagggctattatagtttgttttattcttattgagtcagttgggtacaatatatttttcctaagaaggttttcattatacctaatatttaaaacttatcaatataaagttgttcataatatcttgttatcattttcatatcttctacttggtagttatagttcctttctcttttatttcttccttgtaccttcttttctttctatattccatgttttttattactttcattaattttacttatttaaaataatcatttcctacttgtgtaatttcttgggtttatgcgttttttarcctcataagttggagaataagctaatcattttttaacctttcctcttttatagaataatctctcaaggacatgatttttttctctaaatattgctttagctgtatca

SEQ ID NO: 171499 - DNA, 463 bp, Homo sapiens
attttaatttaaaataatttaaaattctactgcggacattgtgaatactaggttgctgtgagttcccaccctttcttctagctcctgcctgcctccagatgattcagctttgatgatcccctcagtgttcccagtggggaagacagagaggccttctgggcagaatccccccacactgtgccttcttcatgaaggggtaactcagataaagtgaaattattcttcttacctttttcatgtgtccactcagattcttttgctctaccagggtgctggaatctctcagttttactccagagttgccacagaggtactctcatcagtggtgggttctcaaagtcagcatttgtatgacaggttgagggatgggatctsctactccaccatcttctgacataagtcttgattgattttcaaatgttaagccaaccttgcatttctggtatatatccaactttgcatg

SEQ ID NO: 171500 - DNA, 586 bp, Homo sapiens
gtgtaatgagagattttctcaacaatggtctagggtaccaaagaatttcattccttggggagaggataaaatagaaggaaacaagccctcacatgactgagttatctggagggaacttctggccatacatttagtttaagttgatctttgatttctattacttccaggatcctggcagaataaatcataaattctctctagaggcattagcatccactctaagcctcaaattatagttaccaatatatttttgtcacacagcttaagataaccaggagcacaaggaaataaaataccatgaaggaaaaacaccaaaacaaacaaacaagcaaataaaactatacatactttatgtaatgaacgtgccatagacagattataaaacaatttaaaaagaggagcttgagcttgagcttatctacaggtaaaactttaaaaattgcaaagcaaattwaaaaaaatacgtaggattactagaaatgaaagaagcaaaatttacattaaacttacagaattaaatctcaattatctccttcctctaaaatccccctctccacccaaatctgttccattttagataataata

SEQ ID NO: 171501 - DNA, 579 bp, Homo sapiens
tgaaatgaaacgagagctcaaaaggcaagtcttaacaaattttaaaagattgaaattatatcaggtatcttttctgaccacaatgaaatgaaactagaattaatggcagaaggaaaattagaaaaaatacaaatagatggacataaaacaacacacttttgagcaaccaatggctcaaaaaagaaatctaaagagagattagaaataatctaagacaaatggaaatgaaattgcaacataycaaaactaaggggaggcagaaaaagcagtaccaagagggaaatgtatagtgataaatgcccacattaaaaagaaaaaaaaactcaaattaacaacctaaatttacattttaagaaattcaaaaatagatggaaataaggccaaagtgagcagaaagaaggatacaattaagataagaacagaaataaatgaaatagagaatagaaaaaaatcaacaaaattaagttggtttttttaagatcaacaaagaacaaaactttcgctacattaattttaaaaagagaagatatgaatacttaaaatcagaaatgaaagaggggatattacaacttttgccac

SEQ ID NO: 171502 - DNA, 471 bp, Homo sapiens
aaaagaataaaataagaataaacttaaccaaggagataaaagatttgtatactgaaaaattacaaatgttgttgaaaaacagagccaaataaatggaaagatgttgtgtttatggatcagaagacttaatattttttaaaatgtctgcatacccaagggaatctacagattgaatctggtccctatcaaaatcccaatgatatttacagaaatagaaaaaagaatcctaaaatttatttggactcacaaagggcctcatacagccaaaagaatcatgagaaaaaacaargctggaggctttgcattttctaattttaaaacacattacaaagttactggcataaagatactggcgtaaagacaaacatacaaatggaacagaattgagactctgaaatatacccacacaaatatggccataattattaattttaaaaaggcttaaaatttatctgaaaatgacaaaaaaaa

SEQ ID NO: 171503 - DNA, 587 bp, Homo sapiens
ccagaaactaaactaaaatgacagattcaaaatatgagagaaaatttgataattgtttaaggagttctaatatatggatrgtaggaattccagaagatagggacaaataaaatggagacggttgtggttatcagagaaataaaatagaaatttccaagacataaggctatgaatttcagtattgaaaggtccactgagggtttagcatgaaaaaggggaaaaagaccacctcaatggatattattgtgaaatttcagaatgcttgtagtaaatcaggtataccagaaaccctggccacagaaaaagcagagccacactgagagctgacagtggcaatggggaccccacaaggacaactgtactgctgattacagaacaaccagtccagatggagcaggaggacccacaggtatgcatcaaagaaaaaaaaatatatcacctgatgaatttgtgtatagagagtcagagggtgcatccaggagaagaacactgaaaagcaagcaggcaaagaaaaaaatacccaagaaattattaactccaaggatgataaatattgcattcataagttattcatagtccattatgtt

SEQ ID NO: 171504 - DNA, 562 bp, Homo sapiens
tctataggtattatctttgtttttaccatggggattatgtaaaatttcttatatttataacaatccattttaagataacaggaacttaactttaattgcatgcaagtattttacacttttacttctcacacacacactttattactgatgtcacaaattacatcttttttatgttatgtaaccactaatgtatttttgagttgcatatttcttttttaaatttttattattattattatttttgagatggagtctcactctgtcacccaggctggaatgcagtggtgcgatctcagctcactgcaagctctgcytcctgggttcacgccattctcctgcctcagcctcctgagtagctgggactacaggcgcctgccaccacgcctggctaatatttttgtgtttttagtagagacggggtttcaccgtgttagccaggatggtctcgatctcctgacctcgtgatccgcctgccttggcctcccaaagtgctgggattacaggcatgagccactgagccggcctattttttgttttttgacttctatattataactaaaaa

SEQ ID NO: 171505 - DNA, 601 bp, Homo sapiens
agttgtttggttttgctcagtaagagaggataagcagaactttgtcttcccaaatagaaatcacatatcttggattatgacttactgtataaaattatgatgttatctctaaattttaaaaatatatccatcactttgtctttgttgttaaatacaggatttggctatcaaaagaaattacactgtttatgtgtacaggcagcctagttttgtgtttatctcaaatcaggaactcatgtgtaaaactaaaaggtcaatttgaaatatctagctrtttgacatcagatggataaggaggaattacactttcaaccaattcaactgttacaatattagggtaactattttaagaaaatatatttgaacctatgtttgaatgaacttgattgctccttgtatgaaatgacatcaaaagcgaaatctattctctttttacacacaaattatgctcaaatttggtaattttttttcagtttgcttcctgaggattaatggcatgtagacataactttgtgattagaaaattaaccacactgttgtgttccttgctttcctttttatgtggagtaatgctgttttgcattggttcttatattgttta

SEQ ID NO: 171506 - DNA, 482 bp, Homo sapiens
gttctggcattttattgtggatgtattaaatttctacattcttatagattacrgctaatatctttcaactccctatatatgcctccattaactcagtttgtagagtggaatagaatacccctaatggctttgacattgctttctgacaacactgttttcaaacctattattttatgcagtgatcctaataggcatttctcctgaataggggatgaaaatatgtgtgcatacgcactcacacacacacaaatatgcagatgcacacacaaaataagaaatgaaatatggaatgtcatcctcagtacaccaaagtaggacaaaggccttgtttagatttttgaaaaaaaattataatacctatttataggcacaaaaatagatagaataataaagacactattatgtttcagatctaagaacataattgccatatgtgagaaaatggttggaattcagttgaataaacagaaacaaatgaatcg

SEQ ID NO: 171507 - DNA, 546 bp, Homo sapiens
gtgccatggtggtttcctgcacctatcaacccatcacctggatttgaattctttgaaatagcagtgatctgatagctagattatgagaaaatttaaacccactcaaacctataggtcaaggcagtagaagtcaacaattgaaaaatgcttgtacgtctcagctcattacttacacattacagtcaacactgattataagaaatatggagagtattcctggtttctttatgtccaatagaaaatccagtatagtattttcttagcaatgaaaagaaagtaatccaaaaataaataataaggagataaaagccaacacacttttggaaaagacaactgatagtatattaccttttcaatrtaaattaataattatgatgagtattaatccatattttatgatacatttttactatcttctgttctatatgaagtattttataattaaaataaaaagagtgttaccattgaaagcatagacaagtaaatggtacagaacagttcagattcaggtatacacaataataacctagtattgggaaaaggttg

SEQ ID NO: 171508 - DNA, 558 bp, Homo sapiens
atgtgtggggatctctctctcgatctctctctcttactggaaaattataaagagaataagaaattaatggaaacagctttccagaattttgaaaattaggaagcagacacatgcattttgatcctgctttatcccaccagctgaagatctgaaattgttaactccaygttatgtgcaaaaaaaaggaaaatcttatatttgtaaacaatgccttaatcatataatatatacagaaaaatagaaattgatattatatataattcatttcattcttgtagaatgatgtaaactttaagtataaaagggtagtgtcatttacaaatggagcttcagaaatccaaaaagacacaacttcatttgtacagtgtcactcgcaaattagagtcccctcccactgctttcccctcattctgctattacaaacctttgaaaccaagaaagttaaactaaaaagtcctgtagtttttttaggtctatattatttccaagatgattttgtatccttggctaattagttatacttactctaaatttacaactgtgcctacaggttttcct

SEQ ID NO: 171509 - DNA, 558 bp, Homo sapiens
atgtgtggggatctctctctcgatctctctctcttactggaaaattataaagagaataagaaattaatggaaacagctttccagaattttgaaaattaggaagcagacacatgcattttgatcctgctttatcccaccagctgaagatctgaaattgttaactccacgttatgtgcaaaaaaaaggaaaatcttatatttgtaaacaatgccttaatcatataatayatacagaaaaatagaaattgatattatatataattcatttcattcttgtagaatgatgtaaactttaagtataaaagggtagtgtcatttacaaatggagcttcagaaatccaaaaagacacaacttcatttgtacagtgtcactcgcaaattagagtcccctcccactgctttcccctcattctgctattacaaacctttgaaaccaagaaagttaaactaaaaagtcctgtagtttttttaggtctatattatttccaagatgattttgtatccttggctaattagttatacttactctaaatttacaactgtgcctacaggttttcct

SEQ ID NO: 171510 - DNA, 635 bp, Homo sapiens
tataaattataaaatgcattgaaatattatttaatatagcaaaagactgtgtaatgaatactaataacttgatccttttttaagaaacatagaaatttattataaagatcttataaaaactttcagaaatacttatgtcaactaagtaacacatcttctcaagtagatgccyatatcgtatttcattgacttacttttacttggttaatccttttatcacaaattgagcaaaagtaaacttttcttatatattatcataaatttcaagtagagtagatttggcttaaatgttgtctcattctttcaggaagctatttgcttaatgttaaacatttgttagggcatataatgcagtgtaatagcccttcttacaaaaaaaaaaaaaaaagaaagaaagaaagaaaaaaaaagaaaacctggaagaatttttagcctaatcttcccctacctaattttatttattaccacaaacttagacctttgagttgggagcaggtggccttgttgacaactattgggtctaatagctttttgtgtgcgtttcagtatgtacatctttaaagaggaataaaggctacctcttactcagtaccacaaccaagaaaaatagaaaaacaaatgtattttcaaagaaa

SEQ ID NO: 171511 - DNA, 604 bp, Homo sapiens
tacctctttctctaagctaaacttttacatataagatatacttgttattttgtgttcaaaaactttatcttattaaaacttactcctctaattctattgttcatcatcttagaactatgttgcatcccagataagcatgtgtctttatgtattagtgtttttaatgactttttcccttatactttgtctcttcccatgacatttctacccattcaaaacctacttctaattgtccttcatccactaagccttcttttaatcctgtgagttagcattaaggattccttttttytggcttattaggctctctgtgatcctgggtgcctctccaaatagaagatacgttcactgagcgcaagaacgcagtctagcacctttgattctccattatgaccagcacaaaataagccttaataaatacatattaaatatgatgatcaaattgatttctcacatttttccacagatgatagtagatctttcacagaaatatatgtgtaaagtaggatattcacttaatagattgcaaagactggtattctctgttaataaagagacatcatttagcttcaaatataaatcattgtaaaggggtcttcagtgg

SEQ ID NO: 171512 - DNA, 604 bp, Homo sapiens
tacctctttctctaagctaaacttttacatataagatatacttgttattttgtgttcaaaaactttatcttattaaaacttactcctctaattctattgttcatcatcttagaactatgttgcatcccagataagcatgtgtctttatgtattagtgtttttaatgactttttcccttatactttgtctcttcccatgacatttctacccattcaaaacctacttctaattgtccttcatccactaagccttcttttaatcctgtgagttagcattaaggattccttttttctggcttattaggctctctgtgatcctgggtgcctctccaaatagaagatacgttcactgagcgcaagaacgcagtctagcacctttgattctccattatgaccagcacaaaataagccttaataaatacatattaaatatgatgatcaaattgatttctcacatttttccacagatgatagtagatctttcacagaaatatatgtgtaaagtaggatattcacttaatagattgcaaagrctggtattctctgttaataaagagacatcatttagcttcaaatataaatcattgtaaaggggtcttcagtgg

SEQ ID NO: 171513 - DNA, 572 bp, Homo sapiens
tatttcacattaatctatacatgaatatcctacctacccccaattattgcaaaatataaaaatattagataattagagccttaccttgagaaaataatgtgactttctgtataataggttaatgaatcataattataatagggttcatggaactggttaaatggttgtaaatggaagaaagcaagatttggcctcaaatcagcatgagattgaatcttcgctaacatttattagataactatttcataaagtcaggaacagtccygatcatttgcatttccacattaacattaccagatatacagcatctaaacacttttttcctctttttattcactcccttccttctcttttcatcctattcttttttctttaacctagtctttttctactctcttttcctatcaatccttctataatcatcctctcagcgctctctaaagtttgcttccccaaagacctatatagatttttctctcttactcagttggtttgaaatgttgaactcatttcctcttccgtgaacgctttccagtttcataagaagtttgcactttgctcctgtctacttt

SEQ ID NO: 171514 - DNA, 559 bp, Homo sapiens
actcatgaacttcagagtctgcacaargggacttttaaagtctcatatcttccttagactttcctgcaccagctgtgaaaatcaattagccctggtgaaaactgagctgctctatgttctcagtaatgaaaatggccaactgcttgctagcaattttctctgtcctttacaaaggcaaatggagactttgaatcttttttcactgctccatggaattgccttttacttctattttgaaagttgccaggcatgccaggagattaacacagaagaatctttggagcagcgggaaaattatatcatcacacaccagtgacatttgtgactccctcaggctggtatgcagccatcagacagtcaaaacaaacacctcccaaacacatgccagaactcaactccccctcatgtctgctcccttgataaaaactgaaatggctgatggtacctcatcaatttaaagacccagtgaatagctcagataatgctccaagaacataataataggaaaatgctggcataaagatggataaggaggaggccactgagatggtgagccagc

SEQ ID NO: 171515 - DNA, 610 bp, Homo sapiens
taacacagaagaatctttggrgcagcgggaaaattatatcatcacacaccagtgacatttgtgactccctcaggctggtatgcagccatcagacagtcaaaacaaacacctcccaaacacatgccagaactcaactccccctcatgtctgctcccttgataaaaactgaaatggctgatggtacctcatcaatttaaagacccagtgaatagctcagataatgctccaagaacataataataggaaaatgctggcataaagatggataaggaggaggccactgagatggtgagccagcataggaagcacagggaaatgccagaaggacaggggttcacaaactgcctggagatctagattgcttttcaccttcccatcctttatgggaaagtggtcacttccaaagaatgagaaaagaaaagaatcctcctccacatcccttgtacttctgccatcatagttcgcatcattaactaccttcataataaaataataacatctcagtacattatttactcagttaaaacagggattcccagacttggttattgacatattgggtggaataattcttgttgggcagatggagaagctgtaatgcacattttag

SEQ ID NO: 171516 - DNA, 559 bp, Homo sapiens
actcatgaacttcagagtctgcacaaagggacttttaaagtctcatatcttccttagactttcctgcaccagctgtgaaaatcaattagccctggtgaaaactgagctgctctatgttctcagtaatgaaaatggccaactgcttgctagcaattttctctgtcctttacaaaggcaaatggagactttgaatcttttttcactgctccatggaattgccttttacttctattttgaaagttgccaggcatgccaggagattaacacagaagaatctttggagcagcgggaaaattatatcatcacacaccagtgacatttgtgactccctcaggctggtatgcagccatcagacagtcaaaacaaacacctcccaaacacatgccagaactcaactccccctcaygtctgctcccttgataaaaactgaaatggctgatggtacctcatcaatttaaagacccagtgaatagctcagataatgctccaagaacataataataggaaaatgctggcataaagatggataaggaggaggccactgagatggtgagccagc

SEQ ID NO: 171517 - DNA, 527 bp, Homo sapiens
gtcagcaagatctgcaaattaccctctaaccattcagttcacatcttgtaatgtttaatgtcrtcttttttgtcttttctgtacattagctcctgccaaatgctttctttgaagggagaacaaaataaattctgtccactatgaaaggccagatataattccaccttcaaaatgttaaaagtgatgaaattgcattttactccttttgggttatacttattggaaagaagcagaaagttttctaatccacataaacaatgccatcaaccacacagggaaaggagcctgaataaatgcattggttctggcattcttagagcagaattacaccttcccaagttctagctaggagcaaaataagaatttgtgtggggtagaatgtttttattcttggcagcccttaaatttctgttaaaaaaaataaaaatggctttgaagtctttttggattcactatcaccctcagcaaacaatattttgatgagtacagagtcaatgaattataaacagatggattaaatttctaat

SEQ ID NO: 171518 - DNA, 527 bp, Homo sapiens
gtcagcaagatctgcaaattaccctctaaccattcagttcacatcttgtaatgtttaatgtcatcttttttgtcttttctgtacattagctcctgccaaatgctttctttgaagggagaacaaaatarattctgtccactatgaaaggccagatataattccaccttcaaaatgttaaaagtgatgaaattgcattttactccttttgggttatacttattggaaagaagcagaaagttttctaatccacataaacaatgccatcaaccacacagggaaaggagcctgaataaatgcattggttctggcattcttagagcagaattacaccttcccaagttctagctaggagcaaaataagaatttgtgtggggtagaatgtttttattcttggcagcccttaaatttctgttaaaaaaaataaaaatggctttgaagtctttttggattcactatcaccctcagcaaacaatattttgatgagtacagagtcaatgaattataaacagatggattaaatttctaat

SEQ ID NO: 171519 - DNA, 527 bp, Homo sapiens
gtcagcaagatctgcaaattaccctctaaccattcagttcacatcttgtaatgtttaatgtcatcttttttgtcttttctgtacattagctcctgccaaatgctttctttgaagggagaacaaaataaattctgtccactatgaaaggccagatataattccaccttcaaaatgttaaaagtgatgaaattgcattttactccttttgggttatacttattggaaagaagcagaaagttttytaatccacataaacaatgccatcaaccacacagggaaaggagcctgaataaatgcattggttctggcattcttagagcagaattacaccttcccaagttctagctaggagcaaaataagaatttgtgtggggtagaatgtttttattcttggcagcccttaaatttctgttaaaaaaaataaaaatggctttgaagtctttttggattcactatcaccctcagcaaacaatattttgatgagtacagagtcaatgaattataaacagatggattaaatttctaat

SEQ ID NO: 171520 - DNA, 516 bp, Homo sapiens
cttagttgtttagacctctatgtatcctgggaatgacttccatccttattaaaagaggatttgtttaatgaagaacttgttactatcataataaattgtgctatttgttttgaagatctgtcatcagatmcgtcactgttagaataaagactcttaaaaatgaaaacatttatatcaaattaacaatgtgtgatggagaaacatgccactaacaaacacaaaatgaactgttttgctctgtttaatagatctgaactttttcaatgtgtcaaataactactattctttaagattcaaaggttattgaattgagtttgtgatttaaacaaaatgtattgttaaatcagataagtattgtaaaaaccaattgtgtatatagaaaatgaccctacagtataattgtctagtaatacaagggtcatcatttggataacactattgaaatgaccattaaaaataaaatatattcttgttagtacgtttcaatacaatttgttctgcatttccatcttaaca

SEQ ID NO: 171521 - DNA, 516 bp, Homo sapiens
cttagttgtttagacctctatgtatcctgggaatgacttccatccttattaaaagaggatttgtttaatgaagaacttgttactatcataataaattgtgctatttgttttgaagatctgtcatcagatacgtcactgttagaataaagactcttaaaaatgaaaacatttatatcaaattaacaatgtgtgatggagaaacatgccactaacaaacacaaaatgaactgttttgctctstttaatagatctgaactttttcaatgtgtcaaataactactattctttaagattcaaaggttattgaattgagtttgtgatttaaacaaaatgtattgttaaatcagataagtattgtaaaaaccaattgtgtatatagaaaatgaccctacagtataattgtctagtaatacaagggtcatcatttggataacactattgaaatgaccattaaaaataaaatatattcttgttagtacgtttcaatacaatttgttctgcatttccatcttaaca

SEQ ID NO: 171522 - DNA, 516 bp, Homo sapiens
cttagttgtttagacctctatgtatcctgggaatgacttccatccttattaaaagaggatttgtttaatgaagaacttgttactatcataataaattgtgctatttgttttgaagatctgtcatcagatacgtcactgttagaataaagactcttaaaaatgaaaacatttatatcaaattaacaatgtgtgatggagaaacatgccactaacaaacacaaaatgaactgttttgctctgtttaatrgatctgaactttttcaatgtgtcaaataactactattctttaagattcaaaggttattgaattgagtttgtgatttaaacaaaatgtattgttaaatcagataagtattgtaaaaaccaattgtgtatatagaaaatgaccctacagtataattgtctagtaatacaagggtcatcatttggataacactattgaaatgaccattaaaaataaaatatattcttgttagtacgtttcaatacaatttgttctgcatttccatcttaaca

SEQ ID NO: 171523 - DNA, 509 bp, Homo sapiens
tcttttgtggctccataaacattttgttgatttttttaatttctgtgaaaaatattggaactttgatagagattgcattaaatttgtaatttactttgaatactacagagatgtaataatattaatacttccaattcatgaacatggaatatcttttgagtattggtgtccttttcaattttgtttgttagtactttgtatttttcagtgtacagatctttcactccctcagttaaatttatgaattacccttatgccaaagatgggcaaggacatamcaaaaaaaaaaaaaagaaaactacaggctaacatcctttataaatgcagatgcaaaaaccctctacaaaatattaaaaattctatattgaacagcacattaaaatgatcatgcactatgatcaatgagatttatcctgggattcaaggatagttcaacatatggaaatccataaatgtgacacaccacattaacaaaatgaaggttacaaatcatattatcatctcaataa

SEQ ID NO: 171524 - DNA, 639 bp, Homo sapiens
aatgtgtagtacatcattacagggcttacccatgcatcacttactgccggtagattctttatactgtactttcatgaagacagaaagaggtattgaaggagaaatccaccaaatagtacttccagacagacagaatgtccctgccaggggatagacaaaggcctaaggacacaggaccctatcatttatatttttacttctgcacttaaagtgagcagttttataaagatgttaaaagtccaaacaagcctttttactagcactttctgcaccccattatttcatcagtaatgttcagtrtgttctacttgttctgttaaggtgttgtctctttaatttctaggtattttagaataagactcatgcggaataagaatataattggtttagaaaatttaaaactataatcttttgcctgaagttgaatttaaatatggtattccaagtaaaacatcatggcccccaatgaaaaaaaaaataaaattgatgctgctgacatattgcaaatgtttgagatttcccacatgtggggaagggagatggataggaatgtgtgggaggaaaggtgaactataaaagattaataacataaggcaaccaacacctctgagatcctgtctttaattaacatttattaac

SEQ ID NO: 171525 - DNA, 639 bp, Homo sapiens
aatgtgtagtacatcattacagggcttacccatgcatcacttactgccggtagattctttatactgtactttcatgaagacagaaagaggtattgaaggagaaatccaccaaatagtacttccagacagacagaatgtccctgccaggggatagacaaaggcctaaggacacaggaccctatcatttatatttttacttctgcacttaaagtgagcagttttataaagatgttaaaagtccaaacaagcctttttactagcactttctgcaccccattatttcatcagtaatgttcagtgtgttctacttgttctgttaaggtgttgtctctttaatttctaggtattttagaataagactcatgcggaataagaatataattggtttagaaaatttaaaactataatcttttgcctgaagttgaatttaaatatggtattccaagtaaaacatcatggcccccaatgaaaaaaaaaataaaattgatgctgctgacatattgcaaatgtttgagatttcccacatgtrgggaagggagatggataggaatgtgtgggaggaaaggtgaactataaaagattaataacataaggcaaccaacacctctgagatcctgtctttaattaacatttattaac

SEQ ID NO: 171526 - DNA, 597 bp, Homo sapiens
aaacctagatacaatgggaaatatcagaagaaaactgctatgctaaaaaccgagttctgaatcatcatgtgaggtatacattacctttttaactttttgtctcttttttgataatcattggtttgggactttgtaaaatgtgtaaatgtaataaaatatttcaatgaatttctctgtcaytaccaactgtgataattcagtaaaattaacccatttccaaatatggatgaagcaaggattttgaaattagaatttattttgaatccagacttaacaaattaatactttctaactaaactccctctcagcctcagtttcctcatctgtaaaatggggcattctacctcaaaaagtagtaactatgaaattggatgatatatatgaaagtgcctaatatgaaaatggtaggatatcacttgatctttatttttacttctcttattcttctcttccttaagagaaaaaaaaaactaaaataattctcagattatcagtgaattaatatgtatgagttttgcaatatttgtatagttttctgaaaatccagtttggattatttttgtttctacaacatagtcactctgacttagatatatg

SEQ ID NO: 171527 - DNA, 597 bp, Homo sapiens
aaacctagatacaatgggaaatatcagaagaaaactgctatgctaaaaaccgagttctgaatcatcatgtgaggtatacattacctttttaactttttgtctcttttttgataatcattggtttgggactttgtaaaatgtgtaaatgtaataaaatatttcaatgaatttctctgtcattaccaactgtgataattcagtaaaattaacccatttccaaatayggatgaagcaaggattttgaaattagaatttattttgaatccagacttaacaaattaatactttctaactaaactccctctcagcctcagtttcctcatctgtaaaatggggcattctacctcaaaaagtagtaactatgaaattggatgatatatatgaaagtgcctaatatgaaaatggtaggatatcacttgatctttatttttacttctcttattcttctcttccttaagagaaaaaaaaaactaaaataattctcagattatcagtgaattaatatgtatgagttttgcaatatttgtatagttttctgaaaatccagtttggattatttttgtttctacaacatagtcactctgacttagatatatg

SEQ ID NO: 171528 - DNA, 563 bp, Homo sapiens
ttgatttcaacaatgagctgagatctggaggaaaaacaggagttaaccaataaaagggaggtaaaaatcttttgttttaggcaacaaccacaaagacccttacaaatagtgttggcagacatgagggatagaaagtaaaccagcatgcctgagagaagatatacatgtatgtgcctgtgaatgtgtttttacactttcatttacgtgaaacatatgcaatttaagcataaagtagaatcagactttataaatttttctgcaaattgctttaaaatatatgtatatatatcatggatatctttccatgttcattcatatatatctactttattaattttaatggttgccttggatttcattgagttccataatttaactgtctcactactgataaaaatttaagtaattttctaatttattttattacagcagtgcatcagtgaatgttcttgaattttttttttttttttttttttttgagacggagtctcactctgtygcccaggctggagtgcagtggtgcgatctccgctcactgcaagctccgcctcccgggttcacac

SEQ ID NO: 171529 - DNA, 568 bp, Homo sapiens
tccaaagatattaatttcagaaacttagcagagaacagcacatacttatcttcctagaatgggaaccaccattaccaagcccacccctacttactggatttcctatcaagcatcttacatttcttaaacataagcagacagtcaagaatcaagatgcagcagaggaaagcttaaatatcaaaggcagagcctaagtaaacacaaaaagaaaaaacccaaaggcacaaacagtttataagaaaataatgtcagaaaattaccaatattgtacctatgaaaaatgatcaagagggtacagagaagatcattgtgaaccacatttaaagagtttatgagaattcaaaatacaacaggagaaatgaaaaacttttgagaatttttgcaaggtaaagttaaagaaatctagaaatctgagtgtagaggcacaaaaaggtaaatattagacttttaaaaaaacccaaaargcaaaaaccaccaaatattctattgcaagagatccagcattagaatgcaagaaaattcataaaaacaaagatcagcaaatgaaattattaaaaaaaagcaagaa

SEQ ID NO: 171530 - DNA, 569 bp, Homo sapiens
atctgacatttgaggaagtggtatctaaaagagagagtgcagtctgaatcatgagttactggactagaagctatgtcaagtttaagcaggatgatagataaaggaaagagttgatgctttatttcctgacatttgcttcatagggtcagcattttttagttgttacttttctttaacttctttatcattgtttcatttttctactgaggaactaggtgaaaactatattttagcaaataaatcttttcaaactcttgctctgtcatatgacactcatcttcccaggtcttccccagaaaaaaaaatgttagcatacattaattccaagtataagccaactgcctttactcagggtggatatggaasttgtattagtctgttttcacactgctgataaagacacacccaagactgggcaatttacaaaggaaagaggtttaatgtagaactcacagttccacatggctggggaagcctcacaatcatggcagaagacaaggagaagcaagttaaatctcatgtggatggcagcaggcaaagagaccttgtgcaggaaaactcccccttat

SEQ ID NO: 171531 - DNA, 545 bp, Homo sapiens
acattaattccaagtataagccaactgcctttactcagggtggatatggaacttgtattagtctgttttcacactgctgataaagacacacccaagactgggcaatttacaaaggaaagaggtttaatgtagaactcacagttccacatggctggggaagcctcacaatcatggcagaagacaaggagaagcaagttaaatctcaygtggatggcagcaggcaaagagaccttgtgcaggaaaactcccccttataatgaccatcagatctcatgagacttactatcacaagaaaaggacaggaaagacctgccctcatgattcaattacctaccactgggtctctcccacaacatgtgggaattcaagatgaaatttgggtggggacacatccaaacaatatcattccatccctggcccctccgaaatctcatgtcctcacatttcaaaaccaatcatgccttcccaacagtcccccaaagtcttaactcatttcagcattaactcaaaagtccacagtccaaagtctcatctgagacaagaca

SEQ ID NO: 171532 - DNA, 647 bp, Homo sapiens
agatcataatactttttattctaaagttgttttataatttttttaaatgttaacattttattaaacttctctcgcgattttttaattaaaaaaattgmgatgtaacataatatattaaagagagcacggagaatagagtaacacatacgcatgaatcctgctttattccttatcagatgagtggccttgaagacacctgttagcccattctaaatctctgtattctccacactaaccaatacttagaatacatagaacaatacttagaattgtgcggattcgttgacataaaggctataaagaatctagcagagaacacataataagctctataaaatgttaggtgatgttctccttgatccatattgcaagaagacaaattgaggtaatgttttttgccagctttaagttagaggagatacagtagttgtgaaccatatagcaactcaggtgaattctctatggtaccaaaggcaattctatctggggacaagatgataatatataaaaatataaatacaatcagtttttaatctaagtaatctttaccaaataaggggatttccaaacaaatgtcttggttggatatttttttaaaaaattaaatgtctttaaaactataagaatgttttgcttgttttgtgtta

SEQ ID NO: 171533 - DNA, 593 bp, Homo sapiens
gtttacatgtgtgtaagtatgtaagatttattttaataaattggctcatgtgattttggaggcttagcgattccaaaacctgatggggtaggctggcaagctggagttagagtccacagggcagcttctgtagaatttccttttgcttggggaagtagtctattgttatatgcaagccttcaactgattagatgaggctgacccatattatgaagggttacctgcttaactcaaaatccagrgatttaaatgaaaatctcatctaaaaaacaccctcaacagaaacatccagaataatgtttgactaaatatcttggcactgtcatcaagccaagttgacacataaaattaaccatcacaggaatgaaccaatgtaattccaggagcactgtcaaaagaaattgaagaccttcacttcagggttcatcaagaatgtaacttagcccttctgactgcgtctgttccctagccccacagaaagtgcatattgtttcatttttcagtcattttatttttcttttgttgtacacacttttcttctcatcagtaccatcttaataagaattagaaaaacgatgcagtgtgtaagtaaa

SEQ ID NO: 171534 - DNA, 569 bp, Homo sapiens
gtatgctctactttagactttggctcttaaaatgattgttacctgtgaaggaagaattttaaaaatttcagagagcaaggatggagggaggaaaggaagtaagtggaggaaggaagcagcaaaaaagaaaaggaagaagtaaaggagaaaggcagaaaagagagagaaagtakaaaaaattaaatatatatatgaaattctattagtgttcctcacttaaaagcccatatggggataaaacaaagagggaaagaaagcttactggctgttaatggattaactaagggagtctcctaataaatgttgctgtattgtttattttataaggggaacccatattacctttaagtctcctttcccatggcctacgttgtctaaacttgcactacatttaatcaaatttgatgagctgcataacaaaggaggaattccagatagtatttaccctcattcttttattccctgggcagacacagggaagaggccaaaacatgaggctgaggaatgaagacatttcagaataatacattgacctctagaacaaactggttccacgtgaaagtattcac

SEQ ID NO: 171535 - DNA, 569 bp, Homo sapiens
gtatgctctactttagactttggctcttaaaatgattgttacctgtgaaggaagaattttaaaaatttcagagagcaaggatggagggaggaaaggaagtaagtggaggaaggaagcagcaaaaaagaaaaggaagaagtaaaggagaaaggcagaaaagagagagaaagtagaaaaaattaaatatatatatgaaattctattagtgttcctcacttaaaagcccatatggggataaaacaaagagggaaagaaagcttactggctgttaatggattaactaagggagtctcctaawaaatgttgctgtattgtttattttataaggggaacccatattacctttaagtctcctttcccatggcctacgttgtctaaacttgcactacatttaatcaaatttgatgagctgcataacaaaggaggaattccagatagtatttaccctcattcttttattccctgggcagacacagggaagaggccaaaacatgaggctgaggaatgaagacatttcagaataatacattgacctctagaacaaactggttccacgtgaaagtattcac

SEQ ID NO: 171536 - DNA, 599 bp, Homo sapiens
attttcatgtgacaaactgaaaaatatttaaataaattgcctagttctgtttattcatatccttaagagatgaatgtaagcagatctaaagtcttacttaacttttaatgtatttttttataaaataagtgaattgtgaataggctgtttgaagtgagccttataaatcacctgaactgctccactattggcatgtcttggagtcattacgtataattggttaatggtgtatttattctcacattactggatcagctccagggataatcactgatgagtttcaaaactccargaggatttctatgcagaggtaaatgaattaaaacacaagataaaactaattacttttatttaaattcaattttgggagtaattgttctgtcttgggggttttctagcagttttcagaagtgataaatttgctttagtttgctaagttgcatttccttagagctaagggattaaatcattgggatgaatattagaaaggaagtaaattaaattttgtggtagaatttcccaccttagttcttcatgctctttttgatgcttctcttaaccaggcatttgaaaacctgataaatgagaaaaaaagaacc

SEQ ID NO: 171537 - DNA, 612 bp, Homo sapiens
aaaattgaaaaattccaaatattttattgtagtcaccccttctctaacttaataactttcctttcttttcatgtttgtgtttttgttttgttttgttttgtttttgagacagagtctcactctgtctcccaggctggagtttagtggcacgatctcggcttactgcaaacttcgcctcccgggttcaaatgattctcctgcctcagcctcccgagtagctgggactacaggcgtgtgccaccatgcccagctaattttttgtatttttagtagagacagtgtttcaccatattagccaggatggtcttgatcttctgaccttgtgaaccgcccacctcggcctcccaaagtgctgggattttaggtgtgagtcaccacgcccggctgtgtttttgtttttaagagagacactctgtcacccaggtgctasagtgcagtggcgtgatcactgctcactgaaacctggaactcctgggatcaagccatccttctccatcggccaagtagctgagactacaggtgcaggccaccacacctgacttacactaaacttagaatttttttttataatcattcattttaaacatatttgcatcaaaactttatagctat

SEQ ID NO: 171538 - DNA, 568 bp, Homo sapiens
tctgtacctgcaattgatctgtttagatctatctatgtcatgaaaaatctttgtttactacttgggatatacattggtctagaagacagggtgaaagatattttagagtccttgttctcaattcataaggcttttatgtgccccctgccagcccacccccacaagggtatgtttggcaatgtctacagayactttggttattgaaagccggagatgctactaaacatcctacagtgcacgggacaatcccaataacaaagaattatttaatccaaaatgtcaatagtgccaagactgagaaactctattttaaagcctcatcagtggaagtgaggcccaaaagccagcctcatcagtatcacctggaaatgtgtcagaaataaaaaatgtgcagttccatattattcacgttcctcttaaaatttgcagaatttactaggcaaatgcagcagaatttccaccactgcagcaatggtccacttctcacccatgtccaaagtacaacggcaaattgtttttttatacgcttaaaaattttattttccttctttcagatttgtagaaaatc

SEQ ID NO: 171539 - DNA, 561 bp, Homo sapiens
atttcagaatataatcattaaaaataaaatcaaatatttgaagaggccaggaaaccagaagtgtaaaataaggagtctgtgtgacttcaggtgctctgataaggaagtgctaggcgagtaatattagagatgcaagaggtagattgggagaaatgcccaggagggacaaggggaacaggttgggcaggaagggccttcagattttggagctgatctgacacctgtgaaaggcaagtggggaaagaagaaagcttgactagaaagggactccrttctaagaaagtttcaccagaccagtgggaaaccctcaagccaaagccacccattacaggagcaccctgaaccagcactcacaaccatacccagtccttcacaggaaagcagcctggggagcacggtgttgttgcaacctggaagggggctggggagcggcagctgaggctccctgccaactatttttccctgcattaggaaatccaagtggtgcattttcatccctgctccatagagttcattcaataatgtactataatctgtaataaggatactccggccacgtgg

SEQ ID NO: 171540 - DNA, 574 bp, Homo sapiens
tctctttctaaacttcaataaaatctcgatttcagaatataatcattaaaaataaaatcaaatatttgaagaggccaggaaaccagaagtgtaaaataaggagtctgtgtgacttcaggtgctctgataaggaagtgctaggcgagtaatattagagatgcaagaggtagattgggagaaatgcccaggagggacaaggggaacaggttgggcaggaagggccttcagattttggagctgatctgacacctgtgaaaggcaagtggggaaagaagaaagcttgactagaaagggactccgttctaagaaagtttcaccagaccagtgggaaaccctcaagccaaagccacccattacaggagcacyctgaaccagcactcacaaccatacccagtccttcacaggaaagcagcctggggagcacggtgttgttgcaacctggaagggggctggggagcggcagctgaggctccctgccaactatttttccctgcattaggaaatccaagtggtgcattttcatccctgctccatagagttcattcaataatgtactataatctgtaataaggat

SEQ ID NO: 171541 - DNA, 612 bp, Homo sapiens
agtgaatcttaactcaaagtaagaccaaagacacacacctattccacttttgaagataaaagacaacacaagccagtttctaccaacctagttctattataagtacctataagataagcatcatgatttaataattataatatgataataataacaatagatgccacttaggagcccttgacagtttgggcagacacaggccctttacatatgttattacttaaacataattgatgccagagaccttactcaatgcattgaggcatcactgcaggctcgcaaattatagtgcttaatttcttcttagaaatgatatattatgaaataactgtctccagacatttttctgtcatatactttccagttcagctctaagtctatcttctccacaatcttcaagtgatgcagtaaatatgtatgctgcagagggtcatgtttgtctagatccaatggyagaaaagccagcgtggtctgagaatgtgttattgtggctaatcaggtattctggttctatcgatttcacatgaccatttgtggctgaacagtgtcagataaacttaactcaataaaatacatttaatgcttggcctctttggaatataattgtgtttt

SEQ ID NO: 171542 - DNA, 612 bp, Homo sapiens
agtgaatcttaactcaaagtaagaccaaagacacacacctattccacttttgaagataaaagacaacacaagccagtttctaccaacctagttctattataagtacctataagataagcatcatgatttaataattataatatgataataataacaatagatgccacttaggagcccttgacagtttgggcagacacaggccctttacatatgttattacttaaacataattgatgccagagaccttactcaatgcattgaggcatcactgcaggctcgcaaattatagtgcttaatttcttcttagaaatgatatattatgaaataactgtctccagacatttttctgtcatatactttccagttcagctctaagtctatcttctccacaatcttcaagtgatgcagtaaatatgtatgctgcagagggtcatgtttgtctagatccaatggcagaaaagccagcgtggtctgagaatgtgttattstggctaatcaggtattctggttctatcgatttcacatgaccatttgtggctgaacagtgtcagataaacttaactcaataaaatacatttaatgcttggcctctttggaatataattgtgtttt

SEQ ID NO: 171543 - DNA, 612 bp, Homo sapiens
agtgaatcttaactcaaagtaagaccaaagacacacacctattccacttttgaagataaaagacaacacaagccagtttctaccaacctagttctattataagtacctataagataagcatcatgatttaataattataatatgataataataacaatagatgccacttaggagcccttgacagtttgggcagacacaggccctttacatatgttattacttaaacataattgatgccagagaccttactcaatgcattgaggcatcactgcaggctcgcaaattatagtgcttaatttcttcttagaaatgatatattatgaaataactgtctccagacatttttctgtcatatactttccagttcagctctaagtctatcttctccacaatcttcaagtgatgcagtaaatatgtatgctgcagagggtcatgtttgtctagatccaatggcagaaaagccagcgtggtctgagaatgtgttattgtggctaatcaggtattctggttctatsgatttcacatgaccatttgtggctgaacagtgtcagataaacttaactcaataaaatacatttaatgcttggcctctttggaatataattgtgtttt

SEQ ID NO: 171544 - DNA, 507 bp, Homo sapiens
aaaaaataaaactatcactattcacagttgccatgattttatatagggaaaattctaaggaacctaaaaaaactattacagctaataaacaagtattataaggtttcaggataaaagatcaataaacaaaaatcaatctttctaaccattagcaaatagcaacccaaaaatgatatttttaaaattccatttacaaccacaacaaaaagaataacatatctcagaataaacttaagcaaagaaatatgaagcttataaaatggaaactacaaaacactgttgaaagaaattaaacaagttctaaataaatggaaagacacctagtgtttacagatttaaaaatctaatgctattaagatggcaatacttcccaagtttatctactgattcaatacaatccctatcaaaattacagctgccttgtttgtagaatttccaggctgatcctaaaattcatatggaactacaggggactcagaatagycaacaacaaagtaggaagactta

SEQ ID NO: 171545 - DNA, 612 bp, Homo sapiens
catgacatcaaagactttccatattttgtacccccaacacttagcacaggagacttgatcagcaaatatttatgtagattccatctcaaacacaaaagacggagcaggggcgccatgtctgagcaatgacacagttcattgataaccagccacatgagatatcataaatgactcagaagacatgaggaaagacacaatatggctgtgcctgcttttgaaatccaagggtcccttccaaagtctgcaagaaacaaccgatagcaaatttcccccaaacacaaaccaagtccttttttcycccccacaattcagggaatggatttacctaggaacaacttatttttccccaatcaaaatgaggtttttgattaaccaataaaagccaatgcccccagatttctcaagtcaaggcttcttttagaccaattcctgatttccacactttggtcactctgggaatccacactgaaggtgagcatcaatgtcatgtctgtgtctggtgtgttacacttggccctgtttctgtggaccttctcatgttcatttcttggcttctcctgagctgaggttgtgttttccattcctctccaggtgtgcatctgacagagggaa

SEQ ID NO: 171546 - DNA, 436 bp, Homo sapiens
ttgttcaccacctgatctatggtattttgctatagcagcctgaatagactacaacaatatcttttataccacttaattctcayatgttagaaaaagctgtcatcttacattatatcttaaaactcacagccagaagcaagaggcaggggatggagtagattaacaccttgtgtctgtagggagaaagacaggcatataaccttccctgtgtggcccaggatcagatactgccttcctctccatctatatctatctatgcactcatgttcatatgatctacagataactatttttattcagctttgtatttccggtacttagcatgtttggtgaacaacaattattgaatgaatgaatgaatgaacaatgattcattgaaaatgctcagacactttgggtgcttgaactaggattagaatttacatccgctgaattc

SEQ ID NO: 171547 - DNA, 436 bp, Homo sapiens
ttgttcaccacctgatctatggtattttgctatagcagcctgaatagactacaacaatatcttttataccacttaattctcacatgttagaaaaagctgtcatcttacattatatcttaaaactcacagccagaagcaagaggcaggggatggagtagattaacaccttgtgtctgtagggagaaagacaggcatrtaaccttccctgtgtggcccaggatcagatactgccttcctctccatctatatctatctatgcactcatgttcatatgatctacagataactatttttattcagctttgtatttccggtacttagcatgtttggtgaacaacaattattgaatgaatgaatgaatgaacaatgattcattgaaaatgctcagacactttgggtgcttgaactaggattagaatttacatccgctgaattc

SEQ ID NO: 171548 - DNA, 432 bp, Homo sapiens
gaattcatccataaggatacaaggatggttcagcacatgcaaattagtaaacaaaatacatcacattaacagaatcaaagacaaaaaccawatgatcaattgaatagatgcagaaaagacatttaataaaattcaacattacttcataataaaaactctcaacaaattaggtgtagaaggaacctatctcaacacaataaaagctggatatgacaaaccacagctaacatcatactgaatgggaaaaggttgaacacttttcctctgaaatctggaacaagacaaggatgccccctttcaccacttttattcaacatagtactggaaggcctagccaaagcaagagagaaatagagggcattcaaattggggaggaggaaatcaaattttccctggttgaagatgacatgatcttatatacagaaaaaaacc

SEQ ID NO: 171549 - DNA, 531 bp, Homo sapiens
actctaaaatgtatatgaaaattcaaagacccctgaaaggcaaaatttttttaagaaaaataaagatggaggacttatgctaccagatttcaaggtttattataaagctatggcaatcaagacagtgtggcattggtacaaaagtaggcaaatagatcaatgcaacagaaaagagtttagaaattaacccacatgtttataattaattgatgttcaaccaagtgaccaatataattcagcaagagaaaggataatctttttggcaaatggttctggaaaaactagatatcaatacagaaaaaaataaatacaccttgaccctttcctgacaattaattcaaatacatcatagaactacataaaggagcaaaattattcaacttctagtattaaaaaaaaaaaaacagaagaaactcctagtgtccttgagyttggcaaaagcacaaatcataaaagaaaaattcaataaactggacttcagcaaagttaaaaacttttaacagagtgggagaaactatttgcaagacatat

SEQ ID NO: 171550 - DNA, 491 bp, Homo sapiens
aattataaaataaaacataaagcacatataaacataacattattctgctcacaatttcagaagttcacagaccttctgaagttatatatatccataccctagagttccatagattctagctcaaaaactctgctctgtagtgtggaataattgtggataagcactgtgactttttggtcataatatctcccacacctagtggaaagacttacttgtacattaagtgattacatgaatgaatgaaccaagtaacattttttttktgtgatctagtatactggtattatgctcatgttttacatatttaccttattcattcttgtaacattattttatgaataaagaaacagaaactaagctagggaataaagtgagctgaaaacctagaattgacaaacctggaaaggagatgagagcagctgtgaagttcaagggcagaaagtctgtaggagcagggggttagtccggggtgtcagagaatgttgtgggat

SEQ ID NO: 171551 - DNA, 398 bp, Homo sapiens
ctgcttcctgacgtacacaccctctacagtactctctccttgaatgtgagcaggacatgtgaatacaatgggatgtcactcccataattacattctattatatggcaaaaaagggttttgaaaatataattaaggtgtccagttagttggctgtgaattaatcaagagtgagattatgttggggtgagcctgacttaatcaggtgagcagttaaaacaaaatagagattcaaagccaaagtcactttcctgttggctttgaaggagaaaactgccatgttgtggagagggccacgtagcagaaaawggcaagaagcctctaggagctgtgaatgatccctcattgatagccagcaagaaagcaaagacttcagtcctacaaccacagaaacggaattc

SEQ ID NO: 171552 - DNA, 207 bp, Homo sapiens
agcttgtgataagaagctaaaaggaaagtctccagaattcaaatagtgaggtgtccatagaaaagaaagtataaattattataggctggatttaatataaaaatcatttcaaagctaaaatctgagacctgctctccaactgyactcttcactgtctattgctattaaactatatccaagtataaatgtgacaagagatggagtgaa

SEQ ID NO: 171553 - DNA, 207 bp, Homo sapiens
agcttgtgataagaagctaaaaggaaagtctccagaattcaaatagtgaggtgtccatagaaaagaaagtataaattattataggctggatttaatataaaaatcatttcaaagctaaaatctgagacctgctctccaactgtactsttcactgtctattgctattaaactatatccaagtataaatgtgacaagagatggagtgaa

SEQ ID NO: 171554 - DNA, 559 bp, Homo sapiens
gtgtattttgggtttgaagtgttaatttttcagtacacaatctcatagtcctctcctttctttcttaagaattaattagttgctgactctttggggaaggtagaaggaagtttaaaatggcatataacattttgacctggtatgttctggaaattaggactggaatgtgtccctttagaggagaacatatcagaattgacatctgtttaatggcttgcagagaaaagaggtagagcttgttatattcctatctctatttctatgcagctgaaattgatcagtacaagttcaaaaaatgtatttatcctgcaggaaagcaaatagaagggatggatctagagattcacattgatggatagccatgggccctgctcctagcctsctctccttatgggcattgggagtgtttgaaaatagctctagtatctggattaacctgtagtgaccacccctgcctggctctgcagggaggtggtcatgcaagcactccccaccatcaggaaatgtattttgattatggcatgaaaatgaatgccaacagttgtcttctgtgttttta

SEQ ID NO: 171555 - DNA, 448 bp, Homo sapiens
cccccagcagagggcaaaagtgggttagagaggcagccttggaagaccttacctttctgatggctgagtgagccctccttaagggcttcttctttcctcctatgcatatttgtggaactttcttttttcttccagagtttactaagaacaaacaaaatagcaacaacaacaaacacaatgggacaaatcttggaaaaaactcagtgtaagttacatttttaaccaccatatatatattttcaacttcaggtttttctgaaattaccatggtatatacaatctctaagataaatggaccaacttgtaagtggatatgcattttgataattattttcaccccacttccctaaaataggaagtgatgagatatctgaaatagcartattcaggggcctaatttcaccctttgagtggacagcagaagtgggaggagggtaagggagaggga

SEQ ID NO: 171556 - DNA, 511 bp, Homo sapiens
caatctacttacccataacctcctgtagttacttgcatgtgccaaattgatgatctgtaattgggttaaagactagatataggagaagtgggatttttcacctggatcttaaaaagattgacagtttttcatgaagtcagggaagtgaaacttgttggtaggagtgggcattgagggggtggaaaaagggagtcgatttgcaccttgtttatcaaatgactttccagtaaaggtttagatagcaactctgaggcagaattcaacatctgacccacttgggttgtttttaaagtgcctaatgatgaaaatacattttcatctaactcattgtataagaaatttatttctggtaagttaaaatgtattgttggatttctccagactcactcctcatggtgtttcaattgtacacaggcgatacaactaaggaagaaaacacaacktgcacactcttcttcctttcttctttccttcactcattaattcaacagatattttccaaaaacctaca

SEQ ID NO: 171557 - DNA, 532 bp, Homo sapiens
aaccctgtggctgttttgcattaaaatgtgccccaatccacaccctagtaagaagtaagtcctgacacagtggagttgctaatagcctaagtctggtacttcttcagttttccagcttgatgtccttttcccagtttattctttgaattctcagttcttaatttctagcttcatcgcctcactgtggacttaaaatttcttcctaaagctctcccaattaatggttagattctcttcttgtatctrtggacccttgttttccctccccacctctgagctacattttctctttggatcacttctggctgttctgagaaacacttcatggggaccagccactctgaaggtcacatggctagggtcctcaggggttctcccttaaggctgacagaaacaccatggctacttcttggaatttaaagtttgctacaattagcacattcaaaacacttgcagctgagtgtaggaaaatctggaattaggaggaacacaggtgatttgtagaaagccaaaggtgagagctggataggaa

SEQ ID NO: 171558 - DNA, 587 bp, Homo sapiens
tttcttaaatacaattctcccctaaaaggattcagatccccttggaaaaacaataggttttatggttaggtctggggaggtaaaacataaccctggactatcttgcaccagaaactaaggtagtgttcagcacagatgccagcttgaaggggctctccctgccacaatctgggataatttgagcctcaaaataacaaatattcatataaagatataaatgaataaacggtgaaaaagaaagcttttattaactaatgaatttacaaggtgtgattgaattaggatactaatacacacagaggggagtcattgattagaaaatcaccatttgtcagacattaaaagatgccaaacacgaccagtgggtaaaagtttggtaagtattggaatctacctagtctcagagtatctacccctaaatacttactaattacaaagagaaaaggaggaactttatagtagagaaaccctagctaactctaccatcatcaaattatcaaaggtgacatcataagcaaaagaacaactcaaaatcatgtgtcatctgmtaagaatgaaaagaagaatatagcataccttatgtaact

SEQ ID NO: 171559 - DNA, 605 bp, Homo sapiens
acccatcacgttcgctagttctttatttcttcagttgtcacaatatcagtaatattaatatccacctcacaggattgataatattacttaattcttatggtggtttttagatttcaatgagtttatrcatataaagtagatttaaaaatacctggctcatagaaagcccttatgaatatttgttattattactattaatatatttaaagggattaacatacagttgttcaaaaaatcgtagttttttccattcatttctttaaaaaattagaaaaagcataaaatatttttatatatctttccttcaaaggatcagtagagctatttgtgatcaggcgtgtatccacccacattgctacaaaagatcagaaactatactaggcatttgcctttgacttttggatgctgctaatggtgatgtaatgtactgtttttgatacaccagggagttggtcttgcaagctgtatttgatatatgtataagtttcatcttgttatattgtttctgtacacataatatgtatccctcaggataagaaatcattcatgtggaataaataacactttctctatgtaggtgtacaattatctgaaatgtaaggatt

SEQ ID NO: 171560 - DNA, 409 bp, Homo sapiens
acctcttgggattttcatgcagattaaatgaattcgataaatgtaaagtccttaggacaatagctggcacacggcgagccctatgtgttagtcattactattattttgcatttatcttacgagcaatgaaaatccacttgttttgtgtttcccagtggaaggcaggatcaatccccaattcccaaaggacttggatgtcaagactaatgatgacatgcatgtgtcagatgagtataaaaagattattacacacataataagactttctggggagagsagggcaggcacccaagccactccaaaatggcttgagtaaaaggagagtgactttttaaaaatcatgcttattgagggtaggcttgtgtggtttgaactccaccagcaccaagggagggagtactcaagcttc

SEQ ID NO: 171561 - DNA, 559 bp, Homo sapiens
ggatggcaactattatgctccgcatttctgtgtaatgatgaaaaactgctattatcagtcttatatttgaggttggggcagaggctggctaagctgcccaaaaggacataaaagatgccttggataattcttggataattttgtagctctgacatgggatggagcaagagagacaaaaaggatcgaaaatttatccaaaagctctgctgtgttccccgtggctctgcctttccctccagactccrtaggagcctcgggctgcatggacatgggaatacatgtgcaggaggagcagagaactgggatcattcccccttgctgttttgtaaccttgattttcttctctgcaatcataaacttgatgatgctgtgtctacttccagcctctctgatgctgctgagtccagggcactgctgtttcacagccttcatcctgtccaacagtcctgggaagagagcacagcaggtatttttgctgctttctctttgtgcccatccagtggctgtcagtgcatgcatatagcagttgctcagtgcattcttgatgaacagttgagtg

SEQ ID NO: 171562 - DNA, 584 bp, Homo sapiens
ccctggcttcatctcttctcttggtctctcctcttcatagtagttattgtcactatcaaatgtatgctgtcactctaccgtataatctgtcacagcagggcaccaggtgccaggggcaaggcaacaaaagtgtagcgtgccttctctgccctccaggagctggatgctttttcaggagatcaaatacatacacataaccttcatgctctcattccttcacgctacaaatatttattgagcatttactatatgtcagactctgtgctttgtgataaataaaacagagctcccccttacaaccaccaccaaaataaagtagctaacacagcaaaatataacaactgccaaatgtctcatagatcagaagtgttatggaagtccaaaagaaaagatatttccamctgaagggatcacagaagctaaatagaaaatatacattagaaaatagagctctaagcccacgaatattaaaatatgctttatataagtttcaataactcctttctttaccatgcatcagatagcaaacatatttgcgtgcttgatttggagttgtggataaagaactggacgtttcagtccta

SEQ ID NO: 171563 - DNA, 665 bp, Homo sapiens
ttccaaaaccctcaaacatattgtctttcaattacatctctgtatttgtcagtcatcctgtttcttgctccaagctagactgttcttcgaaaaaccccttcacaggtctcctgtattacttctctctttcttggctccaatatctccgtttcataaagatattcttaatttttgtggaatacttacttcagtccctgcctgaaaaagagtaaaagttttagagctgcatacttgaaatctcctttattctgctctcatacttccttagcagtttgactgggcatacaattctagaatgaaaataatttcattctgaattctgaaggcaatgtgtcaatcccttggggccattaatggtgatattgaaagtcagatgtgagtcagatgactgagtctttgtaagtgtaccatctcaagaacaggtcctatctctcgccagaagattttaggatcttctctttgttcccattgttttgaaaatatgtgattatgtgccctggttgcatcctttctattcagagaactgagcagaaatcaggcccctttaatctcratgtcctgtccctgtgttggaaaaatttcctcgtacttttcttctatttcatctctttctgaaacttctctttctggaactcctagtttccaatgttgaagttaatgaattg

SEQ ID NO: 171564 - DNA, 394 bp, Homo sapiens
cagctgtctcagaccttggagagcaaataaatagcagaaaattgcaggctgaggttgctagtgagaacctgaaaaggaagtattctgcrttgttggctgaaagcagagccatatgctcaggatgccagctgatgttttactgtgggaatctagggccttcctggattctgtgcctgaatgagggccatgctgctcgtgtctgcacaattgctccttgctcttcacattttctggaatgctcctcctgccccccaacacacctacccctgcttatggcagcaatgctggccatcctgctgccagtcctcaggttctgtaattctctcctttgagcaaacagctgtttgcatttgtcatatttgattcagatattttataaggtaataaaatattt

SEQ ID NO: 171565 - DNA, 459 bp, Homo sapiens
ataaactcctaaactcttaaaaataagttcttctcaatgattattttggacatattttggaatcttaacttttatacctcttcttatttccacattacgtattcttattttctaagaaatgataagttttaggttatataaaagtaactcagaggcaatggtaaatatgatcctggtaaaccatggccctgtctccatccctgcctggaattcgggagctaagctgggaggctgccgtggccagmacagaaatgctacatgtgtgtgttttagattgaaagtgaataaaccaagtccaaaataaactaattgcttgttcataaaatgaataaattacacatctaagtaataatgataattgaattatcaactttaacaatcagtttctttttctctccacaatagaagtaattcaatcactggcctataaaacttcaaaatcacaaagatgatggcatg

SEQ ID NO: 171566 - DNA, 610 bp, Homo sapiens
tgttatcattgttcatagatgatatgatctaatatgtggaaaattctaaagctttatccaaaagtaattgttataattaataaattagaaaactatctgattacagattcaacatgcaaaataaattgcatttctatgtaataacaatgaacaatctgaaaagaaaacttaaaatttttatttataatagtatcaaaagtatcaaagagaataaaatacttaggaattaagtaagaggtgaaacgcttataaaatgtaatctacaaaacatttcttaaaaaattaaacaagacaaataaatggaaaaaattccatcttcatagatgtgaagatttaatattattaagacagcaacactactcaagggaactcacagattccctcaaaccttatcaaaatttcaatgaggtgttttacagaaataaaaaatctatccaaaaatttgcgtggaatctcaagggccctcccgaattgccaaaacaatcttaacaaagaacaataccagagaacacrtatttcttgatttcaaaacttcctactacagtaaactatgtgctataggtctaaaaacgggcacatagatacatagaatagaatagagtccagaaat

SEQ ID NO: 171567 - DNA, 585 bp, Homo sapiens
ctactattctacttcaagccttgcttcttttccaagagagtcccaaagggcattcccatcacctggtatctgaataataagaaaaatcaataaataaaacatctttggggaatttcatgtgttcatgctctgagcttcaggctcagatgtcagcatcataccaactctcctccaaactaaatacatcattatctcaatgcaaagaaacctccaggtaaggagtacacatatcaatggccatatattaggcatagtttggagccaaagyattagccccctcatgtttcataattgcatttttcagaggccacttgcctagaatccttgcatctatgtgtcctcggcaatggtgtagaaacggggaattcaagctctgtctctctactctctaaatgaattgaagtaaatgattgctgatttttataatctgtaggctatttacttcagacctaagattgaaatgggttatgttctgttagagattttagaggaatgagtgctcattgggagtttgcaaactcacaatgagagtgtgagaactcacatgtaatactttcaaatgagacagtgttacaaaaactactg

SEQ ID NO: 171568 - DNA, 585 bp, Homo sapiens
ctactattctacttcaagccttgcttcttttccaagagagtcccaaagggcattcccatcacctggtatctgaataataagaaaaatcaataaataaaacatctttggggaatttcatgtgttcatgctctgagcttcaggctcagatgtcagcatcataccaactctcctccaaactaaatacatcattatctcaatgcaaagaaacctccaggtaaggagtacacatatcaatggccatatattaggcatagtttggagccaaagtattagccccctcatgtttcataattgcatttttcagaggccacttgcctagaatccttgcatctatgtgtcctcggcaatggtgtagaaacggggaattcaagctctgtctctctactctctaaaygaattgaagtaaatgattgctgatttttataatctgtaggctatttacttcagacctaagattgaaatgggttatgttctgttagagattttagaggaatgagtgctcattgggagtttgcaaactcacaatgagagtgtgagaactcacatgtaatactttcaaatgagacagtgttacaaaaactactg

SEQ ID NO: 171569 - DNA, 573 bp, Homo sapiens
tgctgttttctatttagtattatttcctatgtagtattatacatagatgacaatttttaatttacatagactataagtatatcgcaaaggtattagctcataaaattgaagcaatgtctattgaaacacactctgataggagcaagggtgtctccaaaaaaaaaaaaattatatgatttttaaacrccttgcttgggatgtttctaccacggctgacacctggacatttatgctgtggcactgatgttgagaggttaagccggctgggcttctggggtgggttgggacttggggaacttttctgtctagctaaaggattgtaaatgcaccaatcagcactctgtgtctagctaaagtttgtaaatgcatcaatcagcactctgtaaaaacacaccaatcagcattctgtgtctagctaaaggtttgtaaatgcaccaatcagcactctgtaaatatgaaccaatcagcactctgtaaaatggacaaattagctctctgtaaaatggaccaatgagcaggatgtgggtggggccaaataagggaataaacgccggccaccagagccccctgcag

SEQ ID NO: 171570 - DNA, 573 bp, Homo sapiens
tgctgttttctatttagtattatttcctatgtagtattatacatagatgacaatttttaatttacatagactataagtatatcgcaaaggtattagctcataaaattgaagcaatgtctattgaaacacactctgataggagcaagggtgtctccaaaaaaaaaaaaattatatgatttttaaacaccttgcttgggatgtttctaccacggctgacacctggacatttatgctgtggcactgatgttgagaggttaagccggctgggcttctggggtgggttgggacttggggaacttttctgtctagctaaaggattgtaaatgcaccaatcagcactctgtgtctagctaaagtttgtaaatgcatcaatcagcactctgtaaaaacacaccaatcagcattctgtgtctagytaaaggtttgtaaatgcaccaatcagcactctgtaaatatgaaccaatcagcactctgtaaaatggacaaattagctctctgtaaaatggaccaatgagcaggatgtgggtggggccaaataagggaataaacgccggccaccagagccccctgcag

SEQ ID NO: 171571 - DNA, 470 bp, Homo sapiens
gcactaataccaggcaaggcagcaaacatcagtgagcggtgacaacgggaagccagcagaagtgctagccttccccctgggcctcagaacactctgccccactcagaggcactgtgtaactaggatcaytggcaggggtacctcctcatacgtgcccagtgagggaggccactttgtcaaggtcctgagactatcctcctctgcctagagacaccatcctagtggagagtaccagcaaagatagacctgctccaaggtccccattatcctacctcctctacagcagggaggaaccctccataaccagcactgacctgggaaagctttttccatcccttcaaacaatcccagcagggaacagtgggtgcccagtgacacgagataaatcagtcagaacaaagcagcaccaaacagctctaaaacatatattgtaaatggaaccatggaccacaaacccgtgagctaaacgg

SEQ ID NO: 171572 - DNA, 578 bp, Homo sapiens
gaaaagatttattaactaagacaccaaaagcacaactgacaaaattaaaatattgataaagtagacttattaacagtcaaaacmtttaagcttcaaaaaataccattaagtaattgaagagactaagccacagactaggaaaaaatatttgcgaattgtatatctgacttgtggccagattatgtaaacaaactcttagaaatcagtaagaagtgaacccaattaataaaagtgatatggcatatataacaaacacaagaaaaaatgttcaatacttttagtcattaggaaaatgcaaagtaatatcaaaatgtgatgctacttcatggcaagtgtagacatgtaaaatgcttttatttttttttaattggtagtgtgtttctattggaaaatatatacaagaagtctggatatttttcttgtattattcttttgataatggatgctccttttatttcatgtaatattttatttctgaattccattggttcagtgtaaaaattattgaatgtagtatctctcatattctttgtctgtcatatcaccttcttgtttgctactttattccattttgagat

SEQ ID NO: 171573 - DNA, 594 bp, Homo sapiens
tttttttttggcaagtagagtcctttctaattccagaatattaagaagaaatatgataattaaggtaatgaaaactgtcctactcactgaatttcaaacccactgctcagttcccttttcctcactatttcacagcaacctaatattcatgcaccgcacccctcagctctgtgggggaagttactggcgtaggttacaatggctcccacttgttctgctttttggtctgtgtgtccctaacaaacacagactgtgtctaagatgaccctgcctctgayctgaacagagatagtgatttgtggctgacagtgtggtggaaatcaagtgcttatttagcacacagtaaacactgaataaaggaaggctattatgctaacacagcccatgtattaagatttatgaggaaactcacatagcattaaagtggtaaataagattaggactaatcccttctaagacccttaatatttatgagttagaactccaaattcccaatccccttttatctgttctattttgtcccattacagttatcagtgtctaacatgttattttttcatttctcacacttattgttttctttcttcttcccat

SEQ ID NO: 171574 - DNA, 594 bp, Homo sapiens
tttttttttggcaagtagagtcctttctaattccagaatattaagaagaaatatgataattaaggtaatgaaaactgtcctactcactgaatttcaaacccactgctcagttcccttttcctcactatttcacagcaacctaatattcatgcaccgcacccctcagctctgtgggggaagttactggcgtaggttacaatggctcccacttgttctgctttttggtctgtgtgtccctaacaaacacagactgtgtctaagatgaccctgcctctgacctgaacagagatagtgatttgtggctgacagtgtggtggaaatcaagtgcttatttagcacacagtaaacactgaataaaggaaggctattatsctaacacagcccatgtattaagatttatgaggaaactcacatagcattaaagtggtaaataagattaggactaatcccttctaagacccttaatatttatgagttagaactccaaattcccaatccccttttatctgttctattttgtcccattacagttatcagtgtctaacatgttattttttcatttctcacacttattgttttctttcttcttcccat

SEQ ID NO: 171575 - DNA, 420 bp, Homo sapiens
tttctatatacacgattgtgttatctgcaaataaggttttgcttcttcctttccaatctacatttctttaattattttgactttcccrttgcagtggctaagacttccatttttatttttaacaacgtgttaagggtagacatccctttctttctcttgatactagtggggaataatctaggtttattttgtcattagttagggtatcggatataggtttttaaagatgttctttatcagatagaggagcacatctattcctagaacgctaaagtttttaatttgctttttgtaaaaaacaaaaattgatggtgaattttctcaaatatttttctacatacatcaaaatattacatatatgctttcgttctttagccttttgatatggtaaatgtttaaaatggattttgaatgtaaaac

SEQ ID NO: 171576 - DNA, 573 bp, Homo sapiens
atctgctttttgctttcattttgttaatgtggtgaactacttcgattgattttcatgtgttgaaccaatcttccattccaggaataaaacccacttgataattgtatataatctttttaatgtgctgttgcactgttgaatgtgctgttgaattcactttcttagtattttgttgaggatattttcattaggttcataaataatattggtccatagttttttttttttgtttttttttttcttctggtgtctttgtgtggctttggtatcagagtgataatggcctcrtaaaatgagttaggaaatgctccttctttattttttggaaaagttgaagaaggattggtgtagtacttctttaaatgtttatacattgagatttgacataaaatacatttttagaaaacataataaatatggaacactgtgttatatgttggcaaagcaagaatgtgtcaaatcttagtgttaacttccctcattagtcaggaaaatatactaacttgatgatttccattattgttgcactgctgttcttttacttatgttaaaatcattgacaaagtagaaaat

SEQ ID NO: 171577 - DNA, 474 bp, Homo sapiens
acaagaaaacttatagaactaataaacagttatagcaaatttgcagtattcaaggtcaatacaaaaaaatccaattatttccttatacaccagccatgcaaaattgaaatataaaatttaaaaagttggaaatgcagttatatcagtaataataaaaaataaaaataataaaaatgaaatgttttcatataaatttatcaaaatatgtacatatccatattgttaagatgtcagttgttcttaacttgacatatagagtcaacacaataccaaaaaaaaacctgccgagattttttatacatattgggaatctgattctaaaattgttatgaaaaggcaaagaagtctagaatagccagcacaatactgaagaagaagaaaaaraaagataaaggacttatactaactaatcccaaaatttgccataaagctgcagtaatcaagatagcatggtattggtgaaaaaaatagata

SEQ ID NO: 171578 - DNA, 436 bp, Homo sapiens
aattcacatcatggtgcctatagttaatggtactgtagtgtatattcgaaatttgctgagagactagatcataagtgttttcaccacacacacacaaacacacacacacacaccacaaatggtaactgagagaagtgatgaatgtattaaataatttgatggtggtaatcatttcacaatgtatatttataccaaatcattacatttacactgtaaatatatacaatttaatttgtcaattattcytcaatacagctgagaaaaaaagtaatgtaaacacagaaaagtgcacacatcttaagtgtatgtgtggtgaattttcaaaagtgagcacatacatgtaaccaggatccagatcaagaaacccacattccagaagtgctttgcacacttcggatgaggaggacagggaggtcagagaaggctgcaagaggat

SEQ ID NO: 171579 - DNA, 603 bp, Homo sapiens
ttgtgaagtatattaaaatagctgtaccagaggtataattttatctctcttttcctagccaccagagagagatttgatgttttcttgaaaatttatttgcttgaaattcacctcttcaattcccattgtgtaayagaagctggattaaatttggctgctctaaaatcatatacagatgaaatcatagagtccatgccatgtacatttctgtgtctgttctccttcattcaacatataattttgatcatcatccctgtttatgtgtgtatcacttgattactgtttgtttgctgttaattgctaagtagtattgtattattccattttacaaatatagcattcttctgtggatggacatttagattgttccttgtttggggctatgactaataaagctgatatgaaaatttttacacaagttatatatgttttattcccatttgtcttttttacctagaataaaatttttaactattagagcgtgtgtatatttatctttaaaagaaactaaacagtccaaagaattgcagcatttttgcactcccactagcaatgtatagcagttctagttgctccaggtctcttacaaaaaacaatatatgt

SEQ ID NO: 171580 - DNA, 603 bp, Homo sapiens
ttgtgaagtatattaaaatagctgtaccagaggtataattttatctctcttttcctagccaccagagagagatttgatgttttcttgaaaatttatttgcttgaaattcacctcttcaattcccattgtgtaatagaagctggattaaatttgkctgctctaaaatcatatacagatgaaatcatagagtccatgccatgtacatttctgtgtctgttctccttcattcaacatataattttgatcatcatccctgtttatgtgtgtatcacttgattactgtttgtttgctgttaattgctaagtagtattgtattattccattttacaaatatagcattcttctgtggatggacatttagattgttccttgtttggggctatgactaataaagctgatatgaaaatttttacacaagttatatatgttttattcccatttgtcttttttacctagaataaaatttttaactattagagcgtgtgtatatttatctttaaaagaaactaaacagtccaaagaattgcagcatttttgcactcccactagcaatgtatagcagttctagttgctccaggtctcttacaaaaaacaatatatgt

SEQ ID NO: 171581 - DNA, 603 bp, Homo sapiens
ttgtgaagtatattaaaatagctgtaccagaggtataattttatctctcttttcctagccaccagagagagatttgatgttttcttgaaaatttatttgcttgaaattcacctcttcaattcccattgtgtaatagaagctggattaaatttggctgctctaaaatcatatacagatgaaatcatagagtccatgccatgtacatttctgtgtctgttctccttcattcaacatataattttgatcrtcatccctgtttatgtgtgtatcacttgattactgtttgtttgctgttaattgctaagtagtattgtattattccattttacaaatatagcattcttctgtggatggacatttagattgttccttgtttggggctatgactaataaagctgatatgaaaatttttacacaagttatatatgttttattcccatttgtcttttttacctagaataaaatttttaactattagagcgtgtgtatatttatctttaaaagaaactaaacagtccaaagaattgcagcatttttgcactcccactagcaatgtatagcagttctagttgctccaggtctcttacaaaaaacaatatatgt

SEQ ID NO: 171582 - DNA, 572 bp, Homo sapiens
gaaaggcttacaagtgctgaatcttctgtctgtctttacatgtattgtgtgtgtaatgtttatataaaaagagttctgattcattggctcagaaaaataagtgcttaaatcaaatattttatccaaaaaataaaaactttaatrtattttgttcatctgacttaagtaattttctgaaaataaagacagtttaaaaattgttggtaaaataaatatatcttcaaaatttagacattttgtctaaattaaggtgagatattagatttgctaaatgttttaaggtaacaaactgcttctttaacttttaaaaattgttcaatttatcaactttggagcattagattctggataaggcctgaggatatgtgaggcttgccaggccccatagctatgctgaagagagtcagactttatctgcacttctgtctgatatcctaggttccacatgaagtacataagtaaaatcacttacttatcaggttttcaccaaaaataaaatttgctaagagttaacattgcgacatataattgagactactggagaaacagttttacatacaaggtgtgtaagg

SEQ ID NO: 171583 - DNA, 572 bp, Homo sapiens
gaaaggcttacaagtgctgaatcttctgtctgtctttacatgtattgtgtgtgtaatgtttatataaaaagagttctgattcattggctcagaaaaataagtgcttaaatcaaatattttatccaaaaaataaaaactttaatgtattttgttcatctgacttaagtaattttctgaaaataaagacagtttaaaaattgttggtaaaataaatatatcttcaaaatttagacattttgtctaaattaaggtgagatattagatttgctaaatgttttaaggtaacaaactgcttctttaacttttaaaaattgttcaatttatcaactttggagcattagattctggataaggcctgrggatatgtgaggcttgccaggccccatagctatgctgaagagagtcagactttatctgcacttctgtctgatatcctaggttccacatgaagtacataagtaaaatcacttacttatcaggttttcaccaaaaataaaatttgctaagagttaacattgcgacatataattgagactactggagaaacagttttacatacaaggtgtgtaagg

SEQ ID NO: 171584 - DNA, 603 bp, Homo sapiens
cctgcagcagtcctttctccctttcccaccagaacaccaactagttatccaattgcttaaattatacaagactgcagacagtatgcttgggccttattaagtgccaccatatatctacatgcaaaggaacaaggtagctaactgcactgtcccaaggagaggctgctatagctctttttagtacaaaccctgaatccttagagatggactgggaacccttaaaatagagaacactaggaggcaggtgtctggggmtccccataccctttctctataaccacttggaaggtccacagtatgagttatgggatggacacagaagctgaaagccttgaaaccagaaaaggcagagctatagtaaagagtggtttgattcatcagcctctgggttgtagcctagcaattttcagctgtaccactctgcaacctatgcctgtgttacaaacaaaaatataatcctccaggtttcaaggaaaaatatgagtgatctcctttggtaaagaaaagccattgatttaaatccaacataagcccaaggttcttaaatcatatgatcatagccaccaggcaggtccgtaaccctaatgatgatattggcttgag

SEQ ID NO: 171585 - DNA, 545 bp, Homo sapiens
ttttgacgtctgtgcacccgcaggcccaacaccaagtgtaagctgccaagcctcagggcttgcaccctctgaaacaatgccctgagctgtacattggccccttgtagccacagctcagatgcagggcaccacatcctgagactgcgcaaagcagcaagttcctgggccctgcccacaaaactagttttctcttctagacctctgggcctgtgatgggaggcgctgctgtgaaggtctctaacatgactgagagaaatctgtcccattgtcttagtgattaacatttggctcctcattacttatgcaaatttctgcggcaggctggaatttctccccaraaaatgggttttccttttgcattgcatcgtcaggctgcaaattttccaaagttttatgctctgtttcctcttgagtgctttacagcttagacatttattctgccagataccctaaatcatctctctcaagttcaaagttgcacaggtctctagggcaggagcaaaatgctgccagtctctttgctaaagcatagcaagtgtcatctt

SEQ ID NO: 171586 - DNA, 432 bp, Homo sapiens
tatgaattttcatggcattgatgtcatggtttgtgttagtaaactgtaattgggagcatcctcataagtatttttttttttttgtctttgatgaccttgtcatttggggtatttccacataataaaattttggttaacatttacagcaagaataacagatacatctgcattatatatcaaccatattatagggtattttttttctttactggkgatatgaacttcaattactaagggaatgaccattacatgtctcaactgtaaatttactattttttttctctgcagataaaagtaccttggggggagacaatttaagactctggaattatcttatttcattttttaaaacattttttattttatttttcttagagacaaggactttctctgtcacccaggctggggatcaggggcattaacatagctcac

SEQ ID NO: 171587 - DNA, 440 bp, Homo sapiens
cattgatgtcatggtttgtgttagtaaactgtaattgggagcatcctcataagtatttttttttttttgtctttgatgaccttgtcatttggggtatttccacataataaaattttggttaacatttacagcaagaataacagatacatctgcattatatatcaaccatattatagggtattttttttctttactggggatatgaacttcaattactaaggkaatgaccattacatgtctcaactgtaaatttactattttttttctctgcagataaaagtaccttggggggagacaatttaagactctggaattatcttatttcattttttaaaacattttttattttatttttcttagagacaaggactttctctgtcacccaggctggggatcaggggcattaacatagctcacagcagcttcaaactcctgggctc

SEQ ID NO: 171588 - DNA, 573 bp, Homo sapiens
gacttttggagaccataagatggggtgaatctattttgcatgtggcagggacaggaagtattgggggccagagggcaaagtgtggtaggcacaattctaagatgactccaataagtcaagctcatattcccttttccttgagtgtacattgaatgtgaaacttgcccatacaaatttaagatatcaaaggtgatggatttcacttccttgatcaggtcgtatataaaactttgttttaacagagtggagtaaaagattttccatctgccatgacaaggtaagctgccatgttgtgagaggcactgtgagagaaccatgcgataaggaactcatggcagcctttaaaagctgaaattccctaatcaacagccagaaagaaaatggggacctcagttccacacctgcctgtatctcaattctaccaacatgatgtgcgccttggtactctagaaaagaayttgagtcagttaacaacttgatttcaccctattcaaatggagggacctgctaagcattgtccagactttggattgatggaaactatgaaataataaatgtatgctgttttaatat

SEQ ID NO: 171589 - DNA, 573 bp, Homo sapiens
gacttttggagaccataagatggggtgaatctattttgcatgtggcagggacaggaagtattgggggccagagggcaaagtgtggtaggcacaattctaagatgactccaataagtcaagctcatattcccttttccttgagtgtacattgaatgtgaaacttgcccatacaaatttaagatatcaaaggtgatggatttcacttccttgatcaggtcgtatataaaactttgttttaacagagtggagtaaaagattttccatctgccatgacaaggtaagctgccatgttgtgagaggcactgtgagagaaccatgcgataaggaactcatggcagcctttaaaagctgaaattccctaatcaacagccagaaagaaaatggggacctcagttccacacctgcctgtatctcaattctaccaacatgatgtgcgccttggtactctagaaaagaacttgagtcagttaacaacttgatttcascctattcaaatggagggacctgctaagcattgtccagactttggattgatggaaactatgaaataataaatgtatgctgttttaatat

SEQ ID NO: 171590 - DNA, 556 bp, Homo sapiens
tgaattctttttatcacaaactattcagtttttcaccctttgcctcaataggctccaaaatgtccctttgtagattccacaagaataatgtttccaacctgctgaatcaaaagaaagttttatctctgtgagatgaatgcacatatcataaaatggtttcacagttatattctttctagtttttattgtggggtattcaattttcaccattgtcctcaataagctctgaaatgtcccttccacagatctcacagcagtttcacagatggcttctttctagtttttctcatgggatttgtgcttttcaccattggcatcaataagctctgaaatgttccttcctagattctacaaaaagattgattctggggatrgagccaagatggccgaataggaagagctccagtctacagctcccagcatgagcgacacagaagatgtgtgatttctgcatttccaactgaggtaccaggttcatctcactggggagtgttggatagtggatgcgggacagtgggtgcagtacactgagcatgagctgaagcagggtgaggca

SEQ ID NO: 171591 - DNA, 642 bp, Homo sapiens
acataaaatgtataaaatgcctgtcaaaaggaaaatggagaaataagttataacattttaatgcagtgaaatactrcgttacaatacaatacaatacaatgaatgaactactggtacacttaacaaggtgaatgaatccaaaatatattgaaagaaagaagcctgacataaaaatgtacacagtgattctatgcatatgagtgtcaacaggtgacaaaagagttgaagttcttttctaggtgggatgaaaggagaaatggacaatcagtagatcttaatgatttctaccaaagaaactacaaaacactgctgaaagaaatgagatgacacaagtaaatgcaaaaatatttcacgcttatcaattagaagaatgaacattcttaaaatatggccacagtgtccaaagaaatttacaaattcaatgctattcctatcaaattaccaatgtcattttttttcatagaattagaaaaaatattctaaaatttatacaaaacaaaaagagcccaaatagccatagtaatcctaaatgagaaggacaaagctggagccatcacattgcctaacttcaaactatactatgtgacagtaataaccaaaacagcaataaccaaaacagcatggcacttttacaaaaacaga

SEQ ID NO: 171592 - DNA, 558 bp, Homo sapiens
tgaaaccactttgtgatgtgtggatgcacttcaaatagttaaaccattcttttgattgagtagcttggaaacactccttttttggattccacaaagggaaacttcagagcttattgaggcttatggtgaagaattgaaaatcctgaaataaaaagtaggaggaagttatctgtgaatcccctttgtgatatgtggatttgtgtcacagaattatatcttacttttgattcagcaggttgtaaacactctttttgtggaatctacaaaaaatcattttgaagccctttgaagccagtggtgaaaaactgaatattccatgataaaaactagaaagaaggtatctgtcatatggctttgcaatgcatggattcatctcacaaagttaagcctttctttttcttcagcaggtttgaaaaccttgtttagtggaatctaggcagggacatttcaaagcccattgaggctaacggtgataaacacaatattccccccccmcacacacacacacacaaatagaagccctctgtgaaaccagtttgtgatgtgtggatttatctc

SEQ ID NO: 171593 - DNA, 388 bp, Homo sapiens
tctccccatatctgcatggcttttctaccctgttttcctcccacctccctaagatgtacctattaggtgaagtggcatgtttaaatggtcccagtgtgggtgagtgtratgtgcgcgtgttagtgcacctgctgtgggatggcatcctgtccggggctggttactgccttgtgccctgagtggctatgctaggatctggccatctgctaccctgaactgaaataattgggcagataattatcatgcttgtttttattaatctttcttaaatgtatgtataatcacatttattccaatgttttatactagaaacattttggtctttatttagaagtttggtgatgtctttatgaccagaaatatgccatagaaacttaattcctgttta

SEQ ID NO: 171594 - DNA, 535 bp, Homo sapiens
cttgtgtaaccaaatatacatattcctaaaatataaaatattttgaattctgtaaaaacatctgacactaaggattctggagaaggaatcatggtccaataaattaaccaacaattctgacatagcctacattgcatcaggaaaagataggtggatgtcataatctcgaatattgtccctgtttattttgcgatttgcttctttaackcattcacttgcttcattcactgtgtcctttgaggaggggaaggtgagcagaagagaggcaaaaagcaaagtacatggagtatgtgttcgaaggttctactttgtcacattgttttccttctggtaggttgtgaagttggtattttagtaaagagaaacaatgttagaactatttaagaagaaattagttaaactcagatttgaagctgtaaaactgattctaaaatgtatgttgagcaatttcttgttgttttaagaagttggagacataaaagctatcatgtgacagaaccaaagttttcttgggaaaggtgacttttttggggga

SEQ ID NO: 171595 - DNA, 547 bp, Homo sapiens
agacataacatgaagtctaaaggccaagacatgtctaaaatttggtgtgtcagttattgaattattgttttatcatctggttgtttcagtacgaaagaaaaatacaaaataagtttattgaaaaatattcaaaaatataaattgaaatgagaactttatttatttttkgcctataagattgtaaaagttatgaagaacaatgttctccattgttgcagagaacatacagatatgaattcaaccaaaagccttaaaagtgttcatgctctgtttctgcacttctatgtctatgaatttatcttaaattattaattgagcttacaaaaatatatatttaaggaacatttaccttagtattacttataattgtggaaaattggaagtggaagcaataatctatgtctaacaaatataatggttagagaatttatatggattataacttttaataatataatcttataatatcatgcagcacagtgattatgatttggagctctaaagtgacaaatatggaacatatttctttgaaaatggaaattaagga

SEQ ID NO: 171596 - DNA, 588 bp, Homo sapiens
ttctctgcataattccaagcacatattaagctataattgaagattagcttttaatagtatgcctgatatgactgttatatttatggatctgaaatcatatctatgatgcattgttatgtgaataaargcaataaaatatacagggaaattctgtgttcaacacaaactcatacacacgttcattgggtcttgaaggttattttaagaatgtttcctgtgattattgtgatgaccccatagatacttcctattcgttttttgttttgcttattcagattttcagatcataaatatatgcaaattatttactgatttcttctttaatcaaaactatgaaaaataaactgcttgtttcataaaactgtgaattgagtcattgcttatttacctagttttagtcaaataaaatttaatattttttcaacaaaatgttttcacagaactgcgatcctctgattgattttgaaggccctccatagtgtctccaggatggtctccaataaggaaatagacctgaaaaaagagggagatgaacggctgggatcaggttcccatccatgtgtaactaattatgtgtgcactggaaat

SEQ ID NO: 171597 - DNA, 588 bp, Homo sapiens
ttctctgcataattccaagcacatattaagctataattgaagattagcttttaatagtatgcctgatatgactgttatatttatggatctgaaatcatatctatgatgcattgttatgtgaataaaggcaataaaatatacagggaaattctgtgttcaacacaaactcatacacacgttcattgggtcttgaaggttattttaagaatgtttcctgtgattattgtgatgaccccatagatacttcctattcgttttttgttttgcttattcagattttcagatcataaatatatgcaaattatttactgatttcttctttaatcaaaactatgaaaaataaactgcttgtttcataaaactgtgaattgagtcattgcttatttacctagttttagtcaaataaaatttwatattttttcaacaaaatgttttcacagaactgcgatcctctgattgattttgaaggccctccatagtgtctccaggatggtctccaataaggaaatagacctgaaaaaagagggagatgaacggctgggatcaggttcccatccatgtgtaactaattatgtgtgcactggaaat

SEQ ID NO: 171598 - DNA, 556 bp, Homo sapiens
gctaggagaacacttaggaagaagtgtcactgagtcactgagagaatctgtggtggcaatgaaacacatcactcaaatctcccactgcagagatgtttacacacagatggccccggctgctgcgctcctctggatccaatactgtatccatgctgaggccacacttctacaggctcctcctagccaatgactaagcatggtgggagtgagcctaatcttctgaaacatgggatacctccaatttgcaattttggttcaaagattctccatgagcctgaccaaatccttgttggagccatgtttcctatacaatcccactaccccaatgagactacctaacctagtytgaagtgtttcccacccagtcttccttctttctccctctcacgcacaggggacagacctccatcacagtctgaaggctctccttgctgtctctggcttacccctcaacttctgtttttcacagatgttttttctaacaactcttgtacttctaatctcacttgataattgcttctaggagaatataaacatacacagcatcaaagatagg

SEQ ID NO: 171599 - DNA, 590 bp, Homo sapiens
ataaaatatcagctatgcaagaatttaggaattaaactaatcacaaaaaaagtacagaaaatgtttagcaattaactgagtaatataccagtaactagagatcaaattaggatatgaatgaattggcagaaagaatagaaaccatttaaatataaaacttaattagatttaactgtggtaaaataaagtaacagaaactgtacaaaactataaaatttaagtagaagatatataagaaaagaaaattatctaagatgacaaaatgagacaaattctagataataccagcaaaaatgttaaagtacaagactctccagatttcataaaggtgggactcattatcactgcttcattcttagcattgctaactaggaaaaatgttcaagcattttaaaaaataagttaccaagagtagtttaaaatgatttataaaaggccaattacaaagtataaaatgtaaacaacacacatgtcaaaaagttgatgtctataatatagaaaacatcctaattggtaaagttcatgaatagacaaatcattagagagcaaatacaattaggaaataartacatggaaaagtgttctgtgtg

SEQ ID NO: 171600 - DNA, 397 bp, Homo sapiens
aggggattcttatgctttgaataatccattgagcagggagaatagggttaaaaaaaaaacaagcctaaccaaaataggtatgcaaaatagacaactcacctcagcatatagatgggctaaggaattttcttatgattcagtgctagaatcttccttagaaaacagatytgcatacagttctatgcaccaataaatgaatgattgaggcctcagagttctatatcataaaacagacatgataattgttcttgggaaagatagaaagtatcttttgaatgtgtctctttgtgagaccataaaaataatttcagtgaagtagccaactaaagtccattagttgtatggtccatttgttttctgaggtcagtatcaggcatatacaacttagtttcataaa

SEQ ID NO: 171601 - DNA, 404 bp, Homo sapiens
gacctcgtctcacaaaaaataaaattagccaggcatggtggtgcacatctgtagtcccatctacttgggaggttgaggctgcagtgagctgagatttggccattgcactccagcctgggcaacagacctcgtctcacaaaaaataaaattagccaggcatggtggtgcacatctgtagtcccatctacgtgggaggttgaggctgcagtgagctgagatttggccattgcactccagcctgggcaacacagtgagaccctctctctcgaaaaaaaagaagaggggttttcaagtaagtgaacagggaatgaaattctttttgccaggaacaggtgtatggaattgtgaaaatacttaaaagatgggggtggcagcagytgaaaacccttttatgtgaagtctcc

SEQ ID NO: 171602 - DNA, 459 bp, Homo sapiens
cccaagttcaagtgattctcttgcctcagcctcccaagtggctgggattacaggtgttcaccaccatgacttgctaatttttgtatttttagtagatacggggtttcaccatgttggccaggctggtcttgaactcccgacctcaggtaatccacccacctcagcctcccaaagtgctgggattacaggctgagcccagcctatttctcaatagtttatttcgcttaacttttacttaaggttcagaggtacatgtggraaatttttatgtagataaactcgtgtcatgggatttgatatacagattatattatcacccagtaataagaatagtacccaataagtattcttcctgattctttccctcctcccaccctcccccatgaagtaacccccagtacctgttgtttccttctttgtgttcatacgttcttatcatttagctcccacttataagtg

SEQ ID NO: 171603 - DNA, 594 bp, Homo sapiens
tcacatatgtgtcttcttttgaaaagtgtcatgtcccaaatttgcattttcgacattaaagtttactttttaataaaaaaaaagtatcatgtcttttacccactttttaatggtgctgtttttttcctgtaaatttgtttgtgttccttatagatgccggaacctttgtcagatgtatagtttgcaaatattttctcctattctgcaggttgtctgttttttattgagatactttctttgtcatttattgttttccaaatataaaagcaaatataaacacaagggatagttatgttatatataaataaagaaatggtaacattttgcctttgtgtagcttctattgaccacattccaggtttagaagtctttagaagtcctatgtcattgcctgtttctttggatttccataaacctcagacatttttgccattcaggttccaaaccagtttcttcttgttttgaacttcctaactcagaccagctatgtcacacagtaagagagacaagaagaattgttttatctctgggataaatcaaacaatactaatgaygattacagtgacttccaatggaaaaaaaatgtatcaaatg

SEQ ID NO: 171604 - DNA, 353 bp, Homo sapiens
tatttactggcaaactctagatactttgaggaacaaacaagtgaagatgcagattatttagacatattatagctactattgagatgatagtcttgccactggaaaaaggcataagaaattcaaaagaactggtaaacaaaacagcacttcaaaacatccattatgcraaagccttgagctacaacatctatttttaattacaattacagttcccatttatctatcaagaattgtgctagtcattatacataatttatcttatttaattctcacaacaaccctgtagagtagatattatttccttttgtggatgagaaaaatgaagctcagaggtatcaacacaactcataatt

SEQ ID NO: 171605 - DNA, 490 bp, Homo sapiens
tttaatttagtttttttctcctgtgattctactaatgcaaagtttgcttttacctttatagaaagcatcatgtgccagaagataaatctatattaggcattatagcacataattatcatcactataaccaacactatcattataaaaatatatcacctattatatgctaagtgagagaagccatacccttttaggtgttctttataaaactgaaaatttggtatttactccataatcgtaagatggaagaatcttttttatcaccaataaagygatggagaactttctgctctgtctgcatatgccctaataatgtattttcagaacaatatttccatttgaaaaatctgaggcagtattcctgagcacctcaggatccatgtgtggctggctggctgagtattttgagcaaagagtctactcattattatcagaaaatggagtgttatggcttaataattttttttcctcgaaactgtttgtttggata

SEQ ID NO: 171606 - DNA, 473 bp, Homo sapiens
cctcatctattaacttatatttattttttagttcckcactcagagtcctctctatacaaccaactagaacagttccctttggtatgctcacaagagtacccaacaatgattcttcatatcactgaccacagggtataagtggatctaggaaatgttttcataatttctatttttaccagatttttaggctccttggagttcgggattctatttgtttgctcaccatcatattcaatgaacttgacagatttccaggcacatagctggctctccgtagttatctcttcaattaataaataagtgtaaaaattcttgccttaaggacaatattagacatctgctttcatcacttaaaaacaagagatttatagaaggaagtttagaataatagtaataataaaaaggttatgagtcagagaaagaaagatgttcaaaagggaaaaagtttaaatgaaatcaaaacatacacagca

SEQ ID NO: 171607 - DNA, 473 bp, Homo sapiens
cctcatctattaacttatatttattttttagttccgcactcagagtcctctctatacaaccaactagaacagttccctttggtatgctcacaagagtacccaacaatgattcttcatatcactgaccacagggtataagtggatctaggaaatgttttcataatttctatttttaccagatttttaggctccttggagttcgggattctatttgtttgctcaccatcatattcaatgaacttgacagatttccaggcacatagctggctctccgtarttatctcttcaattaataaataagtgtaaaaattcttgccttaaggacaatattagacatctgctttcatcacttaaaaacaagagatttatagaaggaagtttagaataatagtaataataaaaaggttatgagtcagagaaagaaagatgttcaaaagggaaaaagtttaaatgaaatcaaaacatacacagca

SEQ ID NO: 171608 - DNA, 473 bp, Homo sapiens
cctcatctattaacttatatttattttttagttccgcactcagagtcctctctatacaaccaactagaacagttccctttggtatgctcacaagagtacccaacaatgattcttcatatcactgaccacagggtataagtggatctaggaaatgttttcataatttctatttttaccagatttttaggctccttggagttcgggattctatttgtttgctcaccatcatattcaatgaacttgacagatttccaggcacatagctggctctccgtagttatctcttcaattaataaataagtgtaaaaattcttgccttaaggacaatattrgacatctgctttcatcacttaaaaacaagagatttatagaaggaagtttagaataatagtaataataaaaaggttatgagtcagagaaagaaagatgttcaaaagggaaaaagtttaaatgaaatcaaaacatacacagca

SEQ ID NO: 171609 - DNA, 654 bp, Homo sapiens
aaagttaaacagacacacacattaaacaaggttatgtattggtcagttgatgaaaatgtgacaagaggctcacaagaacctaagcctgtatttctcctagaaacaatgkttcagtaatagtaaattcagcattcatggagactttataaaacataactatcatgaacaagaatcaactgtatctattccaatctaacatctcaatgattctgcctaatttgcagatatgtatgtacatgcacacacacacataaaagacaacatgataatataggaaatcattgatataaaccatgaatcatcagccctgattctatttggtcttttatcatatacaatttattaaaatatatgaaaaagtacaagtgctattttatggacagactcactaatatggtgtccaagtaacctgtttctcagtcatctgcaccacatataaattatgttatccacactttaacttttgaataaggcattgttctctggatgagaaatgaggataaatcatgacttcctacatataatgtgaacttaataaaaactatgttaaattgaaatacatctgattagataaatacaaggcaaagatggtgtgggtggattgaatgtgggtgctctaaatagactggttaatactccaaacccttagctgtg

SEQ ID NO: 171610 - DNA, 568 bp, Homo sapiens
tttaatccctcttggaatttggctctcagcttaagtgttacttctttagtgaggcctttcctaagcatctaatttaatgtaatggatataactccttacccataactttctgtcatattatggtaatttactttgtttayagaacctgtaattagctgaaattattttgactttttttgtttattatgtcctctgtctcctctctctgtcacgttctctgctatatttttcttaacaagagccttacgtgacacatagtaagtactctttatatatttaatgtgaaaatcaagttacctgactaaccctgaggttgctttgctaataatttcatctcttaatgagtccataaataaccaaaaggagttgctaatttgaatttaattcttagcaacaagggaaaactgactgagtcaacggacgtgaaagtaactttggagaatgtgaacaatgttcttggaatttataataaagctgtggaaagcaatcctgggggacagccagatatctactctggactttaggaaagcaggcctcaaaaagtgtaagacaaattaggaatgactac

SEQ ID NO: 171611 - DNA, 568 bp, Homo sapiens
tttaatccctcttggaatttggctctcagcttaagtgttacttctttagtgaggcctttcctaagcatctaatttaatgtaatggatataactccttacccataactttctgtcatattatggtaatttactttgtttacagaacctgtaattagctgaaattattttgactttttttgtttattatgtcctctgtctcctctctctgtcacgttctctgctatatttttcttaacaagagccttacgygacacatagtaagtactctttatatatttaatgtgaaaatcaagttacctgactaaccctgaggttgctttgctaataatttcatctcttaatgagtccataaataaccaaaaggagttgctaatttgaatttaattcttagcaacaagggaaaactgactgagtcaacggacgtgaaagtaactttggagaatgtgaacaatgttcttggaatttataataaagctgtggaaagcaatcctgggggacagccagatatctactctggactttaggaaagcaggcctcaaaaagtgtaagacaaattaggaatgactac

SEQ ID NO: 171612 - DNA, 483 bp, Homo sapiens
ttagaattcacctttttcactgtatttatttatttagaaacaaggtctcactattttaaccagactggacttgaactaaagcgatcctcccacctcagcctgccaaatagctaagactacaggcatgttgcaccatgtctgatttagcctatttaattcttcagtgttccttaagtttcaggwcaattaccacttttcaagggaaacttcttatgtccagaactctgatttcctgttatatgtttacatgacatgtgtacattacattcacagaagtaattacatttggtaattaccaattctgtgtaattattttattaatgcttacattcttccctatacaataaggtcaattagatcagcaactaagatcatttttcatggtattgctactgctttgcaataattggcacataaaagtcacacgatgaatatttataaaataaaccgatttctagaagaattttcaagcataattttcaa

SEQ ID NO: 171613 - DNA, 581 bp, Homo sapiens
tttgaagatctgtaactagggatgtattgaaattaagggaactctagtattttctttttatagccatttttatgactaataattatcttctaaattatgaaactcagaggatcctataatgaaaccatttgttgggcacttacttcatttcaggcactgcatcatttgttcactcatttatgcatttaacaaatatttattgagtacttaatatatgtcaggcattttgacaaaaactgaggctataatggcaagacatagacagtccttaaccagtgggaaagacagaaccagaargataacaagcagataatcacaagaaaatgttttggatgttataataaaaaaggacactatttatttattataataaagaaaaagagaacaaaaggagaactagactaagggatgtggagacagaaaattatatttaagctgaaacctaaaggatgactgagagttatgccgaagaaaagagaggggatgagtgatttgcaggcaatggaaatagcctttaggaagaatataagccaaaagaaagattatagcatattcaaggaacggaaatgagtcctggtttt

SEQ ID NO: 171614 - DNA, 572 bp, Homo sapiens
gaatggcccagtgtattgctttgccttccttgaaacagggatgcactatgtctggcctggccaactatccaaaccacttttctatatatcaaggatccaaaataattccagcagacactaaagtgcaatgtcaatttgcctattcccatctcacatatcttcctaggaaattgagatcaacacagaatacatgatatttttgctcaaacatggaccttggcagatgtctcagaaatgcaggaatggatataccgctagctatagtgctaaatgaaacatctttcatattggtcattggtatacaattataaaatgaataataaagacaaaggaggtttatgtttgggattatagtttgaacctttttgaaaagccttctagatttaagaatatagtgaattcaaacaggtagtcaatatggcattactgtaatagggatataaagagctttcctgaagccatagtccctgtaaaattttcaaatgaaacatctttgcatttcaaactctaagtcagmcgtttcagtaaaattgtatatgtcaaaagaaaatatatcaacggtgggttcatat

SEQ ID NO: 171615 - DNA, 581 bp, Homo sapiens
tttgaagatctgtaactagggatgtattgaaattaagggaactctagtattttctttttatagccatttttatgactaataattatcttctaaattatgaaactcagaggatcctataatgaaaccatttgttgggcacttacttcatttcaggcactgcatcatttgttcactcatttatgcatttaacaaatatttattgagtacttaatatatgtcaggcattttgacaaaaactgaggctataatggcaagacatagacagtccttaaccagtgggaaagacagaaccagaaggataacaagcagataatcacaagaaaatgttttggatgttataataaaaaaggacactatttatttattataataaagaaaaagagaacaaaaggagaactagactaagggatgtggagacagaaaattatatttaagctgaaacctaaaggatgactgagagttatgccgaagaaaagagaggggatgagtgatttgcaggcaatggaaatagcctttaggaagaatataagccaaaagaaagattatagcatattcaaggaayggaaatgagtcctggtttt

SEQ ID NO: 171616 - DNA, 629 bp, Homo sapiens
tttgctaacttctcatcttgtaaaagtcattcatcccatttgcacgatttccttagttttatgctgcagagttcccaggaagatggggaggacattacaatgttgttttgatatggatgttatttgttacaaatccaagagtcatagagtcaagaaagataaaggtcagagagaagatagacagttaattttgccatgctaaccttcatctaagatctccttcactttatatctcttctacagcaattgacacattctaatttgtatgcaagttacacattgtattagttttgtgttgctacattaatagattaccacaaactcactggtttaaaacaacacaaagtttgttagcttatagttctgggggtgaaaaatgtgacatgggtgtcacttggctcagatcaagatgttagcagggctgagttctgttttggaaaattttytaggggaaaattcgttttcttgcttcttccagcttttcaagccacccacattccttggctcatgggcccctttcatcttcaatgatagcaatattgtatttctctgaccatttacatctttctctgcttatgaatagtctctcattttaaggaatcatgtgattatggtgggcccacccagat

SEQ ID NO: 171617 - DNA, 523 bp, Homo sapiens
aattaataaccatcagcagcttttattgttttggaggtatctgtcaacctagatgtgggctagtaacagataatctagttttatcctggcagaaagttgctcttagagaacaaaaacttgcagaatctttgccgtctcacagactagagtgamatgttaaacttttgaagtatatcttacatttaggcagttttccctttaagataaatgctaaatttgaagcttcatgtggtagaagccaaaaaagccaactccttaaaacacataaaaaccccaaacctgtgaaaagcacagaagaaattttggcaaactcatagcttcaaagagacaatgatttgcaataagaacccactgtgaaagaggatctggcaaacatagtctcaactgaacaagctctcagttgaaaccactaaagggctatgcccaattaacagagcagaattaattgcgctatgttcaattaatagacagatttagttttgcctaaactatgtctagtatctaccaaatgcaattcctattt

SEQ ID NO: 171618 - DNA, 523 bp, Homo sapiens
aattaataaccatcagcagcttttattgttttggaggtatctgtcaacctagatgtgggctagtaacagataatctagttttatcctggcagaaagttgctcttagagaacaaaaacttgcagaatctttgccgtctcacagactagagtgaaatgttaaacttttgaagtatatcttacatttaggcagttttccctttaagataaatgctaaatttgaagcttcatgtggtagaagccaaaaaagccaactccttaaaacacataaaaaccccaaacctgtgaaaagcacagaagaaattttggcaaactcatagcttcaaagagamaatgatttgcaataagaacccactgtgaaagaggatctggcaaacatagtctcaactgaacaagctctcagttgaaaccactaaagggctatgcccaattaacagagcagaattaattgcgctatgttcaattaatagacagatttagttttgcctaaactatgtctagtatctaccaaatgcaattcctattt

SEQ ID NO: 171619 - DNA, 523 bp, Homo sapiens
aattaataaccatcagcagcttttattgttttggaggtatctgtcaacctagatgtgggctagtaacagataatctagttttatcctggcagaaagttgctcttagagaacaaaaacttgcagaatctttgccgtctcacagactagagtgaaatgttaaacttttgaagtatatcttacatttaggcagttttccctttaagataaatgctaaatttgaagcttcatgtggtagaagccaaaaaagccaactccttaaaacacataaaaaccccaaacctgtgaaaagcacagaagaaattttggcaaactcatagcttcaaagagacaatgatttgcaataagaacccactgtgaaagaggatctggcaaacayagtctcaactgaacaagctctcagttgaaaccactaaagggctatgcccaattaacagagcagaattaattgcgctatgttcaattaatagacagatttagttttgcctaaactatgtctagtatctaccaaatgcaattcctattt

SEQ ID NO: 171620 - DNA, 554 bp, Homo sapiens
cctgcgcttttttatgtttttcttttgcctggtagattttcctccatccctttatttccaccctgtgagtgtcatcaagtgtgagatgggtctcttgaagacagcataccattaagtcttgcttttttatccagcytgccactctgtgactttgaagtgggctatttagcccatttacattcaaggttagtaattatatgtgtggattgtcactgtactgttagctggtcattatgttggcttgattgtgtggttgctttacagtgacactattctgtgtgtttaagcagagacacaacaaaaaaagaaaacttcaggccaatatccttgatgaacatcaatgcaaaaatcttcaacaaaatactttcaaactgagttcagcagcacatccaaaagctaatctaccatgatcaagcaggcttcatcctgggatgcaagttcattcaatatacacaaacaaataaatgtgattcatcgcgttcacagaactaaagaaaaacaccacatgattatcacaacagatgcagaaaaggctttccataaaattcagcacc

SEQ ID NO: 171621 - DNA, 554 bp, Homo sapiens
cctgcgcttttttatgtttttcttttgcctggtagattttcctccatccctttatttccaccctgtgagtgtcatcaagtgtgagatgggtctcttgaagacagcataccattaagtcttgcttttttatccagcttgccactctgtgactttgaagtgggctatttagcccatttacattcaaggttagtaattatatgtgtggattgtcactgtactgttagctggtcattatgttggcttgattgtgtggttgctttacagtgacactattctgtgtgtttaagcagagacacaacaaaaaaagaaracttcaggccaatatccttgatgaacatcaatgcaaaaatcttcaacaaaatactttcaaactgagttcagcagcacatccaaaagctaatctaccatgatcaagcaggcttcatcctgggatgcaagttcattcaatatacacaaacaaataaatgtgattcatcgcgttcacagaactaaagaaaaacaccacatgattatcacaacagatgcagaaaaggctttccataaaattcagcacc

SEQ ID NO: 171622 - DNA, 608 bp, Homo sapiens
agtcttatgtaatgcccttctttgtcttttttgactttgttggtttaaagtctgttttgtctgaaatcagaattgcaacctgcgcttttttatgtttttcttttgcctggtagattttcctccatccctttatttccaccctgtgagtgtcatcaagtgtgagatgggtctcttgaagacagcataccattaagtcttgcttttttatccagcttgccactctgtgactttgaagtgggctatttagcccatttacattcaaggttagtaattatatgtgtggattgtcactgtactgttagctggtcattatgttggcttgattgtgtggttgctttacagtgacactattctgtgtgtttaagcagagacacaacaaaaaaagaaaacttcaggccaatatccttgatgaayatcaatgcaaaaatcttcaacaaaatactttcaaactgagttcagcagcacatccaaaagctaatctaccatgatcaagcaggcttcatcctgggatgcaagttcattcaatatacacaaacaaataaatgtgattcatcgcgttcacagaactaaagaaaaacaccacatgattatcacaacagatgcagaaa

SEQ ID NO: 171623 - DNA, 465 bp, Homo sapiens
agttagctgtcaaagcaaatatgccactgggataactcggagctttaaaagcagyggtctgggtaacagtattttcaaacaccactatgataacttaactgggctatgaaatgcacagatagctgataaaaaattatttctgggtggggctgtgggggtatttctaaaagagatcagcacttgaatctgtagactgagtaaagcagatggctctcaccaatgtagatgggcattacccaatctgttgagagccccagtggaacaaaaggcagaagttttgggtgagacatccatcttctcctgccctcaaatattaacactcgtcattctcaagcctttggaagtgggctaaattacaataccaggtttcctggttctccagcctgcaggcagcatattatgcaattccttagcccctataatcatgtcagccaatcctataataaatctacccttatacctcta

SEQ ID NO: 171624 - DNA, 438 bp, Homo sapiens
ttatacgtgtgcaggctcataggccaaactcagargatgatgggaggactttgattctgtcggccatttattcacaggaagatctgtttaacaagaagttcacttgtaggattggctttgctgcaagcataccaactcattctattattctaaatattatgacattctttcctcacttgtaaaattggaagagattttttggggaagaaataagtgagtaattgtcttggatctttggaaacaattgtgaattatactgaaggcagctgtggtaatgtaaaatttttggacacttaagatgagccgtttcttgtgcagatcccatttactgaaagcatctgatcacacatccaaaaactctcccggctccaagtatctttgccaccatggtgatgttgaaagaaatctagtgttctagactcactaaaaagtgaattc

SEQ ID NO: 171625 - DNA, 628 bp, Homo sapiens
ttcttcctcagaaatattaagggttattgttattatcaataataatatcagtaatccatcacttgatcacatatttcagttgtacctcctatgtttctggtactgtgctaagaaatataagatccacaaaagaagtaaaacacgatgtctattcacacaaaacttaaaacctaagtggaatttgtgcatattcagacattaagtaataattgtctatatgatgccaataggaagtgtgatgtgatatgatttctgtaatgggaggtatcagtacaactaggttatgttgagacaaacctcagagggaagttagggacttgatctggatcttgatgaatggagtagaagtggaaggtgttaactattaggttgatgcacaagtaattgcagttttcacaattaaaagtaatggcaaaaaccgcaattacttgtgcaccaagctaatactagcatgtggaactaactgagagacatgaaaaagctcagygggtataaggaaatcggtatatctgcttgaccattggaatcgaaaagtctacatttaagtcacaagaatcatagaaaaagactgtagtctgatggaatgaacatgggttttgagactgaattctgattttgccaatataat

SEQ ID NO: 171626 - DNA, 628 bp, Homo sapiens
ttcttcctcagaaatattaagggttattgttattatcaataataatatcagtaatccatcacttgatcacatatttcagttgtacctcctatgtttctggtactgtgctaagaaatataagatccacaaaagaagtaaaacacgatgtctattcacacaaaacttaaaacctaagtggaatttgtgcatattcagacattaagtaataattgtctatatgatgccaataggaagtgtgatgtgatatgatttctgtaatgggaggtatcagtacaactaggttatgttgagacaaacctcagagggaagttagggacttgatctggatcttgatgaatggagtagaagtggaaggtgttaactattaggttgatgcacaagtaattgcagttttcacaattaaaagtaatggcaaaaaccgcaattacttgtgcaccaagctaatactagcatgtggaactaactgagagacatgaaaaagctcagtgggtataaggaaatcggtatatctgcttgaccattggaatcgaaaagtctayatttaagtcacaagaatcatagaaaaagactgtagtctgatggaatgaacatgggttttgagactgaattctgattttgccaatataat

SEQ ID NO: 171627 - DNA, 559 bp, Homo sapiens
aatgtaaattctgtaagggcagggaacttgtttgtcatattcatcattttatttccagtactgtgactggcatataccaagtgtgcagaaatacttgttgattcattcaacagataaataaattcaaaaamttaagtacatctgggtgtgagttagaaatgagcatttttcacaagtagcccacgctgtgatattggtgcaaattttcctcataccacattcgcagaaagaataatttagtggttaaagagtataaaaaattaactttcatttactccttataaggtattctgatagtgatataatctacaatttttttgactttgttatatatccattctccacttaccactatatgtgtattaccccatttaatatatgcaacaaccctgttattgttcccatttcacttaggaggaagctaaaactcagagtactcagaaactcagccaaggtttatacatatggtaaacagattcagaaccaggacttgggtttgtctgacaccaaaaccaatgtttcctaacctctcctctatcacatttgatatacaaatggc

SEQ ID NO: 171628 - DNA, 613 bp, Homo sapiens
gtcttccccattagaatgtaaattctgtaagggcagggaacttgtttgtcatattcatcattttatttccagtactgtgactggcatataccaagtgtgcagaaatacttgttgattcattcaacagataaataaattcaaaaacttaagtacatctgggtgtgagttagaaatgagcatttttcacaagtagcccacrctgtgatattggtgcaaattttcctcataccacattcgcagaaagaataatttagtggttaaagagtataaaaaattaactttcatttactccttataaggtattctgatagtgatataatctacaatttttttgactttgttatatatccattctccacttaccactatatgtgtattaccccatttaatatatgcaacaaccctgttattgttcccatttcacttaggaggaagctaaaactcagagtactcagaaactcagccaaggtttatacatatggtaaacagattcagaaccaggacttgggtttgtctgacaccaaaaccaatgtttcctaacctctcctctatcacatttgatatacaaatggctcccctcatctgttgcttggagtttatttaggaataccat

SEQ ID NO: 171629 - DNA, 613 bp, Homo sapiens
gtcttccccattagaatgtaaattctgtaagggcagggaacttgtttgtcatattcatcattttatttccagtactgtgactggcatataccaagtgtgcagaaatacttgttgattcattcaacagataaataaattcaaaaacttaagtacatctgggtgtgagttagaaatgagcatttttcacaagtagcccacgctgtgatattgrtgcaaattttcctcataccacattcgcagaaagaataatttagtggttaaagagtataaaaaattaactttcatttactccttataaggtattctgatagtgatataatctacaatttttttgactttgttatatatccattctccacttaccactatatgtgtattaccccatttaatatatgcaacaaccctgttattgttcccatttcacttaggaggaagctaaaactcagagtactcagaaactcagccaaggtttatacatatggtaaacagattcagaaccaggacttgggtttgtctgacaccaaaaccaatgtttcctaacctctcctctatcacatttgatatacaaatggctcccctcatctgttgcttggagtttatttaggaataccat

SEQ ID NO: 171630 - DNA, 559 bp, Homo sapiens
aatgtaaattctgtaagggcagggaacttgtttgtcatattcatcattttatttccagtactgtgactggcatataccaagtgtgcagaaatacttgttgattcattcaacagataaataaattcaaaaacttaagtacatctgggtgtgagttagaaatgagcatttttcacaagtagcccacgctgtgatattggtgcaaattttcctcataccacattcgcagaaagaatwatttagtggttaaagagtataaaaaattaactttcatttactccttataaggtattctgatagtgatataatctacaatttttttgactttgttatatatccattctccacttaccactatatgtgtattaccccatttaatatatgcaacaaccctgttattgttcccatttcacttaggaggaagctaaaactcagagtactcagaaactcagccaaggtttatacatatggtaaacagattcagaaccaggacttgggtttgtctgacaccaaaaccaatgtttcctaacctctcctctatcacatttgatatacaaatggc

SEQ ID NO: 171631 - DNA, 559 bp, Homo sapiens
aatgtaaattctgtaagggcagggaacttgtttgtcatattcatcattttatttccagtactgtgactggcatataccaagtgtgcagaaatacttgttgattcattcaacagataaataaattcaaaaacttaagtacatctgggtgtgagttagaaatgagcatttttcacaagtagcccacgctgtgatattggtgcaaattttcctcataccacattcgcagaaagaataatttagtggttaaagagtataaaaaattaactttcatttactccttataaggtattctgatagtgatataatctacaatttttttgactttgttatatatccattctccacttaccactatatgtgtattaccccatttaatatatgcaacaaccctgttattgttcccatttcacttaggaggaagctaaaactcagagtactcagaaactcagccaaggtttatacatatggtaaacagattcagaaccaggacttgggtttgtctgacascaaaaccaatgtttcctaacctctcctctatcacatttgatatacaaatggc

SEQ ID NO: 171632 - DNA, 518 bp, Homo sapiens
ctcaatttgaaaatctataaaatatgggtaattctactactcaaaacacaggatgctgacatggattaaaataaacattgcgttttaaggacccattatagtatctgggcatagaataagcaaaaaataaatgtgatattgttaagagtttccattgctattccaatactgattaaatgcgaaaaagggaaaagccctcatttctcttcttcacrgtagtaagaaatggtaaagctgaggtttgcggaaaggagaaagagtgggaagaagcagccacgcagagaagagaaaagcaggatgagtccctgagactttgagtgggagtaagaagaacatttctgtccaagaaggagccttggtgcttagttgcccaaagacatgttacgtttcccatcagactgtcttttccaatagactctcatcccaaggggtaaaatgacaaagttttataaacctttgtaacccttacattatctgaaattgtgctttgcctgtggtcgatgctcaatatttttata

SEQ ID NO: 171633 - DNA, 552 bp, Homo sapiens
tgaacacctgactacgctggatgttaattttaaatatggaaaaccatatacttacatgagatttgggattaggatgactctttaaattactatgttttcccttaagcataccttgtctgtattcaaacttacgcggagtggcaaagagaaatatatacacgtataacacaggcaagtcaggaggcaattctgttttaatatgccaggttttatgaaaaccctcttgatttcctaggtttcgtgaaaaaaagaagatacttttatgaatgaaataaacaattttatgttgaagattaagatgtaaaatatacttcttttgggmctttctgttccttattagcagggaacaaataaagtaattttgtgtcccttttattaataattccgaagtttagttttaacttctgaaattaatttggttgtaacagatggtaaaacagagtacagctgagagatagaatacaaattgttgtaaagaactattaattttttattttaaggttattgatttacttattaaacatacatatgatggacattatgctagcactg

SEQ ID NO: 171634 - DNA, 543 bp, Homo sapiens
accaggagcaaaaatactcacttcatgatttctatccctcaggcaaattgctgatcactgtttgcctttctcccgctccaatccgagtctccactttcttccttatcacagaaagcgtaggtggcaggactgcttccccatcagtacttstctgtggttcctctgagggcatggcgcaatgagtgtgagctccatgaaggccagcaagagtgattgtctgtttatgacattttggaacatttgaaatagttccttatgtttatgaactatgcctataaatatcaccaccaaaataaagatagcaccaatcaaagttttaaaagcacaggtcaactcatgatactttatctcacaaaggaaattagaaagcataatttaaatggttaagagatcaacttatcactaatgagtgttagaaaccaatgcacagaggcagacttcctttttgaagcagtttgctacattgcaaagagtgtgccaataagtccaggttgatatatatatacctttaaagtaagcagggtcaaatggggcatgaatgaa

SEQ ID NO: 171635 - DNA, 594 bp, Homo sapiens
gaatatatcagtagaaattatctcaggtgaacaatatagaacaaaaagattgaaaaaaattaacagagccaccgtgactcattagataaaacattaaattttaaatgtacaggtaattggcatactagaaggagaggagacacagaatgagacaggaatagtatttaaagaaataatgggctgggtgcagtggctcacgtttgtaatcccaacactttggaggctgaggtggttgaatcccatgaccccaggagttcaagaccagcctgagcaacatggtgagaccccctttcaacaaaaaatacaaaaatcagctgggcatgrtggcacatgcttgtagtcccagctactctagtggctgaggtgagaggatcacttgtgcctgggaagtcaagactgctgcagtgagttgtgatcatgccactgcactccagcctgagtgacagagcaagaccccatctctgaaaacaaaagaaaggaaagaaaagaaacaatggcttaaatctccaaatttcataaaaatcagaaatgtttaaatttgatttagtgtttaaaaatgatttggtatttaaataaacactaaatcaacaccaa

SEQ ID NO: 171636 - DNA, 594 bp, Homo sapiens
gaatatatcagtagaaattatctcaggtgaacaatatagaacaaaaagattgaaaaaaattaacagagccaccgtgactcattagataaaacattaaattttaaatgtacaggtaattggcatactagaaggagaggagacacagaatgagacaggaatagtatttaaagaaataatgggctgggtgcagtggctcacgtttgtaatcccaacactttggaggctgaggtggttgaatcccatgaccccaggagttcaagaccagcctgagcaacatggtgagaccccctttcaacaaaaaatacaaaaatcagctgggcatgatggcacatgcytgtagtcccagctactctagtggctgaggtgagaggatcacttgtgcctgggaagtcaagactgctgcagtgagttgtgatcatgccactgcactccagcctgagtgacagagcaagaccccatctctgaaaacaaaagaaaggaaagaaaagaaacaatggcttaaatctccaaatttcataaaaatcagaaatgtttaaatttgatttagtgtttaaaaatgatttggtatttaaataaacactaaatcaacaccaa

SEQ ID NO: 171637 - DNA, 594 bp, Homo sapiens
gaatatatcagtagaaattatctcaggtgaacaatatagaacaaaaagattgaaaaaaattaacagagccaccgtgactcattagataaaacattaaattttaaatgtacaggtaattggcatactagaaggagaggagacacagaatgagacaggaatagtatttaaagaaataatgggctgggtgcagtggctcacgtttgtaatcccaacactttggaggctgaggtggttgaatcccatgaccccaggagttcaagaccagcctgagcaacatggtgagaccccctttcaacaaaaaatacaaaaatcagctgggcatgatggcacatgcttgtagtcccagctactctagtggctgaggtgagaggatcacttgtgcctgggaagtcaagactgctgcagtgagttgtgatcatgccactgcactccagcctgagtgacagagcaagaccccatctctgaaaacaaaagaaaggaaagaaaagaaacaayggcttaaatctccaaatttcataaaaatcagaaatgtttaaatttgatttagtgtttaaaaatgatttggtatttaaataaacactaaatcaacaccaa

SEQ ID NO: 171638 - DNA, 594 bp, Homo sapiens
gaatatatcagtagaaattatctcaggtgaacaatatagaacaaaaagattgaaaaaaattaacagagccaccgtgactcattagataaaacattaaattttaaatgtacaggtaattggcatactagaaggagaggagacacagaatgagacaggaatagtatttaaagaaataatgggctgggtgcagtggctcacgtttgtaatcccaacactttggaggctgaggtggttgaatcccatgaccccaggagttcaagaccagcctgagcaacatggtgagaccccctttcaacaaaaaatacaaaaatcagctgggcatgatggcacatgcttgtagtcccagctactctagtggctgaggtgagaggatcacttgtgcctgggaagtcaagactgctgcagtgagttgtgatcatgccactgcactccagcctgagtgacagagcaagaccccatctctgaaaacaaaagaaaggaaagaaaagaaacaatggcttaaatctccaaatttcataaaaatcagaaatgtttaaatttgatttmgtgtttaaaaatgatttggtatttaaataaacactaaatcaacaccaa

SEQ ID NO: 171639 - DNA, 604 bp, Homo sapiens
ttccagctatatgggaggctgaggcaggagaatcatttgaacctgagaggcagaggtcacagggagccaagatcgcaccactgcactcattccagcctgggcaatagagtgagactctgtctcaaaaaaataaaaaataaagactaataaaaatggtaaatatcagaataaatgtgaatgactaacttttgtttacttttgtttgtcttaatttctttctacattgtttaagaatttaaaataaaattatacctttttcaacattactgtgaacctaaaactgctcttaaaaaaaacattgccttctgagatttataacatgtgtaggtgggaagagtacttgaggccaagaattcaaatctagcctgggcaacatagtgaaaccctgccttaaaaaaaagatcctgacttaatgtttggtaatacartccaccaaaatattaattacattatatattaatgaagtaaagactctaattagaagacagagtttgtcaaaaactactaagaaaaaaacaaacaaaaacttctcaaaagaagacattcgtgtggccaacaaacctatgaaaagtcagcatcactaatcattagagaaaagcaaatc

SEQ ID NO: 171640 - DNA, 579 bp, Homo sapiens
gcatgtatctgagtccatgaagattataaaaataaaaataaatgcatatgcctttctattataatggaattgctttgttttatttgcaagaatgttcaccacaagcttaattagtactctttagaccaaagaaataatgcctgacatgattcaccttctatcaggagtaaaatttaaaagaaaaatgtmaggtgtgaagacttggaagcactcagaatgtatcaattatttatattaacattcattatctgactaaaaggcaggataaaggctttgggggaatggtagggttcacataatttctctctaattattctaatttactataattaagacactaaaataatcttgagagaaacaataatgtcttaatatcaacccagagaggaaaaagctatttctgcatttttatctttatttactataactttttaatgcgacagaaagactgatcttgtgtaaaagtttttaaaattatggcttttagaacttctaacatgaaactcaaaattctaacagttaagtctataaagtgtttataaattcataaaatcgatcacatctatattatatatgaac

SEQ ID NO: 171641 - DNA, 584 bp, Homo sapiens
ttctgttattggtcgttctaacctcagatgcgtcctagcctctgtgttccagagcttccaatcccacagagaggtaaaaagaaccttaaaaatgtcattatgtcaagtagcaataactttttcgaagaatttttaacgtactattttatttgattaaatatgagctaaaaacagtgattaaatgtaactgataacttctttccctttttgtataatcaggtgattattatttcaatcagtaatacctaggttgttcagcttcatgaaccatctccatgggtgtggcatatttctgcaaagtaacttcagcaaataaatctgcctatttggaaaatggttgtatttctaacaccgtctagtgatcagatcacgctgattttctacattaatataataatttatatgtatgtctatttcagagaagtcaggattatatcttcttagataagtatctcccttggagacttttttgcttttgctattagaaaagaacacatttatacatagtctgcatggkagtaccattcaggtcttttccatgtaccttaaatcagtaattctcaacactgttcattagactgtcc

SEQ ID NO: 171642 - DNA, 631 bp, Homo sapiens
catatttttgagtattagtcccttttcagatatatagtttgaaaatattctattagttcataggttgcctttgcattttgttgattgtttcctatatggaagctttttagtttgatatagtttacttttgcttttgttgtctaagcatttggtgtgatatccaaaaatattactgcctaggccaaagtcaagagctttttccaatgtcctttagaaatgttagtttcagatcttatttataagtcttcaatttattttaagttgatttttgtgtataagataaacatatagtttcattctttttcatgtatatatttagttgtcctaacaccatttattgaagagactaatctaatttcaattttgtattcctggcatccctgttaaaaattagttgaccatatatgcttgggtttactttggggctctcaaatccgttccattagtctatgtgtctgtttttatgccagtaccatactctttgaatactatagctttgtagtataatttgaaattaaggaatgtaatgcttccaacctttttttccttaacatttatttggctcttgtgcagtattttgtgrttctgtatacattttgtggagtattttgtggttccatataaatgttag

SEQ ID NO: 171643 - DNA, 575 bp, Homo sapiens
tctacatggctcttcttccatcttcaaagtgtcactccaacctctacttccatcttcacatcaaattctccgactctgaccctcctgctctccttttataaggatctttgcaactccattgggcccactggatcatccaggttaatttctccatctcgggatcgttaacttaatgacatctgcaaaaccacctttactatgtaagttaatatagtcacagatttggggctgtccaaacgtggacatctttggagggtcattattctacctaccacacatagattctcccttagagcttctggaagaaatgctatctttgattgtggccctgtaagactgaatttaagatttctgaacttcaaaaatgtacaataataattttgtgttgtctcaagccactacgtttgtgttgatatgtcacaaaagcaacgggaaactaacataccttccttctcctgtataaatcgccttctgaacactacagtgcattcagtgcattaaaagccaatcagtyattttggttggaagtcaacacttttaatcagttttgtcctaaagttgatttgaacatgtgt

SEQ ID NO: 171644 - DNA, 512 bp, Homo sapiens
gaattctggatatgatgactcctaatttgtttggttttcatttagcaatccattattttcgctcagagataagtcaaaaaaaaacttcttaaattaaattttgagttcctaccgtatgtaagtcattttgctaaatgtatgtggcaatgcaaagatgatgcttaaaatgcattctttcctatggaatttgtaatgcaattagtggaaaatctatgtgtgtaatttttgcaaagggtttagggtgagatactctcagaattaacaaaggaacacttaaaatccatttttcctcttcttcctgtagttttatataatgtttttaaattaacttagtgtaacagtccattttcacactgctataaagaaatacccaagactgggcaatgtataaaggaaaaagttttgactcacagttccatatgcctgggraggcctcaggaaacttacaaacatggcagcaggtgaagcaggcacgtcttacatggcagcaggcaagacagcatgtgtcagca

SEQ ID NO: 171645 - DNA, 471 bp, Homo sapiens
caaatgccaaggtcagctggtcttgaaaataccatcaagcataccacctttctttcttcccttttggaaaacatgggcttcctyctcctcccatcccatgcccttggatatcctgtttccttttattttcttacttgtttatgcctagtcatcatcagaaatttcaacccagctgagctaatgaattgatgctccttttgcatgtacagagctaatgaggcacaggcaacaggtagaaacatgttagtttctttcctctgtgcaaagaagcctctatattcttatccaattattgactagcaaacccctgttacctctatcagaaacagaagcttccctggtcacataaacagtgtgacatgtcagcagcactgagctatgtctcaagattcttttcctgccagcatgtaggagaagataccccaaagaccatgctactccaaatagctgatgaaatgtgcagtgctgcac

SEQ ID NO: 171646 - DNA, 460 bp, Homo sapiens
atgtgggctgcagtcatttccatgactgttagttactgctagttagttgctactatccatcccacataggaacaacttcyaggaatactcctatgccctactgtgtggactcacccagaaatattacatgaaggtgcaggactagagattatattgtggtataaacatgccctatgacatctagaaatgcacatgtggtagaagagaagcaatgtttgaaatacatggagccagaagccagtttgtataaaagttaaggtgaagatttggtgttcagcaacacctggttaaaacagaagttctttctttttcaggaatatgctcaataacatagcatgtattattttaaacccactgtatagttattattttattataaaaaccacatcaaatataagttatcagaatttgtatgtttataggacacaagcttgcaggatttctccaaatgacaaataca

SEQ ID NO: 171647 - DNA, 391 bp, Homo sapiens
cagtttgtataaaagttaaggtgaagatttggtgttcagcaacacctggttaaaacagaagttctttctttttcaggaatatgctcaataacatagcatgtattattttaaacccactgtatagttattattttattataaaaaccacatcaaatataagttatcagaatttgtatgtttataggacacaagcttgcaggatttctccaaatgacaaatacagttggcttcccatatttgtgaattctgcatccatggattcaaccaactatggatcataaatattcaaaaaattgcatttgtacagaacatgtacagwtgtttattgtcattattccctaaacaatctagtataacagctattttacatagggtttacgttgcattaggt

SEQ ID NO: 171648 - DNA, 567 bp, Homo sapiens
catgcccttccctctttatgctttgataataagggaaatgtcagctagatcagtattccactgcatgtggcatataagattattttataggatactcgtgtgaacaatatttcattttaattgcaatggatttactttaacatatttttaaataatgaacctgtcattacaatcccacaatttcatagatattattgcttaaggcaatgctataaactaaatatttgtatttaaaaaataagttgatttaacaaaaatgttaagtaaatgacagtctaagtactagtgtgcagttgtaggaaaatcatgaatttagtgagtgaatgattgaaattagaagtacattctgtgtgctgttaccagagatagcagatcaatttttactgtcaaaataccactattataccaaacccattttcctctgtttccaaatttcacatgccctraaattcaatctgacaactgatggttgttatgcctatgcttcttacaaaagtaatattttgaaaaacataaaagtaaccactagtagatttgaacacaaatatgtatcttcaaaactggaaa

SEQ ID NO: 171649 - DNA, 619 bp, Homo sapiens
tccattaagacatatctattatattgttttatacaacctagctactattactatgcttgaaatttagttcaaatgtcttttgtgataaaatartaagcaagcatgtattgacaaaatattaaaacacaggaaaagttgattttgtttacttcgagtgattaaacaacatacgataaaactgtcaagagaattcctatttgtacacaagggcaatcaaaagaagattatccataatcttttttccaagacatcaagaaagatttttctaatgcaaaagaagatattctgatgtgtcaagcaaaatttaaagcattatgtttaacttactcttttgccaaatcagatttgatttgtttattgattcatatcactttggtcctattatttactgactctctgatacttcttttatatctgacacaatcaaattttatcctagaaatgggcaagagatgtggaggacttttttctaagtactggtcatgtatttggggtcatgaagagcagtaggagagaaaaggggtcatttctcctttgatttcactaaatcactttctgtcatattttcatagtcattgtaaggagttaaaaatggtataaatgttattgtgagtcagaa

SEQ ID NO: 171650 - DNA, 619 bp, Homo sapiens
tccattaagacatatctattatattgttttatacaacctagctactattactatgcttgaaatttagttcaaatgtcttttgtgataaaatagtaagcaagcatgtattgacaaaatattaaaacacaggaaaagttgattttgtttacttcgartgattaaacaacatacgataaaactgtcaagagaattcctatttgtacacaagggcaatcaaaagaagattatccataatcttttttccaagacatcaagaaagatttttctaatgcaaaagaagatattctgatgtgtcaagcaaaatttaaagcattatgtttaacttactcttttgccaaatcagatttgatttgtttattgattcatatcactttggtcctattatttactgactctctgatacttcttttatatctgacacaatcaaattttatcctagaaatgggcaagagatgtggaggacttttttctaagtactggtcatgtatttggggtcatgaagagcagtaggagagaaaaggggtcatttctcctttgatttcactaaatcactttctgtcatattttcatagtcattgtaaggagttaaaaatggtataaatgttattgtgagtcagaa

SEQ ID NO: 171651 - DNA, 430 bp, Homo sapiens
cctcaaaaattgtaaaaatgatttaaaaatgttggttatttcaacacctaatatggctcttcattgaatttttctcctttcttctactagatgggaacattatctatccccatctacaaaggagttaytttgaggaaggaactctttcttacttgtttagtgtaatgactaaaagctcagattttgagggcctgaacttgaaacccaatttggtctttgggcaaagcaggcatcctctctttgcctaggtctctttgttcttattttttaaatggacataaaataataagtgcctggcatgctttagtactactattattatagttatcccattcactaggacttgctctgttaatattaacatcttagtccacattttagattgatcctattaacatggtttaaactgctttgatctttataacaaagc

SEQ ID NO: 171652 - DNA, 666 bp, Homo sapiens
accttataatttgcagagttgtattatcctagcatccctaaaggaaagtgaaaccctataaagcccacatgggctgagagactgaggagttgcgtttcccagattatctgggagctgtcccaagagatgcttcttttccaagttatacatcctttctttccattcctacgttgaacagcaacatggtgataactcagaatggaattatgaaccacagcaagggttcccttactccacttcagggctttcttcaattgaaatcgatttctctctctgtttyatgccgttctgcagcacagcaggctacattttatgggcaaaaaagaaaggtcatggaatttactcattgatttgctattagggcctatactgcaaagtacaatggattctgcttctttgcaatgctggcccattccagctagtgaatttggtttcatcgcttcgtatggacagggtttgatttcttacaatgaccctcttggcacatgctcaatgactggctggctcttcacttaccttgttattttgcagtgctctgtgaagcccagaattcaaagcccagactcttactttcttttcaacagaaataactgagtttggcccctgtgtttcaagggcaatataagtagtttaataacttagaaaggttttcatcatttctttcac

SEQ ID NO: 171653 - DNA, 666 bp, Homo sapiens
accttataatttgcagagttgtattatcctagcatccctaaaggaaagtgaaaccctataaagcccacatgggctgagagactgaggagttgcgtttcccagattatctgggagctgtcccaagagatgcttcttttccaagttatacatcctttctttccattcctacgttgaacagcaacatggtgataactcagaatggaattatgaaccacagcaagggttcccttactccacttcagggctttcttcaattgaaatcgatttctctctctgttttatgccgttctgcagcacagcaggctacattttatgggcaaaaaagaaaggtcatggaatttactcattgatttgctattagggcctatrctgcaaagtacaatggattctgcttctttgcaatgctggcccattccagctagtgaatttggtttcatcgcttcgtatggacagggtttgatttcttacaatgaccctcttggcacatgctcaatgactggctggctcttcacttaccttgttattttgcagtgctctgtgaagcccagaattcaaagcccagactcttactttcttttcaacagaaataactgagtttggcccctgtgtttcaagggcaatataagtagtttaataacttagaaaggttttcatcatttctttcac

SEQ ID NO: 171654 - DNA, 666 bp, Homo sapiens
accttataatttgcagagttgtattatcctagcatccctaaaggaaagtgaaaccctataaagcccacatgggctgagagactgaggagttgcgtttcccagattatctgggagctgtcccaagagatgcttcttttccaagttatacatcctttctttccattcctacgttgaacagcaacatggtgataactcagaatggaattatgaaccacagcaagggttcccttactccacttcagggctttcttcaattgaaatcgatttctctctctgttttatgccgttctgcagcacagcaggctacattttatgggcaaaaaagaaaggtcatggaatttactcattgatttgctattagggcctatactgcaaagtacaatggattctgcttctttgcaatgctggcccattccagctastgaatttggtttcatcgcttcgtatggacagggtttgatttcttacaatgaccctcttggcacatgctcaatgactggctggctcttcacttaccttgttattttgcagtgctctgtgaagcccagaattcaaagcccagactcttactttcttttcaacagaaataactgagtttggcccctgtgtttcaagggcaatataagtagtttaataacttagaaaggttttcatcatttctttcac

SEQ ID NO: 171655 - DNA, 379 bp, Homo sapiens
tttcttttggtagataggttagtaactgaatgaattgagtttttttmattagacttttttaaatatttagagaataatgcagatgcacatgcacacacacacacacacacacacacacacacacacacctgcatgtaaaatgaaacatgtaagaaataatacagagagacccaacggtacccttctctagttttttgaaaggcaacgtctttaaaaactatgtagtacaatatcacaaccagaatgttgacatcaatccagtcaaaatacagaacagttccatcaccacaaggatatatgaagtttgaagtgcctatagatagtattcaagcaagacttgttatagtggcattctctaaggacatgctctttacctagt

SEQ ID NO: 171656 - DNA, 340 bp, Homo sapiens
agacagtcttcagttccaatcccagttcttccaaatggaagcacagtctgcaaggattcatggttctagctcaactgattacttttgaaggcccgaaattacataatggcagagaaaacagatgaacaatggaaaaagaatggggttaaaaaaayagacaaaccctggtgcccagttgattagaagagagaaaatggtaggaagcatgatacctatattagcctactgggtggattaccgaagagagagaatccaggaaagggagaggtttgtcagaatgaggaggaagtcattattttgaatttggtgtatgacatttaggtgaatatattcattccac

SEQ ID NO: 171657 - DNA, 447 bp, Homo sapiens
tttgtaaatatgtaagagtagcatctagtgcttgctgctagccagaggcttctctagggttgccctgtgctgagcagcctgggacagggaggaaacacaacaagggtgtctctacctgtctctgtggggaccacttagacaaaagctgaggctttgtcagtttcattgtttacacagccaacaaacatttgctttgaggaaagagtttcttggttaaataggatataggagtgactgataaatgattctttatgtcccttttagaataacctactattttagtaatctattactcttatgatcttgaaaacatggtaaaattacctcaaaagagttaccatcctttgaaagttttatttcaatccataagctgatkaacacatttacatttgcatgcactattttttcttacataactcaatataatacttactattattgcattac

SEQ ID NO: 171658 - DNA, 551 bp, Homo sapiens
agaaagaaaaaacataaaaatttttatatgataactaactaaaatgtatagttgagaagggaaaaaaatctaaacttacttatatgtatcagtctgtatgaggtatggacctattgaacagtatcattcaggtttagcatcttcaccaccttcaccattatcaaatgagccttgcctgaaatcagaagcactactttctttcgttagttggagaagttgacatgaatggaggtatctsaagaaccctaaactgtgtcattagaaagcaataggaaacatggtccccttcttttaggagttgtaccaaaaattctgagtataaggggccccaaagtatgtaattctctattatttctttgtgaatcttgatttaagctagtgcactatgaagagacatacctgtttctcagatagtcttttatttaacttataaattatcccaaggcatggactatatagaattcaacgatcaaaactttaagtaagaagagaccagttaatgaatttctgggggaaataaggacctgaagtaattaaaatttctcagtaag

SEQ ID NO: 171659 - DNA, 439 bp, Homo sapiens
ggaccttgcatggcctgataaagaggttgggtgttattctatgggaagcgatagaatagattctgcccagtaatctgatgcacatctttgaaagattaccctaccttcattatgtagactggattacagggtgatsaacagaagcaggaaaaccagttagacatgtaattcaatagtttaagcctgaaataaggtgggtgacagtggatataaagacctttaaatggattggattagataaatcttggatgaagaaaatacagggttagctgttggattggacatagtacatcagagaaagaaaagcagtgaaatttagtaccaagattgttgccttgactaaatgaatggatagatattagttctatttactgaaatggggaaggctggaacagagacaggactgggggaacagcaagagttttgtttgggacagact

SEQ ID NO: 171660 - DNA, 538 bp, Homo sapiens
cccaactaaacctgctgttaaatattctgcttatataagtatgataaaatatgagtggaggtaggacagatggatgggtgaygaatgaatggatggatggatcgatggatagatggatggatggataaatacaaacacggagacaaacagactgatcttgctagaatcctaataatatgcaaccaaaaacaaatgggaaccattttcaaacaattaggaccttggtactgttcactctttgattgaattactgtgtttatagttatttcactgtacttgcagatatatatgtttacttttaaaaagtcagcttaataaaacatctgaacatttcaaccattcttaaactatcccaatcctacatatacaacatcccctgcatttgaacataatagctctcatatcgcttcccatatcttaaacctatgacttcccagaacctttaaaacttttagaaatcgatagaggtcaaaaagtgggtgaaggatatgaacagacacttctcaaaagaagacatttatgcagccaactgtagggt

SEQ ID NO: 171661 - DNA, 538 bp, Homo sapiens
cccaactaaacctgctgttaaatattctgcttatataagtatgataaaatatgagtggaggtaggacagatggatgggtgacgaatgaatggatggatggatcgatggatagatggatggatggataaatacaaacacggagacaaacagactgatcttgctagaatcctaataatatgcaaccaaaaacaaatgggaaccattttcaaacaattaggaccttggtactgttcactctttgattgaattactgtgtttatagttatttcactgtacttgcagatatatatgtttacttttaaaaagtcagcttaataaaacatctgaacatttcaaccattcttaaactatcccaatcctayatatacaacatcccctgcatttgaacataatagctctcatatcgcttcccatatcttaaacctatgacttcccagaacctttaaaacttttagaaatcgatagaggtcaaaaagtgggtgaaggatatgaacagacacttctcaaaagaagacatttatgcagccaactgtagggt

SEQ ID NO: 171662 - DNA, 425 bp, Homo sapiens
ttaataaaaatcatttatcatgaatttgatttttaaatttttaaagttacttatttgttgttgttttagtgacagatatatttggcttggaactatttggggacaaactgaaaaaaagagaagaagcaggtgaattctttcaaaagaggtttactgttttttcctcttccagccttggtttactttgagaaaaaaagcctagggtgtatagagagagggaaggtgtgaaagggtggtttggagagagccctgggaagcctatggagcctttagtggtctttagcgcatttaacactagaagacagagcccttcaggaggcgcagggaaggacacatggattctggcccctaggctgatgaaagaagggcagaagtgatccccagagggatttcatttgcaartaaccactgatgctgctgcatgt

SEQ ID NO: 171663 - DNA, 362 bp, Homo sapiens
aaatttaactgcttcaaccctccaattacattttcaccatctgtgcttccacattttcatgaaataccccagtgagatgacacagaaacattgctgtgtaactaacacacataacataactcatgtatgtgacacaacgaatccaaaaaaagctgatacattaaasagcagaggaattaaatttttaaaccctgttaaaggatgtggtagaaaaaacatctggaaaagaacaggttgattgaaataggcctgcctggcttcagaattggaaggtcatgctaaactaatctccagaagaactctgagggtgttactgccaaaaaagacaaaagtggctcaggcatgtcatgcatttggatttt

SEQ ID NO: 171664 - DNA, 568 bp, Homo sapiens
aagacccatctgtcttctgaaactgccaaagtggatggtagcaagatttaagtgagggcgtggggatcattgctcattaaaaaaaaaaaaaaagaaaagaaaacaacaaccctcctccaaattttattcacagtgattcaaaaatcagagattatcatctaagtcattatgctgtattttgaagtatattaatatttataaaatgtctattgatatttataactctgattatctacttaatagattttgaccaatcagtatcctrtatagttccttttcagtctgatggaaccagccatgcatttatttgtgggtggaggtacagaattatgtaagtgttagcaagaattttttaagctcttaacacattcaggatgctatgtctgtattggatgttgtacagaggttcatcttaacaccaaggagaacaacaaagagtctacggccataccaccctgaacgtgccagatcttggaagctaagcaggattgagcctggttagtatttggatgggagaacagcaaagaatggtgaacagcagctcccccttgtatactgatgacaacaa

SEQ ID NO: 171665 - DNA, 568 bp, Homo sapiens
aagacccatctgtcttctgaaactgccaaagtggatggtagcaagatttaagtgagggcgtggggatcattgctcattaaaaaaaaaaaaaaagaaaagaaaacaacaaccctcctccaaattttattcacagtgattcaaaaatcagagattatcatctaagtcattatgctgtattttgaagtatattaatatttataaaatgtctattgatatttataactctgattatctacttaatagattttgaccaatcagtatcctatatagttccttttcagtctgatrgaaccagccatgcatttatttgtgggtggaggtacagaattatgtaagtgttagcaagaattttttaagctcttaacacattcaggatgctatgtctgtattggatgttgtacagaggttcatcttaacaccaaggagaacaacaaagagtctacggccataccaccctgaacgtgccagatcttggaagctaagcaggattgagcctggttagtatttggatgggagaacagcaaagaatggtgaacagcagctcccccttgtatactgatgacaacaa

SEQ ID NO: 171666 - DNA, 568 bp, Homo sapiens
aagacccatctgtcttctgaaactgccaaagtggatggtagcaagatttaagtgagggcgtggggatcattgctcattaaaaaaaaaaaaaaagaaaagaaaacaacaaccctcctccaaattttattcacagtgattcaaaaatcagagattatcatctaagtcattatgctgtattttgaagtatattaatatttataaaatgtctattgatatttataactctgattatctacttaatagattttgaccaatcagtatcctatatagttccttttcagtctgatggaaccagccatgcatttatttgtgggtggaggtacagaattatgtaagtgttagcaagaattttttaagctcttaacacattcaggatgctatgtctgtattggatgttgyacagaggttcatcttaacaccaaggagaacaacaaagagtctacggccataccaccctgaacgtgccagatcttggaagctaagcaggattgagcctggttagtatttggatgggagaacagcaaagaatggtgaacagcagctcccccttgtatactgatgacaacaa

SEQ ID NO: 171667 - DNA, 522 bp, Homo sapiens
gcctaaatctagatcttgtccaggtcagttcttttagaagacctctggagggcaatgtctcatttaaattataactgaaggcactctaaggttttattggcagtgtaccttagcaagtgaatcctattgaattaaagcgccagataagtaamcactgcgtatataacttggcttttagcagactgaaaaaaaaaatatatacctaaccagcaaagtcagaatgaaatgcttcctttgagcctacattgaacccctttgatggtttacacaccttcaacaaattctcaaagtcattggtttaaccactcttggacgcacccggctgagttggatgaaaacttcagttttgtgttcttttcacttgaaagctgtatgtctattctcagcatcatgcatgttatttttttttttccattcttaacagtattcctcatttacaaaacaaaaacgataataatcagaaatagtcctataaaaatgttaattttgtttagccattgactgatctttctctaaccttaa

SEQ ID NO: 171668 - DNA, 492 bp, Homo sapiens
tatttcatgagtcatgcagttcatgtaggaatcgaggtccttgaggcctgttggactacagacctcaacttgttgctgtctgctggataaaggcttcgcttacttcctcaccgtgcagctctcttcagtatggccacttacttcattgaagccacaaagggagaaagtctgaaatcaagacagaacatataatcttatgtaatgtcatcatgaaagtggcatcctgttggcggagcttgcagtgagccgagatcgcgctactgcactccagcctgggcgacagagcaagactccatctcaagaaaaaamaaacaaacaaacaaaaaaaggaagtggcatcccattatctttgctgtattccattggtgacaagtaaggtatagattccacatgtactcaaggggcacgcattacacaagggatgaccactcacctgcaaggataattgaggaacattttcgattctgttcaacacagccaatttcctatagc

SEQ ID NO: 171669 - DNA, 417 bp, Homo sapiens
catcaataagattttaattttcagttattattatttgagctttatttcccagctctstgacacagatttaggggtggtgtggatattcttagagtggaaattattgaactcttagattaaaggtactcgagttcctagcttgccctgtaactacacatatagagaagatcactctcgtaggtgctagtaagtaggagataaaagttttagggggaaacacagagggatactcagaactgggagcagtcctaaggtggaccttcaaaatgattcatgtcttagaaaatatgatttaagagaagttaggtctatagggtcattttatctgaggaaagatggctgtaaggatctttaatgataggagtcaaatatatgagagattgttgcaaggagaatgttaaccagctattctacaac

SEQ ID NO: 171670 - DNA, 632 bp, Homo sapiens
tgttggttttcaaatgtcatttcccctttggctttgttgatggtaaaattctgcctttgcatctgaaattggaaactcttctaatcctggagtctgagtgtaattaatcggaaggctttctcttatctgtgtctaggatcagcctttagtctgatcttcatttttatccaggtgcaaaactcaaatacttttacctttagtgcagtggcccaaattttgtccctagttctgcytgtgctatcattaactgtcattttttaattatatctacacacgaatgtgggccagaggcagcaagatctggattttctcttcctctctgagtccctgacccttggattgttcttccttcttttcaattttggtgggttctgggtttagatttgtagcctaacctagtcaacaacttctttggcatagaaaagaattatttctgatgtgtatattttcccagaagttagaatacccctttgatatatttatttgtgtttaatccacagaaagaatgaagaattaagttatattaacaagagtatcttgcagtatatatatgctttaaagttcacagtgactttgacatgcctctttcatttagttttcacaactcttggaacgtgtttttgcccattttc

SEQ ID NO: 171671 - DNA, 608 bp, Homo sapiens
gcaagtcttgtttataagcattaatcatgaagatgaacatttataactgaaaaaagatgttcgaattttggggtttgtaaaagaactaggaatggagaacatttagagttcactatgtggtgatattcacaaaagcaaatgatgatataactatgtcacttggaaggagcttcaggcaggttctttctcttctacatgtaacatgtaagcctgttttggggtcattgctgaggaaaactacttcttaagacaattttacgactgcattgtttcaatagtacaccaaactatgttggaaagttatgacctagaatctgaaaaagaaaaaagtgatgaaggaataatgaaaggctgcatgacagaagtatttagtcttcaytcctgtgtttgaagcagaaaaaaaggtattgagggctaaccagactctgccttttgctaaattgaagagtatcacatcaaaggccaaagatccattttaacaggtgccttaaaaagttgtactaaatgatctctgtgcccctttggatcatgaattgtctacataactgcacaacgaatgaacgtaagaaaaatgaattggctggtgaagcctgtctggtaaacaatcc

SEQ ID NO: 171672 - DNA, 455 bp, Homo sapiens
atttcaatgcatgggaaaatatttcttctacctatttactgcctaaagtaaatgctaacccagaagatatttatgtcttggtttagaaatctgtagagtgacagagcaatctgagctctgtaatgtatgcaaaatttatcaggctcagagagacatgagtatgggactttggccacataccatacctgtgcccagggacaactgttaggaaacattttgttccagactagttgtgtcacctattatcttcatgttcctggaatttgtgatacaaagaacaatgtatagccaatcgatagcttatgtatttgaawgtatattcttggtaaacaacttaggaactgcctcttgtttttttcctaaaaaaacccacttgtaatggctggtagttggagtgtataatcagagcaacttgaatctacgctcctgagtggccatcttcaacaatcaccctg

SEQ ID NO: 171673 - DNA, 455 bp, Homo sapiens
atttcaatgcatgggaaaatatttcttctacctatttactgcctaaagtaaatgctaacccagaagatatttatgtcttggtttagaaatctgtagagtgacagagcaatctgagctctgtaatgtatgcaaaatttatcaggctcagagagacatgagtatgggactttggccacataccatacctgtgcccagggacaactgttaggaaacattttgttccagactagttgtgtcacctattatcttcatgttcctggaatttgtgatacaaagaacaatgtatagccaatcgatagcttatgtatttgaaagtatattcttggtaaacaacttaggaactgcctcttgtttttttcctaaaaaaasccacttgtaatggctggtagttggagtgtataatcagagcaacttgaatctacgctcctgagtggccatcttcaacaatcaccctg

SEQ ID NO: 171674 - DNA, 557 bp, Homo sapiens
gaccacaagttgagtcttgctataagctgaatctggaagatagaagtgaaattgtccatgaaaaaggaagaaagaagaatgtcgaagaccaaaggggaaagagagtaagacaaggtaaatcaccttttgatatcgttgctgagttgtgtgaaaggctgtcaaagtgggcagaagtcatgttcagaagagttttacattcaaattaaggagtctctgttagacagctttaaatccatgtgtctaatatcttacaaagaccaaagactcatagtggatatttccctctatctaaaaataataaacttttctttccaaagggaaaaatttttacttatgaaaaatgtggtaaaatatagaataggaaattctgaaagatacaagttcttcttgaacaatgagcaatgtaaaaatgataaaattattgcatgatacaatcttttttaaaaaagagaaaacactgagcatcttttccttaagccccctttcataaaatctcatattwtgcccacttctccatcttaatgattgtggatttctttctcaagacctacttaata

SEQ ID NO: 171675 - DNA, 501 bp, Homo sapiens
cattttcataagtgatgtcctgactctatctgatctagttttcatgtaagtcctttgccactttacatctatcctcaaaagcctaacggaatctggctggataccccaggtgcttcctcaacgtagaagttttctcttgtttktttttttttttattctgagttattttgaatatatcagtcaattttaatctaaacttgcattatgttttcaaatacaatataagaatttaattaaaaacaatgcttcactgacagcagctctacaattctgtatttgacattgtagtacaacatgcaaaggcatgtattgaggtcagtctgaaatgaaacacttagcctctatattttttggaaaaacaaatccaaaatatgaaacattcagataggtaggcataacattcagatgtccagtgatggaggtcttgctttgaggggcaggctgtttcaggtataaataaatctctcaaagtctatttaggaaaaagatatatatatattc

SEQ ID NO: 171676 - DNA, 534 bp, Homo sapiens
aagctatgaaaatgaagacaacagccttactaacattccatctcattattgttataactcctggttccatcataatcttgtttttccatcccaacagaatctgaggtgcagtcatttttgtgaagctgttattttcatcacaatgtgatctatacctaatgattacattacctgtacatytgaagctcgttcgtaaaccatcgtcccctgagagtatacctaacataggaaatactatatatatttggccgctgaagtgctataatgatgccctaaattacatatccctttctacagacataatttgctttattaaaaataacttctgcataactattgaagaataaaacagccacttatgcacaaggtgagggatatctgcatatctgagctagacaaaaagtatgtttgataatctattgtatgttttgctacaaaagcaaagtggttccttatgattggctgaaactctttgagttcttgttctatctttcagcaaatgaagatgctaattgtctttattctagcctttta

SEQ ID NO: 171677 - DNA, 561 bp, Homo sapiens
tgcacatcactgaacctgtatcctactgttaatgatacatatgtcatatttacaaatgcctcatgtgtctcagggtggtaaaaatgtttctattcaagaatggcaactaaaaacacccataggtccatcatattggattaaccacttatatccagctacctgaaactactggcactactcagaaaataaattttcttttaccatcttgcccacttaccgttctyagaaagtcctgcctttcctttcccttctttatccaattaacccaacttttagctcttacatcaaatcttctggaaagccttctagacatttctctcccttcctctctgccattatttctttttcaggataggttagatattatactgggcgctctcatagcttcatgggcatacccatgtcaaagtagccagcaatcgctattctaagaaacttgtctgaatttgtaattggattgtaaatatcttgagtgcaagatcttcaacttgtatagttgtatttccaattttcaacatatgttgagtgaatgtattctaaatataatattaagcatggcct

SEQ ID NO: 171678 - DNA, 561 bp, Homo sapiens
tgcacatcactgaacctgtatcctactgttaatgatacatatgtcatatttacaaatgcctcatgtgtctcagggtggtaaaaatgtttctattcaagaatggcaactaaaaacacccataggtccatcatattggattaaccacttatatccagctacctgaaactactggcactactcagaaaataaattttcttttaccatcttgcccacttaccgttctcagaaagtcctgcctttcctttcccttctttatccaattaacccaacttttagctcttacatcaaatcttctggaaagccttctagacatttctctcccttcctctctgccattatttctttttcaggataggttagatattatactgggcsctctcatagcttcatgggcatacccatgtcaaagtagccagcaatcgctattctaagaaacttgtctgaatttgtaattggattgtaaatatcttgagtgcaagatcttcaacttgtatagttgtatttccaattttcaacatatgttgagtgaatgtattctaaatataatattaagcatggcct

SEQ ID NO: 171679 - DNA, 561 bp, Homo sapiens
tgcacatcactgaacctgtatcctactgttaatgatacatatgtcatatttacaaatgcctcatgtgtctcagggtggtaaaaatgtttctattcaagaatggcaactaaaaacacccataggtccatcatattggattaaccacttatatccagctacctgaaactactggcactactcagaaaataaattttcttttaccatcttgcccacttaccgttctcagaaagtcctgcctttcctttcccttctttatccaattaacccaacttttagctcttacatcaaatcttctggaaagccttctagacatttctctcccttcctctctgccattatttctttttcaggataggttagatattatactgggcgctctcatagcttcatgggcatacccatgtcaaagtagccagcaatcgctattctaagaaacttgtctgaatttgtaattggattgtaaatatcttgagtgcragatcttcaacttgtatagttgtatttccaattttcaacatatgttgagtgaatgtattctaaatataatattaagcatggcct

SEQ ID NO: 171680 - DNA, 510 bp, Homo sapiens
gcctattccattgtttagttataaagtaaaatgattttttaaagtgcaggataagtgaatttttatgtttcatttttagttattgaattgtctaggtaatgcattttaggagggcactsttcctcccagaacttaggaaagcagtcattcaatcactcagtaatttttagggatttttaaaatagatataacaattttaggatgtcaagttttagatgtctagttttaacttgtttggttgagctgacatttaagttcagtcccaatgtgatgtgaatggacctagccttttacctcttctttttttcctcttcattggaaaccagtacagagaacatggtcacttaataagaaagatgtttcctgctttgtttccttttattcaactcagaactgcctgggggaaaagattgcttcctttctgaatgtggtaagccacaaaatggaaaatgtgcacacgagctctttcctattaaccttggggaaaggtgacagaaatgtgtgaacaat

SEQ ID NO: 171681 - DNA, 620 bp, Homo sapiens
tagttataaagtaaaatgattttttaaagtgcaggataagtgaatttttatgtttcatttttagttattgaattgtctaggtaatgcattttaggagggcactgttcctcccagaacttaggaaagcagtcattcaatcactcagtaatttttagggatttttaaaatagatataacaattttaggatgtcaagttttagatgtctagttttaacttgtttggttgagctgacatttaagttcagtcccaatgtgatgtgaatggacctagccttttacctcttctttttttcctcttcattggaaaccagtacagagaacayggtcacttaataagaaagatgtttcctgctttgtttccttttattcaactcagaactgcctgggggaaaagattgcttcctttctgaatgtggtaagccacaaaatggaaaatgtgcacacgagctctttcctattaaccttggggaaaggtgacagaaatgtgtgaacaatgctgttagctgtttaaatgttcttttattattattaatttggtttaagggttttgcctaacaagtaactcccttgatttgtatgtttcagagttgtttaatttttctccaaaataacaatttgtc

SEQ ID NO: 171682 - DNA, 519 bp, Homo sapiens
aagacttttgggtgttcaggagggcaagttagcatgtgttgcatttgaatttatacatttgagacacattttcttactgaagctgatattcatgaagcagaaaagataaaaacttgtacatacctttttatttcttgattttaatgttgaagttctattctcagaatggattttataggcaacaatatgcacttaaatttatgatctgtttacgagacctcactgtattttgacagaggtcaaaataagggaaatcaaycttggttctcattccaaagagttttttttcctgatatcttaaaaaggctttattacattatgttgatatccatggcagagagttccaaagacatccccatgaaagggctataaatgtgaggtttgaaaccaaggcaagtcaagcagggtaagcaatcttttcacccaaggttttaaaataactgctgataagaccttctcacagattttcattcatttcttcctagttataggcaggaaattctgaaagcaggtgaattc

SEQ ID NO: 171683 - DNA, 520 bp, Homo sapiens
aaagacttttgggtgttcaggagggcaagttagcatgtgttgcatttgaatttatacatttgagacacattttcttactgaagctgatattcatgaagcagaaaagataaaaacttgtacatacctttttatttcttgattttaatgttgaagttctattctcagaatggattttataggcaacaatatgcacttaaatttatgatctgtttacgagacctcactgtattttgacagaggtcaaaataagggaaatcaatcttggttctcattccaaagagttttttttcctgatatcttaaaaaggctttattacattatgttgatatccatggcagagagttccaaagrcatccccatgaaagggctataaatgtgaggtttgaaaccaaggcaagtcaagcagggtaagcaatcttttcacccaaggttttaaaataactgctgataagaccttctcacagattttcattcatttcttcctagttataggcaggaaattctgaaagcaggtgaattc

SEQ ID NO: 171684 - DNA, 449 bp, Homo sapiens
gtgaatgtgatgtcttttcattcccatgattgtcttatgtgatatgacgtagttgaccctgaaagggtagggtattcctggcagacctaatctaatcacagaagctgttcaaagcagagaaatttctcgtgctagtgacagaagacgaaagcatcagggaaagtcagaggaattcaaagtgtataaaggacttgagctgttgctggtttgaatacagaggagccacatgagaaggaaggtggktagccatgggttgctgagagagagattcacagctgagcatcagcaaaggaacctggagctcagacctagagccacaaagaactggattctgccaacaacctgaatgatcttgaaagtggtttcttcccccacattctccagattagagcccagtaagccatcaccttgactttgaccttgtgataacttgaccaaacctagctaag

SEQ ID NO: 171685 - DNA, 476 bp, Homo sapiens
agatctcacaaagatgcaagcttttcagtttcacagatatctgtttcccctctggagggggaattaagggaaggagcaagagacggaactacataatgcccactaaaatatttggaatctttttctttttccctttctttctcctacaaagaacatctcctgaataatagacaaacgtcattctagtcttctaaccttacaccacatcaaaaaaaaaaaaaaaaaaaaaagcwtttctaaagctctgcagacttttctgagtcatcctgctgcattctacacccaaactctcagaggcaggtcactctactttgcctggggatgctctctcaccctgcctagtcctcccgtggattttaccctgagagcagctgcttccagggtccccacactgccagccacctgcacttacatctgctcctgtgcctaagctctgctagctgtcatcttttctggctacccaccaagtcccccac

SEQ ID NO: 171686 - DNA, 459 bp, Homo sapiens
cttttcagtttcacagatatctgtttcccctctggagggggaattaagggaaggagcaagagacggaactacataatgcccactaaaatatttggaatctttttctttttccctttctttctcctacaaagaacatctcctgaataatagacaaacgtcattctagtcttctaaccttacaccacatcaaaaaaaaaaaaaaaaaaaaaagcttttctaaagctctgcaracttttctgagtcatcctgctgcattctacacccaaactctcagaggcaggtcactctactttgcctggggatgctctctcaccctgcctagtcctcccgtggattttaccctgagagcagctgcttccagggtccccacactgccagccacctgcacttacatctgctcctgtgcctaagctctgctagctgtcatcttttctggctacccaccaagtcccccacaac

SEQ ID NO: 171687 - DNA, 569 bp, Homo sapiens
atacattcctatggctgtctttaccagtaggcatagtaratgattatatatggctgtaaaatttaaattgccaacctcctattccctgtgctctcaaatttcactccagccatagtggcatcttagttgttccttgaatatgtcaaaatctctgcagttgtagattgttgcactcactgttcttcatcagaaactttttctatccatatattcataaagttgaatctctggctgccttgagatttatactcaaatgtctctttattttattattttttttttggagatggagtttcactctagttgcccaaggtggagtgcaatggggcaatctcgactcactgtaacctctgcctcccaggctcaagcgattctcctgcctcagcctcccgagtagctgggattacaggcacccgccagcagcccgagctaattttttgtatttttagtagaaagggggtttcaccatgttggtcaggctggtcttgaactcttgacatcaggtgatccactggcctcagcctcccaaagtgctgggattacaggcgtgagccaccaggcctggcctg

SEQ ID NO: 171688 - DNA, 520 bp, Homo sapiens
aaaatggtatgcttattctgctatctcttggtttattgatactggataccacctattggcctcctgttatggtgaataaggacttaggtgttttttatrtatctgctccattttaccttaccctaagttaccaaaaatactgttttataatacttgtaacattaataatcaaggtttacatttttatgatcagacatacagtgttcattacatagctgaatagtgtatgaagattacatttccatgcctttgggttttttttattacccaaagtaatgaattactgcattttttactaacattatgttctgaatgtctatccaaattttccccctaagccccatttacatcttccaaatatcaatcagcacttcctcttttatgctggaaacctatcttggacctgtatctctggctcacattcagatctgttgctctccagatcttacacagctgtcatcctgaggctgcccttgaccacatttcctgttggattccctgtttctggattctatgacct

SEQ ID NO: 171689 - DNA, 539 bp, Homo sapiens
gagatgcagtggtaacatagcagccagaacaagttaaataacatggatataaatattttaactagggctagacatcactccctgtgttttaatattgtatctctcctttaatcacaaactcttccttgtttagttttctggttcaagaaaaagcagatttcaagaggggcccttttagcttttaacaggaaggacattttctacagttattttctcaaatgtagcagttcgttcaatttccttrttggatttctaagcctgaaacttattattgccttttgcctactaatggcaaatgtatgtacttaattctaaaattctcatcttctcttttgattctattattactcctaacctacgagttacttttttgatgttttaaatcaatgtaaataaaatcagtgatgattttcaaaaattataaaaaatattcaaagaaaaataactagaaatgtaatctcatcttgagacagactcagctatgtatggatcaaacatattctgtattgacataaaccccacagtaggtttccaaacaa

SEQ ID NO: 171690 - DNA, 432 bp, Homo sapiens
ttttcaacaattaagcttctgagaacccagtgtctatagatctaacaatttttatgacatttataaacaaaaaaattatcttactagtttctccatttttcatgttttcatattttaaataatttttaattaaaataacactttaacatgttttagccctaatttctgcttaggttatctgtcacacagaatttgataattatttctttttaaaatatgtattccacaatagtgagamtattcaatattcaaggtatattcttgtagtacactcagaatctattctcatcaaaattatgtatttctgaataatagtacaaaatttgctatttttattttttataatatcataatgcagaaaacagaaacaagaaagtggaaaccatacatgcaattgcaacatctttcaggagaacataaattaagtagtaa

SEQ ID NO: 171691 - DNA, 608 bp, Homo sapiens
gccccaccctatccccagcccctactcctgggtggagcctgcaggacggcaaggtccctgtgtggaactgactaatgtgtgtctacacagataggcctgagacagcctcacagataatggtgactccagctagactgatggggatggaaatgagataaaagaratggagagtagacagaagaaaaatatattgggaagtaggctatataaatatagtaaagaatgtacaaacatctttgtatgtagaaaaatgtaagtccctcatttctagtacttgatacttgctcaagaaacacctatgttgttcgactttatgatgggatcagtgttttgagggttaccttggaaacttaacctattacctcatttcatgggaaactagattatgaattattagtggttaacttagaaatcaaacatttgcattaggatttattgttagggtaaagtgactcctgggaaggattagagatgaagaacatgaatttggagcaagtccaacctacctggctgtaagaatgctgtcaatgacaggtgacatcaaacctaaatgaaagtggctcaaataatgtagaaattgattgatttccttaaaaacagttaaaagt

SEQ ID NO: 171692 - DNA, 608 bp, Homo sapiens
gccccaccctatccccagcccctactcctgggtggagcctgcaggacggcaaggtccctgtgtggaactgactaatgtgtgtctacacagataggcctgagacagcctcacagataatggtgactccagctagactgatggggatggaaatgagataaaagagatggagagtagacagaagaaaaatatattgggaagtaggctatataaatatagtaaagaatgtacaaacatctttgtatgtagaaaaatgtaagtccmtcatttctagtacttgatacttgctcaagaaacacctatgttgttcgactttatgatgggatcagtgttttgagggttaccttggaaacttaacctattacctcatttcatgggaaactagattatgaattattagtggttaacttagaaatcaaacatttgcattaggatttattgttagggtaaagtgactcctgggaaggattagagatgaagaacatgaatttggagcaagtccaacctacctggctgtaagaatgctgtcaatgacaggtgacatcaaacctaaatgaaagtggctcaaataatgtagaaattgattgatttccttaaaaacagttaaaagt

SEQ ID NO: 171693 - DNA, 553 bp, Homo sapiens
tgatctcaaactggttgtgggcttctgcagctagaccagggagtgagccctgctggaactagtgtctgaaaggaatgtgtatcagctacccatcagcccaggctgtggccattgagggtggctccaccctctctagtggtggatcctcagcacggctgctacccacctctcacctgagcactccatctgctatttgaggatcactctgcctctgctcacaacagctggtgcctactgtcaccattggggtyagggcctcccatggacacccattcaccccattgcagccactgctaacattagtgaacaccacttatgatccagaaaattgtcccatcattgctattcccattgttcacaccacatctgattctcagggtcccgagaatctgttcacctgccaggtccataactaccataatggcattcaagaatgccacctggaggctgaagaatcagcctgccagtaactgacaatacaggtgctagtgtgcaccaccctggggcacaaagataggtatgctcagcccactgctgccacaattgtgacctg

SEQ ID NO: 171694 - DNA, 569 bp, Homo sapiens
tacacatctattatatattaataaaaataaaaaattaaaatatcacacgttaattatgacatataggtaaattggccactttttcagaacaaaaaggaaataacccacttggtattttmaaaagtatttaaggatatttgtgaccttttttgccactcctttctgtgaggtttttataggagttttgattttgaaaaaatttggcaaacacatttagttataagttagcctactcatttttggctgacttaaaggggatggaaatggcattaaaatgtattataggacagctgaaaatttggggatccaaaatcttaattttattttattgttcacagagccaaatgaaattggaaaaaaaagagagcagtttactctttattatgcccaagagaacatgtgatattagtctggggataatctcatgtgtcttaattaaacaaatattatatgaatatgcattggaggctttgactcaattctgatcgtacatgcttagcccaattttagttatatcctcacgatattctagatgttgcaaccactatcagtttcccaactaaacaaca

SEQ ID NO: 171695 - DNA, 569 bp, Homo sapiens
tacacatctattatatattaataaaaataaaaaattaaaatatcacacgttaattatgacatataggtaaattggccactttttcagaacaaaaaggaaataacccacttggtattttcaaaagtatttaaggatatttgtgaccttttttgccactcctttctgtgaggtttttataggagttttgattttgaaaaaatttggcaaacacatttagttataagttagcctactcatttttggctgacttaaaggggatggaaatggcattaaaatgtattataggacasctgaaaatttggggatccaaaatcttaattttattttattgttcacagagccaaatgaaattggaaaaaaaagagagcagtttactctttattatgcccaagagaacatgtgatattagtctggggataatctcatgtgtcttaattaaacaaatattatatgaatatgcattggaggctttgactcaattctgatcgtacatgcttagcccaattttagttatatcctcacgatattctagatgttgcaaccactatcagtttcccaactaaacaaca

SEQ ID NO: 171696 - DNA, 569 bp, Homo sapiens
tacacatctattatatattaataaaaataaaaaattaaaatatcacacgttaattatgacatataggtaaattggccactttttcagaacaaaaaggaaataacccacttggtattttcaaaagtatttaaggatatttgtgaccttttttgccactcctttctgtgaggtttttataggagttttgattttgaaaaaatttggcaaacacatttagttataagttagcctactcatttttggctgacttaaaggggatggaaatggcattaaaatgtattataggacagctgaaaatttggggatccaawatcttaattttattttattgttcacagagccaaatgaaattggaaaaaaaagagagcagtttactctttattatgcccaagagaacatgtgatattagtctggggataatctcatgtgtcttaattaaacaaatattatatgaatatgcattggaggctttgactcaattctgatcgtacatgcttagcccaattttagttatatcctcacgatattctagatgttgcaaccactatcagtttcccaactaaacaaca

SEQ ID NO: 171697 - DNA, 465 bp, Homo sapiens
aaactaggtagttgaattgaagctgataaaatctccttagggagcaatttggtattatgttttaaaatgtaaaactcatattccctttgagctagctcttccattttcagaaagttatgttataractctcatatacacacactagtatatatacacatatgtatatatgtatataaacacacatgctaattgccattttaattttttaattaaaagcaacctaaattctcactgataagaaatatgttaaatataatatataggtatatatacacacacacattacaatgtattggcatattcatacattgaaaagctgtgacatcatgaagacaccaaagcaaatctaaatggagctgtctctcaggtacaccaaaataataaacatattttggtaaaaattgtgtgtatatatacatatatatatatatatatgtcttttataactacataagcttacataa

SEQ ID NO: 171698 - DNA, 465 bp, Homo sapiens
aaactaggtagttgaattgaagctgataaaatctccttagggagcaatttggtattatgttttaaaatgtaaaactcatattccctttgagctagctcttccattttcagaaagttatgttataaactctcatatacacacactagtatatatacacatatgtatatatgtrtataaacacacatgctaattgccattttaattttttaattaaaagcaacctaaattctcactgataagaaatatgttaaatataatatataggtatatatacacacacacattacaatgtattggcatattcatacattgaaaagctgtgacatcatgaagacaccaaagcaaatctaaatggagctgtctctcaggtacaccaaaataataaacatattttggtaaaaattgtgtgtatatatacatatatatatatatatatgtcttttataactacataagcttacataa

SEQ ID NO: 171699 - DNA, 465 bp, Homo sapiens
aaactaggtagttgaattgaagctgataaaatctccttagggagcaatttggtattatgttttaaaatgtaaaactcatattccctttgagctagctcttccattttcagaaagttatgttataaactctcatatacacacactagtatatatacacatatgtatatatgtatataaacacacatgctaattgccattttaattttttaattaaaagcaacctaaatkctcactgataagaaatatgttaaatataatatataggtatatatacacacacacattacaatgtattggcatattcatacattgaaaagctgtgacatcatgaagacaccaaagcaaatctaaatggagctgtctctcaggtacaccaaaataataaacatattttggtaaaaattgtgtgtatatatacatatatatatatatatatgtcttttataactacataagcttacataa

SEQ ID NO: 171700 - DNA, 606 bp, Homo sapiens
cccctctctttcttgctcctgctcttgccatgtgacacacctgctcccccttttccttctgccatgattggaagattcctgagaccctcacaagaagcagatgctagcaccgcgcttatatggtctgcagaactatgagccaattgaacctcttttatttacccagccttaggtattcctttatagcaatgcaataagggcctaatacagaaaattggtaccaaggagtgggatctttctataaggatacctaaaattgtgaaagcaactttgaaactgggtaacaggcagagtttggagggctcagaaraagacaggaagatgaggaaatgtttagaacttattttagagactggttaaatggctgtgatcaagatgctgatagtgatatggacaatgaaggccaggcggatgaggtctcagaacgaaattaggaacttattgggaactggagtaaaagtcatccttgttatgccttagcaaaaaacttgactgcattatgttcatgtcctaggaataaatgaaagcttgaacttaagagtgatgacttcgcatatatgatggaagaaatttctaagcagcaaatgttcaaggtatgacctgttt

SEQ ID NO: 171701 - DNA, 606 bp, Homo sapiens
cccctctctttcttgctcctgctcttgccatgtgacacacctgctcccccttttccttctgccatgattggaagattcctgagaccctcacaagaagcagatgctagcaccgcgcttatatggtctgcagaactatgagccaattgaacctcttttatttacccagccttaggtattcctttatagcaatgcaataagggcctaatacagaaaattggtaccaaggagtgggatctttctataaggatacctaaaattgtgaaagcaactttgaaactgggtaacaggcagagtttggagggctcagaaaaagacaggaagatgaggaaatgtttagaacttattttagagactggttaaatggctgtgatcaagatgctgatagtgatatggacaatgaaggccaggcrgatgaggtctcagaacgaaattaggaacttattgggaactggagtaaaagtcatccttgttatgccttagcaaaaaacttgactgcattatgttcatgtcctaggaataaatgaaagcttgaacttaagagtgatgacttcgcatatatgatggaagaaatttctaagcagcaaatgttcaaggtatgacctgttt

SEQ ID NO: 171702 - DNA, 407 bp, Homo sapiens
tccaaacacaacacggacaacttgtggatttatagccaacgagcaaggtcggggttagtggatgcaaaattactaaaaggaagcattaagtgtaaggggtgatttctagctaaataayccaataggattcttattgaaagctggccaggatgaatggatgtcacctcggggactcaggggaattataaattaaatcagatatcaagggtaggggttctggttaaaccaacttagcaagactgttgctatggttgtgtaatgcgtgtctgataaggatagacactaaggtcacagcctacagggcttataggcaactgactagggtttggtcaaggagacagtttttgtcagtttctcctcatgtttcaggaaggaagaaattcttcttgagcaataagagtccatta

SEQ ID NO: 171703 - DNA, 615 bp, Homo sapiens
gagcgactgcgccccgcccataattcttataaataactatattctgtgtggaatgcgattcccaaaaataatgatgttgagcagtcttgttgtaagcagccttgaaatggaatcaaggctttgcttagtttgaataaatgttctttaaatatttgtttgcttttataaatgagggattttattgctccaatttctataacattgcattatgcacatgctttrgagctagtcaggtatagttgtaaataattactatatgaccttgggtaagtaactcaaacttttataatctcagtttactcacctacaaaatgggcatagtaataactgcacctacctcatagtatcactgtgataataaaatgagaagcattttgcacagtgcctggtacacagcatgtgaaatattagcaccatgtttgctacatagaaaacactttataaatgaggtatattattaaaatttgttgcattaattaaaagctatctgccacaccttgatctcccccataaggccatttctttctgattttcttgaacaatgaaattatgcttcatatggaactattttattgtaatatttccactgcaggatatattatttattcagtgttc

SEQ ID NO: 171704 - DNA, 555 bp, Homo sapiens
gaggtattagaaagtatttggtaattacaaagcatttagtcatttaataaaaatgtatatgggcttatataaatattgtggtttttagtgctttagagagcatgtgaactcaatctggggtcactcccaagcctggaagagaatgagaaggaggcagtagaatatcattataatcatactacttgtcccaggggatccatgtattctactgaagagtgggagtagttcaaaatggagaaatgaggaaaccatgacaaagagtctggataatcattagaactgattaaagtcaggctgccctwgattgaaaagtgtgtgcctctgctcacaggtatgctttttttttggtacattccatggtgggcattgctatttgtatctaggttatcttagaagaatctggtagctcttttttctgcccactcaacttttccatcttccttttcatagctacaatatttcctttcctttggcagactcctctcttctttacatggtcctggtatacatattgatcattgcattcctatcctctaccttcccaggcacatagtt

SEQ ID NO: 171705 - DNA, 585 bp, Homo sapiens
ggaaaccaggctaatggagctacacccctgggaacacctggagtttggggtccccctggcacaggaagagaaggatgaagttacacactaatttccaactcctggagttataaacaaatatcttttctattcgtggtctatttgccttaactagtcaccggactgtaacctaattgcaagcgaggttgggaaacacagggagcatatggaatagtcggtgagtcctgtctctgtcccaggaacctactgtgggaatataaagatgtaagaggaagactaagcattagccaggaacatcctggaaggaaagtatcaggtagtaattagttatgttcaacaaacatttccagttcttttctccagcatgctgtacttctctattttcctggaggtggattggtcttgtgctttggtcattagttactytgggcaatgaaatgtgaacagaatgaaatgtatttcttccaggtggactccctaagcaatttgttgagtactatctttccatctgcctcaatgaccagtggtgttccacgatagaggttgctgcattagcctggggacaaaagtgagcatgacaggaag

SEQ ID NO: 171706 - DNA, 511 bp, Homo sapiens
gattattctatttttctgtatgcttcttaagtagtaatgattktttccagaatatgcctctcttatgtttaattgttaataaatatgttactaacaaagtaaaattatttattgagaatcacaattatgtaccagatatttaaaataatattagtatgactagccccattatagaatattaatcaaagttcagaaaggctaagtaaattatccaagttcaaccataaatattattttcctgttggggttcaagcgcaagtctacctgactctaaaatgcaaactttttctataataccttgaggcaaacttcaaattataacctcaaaatgcttgacttacctgttttaaatgaggagatatttttgtctcctgggcttgacacatacttggtgctcaataaatatagaataagtgaagaaatgagtcatacttatacccagaaagagctgtgtgtatattttagaaagacactagaagctcttgggagcatgtggacagttgtggctgct

SEQ ID NO: 171707 - DNA, 511 bp, Homo sapiens
gattattctatttttctgtatgcttcttaagtagtaatgattttttccagaatatgcctctcttatgtttaattgttaataaatatgttactaacaaagtaaaattatttattgagaatcacarttatgtaccagatatttaaaataatattagtatgactagccccattatagaatattaatcaaagttcagaaaggctaagtaaattatccaagttcaaccataaatattattttcctgttggggttcaagcgcaagtctacctgactctaaaatgcaaactttttctataataccttgaggcaaacttcaaattataacctcaaaatgcttgacttacctgttttaaatgaggagatatttttgtctcctgggcttgacacatacttggtgctcaataaatatagaataagtgaagaaatgagtcatacttatacccagaaagagctgtgtgtatattttagaaagacactagaagctcttgggagcatgtggacagttgtggctgct

SEQ ID NO: 171708 - DNA, 502 bp, Homo sapiens
tggctgctcctgagctgacactaactgctcatgactcctctgtgggagaagtaggtggtttcctagaggaagaagtttgggtaatgaagccacagagatttgctgatacatttgctaggcacgacttctggtcatttagaaagctattttgtggcttcatcaataaggtattccccagctgtgttactccttcgcattgttatctctttccctggaattgaaggcttcctggtctgaggcaaggacaattattccctcactgtcaaccctgatctctggctgcagtaatgagtagaggaagtaagtaatactggggaatcaattttttttgtatggcatgggatataactaatcctttgattctgaaatgtcattggtgtgtaagattmtctgagcattctcagtaataatgggtactactgtttgcagaaattaacagatggaagctgaagttctcattgcctgggagttatattttctttcatgaatagtttattatttt

SEQ ID NO: 171709 - DNA, 531 bp, Homo sapiens
atacacaataagcaacttatctcgttaattttccacacattcctagacatttgtgagtggataacctgggcttttattgtccaactgtcactttcactgcatcaatttaaaaatacagctgaagagcatgttttacttagagtttgtttttaaaactagccagttaaattgatcagttgttagatctgacttgattacatctaagatattctcacaggaaactggttatgataagaacttaaattctatcatctgcttatsgtaacttagcacaagaagcatttttttttaaaggcccctttcttatcttttattattcgaaaatgaaaaacatatttttctagtattactgagaaacaccaagggacccacccaactcccaggctactcactgttctttctcttaattgcttttgcatcatgtccaagtctgagcatttgcactgaacacacgcttgataaactctgctggctgaagatgcttgtctgctttgcattcctcagcctgtgaaggatttttttctgcttcac

SEQ ID NO: 171710 - DNA, 531 bp, Homo sapiens
atacacaataagcaacttatctcgttaattttccacacattcctagacatttgtgagtggataacctgggcttttattgtccaactgtcactttcactgcatcaatttaaaaatacagctgaagagcatgttttacttagagtttgtttttaaaactagccagttaaattgatcagttgttagatctgacttgattacatctaagatattctcacaggaaactggttatgataagaacttaaattctatcatctgcttatcgtaacttagcacaagaagcatttttttttaaaggcccctttcttatcttttattattcgaaaatgaaaaacatatttttctagtattactgagaaacaccaagggacccacccaactcccaggctactcactgttctttctcttaattgcttttgcatcatgtccaagtctgagcatttgcactgaacacaygcttgataaactctgctggctgaagatgcttgtctgctttgcattcctcagcctgtgaaggatttttttctgcttcac

SEQ ID NO: 171711 - DNA, 486 bp, Homo sapiens
atgagagattggacacctaggagatttcacatacacacacacacacacacacacacacacayacacacactttgaagagggagccagttttctcattgtcaaaaaagggaagtacaaatgtggaaagaaaactagaataaactcctgtgtcattggattagaactgaagataatagatgggtaaatagatacattaataaaacattttacttggcattttataagctcccagtaatttgtgttcccaaattcatgtaaacttttttgatcactgaatgtttaggttgtgagaagaatgtgcttagtaaagataatatggtttttagattcaggctcaagtaatatcttgggttcaaaatgtatctcaactattgggtgattttatataatcatggtgaaaactgtgggacagaaaataaacaaactgcaaaatacttttaagtttttctaagacagcagttctcaaccaagggtgatttttccagt

SEQ ID NO: 171712 - DNA, 395 bp, Homo sapiens
ggttgttacaactggaggttgctaatggtatccagtgggtgaaggtgagggatgctgctaaacatcttgcagtgcacgggacagcccctgcaacaaagaattattgttacaggctgaattgcatcccctcaaaattcatgtgttgaagcaaaaacttttgtacctcagaatatgactctatttggagatagagsctttcaagaaatgactaagttaaaatgaggtcatttgagagagggagtcctaatccaatctcactgatgtccttataagaagaggaaatttgcacacagagacaccagaaatgtgcttgcatagaggaaagataagtgaggacacacaatgagaaggtgactacctgcaaaccaagaagagaggcctcagaagaaaccaaa

SEQ ID NO: 171713 - DNA, 400 bp, Homo sapiens
tttttggttgttacaactggaggttgctaatggtatccagtgggtgaaggtgagggatgctgctaaacatcttgcagtgcacgggacagcccctgcaacaaagaattattgttacaggctgaattgcatcccctcaaaattcatgtgttgaagcaaaaacttttgtacctcagaatatgactctatttggagatagaggctttcaagaaatgactaagttaaaatgaggtcatttgagagagggagtcctaatccaatctcaytgatgtccttataagaagaggaaatttgcacacagagacaccagaaatgtgcttgcatagaggaaagataagtgaggacacacaatgagaaggtgactacctgcaaaccaagaagagaggcctcagaagaaaccaaa

SEQ ID NO: 171714 - DNA, 395 bp, Homo sapiens
ggttgttacaactggaggttgctaatggtatccagtgggtgaaggtgagggatgctgctaaacatcttgcagtgcacgggacagcccctgcaacaaagaattattgttacaggctgaattgcatcccctcaaaattcatgtgttgaagcaaaaacttttgtacctcagaatatgactctatttggagatagaggctttcaagaaatgactaagttaaaatgaggtcatttgagagagggagtcctaatccaatctcactgatgtccttataagaagaggaaatttgcacacagagacaccagaaatgtgcttgcakagaggaaagataagtgaggacacacaatgagaaggtgactacctgcaaaccaagaagagaggcctcagaagaaaccaaa

SEQ ID NO: 171715 - DNA, 400 bp, Homo sapiens
tttttggttgttacaactggaggttgctaatggtatccagtgggtgaaggtgagggatgctgctaaacatcttgcagtgcacgggacagcccctgcaacaaagaattattgttacaggctgaattgcatcccctcaaaattcatgtgttgaagcaaaaacttttgtacctcagaatatgactctatttggagatagaggctttcaagaaatgactaagttaaaatgaggtcatttgagagagggagtcctaatccaatctcactgatgtccttataagaagaggaaatttgcacacagagacaccagaaatgtgcttgcatagaggaaagatawgtgaggacacacaatgagaaggtgactacctgcaaaccaagaagagaggcctcagaagaaaccaaa

SEQ ID NO: 171716 - DNA, 537 bp, Homo sapiens
cttccttatctacaaatttcattcctcaaaattataaataaaattactttggaataactttagctcggaattggggataggtcattttcagttcttaatatggagcaaaacatgataggtatctaagaaagagaaagcagtcattgtgtcttaggatagataggagatgaagaaacaggaaaaagtgacacaaaagaggaaacaattgacataattaaagcaatagataataaaagcccaatcaaagtatggggagtaaaaatgaaaaaattctgatgcttattgaaagaaaatatcaatagaatttctggactttgttggggaatcaataaagatttgagtactcaaaaggaggaactttgcaggggcatctaatatttccaggttgggtaaagaaataatttaagtagttttcgttgaaatatttgtaacattacatatcatgtaacacttaatatagaacaagagacatgattatcaatgtcaattccatgtaaattataaagacrtagatgactctttcattcatagtacatc

SEQ ID NO: 171717 - DNA, 600 bp, Homo sapiens
cacactcgccagccgcagtcgcccctccggggcttcgaggattttaatttcgtggtacctgcgctcgaaatccagacttcgagcgctggagcctggggttttggggatttgtttttttgtttgtttttcgcttcggatcctgaactcgggcagaggtgactcagtagagtgcgctaggcaggttcccagtggtgggggcgcgagatgagctccgaagtcgcctccaccgctgccgggcgaagcagcttctggaccgcagaaccaacccggctcccaactggtgtcccccaacccgtcaagctcagcacagcctctttccctggggcgcctagctcaaagccgcctttctctttgcgctctttcaggtggacgcggtcaaacgatgccccgcagcctcctgggtctcagcacatattccacacctacgtcccctgacctgtgctcctagaagctggagagagcaggagccttcggtggggcagctcaaartgtaggtaactgcgggccaggagcagcgcccaacctgtagcgctgcgctacccaaccatcggtccctgcctttgagcgtcgacggctgatcttttggtttgagggagagac

SEQ ID NO: 171718 - DNA, 616 bp, Homo sapiens
gactcattgaagttgacttgtcctggcttcaaasaccgtaagtcagaagaaccaggatttgtcacctgcctgactcaaaacttactctttttctttacatcctatgacatcagtgggtgagagcaaataaccccagagcttcagatataaagagaagcaaatgaattattagattcttcattctttatttggatgttatttgtcaagaaggcaggctgtggaaagtattgtccaacaccaatgaaatataagttctaataaagactattagaagatacagtgatctagcatagtggttacaagccagagatgtggaagagattgcctgtgctgttatctggtctctgttaattattaaatgtatatattgagcaagttagttcaactttctatataccttaatctcctcatctataaaatggagataaatacagtaccaacatttttggctttgaatcaggattataagtttaaaaatttaactgactgtcagttctgctataacacttgttttgaaaatgggaatttggccccatataattcatatattagggaaaaattcgagcattcacttgaattttgcattgttgtgtgcataattttattcatgagaaat

SEQ ID NO: 171719 - DNA, 616 bp, Homo sapiens
gactcattgaagttgacttgtcctggcttcaaagaccgtaagtcagaagaaccaggatttgtcacctgcctgactcaaaacttactctttttctttacatcctatgacatcagtgggtgagagcaaataaccccagagcttcagatataaagagaagcaaatgaattattagattcttcattctttatttggatgttatttgtcaagaaggcaggcygtggaaagtattgtccaacaccaatgaaatataagttctaataaagactattagaagatacagtgatctagcatagtggttacaagccagagatgtggaagagattgcctgtgctgttatctggtctctgttaattattaaatgtatatattgagcaagttagttcaactttctatataccttaatctcctcatctataaaatggagataaatacagtaccaacatttttggctttgaatcaggattataagtttaaaaatttaactgactgtcagttctgctataacacttgttttgaaaatgggaatttggccccatataattcatatattagggaaaaattcgagcattcacttgaattttgcattgttgtgtgcataattttattcatgagaaat

SEQ ID NO: 171720 - DNA, 616 bp, Homo sapiens
gactcattgaagttgacttgtcctggcttcaaagaccgtaagtcagaagaaccaggatttgtcacctgcctgactcaaaacttactctttttctttacatcctatgacatcagtgggtgagagcaaataaccccagagcttcagatataaagagaagcaaatgaattattagattcttcattctttatttggatgttatttgtcaagaaggcaggctgtggaaagtattgtccaayaccaatgaaatataagttctaataaagactattagaagatacagtgatctagcatagtggttacaagccagagatgtggaagagattgcctgtgctgttatctggtctctgttaattattaaatgtatatattgagcaagttagttcaactttctatataccttaatctcctcatctataaaatggagataaatacagtaccaacatttttggctttgaatcaggattataagtttaaaaatttaactgactgtcagttctgctataacacttgttttgaaaatgggaatttggccccatataattcatatattagggaaaaattcgagcattcacttgaattttgcattgttgtgtgcataattttattcatgagaaat

SEQ ID NO: 171721 - DNA, 616 bp, Homo sapiens
gactcattgaagttgacttgtcctggcttcaaagaccgtaagtcagaagaaccaggatttgtcacctgcctgactcaaaacttactctttttctttacatcctatgacatcagtgggtgagagcaaataaccccagagcttcagatataaagagaagcaaatgaattattagattcttcattctttatttggatgttatttgtcaagaaggcaggctgtggaaagtattgtccaacaccaatgaaatataagttctaataaagactattagaagatacagtgatctagcatagtggttacaagccagagatgtggaagagattgcctgtgctgttatctggtctctgttaattattaaatgtatatattgagcaagttagttcaactttctatataccttaatctcctcatctataaaatggagataaatacagtaccaacatttttggctttgaatcaggattataagtttaaaaatttaactgactgtcagttctgctataacacttgttttgaaaatgggaatttggccccatataattcatatattagggaaraattcgagcattcacttgaattttgcattgttgtgtgcataattttattcatgagaaat

SEQ ID NO: 171722 - DNA, 436 bp, Homo sapiens
agaattcaatgacagtctggattaaacacttagtacgtggcttggcatggagaaaatgcttcataaatggtagttcctataatgacatttttattagtgttatttatattctgcatttgtcagaaaaagtgttctgcttttgtattagtctgagttctctacagaaactatatatatatatacacacatataactatatatacayatgtatatacacatatatatatacataactaaattgcattggtcatgcagttccttggaggctaagaactccaagatctgcaattcatgctggagggtcaggagagctggtgatatagttcagccccaggttcaacgacctgagaactaagacagtcaatagtataagctctagatctagtccaagtccaagtctgaaggcaaagaccggtgttccagctccaagacagtc

SEQ ID NO: 171723 - DNA, 436 bp, Homo sapiens
agaattcaatgacagtctggattaaacacttagtacgtggcttggcatggagaaaatgcttcataaatggtagttcctataatgacatttttattagtgttatttatattctgcatttgtcagaaaaagtgttctgcttttgtattagtctgagttctctacagaaactatatatatatatacacacatataactatatatacacrtgtatatacacatatatatatacataactaaattgcattggtcatgcagttccttggaggctaagaactccaagatctgcaattcatgctggagggtcaggagagctggtgatatagttcagccccaggttcaacgacctgagaactaagacagtcaatagtataagctctagatctagtccaagtccaagtctgaaggcaaagaccggtgttccagctccaagacagtc

SEQ ID NO: 171724 - DNA, 436 bp, Homo sapiens
agaattcaatgacagtctggattaaacacttagtacgtggcttggcatggagaaaatgcttcataaatggtagttcctataatgacatttttattagtgttatttatattctgcatttgtcagaaaaagtgttctgcttttgtattagtctgagttctctacagaaactatatatatatatacacacatataactatatatacacatgtatatacacatatatatatacataactaaattgcattggtcatgcagttccttggaggctaagaactccaagatctgcarttcatgctggagggtcaggagagctggtgatatagttcagccccaggttcaacgacctgagaactaagacagtcaatagtataagctctagatctagtccaagtccaagtctgaaggcaaagaccggtgttccagctccaagacagtc

SEQ ID NO: 171725 - DNA, 452 bp, Homo sapiens
gtatgccctttgttgtcagctaccaggctgggtagggaaggaccatcaggtgggggcaggkctaggtgtgtctgagctcagactttccttgggtgggtcttgctgtagctgctgtgggggatgggggtgggattcccaggtcactggagtcatgtacctgggagtattatagcttcttctgctgagtcatgcaggttgtcagggaagtgggggaaagccagtaatcacagctctcacccagctccccaacaaaccaaagggccagtttcactcccactgtgctcccaccaacaaccgcgagtctgttccaggcggtgggcgagatgggcttgaaatcttgccccaggctacccacctcccagctgtgaaagaaaagggctcggttcttcccctggctgtggcgtctacacaacagatttgtgccctcccctgagttctggccaggaggcttc

SEQ ID NO: 171726 - DNA, 453 bp, Homo sapiens
tgtatgccctttgttgtcagctaccaggctgggtagggaaggaccatcaggtgggggcagggctaggtgtgtctgagctcagactttccttgggtgggtcttgctgtagctgctgtgggggatgggggtgggattcccaggtcactggagtcatgtacctgggagtattatagcttcttctgctgagtcatgcaggttgtcagggaagtgggggaaagccagtaatcacagctctcacccagctccccaacaaaccaaagggccagtttcactcccactgtgctcccaccaacaaccgcgagtctgttccaggcggtgggygagatgggcttgaaatcttgccccaggctacccacctcccagctgtgaaagaaaagggctcggttcttcccctggctgtggcgtctacacaacagatttgtgccctcccctgagttctggccaggaggcttc

SEQ ID NO: 171727 - DNA, 465 bp, Homo sapiens
ttgttgtcagctaccaggctgggtagggaaggaccatcaggtgggggcagggctaggtgtgtctgagctcagactttccttgggtgggtcttgctgtagctgctgtgggggatgggggtgggattcccaggtcactggagtcatgtacctgggagtattatagcttcttctgctgagtcatgcaggttgtcagggaagtgggggaaagccagtaatcacagctctcacccagctccccaacaaaccaaagggccagtttcactcccactgtgctcccaccaacaaccgcgagtctgttccaggcggtgggcgagatgggcttgaaatcttgccccaggctacccacctcccagctgtgaaagaaaagggctcggttcttcccctggctgtggcgtctacacamcagatttgtgccctcccctgagttctggccaggaggcttcttgcccagttggaattgttaca

SEQ ID NO: 171728 - DNA, 570 bp, Homo sapiens
tatggtcaactgaggaaagagagaatgttaatttccatgtctggaaacatcagaaatggctgaataatcagcagatgtcctgatttgtgttttggtcttcctatctgtagatgaatgcaacttaaaaacacatcctaatatcaaataggaaaagctccccctttccacccatctcattttagtttttcacctataattattcttccaggtaaaatttagaattattttgtctagttytaagtaaactctttgttgaaatgctgttaatttataaatcagaatggataaaactgatatcttcacaacctaaagacttcgatcccagaatgtattacttctttcaagtcagttcatctttgtagctttctctattgtttattgtatacattgcttattaaatgtatcccttggtattttatagttttgttgctactgtgagtagaatatttacattctaattacaattaatgctggcatataagaaagctatagattttaatatatttaacctttacccagctaccttcctgctttcttattacatactactaataactttttccagctaat

SEQ ID NO: 171729 - DNA, 540 bp, Homo sapiens
ttgttcttctacttctttgctactgcttttttttacactaagtgaatattttgtgatgcaacattttagtttcttcaagtatccttttttttttagttatttctttagtaagtgtttgagtttaccatatacatcttaacttgaaataaactacttcagatttatacttaatcccattgaaatacagtgatgttgctccaaatttttgctgagtatatgtcacactttcctgctttttcatgtcttatatatttttaaatggtactttttttagtacatattgcagcaactctgaatgctgaaccctatcacacctttccccattctccagaatttttatttgtttaataatttgaatgaattattttagttaattatatttcccccacagtatgaagcctctgatgtccttactgagagggcacagcctccaggaaaaacacagttatcctgagataacagcagtttgactatttmtttccccattaggctgtctgtctctgttggtatcacagccagctgttagctccactaattgcc

SEQ ID NO: 171730 - DNA, 613 bp, Homo sapiens
acagtttctagtttgtgtgcacagaggtgttcaaaatagtctctgaggatcctttgtatttctgtaggatcagttgtactgtcatgcttgtcatttctgattgtgcttatttggatcttctgtcttttttgttaatctagctaacagtctgttgatcatttttatccttgcaaagaacaaatttttggttttgtggaatctttgtataaatctttgggtctcaatttcattcagttctgctcaattttagttcttttcttctgctagctttggagttagtttgttcttgtttttctagttcctcttggtgggtgttagatcgttaattttgagatctaactttttgaagtaggcattttatgctataaactttccccttaacactgcctttgctgcatcccrtagattttgatatgttgtgtctctgttttcacttattcaaatattttttgaaatttctgccttgaattctttgtttaccccagagtcattcaggagcaagttgtttaatttccatgtaattgtgtgggcttaaaagatcttcttggtattgatttctatttttattccactgtggttcaaaagtatgttttcaaattttttgaatttattg

SEQ ID NO: 171731 - DNA, 613 bp, Homo sapiens
acagtttctagtttgtgtgcacagaggtgttcaaaatagtctctgaggatcctttgtatttctgtaggatcagttgtactgtcatgcttgtcatttctgattgtgcttatttggatcttctgtcttttttgttaatctagctaacagtctgttgatcatttttatccttgcaaagaacaaatttttggttttgtggaatctttgtataaatctttgggtctcaatttcattcagttctgctcaattttagttcttttcttctgctagctttggagttagtttgttcttgtttttctagttcctcttggtgggtgttagatcgttaattttgagatctaactttttgaagtaggcattttatgctataaactttccccttaacactgcctttgctgcatcccatagattttgatatgttgtgtctctgttttcacttattcaaatattttttgaaatttctgccttgaattctttgtttaccccagagtcattcaggagcaagttgtttaatttccatgtaattgtgtgggcttaaaagatcttcttggtattgawttctatttttattccactgtggttcaaaagtatgttttcaaattttttgaatttattg

SEQ ID NO: 171732 - DNA, 493 bp, Homo sapiens
attgatttctatttttattccactgtggttcaaaagtatgttttcaaattttttgaatttattgagactttatggctgagcatgtggtcaatcctggagtatattctgtgtgcagatgagaagaatgtatattctgtagttgataggtggagtattccgtagatgtctattgggtttaattgatcaggtgtcgagtttaaatgcagaattcctttgttagttttctgccttgatgatctgtctaatgctttcagtggggtgctgaagttccccactattattgtgtgactgtctaagtcttttcacaggtatagaagtacttgttttatgaatctcaatgctccaatgttgggtgcatatatatttaggatagttatgtcttcttgttgatttgaaccctttatcactatgtaaggtycttctttatccttttttttaatgttgttgttttaaagtctcttttatctaagaatagtgaccccctgctctcttg

SEQ ID NO: 171733 - DNA, 424 bp, Homo sapiens
ctgggtgggaggcagagagggctcttctgcaccaagctatctgcacaggaggggtatggtgactcaggcaagctggtgctctgaatgccttgaaatctgtttgggcatgcagtaaagagagactcaccacacaaggtctctgcacaagagaggtagggctattcaggttggtagactatacaagtaggygctctgaatgcctggagacctgcctagacaagtgtcagagaggacccctgcaccccatactacaatctatgtccaggaagggtggggtggctcaggctgctggaccaggcaaatgggtgctccagatacctgcatttttgcctgcatgtgaagcagggagagacccactgcaccataatctattttgaggaagggtggagcagctcaagctgctgaactaggaaaatgggtgctc

SEQ ID NO: 171734 - DNA, 515 bp, Homo sapiens
gggaggcagagagggctcttctgcaccaagctatctgcacaggaggggtatggtgactcaggcaagctggtgctctgaatgccttgaaatctgtttgggcatgcagtaaagagagactcaccacacaaggtctctgcacaagagaggtagggctattcaggttggtagactatacaagtaggcgctctgaatgcctggagacctgcctagacaagtgtcagagaggacccctgcaccccatactacaatctatgtccaggaagggtkgggtggctcaggctgctggaccaggcaaatgggtgctccagatacctgcatttttgcctgcatgtgaagcagggagagacccactgcaccataatctattttgaggaagggtggagcagctcaagctgctgaactaggaaaatgggtgctccaaatgtctggagatctgcttggtcatggagcagagatagccttgctacaccacaatctatgtacttaaatggtggggtgactcaggctgttgaagc

SEQ ID NO: 171735 - DNA, 406 bp, Homo sapiens
aaaagagatgagatagtctgaaaaatactcaaagacatgctgccaacttaataaaagctaaaagtttcagcctaaacattcctctttaatgaagaccttggtgcagctgaaatgggatgattccattytaaaacatctaaagaaatttaccatagttagcagaacagatttgcttcttctcagtgaaattatctttcatctttctcaatgtttataaaagtaggatctttaaaagtctgcattataaagcaaaaaaaaaaaaaaacaactgtcccacagctaaaaaccaaaaataagtcatcaaaactgaaatggaaacacattcccctcgataattacattttagtaaataaagatataactagctgttggtgatgatttctggtgatgaaaatgacccagaatt

SEQ ID NO: 171736 - DNA, 578 bp, Homo sapiens
tctagtttttccatgtttgcaagggcttttagtcatgttgtatccaaaatgccttcaaaatagttatagtattagaaaaatacaaaagtacttcaaaatgtgtggaaacagtacatgtaaacaacagatcaaaatatcttaaaagagtttacctcttcatctttctcacttagtgtacacaggcaacatagaacatttggttatgtggtatgcaattcaaatttgttccatgtgatattctctgattagaaactactgtgttgagtgtgtctttcttaactaattttattagttatactaataattatttttattaataaattaaaaataaaaatagttatactaataaaataaaattagaaatactaattttattgtgtattttgtaaatttttgattaataagttcttatgccatgaaaagaagttgtcttaaaactggcatcattttccaagtcattatggcaaacaactaaccaaataggtatggggggaaagtcagtagagcagcagaagcaatatrtcattccagtctgcttcttaatggcattctcccctctcctatgcacagggcagaga

SEQ ID NO: 171737 - DNA, 441 bp, Homo sapiens
tacataaacctttggaaaaaacttctgtgggccagggttctaggtatgatactccctctctgatctgtccaccaaataatatttagataaatacagctctactttcaaatagtacgccacctgttgtggatcaaatgtttgtgtacccccaaatttatatggcaaaatcctaacgcccaaggtgatggcatcaggaggtagggactcttggcaggaaagtgacgaagccatgaagatagagccctcatgattggaattagtgctcttataaaagagaccccagagagctccttcacctttcygccaagtgtggacacagttagaagacagccatctatgaaagaggaaataggccttcactggacatggagtctgcctgtgccttgatcttggactttctagcctccataactgtgagaaataaatgtttgttgttgaagc

SEQ ID NO: 171738 - DNA, 626 bp, Homo sapiens
agtgtgcaaggaagttcactgtggtattgtttgcaagttgaaagaaaccaaaaaaaaaagaaaagaacagcagcaacagggttaaaataaacctacgttgtctccaataggggacaggtttaataaatttcagtacattcacccaatggcatatttcctagcattaaaaataataaagaaaatcacactccggtagtacaaacagcccataaaacattggtaaataaaaatgtttccaggcaattttgtataatattaatccatttgtgtaaaaaaattctggaatattgtaaatatatagaaagtatatggagacaaaaaatgttattcaaattaccagtaaatctaaatctagggaaattggggaggagacacttttactttttacttcatataattttctatctttatttttcccaacagctgtttattacgttttattaaagtattttttaaaaatctcagtgaagagctgtgaaatgccaaattaaacaaattatgttgcctatatattgcttggcagcactgaccctccccagcatctagcacaatgactggcgsatagcaaatattcaagcaatattctctgattagatgataaatgaataaatgaaggattgaaacct

SEQ ID NO: 171739 - DNA, 585 bp, Homo sapiens
agcagtgcaaatgtaacagcaagtgctgaaaccaaccaggttgaaattccacagcttcttcatctcaccaatgacaatttgattttacttcaaagtggccatggctcttgcggtaacatactacttcgaaggctggttttgtgtaccatgatctccaactgcttcaaatgagcacctattgctgtcaccccacccagatgtaccttagtgtgctggaaacctgtgctcatttcttagatatggaggtgtttgtggactgaatcattctgactagttactctccatctggtgctttgtctatttcgtttcctcttttggttcagtctggaacaaggccaagaaaccaaagttcttctctggaaaggactttctctgccatggcagggaggaatgggtatgtcttcatatagtgcctgggggcagcaggatatcctggcagggtgtgtggctgtcccttccagggaaatagctatgggtttgttctctacacccagagttggagaatggctaatcacacaaaaatttgaaatagttactaaagaragagacattactttgggtggctcataagaagttgccgttatt

SEQ ID NO: 171740 - DNA, 436 bp, Homo sapiens
gcctgttggtgtctctgattttcacggaaggcctagtccctctctaaatggcttctgcttaattaagtgaggcacccaaggataatctctcttttggtgaactcaaaatcaactgatttggggctttatttacatctcctcttactggagaattcaaacggtagtttgattgagtcactggtagaatgtgcatgtcttcatcactgcctccctcctgcaccctaactctcaaaagagaatgtttcttgtagcctaactctaactagaaacacactagaaaggaaagtcggggaaatgtggttcagcctagccaagctgacacatcccaaagccatcayacattccagtggtgatgacatatatgttatgagaaaaatagactgaaaatgagtaaaagatacacatggccgggcgcagtggctcatgcctgtaatct

SEQ ID NO: 171741 - DNA, 436 bp, Homo sapiens
gcctgttggtgtctctgattttcacggaaggcctagtccctctctaaatggcttctgcttaattaagtgaggcacccaaggataatctctcttttggtgaactcaaaatcaactgatttggggctttatttacatctcctcttactggagaattcaaacggtagtttgattgagtcactggtagaatgtgcatgtcttcatcactgcctccctcctgcaccctaactctcaaaagagaatgtttcttgtagcctaactctaactagaaacacactagaaaggaaagtcggggaaatgtggttcagcctagccaagctgacacatcccaaagccatcacacattccartggtgatgacatatatgttatgagaaaaatagactgaaaatgagtaaaagatacacatggccgggcgcagtggctcatgcctgtaatct

SEQ ID NO: 171742 - DNA, 436 bp, Homo sapiens
gcctgttggtgtctctgattttcacggaaggcctagtccctctctaaatggcttctgcttaattaagtgaggcacccaaggataatctctcttttggtgaactcaaaatcaactgatttggggctttatttacatctcctcttactggagaattcaaacggtagtttgattgagtcactggtagaatgtgcatgtcttcatcactgcctccctcctgcaccctaactctcaaaagagaatgtttcttgtagcctaactctaactagaaacacactagaaaggaaagtcggggaaatgtggttcagcctagccaagctgacacatcccaaagccatcacacattccagtggtgatgacatatatgttatgagaaaaatagactgaaaatgagtaaaagatacacatggccgrgcgcagtggctcatgcctgtaatct

SEQ ID NO: 171743 - DNA, 436 bp, Homo sapiens
gcctgttggtgtctctgattttcacggaaggcctagtccctctctaaatggcttctgcttaattaagtgaggcacccaaggataatctctcttttggtgaactcaaaatcaactgatttggggctttatttacatctcctcttactggagaattcaaacggtagtttgattgagtcactggtagaatgtgcatgtcttcatcactgcctccctcctgcaccctaactctcaaaagagaatgtttcttgtagcctaactctaactagaaacacactagaaaggaaagtcggggaaatgtggttcagcctagccaagctgacacatcccaaagccatcacacattccagtggtgatgacatatatgttatgagaaaaatagactgaaaatgagtaaaagatacacatggccgggcgcrgtggctcatgcctgtaatct

SEQ ID NO: 171744 - DNA, 476 bp, Homo sapiens
attttggcagaaaaacttactctattgttgggaagtcacagacatgctacagacactgagaaaggctgtgaggggatgcagagtttcacaaagcacagtgatcaaaggccgtagcggtggggatcgtgctaccgacagagaaactacgaaatccaaatgcagggagagtggcgcttttaggaagtaagtmtatatcagtcactcaaacttgaccccagattaaacaacctggctgagttccatgagcagctgacaacactgggagtaaggggtgtcacatgaaaaggacttaaaacaagcagctagaagaaaggaagggtagaaactgctccagggctctcaggaatggagggcaatactgggaacaggtggacagatgcacaaaaaacagccccaaagaggtttcctgttcagcagtcatttgacaaggggaagatccaggaggcagctgaagggagcaaggattggtcccaaag

SEQ ID NO: 171745 - DNA, 539 bp, Homo sapiens
tgttcattctaaataagcacaaaattattgttctgttcattgaagctgcttaaggtagattttctagtttctcttacttttttggagagtaatgaagctaagaaagaaacaataattatgtaccacatagtatatgaacgtgtgtgtattttaaccatttgaaagcaacttcaaaagccactagcatttcaaaaattgaaatagggagggaagaataaaaataaaagggcttcgggaatgtgaaagttgtagacaccccacctgaaataygcacatttaaaaaactagcttgtaacaataattaagcagtatccaagtacaaaggccttttaaaaattccttgaaaaaattaataaaatgcataatttatttttaaaaatatattaataaaagtcataaatatgctaacaattactatcaaaaaaaccatgcctaaaattaaaagaaaaactaaaataggtgtcacttagatccaaatttgggaatacttgtagctacaatgtgtcagaaagaagaaatggccacaagaaatgctagat

SEQ ID NO: 171746 - DNA, 539 bp, Homo sapiens
tgttcattctaaataagcacaaaattattgttctgttcattgaagctgcttaaggtagattttctagtttctcttacttttttggagagtaatgaagctaagaaagaaacaataattatgtaccacatagtatatgaacgtgtgtgtattttaaccatttgaaagcaacttcaaaagccactagcatttcaaaaattgaaatagggagggaagaataaaaataaaagggcttcgggaatgtgaaagttgtagacaccccacctgaaatatgcacatttaaaaaactagcttgtaacaataattaagcagtatccaagtacaaaggccttttaaaaattccttgaaaaaattaataaaatgcataatttatttttaaaaatatattaataaaagtcataaatatgctaacaattactatcaaaaaaamcatgcctaaaattaaaagaaaaactaaaataggtgtcacttagatccaaatttgggaatacttgtagctacaatgtgtcagaaagaagaaatggccacaagaaatgctagat

SEQ ID NO: 171747 - DNA, 440 bp, Homo sapiens
acagagttttaaatgtattcttgtggaccgatggtaaaatttctgaactgatactcttaacacctttattaaaacaaatctaatctctctgctcactccttccattcaacaatacaatgaaatgttttcatattctctgatctttggctaacttaattatttcatttacttggtataagtgatgtttgctacatgcaaytcagttttcactcacagttttactagtagtactaatacacatttaacaaaattgatggactttcctgtggtgctttaactagcagcatattgaatgatattatctgagaaacaatcatttcctttctctacttcatcctttatcgctcctttcattactagttcagtcattcaacataaatttatcaagcatttactataacctggttactcttctgagcactatggattaagcagtgaat

SEQ ID NO: 171748 - DNA, 573 bp, Homo sapiens
ttaacaaaaacaaaaagcattacatgtaatatatagtgtaagaatctaattggcaaaacttcacaattgccatggatatgatgccaatggaatttcaaacttcttcacagtcatcatgatccaaagtttacaggaktcttaagaaaaataaatcaggacaatatcccaaatttcttttcaaatacaaatactctaatggcaaatatcatgcaaacattatgcaattatttcacagttcacagttttgttcttcttaaaaaatgtatttcacaattttactaaaaattacccacatggtaattacataaataaggaacttgatgtatcagttatattaaaagactccccatacctagtcatatttaaatgacaagtctggaataataaataatgattaacacaagcattaaccaaatacaaaaagctatcttaacattttcctttaaaacttaagtaatgtcttaggtaaatccatccgttatttcgaacaacattgcatcaaacacatcacaacaaagttaaattaataatgtcaaaactggcatgtattatgaaaaaaaaaacgagaagaaa

SEQ ID NO: 171749 - DNA, 573 bp, Homo sapiens
ttaacaaaaacaaaaagcattacatgtaatatatagtgtaagaatctaattggcaaaacttcacaattgccatggatatgatgccaatggaatttcaaacttcttcacagtcatcatgatccaaagtttacaggagtcttaagaaaaataaatcaggacaatatcccaaatttcttttcaaatacaaatactctaatggcaaatatcatgcaaacattatgcaattatttcacagttcacagttttgttcttcttaaaaaatgtatttcacaattttactaaaaattacccacatggtaattacataaataaggaacttgatgtatcagttatattaaaagactccccatacctagtcatatttaaatgacaagtctggaataataaataatgattaacacaagcattaaccaaayacaaaaagctatcttaacattttcctttaaaacttaagtaatgtcttaggtaaatccatccgttatttcgaacaacattgcatcaaacacatcacaacaaagttaaattaataatgtcaaaactggcatgtattatgaaaaaaaaaacgagaagaaa

SEQ ID NO: 171750 - DNA, 573 bp, Homo sapiens
ttaacaaaaacaaaaagcattacatgtaatatatagtgtaagaatctaattggcaaaacttcacaattgccatggatatgatgccaatggaatttcaaacttcttcacagtcatcatgatccaaagtttacaggagtcttaagaaaaataaatcaggacaatatcccaaatttcttttcaaatacaaatactctaatggcaaatatcatgcaaacattatgcaattatttcacagttcacagttttgttcttcttaaaaaatgtatttcacaattttactaaaaattacccacatggtaattacataaataaggaacttgatgtatcagttatattaaaagactccccatacctagtcatatttaaatgacaagtctggaataataaataatgattaacacaagcattaaccaaatacaaaaagctatcttaacattttcctttaaaacttaagtaatgtcttaggtaaatccatccgttatttcgaacaacattgcatcaaamacatcacaacaaagttaaattaataatgtcaaaactggcatgtattatgaaaaaaaaaacgagaagaaa

SEQ ID NO: 171751 - DNA, 591 bp, Homo sapiens
tgaatatttactatgtgccagacagtgttgtaagcactgtgaattgattagctcatttaaattttacaacaagcctatgaagtcaatactattacccgtaatttacagataagagctaatgtagtgacccaaatcactagggtagtaagtggtagaacctaagtattttcaatctggacctttaaaataattttcctgacagcaatttagacagtattttggtataatttgtataatacttagtagtgagaaattctgtgtggggaatttggacttggtacttgcagcttttcagtgtgaggtgatgagatcttaaaagcaattagaagaaaaggrgttagtttgagagaaattgctaaagaaacagcagtaggacttgaatgatgtcatatggaggaaagttataagacatgtataaaatagctctctagcctgatttgggagaatcagcacatcatgaacagaaatagcgaagtcaggagggcaagccaaataggtgaacattcagtttggtttaggtatattaaggatgaagagagagtaagacaagttattctcaatagagaacagagccgttcaggttatagttta

SEQ ID NO: 171752 - DNA, 655 bp, Homo sapiens
tttcttcctccaaaacctagaatgtaagagccttttacagaaatttctgatgctacactagaggaaaaattggttgactggctgcaggtaggtagaacattgtaattcttgtggtagttctcttttataaatcagatcttaaattagactttgacagcaagatgctccatctattcagaagtgaacgagagcataggagcatggtyttcagagtcaaaatgatcagaacaggaattttcctttggctctttgcttatatgtgtcaagtcttctaggtctgctttctcgtttatagaataggggtaataggatttacctactgtgattgttgtgagtattagagatgatatattctcaaacacaaatcatagagcttggagctttttctgctaataaatggcaggtgactgggtagttccattaactaccatccaggagatggtaatccaaagggttgccaatcgtatctttttcctcattaccttaattgccagcagaaaaatgactcattcaaacatttaagaaatgtttattatgtatactttttaggaatgatttattatttagcattagagaaaataaagctttatagaaacataccattcatattttgaataaaaatttagaacataatacctgacagtataaaaatgga

SEQ ID NO: 171753 - DNA, 359 bp, Homo sapiens
ttggtaacctgaaatgttctacattataagcaaattttatcaggttccgkttgcttattgcccataggcataacctacaagaaactggcaggacataacaaaaattaaagataaaccattttacatttatgggttgaaaaccattaaacacataaatgacagtaatagcactttaattgacttgtagtataagggaataaaatcttaagaggtttggaatattcagtggtctagtattagtcaggcagaaaggaatgagaactacctcaaattagatattacatgattctttgaactagttacatttttagatgttttactgtaaatagaagtggtcgttttactttaaataaaatgcg

SEQ ID NO: 171754 - DNA, 578 bp, Homo sapiens
actcaccaatgcctgcgtgttcttctcttcctaggtacataggagaactgtaattccagtttcctccacaattaggtgtgtccagattccagccaaggtgtgtggctggaagtgataaatgctacttctcagcttggcccataaattcctccaacagcatcctccatgccacayaatgggagaagagagaaggcaggtgtttgattctactttccctcccgaccacactatggtgttcacagtaccggtatctgctcccctccgactgctcttccacatacctagctctaataccatttccctgttttgccccttgaggtctagggacaataacagcacccagcttttcatgagttctgggtgactcgccattccatgttagttccttatcaccgcccacacttctgtaaacggtcccttcatgaaactcctctcagttaaacattttaaagaatgtcactgctccctgtcagaaccttgacagctatgtctggctttctcattaaaatttaaataaagattatgatacttaagtattaaagagaactaatgaaaatgacagaactttggaaccgaaa

SEQ ID NO: 171755 - DNA, 436 bp, Homo sapiens
caaataatagtcatcagtttccttatttttttcctttttttaagatgaagcatttcttaaatgtaacayatagaacaactaacagtgactggtataatgttttaataattcctaagtttcatttttgttaaaacatgaatgaaaaaaatcatattatttagattaaaatgttatttaaaaaaatcaccaccctaaccagtggttttccctcatgtgagatatttaacattattgaattggcaacagacattcatttcaagctcaagacatttttcttgccatctttctcacaaaatgaaatgtgtacctacagttgctatggtactggtataagccttaccgtggcatagtaatattgtttaaataaatcattttattaaaaagtgtttgctgaaactttaaaatatatttccaaaggcaataattttctaaaaaa

SEQ ID NO: 171756 - DNA, 653 bp, Homo sapiens
aattggcaacagacattcatttcaagctcaagacatttttcttgccatctttctcacaaaatgaaatgtgtacctacagttgctatggtactggtataagccttaccgtggcatagtaatattgtttaaataaatcattttattaaaaagtgtttgctgaaactttaaaatatatttccaaaggcaataattttctaaaaaaaagttgcttccttctccaattatttttgtatttttttcactcaattgtttacaaattcactgagatggttacttatgactttttaaagaactatatctaataatgccaatgcaaaatttcaaaatatatgcagaaaatyagttaagagcttttctacttcaaataggaataaaccaaaatactttaaaataccactaatatttgaaacttcacaattttgataaaggttacttgttactgcctaaaaaaatggtgacaattatataatactaattacacaaaaaagtgtcaaagtggacaaatgaaagatgagtttcatagtatttttcaaacaaaattcagtagacatgaaggtctaaattccattttatatccacacatcaaagtatactaagatattagtatctaaaagatatgtttattgtggataaattgctcaatagcaaaaaca

SEQ ID NO: 171757 - DNA, 599 bp, Homo sapiens
caagaggagaaaccaaatatacaaaaacagcataccaatgattccacacatcactacccccaaaayaggaataaatgggagcaatagaaagaggaggaggaggaggagagcagggaaggaaggaaggaaggaaggaaggcaggcaggcaggcaggcaaaaagaagagaagagaagagaagagaagagaagagaagagaagagaagagaaatttgcaacagataagaatatccttaacactaacctacagtttctattattttcactgttgaaacagactgcagacaagtaaaaggatagcataccctttcatgaaatcatctacaggcctttgggaatgtcaaagcctaatgctggccagagaagttggccaggtatctaaaacaggagaagatcaagtctggcccaatcctggctgaatcttagattcctgaaggtcaaataacattcagcacaaactgactgcctggataaagtgcacctgagctactcagaacaaatgtcaggggaaaaaaaagttgataatgagaaaagaatgacacaaatttctcaataatgtctgaggtcatttcttactagaagattccaaaatggaagcaa

SEQ ID NO: 171758 - DNA, 599 bp, Homo sapiens
caagaggagaaaccaaatatacaaaaacagcataccaatgattccacacatcactacccccaaaacaggaataaatgggagcaatagaaagaggaggaggaggaggagagcagggaaggaaggaaggaaggaaggaaggcaggcaggcaggcaggcaaaaagaagagaagagaagagaagagaagagaagagaagagaagagaagagaaatttgcaacagataagaatatccttaacactaacctacagtttctattattttcactgttgaaacagactgcagacaagtaaaaggatagcataccctttcatgaaatcatctacaggcctttgggartgtcaaagcctaatgctggccagagaagttggccaggtatctaaaacaggagaagatcaagtctggcccaatcctggctgaatcttagattcctgaaggtcaaataacattcagcacaaactgactgcctggataaagtgcacctgagctactcagaacaaatgtcaggggaaaaaaaagttgataatgagaaaagaatgacacaaatttctcaataatgtctgaggtcatttcttactagaagattccaaaatggaagcaa

SEQ ID NO: 171759 - DNA, 405 bp, Homo sapiens
tactatactagaaacctgattgcttaaacaaatgtactcccaaacatatgtggccacaggccattgctttattatattatatattttttccatttattaacattctaaaaaacatagagaaattctgatttatcagtcctctgagtagcatctgcatttmttagaggttcctgactaatctttgataatatttcagacactatggctggtagtagtagaaacagctgtagtcagagaaccaatcctgaggcatctcaaatcattcattcccaacagtgacatagtcggcttgctgttaaaaataacagctaatatttattaagagtttactgtgtaacattcattattccaagtattttacatatattaagacatgcaaactacccaacaatccagcaagtcagt

SEQ ID NO: 171760 - DNA, 538 bp, Homo sapiens
tatgctttctgagatagcagccaaatctatagcctaattaatactgagatataggccgggcacagtggctcacacctgtaatcccaacactttgggaggctgaggcaggtggatcacttgaggtcaggagtttgagaccaggctggccaacatggcgaaaccccatgtctactaaaaatataaaaattagccagatgtgagggtgcacwcctgtaatctcagctactaaggaggctgaggcaggagaattgtttgaacccaggaggcggaagttgcaatgggcggagatcacacccctgcactccagcctgggtaaggaagcaagactccatctcaaagaaataaacaaacacacacaaacctgagggataaactaagaccctaacattcatttaatttgtttttggaatataaggtttttgttggaatgtagaattaggtgtcttcttaaagttcagattatctttgcatcttttttggagtttattttgctttgtaatatggattatttcttgtcttatgtgagcaaataaacata

SEQ ID NO: 171761 - DNA, 528 bp, Homo sapiens
tcccaggaaaatctctcagctctgatccatgacagcagtcaggtagtgaaacacacttctctttgcggtccacatttagagttgcatctttttccatacttgcctgcaagctgtcagctactagtccatgatgacatgctgtgttacgatcatcagaattaaaaggctgtcccatccagtgggtcacatgttcttcccagcttctctttctgatagctacagacatgtcatcrtagtttaacaacagacagagagatatattccatatgagggtaaaggagatggaacttgatgaaagattatttcaaaatcaccaatcaaagaagcgaatgagttctgtcatttcaccacctattaaaaaattcaaaaaaatatgtagtcgcagatacgtttctaaagtcaaaatatatcttagaaaagagaaaacttaatctatgctatcaaagttaagagattttataaagcttctgtttagtagctttaataatgtcatttctttaagaagcctaatactagaaggaaatttaa

SEQ ID NO: 171762 - DNA, 448 bp, Homo sapiens
aaaccctgttctggcttgtgccagatcatagtacaagctacttcctcaggctttctttcagttacctgtaaaaccagcatccagccagctctggagcaataatgagattggctccattatctccccatctaggaccaggactgcctgtctcatcctatcccccgatccctcatcttcaaaacaccaaagtgggaaatagaaccccccaccttctttgcatctatccacagcacttctgactgcctcaagaagtccaaggagaggtttcacatgaaaaaaaartataaatcataaatttaatcttccctggttcaaaaggaaggctaagtgtgagcttcatgctttataaaatgtaagcacggctgggtgtggtggctcatgcttgtaattccaacactttgggaggctgaggcaagagcattgattgaggccagaagttcaagaccag

SEQ ID NO: 171763 - DNA, 418 bp, Homo sapiens
atatacatgaattctttaactgctcttctagttcttaaatcttaaagaaacttctctataggatactgaataatgtagtagatatcctcgaggatagctgcttctatacagtatttcttagagacacagaaagcaagktccagggaagttgaacactgacaggtcccaaatattgagaaacgtgcctggtactgcataggcttcaacaaatattgagtgagtgagtgaataaagtctacagttttgactgaagccataacactaaagctcacctgaatgaaaacaattatttcaaggtgtgaaaaaagtatgacctgtggtatctagaagaataaataaaaggactccttgtcctgcttaacattccattaggaaagattttgccaaagtacaagagcacacagttcaaggtgatata

SEQ ID NO: 171764 - DNA, 554 bp, Homo sapiens
gatttgggaaatatggtgacccttcagggagagctaagtccaagtgttttcttgttaagaagggatcgaagggagcaggggaggacctgggcacactgcagactctgaggcagcctttgggacctggggctggtcatggaagaggtcagaatgggatgcctccttggtgtggtctgtaatcaaccgagggtcagtctacaagggttagaaggaggcttctccgasagttctcccttgtcactggtgactcattattgggggactggagtctttagtttataaaactttgagaaagtagcttttctgggatagaatagaaggaaatggtttatctcttgtaaaacattgaatttgttatgaaaaagccttggttcaattcctggctttggcaatgatcatggtgttgcatcactgggtccggcacatcatcaggctgacctcactctttgtaacacaaaattcaaagatggggccattcatctttaggctcctgttcagctttaaacgcaggcattttcaccctgagatgttgagaaaagtgcttcctcattcag

SEQ ID NO: 171765 - DNA, 543 bp, Homo sapiens
aatgtgaatagtgctgagatggagacattagcttagccctctggtgatcgctgattctgaagtagaaatcttaacttaggtatgaatccacaacttgcatttccaatggactattctgccacgattttctatttattcktcacggtgtgattatttcaagccaactccagtaccatgaagaagcggactccttcatactagacacacccacttgtgttaattatttaaagtcatggtgaaaataaatgactttaaaaaccgacactctcattacttctgaagtcagccatcccaaaaaaatgatctttgaaagacaatcatctgcataataattactaaattacaatagttacatagagactaaactaagcaatggtagaaaaggcacatgaagatgtttgggaaaaagattaaatgtcccctgatatttgagctgtacattttttcagaaaataattagacatgggatattttgcttagtatttctcccagatatagggtgagaagctgttaagtttctatagtcccaggtcaacatagttt

SEQ ID NO: 171766 - DNA, 543 bp, Homo sapiens
aatgtgaatagtgctgagatggagacattagcttagccctctggtgatcgctgattctgaagtagaaatcttaacttaggtatgaatccacaacttgcatttccaatggactattctgccacgattttctatttattcgtcacggtgtgattatttcaagccaactccagtaccatgaagaagcggactccttcatactagacacacccacttgtgttaattatttaaagtcatggtgaaaataaatgactttaaaaacmgacactctcattacttctgaagtcagccatcccaaaaaaatgatctttgaaagacaatcatctgcataataattactaaattacaatagttacatagagactaaactaagcaatggtagaaaaggcacatgaagatgtttgggaaaaagattaaatgtcccctgatatttgagctgtacattttttcagaaaataattagacatgggatattttgcttagtatttctcccagatatagggtgagaagctgttaagtttctatagtcccaggtcaacatagttt

SEQ ID NO: 171767 - DNA, 543 bp, Homo sapiens
aatgtgaatagtgctgagatggagacattagcttagccctctggtgatcgctgattctgaagtagaaatcttaacttaggtatgaatccacaacttgcatttccaatggactattctgccacgattttctatttattcgtcacggtgtgattatttcaagccaactccagtaccatgaagaagcggactccttcatactagacacacccacttgtgttaattatttaaagtcatggtgaaaataaatgactttaaaaaccgacactctcattacttctgaagtcagccatcccaaaaaaatgatctttgaaasacaatcatctgcataataattactaaattacaatagttacatagagactaaactaagcaatggtagaaaaggcacatgaagatgtttgggaaaaagattaaatgtcccctgatatttgagctgtacattttttcagaaaataattagacatgggatattttgcttagtatttctcccagatatagggtgagaagctgttaagtttctatagtcccaggtcaacatagttt

SEQ ID NO: 171768 - DNA, 652 bp, Homo sapiens
aactcatcctttattccatggtgtgtatgtgccacattttctttatccagtctatcattgatgggcatttgggttggttccaagtgtttgctatgtttattatatacgtatttcaatgatcacactgagtttgatagaaatggacactcatctttaagatatggaacttgattcatatactctacccacatgtgtgtgcgtggtcccacaacacacaagctcacggcaaccttcttaggaaaagtttccatatatccgtgtatatgattttaatggtaagggagaacatgtgtaccattcggatatatttaagatctatatgcttctgagatataaaatttttcaggcaatttatgaaattaaatacaatataacatgtaataatttctacataactaatgttagcatttatcgggtgcctgtggcgtgtccagcatggtgcttggtatataagttttcatctagttttgacaacaatcctgcctggcgggcggccacccacctccacctgctcttcagaaaagaatacagcttaggaacttgccccagggccacagagttggtaaatacttagggccagggatcaaaactgtacatgtctgaccccaasgttagtatttacttcaacacataatgcagtatggacaaacga

SEQ ID NO: 171769 - DNA, 544 bp, Homo sapiens
gtctggggtataagcatttcactctgaagtccactatttgtgtaaccttgtaaaatcacttgacttttgaacctcaattcttttgtcactaaaatatggagaaaaacatttgcagttgatgctacaggctttgtgctaagatccactgaaatatatggcgctatttatattgtgtatgagttgtttccatgtggaaaaagaacaaaaatcagtggctagacatgaaaattcagcagagagcagaactttcaacaaacttattgatgatgatacagtcatcctttattggaataacattatatattgggaatacaagaastttaatgccatgagaagttatactgggcaaatcacataccttaattttataatatgtcaaaatattattgttccggaagtgttttgagaaacaaatgagcttacacaatgaatttaatgcaattattgacacctgtgaagtgcttgagaaatagtataaattctacaaaaagtgctgggacaactggatatccacatgcaaaaatgcatttggatccctacctca

SEQ ID NO: 171770 - DNA, 544 bp, Homo sapiens
gtctggggtataagcatttcactctgaagtccactatttgtgtaaccttgtaaaatcacttgacttttgaacctcaattcttttgtcactaaaatatggagaaaaacatttgcagttgatgctacaggctttgtgctaagatccactgaaatatatggcgctatttatattgtgtatgagttgtttccatgtggaaaaagaacaaaaatcagtggctagacatgaaaattcagcagagagcagaactttcaacaaacttattgatgatgatacagtcatcctttattggaataacattatatattgggaatacaagaagtttaatgccatgagaagttatactgggmaaatcacataccttaattttataatatgtcaaaatattattgttccggaagtgttttgagaaacaaatgagcttacacaatgaatttaatgcaattattgacacctgtgaagtgcttgagaaatagtataaattctacaaaaagtgctgggacaactggatatccacatgcaaaaatgcatttggatccctacctca

SEQ ID NO: 171771 - DNA, 562 bp, Homo sapiens
  misc_feature (1)...(562): n = A,T,C or G
nnnnnnnnnnnnnnnnnnnnnnnnnnnnnnngctctcaccccaaaagaactttccygtttgcaaaagtaaactacttacaaggagacaatgtgatcatcctgaaggcttcaagtccttccattcccccaaaatcatgtctccaacaggtaggcagagaatgaggcttccagtttgattccccatatggttaaattcgagatgagaaaataccttgagcacatggagccccttggatgcatcatccctgactcagccattccttcatgtagataaatgaacacactgatgcattctcctcatgctcccaaaaaaatttaaggagcgattttttttttttttttgccctgtgtctgatcaccactgagctgggatagagcaaacctctaggttagcagagcaaagactgctgtctaagaaggctctcaagagatccattatcccttaattgactgatgctgatttggccccaggttagtggtagggatcacagcgaggagaggaaagtgctaccgccaatgaacagctttgcacacactatatggtttcagtgcctacatgtgc

SEQ ID NO: 171772 - DNA, 570 bp, Homo sapiens
tcatttataagatgttagaagcaagttaccatcgagtgtttattgaaggaagagttggcatcgccctgagggtgagtgtgggctgtgtgcatggaggagccacgtgctaccaagaagtgagaggcccagggtgyggggagccaggagctaggaagcctatggtgccccaggaacctggaagagtaggtaggtccaggctgcggaagagctatgttgaagagcttcttccttattcctgagggctttgggaagtagagcaattaaagagggatatgtcatgtttgtgtctaaacattaacaagatttctctgtacaccattcttggagccgaggaaatggaaggcagacaattgggttagaagctctgcagttttccccaggagacctgagtacttaggctgggctggtgggcattggggtgaagaaaattagaaggacggaagaagtgatgtttgggaggtgagaatgagcaggcctcattgaaagactgggtgtgaggcgtgtagtttgtgaatcaaatagaggtgaggctgcttagcaaaacaggacacagaggagcacctggtttgg

SEQ ID NO: 171773 - DNA, 553 bp, Homo sapiens
tgtagctaacttttaagaaatagccatttgttaagtttaatgttgtgtgaaagaaaaatgtccactattatctaagagggatattaaaataygcctctctttttcaactttctatctgtgtaaacacagattttgttcattgacttcaaccagaataacagagcacagcacattaaatacgaaagcagatatgagaaaccagcctctttcaccatgccagacgttaaaaagttttgcaaaaatagaaaacaatgctacctcttttactacttttttttttttattattatactttaagttttagggtacatgtgcacattgtgcaggttagttacatatgtatacatgtgccatgctggtgtgccgcacccactaactcgtcatctagcattaggtatatctcccaatgctatcccgggtttttgtttggtcaaatatacttattttcataaatatatatgttaatttctaaaggagtattgtcacttttaaatgaagtgataaacatttaaaattttctctcaatgtaattctgaatatattaagtattggt

SEQ ID NO: 171774 - DNA, 570 bp, Homo sapiens
tcatttataagatgttagaagcaagttaccatcgagtgtttattgaaggaagagttggcatcgccctgagggtgagtgtgggctgtgtgcatggaggagccacgtgctaccaagaagtgagaggcccagggtgcggggagccaggagctaggaagcctatggtgccccaggaacctggaagagtaggtaggtccaggctgcggaagagctatgttgaagagcttcttccttattcctgagggctttgggaagtagagcaattaaagagggatatgtcatgtttgtgtctaaacattaacaagatttctctgtrcaccattcttggagccgaggaaatggaaggcagacaattgggttagaagctctgcagttttccccaggagacctgagtacttaggctgggctggtgggcattggggtgaagaaaattagaaggacggaagaagtgatgtttgggaggtgagaatgagcaggcctcattgaaagactgggtgtgaggcgtgtagtttgtgaatcaaatagaggtgaggctgcttagcaaaacaggacacagaggagcacctggtttgg

SEQ ID NO: 171775 - DNA, 570 bp, Homo sapiens
tcatttataagatgttagaagcaagttaccatcgagtgtttattgaaggaagagttggcatcgccctgagggtgagtgtgggctgtgtgcatggaggagccacgtgctaccaagaagtgagaggcccagggtgcggggagccaggagctaggaagcctatggtgccccaggaacctggaagagtaggtaggtccaggctgcggaagagctatgttgaagagcttcttccttattcctgagggctttgggaagtagagcaattaaagagggatatgtcatgtttgtgtctaaacattaacaagatttctctgtacaccattcttggagccgaggaaatggaaggcagacaattgggttagaagctctgcagttttccccaggagacctgagtacttaggctgggctggtgggcattggggtgaagaaaattagaaggayggaagaagtgatgtttgggaggtgagaatgagcaggcctcattgaaagactgggtgtgaggcgtgtagtttgtgaatcaaatagaggtgaggctgcttagcaaaacaggacacagaggagcacctggtttgg

SEQ ID NO: 171776 - DNA, 570 bp, Homo sapiens
tcatttataagatgttagaagcaagttaccatcgagtgtttattgaaggaagagttggcatcgccctgagggtgagtgtgggctgtgtgcatggaggagccacgtgctaccaagaagtgagaggcccagggtgcggggagccaggagctaggaagcctatggtgccccaggaacctggaagagtaggtaggtccaggctgcggaagagctatgttgaagagcttcttccttattcctgagggctttgggaagtagagcaattaaagagggatatgtcatgtttgtgtctaaacattaacaagatttctctgtacaccattcttggagccgaggaaatggaaggcagacaattgggttagaagctctgcagttttccccaggagacctgagtacttaggctgggctggtgggcattggggtgaagaaaattagaaggacggaagaagtgatgtttgggaggtgagaatgagcaggcctcattgaaagactgggtgtgaggcgtgtagtttstgaatcaaatagaggtgaggctgcttagcaaaacaggacacagaggagcacctggtttgg

SEQ ID NO: 171777 - DNA, 602 bp, Homo sapiens
tctgtgttaggtttatcgtaacagagtagcaaataataagtaaaataataaaacttagcacttttctttcaaaataaatataaacgtaggtttgcctatgttccaagagcctttcagtggtgtgactgacttgcacattaaccaaagaaaaagggcatctgtggtagagaccaccatcctggagcagtcgtgtggggagcacagatggaacagaaggagaaagtagaaagagtgctcttgtaatcttgcaaatgatgcaagttaaaatggtgggcatggtctgtcttaagttatggagctgaactattaatacatctcaaatgtcaaatatgaggtttattcagcacattgactgataatgcccccttaatatttctaacattagttcttttactgaagcagattcatggactaaggcagggatactggcatccacgtggttttcaatctatcaccgactgcattttaaatcaataatcccaaaataatgcaaatgagtgcygttcgaatatctgcagggctgaggtggtagagtgtgatgctactgtcctctgtggggagccccgccaaaccgaccagcaaaacttctaatccaaagtctg

SEQ ID NO: 171778 - DNA, 568 bp, Homo sapiens
aattttttgaaaatatattaatcttgaaccatgagggccccctcactactaaatagycatctaagtgttgggctccagttttacacacctttacccggctgtttataaaattacaattttcataaaatgaaattcccattgattttctgtaactgataaatcatcatgaaagtaagtgtttgtaataaaattccaatttttatagggaacattcatctcataaatcaagggaaaccctgacagtggcgataaagcttgtgttgacacaaataattagtttgtttttaggttatagttccctataactattgattttcccttttaattaaaatgaagacctttataccaaatgaagactttcatgttattagaaaggcattttgagttattgaaagccccatgttcccaggttaattctaatttggataaaacgtatgcattccccattctccaatgctcacattttctgagatttgaaatgcagtttccagagctctatctaggagtatacctggattctggtggcatgcatggttgcctctccttttaaaacagtgtaaaaataata

SEQ ID NO: 171779 - DNA, 525 bp, Homo sapiens
ggagccacaagttacccctaaaaccctgtaatcacaaggaaagaagtggtcacctctcagyagctctgagtggagcagaaatgatctactccctccctctttctgacctccactctgattcctgaccatgttcagggatgactctgagtcctggaacactttcatctgcagtggaaaagattttttgtttgtttgcaagaaacaggtgaaacctttctgaatcagttttccagctaagagttatacctgtagaaaggatattaccttggtggggagtaaaatgaaggcaagttgggtatttgattgtactactgtaccattgtgtttcattctttcctatctttcttctttttttaattcgagaatcttacttgtttgtgatactctttgagtccatcccctaccccagtctttgtgagtcatctcattcactctgtgcagaattaccattcaagccttttcaacttcctttatgacaaaaatttcatgcctcagtttcccagatttctattctggggcaaacca

SEQ ID NO: 171780 - DNA, 525 bp, Homo sapiens
ggagccacaagttacccctaaaaccctgtaatcacaaggaaagaagtggtcacctctcagtagctctgagtggagcagaaatgatctactccctccctctttctgacctccactctgattcctgaccatgttcagggatgactctgagtcctggaacactttcatctgcagtggaaaagattttttgtttgtttgcaagaaacaggtgaaacctttctgaatcagttttccagctaagagttatacctgtagaaaggatattaccttggtggggagtaaaatgaaggcaagttgggtatttgattgtactactgtaccattgtgtttcattctttcctatctttcttctttttttaattcgagaatcttacttgtttgtgatactctttgagtccrtcccctaccccagtctttgtgagtcatctcattcactctgtgcagaattaccattcaagccttttcaacttcctttatgacaaaaatttcatgcctcagtttcccagatttctattctggggcaaacca

SEQ ID NO: 171781 - DNA, 541 bp, Homo sapiens
catgttaaataaatgaatatggccaagtaaaaactaaaaagaagcaatgtgtgaaactgctttttgatatgtgcgttcatctcaaagagttaaacctttcttttgattcagcagattggaaacactctttttgggcagtctgtgaaaggtcatttggaaggcccttgaggcctatgaagaaaaacctaatatcctcaggtaaaaactagaaataaactatctgtgaaactgctttgtgatgtgtggattcatctcacagagctaaactttccttttgattcagcaggttggaaacactccttttggagaatctgcagagggacatttgggagcccaatgaagcacataggaaaaaatatccacaggtaaaattaaagagaagctatctgtgtaactgctttatgatgtgtggattcatctcacagagataggccattcttttcattcagcaattggaaagagtctctttgttgaatatgcaaaggracatttgggatctcattgaggactatggtgaaaaagcaaatatcaccagataaaa

SEQ ID NO: 171782 - DNA, 481 bp, Homo sapiens
ctttttaagatagacattgctgacacatggacagggattgaattagtacaaatattaaatatcattaagccttcttttttgagttctgtstgcacatcaacttcacctgaagaatgtttgtaaaatacacatgcttgttccccacccaaaatctattgaatcagaatctctagggagtgaggaccaacagttgcgcttttaacacctccactccccccttgtattggacggtaaaggccagaaaagattaccttaggcattctcatttcagaagctaaaacagacattcaattttctataccctaatttgggacttatatctgagtgttaatatatgcatgtaatactttgtgatgaatgttaaatgtgttttaatagtgttcccttgcagaatattctttcctttgccggtattattaagactatcttgcattgggattcatgcccccaggcttacagttctctgagctatacttgcata

SEQ ID NO: 171783 - DNA, 467 bp, Homo sapiens
ttcttactagcctttttaagatagacattgctgacacatggacagggattgaattagtacaaatattaaatatcattaagccttcttttttgagttctgtctgcacatcaacttcacctgaagaatgtttgtaaaatacacatgcttgttccccacccaaaatctattgaatcagaatctctagggagtgaggaccaacagttgygcttttaacacctccactccccccttgtattggacggtaaaggccagaaaagattaccttaggcattctcatttcagaagctaaaacagacattcaattttctataccctaatttgggacttatatctgagtgttaatatatgcatgtaatactttgtgatgaatgttaaatgtgttttaatagtgttcccttgcagaatattctttcctttgccggtattattaagactatcttgcattgggattcatgcccccaggctta

SEQ ID NO: 171784 - DNA, 386 bp, Homo sapiens
tgtagaattcatcccagcatagagttgctgggatattactggtgcttcttcacagggaaagaaacctggctacccagactacaaagggaaagggggaaaatggcctataactcatatcaggtgaattagcaaacattctcatttcagacgatttttgctgtccctggtcatgaaatttccttaactgggttctatcttttactttttatcccaggcttttagcaagggtcataggaaaatggccatttccacatatctggtatatcccatttgaagatattgcctaacaaacattactcaggatcccttrcataaaaacctccatgataaatttcttctgtacttttttccccaaaaagctggattctcctgtaaaactgttatct

SEQ ID NO: 171785 - DNA, 636 bp, Homo sapiens
acaaaactagcttatttttcctagtcaggcagttttgaatagaaggtgattgtgttttccagagataagtatgtaagtcttttctgctaccggaggaggattctattttagtagtctattaagtagacaataagcrctgagttatgagttgataagtggatctgcttaccacctagaaacatcaattgaaaccacagcttatggtttcttactgcctctttttggtttctcactgagtctttctggttattgttatcatttcgtttttgacttgggcttggactgttcagcttggctgtgttaatttttcagaatcaatgacttttatagttacttccatgagtttttcctcctgcattttatttaagcaattcactaactatttataagaccatctttgaaagcctgagatacatatctaggcaaatatccatggaaaaaataaacactctgcaaatttgcaaacaaatacagcaattgccaaagtagggttatcttttgcaatcagtactgtggtttcagtttgaaaaaataaagctttcttgtcagttttgctccaagggctatctgattcggtgtgtagtcggtgaggaaataaatacaggtataataatctgtgcttgctcaaaaattaaa

SEQ ID NO: 171786 - DNA, 389 bp, Homo sapiens
tccataaaaacgttgcgccagggatcctggtgaggaagctattctgtatcctcattgctggtgttcacgtgaatctacatatgtgataacatttgatggaaccaaatacacmcacaaacacacacatacacatatgagtgcatataagaccagagaaacttattttggtggattccgtaaatgtcaaatctttggttatgatattgaagtgtagtttggcaagatgttactattggggaaaatagtaacattgtactattgtcctgtgaattattgattcacaggaaattgtaaaaaaaaatgctttgtcctatacatttttttagaatttcctgtcaatccataattatttcaagataaaaaaagttttgtaaaggaagaattttaga

SEQ ID NO: 171787 - DNA, 512 bp, Homo sapiens
tatgttgctcaggctagagtacagtggctagttatgtgttaccatggcacactacagccttaaactctgggctcaagcgatccttttacctcagcttcccgagtagctggaatggcgagggtatgttcttaaaccatgaatcaccatcccactgataatgttgttagctctagatgtggccactaagcagcaaaagagtgtcttcctgatttcaacctaatcagaattcasgtatttgtgcacaaatgggaagattaggagctacaggagccttcatcctctgctaagaaagactctattgataatgcagtcttccctctatggaagaccaagatctcctcattttttttgaatttctaaacacacacacacacacacacacacacacacgtgcagatacacacacattccacccaacagagtagggttcaaaaatggattaaggaccaacaatttatgaaaggggctaaactatttgtgagtattttctttcctcctcaggttcatggtgt

SEQ ID NO: 171788 - DNA, 531 bp, Homo sapiens
gaattcaggacacactgggtatgggaaccccaaaaggctgtcacactgacttttcactgagctgtttaacacttaagccatcyccagatggcagggctaaaagagcattgtaacacccctagacaccactgtggggctggagcccaaaagcactcaccctggcttctgctcctgtgcacctgcatgttccccatcccataaggggtttgagcactgaggccaaataaacaagacacccctgtcacaagtcctgtgaagggagtcagggaactctcccgtttcactaggacattttgaattgctaagaaaaaaacattttaaagtaccttgaagggccctctaacctctttttttccttttctttataattataaagtggaaagacaggcaaagattcttttacagtagtgttccatattataaataaaaataaaataaaaatcagctggtggaagcatccacttttctttgactctagctgattgtagttctctcatgcagaccacaaccatgagaaattaacactcaacg

SEQ ID NO: 171789 - DNA, 534 bp, Homo sapiens
tacctgagccttcctgagatgatgtgcctatgtgcacagagtcatataatcaaaatacattttaactgacttccatatggttgccagttggccacaaaataaaactgcatgtagttatatgcacaagctgtctggatgctataaaaagaaaattttgaccagcatgattaaatcagcatgtatgttaaaatataatggctacattcaaagaacaaattgtgtctctcccatgagcaaaatctggaaaaattagagacacaggcaagattccacaggtgtttacagaccaaatatgtctaaagcagtcatctgtttgttatatgcacacacaacgtttgtactttttccttctcaactctattttkcttcatataattctgtatcctaagagagtagtcaagtcagcctatttggcagaattagtggcacatcaagaatggctctctatagtgggataacattaagtttccagatgaatttccactgctcaaaagaaaccctgggtggaacagaaatagaagcatgtaatttgtc

SEQ ID NO: 171790 - DNA, 493 bp, Homo sapiens
atgtttttgtcataacaggtcaaggattgcttactcatgtttgagaagcaataatgatatggcaagagagaggtaagggactacaatgggaggcttattaggaattgtgcatgcctctttcatgtgtgttgtctccaagctaaccttgtgaggtacgaattatgacttcttcctgaaggagaaaagcaagttttagattaagtgcctgacattctgatgtcataaaaagactgaaataagcaacattttagcacaacatttgaacagcccttttcttaaggataagctctttgctctacaccatactaatttccaaaaaggtgtgagattgacatatgaaacttgtacgtttatataaatgtgaatgcagcaagccagagaacagaatgttctgtagcccaggcaagaggcagaggaaatacccagtgacagatctacttggccctcgactaaaggggygctgtaactttaaaatactaataaatatttagct

SEQ ID NO: 171791 - DNA, 451 bp, Homo sapiens
agacctttaattaatcaaaaaattgaccattccttgaaccttgattgyttggtatcattaacaaaggacatgagacaacatgttcaagctttataatttgctggaaataatattttctttttttttaaaaaaagcaattttttgttgtaattgttaatcttactatatatttgtctcctgaaaatggtgttatttgccactccttctacgtattaattggtgtaagctcttaagttatataggatagttttaatttctccaaaaagctgcctaaggaaagtaaaacaccataaagaaaagggtatgtacccaagaagtagcaagaaactaaagagaagagattgagatattatcatgagaatttaataagagaattaaatatctagaaaaatgtgtacatacttagaagtagtaaacattaatttcctttcttccatctatagttcacctc

SEQ ID NO: 171792 - DNA, 505 bp, Homo sapiens
acagcaatgcaatgtttagctagcatgcattttgtcatccaaggctagtaggtgaaatatttcctttacctgtcttgatgcacggtggagaaaggagacccgcttcgttttccctctaatctagagagttaacctcctccaggtagggttgaaaatatgaacagagctgcttttgcaagactgtgttgcctctaaatgtgatttaactcgcatattcagaatcttagcaaaaataaataaataaatagtaagatggggtaaggcaaatacatagatattttggagatcttatcccttattcaaggactgtagattattacagctttgttgtcatattatytctaggcagtaaatcatagtaaagtagtaaattcatagggaatgaattaatctcctttttgttttgttttctctgaaaaagagggtgtgattacagcatatattgattgggtactgattatgggacattttcattgtatttgttgttgttgcagtagactaaatg

SEQ ID NO: 171793 - DNA, 548 bp, Homo sapiens
tacatcacagtatagagatagaatgtgtcctacaaatgtccatgcagcaactcatattcacttggcataattttgtttattgtttgagaaagtagtattttgggtaaaaattctgaaacaggcagtgagtatgtctgagtatttctggcaagggctatttcttcctttctccttttactctggagttttcttgaactgagctgtttggacaaatgacacatatttcaagaattccaactgtgggagtgtttcactcacaggattktgctttcttctaagagccaggtctggtgaacactctcaggagctttgtaacatgttccaagctatgcagaagtgcttagttcattcactagtcaaagactaacacatttacagcaataaaatgcattataagcattctttcttcatgaatctattcatcccattaaaaaagcaggaattccaattaagtgaggtaaaatatgctaagtagtacagtataagatttttaaaaattacaccatgtttttcatggattattttaagaaaaaaactattttaagaaa

SEQ ID NO: 171794 - DNA, 628 bp, Homo sapiens
ttaagaattatgtctttcctttaacctccatcatttgtttttctactttggtggaagctttttgtttgtwtctttactgcaacagtgaatttatccttggatttctccattatgattggcagtatttatacaataatttcttggtattagttaattgataccttatatttactattttcccccaaagctgagtaaagaatagaatgaaatggcctatacttatcagtgtaaatggatattagaattgctgctcttattccaaaaaatatcacttaaagttcacaaatgaaagttaataactgaattttagtaacaacaacttcaacttaaaaaattccatgtaattaatagctcatgagtcccactgagataggttgaacttcataacttctaaagccttttatgtttctactacttttcagttctaatgttcaatagtagcgtgagtatctggttagtttcagtataaaaaagatgatacccacttgtgatatgattctactttcaatgtcacggtggaatcatttattagttttttaatttaatttttcacatgtgagtgtgatacagaacacctgatttttctacactataggatgtcagttcagtaaatcgattttcctcatta

SEQ ID NO: 171795 - DNA, 628 bp, Homo sapiens
ttaagaattatgtctttcctttaacctccatcatttgtttttctactttggtggaagctttttgtttgtttctttactgcaacagtgaatttatccttggatttctccattatgattggcagtatttatacaataatttcttggtattmgttaattgataccttatatttactattttcccccaaagctgagtaaagaatagaatgaaatggcctatacttatcagtgtaaatggatattagaattgctgctcttattccaaaaaatatcacttaaagttcacaaatgaaagttaataactgaattttagtaacaacaacttcaacttaaaaaattccatgtaattaatagctcatgagtcccactgagataggttgaacttcataacttctaaagccttttatgtttctactacttttcagttctaatgttcaatagtagcgtgagtatctggttagtttcagtataaaaaagatgatacccacttgtgatatgattctactttcaatgtcacggtggaatcatttattagttttttaatttaatttttcacatgtgagtgtgatacagaacacctgatttttctacactataggatgtcagttcagtaaatcgattttcctcatta

SEQ ID NO: 171796 - DNA, 628 bp, Homo sapiens
ttaagaattatgtctttcctttaacctccatcatttgtttttctactttggtggaagctttttgtttgtttctttactgcaacagtgaatttatccttggatttctccattatgattggcagtatttatacaataatttcttggtattagttaattgataccttatatttactattttcccccaaagctgagtaaagaatagaatgaaatggcctatacttatcagtgtaaatggatattagaattgctgctcttattccaaaaaatakcacttaaagttcacaaatgaaagttaataactgaattttagtaacaacaacttcaacttaaaaaattccatgtaattaatagctcatgagtcccactgagataggttgaacttcataacttctaaagccttttatgtttctactacttttcagttctaatgttcaatagtagcgtgagtatctggttagtttcagtataaaaaagatgatacccacttgtgatatgattctactttcaatgtcacggtggaatcatttattagttttttaatttaatttttcacatgtgagtgtgatacagaacacctgatttttctacactataggatgtcagttcagtaaatcgattttcctcatta

SEQ ID NO: 171797 - DNA, 628 bp, Homo sapiens
ttaagaattatgtctttcctttaacctccatcatttgtttttctactttggtggaagctttttgtttgtttctttactgcaacagtgaatttatccttggatttctccattatgattggcagtatttatacaataatttcttggtattagttaattgataccttatatttactattttcccccaaagctgagtaaagaatagaatgaaatggcctatacttatcagtgtaaatggatattagaattgctgctcttattccaaaaaatatcactyaaagttcacaaatgaaagttaataactgaattttagtaacaacaacttcaacttaaaaaattccatgtaattaatagctcatgagtcccactgagataggttgaacttcataacttctaaagccttttatgtttctactacttttcagttctaatgttcaatagtagcgtgagtatctggttagtttcagtataaaaaagatgatacccacttgtgatatgattctactttcaatgtcacggtggaatcatttattagttttttaatttaatttttcacatgtgagtgtgatacagaacacctgatttttctacactataggatgtcagttcagtaaatcgattttcctcatta

SEQ ID NO: 171798 - DNA, 471 bp, Homo sapiens
ggcagctttaaattgacagcttttgggtttgtgaggatattgtgagtcagggttctcctgattgggcaagatgaacgagtgaacaacatcactagggggccggagtagatgagatactcactcattcgtgtgcctgctttagcaccagcagtgtgggaatggggagaaggccaatggtctcaaggcagtttccagctctctggcaaacaagataaggccatggctgtaacagacaccctctgccaggttctaaaatctctctcttatgacctttttaagatctttaaagcaccgtctgcccttggccaacaaaagagaaaaaacagagtcaatgcggaaaaygctgccaagacaacattttcttcttaagatcctaaaagcaccattttccctttgctaacaagacaggagcaataaagagtcaattaggaatatgttgccaagacattggccatataatttctactccag

SEQ ID NO: 171799 - DNA, 420 bp, Homo sapiens
attccattagactccattcaattccattaatctccattaaattccattctactccaactgattccattccattctattcctttccattccattccattccattcgcttcyattccattcgtgtccattccactccagtccattccattcgtgtccattccattccagtccattccatttgtgtccactgccttccattccactccattccatattattccattacactccattccattctattactttcatttccattcagttccattccatttgattccattccactcggtttcactccacttgagtccattccattccattccattctgttccattccattccattccattccattccattccattccattccattccattccattccattcggtaccattccatattgttccattcg

SEQ ID NO: 171800 - DNA, 420 bp, Homo sapiens
attccattagactccattcaattccattaatctccattaaattccattctactccaactgattccattccattctattcctttccattccattccattccattcgcttctattccattcgtgtccattccactccagtccattccattcgtgtccattccattccagtccattccatttgtgtccactgccttccattccactccattccatattattccattacactccattccattctattactttcatttccattcagttccattccatttgattccattccactcggtttcaytccacttgagtccattccattccattccattctgttccattccattccattccattccattccattccattccattccattccattccattccattcggtaccattccatattgttccattcg

SEQ ID NO: 171801 - DNA, 420 bp, Homo sapiens
attccattagactccattcaattccattaatctccattaaattccattctactccaactgattccattccattctattcctttccattccattccattccattcgcttctattccattcgtgtccattccactccagtccattccattcgtgtccattccattccagtccattccatttgtgtccactgccttccattccactccattccatattattccattacactccattccattctattactttcatttccattcagttccattccatttgattccattccactcggtttcactccayttgagtccattccattccattccattctgttccattccattccattccattccattccattccattccattccattccattccattccattcggtaccattccatattgttccattcg

SEQ ID NO: 171802 - DNA, 529 bp, Homo sapiens
gaaatacaacaactcagttttgctaaattacatgtatactttaaatttttaagtcaaactgctttgattataaagtcaatataaaactgaaacaaacaaatgcctaagaatacatcaaatatgtccatgtatcattcagcagctgtgcttcaaggatacaacagtgttttttcaagtccctggttttgggaggcaagacaactttctagctttgaaaattatgcaattttggtatttggcatcaacttctccttgtgcacttcaaatgattctcaaaaataatttaaaaaataaacaagcaaaggtaaagcagtacttatacagataaattatataatagctcttggtattctacaatcaggcattaaaatagaataaataaaggcacgtgctttccaagatttttgaaatggtttatttcatcatcgccaaccctatgtttggtaaaaaatagttgaaggtattaccattttgttttagtgyttttctagaatcctgagttttgtgacttaacataaaaagcttcaac

SEQ ID NO: 171803 - DNA, 464 bp, Homo sapiens
ggttagttaagttgtgcatgagtcatttgtatatatattaggaactacctggaagattggacagcatttcgttttcttgaattaggtagaactgatacctgagtgaacttgccagcttcccaaagaacatcttcctaatttttgtctttgaaatctctgtctttctcagcattttccacaagtrttcatactgactgtgttgaccacttggtgtttatgtgatcaatgctagatttggttctataatgtcttttctggagcctcatgaaggtcaaggtctcagagagcatttagagaatgaaagaaatggtcattttctataagttaaggtagcaagactttaaggaaaatctcctaggattgaatggttggaatcaagtatgttccatgcttcaggcactgtgcttctcagttcacatgcaataattcattctatgttcagaataatcccatgaggtaacatc

SEQ ID NO: 171804 - DNA, 656 bp, Homo sapiens
ttttctgaaccgaaatgaatggacatgaagttaaggaaacagcatcgtccaaatagctggaaataaactgtggaagtttaataaagggatatgacaactcaataaatatccaatttcctttacacttatgtttatattcttctagtctttaaagtgaaaagtaaatatgtgaagagttagaaatggctaaatatatattttccatatgtaaatacaactgattttcattttaaaacaatcctttaatatatcctcatatgatgagtacatgtaagaaggagtccatgttttatcactttggggaattttcaacaaagagatactacaattttgcctcatcgctgtcttgtactaatgccttctctgtgcccttgatcatcatcgtccttctcccaccttccaccatgactgtccttcagtcccctttctaagcgttcctggcatcagggttgaaatattctgtagrccaggttgaaaattttctcaggacatccacttaacattttcatagatgcaaggtagtgccaccctgaagagggctgaacattaagtaactgctcaagaaatacttgattccatttactgttcccttacataagtatggaaagtcactccacacactcaccaaccctgtctcccaaataaaagctagatac

SEQ ID NO: 171805 - DNA, 390 bp, Homo sapiens
aaacaataacatctttagacgtgtaagaatgcattaaagaaacaaaatgataaataagactactggcaagatttaaaataacaataatatatataatataagtatgtaccaactggaaaaattatatttatggyattacaaaaaaattaaattacatattcattaatgcattcaataactctgataaagtactggactatatactaggtagtgagagtctaccaatgaaaagacacagtccttatcctcagggagctcacacgctagttggagttagatttaccatgaaacaattgcagtatataatacatgtcacaataaagatttcatgggattttcaaagaaagggtccggacccccattgaagagaaggctttgcagaagaggtga

SEQ ID NO: 171806 - DNA, 573 bp, Homo sapiens
tctgctatcctcaaagccagcagcgtaacatcttccaatcactcccgatgtctctgaccttcatgcttgcttcttatgaggacccacatgaataatccagaataaggattaagagtcttaatcacatctgcaaattccctttttccattcacaggttccagagattagggcatggacatctttagggggacaatattctctccaccacagagtaaaaggagataaatggaatagtgatatcatttaggatatctctaatccaggttagcaatgataaggacttagagtcatggccaagcagtttcactcagatatttgtctaagagaagtaaaaacacatgttcacagaaatacatgtacaaaaacactcatagcagctttacttatcatagctccaaactaaaaataattttaagtgtctgtcagcaggagaatggataaacaacggatggtatttacatacaatggaaaaccatccagcagtataaaggaacaaatttctaatattcagacctcaaaaacattatgccaartgaaacaaatcaagataaataaatactatgtagtttcatt

SEQ ID NO: 171807 - DNA, 569 bp, Homo sapiens
cgtgtaagtaggaattacaggaatgctcctcaggtcgcttttgactgtaggaggaagagctaagaaaatctgtcgctgctggagagggcacctgagatggaaaagcacagaggatatcttgcacaaaaaaagattgatgggcagagggatcacagcatgtgagaccattttcacactcataattttctccagaattgatttgtccrgtataggcacttccctgggaggcagttgagtccacttgtttttttgtgcagtttctagaatcagtctgcctgggttcagtctagactcactaccagctatagggcttggctaagttcataaaattcattattctcatctgtaaaatatacatcataaaatacctatctcagaatagttgttaacaatacatgaaataatgtttctagaatgcttacacagtacctgtccatatataaagcagttaataaatattagctattgatgttactatcatcatcatcatcatttgtaccatctttgtccatcaggatacattaacacagcagtttagaagttaagatctataatatatactttattaa

SEQ ID NO: 171808 - DNA, 613 bp, Homo sapiens
ccagtagccagtgactgctggagttttatcttccttgactcaagggagttatggactctcctttcagatgttttgcctgtagccggaaggggaggacagatagtggttctggccacagtgatcgtatctgactgggtttggttctattctgttgttctgttgtctcgtagaagagtaaggcacttagtacctcttcattttagcttttagattccagcaacctgtcagagacaatagaataattcctatttaacatctcattacaaaaacctatgttatactcttatatttttgaaactacagcttataaatcaaatgtacctactttttwttgtcccagataagtggaactaatattttctcatcaaagaatttttccacaattgtaaaaatccttcctgtttctgatttcttatgattattaacttgaaataatattctatactgcttatgagctaggtaccttgccatatacacaaatatgattttaatattttaaaatattaaagtactaaaatatagcataataagcattacatatattttaacttatgataaattatttctcttctgacttattgtttatgttcatgtcacgtagttagaaaagatt

SEQ ID NO: 171809 - DNA, 480 bp, Homo sapiens
agaagaagataagaaaactttttgcaatatcaaatatcagatacaatggacaattaagctacctgccaatccttcccatagtttgctcatatgagccaatacatttctcctggtgttaaaactatttcaagtttgttttctgtctttagtagtcaaagaatcctgaccaagagaccaggtcatttaaaaatgcaaggaagctttttttttwaaaaaaaaggcaatcattctaagtggagagtgtttaggcaactggacacaggagaattgaaaattacacacaaagaaaatatttcttcctagatgtcccattttttaaagtaggataaaaattatggttaacaatcaggtaatggagtactagtgctcccaggggccaaaaaggacactgaaacaggaatccccatgtggacaaacatggcagcaaaagcgaaaggatttctgtctcctccagtgcctgaaatggggctcaggaattct

SEQ ID NO: 171810 - DNA, 412 bp, Homo sapiens
gaattctggattctgtttcttccccaccccaggtgtccactgaaggtttggccaccactgctttggtgactgtaccaaacaaacttctttcccaactctcttttggaattagatggtaaattccctatggagttgcctcctgatggagatgtttctgtggataattggaggtccagcagctattattgctctccttgtgtgtgtttagccaaagaaatgacagttgtgccacagagggagcacctaygattcacaaggcagaaaagaatgccaattaatctaagggagaggacataactcccatggccaagcacatttgtcaaaacagaccacacacccactctggagaacacattcaaatccttttggtgttctctgtcctctggggtgtgaatatattggtgggagtact

SEQ ID NO: 171811 - DNA, 537 bp, Homo sapiens
gacgatagtcttggaactgttcaatccaactttgttgttggatccaaactccttgatgttggtgtcagaagtcctcagtttggctaaccctgggtagctgctttcaagcagaacccaaccttggcaatcagctccccaaggattgactggtaagctataagagaatttctagacacactgccccggggaaaagctagctatagaaaaccacctggactcctgatgtggagcagtggtgtggaacctccgaaccatcaaaatccagataagtcaacgccttacttagccattcccatgtagaagctacttggttagcctctctcactcacatttaccccagcattctctcactcacattccaccccagtggaaagaaacttagcaaaaatggaagctcacgtgcacctgaggcccaaycttgctccctagaacaggcttacactagcctcacagttcctagggccaaggaaatgcctttctaaatggacaccaactgacacatactgaggtcccttcagtatcgggggaacatttggt

SEQ ID NO: 171812 - DNA, 621 bp, Homo sapiens
cttccttcttattaatgctttattgtggaaaggtggaaagttcattcgatgatgtatgtgtgtatatacatatatattttaaagctaagctaaatgtctctccattttctttcttagctgttttcttcttagctgaacacataataatgctcttttatagatttagacagaataaagaacggcattagaggaagcaactgcacggaagaaaggagacttggggtcatgtgagggaagagaggcatgggacagtcagaagagaggtcagtggatatgggtaggagagacctgagggcgacccgaggggcrtttgaggtcattacctcaccagttacctctcatcgcttcttcagtatcattacacaaaattcaaaattaagtagcagcaaaggtcaaagaggaatcgagcaggatgctgttttctttccattacagtaagatcttctttccttcactcagccctttattgcttttcttgctgtttcccttttcagctctgtttcatctttccactgctcgcagctattgtttatattgtttgttttatctgtggagtggaaacaataactctgatttaagaactagagccctggccatatacaaatgagcacagaagtggtt

SEQ ID NO: 171813 - DNA, 415 bp, Homo sapiens
gttaacttttatgtattgtatgaggcagggatccaactttattcctttgcttgtggatatccagttgtcctagaacctttgaaaaaaaattwattgaccctaaatgtaagggtgtatttctgaactctcaagtctattttattgagctatctgtctatccttagaacttacactatcttaaatggtgtaacttcatcataacttttgaaatcagtaaactttttcaagattgctatggttatttggtgtctcattttcatatgaattacaggatcaactttttaatttctgcaaataagtcagttggaagtttgatagggattatgttaaatctctagatcaatttgaggagtattaccatcttaatattaagtcttctgattcacaaacgtgggatgtcttttcatttatttgg

SEQ ID NO: 171814 - DNA, 540 bp, Homo sapiens
aattaagtaatttgctcaaggtcctttcctacagctagaacgtaatagagctaggattgtaatccaaatgaatcagatttcacagttcattaggccattggatcagaatggcctatacgcatattatcagggatatcctaaactctactgtagactgtattagcacttctggggatggggcccaggaaagtacatttgacctcaccacttaggtgattctttttttcttcttttttgtttttaattgagacagcctcactctgacacccaggctggagtgcagtggcataatcttggtttgctgcaaccactgactctcaggctcaagggatcctcccacctcagcctctggagtagctaggactacaggcatgcaccaccaygcctggctaatttttgtatttttttgtagaaacagggttttgccatatttccaaggctggtcttgaattcctggactcaagtgatcctcctgcctcggcctccgacagtgctgagattacaggtgtgagccactgtgcccagccttaggtgattatt

SEQ ID NO: 171815 - DNA, 496 bp, Homo sapiens
ctaattccttaaaataaacaaaactggagaaattatataagcagatgttaaaactgatcacagaactatagcaattaagacagtgtgatattggccctaaataggcaagaacaaacacaaaacacaactacggaaaagtaaggtagaaactacacatatcctgtcatgattgatgactaggatgacagcatagtagagaaaggatggccttttcaataaatgatgccagaacaaytgaatttccatgtgggaattttgagccccacctcttaccatacacacaaatacacaaagtcctgatagactttgggtcctaatgtaaaataatagagctattaaaaagttacacatgaaagtatctttgtgacctgcagatagttagaggtttcttaagaggacataaaatattaatcattttttaaatgataaagtgaactatattaaaattaaggtgctttactcatcaaaatacaccattaagagggtggaagggcag

SEQ ID NO: 171816 - DNA, 516 bp, Homo sapiens
agatgtatagattgtaaagattttctcccactctgtgggttgtctattaaccctgctgattatttattttgctgtgcagaagctttttagtttaattatgtcccatctatttatctttgtttttgttgcatttgcttttggattcttggtcatgaagtctttgcctaagccaatatctagacggtttgtccgatgttatcttctagaatctttatggtttcaggtcatagatgtaagtctttgatccatcttgagttgatttttgtataaggtgagagatgaggatccagtttcattcttttacctgtggctttccaattatcccagcaccatttgttgaatagggtgtcttttccccactttgtgtttttgtttgcattttcaaagatcagttggctgttaagtatttggcyttatttctgggttctctattctgttccactggtctatgtgcctatttttataccagaatcatgctgttttggtggctatggacttatagtatagtttgaattc

SEQ ID NO: 171817 - DNA, 546 bp, Homo sapiens
ttttatttttcaggaataaaattgagaactttactatagcttacttcaaaacagacagctatagaaagttagtgtttttcttacaaagacttttaagcaatgacttttgtttcagcttatctcttcaatttaattattgtaaaattctgcaggaccttttaaaactacagttattacttttacaaggagttcagattctatattctatttccagactgacttattaaatggttgtacaactcttgggtcagaagcaaacattagaggtttgctaatataaagatattaatcatctttatatcttcagcaggactctacctaacccaatacagacagatgaaaaatctatttytagtttttaaaagcacctaaagaaaaatttataatattcctgagaaaaacactacagcttcaaacaaatcaaaactctgattggactctatttaaacctaaaccctttgtgctctactataaatctcattcatctagcttaatcttttatcttaagttcaggaacagctggtcaacatctttttgataatcagg

SEQ ID NO: 171818 - DNA, 474 bp, Homo sapiens
ggaagagtggctctatggcggtacgaaacttcctgtctctgtctctcgggttctctcaggcctcccctcttggccctcaaacggccggcgtccctggcctctcgcgccgccgcttcgggcctctggttgggagtcctgtccggcctgacttaggccgagcgcggcgtgcgcgtgcccccagtccccgcggcggtctcccgcctggcccacgcccaccatgcgcatccacccctgtggcggccgggccgggctkgggggctgtgaccggtcctggcccccggcttcgctgtgctttccccgaggcgtctcgatcgcctagctgctgcgctctttacccttgtttttttctgtcgattctgaggtggtggtttttggtgtctgtttttgccctgtggccttagggtgcccttcctgtcccttctttcagaaacagtcattctgtaataatagctaaataaagttaatgctgtacaa

SEQ ID NO: 171819 - DNA, 567 bp, Homo sapiens
ggtgatacttcaatcaagtagaaggcatgcaattaagagatgagggtgaaatgtgaacgcgyaccattatcttgtgactaaacttagtttcttcgtggcatgcacaggaagttaagcttaatcacaggatatgcaataatagtcacagtattccaacagaaatccaatgacaacaaaaaacccaaacaatttcaactaattttaaacagaaggcaagctgagtcatagtttttcacagcagggaataatggcttccatgaggggtgagcttaatgagctctgaaggtaggttttctaattaaattattcacagaggcttcaatagtcatctttcctcttgactaccttttaaaacaattacatctttaacaaatgtaccaattaatcttcatctcaatagaagcaaaagcagctaagtgcaagatatgtgacagagtcccttggtactggaaagcagccctttgttcattctttctttcaaaatataagcactttctgtgagctgggcatggatgctggaaacatggctgtgagcatcctcccacaccctgcctgcatggagctagc

SEQ ID NO: 171820 - DNA, 599 bp, Homo sapiens
taatatcttagtaaaatatctgcttgggagtagggcatggagggtggagagagatacctcttgtttgctttggtaaaatttgttcatcaaaagagtttttgcaaatttttctcctggatcctggccttcagagggtttcttgacctgtttttcttcagcacactatgtcgtgaactgtgaagtcttttctacattgatgagccagacttgcctttaaatattgacccccgctaacaggcaatggtaataaactatatctattttcactcctctaaccacatgctggaacgcaagagcattttataaagcagtagtggttggcaataaacttataacttgtaataaatgtgaatgagattcagatttaccaaatcttcctttattacatgtttatcatatttgtttaagtagtttgagttacaaacttaattgyctttttattttaaaagaggccagtcttaatgaactttaaaaaactaacacattgtatgctcatttaggaaaccagtggttctccaaatgtggtttgaggatccctgagattccctaggaggcccatgatgtcaaaagttcttttttttgagacagggttttgctct

SEQ ID NO: 171821 - DNA, 587 bp, Homo sapiens
catggtagcgtacatctgtaatcccagctacatgggaggctgagactagaggatggctttagtccaaggtttggggctgtagtgcactatgatcacacctgtgaatagtcacagcactccagcctgtgctgggcaatgtagtgagactccatctcttaaaaaatgtgcagaaagaccatgagctcctcattatcctccaaaggagtaaatgtgttttggatcaacagtgccctgcagcatgaggcctttgagtagataatgcacaggcagtgcgatttgagggcttgcaaaaagccccctccacagtccacaaatgactctcacatcaaatcagactggcctttcgttgtgataatgtcattccagtgggttgaggcagtaccctgttttaaaaggcaaatgcytaggagaagggtcccatggaaatgctgagtgcctcgggcaataggggcctctctactcaaaattagtgggtcactgagtcagttttgatgggcaaggggaggggtggaaggacaaggtaccagagtggtaagaaatgaattagaaaaattcagctaggacataaattgtgggggattgtggga

SEQ ID NO: 171822 - DNA, 563 bp, Homo sapiens
agcctgtttcttatttctgtgtttctccttctctttagccctgtcctccttattctactctcacctataaaatactgaagaggctaacttgaggatttccatcataggggcactggtttctaaggccgacttttataattttctcccacttcttgaggatgcatccaaggagcatgttatgtggtagggagacacgattacccatctgcaaagagagaatagaggagaaaacaaaggaaaaaagatgttgcctgttatctccctattatcctttcctgaacagggtgaccctcattcatccttagggttctagaatgaaccagtcttaccrtgtaccttaactttggtcccatctcatcacaattactcgagaacagaggagatactggaatgaacagaagccccctattcatccttggggttccacaatgaaccagtcttaccaggtacccctaaccttgccttcatctctgttctaatggtaatctgtccttggaccagccttcatctctgtcctatgggaactttttattctcttgcacctgcagccttcagctggccta

SEQ ID NO: 171823 - DNA, 571 bp, Homo sapiens
tcttcaaactccatgctctttccactataccatgttttctctgagatagtactgggatgtactttgcccctaagtgaggaaacgattgtatctatctgtagtaattatatattatgtatatgattatgtctataatattctaaagtcatagaatatatttatattcccagccattgtcatatctttatgtgtttctggcataaagaaggttagttggagaatatggaaataaatcattaaaaatcaatgattgaggattattattttatgtttgaatgctagcatgttattattggacttaccaaaatagaactgtgaatgctgggatatttttcttccctcctaacaatatataaaaygcaactcccctgaagcaaaattattttacattttcttttgtcaatatgtttagtcattgatgttttagagcagtaaaaatatacttactgcaaacctcaaccaaagttgctggaaggaaagatgaagacagatcacccatgctacaaaaattatccttaagggaaaattgctccaactttatacatttgttgattatactacattgttttaa

SEQ ID NO: 171824 - DNA, 584 bp, Homo sapiens
aattcttttctcacacaactctgtttagagtctgggcaaaggaggcaaaaacaaaaacaaagcaaaagaaaaaccccaayttctccaattgcctgcccttgtttgcttccctgcttccacagagactagaagaagattacaacacacaccaaaactcataaagcccataagcctcctggtgatagcaacaccaagtattttacgtccaggtaaggagataggtaagatgtaaccttggaaaaaacagagccagagatcaatgaaggggaaaattctatacaaagacattttctttttaaaatcctttttcagatactgtcttctgtcttttgcctcctcagtgttatgtctctctgcctttcaattcacacagtggtggtagttttaaaatcagggattgcagagattgaacattcctttttaatgatgcccttagagtcacacaggggcctctttgctatttccagctaagctcacccctcctcttttcctggaacttctgaaagggccccagaatcagcctatgtgatctgctgcagcattagattgagaggagggtttgctttttccacagatactgatta

SEQ ID NO: 171825 - DNA, 584 bp, Homo sapiens
gaattcttttctcacacaactctgtttagagtctgggcaaaggaggcaaaaacaaaaacaaagcaaaagaaaaaccccaacttctccaattgcctgcycttgtttgcttccctgcttccacagagactagaagaagattacaacacacaccaaaactcataaagcccataagcctcctggtgatagcaacaccaagtattttacgtccaggtaaggagataggtaagatgtaaccttggaaaaaacagagccagagatcaatgaaggggaaaattctatacaaagacattttctttttaaaatcctttttcagatactgtcttctgtcttttgcctcctcagtgttatgtctctctgcctttcaattcacacagtggtggtagttttaaaatcagggattgcagagattgaacattcctttttaatgatgcccttagagtcacacaggggcctctttgctatttccagctaagctcacccctcctcttttcctggaacttctgaaagggccccagaatcagcctatgtgatctgctgcagcattagattgagaggagggtttgctttttccacagatactgatt

SEQ ID NO: 171826 - DNA, 442 bp, Homo sapiens
agaattctctaagttgagactttacaaaattaagatacaaaaaataagatttgttgagaaaaattaagtccctagcatggatggagagtccagatgtattttaccacatgtttagtgtaagcacaaacaaatacasagtatacagtggaactctaatataaactgccccttgccgtgcactaaggaattggtatgaatctggactggctaagagaatgttgccttacttctctttgggtctggatttactttcttgcattattgttcaagcttggcttgaacaatatttgtgtgaatcgagctggatttgtttcatgctaatttcaaatagaccagttgctttcccctaataagagcttctttgctggtagttcgtggcttccaactgcaaatgttcacagcttccttcaagaaaatcattgccaaatgatttattttaaag

SEQ ID NO: 171827 - DNA, 442 bp, Homo sapiens
agaattctctaagttgagactttacaaaattaagatacaaaaaataagatttgttgagaaaaattaagtccctagcatggatggagagtccagatgtattttaccacatgtttagtgtaagcacaaacaaatacacagtatacagtggaactctaatataaactgccccttgccgtgcactaaggrattggtatgaatctggactggctaagagaatgttgccttacttctctttgggtctggatttactttcttgcattattgttcaagcttggcttgaacaatatttgtgtgaatcgagctggatttgtttcatgctaatttcaaatagaccagttgctttcccctaataagagcttctttgctggtagttcgtggcttccaactgcaaatgttcacagcttccttcaagaaaatcattgccaaatgatttattttaaag

SEQ ID NO: 171828 - DNA, 442 bp, Homo sapiens
agaattctctaagttgagactttacaaaattaagatacaaaaaataagatttgttgagaaaaattaagtccctagcatggatggagagtccagatgtattttaccacatgtttagtgtaagcacaaacaaatacacagtatacagtggaactctaatataaactgccccttgccgtgcactaaggaattggtatgaatctggactggctaagagaatgttgccttacttctctttgggtctggatttactttcttgcattattgttcaagcytggcttgaacaatatttgtgtgaatcgagctggatttgtttcatgctaatttcaaatagaccagttgctttcccctaataagagcttctttgctggtagttcgtggcttccaactgcaaatgttcacagcttccttcaagaaaatcattgccaaatgatttattttaaag

SEQ ID NO: 171829 - DNA, 442 bp, Homo sapiens
agaattctctaagttgagactttacaaaattaagatacaaaaaataagatttgttgagaaaaattaagtccctagcatggatggagagtccagatgtattttaccacatgtttagtgtaagcacaaacaaatacacagtatacagtggaactctaatataaactgccccttgccgtgcactaaggaattggtatgaatctggactggctaagagaatgttgccttacttctctttgggtctggatttactttcttgcattattgttcaagcttggcttgaacaatatttgtgtgaatcgagctggatttgtttcatgctaatttcaaatagaccagttgctttcccctaataagagcttctttgctggtagttcrtggcttccaactgcaaatgttcacagcttccttcaagaaaatcattgccaaatgatttattttaaag

SEQ ID NO: 171830 - DNA, 477 bp, Homo sapiens
aacttaggagaaaagtaaaaccaggggggaaatctctaatttcacatttgttctttctcttcaccaactggaaggtaccaacagaaaacaatgcaatggtagaattttgatgttgagtattgtctttctacaacacctttcctcgctacctacagacttatgttaagatcattgctttaggatactgctgatcttcctaaattacatagacttaaaatgtctactggacagcaaccaaaggaaacaaatacggataaaacacaaaagatcaagtaaaaattcatatttgtcctttacattgtaaaaaatagtgtgctaagcagcattctgcgattgccctcaagattcctttcacgttgtaaactgcctacgtagtggggcatatcgcaargacctaagggtggcctctaggagccaaaagtgtatcccagccaacgaccaggaagaaaaggtcctacaatcacaaggactgaattc

SEQ ID NO: 171831 - DNA, 472 bp, Homo sapiens
ttaataaaaactttcatttaaaaaggccagaaaaaaatagtgagggacattataaagatttgtatagggagaaccaacctattttaggagtagagagattcgaytgtgaagaattcactatgtatagaatctggtttgttaagttgaggaacaaattatgatattttgcccgaagatttttttcttctaaatatggaggaagcttactgattctaatgctttatgttattctagccaattcttggaagatttacttgaggctctgttgctgctttacaaagatgactagaaatgatagtacatgcttataaaattaggctgggttgctgctttacaaagatgattaggtaattataatgatagtacatgcttataaaatatactgtttaataaaaatttaattcctcaaaataactttatggtaaatactactgttatcttcctttttatagataatggaaactgaggtgca

SEQ ID NO: 171832 - DNA, 590 bp, Homo sapiens
tctagttctaatattctctttagctatgtctaatctgctcttaattcattgaatttttaatttcagttatkatgtttttggttttgcaatttctgtttgatatgttattttaaaaattagctttctagttatctcctgaaatgccctatcataccatctaatttcttaaacatattagtccctttaaaggaacatgttctctctctctctctctctctctgtgtgtgtgtgtgtgtgtgtgtgtgtgtagaaaaggagtgtatgaactatacagatattcctgaaagtaggaattctattaactcgtcattagagagcaacaggcatttcagggtaatcagaaagaagatgaagtttaaagaggagaacccattggacttatgtattaaaatctaagtaaacattcaaaatgttaatcaaagtatatcgtctttttaaagttaggatattttactcagggtttatgaggtacctactaaactggacaattcatgaggatgggtttatgtctcttttttgaggtcaccagcgcctggaatagtgtctggcatatgtttcatgctcaataaaagttttaaaattgaactgaa

SEQ ID NO: 171833 - DNA, 590 bp, Homo sapiens
tctagttctaatattctctttagctatgtctaatctgctcttaattcattgaatttttaatttcagttatgatgtttttggttttgcaatttctgtttgatatgttattttaaaaattagctttctagttatctcctgaaatgccctatcataccatctaatttcttaaacatattagtccctttaaaggaacatgttctctctctctctctctctctstgtgtgtgtgtgtgtgtgtgtgtgtgtgtagaaaaggagtgtatgaactatacagatattcctgaaagtaggaattctattaactcgtcattagagagcaacaggcatttcagggtaatcagaaagaagatgaagtttaaagaggagaacccattggacttatgtattaaaatctaagtaaacattcaaaatgttaatcaaagtatatcgtctttttaaagttaggatattttactcagggtttatgaggtacctactaaactggacaattcatgaggatgggtttatgtctcttttttgaggtcaccagcgcctggaatagtgtctggcatatgtttcatgctcaataaaagttttaaaattgaactgaa

SEQ ID NO: 171834 - DNA, 528 bp, Homo sapiens
ttaactaatgcaatctccccagggtgggattctagattattcttattttcttcttgtttctgcaatgaatgtgtatcatattttaaacaagagaataagttactatataatgaataatttttaaaaataatttcttatagaatcttataaaatgagaaatagcaatgtgttcaaagttacatatatccactcaataaaacaaaaaaaattttaaaagagaaaataagaataggaaaggtaaaccgagaagaaggctgagtttagccataaagaggcaggctgagaagtgtggtaacttggtgaaggtggggcctcaaatgtgttgttgatggtggggtacagtgactcacgcctgcaatcccagcactttggtaggctgaggtggccagatcacttaaggccaggagttcgagaccagcctggtcmatatggtgaaaccccatcgctactaaaagtacaaaaaaagtagccaggcatgctgatgcctgcctgtaatcccagctacttaggaacctggggcatgagagt

SEQ ID NO: 171835 - DNA, 521 bp, Homo sapiens
agggtaattagtatgcgtaatttatgcgttgcctaatacacaagggcagtagcctgaataataaactcaagttaaccttaagtgaaagagatygaatggtcagatgtttatttagctcaggtttgctcacgagttaaggttaaagaggtgaaattcagttacagttaattaattaatttctcagattttcttcatgaaaatcttgctggctcaattgggtaaaagttttgtcaaaggcagacagcactatttttattcatcagctattttctaccctgtcctccagcaagttagtaaccatttgaaagaacacatttaagggaactgcaaagagagagaaaatacgaacacatcaaaccaacccaaacaaaccccaagataggagcagatctgtgatctgtgcttgcagacaaaaaacaaaaccaggacagatttaaggaggacatcattatcaaaatgttgggaatgactaggataatgtccaggtttttttcaattgtgaaccacatgtttgagaattc

SEQ ID NO: 171836 - DNA, 521 bp, Homo sapiens
agggtaattagtatgcgtaatttatgcgttgcctaatacacaagggcagtagcctgaataataaactcaagttaaccttaagtgaaagagattgaatggtcagatgtttatttagctcaggtttgctcacgagttaaggttaaagaggtgaaattcagttacagttaattaattaatttctcagattttcttcatgaaaatcttgctggctcaattgggtaaaagttttgtcaaaggcagacagcactatttttattcatcagctattttctaccctgtcctccagcaagttagtaaccatttgaaagaacacatttaagggaactgcaaagagagagaaaatacgaacacatcaaaccaacccaaacaaaccccaagataggagcagatctgtgatctgtgcttgcagacaaaaawcaaaaccaggacagatttaaggaggacatcattatcaaaatgttgggaatgactaggataatgtccaggtttttttcaattgtgaaccacatgtttgagaattc

SEQ ID NO: 171837 - DNA, 521 bp, Homo sapiens
agggtaattagtatgcgtaatttatgcgttgcctaatacacaagggcagtagcctgaataataaactcaagttaaccttaagtgaaagagattgaatggtcagatgtttatttagctcaggtttgctcacgagttaaggttaaagaggtgaaattcagttacagttaattaattaatttctcagattttcttcatgaaaatcttgctggctcaattgggtaaaagttttgtcaaaggcagacagcactatttttattcatcagctattttctaccctgtcctccagcaagttagtaaccatttgaaagaacacatttaagggaactgcaaagagagagaaaatacgaacacatcaaaccaacccaaacaaaccccaagataggagcagatctgtgatctgtgcttgcagacaaaaaacaaaaccaggacagatttaaggaggacatcattatcaaaatgttgggamtgactaggataatgtccaggtttttttcaattgtgaaccacatgtttgagaattc

SEQ ID NO: 171838 - DNA, 485 bp, Homo sapiens
aaaatgtgggtccagaatggaatttcttgagaatgtccagaatttcttgagatgtccattaggcattcttctaaaccagtgccccagtgcaggctttgagcaatctacttctacaacagaaaggcagttgtagaacccctgcatagcttgtcctacaaagaaaataatactctttataatttgggccatttcccgtaaggtttgggtcatttttgtcatgtgccttttagaccagtcaggtggaacacttaactatgttaaatcattttttcaagagttatgactaaacgatkggcaaaggagctggagttggaggtaaacactgaagaaatgtggtcaaaggcaatttgaagttgacctggtggtctaaagtgcaatgaccaaactattcagctctcaatgattgatgtgtggacttcacacaaaagcaaatgtggaaattgtgattccaatctcaacacaaatccagtcagttgctagtctaa

SEQ ID NO: 171839 - DNA, 485 bp, Homo sapiens
aaaatgtgggtccagaatggaatttcttgagaatgtccagaatttcttgagatgtccattaggcattcttctaaaccagtgccccagtgcaggctttgagcaatctacttctacaacagaaaggcagttgtagaacccctgcatagcttgtcctacaaagaaaataatactctttataatttgggccatttcccgtaaggtttgggtcatttttgtcatgtgccttttagaccagtcaggtggaacacttaactatgttaaatcattttttcaagagttatgactaaacgattggcaaaggagctggagttggaggtaaacactgaagaaatgtggtcaaaggcaatttgaagttgacctggtggtctaaagtgcaatgaccaaactattcagctctcaatgattgatgtgtggacttcacacaaaagcaaatgtggaaattgtgattccaatctcaacmcaaatccagtcagttgctagtctaa

SEQ ID NO: 171840 - DNA, 563 bp, Homo sapiens
cccagccatcccattactgggtatatacccagaggactataaatcatgctactataaagacacatgcacacatatgtttactgcggcactattcacattttgtatcatttttcacctgcaatgaatgagagttggtgcttcttgctagcatttgctattatcaggtttttgttttgctgctgttattttaaccaatctgataggtaggcagtggcatttcagtgtggttttaatttgaatttccctaacattaagcatttttgctaggcatatatctttggagaacatttactcagattttaaaaattgtgttgctggttttcttgctgttgagttttaagggttttaaaccatatttctggatacaacaactctaccaaatatgtgatgtgcaaatattttctgccagtctttctgaggtgtcttttaattctcataccagtgtctaagcgaaaagttttaattttgataaagcacaaattatcaatttgtttcttaatggttcatwgttttggtattgtatctaccaactcatcaccaaatccaaggttacacagaagttg

SEQ ID NO: 171841 - DNA, 420 bp, Homo sapiens
ggagcccccgttcctgtgccactctcaggtggggtgactttgggctctgggaaggagagctgtgtccgtgtcacgagggggccccggcaggtggcgagcagcaccgaagcgcgggccaggacgctcgtttctcggcgccctctcctgggtcagtggcgcatccacctccccagccaccagtgaccagcgggggcgtgcgcagcttcagaggtgcagtttggaactgccctccccctttcagtgtaggactggcgacactcctttcttcctgcaggyagcaatctccagggacctccctcaaccctgtggagggcagttttttcagtggctcaaagaaaacacgtctttcgtgtccctggtcagactgctctgcctgtaactgcggtgtgcagagagcctgcgcgagaccgttgtcctatc

SEQ ID NO: 171842 - DNA, 474 bp, Homo sapiens
tgatatattctataactaatgatacccatttggtagctagagacaaaaatgtgtttcctgggagaaaaaaaaaaacaacaaaggttatgttttaatgtaatggaagattagaaatcctaagcaatttgcttatcaatcaaaacattggaaattttgaaaaaaggagctgtctagttarcagagttttcacctggggctcattagtggttctaaaagtgggtctttctctagtttctaactaatgtgctgctgggagttaggccaggtgttccttacactgatttccactcaaagcaactttatctgaaagcccatcaccttcacaccacacaagtgcaactctgttcactggtttcagtaaattagctcagtctctactactgtgcaaagaccaagatgagtggctggtttcaaataataagcactgaggaccttaaattattttgccagtttgtcttttgttaatgggaattc

SEQ ID NO: 171843 - DNA, 474 bp, Homo sapiens
tgatatattctataactaatgatacccatttggtagctagagacaaaaatgtgtttcctgggagaaaaaaaaaaacaacaaaggttatgttttaatgtaatggaagattagaaatcctaagcaatttgcttatcaatcaaaacattggaaattttgaaaaaaggagctgtctagttaacagagttttcacctggggctcattagtggttctaaaagtgggtctttctctagtttctaactaatgtgctgctgggagttaggccaggtgttccttacactgatttccactcaaagcaactttatctgaaagcccatcaccttcacaccacacaagtgcaactctgttcactggtttcagtaaattagctcagtctctactactgtgcaaagaccaagatgagtggctggtttcaaataataagcactgaggaccytaaattattttgccagtttgtcttttgttaatgggaattc

SEQ ID NO: 171844 - DNA, 390 bp, Homo sapiens
ggaattctacataaaaggcatggcatgtgyaggggcagagaggttttagaaaatacaacattttcagaagctgaaaacagttcagtatatcagaagcacaggcaatatcaaggaatactgagagatgagatacaggttgtgcaagtgtcttgcatgttatcatatttagcttttgtgaagaacagtatgagtaagcccaggatgaatttagctgtagagggagggtgaattacgtgattacactcatgtttatcaacaattacttagtgtcataaaattatgtatgcatatatgcactaatgtagttatccttcttttaattcagttggtagcggaaatgaagttgttagttttcaataaaaatgttacaggaaagaggtcccgatccag

SEQ ID NO: 171845 - DNA, 475 bp, Homo sapiens
gaattcaattcaggaactttttcttaagcatgtgccaaaattcaaccaccactggtacmaatatgcataaggcatagctatgccctcaaggaacccacaatctgctaggagaaagagacatgtgaagaaagagctgtgaaaggaagtcatacatataatcagagagaaataaaacatgtacagataaaacagaagaggagtaaattaggacagaaattgtttagaatgaggcttagctgaattgttctatatattttcatgagaaatgcccatcacggaaggtggtattctatacgagattcattgttaattatctaaaactgtactgcacattatccaatacaactcaaccaatcaacaaagtttcacctggagaaatttcagaaatgttattttaacacatttcattttaatttagtatcttttaaaccataggttgactggagagggtcaagggcaggtgtgaaatgatcaa

SEQ ID NO: 171846 - DNA, 474 bp, Homo sapiens
aattcaattcaggaactttttcttaagcatgtgccaaaattcaaccaccactggtaccaatatgcataaggcatagctatgccctcaaggaacccacaatctgctaggagaaagagacatgtgaagaaagagctgtgaaaggaagtcatacatataatcagagagaaataaaacatgtacagataaaacagaagaggagtaaattaggacagaaattgtttagaatgaggcttagctgaattgttctatatattttcatgagaaatgcccatcacggaaggtggtattctatacgagattcattgttaattatctaaaactgyactgcacattatccaatacaactcaaccaatcaacaaagtttcacctggagaaatttcagaaatgttattttaacacatttcattttaatttagtatcttttaaaccataggttgactggagagggtcaagggcaggtgtgaaatgatcaa

SEQ ID NO: 171847 - DNA, 451 bp, Homo sapiens
cacaggcctgggacagagtaagcactcataartatttgttaagtgaaaaaataaatgaatgaaagtatcccaaacacttgcattttcaaaaggttttgacatccacttccttttcttctcaaagctacgctttgagatggataggtcctattttacctctattgcatcgatgaagaaactgcaatgcaaagaagtgtctaattagtcatttgcttcctttcatcaaatatgtccattacaccagtgtttctcaaaatgtgttccatagatcataaatcctgaaggatgttaatagttattatgtgccaggggacccgtggatatataagtttggaaaatagtgaagtaaaaaaaaaaaaaattggtttacttactacaagttttctcagagccttattaagccaatgtgcattgtgaacacaggaggtagtggagatagttaaagtatgca

SEQ ID NO: 171848 - DNA, 560 bp, Homo sapiens
gaattcagatcagaagaacttcgttttcattgtgcattgtttttactttgagaccatgtcagagagcatgcacagacctttcaaaaaaaatggctacctactattaaccataagactgcataacaaagccatgctacacttacactcacactctgagagctatggcagctgaacatggtgtcttctaaagctgtcaaaccaactgcctgcctttcaggctttgttctgggatggtatcagggtatgcctgctccaggatccttcttagattagtgatgaggatagctcaggaatacttggctggcctagggattcccaggaagtgccttgctccctgcttatttaccccacagtcattttatattaaattttataaaagtttaaaatctaatgtctgaatagaatgtgctatttaatcatcattggtgttttagattagttctctggkccgtaaaaacattctttgcaaaagcattttttctttttagaatcctgggaggaactcaagatgtccatctggtcatctattgggttacttgtggattcccctaactcagaat

SEQ ID NO: 171849 - DNA, 568 bp, Homo sapiens
aatcctagaactaaagaattttttaatgaaataaaaatataattgagagtttcaaaattagattagatcaagcaaaagaattaacattagactagattaacaatagactagatcaagttacaaaacttaaagatgggtcttttgaaataacgcagttagacaaaaataaataaataaaaatgaacaaagtctatgtaacataaaggacaccataaggagaccaaatattcaaatttttggtatttcagatagagataaggccaaaggcataaaaaagctatgtaatgaaataatagctgaaaacttcccaaatacaccaagaggtttacctatccaaatagaagaagctccaagatcccaaagggtcttctccaaagcaccttagagtcaaattgtcaaaagtcaaatacaaagatataattctaaaatgagtaacagaaggaatctccgtcagataatagcagatttctcaacagaaattttacaggccaggagagaatgggatgacatattcaaagtgctgaaagaaaaagaaaatgtcartcaagaatatcatacccagcaaagt

SEQ ID NO: 171850 - DNA, 586 bp, Homo sapiens
gcagaaaaaaaaatcagtgaagataggacaatggaaatcaacttcatctgaggaacaaaagaaaaaaagtttaaacagggcacagtggctcatgtctgtaatcccagcacttcaaaacaggaagagcccttgagatcaggagtttgagatcagcctgagcagcttagtgagaccctacctctatagataattttaaaaattagctgaacatggtggcacatgcctgtagtcctagctactagggaggctgaagtgggagaactgcttgatcccaggagtttgaggctgttgtaaggtataatcatgccacagcactccagcctaggaggcrgagtgaaactgtctcttaaaaagaaaaagaaaaaagaatgcttaaagaaaagtgagcagagcctaagggatctgggggacaacatcaaacagaatacatgtattctgggatttctataaggagaatggagaatgggaaagagagaatatttatagaaataatggctgaaaagttcccatatgggatgaaataaatgaatacaaacatctaaaaaactcaacaaactccaagtaagatgaactaaaagagatccac

SEQ ID NO: 171851 - DNA, 482 bp, Homo sapiens
actgtcaccttcacctagactgtggctccatcattggctgcagcaaatggagctgcagaagttgtatttggcagtgcctccagggraggtcagggcacaggtgcccaggcttgggtgggcatctggtgctgggagggcaggggagtaaggtctttggcaggctgggggaggtgagcagccccagggttctgacatgcctccgctgcctttcacatcctctttagggtatttcttgagaggacgcattgctggcccctgtcccagggctgtggcagctgtcactgagttgtaatgacctatgtctacagttgtaaataaagccaaagaccactctgcaaggactttggctgggcaaaggccactgccgtttgatttctctcatgctcttctatcttactgggtgagaggtggcatggataacttgagaagggctggagcttttatgagtttcttagagagtatctgattcccaagcaggttaa

SEQ ID NO: 171852 - DNA, 647 bp, Homo sapiens
atcatcatcatcatcatcatcatcatcatcatcatcatcatcatcttaacagttttcaatactcctaaaccgggaaatatctaaaaactttaaaatgttccatttgtaacaacaataacaaagtaaacaatttgaagtgcatatgaaggggaaaaagtacatttagtgcattcagctctgccactagtcagctgaacttgggcaggtattttcaatctttgtgctacaatttcttcatctgtaaaaaggaggcagtaacagtacttacttaacaaggtygttgttaaggattaaatgacttaataatatacttagaacagtccctgtaatatattttaatactaaacactcaataagtactaggtattcttatcactaaccagagagacaaagtcgtgccttaaaatacttaaatatgataaagactcaaacaacttatgtatatacaacatattttttaggttgaattatgaagagtttttactttttaaaacctactaaaaaccttcaagtagctttaaaatattcagaattttaaacccagaacttaataatgatccagaatttttgtatcttcagctggtatacctctgcttgtttccaagtgaaccctgaagactagttaaaacatttagctaaggaatgta

SEQ ID NO: 171853 - DNA, 527 bp, Homo sapiens
taaaaaaaagtcagtgaatcatcatccctaagataatgtgtcttcccaaatgggagaatcatactgcacttaagatggtttgtgtgtgcacttatatttttctcatttacaaaaatgagtggtactctggctttagaaaaaaaaaaaagaaaacaaaaggagagagagaggagagagtgagaggaaggaaggaagcaagtgagggaagaaggaaagcaggaaggaaggaaaaacgaagggagggagggagggagagggaggaaaaaatgcagtaggaaaatacattcctggtgaagatactgtgaaaagtgttgaaatgacaacatattctgcagtagggactgtgaggaaaaaattcttttaaaaaaagaaaacagaggattcaaagcatyatagaaattgagttgataaagcagtggcagggtttgagaggattgactccaattctggagttctactgtggataaaaggctatcaaacagcattggatgctacagggaaatctttcctgtaaggaagaggcaact

SEQ ID NO: 171854 - DNA, 420 bp, Homo sapiens
tacagtacttgaaagaaattagcacactaaaaagtcacaaaagtgaatttatcacatattcatctctattttagcattttactcatgaaagaataatttcaccttataacatgttgggtagaaccagtaggggtcctctggacttttttatttgaaattttttctttttcttttttctttttacaaacaaaaagagtaacagtttattttatatattctgatgagtaaaaaagggacccaagtttaccctcctaggtttttacccaagagaaaatatgtatccataaaaaatgcttacataaaatagttcatagtagctttattcaaaattccccaraaacagaaacaaatgaaatgttggtcaatggataaaaggttgtggtatgttcatacaacggaatatttatacttagcaagaaa

SEQ ID NO: 171855 - DNA, 420 bp, Homo sapiens
tacagtacttgaaagaaattagcacactaaaaagtcacaaaagtgaatttatcacatattcatctctattttagcattttactcatgaaagaataatttcaccttataacatgttgggtagaaccagtaggggtcctctggacttttttatttgaaattttttctttttcttttttctttttacaaacaaaaagagtaacagtttattttatatattctgatgagtaaaaaagggacccaagtttaccctcctaggtttttacccaagagaaaatatgtatccataaaaaatgcttacataaaatagttcatagtagctttattcaaaattccccaaaaacagaaacaaatgaaatgttggtcaatggataaaaggttgtggtatgttcayacaacggaatatttatacttagcaagaaa

SEQ ID NO: 171856 - DNA, 541 bp, Homo sapiens
agctttaaaagccattattagtatcttcacaaagataatggacccatgatagaaaaacaggatgaatatggaagcacttggagaaaaacaaagagctcttggaagctaaaaacataaataggagaaacccagaaatagaccttcacatttatggtcaatttacttttggtgagggtaccaagacaagtcaatggagaaaaaagaatattttcatcaaatggkgctgggacaaccatatatcgatatccaaaataatgaatttagaccactatttcatactacatacacaaattaactcagaatgggtgaagggcttaaatgtgagagctaaatctataaaattctgaaaagaaaatatagccataaatctttgtgacttcggactatataacagatatgacctcaaaaccacaaccaacaaagggaaaaaataaacacatttggactttaacaaaatttcttgtgtttcaaaagatactatcaatagagtaaaaattcaactcatagaacaggagaaaatatttgctaatcatatatctga

SEQ ID NO: 171857 - DNA, 541 bp, Homo sapiens
agctttaaaagccattattagtatcttcacaaagataatggacccatgatagaaaaacaggatgaatatggaagcacttggagaaaaacaaagagctcttggaagctaaaaacataaataggagaaacccagaaatagaccttcacatttatggtcaatttacttttggtgagggtaccaagacaagtcaatggagaaaaaagaatattttcatcaaatggggctgggacaaccatatatcgatatccaaaataatgaatttagaccactatttcatactacatacasaaattaactcagaatgggtgaagggcttaaatgtgagagctaaatctataaaattctgaaaagaaaatatagccataaatctttgtgacttcggactatataacagatatgacctcaaaaccacaaccaacaaagggaaaaaataaacacatttggactttaacaaaatttcttgtgtttcaaaagatactatcaatagagtaaaaattcaactcatagaacaggagaaaatatttgctaatcatatatctga

SEQ ID NO: 171858 - DNA, 541 bp, Homo sapiens
agctttaaaagccattattagtatcttcacaaagataatggacccatgatagaaaaacaggatgaatatggaagcacttggagaaaaacaaagagctcttggaagctaaaaacataaataggagaaacccagaaatagaccttcacatttatggtcaatttacttttggtgagggtaccaagacaagtcaatggagaaaaaagaatattttcatcaaatggggctgggacaaccatatatcgatatccaaaataatgaatttagaccactatttcatactacatacacaaattaactcagaatgggtgaagggcttaaatgtragagctaaatctataaaattctgaaaagaaaatatagccataaatctttgtgacttcggactatataacagatatgacctcaaaaccacaaccaacaaagggaaaaaataaacacatttggactttaacaaaatttcttgtgtttcaaaagatactatcaatagagtaaaaattcaactcatagaacaggagaaaatatttgctaatcatatatctga

SEQ ID NO: 171859 - DNA, 541 bp, Homo sapiens
agctttaaaagccattattagtatcttcacaaagataatggacccatgatagaaaaacaggatgaatatggaagcacttggagaaaaacaaagagctcttggaagctaaaaacataaataggagaaacccagaaatagaccttcacatttatggtcaatttacttttggtgagggtaccaagacaagtcaatggagaaaaaagaatattttcatcaaatggggctgggacaaccatatatcgatatccaaaataatgaatttagaccactatttcatactacatacacaaattaactcagaatgggtgaagggcttaaatgtgagagctaaatctataaaattctgaaaagaaaatatagccataaatctttgtgacttcggactakataacagatatgacctcaaaaccacaaccaacaaagggaaaaaataaacacatttggactttaacaaaatttcttgtgtttcaaaagatactatcaatagagtaaaaattcaactcatagaacaggagaaaatatttgctaatcatatatctga

SEQ ID NO: 171860 - DNA, 460 bp, Homo sapiens
tctgaaagcaaagcactggtgtacaagtaaaatatcatgctacagtttgactgtctgctatcccctgccccattgttccacttctttsatcagctctattttctttgagggtattcctggcaacttcacagtcagattcaatgaattaattttattttttaattcagcattgattaattgcccctgtcaaatgaacggtgacatgggccacttaggtttggttcactatttggggtgcctatcctgtactcaaacccagcttatagctgtggaagacaaagacctccacagctatagggtatgctttcaaaaattttgcagtggagttacaagtctgttaacccattaaaatataaaagtactaagaatctctcacattatgtagtatttggcagtgtgcaaaatattgcacataattctctaggttatcacagtgacccctataaaccttgttaattat

SEQ ID NO: 171861 - DNA, 567 bp, Homo sapiens
atggacccatgatagaaaaacaggatgaatatggaagcaattggagaaaaacaaagagctcttggaagctaaaaacataaataggagaaacccagaaatagaccttcacatttatggtcaatttacttttggtgagggtaccaagacaagtcaatggagaaaaaagaatattttcatcaaatggtgctgggacaaccatatatcgatatccaaaataatgaatttagaccactatttcatactacatacagaaattaactcagaatggatgaagggcttaaatgtaagagctaaatctataaaattctgaaaagaaaatatagccataaatctttgtgacttcggactagataacagatatgacctcaaaaccacaaccaacaaaggaaaaaataaacacatttggactttaacaaaatttcttgtgtttcaaaagatactatcaatagagtaaaaattcaactcatakaacaggagaaaatatttgctaatcatatatctgataaggggttggtatccagaatatataaagtactcttatatttcaataataaaaagacaaccgaa

SEQ ID NO: 171862 - DNA, 644 bp, Homo sapiens
atttctggaaggagtcatttcaaaaggaggacataaaaaccatctttaaggtgccactggcctaagatggaacaaatttgaacagcagaaagaattgatcagtggttattgattgaaacatcagtaataaaaatcctctagttcataaaggtattaagaaatcctcattkgtaaccactggaagttaatagggcatcaactcattaatatgaaaattggtatgcaaaggggaagaataaagcatttatcctgccttcctatccgaactatatttttgggataatcaaatagatttgatgaagggaagtgctgtagggaagaatttctgtgaatatatgtagatatattacatctgtagatagaattaatatcacctgtttgcaattcccactaaataatagatcaaggcaacaattattaaaggcttctaaaactatcagaacttgctgatcagtcttagcaacactataacttggaaagccagacattacctgcctcacaatcctctgtaataagaagtatgcagcaccaactatgaagtattcttgctaaaaaaaaaaaaaaaaaattgagccggaatctaatcaccagtttagatgaacttaggtctaactagcatttcgtggaaactacagaagatagag

SEQ ID NO: 171863 - DNA, 459 bp, Homo sapiens
agttgacttcttgtgtttccttttcctccatgattctatctctgtaattatttactcccttcttagctcctgaggccttcaagcagatttttaaaaaaattttgtctagcttttttttttttttgctgttttcaraataaaggttgggttgggttatccactttctatatatttaaaatcctagaagaaatgaaagattttaagagaaaatataaattattcaaattgattcatgagtagaaaatctaaataatttatcaaccatataattacccaagatctatccctaatcactgtagtccaccaagacaattttaccaatgagttctaccaaatcctcaagaaaagataattccaatattacataaaatatgacataatgttacataaatattacaaactataaggaaaaattgaaatctacccaatccaattcataagaccagcatgatgcatgat

SEQ ID NO: 171864 - DNA, 442 bp, Homo sapiens
cttggcagcccttgggagcaggatctttggagaacacataatcaatcctagcactacagcatagcagatattgtgagtgcaggtcacaggtgccctcrgatggagaatggcatcctgtgacaatgacagcagtggggtctcagggcatagagcaggcagctccggagcatctcagtcaatcccaggaccatagcatggcctctcagtactgataggacctcacaaggagccacataagaataaccgtaatcaagacaatagtgaagttgagaaacagctcccgggtgtttatccccattttcacagcggcttggtgagaactgcaggcagatttctgagggcacaccaaggacctctggcttgtcctcacctcctgataaaacataccaaagaaaacccaaggagattaatgggcattcctgtataacaatgctcgttcttt

SEQ ID NO: 171865 - DNA, 611 bp, Homo sapiens
gctggtctcgaactcctgagctcaagcaatstgctcaactcagcctcccaaagtgctgggactataggcatgagccacaacactgggccttccttgttttaatttgcatttctctaacgatgagtgatgttgagctttttttcatatgatggttggccacatgtatgtcttctttttaaaagtgttcatgtccttttggccactttctaatggggtggtttgggtatttttggaaatttgtttaagttccttatagatgctggatatcaggcctttgtcagatgcatagtttgccaaaaatttctcccattctgtaggttgtctgttcactctgttgatagtttatttttgctgtgcagaagctctttagtttaactggaatgcatttgtcaatttttgcttttgttgtcattgtcatgaaatgtttgcccattcttatgtccagaatggaattacctacattgtcttccagtgtttttatagttttgggtttttaagtctttaatccatcttaagttgatttttgtatatggtgtaaggaaggagtccagtttcaatcttttgcatatgactagccagttatcccagcaccacttattgaaaaaagagtc

SEQ ID NO: 171866 - DNA, 560 bp, Homo sapiens
gctggagaattactgaaccatgctacactttatcaagctctattttctagaatttcagcacagcattttgaatctaggaccagagatcctgaactcttgtcgttctgagaaagagttcaagaaaagataaatgaaaaggaatagttggaccgagtgctggggctcatgcctgtcatcccaacactttgggaggccaaagcaggagagctgcttgaggccaggaattcgagatcagcctcatcagcacagtgagaccccatctctacttaatttataaattttaaaaacaagtagctgacaggtgataaaaaagaaggcagtcctggcttcttagtastgactgaacttttggaaatataaccagagggttaagttaattccactatttgattaatctaaaaatcttacctcaagttaagggaatttagagaattaaccaagaaaagcaaacaacaaaacaacagcaaaccgtatcaatgaggttaaacagcaacaccattaccaaaataaaatatgtcaaaactttgtgatgtcaaaactgccacatctcattaagacat

SEQ ID NO: 171867 - DNA, 560 bp, Homo sapiens
gctggagaattactgaaccatgctacactttatcaagctctattttctagaatttcagcacagcattttgaatctaggaccagagatcctgaactcttgtcgttctgagaaagagttcaagaaaagataaatgaaaaggaatagttggaccgagtgctggggctcatgcctgtcatcccaacactttgggaggccaaagcaggagagctgcttgaggccaggaattcgagatcagcctcatcagcacagtgagaccccatctctacttaatttataaattttaaaaacaagtagctgacaggtgataaaaaagaaggcagtcctggcttcttagtactgactgaacttttggaaatataaccagagggttaagttaattccactatttgattaatctaraaatcttacctcaagttaagggaatttagagaattaaccaagaaaagcaaacaacaaaacaacagcaaaccgtatcaatgaggttaaacagcaacaccattaccaaaataaaatatgtcaaaactttgtgatgtcaaaactgccacatctcattaagacat

SEQ ID NO: 171868 - DNA, 522 bp, Homo sapiens
taagggaatttagagaattaaccaagaaaagcaaacaacaaaacaacarcaaaccgtatcaatgaggttaaacagcaacaccattaccaaaataaaatatgtcaaaactttgtgatgtcaaaactgccacatctcattaagacattctaaaacgctcgcttttccctcctgaatccataccactgtttgttcctcttatggaccattctaagagcctcctaatagtttggccactatggcagcaacaagcccccatccatactttatggagtcttcagagtccccagaaggagagaaggaccctggctgctccccgactctcagtccccctcagaggagtgtcctgctcctggctggaaagcaaggctgtgccaagccaacatctcctgagctccacccactaacaggcccccatcatttctctcaatctctgtttttcagctggacagaatggggaaacaatgccgtgactttataccttggagttatttccttttccacccccttttccttcaaaatcca

SEQ ID NO: 171869 - DNA, 522 bp, Homo sapiens
taagggaatttagagaattaaccaagaaaagcaaacaacaaaacaacagcaaaccgtatcaatgaggttaaacagcaacaccattaccaaaataaaatatgtcaaaactttgtgatgtcaaaactgccacatctcattaagacattctaaaaygctcgcttttccctcctgaatccataccactgtttgttcctcttatggaccattctaagagcctcctaatagtttggccactatggcagcaacaagcccccatccatactttatggagtcttcagagtccccagaaggagagaaggaccctggctgctccccgactctcagtccccctcagaggagtgtcctgctcctggctggaaagcaaggctgtgccaagccaacatctcctgagctccacccactaacaggcccccatcatttctctcaatctctgtttttcagctggacagaatggggaaacaatgccgtgactttataccttggagttatttccttttccacccccttttccttcaaaatcca

SEQ ID NO: 171870 - DNA, 522 bp, Homo sapiens
taagggaatttagagaattaaccaagaaaagcaaacaacaaaacaacagcaaaccgtatcaatgaggttaaacagcaacaccattaccaaaataaaatatgtcaaaactttgtgatgtcaaaactgccacatctcattaagacattctaaaacrctcgcttttccctcctgaatccataccactgtttgttcctcttatggaccattctaagagcctcctaatagtttggccactatggcagcaacaagcccccatccatactttatggagtcttcagagtccccagaaggagagaaggaccctggctgctccccgactctcagtccccctcagaggagtgtcctgctcctggctggaaagcaaggctgtgccaagccaacatctcctgagctccacccactaacaggcccccatcatttctctcaatctctgtttttcagctggacagaatggggaaacaatgccgtgactttataccttggagttatttccttttccacccccttttccttcaaaatcca

SEQ ID NO: 171871 - DNA, 503 bp, Homo sapiens
aagggaatttagagaattaaccaagaaaagcaaacaacaaaacaacagcaaaccgtatcaatgaggttaaacagcaacaccattaccaaaataaaatatgtcaaaactttgtgatgtcaaaactgccacatctcattaagacattctaaaacgctcgcttttccctcctgaatccataccactgtttgttcctcttatggaccattctaagagcctcctaatagtttggccactatggcagcaacaagcccccatccatactttatggagtcttcagagtccccagaaggagagaaggaccctggctgctccccgactctcagtccccctcagaggastgtcctgctcctggctggaaagcaaggctgtgccaagccaacatctcctgagctccacccactaacaggcccccatcatttctctcaatctctgtttttcagctggacagaatggggaaacaatgccgtgactttataccttggagttatttccttttccacccc

SEQ ID NO: 171872 - DNA, 389 bp, Homo sapiens
tgatcacaccattgtactccagtctgaatgacagagtgagactctctctgtaaaaaagaaaaagaaagaaaaaagaaataataaactcagtgaagctcaataaactcaaattaaacttaaattaagatcattaaagaagggaaaaaataagataaaaacagatattgataaaatagaaaaacaaatatttcacagagaaaaccaacaaaggcagaaatctgttctttgaaagaataattaaattgatatacctttagcaagagtgawtttttaaaaaggaagacactacttgccaataccataaatttaaaaactggtagattattttagatcctagaggcattataaaaataaatacatactacaaacaactttgtcgctaaatttga

SEQ ID NO: 171873 - DNA, 445 bp, Homo sapiens
atccaattggttgaatctttgcagaattatattttggaacttcatagaaaaataaaacaggaagttggggaagggtggcattggcccaccactagggggagtgttrgtgaaagtttatcttagacactcttaggcgggcaggttctgcagtgggtaagggtttggtggagggaaggaagggaagaggtgggcattcaggaaaaagctgggtggaactcaggaaggcatggaggtgtggtcctgttggaggagagcttgcaagaagagcaagaaggcagtgcagcacattggtaatacctctcaccgagcacttgctgtgtgttaggctctgtgactctcattattagtttctgtcgctggaaaatgggaaggctaatagtttctcctttctaagagttattgcaagcactttaagaaatactgtgtacaacatttttgaacaatg

SEQ ID NO: 171874 - DNA, 445 bp, Homo sapiens
atccaattggttgaatctttgcagaattatattttggaacttcatagaaaaataaaacaggaagttggggaagggtggcattggcccaccactagggggagtgttagtgaaagtttatcttagacactcttaggcgggcaggttctgcagtgggtaarggtttggtggagggaaggaagggaagaggtgggcattcaggaaaaagctgggtggaactcaggaaggcatggaggtgtggtcctgttggaggagagcttgcaagaagagcaagaaggcagtgcagcacattggtaatacctctcaccgagcacttgctgtgtgttaggctctgtgactctcattattagtttctgtcgctggaaaatgggaaggctaatagtttctcctttctaagagttattgcaagcactttaagaaatactgtgtacaacatttttgaacaatg

SEQ ID NO: 171875 - DNA, 445 bp, Homo sapiens
atccaattggttgaatctttgcagaattatattttggaacttcatagaaaaataaaacaggaagttggggaagggtggcattggcccaccactagggggagtgttagtgaaagtttatcttagacactcttaggcgggcaggttctgcagtgggtaagggtttggtggagggaaggaagggaagaggtgggcattcaggaaaaagctgggyggaactcaggaaggcatggaggtgtggtcctgttggaggagagcttgcaagaagagcaagaaggcagtgcagcacattggtaatacctctcaccgagcacttgctgtgtgttaggctctgtgactctcattattagtttctgtcgctggaaaatgggaaggctaatagtttctcctttctaagagttattgcaagcactttaagaaatactgtgtacaacatttttgaacaatg

SEQ ID NO: 171876 - DNA, 578 bp, Homo sapiens
ggtcactatcagagttaaagcaaatatggcacagggcagggccagacttaataaatgtctgctaaatttgaattatcaactgtaaaaaatgggcagagtctattacaaccaactgaatttgtgcgattcaggttgctttcagtttactttatttttatggtttctaactccgttggagttaaaagaagatggagacttcctcctgtatttcttcaacttctaaataagcctcctgttaaattcacaaggagaaaggccatcatctagacaatatcctcttggcaccctctagaaagcyacttgcttgtatgatcaatttgtcctcacaaccaggttaattttcaggctcccaggagccagcgtgatcatttcaaactgcactgtttcagggtttaggtgacaggcttgtgctttggtcctcggttctatcagacctttccatcaggcctttctctaatgctcccacccccatcccaggaaggctgtgaactgaggatgctcccctgagtttaggatgcttagaatgaagctctcacttctcctccctctgagtacctgccctagggcttggctgcaaa

SEQ ID NO: 171877 - DNA, 575 bp, Homo sapiens
ccacagtcagaacagtggaaagtgcctcagtagtaggcactggaattgtgctctcccctgatgccggcctgtggtgggaggaaagctgctactgctgcagtttctcctgatgacaatacttgcagccaggaccagcttgacaacctggaactgctctgcatgtgtcattgctgggtgccccaatatgctcccctgagatcatgctatagcagggccctctctgctccatgcctagaaactagaattctggcgccatgaaaaatctgaatgtagtgacaccaccaaagggtcacactagctctccagcaagagttcctaaccaaaagggaaactaagaaatgacaaagaattcaaaacatggattgcaaggaagcttaatgagttccaagacaaggttgaaaatcagcaaaaagaaacttcyaaatcaatccatgaaatgaaagcggagatagaagtcttaaaaagaaatcaatcagagctactggaattgaaaaactcacttaaggaatttcaaaatacaattgaaagctttatcaatagactggaccaagcagaagaaagaatttcagagcttg

SEQ ID NO: 171878 - DNA, 575 bp, Homo sapiens
ccacagtcagaacagtggaaagtgcctcagtagtaggcactggaattgtgctctcccctgatgccggcctgtggtgggaggaaagctgctactgctgcagtttctcctgatgacaatacttgcagccaggaccagcttgacaacctggaactgctctgcatgtgtcattgctgggtgccccaatatgctcccctgagatcatgctatagcagggccctctctgctccatgcctagaaactagaattctggcgccatgaaaaatctgaatgtagtgacaccaccaaagggtcacactagctctccagcaagagttcctaaccaaaagggaaactaagaaatgacaaagaattcaaaacatggattgcaaggaagcttaatgagttccaagacaaggttgaaaatcagcaaaaagaaacttctaaatcaatccatgaaatgaaagcrgagatagaagtcttaaaaagaaatcaatcagagctactggaattgaaaaactcacttaaggaatttcaaaatacaattgaaagctttatcaatagactggaccaagcagaagaaagaatttcagagcttg

SEQ ID NO: 171879 - DNA, 582 bp, Homo sapiens
tgtaaaaactgctaagaagtgttaccaaaaaaggcaagtaaaaactgctaaaaaaaaatgtaaagcacccagacaaattaaaacatattacctttagagaagcaatgagatcaacagcagacataaaaataaattatgagagcaaaagagacaatgaatgcagtgattcctttaaagtattaaaagaaaataattaccaacttttaattatatacccagcaaaaacattctctaaaaaatataggwaaattaaaagtttatggatgaaaaaaagttaaaacagaaaagaaagaaaaaaccaacaaagaatttatcaccagcagacccacaataaaaaatttaaaagagagttgttgaggtacatgaaaaagaatcctcaaaatctgtaaatgcagaaataaagagcaacataaaagataaatgtttaataaagctgaatgtatactacctaaaataataatttcttataaagttagaaaatttagtagaattaaaaatacatgataatgatagcataagaggatgtgagagagttaaaaataaagaaatgtgtgtacctaataacatacaaatattaagcaa

SEQ ID NO: 171880 - DNA, 550 bp, Homo sapiens
atcctctgccttgattaattgagtttcttgtcacaaaaaatgtccaagtgagaattggattaccatgcagtgggaggcgggctgaaataggtgtctttktggactcccttcctctgagattctcatcttgtaccctggctttcctcttttaaaggttatcaccctgccttatcctaccctcagtggccaagcaactgtcttccctcatgtgcacctgtttttccctgtgtaattacacctttctttgtggttctctctgttggagatcccaaacacctccttccactactacctaacttcccttttcttttctactttccaggatactgaactttcaattcatagggcactgctaaggtcaaaatattgtcctcaatgtaaattttactgggcatgagtagaatcatgtggataaaaggaagataagagagagcatttatttgcacctactgtgtaccagatgctttaaatacattatttaatataatcctcacgttaaccctagcagttgatatgcttgccctccacacttgctagctggatgactttt

SEQ ID NO: 171881 - DNA, 550 bp, Homo sapiens
atcctctgccttgattaattgagtttcttgtcacaaaaaatgtccaagtgagaattggattaccatgcagtgggaggcgggctgaaataggtgtctttgtggactcccttcctctgagattctcatcttgtaccctggctttcctcttttaaaggttatcaccctgccttatcctaccctcagtggccaagcaactgtcttccctcatgtgcacctgtttttccctgtgtaattacacctttctttgtggttctctctgttggagatcccaaacacctccttccactactacctaamttcccttttcttttctactttccaggatactgaactttcaattcatagggcactgctaaggtcaaaatattgtcctcaatgtaaattttactgggcatgagtagaatcatgtggataaaaggaagataagagagagcatttatttgcacctactgtgtaccagatgctttaaatacattatttaatataatcctcacgttaaccctagcagttgatatgcttgccctccacacttgctagctggatgactttt

SEQ ID NO: 171882 - DNA, 550 bp, Homo sapiens
atcctctgccttgattaattgagtttcttgtcacaaaaaatgtccaagtgagaattggattaccatgcagtgggaggcgggctgaaataggtgtctttgtggactcccttcctctgagattctcatcttgtaccctggctttcctcttttaaaggttatcaccctgccttatcctaccctcagtggccaagcaactgtcttccctcatgtgcacctgtttttccctgtgtaattacacctttctttgtggttctctctgttggagatcccaaacacctccttccactactacctaacttcccttttcttttctactttccaggatactgaactttcaattcwtagggcactgctaaggtcaaaatattgtcctcaatgtaaattttactgggcatgagtagaatcatgtggataaaaggaagataagagagagcatttatttgcacctactgtgtaccagatgctttaaatacattatttaatataatcctcacgttaaccctagcagttgatatgcttgccctccacacttgctagctggatgactttt

SEQ ID NO: 171883 - DNA, 523 bp, Homo sapiens
ctcatctgtaaaagggggataatctagtgtctacttcatagggctgttataagagttcaatgtgatgatagatggaaagcccttaacacagtgcctggcatacagtcaagatgtgatacatattaggtatcactcttaacaattctatgaaatagatatttcttgctcctgttttacagatgaagttagtgaggataaagtagtataatctacagtagtttccctgactctgatccaawgattggatccattagaattacctggggagttttaaaaaatacagacttcagagtcctgttctggaagattctgattgcgtttctttgggatttgacatttgtgaatggtttgatctgttaaccaaggttgacatctgggtgtacaaaaaatgggaattaaaaaaaaaatcaggcattaatgagttaaccagtgtttatagctttttcagctgcttttgaaaagaccttccttggctctttttttaatgggatggccatagcagctcagaatgggagagcagtaa

SEQ ID NO: 171884 - DNA, 523 bp, Homo sapiens
ctcatctgtaaaagggggataatctagtgtctacttcatagggctgttataagagttcaatgtgatgatagatggaaagcccttaacacagtgcctggcatacagtcaagatgtgatacatattaggtatcactcttaacaattctatgaaatagatatttcttgctcctgttttacagatgaagttagtgaggataaagtagtataatctacagtagtttccctgactctgatccaatgattggatccattagaattacctggggagttttaaaaaatacagacttcagagtcctgttctggaagattctgattgcgtttctttgggatttgacatttgtgaatggtttgatctgttaaccaaggttgacatctgggtgtacaaaaaatgrgaattaaaaaaaaaatcaggcattaatgagttaaccagtgtttatagctttttcagctgcttttgaaaagaccttccttggctctttttttaatgggatggccatagcagctcagaatgggagagcagtaa

SEQ ID NO: 171885 - DNA, 593 bp, Homo sapiens
tatgagccaaaatctgtgtcataaattgatagcactccagctaacaaaagattgacaataaaacttactgtaaataaaaccatctaaatcttgagtatgaataaagtccattagtttgggttgtatttttattattgttgtttttgactcctgtgctgcatgtacattttcttttattcatctactgcaaaatcatacatttgcacatttaccagagaagggcaagaaaatataatcaagtgatattacttcttagaccttggaagatttggataggtgagaaaggtgaaagtcaacagccaaaaaagaaagagagagaaagaaagaaagaagagagagagagaaagaaagaaaaagaaagaaagaaagaaagaaaagaaggaaaagaargaaggaaggagaaagaaagagaaagaaagaaagaaaggaaagaaaaagaaagattgcacactgatcccctctgcctgtaaatttcccttacttccattgcctttgacccatgaatctggctcacacttgcttcgctgcttaaaggtcacttcctcagggaaaccttccctgacctcccagctataaaaatctaccacaacagc

SEQ ID NO: 171886 - DNA, 593 bp, Homo sapiens
tatgagccaaaatctgtgtcataaattgatagcactccagctaacaaaagattgacaataaaacttactgtaaataaaaccatctaaatcttgagtatgaataaagtccattagtttgggttgtatttttattattgttgtttttgactcctgtgctgcatgtacattttcttttattcatctactgcaaaatcatacatttgcacatttaccagagaagggcaagaaaatataatcaagtgatattacttcttagaccttggaagatttggataggtgagaaaggtgaaagtcaacagccaaaaaagaaagagagagaaagaaagaaagaagagagagagagaaagaaagaaaaagaaagaaagaaagaaagaaaagaaggaaaagaaagaaggaaggagaaagaaagagaaagaaagaaagaaaggaaagaaaaagaaagattgcacactgatcccctctgcctgtaaatttcccttacttccattgcctttgacccrtgaatctggctcacacttgcttcgctgcttaaaggtcacttcctcagggaaaccttccctgacctcccagctataaaaatctaccacaacagc

SEQ ID NO: 171887 - DNA, 542 bp, Homo sapiens
ctgtggatgacaggacctcatcgctgaagagctggaaaagaagccaggaagttgtgctctcagtacaactaaaggggtacagaggtgcyctgaatttcttaggaccctcattccatccatcctaagcatgggcatgatatattgccaatttttgttcatggtatctagctgctttatctcatctgggctaaaggtgaagtcataaaatattttgagccagatggagaaaacgggtctcgacatagttaggaaattttgaacaactggttgaaaattataccctcccaaatattgatcaagtggcatgatccttgaccctgtcctatgtggtggttttattcatgcttttgtcaaaagttgatgatgtacttatcaaatttagagatgttgtaaagctagaaggaatagagaccatggtctgtgatagaataaaccagcactttgtgtatttctcagcacataatagtgctcaataaatggctgatgagttttgataattgactaattgcttagaaccaatgagtggaagttacagagacatg

SEQ ID NO: 171888 - DNA, 542 bp, Homo sapiens
ctgtggatgacaggacctcatcgctgaagagctggaaaagaagccaggaagttgtgctctcagtacaactaaaggggtacagaggtgctctgaatttcttaggaccctcattccatccatcytaagcatgggcatgatatattgccaatttttgttcatggtatctagctgctttatctcatctgggctaaaggtgaagtcataaaatattttgagccagatggagaaaacgggtctcgacatagttaggaaattttgaacaactggttgaaaattataccctcccaaatattgatcaagtggcatgatccttgaccctgtcctatgtggtggttttattcatgcttttgtcaaaagttgatgatgtacttatcaaatttagagatgttgtaaagctagaaggaatagagaccatggtctgtgatagaataaaccagcactttgtgtatttctcagcacataatagtgctcaataaatggctgatgagttttgataattgactaattgcttagaaccaatgagtggaagttacagagacatg

SEQ ID NO: 171889 - DNA, 339 bp, Homo sapiens
gcttagaaccaatgagtggaagttacagagacatgtatttgagccccaataagggctaatattagccttgctaaacactgaaaagtgatgaatcataaaacaataagttctcctttttgcaaaggtgtgaaagcagggtatatttaayatatgaccctccagcaggagatcttggagtagagggcagtgccaaggctctgcccagatctccctgcatcctctttaccatctcaaatgttgtttccaacttctgtgttcttgtgccaatgatgcagttgtggggaccccagttcccttaccttgagtttggataaactctaagatgtaatttatctcccc

SEQ ID NO: 171890 - DNA, 339 bp, Homo sapiens
gcttagaaccaatgagtggaagttacagagacatgtatttgagccccaataagggctaatattagccttgctaaacactgaaaagtgatgaatcataaaacaataagttctcctttttgcaaaggtgtgaaagcagggtatatttaacatatgaccctccagcaggaratcttggagtagagggcagtgccaaggctctgcccagatctccctgcatcctctttaccatctcaaatgttgtttccaacttctgtgttcttgtgccaatgatgcagttgtggggaccccagttcccttaccttgagtttggataaactctaagatgtaatttatctcccc

SEQ ID NO: 171891 - DNA, 504 bp, Homo sapiens
gcaggtgctcatgggtgaccgcgcggaggcagacatgctgcgggacttgcagcatcaaggtcatctgtaaaggagctggccatgacccgccactgcccaccaaggtctggagcagacgttattctcaagaacacttcaaagggaactagttcaaagggaactaggtagtatcgtatgtttttgttttgttttgtaagaaaaaaaatgttagatatcctgaggttgttatcttgctattcacaaatggaaaagcagccgcccraggtgggggtggagtccatttgaacgagggaccactgtgctctgctgagcaggcatttgctcctgagctgcccttcctcttctaccgtcttcccaacccatcccttcagtcctctcaacctatcctgggtaactcccgcccggctccagggcgcggtgtgaccgccttaggaagtctatcttcaccaggaagcttgcattggctgctgctgtcaggaatttggacgctccatccaaatcccc

SEQ ID NO: 171892 - DNA, 504 bp, Homo sapiens
gcaggtgctcatgggtgaccgcgcggaggcagacatgctgcgggacttgcagcatcaaggtcatctgtaaaggagctggccatgacccgccactgcccaccaaggtctggagcagacgttattctcaagaacacttcaaagggaactagttcaaagggaactaggtagtatcgtatgtttttgttttgttttgtaagaaaaaaaatgttagatatcctgaggttgttatcttgctattcacaaatggaaaagcagccgcccgaggtgggggtggagtccatttgaacgagggaccacwgtgctctgctgagcaggcatttgctcctgagctgcccttcctcttctaccgtcttcccaacccatcccttcagtcctctcaacctatcctgggtaactcccgcccggctccagggcgcggtgtgaccgccttaggaagtctatcttcaccaggaagcttgcattggctgctgctgtcaggaatttggacgctccatccaaatcccc

SEQ ID NO: 171893 - DNA, 576 bp, Homo sapiens
agcagaggaataagataacatcattccgtggatagaggtgggaggagaaaggtggatcattcctgatctcctgaggcaagagaaaaagacaggagaattcttaggtttaagggggggaagaggtcttttattcacttcctggtgcaggcacatgtacctatatattgctctttctgtagccagattatttactcagtgtagtgtgtgtgcctatgctacacaagaggttagcaaccattttgtaaagggtcagacgggaaaaattttaggctttttgagccatacagtttgagtggctactactcaaatccgccatgttgagcaaaacagtcataaataggtctttacactgtgttccaataacattgtatttatggacratgaaatttgactttcatctaatgtcccaagtggcccaaaagattaatcttcttttaatcttcctccctaaccatcaagaatgcaaagccccacgccttgtgtatgagtacacaccatatgtagcacaggaaaaaggacgtccttgggaaggataatcactgcattcaggggagtggccacccctgagaagagaga

SEQ ID NO: 171894 - DNA, 410 bp, Homo sapiens
gaatgtggtcctagtgtggaatttaccagaaagctcacatggagattaccactgccctcaaaggattgcaggtaaactagcaactgtgggaagtggaggctcctcctctccttttgtaattcaaatgttcctagtgtactgcaatagacactagtttgaatgaattcaagatatcatctcttggtaaaaccaaaagtaaactgattacaaaaggcacaaacccttcaaccatactcccactstctgcctttcctctactttctgtgtggtttaagtacacctgaaaaaacaaaacaaaacaattacagctcagtttatgtaacttgcatatttaacaggagcatcttttttggttgttatgaatcttccatttttgtcatcataggaacttagtttatgtaaacaacgat

SEQ ID NO: 171895 - DNA, 461 bp, Homo sapiens
tttgcaatgcagtttgccttgaaaagagtcgggttgcacacaggtgagaagcagaagttctagtttatacagcttggktatggctatgtctgggatactatgtaaaattcctggaagtcacttggccctaaaacataagggcaaagataaacaaaaagaaatttagagaagatagagaagtagattaaaatattaaatatgtataagttggcaaaggaaagaaagagaggtcacgttactggtcctcagttgttttcagtgtataaatcaacagagaggcgaacagaagaatggttcagagacctctgaattgaagaaaaaggttttgttttccttcactcaaaatggctaaagatcaaaaattcttcctaacatataagaagtcattaagtgttccatgatggtttttttttctctgctgaaagtttttcatatcattaaataaaagttttcaaattact

SEQ ID NO: 171896 - DNA, 448 bp, Homo sapiens
ttgaaaagagtcgggttgcacacaggtgagaagcagaagttctagtttatacagcttgggtatggctatgtctgggatactatgtaaaattcctggaagtcacttggccctaaaacataagggcaaagataaacaaaaagaaatttagagaagatagagaagtagattaaaatattaaatatgtataagttggcaaaggaaagraagagaggtcacgttactggtcctcagttgttttcagtgtataaatcaacagagaggcgaacagaagaatggttcagagacctctgaattgaagaaaaaggttttgttttccttcactcaaaatggctaaagatcaaaaattcttcctaacatataagaagtcattaagtgttccatgatggtttttttttctctgctgaaagtttttcatatcattaaataaaagttttcaaattactaatga

SEQ ID NO: 171897 - DNA, 515 bp, Homo sapiens
gaggtagaggttgctgtgaactgagattgcaccactgcactccagcctgggcaacaagagtgaaactgcatttcaaaaaaaaaaaaaaaaaaaacctcagcagaaaaaaaattagaagtgccacacgcggtgtccaggtatgtrcagtgtggcagctggaatagcaaggcaagtgcctggatcaaggaaacttcaaatgagggatctcccatgaggggagtgtccacttggaagacctccaggcctggagagcatcagtgtagattagcgctaagtaagttacggctaccatttttgttgcttctgtctgttccttcttacctctccttccctgaagggtgacgagccaaaattattaaaagctgagaaagaagtggcgaggagaagtaagctgaacatgccctctttttcggcttcatgaaaaaaaaatatgtttaaatgaacctagaattgttattacattggattgaatattctaattactgaactgattgttttgagacaaaagtgacagg

SEQ ID NO: 171898 - DNA, 465 bp, Homo sapiens
aatgcagtttgccttgaaaagagtcgggttgcacacaggtgagaagcagaagttctagtttatacagcttgggtatggctatgtctgggatactatgtaaaattcctggaagtcacttggccctaaaacataagggcaaagataaacaaaaagaaatttagagaagatagagaagtagattaaaatattaaatatgtataagttggcaaaggaaagaaagagaggtcacgttactggtcctcagttgttttcagtgtatamatcaacagagaggcgaacagaagaatggttcagagacctctgaattgaagaaaaaggttttgttttccttcactcaaaatggctaaagatcaaaaattcttcctaacatataagaagtcattaagtgttccatgatggtttttttttctctgctgaaagtttttcatatcattaaataaaagttttcaaattactaatgagaaa

SEQ ID NO: 171899 - DNA, 422 bp, Homo sapiens
ggttgcacacaggtgagaagcagaagttctagtttatacagcttgggtatggctatgtctgggatactatgtaaaattcctggaagtcacttggccctaaaacataagggcaaagataaacaaaaagaaatttagagaagatagagaagtagattaaaatattaaatatgtataagttggcaaaggaaagaaagagaggtcacgttactggtcctcagttgttttcagtgtataaatcaacagagaggcgaacagaagaatggttcagagacctctgaattgaagaaaaaggttttgttttccttcactcaaaatggctaaagatcaaaaattcttcctaacakataagaagtcattaagtgttccatgatggtttttttttctctgctgaaagtttttcatatcattaaataaaagttttc

SEQ ID NO: 171900 - DNA, 553 bp, Homo sapiens
tgcagataatcctgggcatggatagctattgttattgacagctcctgagacatgcatcatttgttaagcctsttttgcttgaaataggactatcattctagaacaagtatcttgatcataagatctttcccctggaagatcaggccacatgctcaaagggtttctctgagactgtaaggaacttttcatactaaattactttttggacctcctaaaaggtagtgtgaggtcacctaaggatagtctcctctaaactcatagaagccagaagatggcacacaagagcaaagaggtgaggtgacagaaatagtgaaatataatttgtatgcttccaattttccaaagtggctcagtagtattaccagcacaatttggcaagctcataatgcagacaatctttcaaggaaaaaaaaggcaggtcactctccaccgtgattggattttgtagatacatgccttgactttatccagaaaacatgactacactttcactacctacctcattcagaatctgctgggatgctggaatgacatggcgtattagtctgttttt

SEQ ID NO: 171901 - DNA, 576 bp, Homo sapiens
gccacatgctcaaagggtttctctgagactgtaaggaacttttcatactaaattactttttggacctcctaaaaggtagtgtgaggtcacctaaggatagtctcctctaaactcatagaagccagaagatggcacacaagagcaaagaggtgaggtgacagaaatagtgaaatataatttgtatgcttccaattttccaaagtggctcagtagtattaccagcacaatttggcaagctcataatgcagrcaatctttcaaggaaaaaaaaggcaggtcactctccaccgtgattggattttgtagatacatgccttgactttatccagaaaacatgactacactttcactacctacctcattcagaatctgctgggatgctggaatgacatggcgtattagtctgtttttatgctgctgataaagacatacctgaggctgggaagagaaagaggcttaatggacttacaattccacatggctggggaggcctcctaatcatggtggaaggcaaggaggagcaagtcacgtcttacatggatggcaaagagcttgtgtagggaaattcccattttta

SEQ ID NO: 171902 - DNA, 561 bp, Homo sapiens
agggtttctctgagactgtaaggaacttttcatactaaattactttttggacctcctaaaaggtagtgtgaggtcacctaaggatagtctcctctaaactcatagaagccagaagatggcacacaagagcaaagaggtgaggtgacagaaatagtgaaatataatttgtatgcttccaattttccaaagtggctcagtagtattaccagcacaatttggcaagctcataatgcagacaatctttcaaggaaaaaaaaggcaggtcactctccaccgtgattggattttgtagatacatgccttgactttatccagaaaacatgactacrctttcactacctacctcattcagaatctgctgggatgctggaatgacatggcgtattagtctgtttttatgctgctgataaagacatacctgaggctgggaagagaaagaggcttaatggacttacaattccacatggctggggaggcctcctaatcatggtggaaggcaaggaggagcaagtcacgtcttacatggatggcaaagagcttgtgtagggaaattcccatttt

SEQ ID NO: 171903 - DNA, 608 bp, Homo sapiens
gaaatttaaaacttgtacttctttatagggacattcttaagtaacaactgttttttgtgtttttttgtttgtttgtttttggagacggagttttactcttgtcccccaggctggggtgcgatggcctgacctcggctcactgcaaactccgcctcctgggttcaagggattctcctgcctcagcctcccgagtagctgggattataggcgcctgccaccacacctggctaatttttgtatctttagtagagacagggtttcaccatgttggccaggctggtcttgaactcctgacctcaggtgatccacctgcctcagccttccaaagtgctgggattacaggcatgagccaccgctcctggccttttttttttttttttttttttttttttttycctgcaagaatagaccttgctaggtgtggtggctcacaccaaaagaccaaacaaaacaaacaacaaaaatgacaacaacaacaaaatagctgaactggaagtaaagaatatactgactattactaggaccctttgctgtcattgccttgatttctgccaaggcaccagcactttcacccatcatcactttgtttcactggcacaagtatcagc

SEQ ID NO: 171904 - DNA, 608 bp, Homo sapiens
gaaatttaaaacttgtacttctttatagggacattcttaagtaacaactgttttttgtgtttttttgtttgtttgtttttggagacggagttttactcttgtcccccaggctggggtgcgatggcctgacctcggctcactgcaaactccgcctcctgggttcaagggattctcctgcctcagcctcccgagtagctgggattataggcgcctgccaccacacctggctaatttttgtatctttagtagagacagggtttcaccatgttggccaggctggtcttgaactcctgacctcaggtgatccacctgcctcagccttccaaagtgctgggattacaggcatgagccaccgctcctggccttttttttttttttttttttttttttttttccctgcaagaatagaccttgctaggtgtggtggctcacaccaaaagaccaracaaaacaaacaacaaaaatgacaacaacaacaaaatagctgaactggaagtaaagaatatactgactattactaggaccctttgctgtcattgccttgatttctgccaaggcaccagcactttcacccatcatcactttgtttcactggcacaagtatcagc

SEQ ID NO: 171905 - DNA, 601 bp, Homo sapiens
tgcctttcctacactgctagaatcaaataatacattcacaaatgcataagarctacgaaataatatatttcttgggttttaaattttttttatttttttttttaagacggagtcttgctctctcgcccaagctggagtgcagtggtgtgatctcagctcactacaaccttcacttcttggattcaagtgatcctcctgcctcagcctcccgatagctgcaactacagacatgcgccaccatgccaggctaatttttgcatttttagcagagatggagtttcgtcatgttggccagactggtcttgaactcctgacctcaggtgatccccatacctcggcctcccagagtcttgggattacaagtgtgagccaccgcaccaggccaccatttgttttattataatttttaaacatttattttttatttagatatttatcataatacctggctgaaatatatacatcaaaatttagtacttgtcaaagctgaaaatggaaaccaggagaacaaactagaatatgcattacatagtttagagcagcactaataaaaaattctggaatgttggaaatattctaaatctatgttgaccagtacagt

SEQ ID NO: 171906 - DNA, 591 bp, Homo sapiens
tttgtctgtcaaccctaattatttgatttttttatcaatactgtgcatagactttcatcttatgagttcttagtggttttcatctaacagattaccaacgtataaactcttgcgcccttaacttttaggaactacccctaaaagagttatgccagacagattttatatatagaaatctaagcagaaatatttctctrttcttcaagtgggacacatcacatcgtttcctctaacttctctcttgaagaaacttctgtttctcaaagatttgatggcttacatttcccccatttttaacaggaaaatcacgtattttcccaacacctgtgatggtatccttgaagattccttattaagctgtcactcaaatatcttaaggacattagatttatataattctacacatcatttttttcagactacgtttgagatcattcagtcattttctattctcccggagtaggtgggtgggacagaataatctatgaatgtatctaccaaaaagagaaaaataaagagagaaagggaaagaaacaatgtaaaatcaactctcatagccttaacttttcagagcatatttgaaaatatagc

SEQ ID NO: 171907 - DNA, 426 bp, Homo sapiens
tgctggggaggcctcagaaaacttacaatcatggcggaaggcaccactccacagggtggcaggagacagaatgagtgccagcaggggaaatgccagatgcttataaaactatcagatctcgtgagaactcactgtcaggagaacagcatgggggaaaccacccccataatttaattacctcccagtggatgtctccacacatgctgattatcggaattacaattcaagatgagatttgcatgggaacacagccaaggcatgtcactgacctagtaataatttacgtaactgtacttaagcagtgaatcttattggctatatattcattggtacataacatatatatccatataatatcatatatagccagagctgcagtgtgtgtgtgtgtrtatgtgtgtacttatcaaacctgcctgtggtata

SEQ ID NO: 171908 - DNA, 518 bp, Homo sapiens
aaggagtaatttttactttcaagtcttattagttaataaatatgtctcataaagctaagtaggcgtaagtagtgagttctcagatagattgggtaaagtcaactgaaatccttctgaaaaagattcacccttctrgatgcccttaaagaacattcatgtttcataggagaaggtcacagtagcaacatgaatagggtttgaacaaagttgatttcaatcctcatggatgactttgagggttttaaggctttagtgtgggaagaaactgcaagtgaagtggaaatagcaagagaactagtagcagagcctaaagataggactgaattgctgcaatctcatgctaaaacttgaagggatgaggagctgcttattatggatgagcaaagaaagtggtttcttcagatggaatctcctcctggtgaagacgctgtcaacactgttgaaatgagaacaaagaatttagaatattgcataagctcagttggtaaagcagcatcaggattcaagaggattggctt

SEQ ID NO: 171909 - DNA, 575 bp, Homo sapiens
tctttcaagtgtggaatttcaaaatcaaaacaaaacagaaagaacacgttttccagattcctttgaagcaacggttctagaggcaaattagatctgccaatcatatgcacgggcatgaaatttggaaagccaaagtgaggtagaagccatcttcctgtcacattttgtctgcttctgcttggaagcctgtggtggaaaccacaatttctctgcagcaattamtcttcaacagcctcttttcctagctctgtgctgcctcagtatggagtcactagcgtcatgtggccacggagcatatgcaatgtggctgggccaaatggagatgttctgtaagtgtaaaacacacagtgggctttcatgtcttactattccccaaaacataaataagtaaaaatcaagtaatcaattttcataagcattgtgtattgaaatattttatatataattatgtaagtataatcatattaatttttgttaaaaaatttaaaattaattttacctattttactcccttgtttaatgagggcacaagaaaattttaatttacatatatgtctcacattatattgctatta

SEQ ID NO: 171910 - DNA, 484 bp, Homo sapiens
aagagttagaaaaacaggaaatcatggtcagagaacaggcaagttatattataaggttctgagcttgaccagaccagattaggaaaacttggagaatttgaccctgcagggaggatgtttgctgtaaatgtaaatggccattgaagctgcaaaagcccggggaattagacacaaagctattgtttggaattttataggtgatggttaaagaccattcaaataatccaaagatgtgtaaatctggcaactatgatccaggtaccaaagtctgaaacagatgtagaacctacaaaggaagctgtagaaaatgcagaaaggataggataatatgattctcaaaggagtggaagttttgatacgacgtagaatacttgtgtgaaagtkctgttgtgaatctagagaatgaaaaccctattttctcacttcaactatttggatttgaaaatataatcagttctaggtacattttaatgtgataatttca

SEQ ID NO: 171911 - DNA, 368 bp, Homo sapiens
ggttgccttcttgggttctaggaaagattaactcacaggaaaaagagactaaaggtctgacacttatcaaggtttgacagacaaacttactaaaggctacaccatctctctgaggactgctgctcgggagacttcatctgcgtaaccagaccgcttttgctcattatttagttcttttcctcggcctccaataacctgttaccacttcactccaagagctaaaaacccctactcatttctgyacagtataaaatcttcagtcatctggctcatcctggagtctcacattttgtgtggctgctgtgtatttgcatacaaattgactcgtatgccttttctcctactaatctgtctgttgtcagtttgtt

SEQ ID NO: 171912 - DNA, 518 bp, Homo sapiens
attgtctctcaatgtccatttctcagcttattttaatgaaagatttcccaaaattcatctgtgtaatggctatcacttgtatttcctgacctcttttgagattagtgtagccaygtgactaataatataatggaatgtgagcagaagtgatgtgcagctttcaggtaacttccttaaaacacaggttcttcccctggactgtcataaaaacatactaattgagaaaattgttacggaaaatgcaaagatagcctttggaatcccaaaactgttctagatgacagaaaaaaaaaatactttctacctcgtttgagccacttgggttaggtctctttgctaatgcagcctaggctatactctgattaacatagtaggcaaaagagaaagcaagcacctaagataactaagctatcaaataaggaaaagaaacaaaacattcagaagaagtgttcctagaaaaccagttactggacaacagagctttcacttacatcaaatgcacattcatacacactttt

SEQ ID NO: 171913 - DNA, 518 bp, Homo sapiens
attgtctctcaatgtccatttctcagcttattttaatgaaagatttcccaaaattcatctgtgtaatggctatcacttgtatttcctgacctcttttgagattagtgtagccacgtgactaataatataatggaatgtgagcagaagtgatgtgcagctttcaggtaacttccttaaaacacaggttcttcccctggactgtcataaaaacatactaattgagaaaattgttasggaaaatgcaaagatagcctttggaatcccaaaactgttctagatgacagaaaaaaaaaatactttctacctcgtttgagccacttgggttaggtctctttgctaatgcagcctaggctatactctgattaacatagtaggcaaaagagaaagcaagcacctaagataactaagctatcaaataaggaaaagaaacaaaacattcagaagaagtgttcctagaaaaccagttactggacaacagagctttcacttacatcaaatgcacattcatacacactttt

SEQ ID NO: 171914 - DNA, 483 bp, Homo sapiens
taaggaaaagaaacaaaacattcagaagaagtgttcctagaaaaccagttactggacaacagagctttcacttacatcaaatgcacattcatacacactttttaaaggtaaaatgtgagggtgtaatttttctttttttttcaagacgacgtctcaatgtattgtccagactggagtgcagcggcgttatcatggctcactgcagccttgacctcctgggctcaagggattctccctcctcaggctctcaagtagctgggactacaggtatacaccacaatgcccagctactttttttttttttaaatatagaaaatgaattgataattaccactatgacctgaatcagaaggctgcaaatcaakagaaaataatagctcaaatggacaagaatatacattctaaattaaaacagaaagaagacacaaaatgtttttaagcaataaaccttatagtagataaatctaaattgacaatgatggt

SEQ ID NO: 171915 - DNA, 434 bp, Homo sapiens
agaaaccataaattaatagcaacagataaaacatcaaaagtaaaaaagagaaaatgaaaacacactataaaataaacagaaaacaaaataagatggaaggcatggtttaagatatttatgttgactgagtattgggttcagtgacccagttctcccactggattaagaatcaagtcccatctatatgttgcttaaaataaactttcaaaaagacttttagcaatttaaaatatagagatacagataagrtggatgttaaaaggatagaaaaagatttataatgaaagagtactcataagaaacctggagtgactatataaatgtcagacataataaactttaggataagatatattactagagacaaacagggtattttatccctctcaaaatcccaattcaatttttgtaggaagtaccatgcttattcccaa

SEQ ID NO: 171916 - DNA, 434 bp, Homo sapiens
agaaaccataaattaatagcaacagataaaacatcaaaagtaaaaaagagaaaatgaaaacacactataaaataaacagaaaacaaaataagatggaaggcatggtttaagatatttatgttgactgagtattgggttcagtgacccagttctcccactggattaagaatcaagtcccatctatatgttgcttaaaataaactttcaaaaagacttttagcaatttaaaatatagagatacagataagatggatgttaaaaggatagaaaaagatwtataatgaaagagtactcataagaaacctggagtgactatataaatgtcagacataataaactttaggataagatatattactagagacaaacagggtattttatccctctcaaaatcccaattcaatttttgtaggaagtaccatgcttattcccaa

SEQ ID NO: 171917 - DNA, 566 bp, Homo sapiens
caaacagggtattttatccctctcaaaatcccaattcaatttttgtaggaagtaccatgcttattcccaaagttacatggaagcaaaagagacataaaatagtcaaaacaaattttaagtagaggacccaagaacattctcatgacttaaagttccactataaagctacagaaataatcaaaatagtgtggtattcacagaggatagacatataggttaatgaagcagactgaaaaagttaagaagtagaccaaaaaatataccataaattggtttttaacagagataccaaagtgattcacgggtaatagtattcttttagcaaaagctgctgcaacaaatgaatatcwatgttgggggtagggggcagagggtacttactttacagaataggcaagcatttaaaaaatgaatcatggtcctaaatgtaaaagtaaaaactagatgccacagaattttgttttatattttcatttagtttaaaatattttctaattgttcttgttaattttttctttgattctcaggttatttagaaaagtgttgttaattgccagatatttagt

SEQ ID NO: 171918 - DNA, 573 bp, Homo sapiens
acaacacagtaagagttacactaaacctaaaaccatggctgcttcatggtcatctggaagactttattccaataaacagacctaacaaggacttctattctaccatcaacatgagtatcacaaggcttctyactccacaacgggtacaacgtcaactatctgaaaccaaggagaagccccaggggtgtgtatacttgcctccatgcttggtgataaccaggaatgtgcaactgaagaaactccttagcaagggcaaaacactatattcaaggtctcagatccctcagagaaaaaggcattctttctccactgggtgagcaactaccatgagaagttgtgctcttttatggggaagagaatctaggatatgtatgaaaatatagaaataatatcaattatggctgtgagaacaactccagcagtgggactatatcttatcctagtagtcttcctgttgtaaatcatttttagaaattgtgactggtcataaccttgaagaatgagtgttaggaaatagtggaataattatgggccataggtggctctgagaagagcaaggaataccctgaaaga

SEQ ID NO: 171919 - DNA, 573 bp, Homo sapiens
acaacacagtaagagttacactaaacctaaaaccatggctgcttcatggtcatctggaagactttattccaataaacagacctaacaaggacttctattctaccatcaacatgagtatcacaaggcttcttactccacaacgggtacaacgtcaactatctgaaaccaaggagaagccccaggggtgtgtatacttgcctccatgcttggtgataaccaggaatgtgcaactgaagaaactccttagcaagggcaaaacactatattcaaggtctcagatccctcagagaaaaaggcattctttctccactgggtgagcaactaccatgagamgttgtgctcttttatggggaagagaatctaggatatgtatgaaaatatagaaataatatcaattatggctgtgagaacaactccagcagtgggactatatcttatcctagtagtcttcctgttgtaaatcatttttagaaattgtgactggtcataaccttgaagaatgagtgttaggaaatagtggaataattatgggccataggtggctctgagaagagcaaggaataccctgaaaga

SEQ ID NO: 171920 - DNA, 573 bp, Homo sapiens
acaacacagtaagagttacactaaacctaaaaccatggctgcttcatggtcatctggaagactttattccaataaacagacctaacaaggacttctattctaccatcaacatgagtatcacaaggcttcttactccacaacgggtacaacgtcaactatctgaaaccaaggagaagccccaggggtgtgtatacttgcctccatgcttggtgataaccaggaatgtgcaactgaagaaactccttagcaagggcaaaacactatattcaaggtctcagatccctcagagaaaaaggcattctttctccactgggtgagcaactaccatgagaagttgtgctcttttatggggaagagaatctaggatatgtatgaaaatatagaaataatatcaattatggctgtgagaacaactccagcrgtgggactatatcttatcctagtagtcttcctgttgtaaatcatttttagaaattgtgactggtcataaccttgaagaatgagtgttaggaaatagtggaataattatgggccataggtggctctgagaagagcaaggaataccctgaaaga

SEQ ID NO: 171921 - DNA, 575 bp, Homo sapiens
aaagagaaaatcaggacaccagattcagaaagagaaaaactcttccagatccctctactacaaagcttagcagtatagcatactaactattaaaggagaaatgtttacagggtccagctccagtactacaaagtagggcagaaaaggatagttcaggcatgagaagcaatatagtgataacaagcacaatgtgcttccaaacaacttgagttattctctagccataaggaaataccagcattcgtctagaaactctgcatacccttctatcatttgcatatacgtttctgtgtgtgtgtgtgtgtgtgtgtgtgtgtaattaacatcaggagtgtaagcttctggtaaaytcatttcttggaggaagttgcatgccaataaattgaaggggacagtataggagctttgataaaaatttattaaaattgaggtaaaaggatgactacatgctgtttttatgtgatcctggagcaccttttagcaagtccacttaagagtcatctacatctctagcaaaatcattctatgtactattaattttatttcattaaattagagctcagactatacaatta

SEQ ID NO: 171922 - DNA, 385 bp, Homo sapiens
atactaaatcaaacagaagaaaagaatttctgaactttcagacaggtcttttgaagtaacccagacaaaaataaagaattaaaaagaatgaagaaagattgcataacatattggatgccattaagtgaaaaggtgttcacatttgcggagttccagaaggagaagagatgggaataaggcatagaacactgatttaataacataatagctgaaaactatctaaatcttgggaaagatacacacatttagatacagtaagctcaaagatgctcaaatagaatcaaaccaaagaagtccttcctgmgacatatcatagtcaaactgtcaaaagtcaaagacataattctaataacagcaagagaagagcatcacgtcacatatagtg

SEQ ID NO: 171923 - DNA, 624 bp, Homo sapiens
ctctactaataatacaaaaatcagccgggtgtggtggcaggtgcctgtaaatcccagctactcaggaggctgaggcacaagaatcacttgaacccgagaagcagaggttgcagtgagctgagatcacaccactacaccccagccaggcaacagagtgagactctgtctcaaaaataaaaaataagattatatatatatgtatatatattagaatgtgtattatctgaaggttaacacaaatctattaagtacatggaaggagttcatgactacataaatagtttttgtttgacagcaagcaggaaacatacacctaaaaaaataagtgggtttaatgtcttcagtaacttattagaaagattaataaagaaatatttccaaaaattgaatatattttaagaataaaattgatttacctctattacttgtttcttctatttcaagaaataacactaatctgttaataacatgggaatttcccccctatttcttgatatgatgctgtctacaactaagatasagattaagactcactgaatgctcccttatgagaataaaaatgcacagtacattttgtagaagattagtgtttcgcatcatgactttactaaattttaagtgttc

SEQ ID NO: 171924 - DNA, 578 bp, Homo sapiens
caaaaatttaaataaaaaatcaaatacttggaaaatggaaaatagcttctaaaataacctttaaatagcacagaaaaacaatactgtgattccagaatacgtaaaagaaaaatttaaaaataaaagaccttttatcactctgcctgactaaagtttatgagatgtcacaacatctgaattcatcgtcaattctttgctttacaacttttctgtattaagaaatgtaaaaatcaatgaataaagcatttaattcaaggatttatttttaaaactaaaacttgtacacaycaggagcaaggcaatgatttttaaaaacacacagaattttaacaaagaaacagtttgactctttacagaagtcaagttttcaaatgtttaacacacaaaagagatatcactgcatgtagatttttaatgtggtgagttaatatttcaagtccaaaacattgtgaaatgagtcttgattttgcctatgtaccaagaaaaaatttatattagcgttgtcaatgacaaagagattatccaatgttaaacttgtaaatggatacagaaagctgaaaatcagtacacagaaagtg

SEQ ID NO: 171925 - DNA, 497 bp, Homo sapiens
ttataaaccaccacactgttctccaaagtgaagaaccattgtacatggtaatcagcaagtaagataatttcaggagctaatactcttgatcaagttgacactcactccttrgtaatgaaatattttaaattttactcaaactagttaatggaaaatagtatcccattgttactgtaattccatttcctcgatagctgaggatgttgggcttctttatcatgtgcatattgaccattaatacttactatatgaaatatattttatcctatttttgtttgattgccttttagttacagccttgtaggtgatatttatatgtgtctaaggtcccatataaattaagtgggctttttcgtagataatcaatcaaacatccatatgtacatgtgttttgggctctattctgtaccatgaatctatttatctatgtttataaagtgctgcattatctccagtactggaggtttataggaggccatggagtagctattgtgagt

SEQ ID NO: 171926 - DNA, 408 bp, Homo sapiens
ttagcactataaactttcctcttaatactgctttagctatatcccagatattttggtaagttgtctccctattttcattacttgaaaagcayttttaaaatttatgccttaattttaattttgatgttaacctaagagttattcagaacaaaattgtttaatcgtcattttttttattttgagggatgtccttgatattaatttctatttttattgcattgtggtgtgaaagtgtgcttggtatgattttgatttttctaatttgtagagacttgctttattactgaacatatggtcaatgagaagaatgtctattctgtggttgttgggcagagtgttctgtagatgtctattagatttagttggtcaagtgtcaagtttaagcccagagtttctttgttaggtttc

SEQ ID NO: 171927 - DNA, 426 bp, Homo sapiens
tttaacttcttattgaaggtatttagcactataaactttcctcttaatactgctttagctatatcccagatattttggtaagttgtctccctattttcattacttgaaaagcatttttaaaatttatgccttaattttaattttgatgktaacctaagagttattcagaacaaaattgtttaatcgtcattttttttattttgagggatgtccttgatattaatttctatttttattgcattgtggtgtgaaagtgtgcttggtatgattttgatttttctaatttgtagagacttgctttattactgaacatatggtcaatgagaagaatgtctattctgtggttgttgggcagagtgttctgtagatgtctattagatttagttggtcaagtgtcaagtttaagcccagagtttctttgttagg

SEQ ID NO: 171928 - DNA, 426 bp, Homo sapiens
tttaacttcttattgaaggtatttagcactataaactttcctcttaatactgctttagctatatcccagatattttggtaagttgtctccctattttcattacttgaaaagcatttttaaaatttatgccttaattttaattttgatgttaacctaagagttattcagaacaaaattgtttaatcgtcattttttttattttgagggatgtccttgatattaatttctatttttattgcattgtggtgtgaaagtgtgcttggtatgattttgatttttckaatttgtagagacttgctttattactgaacatatggtcaatgagaagaatgtctattctgtggttgttgggcagagtgttctgtagatgtctattagatttagttggtcaagtgtcaagtttaagcccagagtttctttgttagg

SEQ ID NO: 171929 - DNA, 422 bp, Homo sapiens
ttagcactataaactttcctcttaatactgctttagctatatcccagatattttggtaagttgtctccctattttcattacttgaaaagcatttttaaaatttatgccttaattttaattttgatgttaacctaagagttattcagaacaaaattgtttaatcgtcattttttttattttgagggatgtccttgatattaatttctatttttattgcattgtggtgtgaaagtgtgcttggtatgattttgatttttctaatttgtagmgacttgctttattactgaacatatggtcaatgagaagaatgtctattctgtggttgttgggcagagtgttctgtagatgtctattagatttagttggtcaagtgtcaagtttaagcccagagtttctttgttaggtttctgcctcaaagatct

SEQ ID NO: 171930 - DNA, 556 bp, Homo sapiens
ctcaggaaaacttacaattgtggtagaaggcaaaggagaagaaaggaccttctttacaaggcagcagtggttggggagaactcattcactatgaagagaacagcatgggggaaaccttccccatgatccaatcacctcctaccaggttcctcccatgacacataaggattgcaattcaagatgagattacagtagggacacagagccaaaagatatcattctgcccttatccctcccaaagctcatgtcctttttagattttaaaaccaatcgtgccttcccaacagtcccccgaagtcttaactcatttcagcattaactgaaaagtcaacagtccagggtctcatctgaggcaaaaatcccttctctctatgagcctggaaaatcaaaaacaaattagttacttccaagatacaatgagagtacaggaattrggtaaatgtcctcattccaaatgggaaaaattggccaacacaaaggggctacaggctctgtacaagaatgaaatccagtggggaagtcattaaatcttaaagctccaaaataatatactttg

SEQ ID NO: 171931 - DNA, 603 bp, Homo sapiens
aaggcaagataacgatatcattgcatacagatcagacctcacttgcatggtgaaggtctgtaactgtcaaaggacatctgtaatagccagcagatagatacagtatggtgtagtgcattttattacttttatttgctttgtacaagtagaaaaatcaactgatgcaatcaaacagtgaagtaaatgaaaatatagtgcattcgatatagtgcatattgataaaaattatggattgtcaactcagtgagagactacaaagttaattcatcatagaatggtccccctcctcaaagatgtaaaaacaactggaacacaaattttaaccacagtttattacttttttttagataaataacgggaaaatctgtgaaaaaggcagttattaagcaagaacaactagagagaaagaataaacctgagaatttctatggatgtcttctaaacttaagcataattgatatatctactcatgtaaacagaatgggctaactgaaacaaaatcaggtgctaatcagaatttaccgattattgagctacaaagtatgttcrgttaacagacttctatgtggaaataaaaacattgataaggaaatagtaggatcc

SEQ ID NO: 171932 - DNA, 603 bp, Homo sapiens
aaggcaagataacgatatcattgcatacagatcagacctcacttgcatggtgaaggtctgtaactgtcaaaggacatctgtaatagccagcagatagatacagtatggtgtagtgcattttattacttttatttgctttgtacaagtagaaaaatcaactgatgcaatcaaacagtgaagtaaatgaaaatatagtgcattcgatatagtgcatattgataaaaattatggattgtcaactcagtgagagactacaaagttaattcatcatagaatggtccccctcctcaaagatgtaaaaacaactggaacacaaattttaaccacagtttattacttttttttagataaataacgggaaaatctgtgaaaaaggcagttattaagcaagaacaactagagagaaagaataaacctgagaatttctatggatgtcttctaaacttaagcataattgatatatctactcatgtaaacagaatgggctaactgaaacaaaatcaggtgctaatcagaatttaccgattattgagctacaaagtatgttcggttaacagacttctaygtggaaataaaaacattgataaggaaatagtaggatcc

SEQ ID NO: 171933 - DNA, 539 bp, Homo sapiens
tgaattgtaattaaaatttcaaagccagtttctttgggatgttgggcagcatggtgagtatgactagtgaattccatgatcatggacacattgctgcacttctttwtctgtgaagtgagtttcttgatatatgtaatgccatgtggaatatcatgatggtacataaggcattctataacttggaaggtagttttggcagaattgcttgcagagaaggaaaatctgtatccagagtaagtatatattgcactaagaacaaaatgctgctcttaaatgttggaaacagtgcaatgtaaccaaactcctgccaggcagctggctactcccattgggtaatggtgccatattagtggctctgtgttgttcactgctgctggaagattggacactcagcagtgactatggccaggttggccctcatgagtggaagtccatgttgctgtgagaccacacataacctatgtccctgccaccatgtccactttctttgtgagcccattgggtgatgacagggtgcctgaagaaagaggctggctagt

SEQ ID NO: 171934 - DNA, 595 bp, Homo sapiens
acaaactatgcaaccaacaaaggtcaatatccagagtctataaggaacttaaatacattttgaagcaaaaaccaaataacccaattataaagtggtcaaaagacatgaccaggcacttttcaaagaagacatacacatggctaacaaacatataaaaaacgctcaacatcactcatcattagagaaatgcaaatcaaaaccacaagaagataccatctcacaccagttagcatggctattatttaaaagtcaataattaacaaatttcagtgagattgtggaggaaaaggaatgcttatatactgcttgtagcaaagtgaattagtgcagccattgttgaaaggagtttggcgatttctgaaaaaaactttaaatactccccattcaactcagcaatcccactattgagtatatgcccaaagggatataaatctttctaccataaaggcatatgtgtgcatatatatattcactgcaccactatktacaatagcaaagacatggaatcaacctaaatgcccatcaatgctagactgcataaagaaaatctggtacatacacaccatgaaatactacacagccattaaaaagaatg

SEQ ID NO: 171935 - DNA, 467 bp, Homo sapiens
gcaatcggcagtgtttaagcactttattgtatccttagctacaaagccataaaaatccactatattgggaaagagatattaagagttacaagaaaaaaagttatgtcctacagatasaagttttgattccagatctctgtgttgcagtagagaaaatataaccaagaatagtggtggaaaggtaactaacataactctacttgtttggaaatataagcatattctattattagcagatatcccattggctttgtttgaagcttccaaatgctttagccataattaacaaattgtgttccatctcctcagggagagtctcaaaggaggaaagaaacccataaatttttcttactgggttactttagggacacatggaaagcacagaaagattccttattagagtttagtagactacacctgtttctgtgactacacctcagagttccagttactcttcatggtcctgt

SEQ ID NO: 171936 - DNA, 545 bp, Homo sapiens
agatcatttgtaactcttttttctttttttgagaaatgcctgttcagatcctttgcctacatatatatatagctattgagtttgagtttcttatctattttagatattaacccattatcagatgcatggatgcaaatattctctcttcatctgtagcttgtcycttgactctggtaattgtttcctttcacatacagaagctttttattttcatgcattcccacttgtatatttttgcttttattgcctgagcttccagggtcttatccaagcaatcactgcacaaagcaatatcatagagatttcccctatgttttcttctaggattcttatagtttcgggtcttacagttaagttttaatccattttgagctggattttgcatatagtgtgaaacaagggtccaattttattcttctgcttatgaatgttaagttttcctaacacactttgttgaagagactgtttttttccactgggtactcaactctagaatctctgttccattggttgatttggtctatttgttagtaccatgctgtttt

SEQ ID NO: 171937 - DNA, 544 bp, Homo sapiens
taatatggctaaatctagttggtatctccttgtttcttgccttgttacctacaaaccccttctcccgcattagaaagcaatgaacttggtagaaaaatttctttgtatcatttctaaataacagtttaaagctagtgctgatttagatcataaactcagattactaattgtagaaaggaccttggtgtctaggtatgcttatttgtagkaaattcctgattaaaaaatgaaaagaaagtcacaaaagtaattggacagaacaaggttaggaagtaaaactctctcatccaattttgaggcacagtgatcataactctactattttcacaaatgaaaccaagagaatttcacaaatgaagaaaatttcagaaaccaagagaataaaaattacatctcagaaagaattttggttgaaagagggaaggaaataaaagtctactcatctacttatgtggccaatggcgcacaatgccaacagctggttggagtttgcaatacaccacccagggtactcttgtatcagttaaaggtcctgctccctcaa

SEQ ID NO: 171938 - DNA, 584 bp, Homo sapiens
caataaaggaaggaaaagaaatgtctgagataatcttctaagtataatactagctcctaaagagaagaaagtcaggaatactttctttacatgaatagatatgattatagtactattcaggcatgctatttctaaccagcgaattgtgtagttactgtattgaggagttatytggggaagagtaggagagatgaatcaggaatccctggtgtctagcacagagcctggaacacactctgttcttactgaggatttgttgaatgagcagttgtagcaactccaatttcctatggtgctttagcatttactcagcactttacttactatgtatgtcactgattctctcaacaatcttattttacaaatgaagaaaaataggctctgaaaggtcaaatgactaggtctctctcatttctggcatccaggcatctaggcctctaagttccaaatccagtagttctccagaggtggagcttcctgccattgtagggactagtgggactggctccacttcctcaaaggtaattgctgctctgatgcagcaagtactaggtttctgagaactccagacaaaccaaatgaat

SEQ ID NO: 171939 - DNA, 543 bp, Homo sapiens
ggctggtcattttctacttaaaatgaggtaggacattcatgttttgagtcattttgttaggtacactaattcctagcagattatcaccaacacttatcagcctttgcacatccctcctttttttaaaaaaaaaaaaagacttgagattctccttgaccttcatctgcactaacatcgtctctgcctgggaaagctgggcaaacaaaaatgggaaggcttaccaaggaaagtccctggtttctttttcagatatgagaaacrctccctcttcatgcttgttctctgagatgctttagcagattaagataggacagcagcagttttaattctgagcccaagaacgagaacacattagcagtattctttttccagtctgaccgtcctcacatttctatgctctactggctccaaaatatgataaattgttaagtatagaattttttttaaacaagcttggggaatgatgtgtttgtgggggcaggcaggggagcagtagggaggtaagtagaggagtagataggtaagtgtatgattgggacagac

SEQ ID NO: 171940 - DNA, 650 bp, Homo sapiens
tcgcaagacttaagtgtctgcctgttaaatttgaagaaaaggaaggagttgcctggtccaggagcctagagagaacatgagaaagttgctggtttcttgctgaagacaaacacccattcagtgagatactgtggaagtcccttagtcttaacttgttagtctgttaattgggaatggcagaagaagtgaattactctgtggaattttgtgaaaatgaatccactgctgctaaaaggaaaattatctacttttcaaacactcatattattaaaataaatacattatgtttgaagtcgcatattattcttgaggctttcaaataaaagtgagagtaactttgccaagtgatttggggctccactaatctccccccaaattctgccccataaaattctttttacagttcaataaaattcattaggctgaacacagatgcaaagaatcacaggcaaagttaagattctctggccaatttyccccatctggactttaattaaatttgtctccaagtgaattcttctcttcactaaatggttctccttccagaagtgacaagaacaagaggaacaaaactctacttgtccttcttccattctaataacaagtcattctgagaactttaggtaccactcagcctaagggatggttat

SEQ ID NO: 171941 - DNA, 441 bp, Homo sapiens
catttccccatcccttccccgctccacaaatctgacttcttacctacagctgttacctctcctgttcttgctgacttgtgggtttacatctttttaattcttttattgtcatttcaatcaggatttaggcgggagaaggataaacatgtatactctatttaccatatctgacctaaggtctcttgtttttttttacatggctttctgaaatcacacacagaggcccaggcatagaaaacatcaagggctgtagttcatagccagtttgtagtaaacaagaattcctttaagtcttggaggctgcctyaaagggagaagccttacccagctgtggggtctcctggcctcccctgcactggctcgacagcaccagggccagaggcacctcagggaattgtctctccttgagcagctgctgaagcatcaggcacaggggagcgg

SEQ ID NO: 171942 - DNA, 292 bp, Homo sapiens
tggggttatgtttcatggaaagcttgtcaaagaagaaaggcttttcctccttatctgcctgttcaacttgcaagcggactgttaagcaattaatattttccaagttttcacaagtgtcctgtagagaactgggacaggagcgatgcttattaaaagaatgtgataaatataaacaatagcaaaaggctttgcagtcaagaaagtgccaagcagaaaatattgtaagaccaaaacaatcatgataaccccctcctccaaacaaacaaaayaaaagacatcacaggcaaaattc

SEQ ID NO: 171943 - DNA, 307 bp, Homo sapiens
catgtaccaataaaaaaaataggggaaatatatttagatccttttgtttgactgtccaactcttaggaagtgtaacatctgcagggtgcaaggaaatgtgactttggagagatgttttttcctggcctcagagaacacagtagggtcagttcccagagcactcagaaaggtttttgtggtgagggaaaactgcagtttctctcaacctgtgttgtgtgccagagatgattacatatcctctcaataacacagtaagcattgcttcttaccaartgtcccctgtagcctgagtttatctcaaaagaat

SEQ ID NO: 171944 - DNA, 506 bp, Homo sapiens
agagaaacggaatcttgaaattactgattagttcacaatggcaataattatggagaaattagtctgtaataaaactcggcattgagtgcaaagactaccatttttgakcaaagcatagaaaggttccaagtggggcagggcaaggagtggggggcgtggacatctcccaacaacaggcactgctgctgctgtttcttcctgacagtcagtggcagagaactgtttcaataactcctccaaacactgtctgagacctcactttgtgagagctgagtattccaggtatgctattttagggcactgatctctttatctgtagctcaaccctgtggataggtgatgggagtcagctgcttctccttcagtttcctaatcatggctttatcatccctaagatcacgcttagttcccactaggatgatgggcatgttggaacatggtggtgaatatcaggataccactttgcacaggtattttcaaatgatgcaggactcacaaaggaaaag

SEQ ID NO: 171945 - DNA, 506 bp, Homo sapiens
agagaaacggaatcttgaaattactgattagttcacaatggcaataattatggagaaattagtctgtaataaaactcggcattgagtgcaaagactaccatttttgagcaaagcatagaaaggttccaagtggggcagggcaaggagtggggggcgtggacatctcccaacaacaggcactgctgctgctgtttcttcctgacagtcagtggcagagaactgtttcaataactcctccaaacactgtctgagacctcactttgtgagagctgagtattccaggtatgctattttagggcactgatctctttakctgtagctcaaccctgtggataggtgatgggagtcagctgcttctccttcagtttcctaatcatggctttatcatccctaagatcacgcttagttcccactaggatgatgggcatgttggaacatggtggtgaatatcaggataccactttgcacaggtattttcaaatgatgcaggactcacaaaggaaaag

SEQ ID NO: 171946 - DNA, 506 bp, Homo sapiens
agagaaacggaatcttgaaattactgattagttcacaatggcaataattatggagaaattagtctgtaataaaactcggcattgagtgcaaagactaccatttttgagcaaagcatagaaaggttccaagtggggcagggcaaggagtggggggcgtggacatctcccaacaacaggcactgctgctgctgtttcttcctgacagtcagtggcagagaactgtttcaataactcctccaaacactgtctgagacctcactttgtgagagctgagtattccaggtatgctattttagggcactgatctctttatctgtagctcaaccctrtggataggtgatgggagtcagctgcttctccttcagtttcctaatcatggctttatcatccctaagatcacgcttagttcccactaggatgatgggcatgttggaacatggtggtgaatatcaggataccactttgcacaggtattttcaaatgatgcaggactcacaaaggaaaag

SEQ ID NO: 171947 - DNA, 432 bp, Homo sapiens
catttctgatgatgctggcctacaaatcacactttcagtggtgagggctttaaaaataaagaaaatgttagatcatttaatttaaagactcaggaaaatattgacttcaaataaggcttgtaacagttgttcaataatgtcatggaagtgctggtttcttttcactttttcctgtgttctgtaaagttggcttcacstttgggctggctttcctcatgggaccaagatggctgcctgcagtccctgaggctttggttcatacttgcttgggtgtgaccagcagaaaatttgtctccagtattaccaacaaaattgcctagattcattttgattgtacagatgaaataaattgatttctttaactacaagtggagcgaaggtggagtgaaatttctagagcctatagaaatcagggctatgagaaggggaggg

SEQ ID NO: 171948 - DNA, 399 bp, Homo sapiens
tggaagctgcagctctcttgaggcccccagcctcagaagtctggcagagtcttctaccacattctacaggtcaaaacaggtgccagaccctttgtggactcaagagraagagaattagctttcatctttcaatgggatgaaggttaagaaatttgtagtcatttttaatcccccacactcatttttcctgggacctgataaactttggataaaccaaatatcaaaggtctaagcctcccaagatgagagtataaattttcacaatcagcccattctttagcataaataaattactcatcactataatacataataggtatacttaacttggcacttagtgtatgttcctgaaacatgtatatacttcagcattttgagaaatgaatcacattttaaatg

SEQ ID NO: 171949 - DNA, 607 bp, Homo sapiens
aagcttctcccccgctcttgtcctcgtctccctctgtctttcttagcggctcccaaattttggaatgactcttggcctacacagatggcgtttactgactttgtctcaaaacctttcttgccttccaattctgtcataagtttctttatgccttatggcarccgccctgttttacaagtttctacttgtgcttgtggcagatggatttcccacaccctggctggaaaagacaatgaatgtgtttgaggataggttcttttaggtgtcaataataataacgggaaaatgtcacagtacctattggagacagactatgaaattactatacttgggatccccagggaaaagaaaaaagaagagttaaaatcctcagaaggtatttgagaggcatcttggcttgaaaacttgactgctgtgacttgggaaagcagagaaataaagcaaaccaagttttttacttgcttggctagaggtttgtttatcctgatcatgtgaagcctgagccagcaattccaatgattttaactgcccctcgatgcttctctgcatttgggcaggggaactattagaatgggccagttagctcctactatgatgggtgcaggac

SEQ ID NO: 171950 - DNA, 607 bp, Homo sapiens
aagcttctcccccgctcttgtcctcgtctccctctgtctttcttagcggctcccaaattttggaatgactcttggcctacacagatggcgtttactgactttgtctcaaaacctttcttgccttccaattctgtcataagtttctttatgccttatggcaaccgccctgttttacaagtttctacttgtgcttgtggcagatggatttcccacaccctggctggaaaagacaatgaatgtgtttgaggataggttcttttaggtgtcaataataataacgggaaratgtcacagtacctattggagacagactatgaaattactatacttgggatccccagggaaaagaaaaaagaagagttaaaatcctcagaaggtatttgagaggcatcttggcttgaaaacttgactgctgtgacttgggaaagcagagaaataaagcaaaccaagttttttacttgcttggctagaggtttgtttatcctgatcatgtgaagcctgagccagcaattccaatgattttaactgcccctcgatgcttctctgcatttgggcaggggaactattagaatgggccagttagctcctactatgatgggtgcaggac

SEQ ID NO: 171951 - DNA, 567 bp, Homo sapiens
gagtgttggcctctgtccttttaccggtgtaccaaatattagcaaacaaaggcatagcactgcaacaaatcactttgctcatgaatgtagctcaattaaaaaataacctgtttcaaagttggtagacagtaaccatgtagataaacctctatccatccatctgctcatcaattcatctgtctgtccatctacccaatagttgatttatttgtaacccattawttcatcaatcaaatatttattgtgtgcctactgtgtactaaacactcaacagacccaaaaggagtgggaagagaatggggaaaagggtcaggagcagagctgtcttctagcctgttttccttctcccaattcaagcatccttgaccctttcctcactgatgtgggaaataaaatgatgcctttgtcccaggtgtcaatattacaaggacattctactacttcttggctctaatcaattagggacggtttgccttctagattctcagctcttcaactttcccctgaaccctactctcaatctagtatgagttcaaaaggaccatagaaccttaacccaccttgtgc

SEQ ID NO: 171952 - DNA, 613 bp, Homo sapiens
actgccttgacttggcatttggaaatgaaacttgttatttgaccagttaaagtatataaggtttaaaagttaatttgtcttcataagggaaacataacatattgagttccaataggaaagtagttttattttaaatcaaagtctctctcttggtgggttctggaatttagatttaattccatcagttgggttttctaaccattgtgtaatacattggccagaacaaggggatcttgggcatgtcaggtggctgttttcctcatccttagaatgtgaagggatggtcaaaagccaccacacaggattgtaatgataagcagtgtctgttctgatcacatagtgggcacagctacatgatactgttattcaacaaaggggtcctattcattcagcctgctgttttaggatacctaccagtttctagacagaatataaaaggtgaaaatgatttgatcctaattaaaaaaaaayttataggtgagaaagaagaagcatatccattgagctttctgttctcttgacctaggctttattgccgtgactgagactgggtctaagagatttggattctcttgtcatggggacagaggtgctcacccaggtgtgctgtagt

SEQ ID NO: 171953 - DNA, 615 bp, Homo sapiens
actgggtgcagcatttctgtgaggaaattatatagtggtatcgtgtgtgttttaaagttacctcaactagtgattttgttattgtttaataatttttattctaatatgtgttatttatgaatctattttgaaaatattttaggtagatttgaaatctgtccagattatagttaatgacttattgctttaattaataccatctagggtgaagctttaagattatatatgctttgaaattatatatgtgtctagcagtgtgatcaatgtgttttctyactaacttagatttattgccccattcttaaaatttggagtagataatctctactttgtctgacatttggggatgatccctaagccacttacgaagaatggtccgttttgtagttcttccaggaagtgtgagtggttggttacttttgagttcaccttgcaaaggaacaccatttatatttagtggtctttggctaccacccagttcttgtttagagaatatagggagattttaacttactggcttttcttacagaaattaatttgatttggttatgtgtaacagagaccagcaaacttaaaaggatcagatagtaaatattttaggctttgtgggccata

SEQ ID NO: 171954 - DNA, 408 bp, Homo sapiens
gaaaaaaatctaataagttaatttaaaaatgggcaaaagctttgaatagaaatttttcaaaagaagacattagggtggtaaacaggcatatgaaaaagtgctcaacatcaytgatcagagaaatgcaaatcaaaactacagtgagatatctgctcagcccagttaatatggcttatattcaaaagacagacaataacaaatgctggtgaggatgtggagaaaagggaacactcatacactgttggtaggaatgtaaattagtacaaccactatggagaagagtttggaggttcctcaaaaaactaaaaatacatctaccatatgatcccgcaatcccactgttgggtatatggccagaagaatctgcactcccaaatttgttgcagtactgttcacaatagccaagat

SEQ ID NO: 171955 - DNA, 408 bp, Homo sapiens
gaaaaaaatctaataagttaatttaaaaatgggcaaaagctttgaatagaaatttttcaaaagaagacattagggtggtaaacaggcatatgaaaaagtgctcaacatcactgatcagagaaatgcaaatcaaaactacagtgagatatctgctcagcccagttaatatggcttatattcaaaagacagacaataacaaatgctggtgaggatgtggagaaaagggaacactcatacactgttggtaggaatgtaaattagtacaaccactayggagaagagtttggaggttcctcaaaaaactaaaaatacatctaccatatgatcccgcaatcccactgttgggtatatggccagaagaatctgcactcccaaatttgttgcagtactgttcacaatagccaagat

SEQ ID NO: 171956 - DNA, 509 bp, Homo sapiens
taagtagagagatttttaaatgtaccaggaatcctccctgggctttggaatgaggacagaatttcagaaggcacaaagatgagaagaaatcattatcaaattgataggtgctttgattatttttagactaatggtgtacagttgtggtgcactctcaacaaagtgcgcatgagctgggagtgggttgagagttggggagactctattttgtaaatgctgaaacattamcccagggacataaatgtttatgtctctttctctttacctgccagtccctcttgatttttgtcttatttttaaagttcttttcctacttgtgataccatccatttttaaccactacatcttacacccattgtcctttctctctattaacatagcactctagctctgtgttcctccatacttaagatctccctggagagacacaaagggagtccattatcccttttttttttctggtcacattttggcagagaagtgttctccacttgcatggtcctggcagt

SEQ ID NO: 171957 - DNA, 509 bp, Homo sapiens
taagtagagagatttttaaatgtaccaggaatcctccctgggctttggaatgaggacagaatttcagaaggcacaaagatgagaagaaatcattatcaaattgataggtgctttgattatttttagactaatggtgtacagttgtggtgcactctcaacaaagtgcgcatgagctgggagtgggttgagagttggggagactctattttgtaaatgctgaaacattaacccagggacataaatgtttatgtctctttctctttacctgccagtccctcttgatttttgtcttatttttaaagttcttttcctacttgtgataccatccatttttaaccactacatcttacacccattgtcctttctctctattaacatagcactcyagctctgtgttcctccatacttaagatctccctggagagacacaaagggagtccattatcccttttttttttctggtcacattttggcagagaagtgttctccacttgcatggtcctggcagt

SEQ ID NO: 171958 - DNA, 565 bp, Homo sapiens
gtcctctggctctctctggctcccaccctgctggctgagacgcctgctgattccggacttcccagcttcccgtcagcacccctagcctctctgggatctgtaagtratccaaacttctttttttgtttcgtgcatcttggcttcacctcctcggtgcacctcacttgaccgtcatacccaaagctaatttttttcctggccaggactctgctagagagtggttaccttgtcttatggcaactcccaacagagaggcctcaagactaaattagaaagagagcttaacaataaaattacaacagacagctacagagattattgtgagaagcatgctctatgttgaacctcaccccagttcccatctttatttcatgacagtagcataaagtgcttgattgggacaaacactaccagatattaaacatattattaagtaaccataatttaaagaatgttatagacagacatcaggatgacaaagtatacaccatgcttttaaatcctgttggaaataacatatcccttccagtcatatttcttttctattcttaattgacaaataaca

SEQ ID NO: 171959 - DNA, 461 bp, Homo sapiens
aaaaacctactcctccagtctgaggctttgtaccctttgaccatcatttccccattacctccacccctcagcctctgtaaccaccattctactctgtgctgctttgagtttgatttagattccacatatgagtgggaacatgcrtttatctttctacatgtggcttatttcacttagcatcatgttctccaatttcatccatgttttcacaaatgacaatttctttttagttgttgagtagaatttggtgggattgctggatcctaaggcacttttgttttttaggttttttttttttttgaggaacctctatacagttttccattatagctgtactaattgacatttccagcagcagtgtacaagggctcccttttattcacatcctcactaacacttgttatcttcctctttttgataataaccatctgacaggtgtgagatgatatcttatggcttta

SEQ ID NO: 171960 - DNA, 432 bp, Homo sapiens
tactaggctgcagaaatctgtcatttactaatctgcttggaatgtcaaggaaagcagagctgaagctttgatgggtgaatctcctgtcctggatactctctgctgggctcagaagaatgccaaaagagctggcagctgagtggagttttgattaactgtactggtgtgtacccactcaagcgtcagtgagattggttattgtcagtcagctgtctcctgagtgctgaattctcatttaagcttttgtatttaacgggaaactyacagttctctcactctggagttttaaatgaagttcaaatcagatgtaatttgcagttttataaaagctatgcaatattttctgtctctgtaagtagctcagaaatggaattgcctttaatgattataacttcttattctcaaatttgcattaatgcatgttccctaaca

SEQ ID NO: 171961 - DNA, 583 bp, Homo sapiens
ctaccttggccagatgattgaggttaacatcagtaataaatcatgttaatggcatgcacttcctgatataaggcactaaaaagaacactaaccacaaccttatggggaaaacactggacaaatagaaactgaagaatattctataaaatatctaatcatagactcctcaaaacaatgaaagattgagaaactgtcatagaccagagaagattaagaaaacatggacactaaatgtattttcttggattctgtyctggaacagaaaaagacataagtggaaaaactagtgaatgctacaaaaagtctgtactttggttaatagtaatgtaccagtgttagtttctgagttacaacaaatatgtgcgattcacaaaaggagaaactgggtgtggggtatattttctataaatctaaaattattccaaaatgaactttatttttagcaaagctatttgaaatgttttttaaaaactctgctaaggctgctggatacacaggtaagtagaacatataaaaacctagagtttttattaatattagcaataaaataaaaatcaaaagaatacataatagtgataagaac

SEQ ID NO: 171962 - DNA, 602 bp, Homo sapiens
ctcttctcaactcaacagaacattcaattttatagaatgaggtgttgcctcattctagaaccacaataaaagccaatttgatctttacatttgttgtaatcttgtcttctgacatcacttctacaatgaaatagaaacttcatattttttgaaggagaaaaacatctttaaaaattatctaaatacagattgatgaaagtcatatcattgtaatctaagagttttgtgtatagggtatgcatgtgtgtagttttgttataggcttctacagtcttatatcagataggtgatatggtttggctctgtgtctccacccaaatctcatgttgaattgtaatcttcagtattggagaagggacctggtgggaggtgactgaatcatggggatggacttcccccttgctgttttcataatagagttctcacaagwtctgattgaaagtgtgtagtacctccatgctctgtctctccttctctctctccctctttctctgtctctctctccctctccctttctctgtctctccctttctctgtttctccctttctatgtctctctctccctctccccatctctccctctcttcctcctgctctggcca

SEQ ID NO: 171963 - DNA, 499 bp, Homo sapiens
agttctgattgaaagtgtgtagtacctccatgctctgtctctccttctctctctccctctttctctgtctctctctccctctccctttctctgtctctccctttctctgtttctccctttctmtgtctctctctccctctccccatctctccctctcttcctcctgctctggccatgtaagatgttgctgcttccccttcaccttccaccatgactgtaactttcctgagggctctccagaagcagaagcctgtacagcctgcagaaacatgagctggttaaaactcttttcttcataaattacccagtctaaggtatgtctttatagaagttgagaataatacaataggtttatattagattatattaggtagtgatatggtttggatctgtgtccccacctaaatctcatgtcacattgtaatcctcattgttagagatggagcctgataggaggtaattgaatcatgggggcagagttctcatgaatgattcaaca

SEQ ID NO: 171964 - DNA, 580 bp, Homo sapiens
ctgttctccaccagggagcctagtcagcactgtccagcagaattttctgcaaagataaaaatattttcatgcagtccaaaatggtagccacaagccatgtggatattgagcactttaaatgtggttagagttactgaaaaactgaatttcaaatctgatttttactttaattcatttacataggtccatgtgacttctggctaccatagtggacagcacaggtatagataaatgatcaaaattataaaagttacattttatctttttaaatttgaataaaacatatcatcattaaaagcaatgctttttaagctaaaggttaactgtatgatttaaagtasagaataagaaaataacataactgtgtttcaataataaatttatttcttgacaatcaagggcagtgtaataggaagtcaataaagcaaaactaattaccgtcagggacaaataggtaaagtatttcattttaattaccttgcagtttcctggcgaagagcattaagaaatgtgtctggatggaaaagttctgataggtcaagtgtttcagagagaagagcctgtttttcagctttatcta

SEQ ID NO: 171965 - DNA, 630 bp, Homo sapiens
aacatagaattaaatctatataattattgtgacaaaattaaatgtgcatgaaaacaactttatgaaaatcccaaagggccaaargcatgagatccaaaaaaaaaaattaagtgattcaaatgtatcagtgataccctatggaggaaaaattcctttaaagtttttgcaaacatttatgaaatgcgtatccacacaccaggaagaaactgagcctctgatcataatcaagtaaaaatgttagaatttaacctattataaggtcactgaggaataaaaacattattcaatcaattatgctggggaaaaactattgttttggaaaaaaattcaatcttcagttcacattctaacctaaaactgtgctacttaccattcagagtaaaattttattccataatggaggaaaaaaattcacatgaggaaaaaaaggggtgagattatacatctgattacagaatggtggactttcattaaaaagataaaagaaatataggctatattatacaagattttatatctatatatataccattaaaactaaattggaaaaacacatttaccacaaatatgaaaatgagttaataacattaacaaagtggcaaattgtttacataattatagaaacaagat

SEQ ID NO: 171966 - DNA, 630 bp, Homo sapiens
aacatagaattaaatctatataattattgtgacaaaattaaatgtgcatgaaaacaactttatgaaaatcccaaagggccaaaagcatgagatccaaaaaaaaaaattaagtgattcaaatgtatcagtgataccctatggaggaaaaattcctttaaagtttttgcaaacatttatgaaatgcrtatccacacaccaggaagaaactgagcctctgatcataatcaagtaaaaatgttagaatttaacctattataaggtcactgaggaataaaaacattattcaatcaattatgctggggaaaaactattgttttggaaaaaaattcaatcttcagttcacattctaacctaaaactgtgctacttaccattcagagtaaaattttattccataatggaggaaaaaaattcacatgaggaaaaaaaggggtgagattatacatctgattacagaatggtggactttcattaaaaagataaaagaaatataggctatattatacaagattttatatctatatatataccattaaaactaaattggaaaaacacatttaccacaaatatgaaaatgagttaataacattaacaaagtggcaaattgtttacataattatagaaacaagat

SEQ ID NO: 171967 - DNA, 630 bp, Homo sapiens
aacatagaattaaatctatataattattgtgacaaaattaaatgtgcatgaaaacaactttatgaaaatcccaaagggccaaaagcatgagatccaaaaaaaaaaattaagtgattcaaatgtatcagtgataccctatggaggaaaaattcctttaaagtttttgcaaacatttatgaaatgcgtatccacacaccaggaagaaactgagcctctgatcataatcaagtaaaaatgttagaatttaacctattataaggtcactgaggaataaaaacattattcaatcaattatgctggggaaaaactattgttttggaaaaaaattcaatcttcarttcacattctaacctaaaactgtgctacttaccattcagagtaaaattttattccataatggaggaaaaaaattcacatgaggaaaaaaaggggtgagattatacatctgattacagaatggtggactttcattaaaaagataaaagaaatataggctatattatacaagattttatatctatatatataccattaaaactaaattggaaaaacacatttaccacaaatatgaaaatgagttaataacattaacaaagtggcaaattgtttacataattatagaaacaagat

SEQ ID NO: 171968 - DNA, 421 bp, Homo sapiens
tcctggcttggatatagaaatcaacacatgagcaaggctggaataaaaattgcaggtgtacrgtcaagggatccaactatgagtagttgagaaaactaggataaaggaaccaaaccaaggctgacaatgtaagatttacaaacagggtagagaacacgctagaatttagaatgatcatcacagaagaatcagaatatactgctgtaagggatacgctacaagccaaagggaaaacacagagtggaaatcaggaacacaagaaactctttgaagatgttatttctgaagaaaagacagaaaaatttgaagccagggaaataattctaagttccccaaagagagtaatctgtccagtccattcatttgttaattcctttgttcattcattcattcagcagacagtatataggtattggaaata

SEQ ID NO: 171969 - DNA, 620 bp, Homo sapiens
caacttttatattagaacaaagatgacgaagatggcttcaaacaaatttgtagatgagagagaaggacgggaattttcaagtggtcatatctcacagcttgaattttctctatgaagtaaaacgtaaggtgctctgctaaggaaaaggggagtcagtgacagaatggagtcttcaagaaagagtgaagaacatcactatggaatacaggagcagtgctcagggcccatccactgtatctgaaccgtatctgaagtgtacactgtacactgtatctgaagtttcggtagcagcgctcagcagcctgcatatggacagatactaatcccaagttaaatggtttttggaaaggatgaagcataaagaaaagtgagttaggatactgaaggtgctagaaagagaatatagttatgtgccacaaatagaaggctgaatcggccagaatcaggaaagaaagtgayagagaactgaacagggaagagactggaaagtctagagaatacaaaattgagaatgaaatgtggctgttgtcaaagaataacatgtatgcttaggggttcaaaggtggagcagggatgagtgatgacaaatgtgaacagacttgtggatcattattttaaaa

SEQ ID NO: 171970 - DNA, 513 bp, Homo sapiens
attttcttttttaaaagtcagagcacatctgctttccttaatggcaggctagaccaatcctgccaccaagaacaactgaaatatatggagaaaatgtttttaaatttttggcacagtgagaatagcaaagcagacaaaaatgacagtagcaaggttagggaagagaaggaaatgtggagaaggaagccctacaattgagggtgctgtcagttccatgggaagtagctgagagactgaaaaacatagtagtacttacaatggcccaagggggcatgtggtaaatttggagtcccagtccaccaggtagaaaggattctggtaaactcttcaggatttaggtttagaccagaagggctttacctcagagtaagaaaaaaacataaatctctgttgtgactgaaacctggttttgaatcatctcagagccctgaggttatattaaggtgatccaagtttacacmtacccctagttacctgaccaaaggaaatgtacatcccacatagagaaagatg

SEQ ID NO: 171971 - DNA, 554 bp, Homo sapiens
gcccctgggatagtcctgtgcatgcagagagcgctgcgtgtttgcagtgaaggaagctaagttgatagttctgagagctaagttcacaattcaaagcattcctcccccatattatcttcctaagttttatagaggtgactcttcaatgaaaatatgtaatgtaacaagtattttgactagcactgtcaattcattttatcttcttgccagaagcactgctgtactaaatatttgtcaagatgaagaattgatcaacttgtggttctggaataatcctgctcattccttttagcatactaacttccaaatgatatatgttagagaattccgttttgctcgctttgctctttcctgggtgggggsggggggcgctgaaagagagttttctttcttgccactttgccaatttattagctatgtaatctgtcttagttttctcatcaatggaatggacataacgaggtgagtggtgataaacatgtatgtatctacctatcagttgcttgcagcaatgccaatgtcagcatgcaataagaactatataagccatcatc

SEQ ID NO: 171972 - DNA, 545 bp, Homo sapiens
ggacttcttaagatgattaggtaaattatgaaaaatacataagctgtgctttctttgcatatctgaaagtggtaggtaaatttacaatctgagaaatttataaaagcacgttgtcaactgtgaagtrtttagtctgagaaacataggagggtagggatatctgggcaaaccccaaaagtgtcaggaaattggaacccagaacacatatttaaaagttgctatgagatactgattagataaaactactaacatgtaattagacttcagtgcctggcaagataatggaactgacaaggaaagagtaaatatcttgggaaattaatggagtcacatcaaatattatacattaattatatgatgtgcttaaggctattttttaagactcagaagctaatttacaggcatctcctcaattccatgagtctttctgaatcatcttgacactgtgtgacagcacgtctcctagcattcccaaatggtaggaaagagatacgtcaaatgtgtgggttatctgaccaatggagccatggatccaaaggtggtag

SEQ ID NO: 171973 - DNA, 539 bp, Homo sapiens
tttcaaggccagacaaaaagaataaagaaacacattaagagtgtatggatcatgaacagtgctataaataagtaattaagatgatttgatatgaagtatcagaacaggctaggagattatattacagtaacaaacaaccccctccccctacccaaaagaaagaggtttatttctcatgttacttggacattgtgggttagcttgggagctctgctcatgtggtcacccagcaacaggctgggagagacgctatctccaaactccacaattaccttgccaagaagaaagagtgtcgaagttctggcaagtaaatacttccacytagaagcaatacatcaacacataccacatctgcccacacttcacattagttatgtatgagttgaggagatgtgtttccacgcagaggaaacactagtaggaaaatgagttggtctgatggagaagcagcaatacatcctctatcttgcaactggagagtccggccccttacccttcacaggcacctctttaaggtcactgatgatactcctcacccc

SEQ ID NO: 171974 - DNA, 403 bp, Homo sapiens
tcaatttacaactaagaatgaaaatttttaaaataattwaaaactcctgttactttttacaaagtttcagttacacaagatgagtaagttctagagagctaatgcacagcatggtgactatggttaacactgtattttataactgaaatatgctaagagggtagagcttaagagttctgatcctccacctccccacacagagagaaagaaaagatgataactatgtgagttgattgatactgtaattagcttgactgtggttttaatttcacaatgtatacatatacaaaacatcgagttgtataccttaaatacaatttctatttgtcaattatacctcaataaaactgaaaaaatattactcttgttcatgcagtaagtaaaaagactcagtgacacatca

SEQ ID NO: 171975 - DNA, 385 bp, Homo sapiens
acatgaataggaagtctgaattaacaagcctgttatgatacaagatcaaagcatgatccaggccaggtatagtctatagactctgggtttgaggcaaacccaaaacattttgtgagcacacgcctacaaagccacaactccagagaagatgatcagtctaaacagaagatcaaagattaaaataaaaagttatgaaacaaaaataaatgaactattatgatacaggaatttgtacctcataggaaagcaaaaacactatttctctacactctcaacagaacatttctgamaccaaatatgtgggtttttccctcacattaagcaattatccaactctctagatgccaaccgggtgtcccacagctgaactcaattcagacactgc

SEQ ID NO: 171976 - DNA, 550 bp, Homo sapiens
aaatgcaaatcaaaaccacattgaggttccatcrctcaccaatcagaatttctattattaaaaagtcagaaaataacatgatggtgaggctgtggagaaaagggaatgtttataccctgctgctgagaatgtaaagtaattcagtcattgtgaaaagcagtttggagatttctcaaataatttaaaacaggaattccatttgaggtagaaatccctttactgggaatatacccaaaggggtcattctaccataaaaggacatgccagcgtatgttcatggcaacatttttcaccatagcaaagacacgtattcaatctagatgcccatcaacagtggactaattcaagaaaatgtggtacatgtagaccatggaatactacacagccataaaaaagaatcaaatcttgtcatttgtagcaacatgcttggagttgggggccattgtctcaagggaaataaattaggaatagaaaaccaaatgctacctgttctcacttataggtggaagctaaacattgagtatacattcacacaaagtagaaaatagac

SEQ ID NO: 171977 - DNA, 538 bp, Homo sapiens
aaggttaggcatttcaatagacaataaggttggctggcagattatatagaaccaaatgtatgaaagtsctttaatgataagataacacgttttaaggctcaatggctaataaatgaagctctaaatgaaatgtgaattatatgctttgggaaagtttccatgattccattgttatcaaaatattggtaggtaaaataacaggttgggaaaaattactctgaacctatagggaaaagaatactacgagacagataagaagtgctatgggtgagtaacagagagaatgagacatattccagagaaaattaatgaaaatcatcaaaaggacttcagaaatcattagacttgtggtttttgttttgattttgagagaaaagcatttacaatgacacagattttgaacttgtgtcactagtatgataaaatttttaggagataaagaaatatgatgtaagaatctgagtgccattaaaattcctaaaggaagagctttctggaaaaaaggtatagccaagaacaaattccaagaggtaggaag

SEQ ID NO: 171978 - DNA, 538 bp, Homo sapiens
aaggttaggcatttcaatagacaataaggttggctggcagattatatagaaccaaatgtatgaaagtcctttaatgataagataacacgttttaaggctcaatggctaataaatgaagctctaaatgaaatgtgaattatatgctttgggaaagtttccatgattccattgttatcaaaatattggtaggtaaaataacaggttgggaaaaattactctgaacctatagggaaaaraatactacgagacagataagaagtgctatgggtgagtaacagagagaatgagacatattccagagaaaattaatgaaaatcatcaaaaggacttcagaaatcattagacttgtggtttttgttttgattttgagagaaaagcatttacaatgacacagattttgaacttgtgtcactagtatgataaaatttttaggagataaagaaatatgatgtaagaatctgagtgccattaaaattcctaaaggaagagctttctggaaaaaaggtatagccaagaacaaattccaagaggtaggaag

SEQ ID NO: 171979 - DNA, 550 bp, Homo sapiens
aaatgcaaatcaaaaccacattgaggttccatcgctcaccaatcagaatttctattattaaaaagtcagaaaataacatgatggtgaggctgtggagaaaagggaatgtttataccctgctgctgagaatgtaaagtaattcagtcattgtgaaaagcagtttggagatttctcaaataatttaaaacaggaattccatttgaggtagaaatccctttactgggaatatacccaaaggggtcattctaccataaaaggacatgccagcgtatgttcatggcaacatttttcaccatagcaaagacaygtattcaatctagatgcccatcaacagtggactaattcaagaaaatgtggtacatgtagaccatggaatactacacagccataaaaaagaatcaaatcttgtcatttgtagcaacatgcttggagttgggggccattgtctcaagggaaataaattaggaatagaaaaccaaatgctacctgttctcacttataggtggaagctaaacattgagtatacattcacacaaagtagaaaatagac

SEQ ID NO: 171980 - DNA, 612 bp, Homo sapiens
attttctaggagaaaataatatttatttatttattcttcatatacagattggaaataaattatatttwaaaaaaagaatgcatcataggtacttagaatgttttaaggtttctgagataatggatcatctcctgtactaactcatcttagaatatcacccagtcctcacccctactatctgctccattaacctttaatttaggaaactaatacattttaattcaagaagatgaaatttaattgtttttagtataaagaataaaggcccattcttatgtagccacatatgtaagagaaacatgtgaaacattgtcaccaaaatccctcatgatacagtttaagctggaaaaagccacaatattgactccatcaggggacacctgcaggactggaggaataaatcaggagagggggactgggttgattttaagaaagccttttaagaaatagtagttttaattttctttgatgatattcttggaaaggaaatcaaggaatggaattgatttgatatttttatgttattgcttttttttgctgttttttttctattacttggacaactaggcccaagtaacgtgttcttaaaagcatgagagagtaccaagaaag

SEQ ID NO: 171981 - DNA, 594 bp, Homo sapiens
tttcagcaccatttattaagtagggaatcctttccccattgcttctttttgtcagatttgttgaagatcagatggttgtagatgtgcagctttatttctgagttctgtattctgttccattggtctatgtgccaatttttgtaccaacaccatgctgttttggttacagtagccttgtagtatagtttgaagttggatgcctccagctttgttctttttgcttagtattgttcyggctttacaagctcatttggttaaatatgaattttaaaatagtttttttttttccaattctgtgaagaatgtcaatggtagtttaatgggaatagtattgaatctataaattgctttgggtagtatggccattttcatgatactgactcttcctatccatgagcatggaaatggaatgtttttccatcagtttgcgtcctttctgatttccttgagcagtggtttgtaggtctccttgaagaggtccttcacttcccttgttaactgtattcctaggtattttattatcttaggggaaattgtgactgggagttcattcatgatttggctctctgcttgtctgttgtggtgtataggaat

SEQ ID NO: 171982 - DNA, 580 bp, Homo sapiens
caacagacgttcagagagctcctatggcatgccagacagttttacatattttctttcttttattagtacaaatttaaggagttcaagtgcagctttgttccatggatacatggtatcatggtgaagtctgggcttgtattgtaaccattacccaaataatgtacattttacccattaattgatttctcatccctcatttccctctctcctcccccscttctgagtctccaatgtctattattctatgtctacaagttttcacttattttcttatttaattctcacaattagatctaagggaagatttatagatgaatccaatagtttggcatgaaattacaagtttctctggtaaaaagtgactagtcattctttttaactttttgcaatttcagtaacatggacataatcaaagctgtcttggagcctgtttgcagtatttgaattgttattaaatagcttactttacctcacactcgtagtacaaggtagaaatcgaagcccatgtctttatcactgtttattcaatattagtgaaacattattcccaaataattttggattgtggattgtgaattat

SEQ ID NO: 171983 - DNA, 580 bp, Homo sapiens
caacagacgttcagagagctcctatggcatgccagacagttttacatattttctttcttttattagtacaaatttaaggagttcaagtgcagctttgttccatggatacatggtatcatggtgaagtctgggcttgtattgtaaccattacccaaataatgtacattttacccattaattgatttctcatccctcatttccctctctcctcccccgcttctgagtctccaatgtctattattctatgtctacaagttttcacttattttcttatttaattctcacaattagatctaagggaagatttatagatgaatccaatagtttggcatgaaattacaagtttctctggtaaaaagtgactagtcattctttttaactttttgcaatttcagtaacatggacataatcaaagctgtcttggagcctgtttgcagtatttgaattgttattaaatagcttactttacctcacactcgtagtacaaggtagaaatcgaagcccatgtctttatcactstttattcaatattagtgaaacattattcccaaataattttggattgtggattgtgaattat

SEQ ID NO: 171984 - DNA, 555 bp, Homo sapiens
ctagtgcccaactccattcacccatgtactttttccttagccagttggctttcttagatttctgctattcttcagtcttgattcctaaaatgttggtgaattacatagcaggacagaaagtcatctcttatcacggttgcctccttcagtattcctttgtcagcttgttcctgactactgaatgcttcctcctggctgccatggcatgtgatcggtatctcgctgtttgccacccacttcactacaaaggtctcatgactcctactttctgaatctatttggtgactgtttcttacctgctgggctctgtaaactccctcacccacctgagtagcttactcagtttgtctttctgtgggtccaatgttatcaaccgttatttctgtgacattccattgctcttccaactctcctgttccaacacccaacacagtaagattttatttactgtcctttctggagcaacatcagtgactacctttttgatagtggttagttcctatctggtaatcctactcaytgtcctgaagatacattccaccaggggcagaaata

SEQ ID NO: 171985 - DNA, 610 bp, Homo sapiens
ctttagcttgtaatattaaaaggcaacaaaaattaatttatcaggtctagcaagagcttagattgtggataatttctccaacaatcactaaataaccctattcaagcaaatatgtckctatactttgctttatttgcttttgtacattgtgatgaccatgtttctgacatgaattttatgcattaaaacagcttaaaacagtttaactttacagcatgtgagtgaatgtggtttctttctttagatccatagtcaatctaaaaatttgtgtttaattttggtttctaataaaagcctctgttatgcaatgctgatttcatatatctatatgtctatattttatatagatataagaatccatgtacatataaatgaaaaggagtgtttctatgctacgattaaagtgtttatgatctactttaatccttagtagtcaatcttgaattaatatgtgtaactgtggatattgtatatttaacatgttccaaattgtttaagttctttgcaggggaaagtattaaggataataaaaacacatcatgtggagaatattgaattgaaagggttagagaacaaattataattttctcttattgaaaacaggccatga

SEQ ID NO: 171986 - DNA, 610 bp, Homo sapiens
ctttagcttgtaatattaaaaggcaacaaaaattaatttatcaggtctagcaagagcttagattgtggataatttctccaacaatcactaaataaccctattcaagcaaatatgtctctatactttgctttatttgcttttgtacattgtgatgaccatgtttctgacatgaattttatgcattaaaacagcttaaaacagtttaactttacagcatgtgagtgaatgtggtttctttctttagatccatagtcaatctaaaaatttgtgtttaattttggtttctaataaaagcctctgttatgcaatgctgatttcatatatctatatgtctatattttatatagatataagaatccatgtacatataaatgaaaaggagtgtttctatgctacgattaaagtgtttatgatctactttaatycttagtagtcaatcttgaattaatatgtgtaactgtggatattgtatatttaacatgttccaaattgtttaagttctttgcaggggaaagtattaaggataataaaaacacatcatgtggagaatattgaattgaaagggttagagaacaaattataattttctcttattgaaaacaggccatga

SEQ ID NO: 171987 - DNA, 610 bp, Homo sapiens
ctttagcttgtaatattaaaaggcaacaaaaattaatttatcaggtctagcaagagcttagattgtggataatttctccaacaatcactaaataaccctattcaagcaaatatgtctctatactttgctttatttgcttttgtacattgtgatgaccatgtttctgacatgaattttatgcattaaaacagcttaaaacagtttaactttacagcatgtgagtgaatgtggtttctttctttagatccatagtcaatctaaaaatttgtgtttaattttggtttctaataaaagcctctgttatgcaatgctgatttcatatatctatatgtctatattttatatagatataagaatccatgtacatataaatgaaaaggagtgtttctatgctacgattaaagtgtttatgatctactttaatccttagtagtcaatcttgaattaatatgtgtaactgtggatattgtatatttaacatgttccaaattgtttaagttctttgcaggggaaagtattaagkataataaaaacacatcatgtggagaatattgaattgaaagggttagagaacaaattataattttctcttattgaaaacaggccatga

SEQ ID NO: 171988 - DNA, 621 bp, Homo sapiens
tcttagaaacagagaagtgaaaaatgctctcattagagtcatgcagagaagacaggactccaggtagttaaaatagcagaaatggaacatttaatctcatcttttctttcattcctattgggtattttcttagtctctctataaaaacaattgaatcctttaatttatttgcatttctgttgtgctactctttgcttgactaaacatgatttaaaacatttcaaggcatatgtttttagaaatccaaatggtaattagaatcataatatgtgtgtcatgttttgaagcaactgatgtggaaaataagaaaataaggttgtcatttttaattatattattcaaattcttatgtatgcttcaactgtagataaatttattatggaaagaatatttgagacacggtgataatagttttagatgttattccatttattatgtggggaagaatcatagcagagtgggyaggagtacttactttggaataaaattttccaagagttagattctaaatatgctacacttttagctgtgtagccattaatatgttacctaaagcttaagcctcctttccctaagtgcgcaagataaataactccaaatctgatcagagggtagttgtag

SEQ ID NO: 171989 - DNA, 620 bp, Homo sapiens
tctcataactcaaaatgtttccatgtattttttttaattcaatgatctttaaatcttacctcttggtaattcttaggattgcttgtaaacttacttttatttctcttacataatggcaggttacatgaactatctcttcatttatttatagagctctaaaattacattgatttaaaggagtaacatggattttccatgaatttctttaaggcaacatttacatcattattcctcaggctgtagatcaagggattcagcataggaatcaccaatgtgtaaaacacagaagccatcttatcagtatccagtgagtggttggtttggggctgcaaatacataaatagcattgtcccatagaaaaccgtgactgctatcatatgcgaagcgcaggtggaaaaggcttttttccttccttctggtgaacgtatccttagaatggacaaaacaatattgaaataagatactagaactgtaatcatggaaaaaamcaaatttgttgctgcagatataaagactattgtttctggtatgtaagtatcagagcaagataatgctaacagaggtgcaatatcacagtaaaaatgattgattatattagaagagcaataagacacagagaa

SEQ ID NO: 171990 - DNA, 512 bp, Homo sapiens
agtttctatgaaatgtttcagcrcacaatttcctggtcattcttttaacagctttatgtcatgcacaagtctagggttcagccaaaatctcaagaaaacttatggaggaaaggatgaccaacaataaggataggacctataggaaacaaatagcaatatgccaaaaggatgttctccattatctgtgataactttaaatggacatggattacattctccaattaaaagaaagaaattgacagaataaattaaacaaaccaaaaaaaccacgtgatccaaatatatgctatctgcatgagtctgactcactttgtttaaataaaatgaaaacaagattgagaatgtacatcctattttaaaaaaaggcaaaacccctacaaaataaagatatagcttactaaaatgtagcttaatgtgtgttccactggtagaatataaggtatgagatcactaaagaaaatagtaaatcagaagaaagacattttcgaaggaagtggtattttaattgaatt

SEQ ID NO: 171991 - DNA, 580 bp, Homo sapiens
tgttccactggtagaatataaggtatgagatcactaaagaaaatagtaaatcagaagaaagacattttcgaaggaagtggtattttaattgaattctataatatgagggttaattggctgattataatgagaacaatctatttttgaagtgttaaaatggttctttttgtagagtcataaagaatgtaattatatctattagaaacactatcaagtgataaatatwttctcataatttattggaacaatgttccatagtgtactgtaaagacaaagtttgcactaattcttaaagactctataaaagacatttttaacccctaagttgctaaagctgtagatcaagaggttaaacctgaggatcattaaagtgtagaacaaggaggccatttatccatatcaaaaagtagagatccatagaacataaccaccattgtaagatgagaaccacacatggagaaagcttttttcctgcccagtgcagaatgcattcaacatatggctaacaaaatcagaatgtttaacactagcaataccaggaggtagggatcaaattaaatgctgtaagcagtgtgatcaa

SEQ ID NO: 171992 - DNA, 603 bp, Homo sapiens
cacctgtgtagtctttcttatctgtactgctatggggatgtcttaggcaagcccccttgtgcaagttctcttatctgtgcctgcaggctgttcttttgtttgaaaggagtcaactgaggacccgccctaactacctgcctgactgagttttttcctttctcctccctcaataggccctttgaaaaaacagcacactactgcaaattccatgagacaagcaaaaaactgagttcccaaagtgtgagaggrggaaaccctgactctaaacacacattatcactggaaaatctgaaaacccagatcacgggagaaggatttaatcttacctagaactaaaatggatttacgaagttgtacaaaaatataaaagtagaagcagcagtggatggtgctttgcaggcattcccagtctccagcttgaacccaagtaagctatccctgactgtatctcacagggtccatcagagaaggcagccagaagaactggggagtggtcacagggtgaagaaagcttccagctgcaattggtagtggttttgactgggcagcaatttactcgagcagagtccagaggatgagcaggagctgctgcagatatgagtg

SEQ ID NO: 171993 - DNA, 543 bp, Homo sapiens
tagataatgactatggagttttctaggtatacaattatattgcctgtgaggagagataatttaacttcctcrcttcctatttggtgcctttactttctttctcccacttgactgcaatagctaggccttcgattactctgttaaataggagtgttgagagtaggcatcttcgtcttatcccagttctcagagggaatgatttcagctttctcacattcagtatgacattggctgtgggtttgtcaaagattaatcttattattttgaggtatgttccttcaatgcctacttttttaagggtttttaatgtaaacggatgttgaatttttattggtagacctttttgcatccattggaatgattatgtgatttttctgttttgagttctgtttgtgggatgaatcacatttattgatttttgtgtgttgaaccaactttttatcccaggaataaagcctgcttgatcatagtggattatctttttgagtgctgttagattcagtttgctagtatttggttgaggatttttcctttgatgctcat

SEQ ID NO: 171994 - DNA, 619 bp, Homo sapiens
ttatactagcgccgacatcaaaaaagaagaaaaacttcaaataaaagactcaacaatgtgtcttaaagaactggaaaagaatgaacaaaccaaagctgaaattagtagaagaaaataaaaaataaagattagagcagaggccgggtacggtggctcacgcctttaatcccagcactttgggaggccaaggcgggrggatcacgaggtcaggagatcgagaccatcctggctaagacagtgaaaccccttctctactaaaaatacaaaaaattagcagggtgtggtggcgggcgcctgtagtcccagctactcagggggctgaggcaggagaatggcatgaacccaggaggcggagcttgcagtgagctgagatcgcgccactgcacttgacagggcgagactccgtctaaagattagagcagaaatgaatgaaatttacaaaagaaaaaaatacaaaagatccataaaaaattccatgtagccataaaaaagacggagattatgtcctttgcagggacatgaatgaagttggaggccattatccttagcaaactaacagtaacagaaaaccaaatactacatgtccttacttctaagtgggagctaaatgatgagaaca

SEQ ID NO: 171995 - DNA, 619 bp, Homo sapiens
ttatactagcgccgacatcaaaaaagaagaaaaacttcaaataaaagactcaacaatgtgtcttaaagaactggaaaagaatgaacaaaccaaagctgaaattagtagaagaaaataaaaaataaagattagagcagaggccgggtacggtggctcacgcctttaatcccagcactttgggaggccaaggcgggaggatcacgaggtcaggagatcgagaccatcctggctaagacagtgaaaccccttctctactaaaaatacaaaaaattagcagggtgtggtggcgggcgcctgtagtcccagctactcagggggctgaggcaggagaatggcatgaacccaggaggcggagcttgcagtgagctgagatcgcgccactgcacttgacagggcgagactccgtctaaagattagagcagaaatgaatgaaatttacaaaagaaaaaaatacaaaagatccataaaaaattccatgtagccataaaaaagamggagattatgtcctttgcagggacatgaatgaagttggaggccattatccttagcaaactaacagtaacagaaaaccaaatactacatgtccttacttctaagtgggagctaaatgatgagaaca

SEQ ID NO: 171996 - DNA, 530 bp, Homo sapiens
agacaggggtagagaatggtacatcttaggaggaatttctacacatctttccagacatgtattttttagtctacacaatcrtgaatttgagtttttttctgtattaatgtctgtaagttttcagttttataaaaaataaaaattatccgtaaatctctagctaacttcaggtcattaaattttactttccatttgtaaaactttcatgattggagtctaagtcaaatttgattatagggcctttagatttgaatccttctctaactttccttattgttattcagcaggtaagtcaaaggcctgagttgatgtaaatggctggcaacaatttcactgaggttaccgtcttcatcctctctggatttgcaaatcaccctgaattacaagtcagtcttttcttgatgtttctcttcatttatctattcactgttttgggaaacctgggactgatcacgttaatcagaatggattctcagcttcacacccctatgtactttttcctgagcaatttagcatttattgacatattt

SEQ ID NO: 171997 - DNA, 616 bp, Homo sapiens
ttgtgttctatttcactaactttaagataaatttttgtatcaaaagtttttaaaaattctttttaaaacttgtttcatttcaagaaggatttcaaaaacttctgaagaaacaaattagtcaatgaaaataaactaaattcagtaaaattgatttttgatatcatagagattctgactcattctcatagctgtatattaagattaaaggtccatttaaaatgaattcaaagttactgtctgttacttggaataactagtatagaatggctggaatttgcagagatatttgccttttaaaatmggggaagagaaggatgggtagaaaaactgtcttaaattaatagctaaagataacagatacaaaagaaaaatatagtttaggaaataatgtacagaaatgttagcattatgaaatataaatgtattagagaactatataacttttatatttattcatggtaatgaatgcctctaaaaagtcaaagattgttcagaactcagtatattattttgcttacacaatttttactaaagtaaagtgatacaaaacattaggacaaagtaactaattttatagaacattgcttttactcttccacttgcctgaaattcagtc

SEQ ID NO: 171998 - DNA, 445 bp, Homo sapiens
aattcaacttttttacataccacacacatgtgtgatcatacaktatttgtctttctgtgcctggcttattgcatttagtctaatgctctccaggttcatcaatatagttgaaagtgtcaggatttccttcttttatgacactgaataatatttcactgtatgcctacaccacattttctttctccatttatccattgatagacacttaagttgtttccatatgttggctactgtgaagaatggtgcaatgagcgtgggagtgcagatatctctctgaaattctgttttcacttcattggatatacaccagaaaagagactgctggattacgtggtagttctatttgtacttttaactggaacatttaagttgctttctttaatggctgtacttatttacattctcaccaacagcgtataagggttctcttttttcacatccttgc

SEQ ID NO: 171999 - DNA, 457 bp, Homo sapiens
ataactaatgttcttggtatttctgttataatgcattaagttgcattatacaaatgtaaaaattttaaaggctaaaatgttcagctttttaggattatttttccaagaggaagggactatatctttgggtagagatgccataaagtttgagatccctgcatctgtactrtatctttatcactgaattttctcttcaatgtcattggtaacccagttttagctaaatccaatggacttgttttattattttaacataataatatctctgaagatttacatatttacacccttctttctatgtatttatgcctttatttatatttgtttccttctaattatctcataaagtaatatagacattgactttcagggaaggtgcataagagattagtgttttgacaattgtagtctcttgactgggtataaattgtatactgatcaagagaacattgcagtt

SEQ ID NO: 172000 - DNA, 562 bp, Homo sapiens
ttgtcagggccagttctgaagaccccagatagttgagtttatsctttactgcacaatactaacatttaaaaatatatagatggctaagtttctaatgtaattacatttggctcttttattttgccagtacagaagaaaaatgagtcttcaaaaatatgagttaattattctttattaatttgatcaactatctatttctatttaaaactatcattccagatgtggtcttcttaccgtacagcccatggtaccctccttgtagcttttaatctgtatagtatttcctccccctccctaacccacaaaaggaaagcaaacttcctcagtcattttacttgttcttagcaggagaaacacaaaatgtcaatattagtctctaaatttgtacatttcagcctctgaagaaaaaagtcaatttgcctttcattatcccattaaaggacacagttatccaccatattgaagacaaaacataatatggaaaactggaaatatcagcaatttagaatccttgtttctgtaggtccaggcatctgggggctttctgtgattccttacatgg

SEQ ID NO: 172001 - DNA, 562 bp, Homo sapiens
ttgtcagggccagttctgaagaccccagatagttgagtttatcctttactgcacaatactaacatttaaaaatatatagatggctaagtttctaatgtaattacatttggctcttttattttgccagtacagaagaaaaatgagtcttcaaaaatatgagttaattattctttattaatttgatcaactatctatttctatttaaaactatcattccagatgtggtcttcttaccgtacagcccatggtaccctccttgtagcttttaatctgtatagtatttcctccccctccctaacccacaaaaggaaagcaaacttcctcagtcattttacttgttcttagcaggagaaacacaaaatgtcaatattagtctctaaatttgtacatttcagcctctgaagaaaaaagtcaatttgcstttcattatcccattaaaggacacagttatccaccatattgaagacaaaacataatatggaaaactggaaatatcagcaatttagaatccttgtttctgtaggtccaggcatctgggggctttctgtgattccttacatgg

SEQ ID NO: 172002 - DNA, 571 bp, Homo sapiens
acctggtatactgcatgtcttccttatctgtgtgtttaggccatttatgcatagagttccattattggaacactaagcatcctactgctcaaggtcatcgccaaggtctgatttcaaaaattcaaaatattgtaacctcagacataaatttaagtatggatggagggatggatagatggatagatagatgaatgactgggaaaatacagccttattttatttggacagtgagtctatatttgtactcacaaagcatttgtcaatagagatattttataataccaataatctgttagggatactgatggtggtttcactggytctcaagaaattagaagacatgtagcaatagtctcattattattaagtcagaatgaagatacatcacattgtctttgggctaagttgattactgcaagaaattccctactttttcattcagagtgggtaattgtgaaaaacaagtttgtgaatactatcaagattataaactgtagaatttcctaattatttatattcatgttgctaacatagtctttgaggctctatcttcaagaagaggtgaaaatta

SEQ ID NO: 172003 - DNA, 586 bp, Homo sapiens
aagcttccaaaggaaggaacgggcagcaatctttactgttctgcagccttcgcaggcaaacagggtctggagtggatctccagcaaactccagcagacctgcagcagaggggcctgacaattaaaaggaaaactaaggaatagcatcaatatcaacaaaaaggacgtccactcagaaactccaycaccaacatcaaagaccaaaggtagataaatgcatgatggtgaggaaaaaccaatgcaaaaaggctgaaaatttctaaaaccagacatctcttctcccacaaaggatcacaattccacgccagcaaggaaacaaaactggacagagaatgagtttgatgaattgatggaagtaattgggtaataacaaatagaagaattgggtaatatcaaactcctctgagctaaaggagcatgtcctaactcaatgcaaagaagctaagaacctcgaaaaatggttagaggaattgctaattagaataactggtttgaagagaacataaataacctgatggagctgaaaaacacagcacgagaacttcatgaagcatacacaagcatcaatagccaaatcgatcaaacag

SEQ ID NO: 172004 - DNA, 607 bp, Homo sapiens
caatctttactgttctgcagccttcgcaggcaaacagggtctggagtggatctccagcaaactccagcagacctgcagcagaggggcctgacaattaaaaggaaaactaaggaatagcatcaatatcaacaaaaaggacgtccactcagaaactccaccaccaacatcaaagaccaaaggtagataaatgcatgatggtgaggaaaaaccaatgcaaaaaggctgaaaatttctaaaaccagacatctcttctcccacaaaggatcacaattccacgccagcaaggaaacaaaactggacagagaatgagtttgatgaattgatggaagtaattgggtaataacaaatagaagaattgggtaatawcaaactcctctgagctaaaggagcatgtcctaactcaatgcaaagaagctaagaacctcgaaaaatggttagaggaattgctaattagaataactggtttgaagagaacataaataacctgatggagctgaaaaacacagcacgagaacttcatgaagcatacacaagcatcaatagccaaatcgatcaaacagaaggaaggatatcagagattgaagatcaacttaatgaaataaagctt

SEQ ID NO: 172005 - DNA, 565 bp, Homo sapiens
gactcatcctgtggtaatttcccgagtgccagaaagcataattggcatagacatatttcrcagctggcagaacccctacattagctcccttgtaggtgagggctattatagtgggaaaggccaaatggatgccattaaagtggcctctacctaaaaagaaatagtaaatcaaaaacaatattgcatcagcggagggaatgtgaagattagtgccaacatcagggacttgaaagacacaggggtggtgattcctacaacatccctgtacaactctcctatttggcctgtgcagaagtcagatggatcttggagaatgacagtggattatcataagcttaaccagtggtcactgtaattgcagctgctgtaccagatgtggtttcattgtttgagcaaattaacacatctcctgatacctggtatgcagccattgatcggcaaatggctttttctccattcctgtccttaaggcccaacagaaggaatttgccttcagctggcatggccagaaatatacctttatgtccaaccccatgggtatgtcaactctccagattagtgtcaa

SEQ ID NO: 172006 - DNA, 377 bp, Homo sapiens
gatttgggggtggggatactaaatgtggcagggttcaacaaatttacattttatcaaaataaggttcttaaagartacaatgatagcatatgctttaactctggtagcacaaaccctcattaattgatggtcacagaaaaatactgtaatgctttaaacaaaagttttaaattacatcaatgacacaagtttcaaacaaaatgcagtgatcaaaatacttaactgtcctttcatcaagcttttacaaacacaatcagtcttcgctgtctgaggaaatcagttttagtttcttcatggtcctccatctgtcttttaacatgacacttgtccggttgttgaatttataatgcaacagtattttagaccagtttccctct

SEQ ID NO: 172007 - DNA, 377 bp, Homo sapiens
gatttgggggtggggatactaaatgtggcagggttcaacaaatttacattttatcaaaataaggttcttaaagaatacaatgatagcatatgctttaactctggtagcacaaaccctcattaattgatggtcacagaaaaatactgtaatgctttaaacaaaagtyttaaattacatcaatgacacaagtttcaaacaaaatgcagtgatcaaaatacttaactgtcctttcatcaagcttttacaaacacaatcagtcttcgctgtctgaggaaatcagttttagtttcttcatggtcctccatctgtcttttaacatgacacttgtccggttgttgaatttataatgcaacagtattttagaccagtttccctct

SEQ ID NO: 172008 - DNA, 377 bp, Homo sapiens
gatttgggggtggggatactaaatgtggcagggttcaacaaatttacattttatcaaaataaggttcttaaagaatacaatgatagcatatgctttaactctggtagcacaaaccctcattaattgatggtcacagaaaaatactgtaatgctttaaacaaaagttttaaattacatcaatgacacaagtttcaaacaaaatgcagtgatcaaaatacttaactgtcctttcatcaagcttttacaaacacaatcagtcttcgctgtctgaggaaatcagttttastttcttcatggtcctccatctgtcttttaacatgacacttgtccggttgttgaatttataatgcaacagtattttagaccagtttccctct

SEQ ID NO: 172009 - DNA, 400 bp, Homo sapiens
aaagcttgcctagtcgaagaatcctagacattcctccctagaagcrtcctccccaaaatcttttttcccttcattctaaggtacatttttaagttttagagaattttctagtacaacgcatggaagcttatccttccattttccttagttcctctgagccaaaagtcttcagctaggaaaaaaagaaaatgctcctctaagaaacatctttgactttggtgtttcacaaggaggcagtgtggggactgaaggctcccaggatgcacttgtgtagcacttcctaagccttttccatgaactgcacctaacgcagagaataaacatgtgtgcctggaatggtctgggaatgtcccaagcacagagttcttttggagtcttatgttttacacaaaaaattcat

SEQ ID NO: 172010 - DNA, 618 bp, Homo sapiens
agactctgaactcccccagctccagctccagaggtaaatcatgattggtctttttcttttctttctctttgttttttaaagacaggtctcactatgttgaccaagccagtctggaactcctggcttcaagcaatcctcccaccttggcctcccaaagtgmtaggactacagatgggggccaccacacatggcctgtgattactctctaagtcagctttggggatctcattctcttgaggtagagttggctaaggcataagcatgtgaccctcttgtggtcaatgagaggtaggggaagttggctgggggtctcctgtgagaatttcttttcaaattaaaggtatgtggcttaggtcaggtttaacaccaagatgggaatttatgtgcaaataatttatcatggaagtggtcccaggtgtgacaagagaggaagtggaggaagcaggacagggaaggggaggagaccaagcaaaggtgactctcactgattccacagaactctggaagtgtacatttcaccacagagctgtcccatgaaggcaagggagctagacttcatactcctgccccaccggtcattggtcaggggcctcccagggagaagacaatgcccaagca

SEQ ID NO: 172011 - DNA, 579 bp, Homo sapiens
gggagtagagcagccttttgttcrgtaacttctctcggtgtcaaagatgggatctggatgctccatgaagtcaagcagggcctgagtgaatgggatctattgctagcctcagggccaccaccaggtctgtagtaatgctgtgaaacactccccaaaatcttagtggctaaaattacaaatatatcttttttcactcacaggttcacaggtgaaatgggatggctgtgactcgggagtgggtctagatttagactgactctgcatctcattcttggatgcacggctaccgagggcttgtcattcccatggtggatggcagaagtgaaagaggctagccaaaccatgcaagtccatttaaaacctcagattggacattatatttgctcacttaccatgggtgaaggcaagtcatgtgaccaagccaaaagtcagttgagaaggaaggtatactttgcccaggtggatcatggcaaaagcagagagggaaggaagaatcatgaaccaaaatcatcatccaccagagttctccctctttgccacaaatgatccatttgtatccaggaaggaaaataccctcac

SEQ ID NO: 172012 - DNA, 534 bp, Homo sapiens
gccctgtaaacatgaattcccctggctcacaggtcccccagcccaccttggtatctccttcttcccctctygcatctgctcaccccatttctggatcaaatgcctgccacaaatttcttgctcctttgttttaaccaaggcaagttgatcacagaactgaatgcctgaggccgggctcagtggctcatgcctataatcccagcactttgagaggtcgaggtgggcggatcacttgaggtcaggagtttgagtccagcaaaaccctgtctctattgaaaatacaaaaattagctgggcatggtggtgcacgcctgtaatcccggctacttgggcagctgaggcagaagaattgcttgaacctgggagacagagttggcagtgagccgagatcgtgccactgcactccagcctgggggacagaaactccatcccccacctccagaaaaaaatgaaaaactagacttgtagcacaaacaagccccccagccaggatgcctctgagtgacatgtgaggtggggtctgagagcagagac

SEQ ID NO: 172013 - DNA, 534 bp, Homo sapiens
gccctgtaaacatgaattcccctggctcacaggtcccccagcccaccttggtatctccttcttcccctctcgcatctgctcaccccatttctggatcaaatgcctgccacaaatttcttgctcctttgttttaaccaaggcaagttgatcacagaactgaatgcctgaggccgggctcagtggctcatgcctataatcccagcactttgagaggtcgaggtgggcggatcacttgaggtcaggagtttgagtccagmaaaaccctgtctctattgaaaatacaaaaattagctgggcatggtggtgcacgcctgtaatcccggctacttgggcagctgaggcagaagaattgcttgaacctgggagacagagttggcagtgagccgagatcgtgccactgcactccagcctgggggacagaaactccatcccccacctccagaaaaaaatgaaaaactagacttgtagcacaaacaagccccccagccaggatgcctctgagtgacatgtgaggtggggtctgagagcagagac

SEQ ID NO: 172014 - DNA, 534 bp, Homo sapiens
gccctgtaaacatgaattcccctggctcacaggtcccccagcccaccttggtatctccttcttcccctctcgcatctgctcaccccatttctggatcaaatgcctgccacaaatttcttgctcctttgttttaaccaaggcaagttgatcacagaactgaatgcctgaggccgggctcagtggctcatgcctataatcccagcactttgagaggtcgaggtgggcggatcacttgaggtcaggagtttgagtccagcaaaaccctgtctctattgaaaatacaaaaattagctgggcatggtggtgcacgcctgtaatcccrgctacttgggcagctgaggcagaagaattgcttgaacctgggagacagagttggcagtgagccgagatcgtgccactgcactccagcctgggggacagaaactccatcccccacctccagaaaaaaatgaaaaactagacttgtagcacaaacaagccccccagccaggatgcctctgagtgacatgtgaggtggggtctgagagcagagac

SEQ ID NO: 172015 - DNA, 574 bp, Homo sapiens
tctaagctttcttctggaccctcacagcctctccatctctatgccctagacagccttccccacaatgagatagcagtaaaaatgacaattgcagctgctgtttactcagcaccaatagttgattatctcatttaacccccacaacagacccctgatggatgagaaggctgaggatcagcgaggccccgtggcttgtcccaggaaacacagtggagatgcagtgttgctggggctttgaggagtggagggaggaaggctaccgttgcactggcttctgcccaccccagcctttggccaccctgcccgagatgcctccctctcagcccccggctctggatttccaccstgaatccttccctagctcaggctggatgggctttgctggttgagagttctgggagccgggcccagggaagctggggcagctggcagaggcccctaggtcccacgcacaccagggctgcccagggcctccagccgtggaggcaggggcagtggatagaagaggacacggggctctctcttgggagctcttcccaccagaggcctctgcttcaaaaattcgtgacccacc

SEQ ID NO: 172016 - DNA, 605 bp, Homo sapiens
ggaggagccaggacagggtcttgccatctgccgctcacccccaccctgtgctctggggaccgctgcatcctcaggctgtggactaggaagctgagggtcacccagacaagaggaggtgctggaggtcacacagtgaatatgcctygctggccttcctgtctggcgtgtcttcctctgcccccatccaggtaggctggagttgggttttgatggaggagattttggttaggaagatgagagtggtggtagcagttcagggccagggggagggacaggaagcaccagatcagttttgtgggcagcaagtaggtcaatgtggttaagacacaattgtccctggggtagcaggacaagcaaggggatgagcagggagacagggtgccaaaaggctctggggagcctgaggcctcagcctgaagccacaggagtgtcgcctgcacatctggccaaaccctaagctctgagctggggacacacaggggaattgagcacttctctgaccccaggagctcattgccttgtcaaacagtcagaagtggaaaagggaaagtgcaggtggttgaggagccagggagccgctggcccagcctgggcagcagggaggg

SEQ ID NO: 172017 - DNA, 605 bp, Homo sapiens
ggaggagccaggacagggtcttgccatctgccgctcacccccaccctgtgctctggggaccgctgcatcctcaggctgtggactaggaagctgagggtcacccagacaagaggaggtgctggaggtcacacagtgaatatgcctcgctggccttccygtctggcgtgtcttcctctgcccccatccaggtaggctggagttgggttttgatggaggagattttggttaggaagatgagagtggtggtagcagttcagggccagggggagggacaggaagcaccagatcagttttgtgggcagcaagtaggtcaatgtggttaagacacaattgtccctggggtagcaggacaagcaaggggatgagcagggagacagggtgccaaaaggctctggggagcctgaggcctcagcctgaagccacaggagtgtcgcctgcacatctggccaaaccctaagctctgagctggggacacacaggggaattgagcacttctctgaccccaggagctcattgccttgtcaaacagtcagaagtggaaaagggaaagtgcaggtggttgaggagccagggagccgctggcccagcctgggcagcagggaggg

SEQ ID NO: 172018 - DNA, 605 bp, Homo sapiens
ggaggagccaggacagggtcttgccatctgccgctcacccccaccctgtgctctggggaccgctgcatcctcaggctgtggactaggaagctgagggtcacccagacaagaggaggtgctggaggtcacacagtgaatatgcctcgctggccttcctgtctggcgtgtcttcctctgcccccatccaggtaggctgsagttgggttttgatggaggagattttggttaggaagatgagagtggtggtagcagttcagggccagggggagggacaggaagcaccagatcagttttgtgggcagcaagtaggtcaatgtggttaagacacaattgtccctggggtagcaggacaagcaaggggatgagcagggagacagggtgccaaaaggctctggggagcctgaggcctcagcctgaagccacaggagtgtcgcctgcacatctggccaaaccctaagctctgagctggggacacacaggggaattgagcacttctctgaccccaggagctcattgccttgtcaaacagtcagaagtggaaaagggaaagtgcaggtggttgaggagccagggagccgctggcccagcctgggcagcagggaggg

SEQ ID NO: 172019 - DNA, 605 bp, Homo sapiens
ggaggagccaggacagggtcttgccatctgccgctcacccccaccctgtgctctggggaccgctgcatcctcaggctgtggactaggaagctgagggtcacccagacaagaggaggtgctggaggtcacacagtgaatatgcctcgctggccttcctgtctggcgtgtcttcctctgcccccatccaggtaggctggagttgggttttgatggaggagattttggttaggaagatgagagtggtggtagcagttcrgggccagggggagggacaggaagcaccagatcagttttgtgggcagcaagtaggtcaatgtggttaagacacaattgtccctggggtagcaggacaagcaaggggatgagcagggagacagggtgccaaaaggctctggggagcctgaggcctcagcctgaagccacaggagtgtcgcctgcacatctggccaaaccctaagctctgagctggggacacacaggggaattgagcacttctctgaccccaggagctcattgccttgtcaaacagtcagaagtggaaaagggaaagtgcaggtggttgaggagccagggagccgctggcccagcctgggcagcagggaggg

SEQ ID NO: 172020 - DNA, 588 bp, Homo sapiens
gagtgttctgctcaagaaactcagtgaaggatgctgtctaggttgtagatgaatatctcacaatcccttctattccttggatatatttctagaggatgacagattctagttgagttcacagagtctttttttattggtaattatttgttctagttgaatctagccagtcaacattcagtggctatgaaatacttctagattttctctctgaactcaaaccatggattttagctacctggtaaactgttcctatgttctcagaatatcttcctcaatttgtaagtaaaatgaatgcaggattaacatttaattctcaagttatagtacctctaagtgtccccctccttgaatgcagcatctcagttttctcacamctgcattccctactctccaactccaattcttctgctatttctgggaaagcctcagtactaataatgtatacctaacatcatatgcaatggtgacagactgcatactttctccctaagatcaggaagaaagatacatactctcaccactttaatttgacattgttctagatgtcccagacagtgcggtatgcaagaatatgaaatgagaggtacc

SEQ ID NO: 172021 - DNA, 526 bp, Homo sapiens
ctaggcccaatgcaaggaaatccaaaaaagcaatacaacaagggagagatattcaaggaactagatagcataaagaaaaaataatcaaaacttcaggtaacattggacacacttacagaaatgcaaaatgctctggaaagtctcagcaatggaattgaaagtagaagaaagaaattcagagctagaagacaggtcttagaattaayccaatccaacaaagacaaagaaaaaagaataagaaaatatgaacaaagactccaagaagtctgggattatgttaaacaaccaaacctaaaaataatcggtgccctgaggaagaagagaaatctgagagtttgaaaaacgtatctgggaaataatcaaggaaaacttccccagccttgctagagacctagacatccaaatacaagaagcacaaagaaaacccgggaaattaatcacaaaaaactaatcacctaggcaactgtcatcagtttatccaaatttcagatggaggaaagaatcttaagagctgtgagacagaagc

SEQ ID NO: 172022 - DNA, 531 bp, Homo sapiens
gagattgaaatatgtatttgtgaggattttccagagaaacagaaccaataggatggagataggtgtagatacatggagagagggagagagggaaaaatagaaggagagagagagagtataaggaattggttcatgtaactatggaaaccaagaagtcccacaatcttcagtcagcaaggtagagatacaggaaaaatcaatgacgttaagtyccattctgagtctgatggcctgagaaccagaaaagtcaatggtctaagtcccaggccaagggcaagagaagaccaatatcccagcttatgtgatcaggcagaaagagaacaaattctcccttcctctgcctttttgttctattcaggccctcaatggattggataatgcccacccacattggggagggcaatctgcttgactcagtctatagatttaaatgctaatctcttccataaacacccctacagacacacccagaaacaatgtttaaccaagtatctgggcatcccatggcccaatcaagttaacatataaaat

SEQ ID NO: 172023 - DNA, 526 bp, Homo sapiens
ctaggcccaatgcaaggaaatccaaaaaagcaatacaacaagggagagatattcaaggaactagatagcataaagaaaaaataatcaaaacttcaggtaacattggacacacttacagaaatgcaaaatgctctggaaagtctcagcaatggaattgaaagtagaagaaagaaattcagagctagaagacaggtcttagaattaacccaatccaacaaagacaaagaaaaaagaataagaaaatatgaacaaagactccaagaagtctgggattatgttaaacaaccaaacctaaaaataatcggtgccctgaggaagaagagaaatctgagagtttgaaaaacgtatytgggaaataatcaaggaaaacttccccagccttgctagagacctagacatccaaatacaagaagcacaaagaaaacccgggaaattaatcacaaaaaactaatcacctaggcaactgtcatcagtttatccaaatttcagatggaggaaagaatcttaagagctgtgagacagaagc

SEQ ID NO: 172024 - DNA, 507 bp, Homo sapiens
catctaattaaaaacaaatggttaataggctaattattttagataatcaagtctccaagggcttttaacacaacaaacatatcctgaaaagcagttacaatattactcttaaaggccaacatggaggcccatgcctgtaatccctgcacttcaggaggccgaggagggaaaattgcttgagcccaggagttcaaaaccagcctaggcaatatagggagatccctccctacaaaaaatataaataaattagctggtgtgtggtgcacacctgtagtaccagccattctgaaggctgaggcaggaggattgcttgagccagaggggttaaagcagaagtgagccatgattatgtcactatactccagcctggacaacasagcaaaagcgagaaaaaagaaaagaaaagaaaaaagaaaaggagagagagagagaaagaaagagaagaaggaaggaaggaaggaaggaaggaaggaaggaaggaaggaggaaaatttattatattacata

SEQ ID NO: 172025 - DNA, 393 bp, Homo sapiens
tcctattagtcagagacagattagggttmttgttcaagtaatttattagtagccagctttcatgagaaagaagtgagaaaagccagataggagaaaatcctaagcaagaatgtgttctttcctagagactagtggtggcaccttgagtcaaggtgaccagcctcttacattcccatgtgattcagtcattggttgctggcttctcctggacaggggttggagagatacctcccgggcaacatggcttctgtccagcaggggacaattgtctggagaaagggcaactgtaagcttttagcaaccagaacttacagcaactgtggggttgatgcaccagtgaaagggatcgaggcagggtaaggtatctaatccaatatttgtacactcagatct

SEQ ID NO: 172026 - DNA, 393 bp, Homo sapiens
tcctattagtcagagacagattagggttattgttcaagtratttattagtagccagctttcatgagaaagaagtgagaaaagccagataggagaaaatcctaagcaagaatgtgttctttcctagagactagtggtggcaccttgagtcaaggtgaccagcctcttacattcccatgtgattcagtcattggttgctggcttctcctggacaggggttggagagatacctcccgggcaacatggcttctgtccagcaggggacaattgtctggagaaagggcaactgtaagcttttagcaaccagaacttacagcaactgtggggttgatgcaccagtgaaagggatcgaggcagggtaaggtatctaatccaatatttgtacactcagatct

SEQ ID NO: 172027 - DNA, 393 bp, Homo sapiens
tcctattagtcagagacagattagggttattgttcaagtaatttattagtagccagctttcatgagaaagaagtgagraaagccagataggagaaaatcctaagcaagaatgtgttctttcctagagactagtggtggcaccttgagtcaaggtgaccagcctcttacattcccatgtgattcagtcattggttgctggcttctcctggacaggggttggagagatacctcccgggcaacatggcttctgtccagcaggggacaattgtctggagaaagggcaactgtaagcttttagcaaccagaacttacagcaactgtggggttgatgcaccagtgaaagggatcgaggcagggtaaggtatctaatccaatatttgtacactcagatct

SEQ ID NO: 172028 - DNA, 415 bp, Homo sapiens
ttaagaaacacaaaattcacaaatatttttctgggaatgagagtgagtggcatcactcccactttcattccttgattcttggatccaggtactacagtcacaccacgacaaaatgacctcagatttaaagtgtaaaccacatctagaaggataacasccatcctcaaaagttatcaccctaagaagatgtctcagctgtgccttccacttggcacactggagagagttttggatagtgtggtaagtggaaggaccaacagattttctggccatgtgtctactgccataaccctttgctgtgaaattatctcttggtcctggacaatgtgatatggcctccaatacaagaaaatctgacattttgtgagacctcagccagtggcactaagctgaggcactgcaggcaggaaggtaa

SEQ ID NO: 172029 - DNA, 605 bp, Homo sapiens
tttgatacatttatgctttggcatttgtcaagcatgtcctttcttgcctacctctttggaaaacaactactctaatttcaagacacatttcaaaacatatgcgttgttaaagccttcactctttacctgtgcatacctcttgagtagtgtagctatttacctgtgtgtacctcttgtgttgcatcatatatttttatatcataaatcatctccctcactgcactgttagctcctggggactaagaactatgccttatatataactctaccccctgcttttagcagagtctagcctatagcaaaagtaatcaattggatggttatactgtcctttaaagagataaattctggcattgtcaggcaatgaaatgactgggtcccaaagggaaattgtaacagattctgaagactttaatcataaattcagggatcaggtaggtcacgaagtggtataaattggctatarctaatgattagggagtaatgagggcagcaacaaacttatgggaatatcttccctacttaacagtgatctcaaaactatttaaaacaaataaaagcacactgtatttgtattaatctgttttcatgctgccaacgaagac

SEQ ID NO: 172030 - DNA, 418 bp, Homo sapiens
aaggtaatttgcttagcaaaagtagtcttttttcatacactgtgctcagcttgagttcacctttctcaccttcaaatattaaaactcaccccatagaaaatgaatctgggagcctaatcagaatcttcgccttctattctgagataggctcattctcctgagatcatatttgttcrgaagacattgaccccaagagtaattggcttccaatgatactttggttccttatttctcgtttataaagaaaaaaaatggattccagaagcaagttcaagagaacagtcccaaactttgcaacaagaaagtaaattttttaaataaaggcatttaaatcttcactgcaatgagattagaaaaaaacaacccatcactgcaagaaggtgaaagaaggacataggtttttctgttcataaaaatc

SEQ ID NO: 172031 - DNA, 519 bp, Homo sapiens
aacatatgtatataagttatgtatacatatataacatatgtatataagttatgtatacatatataacatatgtatataagttatgtatacatatataacatatgtatataagttatgtatacatatataacatatgtatataagttatgtatacatatataacatatgtatataagttatgtatacatatataacatatgtatataagttatgtatacatatataacatatgtatataagttatgtatacatatataacatatgtatataagttatgtatacatatataacatatgtatataagttatgtatacatatataacatatgtatataagttatrtatacatatataacatatgtatataagttatatatattctagaagaataatatatataatatatatataacatatatataagaaggagtatacactaaaataatgatcaaaagtatagtaaaaatgtaaaccagttaacagtcatttattatcattatcaagtattatgtactctaca

SEQ ID NO: 172032 - DNA, 461 bp, Homo sapiens
ccctcatttgcccgtggaaacattaaaaaacaactaaaaactgaattaaaaaccttataggagccctgaaagacagtcaaagttctgcaagaactaagtgaacacccaatcaagaaagaaccactttcaaaccaggaggaaattttatcacatgtttacttgcccatgtcccatccactttctggtacagtgtggtctcagtctagagggtggtaatccagttcccaattccctctctcaaaccaaagggagtggagtagaccgtacctgcaatattttaactaacctrccttagggatgcctgaaggacttgtctctatctcacctaaatcagatctcagacagaagtggcaggcacttttattgacaatggcagagagactagagagtgaagataactgagccaagaaactatgggtgacacttacaacagaccatcaaagacaaaaaacaatggaaac

SEQ ID NO: 172033 - DNA, 566 bp, Homo sapiens
agaaaattaagcaagcaaaaaagttaattattaatgccagaaaaaaaaaacataatattatacagaaaagaragaatattcattgtatataacatgccccattggtgaatagcatttacattgtcataaaaccagaagcacagaatattgatccaaccaaaactgtgataaattgcaattggcaggatggggaacaggaaatgtgcatgtgtgtggtgggggtgggagttcttgaaagaaagcaaaaacctcatcttccgtcgtggaaggtcagtagataaagcctaaaacagaaacatcaaaaagtagttacataaacctgttatttcgagatatggaggtaaatatcaaaagaatcagctaaagaagttgaaagtggttgcccttggcgataagaaatatgggcagggactgttggtttttctataaagctttgtagaattatttgtctctttaacgtgcaggtacaactttaaataaatgaattttgaaaaacacagaattgggattaactgtgcacattgctgtcaattgttgtagttcaggccactggtaccacacaattt

SEQ ID NO: 172034 - DNA, 532 bp, Homo sapiens
ccttggcgataagaaatatgggcagggactgttggtttttctataaagctttgtagaattatttgtctctttaacgtgcaggtacaactttaaataaatgaattttgaaaaacacagaattgggattaactgtgcacattgctgtcaattgttgtagttcaggccactggtaccacacaatttaccaattcaagtttgatatccacctggccatttttaggatgtgtggaatatttatttayagaatttagagctgaaggactttttacattttttaatttattttttcaatgggttttgggggaacaagtggcgtttggttacatgagtaagttctttagtggtgatttctgagattttggtgcacccatcacccgagcagtgtaccctgtacccagtgtgtagtcttttatccgtcgccaccccccaacatttcctctgagtctccaaagtccaatgtgtcattcttatgcctttgtgtcctcatagcttagctgccacatatgaatgagaacatacgatgtttggtttt

SEQ ID NO: 172035 - DNA, 532 bp, Homo sapiens
ccttggcgataagaaatatgggcagggactgttggtttttctataaagctttgtagaattatttgtctctttaacgtgcaggtacaactttaaataaatgaattttgaaaaacacagaattgggattaactgtgcacattgctgtcaattgttgtagttcaggccactggtaccacacaatttaccaattcaagtttgatatccacctggccatttttaggatgtgtggaatatttatttatagaatttagagctgaaggactttttacattttttaatttattttttcaatgggttttgggggaacaagtggcgtttggttacatgartaagttctttagtggtgatttctgagattttggtgcacccatcacccgagcagtgtaccctgtacccagtgtgtagtcttttatccgtcgccaccccccaacatttcctctgagtctccaaagtccaatgtgtcattcttatgcctttgtgtcctcatagcttagctgccacatatgaatgagaacatacgatgtttggtttt

SEQ ID NO: 172036 - DNA, 588 bp, Homo sapiens
tattattattttttttccttctttatttcagtctgggcatttttgcctcttaaaagcagctaaccctttaccacggaggtgatgcagaaatctactcatcaagtaagcctgaaagccctttgmttcctgcagaaaaatctatatgtgcccttcagcctcataattgagttgcaaaggggaaaaataaaattgtttcctggctgtgtggagccattctacccaacatgccaataaaaagcaagtggtgtttttgtccataggatgtccaggttcagagtcagatccatgaggctaaacaagggctaggttattaccaacaaatgattacactccaggttgtattgaacagagtgagatatgtgaactcttgagactaattggaaggggaaatgtcaatgttgacatcccctgactggattccctaaaccacagtggaaactaacccagaatcttaaaaatgctggcttccagaaagccctattcttatcaggaaatgtgaatattaatcccaggcaagtcacttagccactactgtttttctttgccatcagatagtaatagccatctgcggtatcttttttcagaaaa

SEQ ID NO: 172037 - DNA, 572 bp, Homo sapiens
cagctatgagggagtggcggtagctgtgaggagcaggagggagtgctgctggtgggaaagtcagggtcaggagaggcagcacccttccctatcctttcagccttgactcagtgtctcagcctggcgcaggcaagtaaagagacatggtaggtgaagaaggtggccctgccaatctagtaatcagttccaggtagagaaagtcttgggttgggcccaaagtacttcaaagggctccagaaggaaagagaatctatgaggaggacaagggaagggaaggggaagtgaagacactctagtgcacgtaaagtctggatttagctacagtgtgggggtctgttcatttccagcatctctgggtggctagtgactgaggccgctgagtgtggagaggacacaccctctgaaagcccccacayaggggagagtgcaccactctgcctggttcaggcgcatggggcctctgtgaccctcaaagagaaagctcctgggaggcactggggcagaaaccatacgggatatttctttataaccttcggaagaaagtaataaaagtcaagtcttcgttaatagct

SEQ ID NO: 172038 - DNA, 553 bp, Homo sapiens
gtttgcagtgagtgagtcaagatcatgccactgcactctagcctggacaacagagcgagactcagtctcgaaaaaattttttataaggccaggcgcagtggctcacgcctgtaatcccagcactttgggaggccaaggcgggcggatcacctgagatcaggagttcgagaccaacctgaccaacatggagaaacccaatctccactaaaaatacaaaattagccaggcgtggtggcgcatgcctgtaatcctggctactcaggaggctgaggcaagagaatcgcttgaacccaggaagaggaggttgtggtgagccaagatcacgycattgcactctagcctgggcaacaagagcgaaactcctcctcaaaaaaattttaaaaaaggaaacatcaccactttttgactgacttttcacctagcaatgatggcttcacttcagatattgaagagacactgaatggatatgtaccctgatttgtgtcatttttgcatttttcccataattctagaaaatcagaggaggctttcatctttcttcttctggcgtgtc

SEQ ID NO: 172039 - DNA, 588 bp, Homo sapiens
atcctcctgccttggcctccaaaagggctaggagtatagatgtgagccaacacactctgccataggccaattcttaaatgacaaacctcatcaccatcctggaggagcacatcatttgttcccgaactttctcctgcttccctttgaactttgagaatgagaaccaaatggtctgaacataacacttctctgcgtagcatgtttgacatatttggaatacaaagaatgcttctgccyttaatctggctttgtgcagctgcacggaaaagatcgtttaacactcttctttatattttgtattttgggggaattctaccaggaaacttacgatcatctttcggaagtcccggtcacgcgggagcagttaaaccactatcggaatgtggctcaaaatgctcgaagtgaacttgcagcaactttggtcaaatttgaatgtgctcagtctgaggtaagataatgcatttccagcactcagaaatgggccttcttagcttcttataaaatgaaacagatcacgcctgtaatcccagcactttgggaggctgaggcaggcagatcacgaggtcaagagatccagaccatcctggc

SEQ ID NO: 172040 - DNA, 558 bp, Homo sapiens
gaattcttgttttaatccttgaagacacttaatattttggccagaacactatttatattccgtttattttaacaatgaatttcctgtcccaaatgtagtcaaaatgtgtacttgcacaacaaaagcattgcaaacactgctgtgttacagactggccaatgcaccacaatgtattggtctcyttgtgtgagttatcacctggagtactttgtctcaggaccaagagaattaaagggtgaggttggagcgaaagtttaataagcgaaaggagaaagctcactgcaggggagaggggatccagaagagggttgctggtttttgcagttgaatgcaaaggcttttgtaagaaaccgatgagggctgggcatctcatttgcataaggtgcaaatttctggtagctccaccctgacctcctagtgcacatgtgggcgcttagcttaagttactccatattgctttgttctccttactatgcatgtgttaggggatggaattttccattgcaggcatgtctgggcaagcccccctgtgcaagttcccttatctgtgcctgcagg

SEQ ID NO: 172041 - DNA, 547 bp, Homo sapiens
aacaaaaaagagctgagggatttttgtcaacaccagacctgttttacaagacacgataaaaggagttcttcaatctgaaaaagaaaaaaaaggatgttaatgagcaacaagaaatcacctgaaggttaaaaggcactggtaatagttaatacacagacaaatacggaataccctgacactgtrattgcagtgtgtaaaccacttatcttcagtaggaaaacataaagagaaatctatcaaaaataataactacagaaactttttaagagatagacaatataaaaagatacagagacaacaaaaagacaaaaagcaaaagaactgaagttacaagtgtaaagttttttagttttctttttgtttgtatttttgtgttttctttctaatcagagttaagttgtcatcagtttaaagtaattggttaaagatgttatttgcaagcctcataataatgacaaaacaaaaacttacgatagatacacaaaaaattaaaagcaagaaattaaaacatattaccagagaaaatcacttttacacaaaggaagac

SEQ ID NO: 172042 - DNA, 374 bp, Homo sapiens
tactttgtctttatcttctcctttggaaactcccatatgcatatattgattyccttgctggtgtcccataagtcccataggctctcttcactttttttcattcttttccttcttgcttttctgactcaatttcaaatgtcctaggcatagtacaagctaactatgggaggaatttagtttatagtttaacctatcttcaagtacattgatttttctgcttgatcaggtctgatgttaaagctctctattgagttgtttagttcagttgtcatattcttcagctcaagaatttccatttggttcttttttatggtttctatttctttgttgaacttctaattttgtttatgtattattttctttattttgtttag

SEQ ID NO: 172043 - DNA, 590 bp, Homo sapiens
ttttaaactctaagctgcccttgttcattcctaggcataggacgagctaactatgggaggtattttttttatagtttaactgaaacagagatgaaaacagccctaaaacaaacaaattagccacaagattagcaattatgactcaggaatcatgmagccagaggccacaagattcctaacctccccagttgctcctaggataacctcattattgtaaaacctaagactgctgctgctcaagatactttttagaccctgcattctgatggacaagcttgtgccactaaaaccaataaactggctcaactagttttgtgatcccacccaaaaactaatgacagcagtaagaacccacttcaatcccctatgatttcattgccaacccaaccaaacactattctttatctcctaggcccctttgcaccaaactatccttaaaaaaccctggcctctgaatttctggaaagactgacttgaataataaactctggtcttctgcttagctatctttgcatttattaaactctttctctatcacaattccactgttggtaaattggctctagctgggcagagggcaaaaagaacct

SEQ ID NO: 172044 - DNA, 567 bp, Homo sapiens
tcatagatggtcagatggcttcacagctgcatttcaatgcttatcaaatgctatgccttaaacatgtgcagctcattgcttgtcaaatyacaactcaaaaaaatgttagaaagaattatctctttggtatttccacagaattttgttttaaatctctattacagtgttacctttgaagttagaaactttagagttagaaggcctgggatggagtcccatttccattaattattaagcatgtgactttagggaagttaaaatcagttttgtcatctataaaatggatataactaaagtgcttctctcagaatattgttcagacgattgaatgtatcaacttggcacattgcctatcaactggtgagtgctcaaaaatatccattgctgtgatcagtaatgccacagggtgaccatttaaggacagagtccatgttttatccatccttatgttcctactatgttactgttgaacaaagtacactctcaattacagctacataggaggaataaattccggtgttccgtaccaccataagatgactgtagcacacaataatatattatata

SEQ ID NO: 172045 - DNA, 558 bp, Homo sapiens
gatggcttcacagctgcatttcaatgcttatcaaatgctatgccttaaacatgtgcagctcattgcttgtcaaattacaactcaaaaaaatgttagaaagaattatctctttggtatttccacagaattttgttytaaatctctattacagtgttacctttgaagttagaaactttagagttagaaggcctgggatggagtcccatttccattaattattaagcatgtgactttagggaagttaaaatcagttttgtcatctataaaatggatataactaaagtgcttctctcagaatattgttcagacgattgaatgtatcaacttggcacattgcctatcaactggtgagtgctcaaaaatatccattgctgtgatcagtaatgccacagggtgaccatttaaggacagagtccatgttttatccatccttatgttcctactatgttactgttgaacaaagtacactctcaattacagctacataggaggaataaattccggtgttccgtaccaccataagatgactgtagcacacaataatatattatatagttt

SEQ ID NO: 172046 - DNA, 567 bp, Homo sapiens
tcatagatggtcagatggcttcacagctgcatttcaatgcttatcaaatgctatgccttaaacatgtgcagctcattgcttgtcaaattacaactcaaaaaaatgttagaaagaattatctctttggtatttccacagaattttgttttaaatctctattacagtgttacctttgaagttagaaactttagagttagaaggcctgggatggagtcccatttccattaattattaagcatgtgactttagggaagttaaaatcagttttgtcatctataaaatggatataactaaagtgcttctctcagaatattgttcagacgawtgaatgtatcaacttggcacattgcctatcaactggtgagtgctcaaaaatatccattgctgtgatcagtaatgccacagggtgaccatttaaggacagagtccatgttttatccatccttatgttcctactatgttactgttgaacaaagtacactctcaattacagctacataggaggaataaattccggtgttccgtaccaccataagatgactgtagcacacaataatatattatata

SEQ ID NO: 172047 - DNA, 558 bp, Homo sapiens
gatggcttcacagctgcatttcaatgcttatcaaatgctatgccttaaacatgtgcagctcattgcttgtcaaattacaactcaaaaaaatgttagaaagaattatctctttggtatttccacagaattttgttttaaatctctattacagtgttacctttgaagttagaaactttagagttagaaggcctgggatggagtcccatttccattaattattaagcatgtgactttagggaagttaaaatcagttttgtcatctataaaatggatataactaaagtgcttctctcagaatattgttcagacgattgaatgtatcaacttggcacattgcctatcaactggtgagtgctcaaaaatatccattgctgtgatcagtaatgccacagggtgaccatttaaggacagagtccatgttttatccayccttatgttcctactatgttactgttgaacaaagtacactctcaattacagctacataggaggaataaattccggtgttccgtaccaccataagatgactgtagcacacaataatatattatatagttt

SEQ ID NO: 172048 - DNA, 558 bp, Homo sapiens
gatggcttcacagctgcatttcaatgcttatcaaatgctatgccttaaacatgtgcagctcattgcttgtcaaattacaactcaaaaaaatgttagaaagaattatctctttggtatttccacagaattttgttttaaatctctattacagtgttacctttgaagttagaaactttagagttagaaggcctgggatggagtcccatttccattaattattaagcatgtgactttagggaagttaaaatcagttttgtcatctataaaatggatataactaaagtgcttctctcagaatattgttcagacgattgaatgtatcaacttggcacattgcctatcaactggtgagtgctcaaaaatatccattgctgtgatcagtaatgccacagggtgaccatttaaggacagagtccatgttttatccatccttatgttcctactatgttactgttgaacaaagtacactctcaattacagctacataggaggaataaattccggtgttcygtaccaccataagatgactgtagcacacaataatatattatatagttt

SEQ ID NO: 172049 - DNA, 567 bp, Homo sapiens
tcatagatggtcagatggcttcacagctgcatttcaatgcttatcaaatgctatgccttaaacatgtgcagctcattgcttgtcaaattacaactcaaaaaaatgttagaaagaattatctctttggtatttccacagaattttgttttaaatctctattacagtgttacctttgaagttagaaactttagagttagaaggcctgggatggagtcccatttccattaattattaagcatgtgactttagggaagttaaaatcagttttgtcatctataaaatggatataactaaagtgcttctctcagaatattgttcagacgattgaatgtatcaacttggcacattgcctatcaactggtgagtgctcaaaaatatccattgctgtgatcagtaatgccacagggtgaccatttaaggacagagtccatgttttatccatccttatgttcctactatgttactgttgaacaaagtacactctcaattacagctacataggaggaataaattccggtgttccrtaccaccataagatgactgtagcacacaataatatattatata

SEQ ID NO: 172050 - DNA, 582 bp, Homo sapiens
tgtgtagtggtatcccatggtttccatttttattcttctgaagattattcatattcagtatgttttcatatgcttattaattgtaaatctcttgtaaatcgtttaaatgttttgctcatttgttttacattaggttgtattaagagatataagtcttttatcagaaatgtgatttggaaatatattctcccagtmtataacttatatattgaatatttttacagtatccttcaaagataagacattttttattttttattttactttttctgagagtctcacttggtcgcccaggctggtgtgcagtggcacgatcttggctcactgcaacctctgcctcctgggttcaagtgattctcctgcctcagcctcctgagcagctgggaatatgggtgtgcaccaccacttccaggtaacttttgtatttttagtagagacggagtttcaccatattggccaggctggtcttgaactcctgaccttgtgagccacctgcctcggcctcccaaagtgttgggattacaggcatgagccactgtgaccggccacatttttaattttaataaggcccaatttatcaat

SEQ ID NO: 172051 - DNA, 582 bp, Homo sapiens
tgtgtagtggtatcccatggtttccatttttattcttctgaagattattcatattcagtatgttttcatatgcttattaattgtaaatctcttgtaaatcgtttaaatgttttgctcatttgttttacattaggttgtattaagagatataagtcttttatcagaaatgtgatttggaaatatattctcccagtctataacttatatattgaatatttttacagtatccttcaaagataagacattttttattttttattttactttttctgagagtctcacttggtcgcccaggctggtgtgcagtggcacgatcttggctcactgcaacctctgcctcctgrgttcaagtgattctcctgcctcagcctcctgagcagctgggaatatgggtgtgcaccaccacttccaggtaacttttgtatttttagtagagacggagtttcaccatattggccaggctggtcttgaactcctgaccttgtgagccacctgcctcggcctcccaaagtgttgggattacaggcatgagccactgtgaccggccacatttttaattttaataaggcccaatttatcaat

SEQ ID NO: 172052 - DNA, 582 bp, Homo sapiens
tgtgtagtggtatcccatggtttccatttttattcttctgaagattattcatattcagtatgttttcatatgcttattaattgtaaatctcttgtaaatcgtttaaatgttttgctcatttgttttacattaggttgtattaagagatataagtcttttatcagaaatgtgatttggaaatatattctcccagtctataacttatatattgaatatttttacagtatccttcaaagataagacattttttattttttattttactttttctgagagtctcacttggtcgcccaggctggtgtgcagtggcacgatcttggctcactgcaacctctgcctcctgggttcaagtgattctcctgcctcagcctcctgagcagctgggaatatgggtgtgcaccaccacttccaggtaacttttgtatttttagtagaracggagtttcaccatattggccaggctggtcttgaactcctgaccttgtgagccacctgcctcggcctcccaaagtgttgggattacaggcatgagccactgtgaccggccacatttttaattttaataaggcccaatttatcaat

SEQ ID NO: 172053 - DNA, 582 bp, Homo sapiens
tgtgtagtggtatcccatggtttccatttttattcttctgaagattattcatattcagtatgttttcatatgcttattaattgtaaatctcttgtaaatcgtttaaatgttttgctcatttgttttacattaggttgtattaagagatataagtcttttatcagaaatgtgatttggaaatatattctcccagtctataacttatatattgaatatttttacagtatccttcaaagataagacattttttattttttattttactttttctgagagtctcacttggtcgcccaggctggtgtgcagtggcacgatcttggctcactgcaacctctgcctcctgggttcaagtgattctcctgcctcagcctcctgagcagctgggaatatgggtgtgcaccaccacttccaggtaacttttgtatttttagtagagacggagtttcaccatattggccaggctggtcttgaactcctgaccttgtgagccacctgcctcggcctcccaaagtgttgggattacaggcatgagccacygtgaccggccacatttttaattttaataaggcccaatttatcaat

SEQ ID NO: 172054 - DNA, 412 bp, Homo sapiens
ttcatttgtagtttattaacttcataaaaggccattgctttatttacgaaatgattgaaggattcyatgagaaaaaatatcataaaagtaagcaaccactttaatactatctctctatgctactaacattggtaaaagaaatgtaatgttcatgtcagccaccaaacattcttactcattaacccaatagtgacagatactgtccaagatccagagccactcttctgtagctatgcccttttctgctaatcccctccaaatgacctttagatagtcctgttacagtgcttcccagattattctccagtgtatgatttttagggtgtaattgtcacatcactgagaagtttgctagtaagaaatatgtttttcagaacagcaagtacagtacaaataagaaggtagcagaaca

SEQ ID NO: 172055 - DNA, 386 bp, Homo sapiens
actttaaagaggagataaacactgattctttttttccattcattcaaccacttgcacagagagagagaatccagaaatctgatgtaagaaattcttatgtttttgccagcatgccaggcttctgggttccctttccctgagcggccctagtgatttcgcttgcagcatcatcaccctgggagccaarccacatcataaaggaaaaatttatttattttttcattctggccagagcaaaatacatgtgataaaacacagacgttaaccactctgcttagcacccagtatcaaaccagcaaggcttaaatttgcccccagatgtgccccatcatctttaatccaacctccttctaggagtttcaatgcgtggtctctgggcaagatgg

SEQ ID NO: 172056 - DNA, 386 bp, Homo sapiens
actttaaagaggagataaacactgattctttttttccattcattcaaccacttgcacagagagagagaatccagaaatctgatgtaagaaattcttatgtttttgccagcatgccaggcttctgggttccctttccctgagcggccctagtgatttcgcttgcagcatcatcaccctgggagccaagmcacatcataaaggaaaaatttatttattttttcattctggccagagcaaaatacatgtgataaaacacagacgttaaccactctgcttagcacccagtatcaaaccagcaaggcttaaatttgcccccagatgtgccccatcatctttaatccaacctccttctaggagtttcaatgcgtggtctctgggcaagatgg

SEQ ID NO: 172057 - DNA, 532 bp, Homo sapiens
atacaaaatcttttgtattaagaaagcaaaaggggagagaaaaaagcattgcctgtggtagggtggggaaggcgaaatgatcagagggccagagaaagacccacccattgcagtggcactgaaaatttcagtcagctgcttcttggtacaaagggatcttttccagtaagcctattagctctcaagtttcccctattagggaggaaaaagctccccatgtcccacgatcctgaacatgcctaaccctgtcacccacagccatcagcaaacagtacaaggcagattaatccaatgagaatagcagttaacatcccatagtgtcaaatgtattcttagccgagtgggactttactgagacagtcttctaaccccctaaatcwtaaaagggactctaaccctcctaagtcaggcctctaacccaaggtcagtcaagcatccttgccttttattaagaagggcctcttacctactctgtcttaggagagactcttactcccctaagttgggcctctaacccaatcccattatttac

SEQ ID NO: 172058 - DNA, 599 bp, Homo sapiens
gatgggttcaataaaagcccacacctcagcatcacccaatatacccttgtaacaaacctgcacatgtacccctgaatctaaaattaaaattaaaaaaaaatatttcrgtgtcccacaaataaagtactttccatttttaagttattattttttcaaattttctgtagaagttgagcttcttttgataacacatttctttagtcaaggattaatattttcttttaaggagtccacacactccagtctaggagtaataaacattttaaaaatctacaagatttaaattttcaccagtgtttagaaaaagtggaaggcattatgtaaacaaactcagaatcttaaaaatggtacatttatttaatgaatctgcctctttttgagttttttttttatactggaaggatagtggtttctgaaaagtaaaatgttttaaaaaattaaaaggaaaatccatatttataagaccattaaattgaactgtgcccctctaccttgcttttaatggtttattaataaacactacagagagaagatacaacaaaacatgaactactctttttatgcataaactatttttattctttagcatatgttaggca

SEQ ID NO: 172059 - DNA, 603 bp, Homo sapiens
aacattctaagtttcagtcatttttatgtttgacatacctgctcagtgacaaaatattcattgctccttacactccaatgtctttgatgcccaaaggtcttttgaagttatgttaacagcaatattttgatcttataatcaggggaaatgtcatataaatgcaatgctcttgggctctgagtattggtatgagtaatataaatcagtaggtaatcgtttctattggattgtgttttggtaaatttggatctctttttgcacaacacagtgaataacttcctactacagagaatgcctagtccataacttggtattagatattcacatacctagaccatattaatcactcttaaaattccatctatccacactgttgtattgaagattaagttaccagcacatgctttctggaagacccattcaaaccatagcattttgccccaamcttaaaattcaggttcttctcattgcaaaatacattccatcccagtgtcccaaaagttttaacttatttcaataccaactcaaaagtcctaaatccagagtctcttctgaatcagatatggatgagacccaaggcaaattccaagacaaattcctcaa

SEQ ID NO: 172060 - DNA, 531 bp, Homo sapiens
tggggttgtagcccccacacagagtccccactggggcactgcctagtggaaatgtgcaaagagagccaatgttctccagacctcagaatggttgatccactgacagcttgcaccatgtgcctgaaatagccacagacattcaatgccagcccaagaaagcagctgggagggaggctatacactgcaaaaacatggagcagagctatccaagaccatgggaatccacctcttgcrtcagcatgacttgaatgtaagacatgaagtcaaaggagattattttgaaactttaaggtttaatgactaccctattggatttcagactttcaaggggcctatatagcccctttattttggccaattcctcccatttgggaggagtatatttactcaatgcctgtaccctcattgtgtctaggaagtaactaacttacttttgattttacaggctcatagggagaagagatttgccttgtctcagttgaaactttggactgcagacatttgaattaattgtgaaaggaattaagactt

SEQ ID NO: 172061 - DNA, 531 bp, Homo sapiens
tggggttgtagcccccacacagagtccccactggggcactgcctagtggaaatgtgcaaagagagccaatgttctccagacctcagaatggttgatccactgacagcttgcaccatgtgcctgaaatagccacagacattcaatgccagcccaagaaagcagctgggagggaggctatacactgcaaaaacatggagcagagctatccaagaccatgggaatccacctcttgcgtcagcatgacttgaatgtaagacatgaagtcaaaggagattattttgaaactttaaggtttaatgactacccyattggatttcagactttcaaggggcctatatagcccctttattttggccaattcctcccatttgggaggagtatatttactcaatgcctgtaccctcattgtgtctaggaagtaactaacttacttttgattttacaggctcatagggagaagagatttgccttgtctcagttgaaactttggactgcagacatttgaattaattgtgaaaggaattaagactt

SEQ ID NO: 172062 - DNA, 571 bp, Homo sapiens
aaacactctctaggttgccataagcttttagttaattttcagagttttgcactattggtttatctgggttactggcttctccagtggcaaatataggctatgtgagacaaaaaagaaaactcaagaaactgactactgtgttattatttgaattctgaagttcctagcctgtttgacttytgattgacttttgacttttctccaactttcaagttttcttaaaaatatttaatatataatacataatatatttgatactaaatattaatatgtaatatagctatgcttagtggtagaaatagagaaaagtatgctcaacccatctttatggagggaaaagtctttttaaatgttattttaggatcttttttttttagaaattatatacacacaaacatccacacacatacataaatacaattcagcctttaaaaatgacaatagacagtgcaatgacaaagagtgtgagggctaatcgcccgtaccaagcttactgccttgtgaggaagatcaataagacctaagaaaaaatgaatagcatacacaaaaaattaatttaaaatagaaaaaa

SEQ ID NO: 172063 - DNA, 571 bp, Homo sapiens
aaacactctctaggttgccataagcttttagttaattttcagagttttgcactattggtttatctgggttactggcttctccagtggcaaatataggctatgtgagacaaaaaagaaaactcaagaaactgactactgtgttattatttgaattctgaagttcctagcctgtttgacttttgattgacttttgacttttctccaaytttcaagttttcttaaaaatatttaatatataatacataatatatttgatactaaatattaatatgtaatatagctatgcttagtggtagaaatagagaaaagtatgctcaacccatctttatggagggaaaagtctttttaaatgttattttaggatcttttttttttagaaattatatacacacaaacatccacacacatacataaatacaattcagcctttaaaaatgacaatagacagtgcaatgacaaagagtgtgagggctaatcgcccgtaccaagcttactgccttgtgaggaagatcaataagacctaagaaaaaatgaatagcatacacaaaaaattaatttaaaatagaaaaaa

SEQ ID NO: 172064 - DNA, 532 bp, Homo sapiens
caaagggatttaaattatgtcaacaaaataattataaaatgcagcaaagttcaagattaagcctttagccaatgaagctgatgttatttttttttcagcaaaataaattgttactctgcctcttacayatagtggatacttaataagcattcattgcataattagaggaataaatgtattaggaagaagttagagtgcctcatcggtagacttgattatcctccgactatgcgaaaatcagaactcaactttagcatttatcatttagtctgtgtctataagaattaagagtgcaagaagaccgaatacttatattgtttatataggttacacaggctgttgataaaaataaacctggttcaaaaataaagtattccaaatccacatttctatgaccagaagatttttctttttctctttttcttttctttaagtagtctagataattgcctcaacattattctttgttttctttgtaaatatgcagaataaatgtaacctgactcaccactcctattttgggctaacctgc

SEQ ID NO: 172065 - DNA, 532 bp, Homo sapiens
caaagggatttaaattatgtcaacaaaataattataaaatgcagcaaagttcaagattaagcctttagccaatgaagctgatgttatttttttttcagcaaaataaattgttactctgcctcttacacatagtggatacttaataagcattcattgcataattagaggaataaatgtattaggaagaagttagagtgcctcatcggtagacttgattatcctccgactatgygaaaatcagaactcaactttagcatttatcatttagtctgtgtctataagaattaagagtgcaagaagaccgaatacttatattgtttatataggttacacaggctgttgataaaaataaacctggttcaaaaataaagtattccaaatccacatttctatgaccagaagatttttctttttctctttttcttttctttaagtagtctagataattgcctcaacattattctttgttttctttgtaaatatgcagaataaatgtaacctgactcaccactcctattttgggctaacctgc

SEQ ID NO: 172066 - DNA, 594 bp, Homo sapiens
tttatggcagtaagagaactgactaatgcaggaaactggcactggtagagttgggtactgctataaagataacctggaagtgtggaagtgactttggaactgggtaatgagcagaggctggaacaagttggggggctcagaagacagggagatgtgggggagcttggaattcctagagacttgttgaatgactttgaccaaaactctgatagtgatatagacaatgaagtccagtctaaggtggtctcagatgragatgaagagcttgttagtaacaggactaaaggtcactcttgctatgctttagcgaagggactggtagcattttgcctctgccctagagatgtgtggaacttggaactttgaacttgagagggatgatttagggtatcaggtagaagaattcctaagcagcaaagcattaaagaggtgtcctggattattctgaaagtgcttagagttttatgtgctcacaaagaaatggtttgaaactggaacttatgcttaaaagggaagcagagcaaaaatgtttgaaaaatttgcagcctgaatctgtgctaataaagaaaaactcattttctgggaaggaattca

SEQ ID NO: 172067 - DNA, 463 bp, Homo sapiens
tttaaaggatatttcatattatcttccatctgtaggtattgatgactggaattcatagtaaaaatttatactaatttgtatgtaaagcaatttcatcttccttgaaatatcagtggagttctaacttgtctagaatattattttttatttattcttagaattttgaaagaaaattttaagatatttcagataagggaaatacacttctatcacattgttaattgtcttattctctctttttagaactcttattaaatagaacaattctccatatatcttaatattttccataattttcttttgctttggactctagggattattttcccaagttaatttgtgattattaattaggtatgtagttccattgattctattttttagtcatttttaatttttatgatatttttaactcaaaataaatatttcscatgcttctttacttcttgttttatagacttag

SEQ ID NO: 172068 - DNA, 588 bp, Homo sapiens
atatggcataaacaatcaaagagaaaaaaactgcatttcaaagcctagtagatttagatatcacccaactaaaattagtattagcagtaccatgtaatttttatatgcwtatagatctttataagttctataagaagtttgtgtattttcaaatgagaaaaataagtaatccaagagaaaaataattactttcaatgaaataataggatctgatgaaagatcacagcaacatgaaagcttagacttaaggcaggaaataactggacttctagtactgtctccttgacagtcaattgtttggttttaatagctggcacagccccagcaatttacattagaaaaggcaaattatccttctgtggtatttcctataatctagtagttcattatcaaataacacacacccttattggattaccatgagtagccataatattttgttttctttgagttgtgatgttggaaggtgagaatgataattgtatttttgtatggaacttagcttaggtacatatctgcatttttatagattaaactatcatatatatcagtccccaaaaaagtaaaatgaactaagaaagtttatac

SEQ ID NO: 172069 - DNA, 416 bp, Homo sapiens
aaactctcatactctgttggtaggaatgtaacaattagtacagtctttatggaaaaatgtatggggtttcttcaagaaacttaagatagaactgctatacaatcctgctgggtatatagcaaaaaataataataataataattttgctatataagagatacctgcacttccatgtttattgaagtactattcacaatagtgtagatatggaaccaaccctrgtgttcatcgaaagatgaatggataaagaacatgcggtaacccaatggaatattattcagctataaaaataaagaaatcctgtcattggcagtaacgtggatgaaactggaagacactatggtaagtgaaataagccagtcacaggaagaaaatatcacacattcccacaaatatatgagagctaaaaagaaaga

SEQ ID NO: 172070 - DNA, 518 bp, Homo sapiens
cagatgttctaggatgctaattaccccaggaacagtattatttacttagactttcataggctcattgattttttttctttttggttttgttccaatgggtaacatttttttttcttttatatgtatgcttggctcaagggaaacataataacattgttgtctagcacctactgtttttagctcttagtgaaacctggctattaaaatgcttggtgtatatgtacttatagtgttaccaggctgctcatatgaaaatcttggcacctctcatattaacagttcatctgaatggctatgttttcctttgcttttctcactagctggcatttttttggctgtctctctgactctcttgccctcttgatatgtatcttatgggttrtctgtcagtctgattgtaaattacacatggggatgacatgtgttttgtatggcattttgctttcttgaattgtttcagaatgtttagaaagttacccagtacaaatgatttttggcaaattagcatatagtctgct

SEQ ID NO: 172071 - DNA, 607 bp, Homo sapiens
attgcagcggctcaagattatccctgtaatactcacgtgcactctgacattttcttcattgcaagggaaaaggagggaagtggatttagagttctgggaagtgagggtaagtcaaaactatgtcaaaggattcttgtgaggattaaatgagatgctatgtatgaagcacttagcatggtacctggcatacagaaaatatgatgtaaatgtttgttaatagtattaccataccacagccaaccaaccacactccccacaccaccacaataacaaatttttgttattgttagcatactaccaattatgtgtatcatggcagaagggaaagcaattttgaaaacctctggctctataatctgacccgtgaccttgggctggatttgtcagatgtgactcccacygttccttccctcttaaagcagacttgcctattttgtcctagcactccttccccactggcctgacaaagaactttgttttctctaacttttaatttttgtgggtgcatagtagaaatatagatttatagggtacatgagctattttgatacaagtatacaagatgaatgcttctctgatgatcaatgatgttgagcaccttttcata

SEQ ID NO: 172072 - DNA, 563 bp, Homo sapiens
tggtgtagtgcaaagaattcaggatttggatgcagaaagtctaggcttttgtccttatttctccattgctacccgtatgaccttatgactaccttgatatctctaagcctcaataattttctcacctgtaaaaagaggaaaataatgtccaataattaaaggcattatgaagcctaatgaatatcaaaaaatacaagatcattattaaataacaatgttgcagctactgaatatatgcaggacatcacacagtgccaggatatagtccacagttattttattgcttctccagtgaatgtgaatgaatgaagaaagatgaagactccatcatgaaatttgttttggttttattggactggtctagtttcacagttagaagacaacaaattttgagaataaatctcaacagccaactctatggatcgggcatactgacagaccattaaatgagtcaaggactttctaatggggarttaaatcaatctgtttatccagtggcaaacaaatactttataatacattaaatgcaaagaagaatatcaagccgttaatgaagggggctg

SEQ ID NO: 172073 - DNA, 610 bp, Homo sapiens
ttagatctcagtcttaaaaccaatgtgrtgttcttttcatgaaacaaagctgcctccctccaagtactaatcatgctaacatctgatcattatcaagcagttcttatgtgccaagctctgttctaagctctttgctcatttcttcttcacagtaatatgtcgggtaagtactcttagtttcagcgttttatagttgagaaatctgaaacagcaaagtttaagtcacttgcccttcacataagtagtaagaaactgatctctttttgacccaagaacaatggctccagagcccttgctcaaaatcatactatattattgcatgtagttttaaaagactaaactcttcaccaaaaatgaagtcaaaggcatcatctttcactcagactgtcttccaatctaagacacctaataataacacaattaaagataattaaatcagacttcaggctaatctttcctggacttacttgggagactcaaacacacagctttcagtgacactttgcatatgcccctacaaataacaatgagagttctcactgattgattcattcactttattccttcagcaaatttttgctgaaaaccaatatcaaaagatactcttttg

SEQ ID NO: 172074 - DNA, 610 bp, Homo sapiens
ttagatctcagtcttaaaaccaatgtgatgttcttttcatgaaacaaagctgcctccctccaagtactaatcatgctaacatctgatcattatcaagcagttcttatgtgccaagctctgttctaagctctttgctcatttcttcttcacagtaatatgtcgggtaagtactcttagtttcagcgttttatagttgagaaatctgaaacagcaaagtttaagtcacttgcccttcacataagtagtaagaaactgatctctttttgacccaagaacaatggctccagagcccttgctcaaaaycatactatattattgcatgtagttttaaaagactaaactcttcaccaaaaatgaagtcaaaggcatcatctttcactcagactgtcttccaatctaagacacctaataataacacaattaaagataattaaatcagacttcaggctaatctttcctggacttacttgggagactcaaacacacagctttcagtgacactttgcatatgcccctacaaataacaatgagagttctcactgattgattcattcactttattccttcagcaaatttttgctgaaaaccaatatcaaaagatactcttttg

SEQ ID NO: 172075 - DNA, 618 bp, Homo sapiens
ctattaatcttttctaactacgtgacatgaacataaacaataagtcagaagagaaataatttatcataagttaaaatatatgtaatgctwattatgctatattttagtactttaatattttaaaatattaaaatcatatttgtgtatatggcaaggtacctagctcataagcagtatagaatattatttcaagttaataatcataagaaatcagaaacaggaaggatttttacaattgtggaaaaattctttgatgagaaaatattagttccacttatctgggacaataaaaagtaggtacatttgatttataagctgtagtttcaaaaatataagagtataacataggtttttgtaatgagatgttaaataggaattattctattgtctctgacaggttgctggaatctaaaagctaaaatgaagaggtactaagtgccttactcttctacgagacaacagaacaacagaatagaaccaaacccagtcagatacgatcactgtggccagaaccactatctgtcctccccttccggctacaggcaaaacatctgaaaggagagtccataactcccttgagtcaaggaagataaaactccagcagtcactggctactgg

SEQ ID NO: 172076 - DNA, 618 bp, Homo sapiens
ctattaatcttttctaactacgtgacatgaacataaacaataagtcagaagagaaataatttatcataagttaaaatatatgtaatgcttattatgctatattttagtactttaatattttaaaatattaaaatcatatttgtgtatatggcaaggtacctagctcataagcagtatagaatattatttcaagttaataatcataagaaatcagaaacaggaaggatttttacaattgtggaaaaattctttgatgagaaaatattagttccacttatctgggacaataaaaagtaggtacatttgatttataagctgtagtttcaaaaatataagagtataacataggtttttgtaatgagatgttaaataggaattattctattgtctctgacaggttgctggaatctaaaagctaaaatgaagaggtactaagtgccttactcttctacgagacaacagaacaacagaatagaaccaaacccagtcagatacgatcactgtggccagaaccactatctgtcctccccttccggctacaggcaaaacatctgaaaggagagtccayaactcccttgagtcaaggaagataaaactccagcagtcactggctactgg

SEQ ID NO: 172077 - DNA, 576 bp, Homo sapiens
gtatgcttccagggagattcagcatgtattctgcagctgtgggaagtggcattagcaggccagaatgaaaataaatctaacagaagggcagaatggttaatgtgcctgaaaccctggatactgcagtggccaaaagaacctggaagggtctgtgagacactggattgcggggtaacaatttatggataaccttctaacaaaagatttcccgtaacatttaaagttggtgagatccgccttcccaagatggtgggcattgccagtagaaagtcccagctcctggaaaagtgattacattgagcctatggagtcattccaaccatgtaagggcttggcggtgactgaagtgtgcgctttgctttgcttgacattatgttgagcttcagttggcttgtagctcatctcatttgacaaagcaaagctgccttattgtttgaacattcctctgatgtttaygtgctcctatccactcaaagtcatcaggcaggatggttagagccaatgctgttcatatgtaattatgtttgctttgaaatgcatatctgactcctgccctggacctcagcaactgaagtg

SEQ ID NO: 172078 - DNA, 575 bp, Homo sapiens
ttgttttttgtactgcagcagaactcaaactgctatctaagaaaaaatttaagtggtattattctaaagcaagagttttggttaaacacatcaaatttcacatcaggatatsacttttatatctgctacttgtatggtttcataaagtttatgactcttatttaaatcagaaaacttgctttaaaacaaaacaatacgaaaacaatctccccttttatctcacatcattttaaaattactaccccctttcactgcttcacttcacaacataaccgctcaaagagttgtttacccaccagatgattacatcattacctcccattcacattttttaaaagttccttgttaaatacagaatatactcaaaagaatatttatatgtatgatataaagaataaatgcacaaataaacaaatgtatccatgtacctaccacccagcttaagaaagagattactagaacctttgaaaacttccctgatcccattctctgtgaaaacacaacatatcaaaattttagcatccctaaagcagtacttaaagagaaatttatatcacgaaacacctatattagga

SEQ ID NO: 172079 - DNA, 627 bp, Homo sapiens
ttgtctctctttcaaagtgtttagcaaaggctgccttacttatttaaagcttttgggtgagtggattcttttggggtaactcaaagaggtactgagttctctgtccatatctgtacagggggaacccagggacagcaagggagcacacaygactggaaaagagaagtgatatgtatatatgtgaaagaattagagagaaagagatccctcccttgtaagacaatcccctctactggtgaacagggtttccagggatgtcttaaagtataggtggctcaaagcactggtattgagtgagtggctgcagtgtccagagtccttgggcaagcatttgtgcatttttagctttattgcacctttcctggtgtgccttattgaaagaggatgtctgtaatttcacacactgattctgaaatgtataaaaattgcagagcttgcaaactttgagttgcaagaatgtttcttttaaacttcatatcgaaaatgaatcctgtcagttttatagttcgtctatcccttactccaattttgaattctgttatgcagtcaatccagtgtggttttaggctcttgtggggcttttagaatttcattactcctgatatgtgcacctgcaatatacattaa

SEQ ID NO: 172080 - DNA, 647 bp, Homo sapiens
ataatgtgagtataatggctcatttttagacagatgggactcaactactccaggctccaaagaatttactatcagtctgggaagccaagacttttactcctaagaagggaactaatatccaaggaccaaaggataagcttagcctgtaagtgccataaggtttcagagtggagagggatgataatgsgttggtgtgtttgaagaaaagtgatgaaggaaggtaaatttgagagagaccttaaggttaggtcagaacttagagaggaaagagacaggaatctcacagctgaagaattttctgggcagaagcaaagatgaaaacaagcaaagcagattcagagtaggccaatctaaccaattttgtagcctgtagctgagtcaagggatgttggaagccacatgaatccactgaaagttgacaagcagggtcttccatgatgccatttgtgggtattatgatgatttgtccaaaccttacagtagcttcacttacatatctggaatgtatagtaaaattctgaattctcttttatcatgtgtatgctaataaccataggcctatcctccttagaaaagcactattggtagagtatagattatttttaatgtccttccaaaattatacctcagacactcagccagaagga

SEQ ID NO: 172081 - DNA, 462 bp, Homo sapiens
aaaaaactccaccctctagtttctcctaagacttttggatggagcatacaactgtgagaaagacaaacagatatgattcaatcatagaaatgacagtgtccagttatttccctcaagaattgcaaaaatctgaatatggatagagggaagatagtgatgatcttatatttcccttatgtgttttcaaccacaagaagtactgttattttaaggtttgctccatttatttctaaacctctactccttcattttcttcctctyaacctaattttacatttaaaaaaatataagaagcagcaaacataaataacacatttgtaacaaaacccacttacacgaaatgcaagactcactgcctagtgaggaaggtgggacagtgtgccgaatggtctccacttgcccttccatccttcattctgagctgcaccctggacattgtcctccagagactccgtcaactgt

SEQ ID NO: 172082 - DNA, 641 bp, Homo sapiens
gttgctgccaggccctctcagctaagaaagcaaggaaatacgtggtggtattctaacccttgtgtatacacgtattcatattaacatgagttcacactgatgctgattccattacacatgaatcattctatcctcttccatttgcttgttggtaaattcccaytccaacagtgagaaatccagctccaaccattcactacctattcatttaactgttcaattccagtatacacataggtatactgtacatattaacctgtaccactgtggcaaagaacttcatcaattacagtacaatgctcatgctaagtttcttttgcccttagtcttacaaactctacccaggtccaaagttacttagtcaccatcttcttcttccactcctttctctgagattgtttcatacacttgtaatatagttagattatcttgtcaaaatcactgtttcttccttgtaatactttttattttccatctcctaaatgctttttaaatttgtatgcattaaggtttactctttgtgctataaagctctatgagtttaagaaattacataatgtcatgtatccttccattatagtataatacaaaatagtttcattgccctaaaaatccactatgcttcccttactcatctcttc

SEQ ID NO: 172083 - DNA, 585 bp, Homo sapiens
ctttgtcttcctaagtcttggttttcactcaaaagatttgtgagaaaacatgcaagagtacataataaatgcttaataaatgtttatttttctttttacttttcctaaaatgaaatggtrctagcattccattctagtaacagatctgctatccattaactgtgtgagcctggtcagaatacttaacttctaggtatgtatttcagctattaagtggtgatattttcttacctctcaagtccatgccagcactttagtcatatgaaaattttgtactattttttcctaagcaaattaataatgcaaacaaggtaggatgttttaatttactctaacactgtctctaagcattttcaaggtcattatagcatgatccatgctatggtataaatgtatcccccaaattcatgcattgaaaacttcatgcccagcatagtggtgttggaggtggggaccttttgggaagtctttaagtcatgagggctctgttctcctgagtgaattaatgtcactacaaaaaaaagggcttgtaggagtgggctctctcttgctcttctgctcctctgctatgttaggagcagtgtt

SEQ ID NO: 172084 - DNA, 585 bp, Homo sapiens
ctttgtcttcctaagtcttggttttcactcaaaagatttgtgagaaaacatgcaagagtacataataaatgcttaataaatgtttatttttctttttacttttcctaaaatgaaatggtactagcaktccattctagtaacagatctgctatccattaactgtgtgagcctggtcagaatacttaacttctaggtatgtatttcagctattaagtggtgatattttcttacctctcaagtccatgccagcactttagtcatatgaaaattttgtactattttttcctaagcaaattaataatgcaaacaaggtaggatgttttaatttactctaacactgtctctaagcattttcaaggtcattatagcatgatccatgctatggtataaatgtatcccccaaattcatgcattgaaaacttcatgcccagcatagtggtgttggaggtggggaccttttgggaagtctttaagtcatgagggctctgttctcctgagtgaattaatgtcactacaaaaaaaagggcttgtaggagtgggctctctcttgctcttctgctcctctgctatgttaggagcagtgtt

SEQ ID NO: 172085 - DNA, 585 bp, Homo sapiens
ctttgtcttcctaagtcttggttttcactcaaaagatttgtgagaaaacatgcaagagtacataataaatgcttaataaatgtttatttttctttttacttttcctaaaatgaaatggtactagcattccattcyagtaacagatctgctatccattaactgtgtgagcctggtcagaatacttaacttctaggtatgtatttcagctattaagtggtgatattttcttacctctcaagtccatgccagcactttagtcatatgaaaattttgtactattttttcctaagcaaattaataatgcaaacaaggtaggatgttttaatttactctaacactgtctctaagcattttcaaggtcattatagcatgatccatgctatggtataaatgtatcccccaaattcatgcattgaaaacttcatgcccagcatagtggtgttggaggtggggaccttttgggaagtctttaagtcatgagggctctgttctcctgagtgaattaatgtcactacaaaaaaaagggcttgtaggagtgggctctctcttgctcttctgctcctctgctatgttaggagcagtgtt

SEQ ID NO: 172086 - DNA, 648 bp, Homo sapiens
tctgtcttcactcaaaaatccattctaaaagaaacaacatggtgtcagactgtgatgaataatatggcctagtgacttctggcatgactgcatgtttagtaactcactgttcatttctcatgcctatttgaaaagctgtgttttatggcaataaatcttgctttctcaagcaattgaaaatattggacaaattgaggactaaagggtgcaaaattagtatctggaatgtaayggtagattcttccaaatttttaaagaacttttcacttttgattataaaaataatatactttatggttaataaattatttaatttacccaaaaataaaaataagaaggaagccacctgtaatctgaccaggcacatatagtcatttttaatatcatggtgtcttaaaagaatgcctgattcctgccatctccaaaaaatgacagggcacttaccagacaccaaacctgctggcttcatttttgattgaccttaaacatgtatttagctctttagtgaaaaaaaaaattatatattagatatattttatttctatccttattttattatcaaatccaaaattatagtattcttatacatgtaaactttttttaagtttaggatgcccttcaaatttagaaaaaaaataattcaaattc

SEQ ID NO: 172087 - DNA, 509 bp, Homo sapiens
atgcttagccattacttagtcaatttctagctcgaagcacatccaaaaatcagatttttatkcttcatgtgacctgttttagaaaaaggctcaattgatttctgatctcacaaagcaggaagcaaaaataatctatttacatccatcattggtgaacattaaaagtgagaaacatttcagatcacttgtttgataaacttagggatataaacacattgattagctttttttgaacttatgctaaatttgaggtgtgtggacacccacctttgtcaaagttaaaacagcaaacactagttagaaaaccaatggcccctttggaagaaatcagccctgagcccacctcagacggctcctcttggcattcccagagagccttgaataattgttgttagattcattctgtaacagttttaatttgctatctcctcattggcatttttagattgctaagtctttttgcctggatttcaaaatatttttaagaggaaatagcagctaagcttctc

SEQ ID NO: 172088 - DNA, 513 bp, Homo sapiens
ccctatgcttagccattacttagtcaatttctagctcgaagcacatccaaaaatcagatttttatgcttcatgtgacctgttttagaaaaaggctcaattgatttctgatctcacaaagcaggaagcaaaaayaatctatttacatccatcattggtgaacattaaaagtgagaaacatttcagatcacttgtttgataaacttagggatataaacacattgattagctttttttgaacttatgctaaatttgaggtgtgtggacacccacctttgtcaaagttaaaacagcaaacactagttagaaaaccaatggcccctttggaagaaatcagccctgagcccacctcagacggctcctcttggcattcccagagagccttgaataattgttgttagattcattctgtaacagttttaatttgctatctcctcattggcatttttagattgctaagtctttttgcctggatttcaaaatatttttaagaggaaatagcagctaagcttctc

SEQ ID NO: 172089 - DNA, 529 bp, Homo sapiens
cttagtcaatttctagctcgaagcacatccaaaaatcagatttttatgcttcatgtgacctgttttagaaaaaggctcaattgatttctgatctcacaaagcaggaagcaaaaataatctatttacatccatcattggtgaacattaaaagtgagaaacatttcagatcacttgtttgataaacttagggatataaacacattgattagctttttttgaacttatgctaaatttgaggtgtgtggacacccacctttgtcaaagttaaaacagcaaacactagttagaaaaccaatggcccctttggaagaaatcagccctgagcccacctcagacggctcctcttggcattcccagagagccttgaataattgttgttagattcattctgtaacagttttaatttgctatctcctyattggcatttttagattgctaagtctttttgcctggatttcaaaatatttttaagaggaaatagcagctaagcttctccatatttgggctagggctggccagcaggagatct

SEQ ID NO: 172090 - DNA, 571 bp, Homo sapiens
acaaaaacaatactgcataatatattttattgtatttcttaaaagtaactcaattatagaatcatacagtcaragcacattgtgattatttggttagggtgaacataagcgtttaaattattcttttcattttgggcccaaaagggggtgacagagagtagttggacattaacttttaaaaaaattttcccttgagataatataacaacttttattccatcataactcaaacttaatatcaatatggctttcccaattagatcaaccgatgtgtaacagattcattggcagcagatgagttggtgacatgagactaaagcatgaagggtaaagaagttacttaaaatcaatttatcttggccaaaatttttacgaggtttaaatattttttatgataatatctcaaaattcaaagcatggtggtagagactttggtcatcttatgtacggttctgtttctggctggaatgttaactctaacaggcatatgatccacctcgccccaggtatttatattaaataatttctggagaggatcttcaacagaagataagttaagaatgcccacatc

SEQ ID NO: 172091 - DNA, 571 bp, Homo sapiens
acaaaaacaatactgcataatatattttattgtatttcttaaaagtaactcaattatagaatcatacagtcaaagcacattgtgattatttggttagggtgaacataagcgtttaaattattcttttcattttgggcccaaaagggggtgacagagagtagttggacattaacttttaaaaaawttttcccttgagataatataacaacttttattccatcataactcaaacttaatatcaatatggctttcccaattagatcaaccgatgtgtaacagattcattggcagcagatgagttggtgacatgagactaaagcatgaagggtaaagaagttacttaaaatcaatttatcttggccaaaatttttacgaggtttaaatattttttatgataatatctcaaaattcaaagcatggtggtagagactttggtcatcttatgtacggttctgtttctggctggaatgttaactctaacaggcatatgatccacctcgccccaggtatttatattaaataatttctggagaggatcttcaacagaagataagttaagaatgcccacatc

SEQ ID NO: 172092 - DNA, 497 bp, Homo sapiens
ggatctcataacactgagtacttcttattaatgccttcgttcaactaatatttatggagcacctgtgtcagatgctgttctgggtactcaggaaacattgttgaacagaacaaaatctctccttttatgargctgacattctacgatgggaaacaggcaataaaaaaaaacaaataaatataaatgtcagagggtgataagtacttaaaaataaataagcagaaacaaagatgagggagcttagatttgcaatttttcatttgtttctgtggttactggattatatttttgttccccactagactgtaggctccaagacagctaggtttgctcattatttatcttcaacttctagcacagtacctatctcataatagatgctcaataaaaatgattaactcattttcattcaaaaaacaataatttgcacagagtggaacataaaactgttgaaaagtgagaaataaaagaaactttttatttaaagaatgtgagcc

SEQ ID NO: 172093 - DNA, 497 bp, Homo sapiens
ggatctcataacactgagtacttcttattaatgccttcgttcaactaatatttatggagcacctgtgtcagatgctgttctgggtactcaggaaacattgttgaacagaacaaaatctctccttttatgaagctgacattctacgatgggaaacaggcaataaaaaaaaacaaataaatataaatgtcagagggtgataagtacttaaaaataaataagcagaaacaaagatgagggagcttagatttgcaatttttcatttgtttctgtggttactggattatatttttgttccccactagactgtaggctccaagacagctaggtttgctcattatttatcttcaacttctagcacagtacctatctcataatagatgctcaataaaaatgattaactcattttcattcaaaaaacaataatttgcacagagtgkaacataaaactgttgaaaagtgagaaataaaagaaactttttatttaaagaatgtgagcc

SEQ ID NO: 172094 - DNA, 512 bp, Homo sapiens
agttgctctgggtcaggcagtgagtgagtggtgagtgaatgtgaaggctaggacagtaccgcacactagtgcagaccttataaacactgtacacttaggcaacactaaatttataagaagatttttttctttcttcaataataaattaaacttagcttactgtaaattttttactttataaatttttcaacttttaaaaactttttgacttttgtaataacgcttagcataaaacacaaacacattgtatagctgtccaaaagtattttgatatccttattctataagctttttyccatttttaaatctttttttacttttaaaacttttttgttaaaactaaaacacattagtctaggcctacataggggcaggatcatcagtatcactgtcttccccttccacatcaggtctcactggaaggtcttcagggacaataacactcatggagctgtcatctcctaggacaacaatgccttcttctgagggacacctgcctaaggctgttttac

SEQ ID NO: 172095 - DNA, 580 bp, Homo sapiens
tctgggggctgagatgtccaagatcaagatgctggcagatttggtgtctggtggcagcccatttcctggctcataggtggagccttctcactgtgtcctcacaaggtggaaggagagaggtgcctctctggggcctcttttataaggttgctaattccattcatgagggctctgcccttatgatctaattacctctccaaaggcctcactacctaataccattgtcttgggggttaggatttcaacatacacattttagggggacacaacattcagaccatagcagtactataattactaacttatttctctgtctcccccataggaatttcagtagtttgaaggcagcaagggcagcatctcactcattgctttcttattgctggagagccaatgatggcttggctgcgtaacaatcacttggggaatttgttaatgatatcgattcgtaggctccacctccagatagtctggttcagtgggtctcatttggacccagaaatccatattttttaaaaaagtacttcagagattctgctgcatagycaggtttggaaaccagtggatttttcctctttgt

SEQ ID NO: 172096 - DNA, 589 bp, Homo sapiens
agaaaggtggaaaagagaagyatcaggacaaagccaaacatgcaagggtatttctgtccaaggttcatcctggcagctcagacatttgtggagagcattctgtattatcttcttcccagagtttaccagtgggctcagaacctttgggtgaaaacagtgcaaccaacacgcaacttgtggtagctcttccagacagagaaagaagggtctggaaagaaactcagcatcagatagctaaaatagccaagcattgtgtttatcttcccataaatattttttaaattacaaataaatttaaaataatactctacttaattctaattataaaagttgtatgttcattgctgagaatgtgaaaaacagaaaagtataaataagaaaatttaaatcatccatttctccactgctcaacaatggtcacttgtaatattttgagcattgtatttgagatagaaaaatagtagttattatatatattacagagtaggaaagcctgttttcatatttttaaatttaatactatataactccctataagcatcattttaatggttccaaaatattctatcacatggattttatttagcca

SEQ ID NO: 172097 - DNA, 604 bp, Homo sapiens
aggttgaaaattgaacaggaaaggtaacttttatcattgtgaaatttctgattaatacaaaaaacttttgtgctaggtcccataacaaatgaaagaccaaggagcagaaacatgggggcaggtaccctttaaaaaaaaatctatggaaggatctggcaagatggccgaatataaacagctccggtctgcaactcccagtgagaccaacacagaaggcagstgatttctgcatttccaactgagtggcacctggaaccccagcgagacaaaaactgttcacactcctggaaagggggctgaagccagggatccaagtggtctcgctcagcgggtcccactcccagggagtccagcaagctaagaaccactggcttgaaattcttgctgccagcacagcagtctgaagtcaacctgggacaattgagcttggtgtgggcaggggtgtccaccattactgaggcttgagcaggtgggtttcccctcacagtgctaaggactgggtagaactcaacacagctgtagccagactgcctcaccagattcctcttcactgggcagggcatctctgaaagaaaggcagcagcccagtcaggggtttatagat

SEQ ID NO: 172098 - DNA, 585 bp, Homo sapiens
gaatttaaaaaaaaaaaactctttgatttgaatgtgtcgctaatttasaaacccaatgatttggttaccgttgaagtgtatctttagaaaacagccttaatatattaatatgcatgagatgaaattatcttaggtagatgggtacttaatgttataatttattccctaaaattactaaatataactaatatgttttaaatataatgcaacatcttgtcatattttgggtgaaaattagcaaactgattctgaaatttatatataaaaggccaagaatacttgagacaatcttgaaagaaagaaatgagatttgctaatctcagcactttgggaggccaaggcgggtggatcacgaggtcaggagatcaagcccatcctggctaacactgtgaaaccccgtctctgctaaagatccaaaaaaaaaaaaaaaaaaaagttagcaaggcatggtggcgggtgcctgtagtcccagctactctggaggctgaggcaggagaatggcgtgaacccgggaggcggagcttgcattgagcccagatcgcgccactcactgcactccacctgggcgacagagcgagactccgt

SEQ ID NO: 172099 - DNA, 585 bp, Homo sapiens
gaatttaaaaaaaaaaaactctttgatttgaatgtgtcgctaatttagaaacccaatgatttggttaccgttgaagtgtatctttagaaaacagccttaatatattaatatgcatgagatgaaattatcttaggtagatgggtacttaatgttataatttattccctaaaattactaaatataactaatatgttttaaatataatgcaacatcttgtcatattttgggtgaaaattagcaaactgattctgaaatttatatataaaaggccaagaatacttgagacaatcttgaaagaaagaaatgagatttgctaatctcagcactttgggaggccaaggcgggtggatcacgaggtcaggagatcaagmccatcctggctaacactgtgaaaccccgtctctgctaaagatccaaaaaaaaaaaaaaaaaaaagttagcaaggcatggtggcgggtgcctgtagtcccagctactctggaggctgaggcaggagaatggcgtgaacccgggaggcggagcttgcattgagcccagatcgcgccactcactgcactccacctgggcgacagagcgagactccgt

SEQ ID NO: 172100 - DNA, 585 bp, Homo sapiens
gaatttaaaaaaaaaaaactctttgatttgaatgtgtcgctaatttagaaacccaatgatttggttaccgttgaagtgtatctttagaaaacagccttaatatattaatatgcatgagatgaaattatcttaggtagatgggtacttaatgttataatttattccctaaaattactaaatataactaatatgttttaaatataatgcaacatcttgtcatattttgggtgaaaattagcaaactgattctgaaatttatatataaaaggccaagaatacttgagacaatcttgaaagaaagaaatgagatttgctaatctcagcactttgggaggccaaggcgggtggatcacgaggtcaggagatcaagcccatcctggctaacactgtgaaaccccgtctctgctaaagatmcaaaaaaaaaaaaaaaaaaaagttagcaaggcatggtggcgggtgcctgtagtcccagctactctggaggctgaggcaggagaatggcgtgaacccgggaggcggagcttgcattgagcccagatcgcgccactcactgcactccacctgggcgacagagcgagactccgt

SEQ ID NO: 172101 - DNA, 572 bp, Homo sapiens
aaaaaaaaaaaaaaaaaaatgctggaagggaagtcagtatatttccaactgacaaagattttgaagtttatagacttgaagaaccttgttcaaggtcacagaataagtggctttgtgcagagtctttttcagaatctttgaaatacagtttctcatattttagctcatcatgctgccattttcctatgtagatacaaaaccatggttgtgtatgtgtatgtgtgcatgtacacacgcacacacaaacatacaagttcaaatatgctactttttcttcagtctgatgaatggtagacataaaaagctccccttgagtgacaacgggagacagtaaaaatttctgaacttcattatacytaaaggaactcaagcacaagaaacaaaaccaagttaaaatatgtaagcataataaaatatgtggcataggtaaatgatattgttgttaaaaaaaaaagaaaaaaacctaggaatattttacagaggtatttcatttggtatttcatcaaagcagtagcaaagagcttattaggctgtttagaaacacattttcttaacagaatattgatgccagc

SEQ ID NO: 172102 - DNA, 590 bp, Homo sapiens
aatgatattgttgttaaaaaaaaaagaaaaaaacctaggaatattttacagaggtatttcatttggtatttcatcaaagcagtagcaaagagcttattaggctgtttagaaacacattttcttaacagaatattgatgccagcaaattaagtgatatagctgcaaaaatgaatgctttgctcagtttcttctggtttacaaggaaatgccaagcaactgacttacaaaggggacccaagtagaaccagaccagacagttgttgcttaattacatcataactggaatggctgttataccctaaaacatctgttcactagcactgaaattaaattgtgtcaggaaatattttctatgtttagtttcaaaaagtattagcaatatgacaaggcttcattatatttacacctcaaatttctgtgaaaaagaattagcagttttcaaagtgattgggtaagcatctttgagagcacaagaggaaagtgtttcagacttgaactcttagaakaataagtgacgctaagctaaatatcttatagccatgtactatattattagtagtattactaataactattgatcacaaagacta

SEQ ID NO: 172103 - DNA, 557 bp, Homo sapiens
ctactttgtaaaaattttctacagatcaagtataatttcagatatcttcaatgcccattagaattaacagaaaatataacacctacaaagaatatcacatataaaccttttgcagccctcaatgtaagttcggtgttttcattatctaggtagtttctagccgggttctaaaatgttttaatacaatagtcccacattaggtggatggggagaattccagttttataattctatgtccatgtctgccatgtgactcaactgtttattttttaataaagaaagcaatcatttttttcaattgctagaaagttctacccttcttttctaatgttcacktaagacctgctccaaaccagaatcaaataaaccatggagaacacaggtaacgcttgccacctctatccacctgcatattcaagagtttcctccagtataaaccccaggaaaatgcaaagggtgatattttacagtcacagctttcaagttcggtgagccgctgggctccaagacaaactgaccatggagaggtgccttccagagggatgaacccaatctaa

SEQ ID NO: 172104 - DNA, 522 bp, Homo sapiens
ataatactgtgtcataataaattcacatagcttgactaacatatagattagaaataccaagcataaatgtttcaaaatgtagaaatcacatgattttgggtaaggtcactgcctgtttgatatatctatatatatctataaaagagatgttccacttttactggtccataaagatctgtctrgctacacatggttattatgggtgaccttttggttattatgagtgacttttctgtctttcctcttacatagtttttaaagattttgctaacataatggttagattttgaacttgataatttttaatgtaaaagtttataaagaagttatctagcccaagactccatttcaaatgggtctgtctttgaattctaacagaaatttttccttttaaataaaattccaagttttaatacaattttggaactttttatagcataatttttactttatcttctatttttttaatgagtgagccaagttcagatcagaaccaagtatataaattatgtataggtcctt

SEQ ID NO: 172105 - DNA, 547 bp, Homo sapiens
tctagagatctgtgaaactttgaactagagagagattgatttagagtatctggcagaagaaatttcgaagcagcaaagcattcaataggtgccctgcatgctcttaaaagcattcagttttatgcattcrcagagagatggcttggaattggaacccatatttaaaagggaagcagagcataaaaatttggaaaatttgcagcctgataatgtgacagaaaagaagaatctattttctgtggacagactcaagccagctgcagaaatctgcataagtaatgaggagccaagtgttaatcccaaagacaatggggaaaatgtttccagggcatgtcagaggtctttatggcagcacctccaatcaggcccagaagcctaggaggaaaatacagttttgtgggctgggcccagggccttgctgctttgtgcagtcttggaactttgtacctcatgacccacccatggctaaaaggggccaaggtacagctcaaacctttggttccgagggtgcaagccccaagccttggcagtttacatgttgtgttgg

SEQ ID NO: 172106 - DNA, 532 bp, Homo sapiens
gcagaagaaatttcgaagcagcaaagcattcaataggtgccctgcatgctcttaaaagcattcagttttatgcattcgcagagagatggcttggaattggaacccatatttaaaagggaagcagagcataaaaatttggaaaatttgcagcctgataatgtgacagaaaagaagaatctattttctgtggacagactcaagccagctgcagaaatctgcataagtaatgaggagccaagtgttaatcccaaagacaatggggaaaatgtttccagggcatgtcagaggtctttatggcagcacctccaatcaggcccagaagcctaggaggaaaatacagttttgtgggctgggcccagggccttgctgctttgtgcagtcttggaactttgtacctcatgacccacccatggctaaaaggggccaaggtacagctcaaacctttggttccgagggtgcaagccccaagccttggcagtttacatgttgtgttgggcctgagagtacasagaagtcaagaattgaggtttgg

SEQ ID NO: 172107 - DNA, 486 bp, Homo sapiens
cacttgggctctccaagcagcttgcccagaagatgtggggcagaagaggaagacagaggcgtgggacttataagctgtcagcagccaaaggtcaaaaaatggaggaagatttttttattacaaatggtttaaaaattatatttgccaatatttaagaaaagtgtttcattttatatttatagctgtgtgtgtataagtgaatctcgtgtctcagttaaaacaatttaaatgtctagttttgtgacacttgataatacccaaaatatgaagtcayatgtgtaagacagcaagcatgaccaaactcctcaaatttcagtcctgagaaatatctatttctgaaaatcagcaaaaattaaataatcaacacatttagcttttttatatggttataaaattaatagaaaaaatctgtatgatcagtattactagaatgtaagctctgaaagtatctttttcatcactacagaacataagcacctacaactg

SEQ ID NO: 172108 - DNA, 564 bp, Homo sapiens
ttttcatcactacagaacataagcacctacaactgtgccttgcatggagtagacaataaaygaatgggaaaataaactggataaacactgtatatcttaacaaataaaagctaggtatgaattgtaaagaatatgcacaaattttacaaagcccaaatatatctactagtgggaatataattatataaggatttctaactaataactcaaataacaatttaaatcttggaaactttttaattgtggaaaacaattacttaacttttaacaaattaatttttgaacagttatcaattttaataatgtcaatttttagatattactttgagttcctaatattaaactgaatagtatttcagaggaaatgataatgaaataaaaatgaatacgcagtatacttgttaacacatgctgaactcattttagaatgtttaagaggcttgagctactaggaggaaaagaatacactgcagccaaccacttcatactaaactttttattaaaacagtccttacaacatatttaaaatggcatgttccacagtcaaatatttaagaaaaaaaa

SEQ ID NO: 172109 - DNA, 681 bp, Homo sapiens
tgaaattaaacaggaaatgaatgacctctggaacatttcacttccctgtatatctgagattttctgayattaatagttagtgacagattgttgctgtttaggccttaatctttctgctaagaatccctgatcatttaagggctccaacttcttgattttgttttactggactgatgtgccaaatctgttaaaagttttccactcaggaaaaaattcaacaaacaattggagctataaggatctctggaagttatacaaaagagaaacaatgatccctccaaatttatacatttaagatggaggacacaatataattttgtaacatttagaaatgtagtacacttggggaaagagttaaaaacatcacacactgatagaaactgctgtgaaaaacaaaatttgcaatatggcacagcgatgctcatttagctgtttctaagaaaggaacattttgtataaactgaattcaatcaatgagactgaaaaaaaatacatttttatgtgagaagtacggtaaaaacccaaacattttagttgaaattctgtggaattgttatgaacacttttaaaaaaatccaaatttagaaaaattggcagatcttaacatttaaaggaaaataatattaagtgcatttgtcatgtgatttttataccctaatatacttaggttttgtaatcatt

SEQ ID NO: 172110 - DNA, 566 bp, Homo sapiens
tgcaaggagtgcttccaattaggtagttaaatatgctgaatcctgtaaatctttgtatagcaacacatggcagattataactgctgggatgacccttacatatagtgaatatgaaatagtcaaacagtaaagtcctagctaggtggctgggtggcactccgttttaagtaatttttaaaaccaaccacaatatccccactgggaaatttgctacacagaaagtggccactgtttacagccattggtcactctccaacycaacaactcatttattcttcataactcttatcaatatgcagaaatatttacttgtattattattatttattacatatgttcccttactagaatttaagcttcaagaaaaaaagaaccttgaccatgactagatccttaggaactaaataaatatttgttgaaagaataaatgaatctaaaacccaagcctttgacagtaccccataattaaagccagagataattatagaatcccattcttcttagctactgagaaaattttagaagatactttatcaatgtatatgtataatacatatattatatac

SEQ ID NO: 172111 - DNA, 574 bp, Homo sapiens
taagcaagtcaaattacctgccttggccttagtttcttctttgaaatatactattaagaaaatgaagaggaaatccagagcctgcaagaaaatatttggaacacatatgcagatgctcctcgatttatgatggggttacagctcaataaattcatagtaagttaaaaatattgaagtcaaaaatgcactttagtacactcaacccacccaacattatagcttggyctagcctaccctaaatgagctcagaacattagcctcttgttgggcaaaatcatctaacacaaagcctattttataatagtgactatctcatataatttattgaatactataaatacatggtttgatatatgcaaatcaatttatgtgactcatggcataaaaaaattaaggacaaaaattatgtgacatggtttggctgtgtccccacccaaatctcatcttgatttgtagctcccataattcctacatgttgtgggaggcacccagtgggagataattaaatcatggggcagttttccccatactgttctcatggcagtgaataagtatcataagatctgatggtttt

SEQ ID NO: 172112 - DNA, 478 bp, Homo sapiens
cagaactttatttcctaatatatccagtcacatgtatagtcttttatgttgacaaattatagttgtatatatttattggttacaaagtgatattatgcttttaaaatataatatgaaaagattacattaagrtagttaacatatccatcacctcaaatttctaactttttaaaatacttttattttaggtttaggagtacatgtgtgggtttgttatataggtaaattttgtgtcatggccatttggtgtacagattatttcaccattcaggcaataagcatagtactctgtgggaagtttttcaatcctcaccctcctccctccttgcactcccaagcaggccctggtgtctgtggttcccttctttgtgtccataggtactcaatgtttagctcccacttatgactgagaacatgtggtatttggctcctgtgttagtttgcttaggataacggcctccagctcattcatgttgtt

SEQ ID NO: 172113 - DNA, 478 bp, Homo sapiens
cagaactttatttcctaatatatccagtcacatgtatagtcttttatgttgacaaattatagttgtatatatttattggttacaaagtgatattatgcttttaaaatataatatgaaaagattacattaagatagttaacatatccatcacctcaaatttctaactttttaaaatacttttattttaggtttaggagtacatgtgtgggtttgttatataggtaaattttgtgtcatggccatttggtgtacagattatttcaccattcaggcaataagcatagtactctgtgggaagtttttcaatcctcaccctcctccctccttgcactcccaagcrggccctggtgtctgtggttcccttctttgtgtccataggtactcaatgtttagctcccacttatgactgagaacatgtggtatttggctcctgtgttagtttgcttaggataacggcctccagctcattcatgttgtt

SEQ ID NO: 172114 - DNA, 478 bp, Homo sapiens
cagaactttatttcctaatatatccagtcacatgtatagtcttttatgttgacaaattatagttgtatatatttattggttacaaagtgatattatgcttttaaaatataatatgaaaagattacattaagatagttaacatatccatcacctcaaatttctaactttttaaaatacttttattttaggtttaggagtacatgtgtgggtttgttatataggtaaattttgtgtcatggccatttggtgtacagattatttcaccattcaggcaataagcatagtactctgtgggaagtttttcaatcctcaccctcctccctccttgcactcccaagcaggccctggtgtctgtggttcccttctttgtgtccataggtactcaatgtttagctcccacttatgactgagaacatgtggtatttggctcctgtgttagtttgcttaggataayggcctccagctcattcatgttgtt

SEQ ID NO: 172115 - DNA, 545 bp, Homo sapiens
tctgaggacacagcaggaaggtgggcatctgcaagccaaggagaggggccttagaagaaagmagcctgctgacaccttgatcttagacttctagcctctagaattgtgaggaaacaaatttctgttgtttaagccacctagtctttggaattttgttatggcatctgtattgggctgttcttgcattgctataaagaaatacctgagactgggtaatttataaagaaaagaggtttaattgcctcacagttctgcaggctgtataggaagctgctgccagcatcttctcagattctggggaggcctcatgaagtttacaatcatggcagaaggtgaggtggtagcaggcatgccgcatggcgtatgcaggagtggtggaggtggtgctacacacttctaaacaaccagatctcctgtgaactcagagcaagcactcacttatcaccaaagggatggtccaagacatacataagggatccaccactatgatccaaataccttccaccagccccaactccaacactgcggatgacatttcaacatga

SEQ ID NO: 172116 - DNA, 390 bp, Homo sapiens
aaaatttctgtcaatgatcagttgaggaatattgtaagaggttacacaaggaacaaatagaaaatgacaactgagtttgatgtatgactgcttaacctggagaaaccaggtcctgcaaagaagaactcttttatgaaacacacacacacaccacagccagttagaaggaaatattgatattattaaatacactrgggtgccaatctgctcatgtaatactaagcatctgaataacattctgagcataaaagatttagaaagaaaaggaatcatggctctggaatgaacagtcaataatatgacaactataaaaggactatttggaattcagagatcaaaaaggagctgtagtctttgcagctccatcaggaattaggcccaaaccacttc

SEQ ID NO: 172117 - DNA, 594 bp, Homo sapiens
aactactaactgtcaaagatgaccttcaagaagcatcaaacaattctgtcgtggcttctcaaattagcctagcagtaatgctcaataactaagaagaggtcacagtgctttcattcactgtcctgctaatgtgcaacctgttcttaaaattcttattgccgcttcattttggacatatattttaagataaaataatccaatccctaggtcactgagtgaggaaatttgggaatgggaatgttacaaagaagagagctttcttttttccatatttttcttctyttttttaacctcttattggccattttgtttcttttttaaaatcaaacatcaatattgtttttaacctttatatatgaaaaaaagacagactgccctctagggtattcagaaatcagtatttatgactctgataaggctatctctctagattgctattatagaaataaatggaaatgcatcatgagtaaggcaccatatctaccctcaaaaagcttgtattatagttattatatgacaaatatagggtactaagtgctgtagtaaggcaacaatagagatcaaagtagtcctataaatgtataccaagtttag

SEQ ID NO: 172118 - DNA, 594 bp, Homo sapiens
aactactaactgtcaaagatgaccttcaagaagcatcaaacaattctgtcgtggcttctcaaattagcctagcagtaatgctcaataactaagaagaggtcacagtgctttcattcactgtcctgctaatgtgcaacctgttcttaaaattcttattgccgcttcattttggacatatattttaagataaaataatccaatccctaggtcactgagtgaggaaatttgggaatgggaatgttacaaagaagagagctttcttttttccatatttttcttctcttttttaacctcttattggccattttgtttcttttttaaaatcaaacatcaatattgyttttaacctttatatatgaaaaaaagacagactgccctctagggtattcagaaatcagtatttatgactctgataaggctatctctctagattgctattatagaaataaatggaaatgcatcatgagtaaggcaccatatctaccctcaaaaagcttgtattatagttattatatgacaaatatagggtactaagtgctgtagtaaggcaacaatagagatcaaagtagtcctataaatgtataccaagtttag

SEQ ID NO: 172119 - DNA, 578 bp, Homo sapiens
taaaacatttctcaagacagggagctaaaaggaaagactaacttatctgagtattatatgtgagggtttctgaggtgatttcataaaatctgkggaggggggagttgtgtgcctagcatgctgagatggggtccatccgttttatctgcctctccttggtagcactgtgctgcttcaaaaatggactctagatcttaaggctggaaggctttgtgatggcatgaggctgtcagctaagggacagtagaagggatcacgttttagaggaaagaattttttataaagtagacattggggacaaacagtttgtgccaaattttctatatcactatgcagctcacagcaaaacagtgctttgcatatagtaggttctctgcaaatctttgttagtctcctattgtattctttggttttagatttgaggaattccttgggtctgtttaattcgtttacttttgaaggataaacacataaagatatattagcaagatatggttatataatataaacatagcagcctctgaaaacacttgctgtttttttgtttccatgaaacttgctttagaaagaaaaaaaat

SEQ ID NO: 172120 - DNA, 618 bp, Homo sapiens
atagtgctgtttagtgagaactggaaattttacccctaaactttaaatgctctaatatacctgccaagatgttttctgatttagaatattgcaaaagaaactaaaaagagagaaagaactaccgagaaggtaaaaacattttgctgacataaaagacactagaaaagagctttcaatggtactttgaacagaactttgtaatatattcttataaggtacttctatattcatgcatataaactatgaataaagaaaactacaaaagaaaagaatattccaaattaagttagaatattacattaaatgcagtgcatgtgactatcttagttatcttaaatacaatgaaagaagtataaaaagacactttctctctattttaataaataattgttggatggatattttggagatagtggtttagatgtgcatggaattactagctagtccaatttatccatatgtctagatgtgactctggtatggagtacaagatattctgttatgaagttagatgagctgtctctgctttgataagaaataggctactaatatgtctagtgatagagatgmtgagagttaatcctggataacaaatgaaggggaaattaagtgaaaatg

SEQ ID NO: 172121 - DNA, 554 bp, Homo sapiens
ggatgtaattcagcccataacaaatagcgtgataatagtgcctcagagagctctgaagtgagaattaaatacgttaatacatgtcaagtactaaatacaatgcctggcacacagcaacagaaatacaatcactagaattttttttccacaataaccttttgcgttcactaaaatttttatgaaaaacttaatttgcgtggctaatgagtgttggaattgtggggctctgtatatctcaacatttcctgggttaagttaacatagtaaattgaggtatcccttttctccttaggcaaatycatagcagtgatgagtactggtgatcatttttgcaaaatattctcaaaatatgtctcaagaaagtcagaattagaccattgttttggagttttgtttctaatctataatgaactaagaaagtccaaatgaatttattcgtaacacatgtaaaatatatttttaagtaaataagagcaaccaattgagtcatttatttaagaaatacttatgtacttattgaatgatactatgtgccaggcactattatacactgg

SEQ ID NO: 172122 - DNA, 554 bp, Homo sapiens
ggatgtaattcagcccataacaaatagcgtgataatagtgcctcagagagctctgaagtgagaattaaatacgttaatacatgtcaagtactaaatacaatgcctggcacacagcaacagaaatacaatcactagaattttttttccacaataaccttttgcgttcactaaaatttttatgaaaaacttaatttgcgtggctaatgagtgttggaattgtggggctctgtatatctcaacatttcctgggttaagttaacatagtaaattgaggtatcccttttctccttaggcaaatccatagcagtgatgagtactggtgatcatttttgcaaaatattctcaaaatatgtctcaagaaagtcagaattagaccattgttttggagttttgtttctaatctataatgaactaagaaagtccaaatgaatttattcrtaacacatgtaaaatatatttttaagtaaataagagcaaccaattgagtcatttatttaagaaatacttatgtacttattgaatgatactatgtgccaggcactattatacactgg

SEQ ID NO: 172123 - DNA, 593 bp, Homo sapiens
gtcttgcgggtacagaggaaggaatatctcaggagagggaacagtaaatacmaataccctaagccaacattaaacttggtgtcttcaagaacaacagggaagccaggatgattggagcaatgtgaatgagggaggggaagagtgctggggatgatatcagagtggtcacaggtaacagatcgtgtgatatatcctctgcctttctgcacaaattatgttaaatcatttttaaattgaaaattttaaaagtttgcttatgttcaaatcttcaaagtgatcatgctaacatattatcgtgtatttatgactttgaaaagatatgatatacatggaagcagcctacccattgagactattccaaacattgtagctattatttttatttaaaatgtatattaatctccataattcacagtttatgatttatgtactatttgattcaataataaacagtatgttttgagtatgtgtgccagtcactctcattggtgatggagttaatgttggaaaagatgaacctctctgctcacaggcagtcaccagcaagtacctttctaccaagtgtgggcacagggatattaacactataatag

SEQ ID NO: 172124 - DNA, 593 bp, Homo sapiens
gtcttgcgggtacagaggaaggaatatctcaggagagggaacagtaaataccaataccctaagccaacattaaacttggtgtcttcaagaacaacagggaagccaggatgattggagcaatgtgaatgagggaggggaagagtgctggggatgatatcagagtggtcacaggtaacagatcgtgtgatatatcctctgcctttctgcacaaattatgttaaatcatttttaaattgaaaattttaaaagtttgcttatgttcaaatcttcaaagtgatcatgctaacatattatcgtgtatttatgactttgaaaagatatgatatacatggaagcagcctacccattgagactattccaaacattgtagctattatttttatttaaaatgtatattaatctccataattcacagtttatgatttatgtactatttgattcaataataaacagtatgttttgagtatgtgtgccagtcactctcattggtgatggagttaatgttgraaaagatgaacctctctgctcacaggcagtcaccagcaagtacctttctaccaagtgtgggcacagggatattaacactataatag

SEQ ID NO: 172125 - DNA, 579 bp, Homo sapiens
atatattggatgggattaatgacaaatgcaacattgcagatgtaaatattggtaaacatgwtgacatgaaaataaaaaccatcaagataaaacacaaaaataaaggataatattttttaaaaaaatgaatggactatatagatatgagacaatttcaagtggtctaacatgcttgtaagtaagtggccaaagcaaggagagagacagaaaaaatattgaagaaagtaagtttgaaaattttcaaatttgatgaaaacagtaaactcacagatccaagaatcacaatgaaccccaaattcaagaaacatgaagacaattataacaaacacagttcatcataatccaattaattgggttttttaattaaaaattttttttttgagtcacccttttttttttttctctctgtcacccaggctaaagttcagtggcacaaccatagctcactgctgcctcaaactcctgggctcaagtaattctcccacttcagcctactaagtagctaggactacatagatatgctaccacacctggctaattttaaaatttttttgtataaacccagtctcactgtgttgt

SEQ ID NO: 172126 - DNA, 478 bp, Homo sapiens
tttgatggcattacttccctgcccaatgagtgtacatgtttttgaaaaataattttcttggtgtttcagagtccaatttgaatcttgtaactttgaaaccattctgaattaatgttaaagaattgaaaagaggaaaattgcctcaaataaatgttggttttgattgatttcttcgggtttttttgtgtggttcctttatggcaggaggagaaatggacataatcacctttgcacctgagccatatctagacttccttataaaacagactgacattaaacaaccatcaccataaaacaaaccatyagcttaacccctttaaatagtttagctgttataagaaagcaaactctttgtctatttaggctataaaattaccttaactttaaaaacttacctttgattctatacatgttcaaatttataatgcatctggaaggaaatatggcattctcggcctcacagaatgtgtggagaaaa

SEQ ID NO: 172127 - DNA, 398 bp, Homo sapiens
ttagaaggatgacatttacaaggttatagactgaatactcaactccagctatgctgagctcatgagcaatcaagtttgcttagtcttattttgtttcctctatttgtgatctttttgtacagtcaaaagctgattgtttttgacagggctccttgtatgattgttcaggttgtgcactgaccaagtgtgctaggtttgagggcaagtggtgcctaagtccagcttacatttctrgttcagagctgagtttatctgcaagagcctttttattcctttaagttggcccccaacacctcgtgtgaagaaagaaccctaggtcttggctcaggttcttctttaattccctaaaaagtatgtagtctttttctagctccatcttcctgctatggctggctcaa

SEQ ID NO: 172128 - DNA, 578 bp, Homo sapiens
gctacattaatgctgaagagaaacctctaagacctgctgttaagtgaaaatatacacattaaaagtggaagaagacaattttaagaacaagatattctagcacaatgtgaatgtacctactgccattgaactgcgtgtatatttaaaaatggctgatggtaaatttcgttatgtgyactttatctcagtgtttcataattttaaaagacaaggtgttcttatgatatcatctataaaaaactaagctatattttctcatatgtatggcttaagcatgtgaatgagtgtcaacaaggtcagatattgacctccagagagaggacttgaattgaggatagaaacagcacagaatttagctttggcagcattatacaaatgtcttataacaagaatacagccatagatactatacttaataaataatttaaatgaaacctgcaagtgaagatcaagtttcttctctaagatgggggtattgaactaggtcagcatttcaaccatttcttcctttaatagtgatatccatggcattgaaagatttgtgtttatggaattactataattactaggcatcaaat

SEQ ID NO: 172129 - DNA, 578 bp, Homo sapiens
gctacattaatgctgaagagaaacctctaagacctgctgttaagtgaaaatatacacattaaaagtggaagaagacaattttaagaacaagatattctagcacaatgtgaatgtacctactgccattgaactgcgtgtatatttaaaaatggctgatggtaaatttcgttatgtgcactttatctcagtgtttcataattttaaaagacaasgtgttcttatgatatcatctataaaaaactaagctatattttctcatatgtatggcttaagcatgtgaatgagtgtcaacaaggtcagatattgacctccagagagaggacttgaattgaggatagaaacagcacagaatttagctttggcagcattatacaaatgtcttataacaagaatacagccatagatactatacttaataaataatttaaatgaaacctgcaagtgaagatcaagtttcttctctaagatgggggtattgaactaggtcagcatttcaaccatttcttcctttaatagtgatatccatggcattgaaagatttgtgtttatggaattactataattactaggcatcaaat

SEQ ID NO: 172130 - DNA, 484 bp, Homo sapiens
cacacctggacttcccaataacataagcgattgatttcactttggtgtaagctagtctgagttgggtttgtcttgtgcaagtaaaagaactctcccagataccatgaatgtatacatagatacctacatatgacccctccccaaattcaaaacatatccaggcagtttaacagtacttacatctgattgagatttgagttagggaaaaaaaattatcaaccttattcactaattttaactttttacaataagctattattttatgattttttagtaaaaartgttttttttttcataaacagaatctgtattcactcttaaggtgggaaccatggcatacactgtaggcagcaatatttgaaacaggcaaaactgcagatgctgtgcaaaatcacacctctagtctgtttgcttgattcagttcattgtatagtgaacggctgcaaactacagtcttccagaaatgtaatttagcctcccttca

SEQ ID NO: 172131 - DNA, 585 bp, Homo sapiens
tttcgacagtgctttcgacagcactccagagcattagatgctaccaatagatcaacgttaaacccatgtgccatctttgaagttatagtctttctcaaggcttggtttatgaaaacggggatcatctcattcagggatactctttgaaatacccatcagggtttcttagctcagaagccatggtgaacgcagatacctggtaagaggcagcatacgcatagtaaggatggctggtgggttgtattaaagggggcctggaaaggggagagccgmgatgcatgaatagcacttgggaggctaccatctcgtaataatccagacaagagaggaagatggccaaattgaggtaacagcagcggaaatgggagaaggttttgcagagttttttcaagctgtgggtcatgaaatcaatttgctgggtcatgaccaccacttcttaaaaatgaagtaataaaatagaataggtattgtttggtgaagctcatttcagcccttatattacatgtgtgtatcaggtttcaacgtaaaagatatgtcttactatgggttgcagtctatgataggttaaataacagtccccaggcc

SEQ ID NO: 172132 - DNA, 585 bp, Homo sapiens
tttcgacagtgctttcgacagcactccagagcattagatgctaccaatagatcaacgttaaacccatgtgccatctttgaagttatagtctttctcaaggcttggtttatgaaaacggggatcatctcattcagggatactctttgaaatacccatcagggtttcttagctcagaagccatggtgaacgcagatacctggtaagaggcagcatacgcatagtaaggatggctggtgggttgtattaaagggggcctggaaaggggagagccgagatgcatgaatagcacttgggaggctaccatctcgtaataatccagacaagagaggaagatggccaaattgaggtaacagcagcggaaatgggagaaggttttgcagagttttttcaagctgtrggtcatgaaatcaatttgctgggtcatgaccaccacttcttaaaaatgaagtaataaaatagaataggtattgtttggtgaagctcatttcagcccttatattacatgtgtgtatcaggtttcaacgtaaaagatatgtcttactatgggttgcagtctatgataggttaaataacagtccccaggcc

SEQ ID NO: 172133 - DNA, 421 bp, Homo sapiens
gtctgctcaggataaagaggatgtgacccagtctccctgggagcttgatgtagccatatgacttaagtgctggctagtcacatgtaagcagaagtgttatatgcagcttccagaaagtcttcttaaaaggcggtggacagacccttcttctactgtcttttctgttgacaggcatgaggtcatgatggcaggaattcaagcagccrtttgagactatgagattgagaactccagagcagcaggatagaaaaaaggctgagtccttggggatttacggggccacgtttacagcctgaattgcctatctcagtgctttgtttagacaagagagaaacaaactttattagtatgttttcatactgttgtaaagaactgcctgagactgggtaatttataaagaaaagaggttaatcgtaagtta

SEQ ID NO: 172134 - DNA, 458 bp, Homo sapiens
caccatgaattcattaccgctattggaaaagctgtcctgggctgggtgcagtggcctatgcctgtaatcccagcactttgggaggctgatcatttgaagtcaggagtttgagaccaccctgactaacatggtgaaaccccatctctaataaaaatacagaaaaattatcccggcatggtggcgtatgcctgtaatctcagctaattgggaggttgaggcaggagaattgctggcacctgggaggtggaggttgcagtgatgaacaatgatcaagattgtgccactgcactccagcctgggtgacagagtgagactccatctcaaaaaaaaaaaaaaaaaaagctattctaagcacatgtcctggkgatgaaaccttaatgcctaatgccttatctttgtaaatgggggagcagctttatcactattgtttaattctgagatattctgtaatagtacca

SEQ ID NO: 172135 - DNA, 584 bp, Homo sapiens
aagcttgcttatgggatgagttgacctgctctgtgcacggcggtcagtgtgaaattcctgattagaagtgagagtaggctcattgtctagaatattgtttctcccctctcctctttgcctgggaaacacctaaacatttttcaggtctcagtttacacatttcttgatggtgtcattctagtcaatctttttgattttccaggaaatatgagggctgctcatcaaacccacccagagtgccaactcctctctcccagcgctgctcaccaccctgacatcaggcgtgtttgtaaaacgtgctttgacggcattaaaccttcataagcacagggccctgcctgtcttgttcatcacggattacctagttatcagttcatttttttaaatgattctttcttaattcaataaaatgttgcacttccaacttaaaaacaaacatttgttttacaccaactacttgccagacagcacactaggaattttctcaagtgttctctcattgtatctgtacagccgtcagtgtttatcagcatttggtgggagaggaaacygaggttcagcaagaagacagacttgaccaaggc

SEQ ID NO: 172136 - DNA, 464 bp, Homo sapiens
tttctcaacaaccctatgatgatttgcctccatcatagtcaaaggaaagggtgcagcataacttgtcgaagcttctcctattagtttgaagcaagcagatttctcttactctgtagcagaagstattggaaccccagctataaaccctccttctctgtgcaaggcagccagtgtcctgcctgagaacttccagtggcagcgccaaggtaggctgggtgttctagagagcattccctgcacaaagcagacaactgatgatggatgatggaggttggcatataaatactctgattcctctaccctttggatgggaaaactctgagactcacatattattgattttcagagtcccccagtgggattaagttcttgttatagtggtaactgggttgatcatgcatttgttgttggccatcttctctgtattactttcccaccccattattagtgtttcttgcaatcaa

SEQ ID NO: 172137 - DNA, 408 bp, Homo sapiens
ctttcccatcccttctcttctatcatttattttctgatgttttcctttatctgctcactttctccatgtttaaggcttcttccctaccatatgtaggatgagcaggctgggcaggagaagagataatatcttctggtttatcacttctatgactgctaagttggtcataaggctagtcttgtctggcctcaaacagactggactagcagaaaccttgaawaaaacagaagtagagaggagtcttgcttttttattgcaacaaaaggaagacattatttcaggccagtggaagctacaggtcagatgcctttcaatcatgaagagttctctttcaccactggttacacatcttctttctcccccacgccattgagcttttattaattttggcccagagttttccttctc

SEQ ID NO: 172138 - DNA, 337 bp, Homo sapiens
actgtgttataaaaggcatttttaatctacttgggctgccacctacactcttgggttataaaaagggagcagcagcagagccmgtagaaaagaacacaaagagcatggtgactgcgcctgtgacagcagaatgattggctacaggaagcatcagcaagagcaaagcgactgagaaggacgcagagatggcagccttaattgagcaagagcacagcatcagaggtaatccaaggggctgccctgcatagcatccacctgacataggaggaagggatttgggcaaaatctgcagggctagagtgctgtaaggagtagaattaacagaagacagagggaa

SEQ ID NO: 172139 - DNA, 337 bp, Homo sapiens
actgtgttataaaaggcatttttaatctacttgggctgccacctacactcttgggttataaaaagggagcagcagcagagcccgtagaaaagaacacaaagagcatggtgactgcgcctgtgacagcagaatgattggctacaggaagcatcagcaagagcaaagcgactgagaaggacgcagagatggcagccttaattgagcaagagcacagcatcagaggtaatccaaggggctgccctgcatagcatccacctgacataggaggaagggatttgggcaaaatctgcagggctagagtgctgtaaggagtagarttaacagaagacagagggaa

SEQ ID NO: 172140 - DNA, 293 bp, Homo sapiens
cttggcataagaaatatagtcatgtaagtrtggggatttctgtatgtgatgggcctttcttgtagattcataaagctcatcagcacattaaaagttatcagaaataagaaattacactttccttcaaaaagttacttaaaggaactcaaagtaagccatgctcttactttactgtggtcgtttccagaagctcttcctgaccccacttcctcccactgccacctttgtgtagtgaattcctatctacccttcagcctcagctcaatcctcatttcctcggggaagtcttccat

SEQ ID NO: 172141 - DNA, 577 bp, Homo sapiens
atatccttactttatatgatttcattcattcatgcacttatttgatcttcaacaaatatttgttaggtgtctactatatactaggttttgcgcttggaaaaggaaaaactgttgcttcagtsagtgcttgcaacatcagtgctccaagatattgaaagatcattcattaattaaaagagttctaatctcaggcatgtttaagaaacaccacatttttaaaattttattattatactttaagttctaggatacatgtccacaacgtgcaggtttgttatatatgtatacatgtgccatgttggtgtgctgcacccgttaactcatcatttacattaggtatatctcctaatgctatctctcccaagaaacgccatatttcttcgctgtataaattctcagaaacttttaatatgctgatgagctttatgaatctacaagaaaggcccatcacatacagaaatccccacacttacatgactatgatactctttccaccgggatgttggttaacatctggattaacattattattctgcagaacatagttcaggcgacactggcatatattttctgacat

SEQ ID NO: 172142 - DNA, 577 bp, Homo sapiens
atatccttactttatatgatttcattcattcatgcacttatttgatcttcaacaaatatttgttaggtgtctactatatactaggttttgcgcttggaaaaggaaaaactgttgcttcagtcagtgcttgcaacatcagtgctccaagatattgaaagatcattcattaattaaaagagttctaatctcaggcatgtttaagaaacaccacatttttaaaattttattattatactttaagttctaggatacatgtccacaacgtgcaggtttgttatayatgtatacatgtgccatgttggtgtgctgcacccgttaactcatcatttacattaggtatatctcctaatgctatctctcccaagaaacgccatatttcttcgctgtataaattctcagaaacttttaatatgctgatgagctttatgaatctacaagaaaggcccatcacatacagaaatccccacacttacatgactatgatactctttccaccgggatgttggttaacatctggattaacattattattctgcagaacatagttcaggcgacactggcatatattttctgacat

SEQ ID NO: 172143 - DNA, 517 bp, Homo sapiens
cttaacaagcaaaaaaccattaaccccattaaaaagtargcaaaatacggctgggtgcggtggctcatgcctctaatcccggcactttgggaggccgaggtgggcggatcatgaggtcaggagtttgagaccagcctggccaatatggtgaaaccctgtctctactaaaagtacaaaaattagctgggtgtggtggtgggcacctgtaatcccagctacttgggaggctgactcaggagaattgcttgaatctgggagccagagatggtgccactgcactccagcctgggcaacagagcaaggctctgtctcaaaaaaaaaaaaaaaaaaagtaggcaaaatacatgaacagacactttgcaaaagaagaatccaaggggccaacaagcatgaaaaaatgttccatgtcattaatcatcagagaaatgcaaatcaaaaccacaatgagatatcatcttacaccagtcacaatggctgttattaaaaagtcaaaaagtaacagatattggcagagttg

SEQ ID NO: 172144 - DNA, 517 bp, Homo sapiens
cttaacaagcaaaaaaccattaaccccattaaaaagtaggcaaaatacggctgggtgcggtggctcatgcctctaatcccggcactttgggaggccgaggtgggcggatcatgargtcaggagtttgagaccagcctggccaatatggtgaaaccctgtctctactaaaagtacaaaaattagctgggtgtggtggtgggcacctgtaatcccagctacttgggaggctgactcaggagaattgcttgaatctgggagccagagatggtgccactgcactccagcctgggcaacagagcaaggctctgtctcaaaaaaaaaaaaaaaaaaagtaggcaaaatacatgaacagacactttgcaaaagaagaatccaaggggccaacaagcatgaaaaaatgttccatgtcattaatcatcagagaaatgcaaatcaaaaccacaatgagatatcatcttacaccagtcacaatggctgttattaaaaagtcaaaaagtaacagatattggcagagttg

SEQ ID NO: 172145 - DNA, 419 bp, Homo sapiens
gttatacaacaaaatgcctactgatcatgccaacacytatttaaaatccttcaatgattcctccaaacttttccaaataaagcaccttagcttaatatagcacatggagcctgctcaggctgcaataaacagactattagagaatgacacagtgtgtacatggacagacttgcggctcactgtgagtcactactctgggcatcactatcttgtttctaatcattgaaaggatccacgtgtgtcagatatcaatatataacagcattgctgagagatgtagttattacattaaacccaaagcaagaaaataagcaggatgtggaactggtcctcttccagaaaggaaaatacaatcagctttatgattggctaaaaatagtttaccagtgaaacttgccattgatttttccagattgtga

SEQ ID NO: 172146 - DNA, 600 bp, Homo sapiens
attggtttgagaggcacatctcagtaacaagaggacgatagcagagaagtttatgatctcaacagcaatatttgcagattgctgtgatcccctaaggaggagttctaggaatggcccatagcacatgagccagtgtgcaggcagtgcactcccacgacyctgtggaatggaggaaatttgactcagcaaagctcagaaggaaaagggaaagtggtttatacaatgcccccaggagcacataacatcctggacatgaggcacttttacataaatgagtcagttggcccaccaattttcagtgctaccactgtttagtgggtcagtgaatcagatttgtcctactaggcactacagggtaatcactccttatctgcttggagggaccttttggagaaactgacatactcaattatcttacgggtactgtgtcctggaccctggatgctctgccaacagggagaaatatgttgagttcccccaggcccttagtcccagatgtatcttatgaagcagctcagggaagactttgctttctaagctcctcaattttaggctaggaattcatggcaacacttgacaaaaacaacacaatgcagcagc

SEQ ID NO: 172147 - DNA, 557 bp, Homo sapiens
ggcactcatctgtgttcaaccttaatgtgtgtgtgtgcatatatatgctgtgagtatgtgtatgtgcacgtgtgtgtgcatgtgtgtttgtgcatgtgtgtgtatgcatgtgtgtacgtgtgtgtgtgtgcatgtgtgtgtgtgtcccattagcaatactgaccaagatgcagatagaggaaaggagggttcccaagtctttctagattctaaaactctctcatcagttgatgttttgtrgcctccatgccactagagttcctttaacaagtatgatacaaatctctattctacatcattattttaacattcactttccatctttccccacctactactgtattatttacagtggattttttttttttttgtgggttggattttcttttccctcatatggttatgttcatctgtaagaaggtaccgaatttttactctaaacctgcagagtgttttatgagatgggtggtagtgatgtgtaaagtcaggactcctccttcacaaagtttctgacgtagcagataaggcaagccctgcagtgcacacaggcacacgca

SEQ ID NO: 172148 - DNA, 557 bp, Homo sapiens
ggcactcatctgtgttcaaccttaatgtgtgtgtgtgcatatatatgctgtgagtatgtgtatgtgcacgtgtgtgtgcatgtgtgtttgtgcatgtgtgtgtatgcatgtgtgtacgtgtgtgtgtgtgcatgtgtgtgtgtgtcccattagcaatactgaccaagatgcagatagaggaaaggagggttcccaagtctttctagattctaaaactctctcatcagttgatgttttgtggcctccatgccactagagttcctttaacaagtatgatacaaatctctattctacatcattattttaacattcactttccatctttccccacctactactgtattatttacagtggattttttttttttttgtgggttggattttcttttccctcatatggttatgttcatctgtaagaaggtaccgaatttttactctaaacctgcagagtgttttatgagatgggtggtwgtgatgtgtaaagtcaggactcctccttcacaaagtttctgacgtagcagataaggcaagccctgcagtgcacacaggcacacgca

SEQ ID NO: 172149 - DNA, 570 bp, Homo sapiens
gaggagtggacacggggtactactgaggcatcattcatcattggaggagtgaacacggagttccattgaggcaccattcatcactggaggagtggacacagggtactattgaggcactatttgtcattggaggaggggatacggggtactactgaggcactattcatcattggaggagtggacacggggtgctrttgaggcaccattcatcattggaggagtggacacggggtaccattgaggcaccattcatcattggaggagtcgacacggggtactattgaggcactattcatcatcagaggagtggacacgggttacttctgaggcaccattcatcattggaggagtggacacagggtaccactgaggcaccattcatcattggagtagtagcacacattccacaatgtttttgcaaaccaacaaactatttatttagggagttgaccgtataacttattatctgatccaaatgctgaaccaatggcattattacccttaagttacctttggagtaaagggtgataatgctattaataatcaacctagaaacaaccaaagactcta

SEQ ID NO: 172150 - DNA, 570 bp, Homo sapiens
gaggagtggacacggggtactactgaggcatcattcatcattggaggagtgaacacggagttccattgaggcaccattcatcactggaggagtggacacagggtactattgaggcactatttgtcattggaggaggggatacggggtactactgaggcactattcatcattggaggagtggacacggggtgctattgaggcaccattcatcattggaggagtggacacsgggtaccattgaggcaccattcatcattggaggagtcgacacggggtactattgaggcactattcatcatcagaggagtggacacgggttacttctgaggcaccattcatcattggaggagtggacacagggtaccactgaggcaccattcatcattggagtagtagcacacattccacaatgtttttgcaaaccaacaaactatttatttagggagttgaccgtataacttattatctgatccaaatgctgaaccaatggcattattacccttaagttacctttggagtaaagggtgataatgctattaataatcaacctagaaacaaccaaagactcta

SEQ ID NO: 172151 - DNA, 570 bp, Homo sapiens
gaggagtggacacggggtactactgaggcatcattcatcattggaggagtgaacacggagttccattgaggcaccattcatcactggaggagtggacacagggtactattgaggcactatttgtcattggaggaggggatacggggtactactgaggcactattcatcattggaggagtggacacggggtgctattgaggcaccattcatcattggaggagtggacacgrggtaccattgaggcaccattcatcattggaggagtcgacacggggtactattgaggcactattcatcatcagaggagtggacacgggttacttctgaggcaccattcatcattggaggagtggacacagggtaccactgaggcaccattcatcattggagtagtagcacacattccacaatgtttttgcaaaccaacaaactatttatttagggagttgaccgtataacttattatctgatccaaatgctgaaccaatggcattattacccttaagttacctttggagtaaagggtgataatgctattaataatcaacctagaaacaaccaaagactcta

SEQ ID NO: 172152 - DNA, 570 bp, Homo sapiens
gaggagtggacacggggtactactgaggcatcattcatcattggaggagtgaacacggagttccattgaggcaccattcatcactggaggagtggacacagggtactattgaggcactatttgtcattggaggaggggatacggggtactactgaggcactattcatcattggaggagtggacacggggtgctattgaggcaccattcatcattggaggagtggacacggggtaccattgaggcaycattcatcattggaggagtcgacacggggtactattgaggcactattcatcatcagaggagtggacacgggttacttctgaggcaccattcatcattggaggagtggacacagggtaccactgaggcaccattcatcattggagtagtagcacacattccacaatgtttttgcaaaccaacaaactatttatttagggagttgaccgtataacttattatctgatccaaatgctgaaccaatggcattattacccttaagttacctttggagtaaagggtgataatgctattaataatcaacctagaaacaaccaaagactcta

SEQ ID NO: 172153 - DNA, 574 bp, Homo sapiens
tccattgttgacttatcgtggaggccccaaaggtctgccctgacctgagtggttagtaatatatgtcacttccctgcatgctgtacctggttagctccagctgctgcctgggcatgttcatgaagtaaaacaaactcatgtctgctgctattgtgtgaggctgatgcatgatggaggtgtgagctggacrgtggtgcaggctgccggggcggtggtgcaggctgctggagctctgcttccttctcccatgtctctgcctccgacactcctcactgtttcctccctcgagctacagagcaaagagcatgatccgcaaaacgccttttggtctagagttcgaagagtctcctctggcttcctaagcccacgtggaaaataggcactgacgttgctctcctcaaagccctgataaattgtcaggaaggaggcaaaggggctttcaccttggatctcagggagacacaaaagagaagaagatgggagaggggcttgcgggcaaagctccttcccaagccatgattccccacagtcctggctgcatccaaaccctcttccacgttcacacagtgtgcaa

SEQ ID NO: 172154 - DNA, 574 bp, Homo sapiens
tccattgttgacttatcgtggaggccccaaaggtctgccctgacctgagtggttagtaatatatgtcacttccctgcatgctgtacctggttagctccagctgctgcctgggcatgttcatgaagtaaaacaaactcatgtctgctgctattgtgtgaggctgatgcatgatggaggtgtgagctggacggtggtgcaggctgccggggcggtggtgcaggctgctggagctctgcttccttctcccatgtctctgcctccgacactcctcactgtttcctccctcgagctacagagcaaagagcatgatccgcaaaacgccttttggtctagagttcgaagagtctcctctggcttcctaagcccacgtggaaaataggcactgacgttgctctcctcaaagccctgataaattgtcaggaaggaggcaaaggggctttcaccttggatctcagggagacacaaaagagaagaagatgggagaggggcttgcgggcaaagctccttcccaagccatgwttccccacagtcctggctgcatccaaaccctcttccacgttcacacagtgtgcaa

SEQ ID NO: 172155 - DNA, 588 bp, Homo sapiens
agaaggggaggaatcaaaccacagggttaagttaattaagctacctattatgttaattagsttaatgaattagttaatacacttgatttgatttgctatctgggcaagagatgaacaaaacctaaagggatttgtgtatttagttggatgaaatgtggtagataggacaattctaacagaagagaacacggtgaattcatcgctgttgtttcaaaaacaactggaaacaaacatttgaaacacaaggaatcaaagcttccaacttttatctttaagaaagtgctccagggcagcccttctacaccagaaacatcaccatcacctgggaagttgttatcaatgcaaattttcaaaatgttaggcccccaatgtagacttactgaatcagaaactctaggggcggggctcagaaatctatttcaataaactccccaggtcgttgaggtgacactaacagttgagaaccattgctgttagagaatttaaacaacaacactgcctgtgatcaattttgctgaaagcataggtcttagaggcaaatggccttgtgtcatgtctggctctaaaatcagcaggtgcgagtgagac

SEQ ID NO: 172156 - DNA, 588 bp, Homo sapiens
agaaggggaggaatcaaaccacagggttaagttaattaagctacctattatgttaattagcttaatgaattagttaatacacttgatttgatttgctatctgggcaagagatgaacaaaacctaaagggatttgtgtatttagttggatgaaatgtggtagataggacamttctaacagaagagaacacggtgaattcatcgctgttgtttcaaaaacaactggaaacaaacatttgaaacacaaggaatcaaagcttccaacttttatctttaagaaagtgctccagggcagcccttctacaccagaaacatcaccatcacctgggaagttgttatcaatgcaaattttcaaaatgttaggcccccaatgtagacttactgaatcagaaactctaggggcggggctcagaaatctatttcaataaactccccaggtcgttgaggtgacactaacagttgagaaccattgctgttagagaatttaaacaacaacactgcctgtgatcaattttgctgaaagcataggtcttagaggcaaatggccttgtgtcatgtctggctctaaaatcagcaggtgcgagtgagac

SEQ ID NO: 172157 - DNA, 588 bp, Homo sapiens
agaaggggaggaatcaaaccacagggttaagttaattaagctacctattatgttaattagcttaatgaattagttaatacacttgatttgatttgctatctgggcaagagatgaacaaaacctaaagggatttgtgtatttagttggatgaaatgtggtagataggacaattctaacagaagagaacacggtgaattcatcgctgttgtttcaaaaacaactggaaacaaacatttgaaacacaaggaatcaaagcttccaacttttatctttaagaaagtgctccagggcagcccttctacaccagaaacatcaccatcacctgggaagttgttatcaatgcaaattttcaaaatgttaggcccccaatgtagacttactgaatcagaaactctaggggcggggctcagaaatctatttcaataaactccccaggtcgttgaggtgacactaacagttgagaaccaytgctgttagagaatttaaacaacaacactgcctgtgatcaattttgctgaaagcataggtcttagaggcaaatggccttgtgtcatgtctggctctaaaatcagcaggtgcgagtgagac

SEQ ID NO: 172158 - DNA, 593 bp, Homo sapiens
tggtaccttatttctattttatacttcatagcgtgttgctgaacacagggacagtacagaatgaagcttggcgattagatacgtattgttcagaacgagcagtgtgtgagttggatttcttcttaaaagtttgaaattattgcaattcttttagattacacaatgaagatatgctctttcttggaaatttcatcttcatagtttagatttatatggcattatttctctaaagaagttgaaattgtatagtctatttgggaatgtcattttatgccgaatggttttacttcccagttctattgcgtattgggaattcaagatctttaccagtatttttcatagggstgttgggggaattaatattatggagtgtagaactgatttgagcttgtttggaaagcccatattgttaacagaaacagcagtattttcttgttatctgctttgccacatcaccactacccttctcctctagtgggaaatcccaaagggaccaattcacagttgaatcatttttgctaatatgataaccccccgaaaaaaagaactaggatcatcccaggacagctggcaaagagaataacagtttgacc

SEQ ID NO: 172159 - DNA, 583 bp, Homo sapiens
ggattaagacagtcatttctgggaatgtaaatgaagataaatatatatatttaaatctatcaaatatgtattggtcattaaacttgtgtcacgagttagggatatgtcattttggggacccactgtrtaacagccatgcgatgtggccggtccttcactagagtcctcattcctcaaaggaggcttccacaagtgccaggacttgggctgtaaaaagctggcccttatcaggcttcgtggcctaaaggaggaatgatttagaatccccataactggccaggcagggtggctcacacctgaaatcccagcactttgggaggctgaggtgcgctgattacttgaggtcaggagttcgagaccagcttggccaacatggtgaaaccctatctctattaaaaatatgaaaaatagccgggtgtggtgttgggcacctataatcccagctactggggaggctgaggcaggacaatcgtttgaatccaggaggcggaggttgcaatgagccgagatcatgcctctgcagtacagcccggacaacaaaagtgaatctcaaaacaacaacaacaacaaaagaacccccata

SEQ ID NO: 172160 - DNA, 583 bp, Homo sapiens
ggattaagacagtcatttctgggaatgtaaatgaagataaatatatatatttaaatctatcaaatatgtattggtcattaaacttgtgtcacgagttagggatatgtcattttggggacccactgtgtaacagccatgcgatgtggccggtccttcactrgagtcctcattcctcaaaggaggcttccacaagtgccaggacttgggctgtaaaaagctggcccttatcaggcttcgtggcctaaaggaggaatgatttagaatccccataactggccaggcagggtggctcacacctgaaatcccagcactttgggaggctgaggtgcgctgattacttgaggtcaggagttcgagaccagcttggccaacatggtgaaaccctatctctattaaaaatatgaaaaatagccgggtgtggtgttgggcacctataatcccagctactggggaggctgaggcaggacaatcgtttgaatccaggaggcggaggttgcaatgagccgagatcatgcctctgcagtacagcccggacaacaaaagtgaatctcaaaacaacaacaacaacaaaagaacccccata

SEQ ID NO: 172161 - DNA, 392 bp, Homo sapiens
aaccgaggccagctatgcagataagtggaggaagagtgttctagaaagggaagtcagaacgygcacagaccctgaggcattacgtgctcagcaagttcgaggtactccatgaagggccatggcttccatattgtgaatgaagaggagacagaagacctatgtgaagtgtgtgggggtggggactagatcttgtctggttttatgaatcaatgtaaggatttgggcttttactcaaggtgaaatggaatcctttgaggtgtttcaaccaaaggggtgatacgatctgtcttaggtgtttaaaggatcatgtgagctgtgttgagaatacattctagggaacagagaccaggggaaagtacaaagaccggcaagaaagctactgctgtaatcaa

SEQ ID NO: 172162 - DNA, 392 bp, Homo sapiens
aaccgaggccagctatgcagataagtggaggaagagtgttctagaaagggaagtcagaacgtgcacagaccctgaggcattacgtgctcagcaagttcgaggtactcmatgaagggccatggcttccatattgtgaatgaagaggagacagaagacctatgtgaagtgtgtgggggtggggactagatcttgtctggttttatgaatcaatgtaaggatttgggcttttactcaaggtgaaatggaatcctttgaggtgtttcaaccaaaggggtgatacgatctgtcttaggtgtttaaaggatcatgtgagctgtgttgagaatacattctagggaacagagaccaggggaaagtacaaagaccggcaagaaagctactgctgtaatcaa

SEQ ID NO: 172163 - DNA, 392 bp, Homo sapiens
aaccgaggccagctatgcagataagtggaggaagagtgttctagaaagggaagtcagaacgtgcacagaccctgaggcattacgtgctcagcaagttcgaggtactccatgaagggccatggcttccatattgtgaatgaagaggrgacagaagacctatgtgaagtgtgtgggggtggggactagatcttgtctggttttatgaatcaatgtaaggatttgggcttttactcaaggtgaaatggaatcctttgaggtgtttcaaccaaaggggtgatacgatctgtcttaggtgtttaaaggatcatgtgagctgtgttgagaatacattctagggaacagagaccaggggaaagtacaaagaccggcaagaaagctactgctgtaatcaa

SEQ ID NO: 172164 - DNA, 581 bp, Homo sapiens
ccttccctgcaccccaacccagaaccaacttcatatgctgaaatcctaaccttcaaaatgatggtattatgaggtgagacctttgggagataattaggtcaggagagtggagctctcttgtatgggattaatgcccttatgaaagaaacccctgagagctagctagccccttcccacatataaggacacagarggtgccatctataagcctgaaagtaggccctcaccagatggcacatcggccagtgcttgatcttggacttcccagcatccagaactgtgagaaataaatttctattgcatataagctggccagcttatggtattttgttatagcatcccaatgaactaagacatctcctttacccttaaaagtgtctaggtttagacaaaaaaatatatatggtcaccttattaatatgttctattagctttctctgctcacctagtgtctcttagccataggagcctctgtcagcctagcactgtggaaggtgggagaacactctaaattcaggagacctagctatgccagcccctatcactgcccccatcagctgagacctcagagacatcaccaa

SEQ ID NO: 172165 - DNA, 505 bp, Homo sapiens
gacttaggttagaggaggaggaaaagatggtctttggagggaggaggatgcaaacaaaggcaggattgagcttggagagactgggaaactcctcctaggggagcagagcagaaggttcctgtggctgggctgctcatgacccagggcaaggcatcaaaaagcaagcaagtgccatgctgggttggatcaatagtccattcagtamtctgtatttggacagtggccctgagggatactttgggagagcctctggttgtgccatttggatgattctttagctattaggaaggtaaattatataataacccattatggtgcgatcgttcatgaatttttattaaccctgtctgcatctgtaggcaaaaatctcaaaaaagaccctcttaaaggaatattctacaatacaaagctgcttctatgggctctcagaaagccgacaggaaaagacaattatataaaaagcgaccctaaagaaaaagaaaaaaaactatagaaacaaaaagca

SEQ ID NO: 172166 - DNA, 462 bp, Homo sapiens
gagtgggacttaggttagaggaggaggaaaagatggtctttggagggaggaggatgcaaacaaaggcaggattgagcttggagagactgggaaactcctcctaggggagcagagcagaaggttcctgtggctgggctgctcatgacccagggcaaggcatcaaaaagcaagcaagtgccatgctgggttggatcaatagtccattcagtaatctgtatttggacagtggccctgrgggatactttgggagagcctctggttgtgccatttggatgattctttagctattaggaaggtaaattatataataacccattatggtgcgatcgttcatgaatttttattaaccctgtctgcatctgtaggcaaaaatctcaaaaaagaccctcttaaaggaatattctacaatacaaagctgcttctatgggctctcagaaagccgacaggaaaagacaattatat

SEQ ID NO: 172167 - DNA, 551 bp, Homo sapiens
actgttgagacctactgcttagaaaaaagactcatttccaaatattgctgctcatccaagaactctgatagagagggacaaggagatgttgtttacatgcctgctaacacaatattcattctgtagcccatggatcaaggcgtgattctgacttacaagacaattgttagcattattaaagaaatataggctgcgcatggtggctcactcctgtaatcccagcactttgggaggccaaggtgagtggatcatttgagcccatgagctcaagcccagcctggacaacacattgaaaccccaactctacaaaaagtagaaatatgagccaggtgtagtggcgcacacctgaagccccaaccacttggaaggctgaggcaggagaatcacytgagcccaggaagtcaaggctgcagtgagccatgatcacaccactgcactgcagcctgggcaacagagaccctatctcaaaaaaagtatatatatatatatattttgtaaggctgtaactgacatagacagtgattccgcttaaagatctgggcaaagtcaac

SEQ ID NO: 172168 - DNA, 601 bp, Homo sapiens
cacatctgtttatagcactgtttactaaacattttaagcccactgttgagacctactgcttagaaaaaagactcatttccaaatattgctgctcatccaagaactctgatagagagggacaaggagatgttgtttacatgcctgctaacacaatattcattctgtagcccatggatcaaggcgtgattctgacttacaagacaattgttagcattattaaagaaatataggctgcgcatggtggctcactcctgtaatcccagcactttgggaggccaaggtgagtggatcatttgagcccatgagctcaagcccagcctggacaacacattgaaaccccaactctacaaaaagtagaaatatgagccaggtgtagtggcgcacacctgaagccccaaccacttggaaggctgaggcaggagaatcacctgagcccaggaagtcaaggctgcagtgagccatgatcacamcactgcactgcagcctgggcaacagagaccctatctcaaaaaaagtatatatatatatatattttgtaaggctgtaactgacatagacagtgattccgcttaaagatctgggcaaagtcaactgaaaacct

SEQ ID NO: 172169 - DNA, 485 bp, Homo sapiens
tcattaatttttattcttttttcttctgtctcctctgactgtgtattttcaaatagcctgtcttcaagctcactcattctttcttctgcttgattaattctgttaagagactctgattcattcttaagtatatgtcagttgcatttttcagctccagaatttctgcttaattctttttaattatttcaatctgtttgttaaatttatttgataggattctgaattttatctctgtgttatcttgaatttttgttgtgcttcctcaaaatagctattttgaattctctgtctgaaaggtgacatatctctgtctctctgggattggtcactggtgccttatttatttatttatttattttggcgaggccatatttttctggatgttcttgatgcttgggtatgttcattaktgtctgggcattgaagagttgggtatttactgtaatctttactgtctaggcttgtttgtacctgttcttcagaag

SEQ ID NO: 172170 - DNA, 515 bp, Homo sapiens
gggcctcacagtagtataaaatctgtgtggcgctgaaacagaggaacactttatatttaataaccaacagaccaaagcctcctgaatggagatttagcatcctagggaccaacaactcatacactttgcatggacgtataaagaaggttcagaaaattcccattatgcattatagacttcacgctaaaggaaaataaaacaaagaaaatatacatgwctgaaaattaaagatgcacatagaatgaggtagttcatttgtaagatgtgttaaggattagtcatcattttgtccctatttttcaagagcattcattttaccagatgtttgcttagcatgataaacccataagccatccatctgtctgttcatctgtccatccatccatccatctaatctctcagtgaagagtcattgtgaaatattattttgctaaagaagtcaagcaatcttaaaggtaaaaagagattgaatgtttaggtaggtaaagaagaaagagtaggagtatatggtctct

SEQ ID NO: 172171 - DNA, 603 bp, Homo sapiens
ttatcatcagatatgtcagacaggacacaataactagaaaatggccatacaagaaaacaacatatggcatgatttccaaaatgcagagaagaaaccaattttaacaccttttacattaacataggtaaaaagctaacagtatgtataaaaaatatagacacaaagaataaagtataaacagtagcaagaaagaggtgaggaaaaagtttcacctaaagcaaaaaactcataaatccattccttagagtagaatgtgggccactgtagctaatttctgaacagtattggctatactggttaaattctcatctacacttcttaatattctgcagatggttaaatcccctgaaattatatgcaaatgttgtgtcagcatctatgaattcttctggaaaaattgtctaactttttcattgattcttgatctaaaattggaaatttttgtttggagaggtagggctcagaataggcaaccttctttgacctgaaatataaaaggtttcatcataaagtgaccaagaggatctcattatagtattcagcaaatctccattatgttctgaaatagaagtgsaactaggaataatcaatcaccaaatattt

SEQ ID NO: 172172 - DNA, 579 bp, Homo sapiens
tttaaatatatgggatctagtgggagagaaatagaggtcaaaaaaatattagctatgttatgggagtagggagaaggttagtttagctgaaagggaggcatgtgagaagagaaattgtgagaaataatgtttggacccttaatgccaaactaggaggttgaacttaatttatggtcagtgaagaccccttgaagaatgaagtgacaattttggttcctgtgcagaatacattgcttggagtagggggatattggcattgcagacatgagttttgatttttgcagggagaggttaagactcaggaatatagtactctacactctataaggaaggagttccagttgtagctttggattaagagattggagcaaaggaaaawataaagtacatacatttaatgtaaaaaggcgtatttgtggttatatacttattctatagtacttttagtatcttttaaccaaacttattccttgagcttgctggggggaaggccgtgtgttggatactaaactgacttttttttgactatccaggcccacacagtgctcctgcagaagatcgttcaggcacacccgacag

SEQ ID NO: 172173 - DNA, 609 bp, Homo sapiens
atatacgaactgaggtgatgcagggggagttttagtactgttctgatcatccaagattaagaggaatcttggtgatggaaagctttgtaaataagctgctgtttttttcttcagctgactctgactttgaagtctactaatatacatgtcaatgaaatgaaatagagaatctagattcaaataattttcagtaaawgggaagtgttcttaccataattataattgatatcttgggctctaaacgaattatttcttttattggctttggcttctgtaacctctcattgattcttaccattattttcactttctgaggatgcaaattcagtaatttaagtaagctgtaggccaggaaggttttattgttgttatttcattaatctttttttgctttctttttaaatagtgacagtcgaatacatccagcaaattacctagtatttataaatttttatttgctattttactagaaagttcttaaacactataattttcataaagtaattacacaactttagctatatactttgcaagatcacatattaatatatttgtttatcttttgttttcacagtaaataatttcccttactaaaagaataccactaac

SEQ ID NO: 172174 - DNA, 524 bp, Homo sapiens
acatatatagaattgaatatgatttatccttaaaaagaaaagtaattctgacacrttacaacatatatgagcacggagaacattacactaagtaaaataaatgaatcacaaaataaggtacttacagtttaatcgcagagaaataaaacagaatggtggtttccagaggatggtgggagttgaaaatgggcagttgttatttaattggtacagagttttagtcttgcaagttgaaaggactctggagaggaatggtgatgatgttggcatgaaaatatgaatgtacttaataccactgtacacttactaaaggttcaaaatagcaaatgttattttatgtgtttttactacaataaaaatggaaaaaatataggaaaacaaatgtgagaatttttaactattttagaaagcaggaatatttgctaagactcaaaaaccataaggcataacaaggttaacaaattcaaatagaaactaaaatggaggcattttcttcaagaaaaatattattacacagtcaaaga

SEQ ID NO: 172175 - DNA, 524 bp, Homo sapiens
acatatatagaattgaatatgatttatccttaaaaagaaaagtaattctgacacattacaacatatatgagcacggagaacattacactaagtaaaataaatgaatcacaaaataaggtacttacagtttaatcgcagagaaataaaacagaatggtggtttccagaggatggtgggagttgaaaatgggcagttgttatttaattggtacagagttttagtcttgcaagttgaaaggactctggagaggaatggtgatgatgttggcatgaaaatatgaatgtacttaataccactgtacacttactaaaggttcaaaatagcaaatgttattttatgtgtttttactacaataaaaatggaaaaaatataggaaaacaaatgtgagaatttttaactattttagaaagcaggaatatttgctaagactcaaaaaccataaggcataacaaggttaacaaattcaaatagaaactaaaatggaggcattttcttmaagaaaaatattattacacagtcaaaga

SEQ ID NO: 172176 - DNA, 381 bp, Homo sapiens
tttcccatagacatgctgctactataaatggcagcctgggagatacagacttgagcagtttacctctgaagtgcatgttctttgttttacattatatgactgccctgttgaaatgcttttaaacattcattcataaattaatacattaaaattgcattacctcctgtcattgtcattcttttcattggaaatgacagaatctcaccttatgctagtttaataaaatacaatataataaataggcttacaaaactttaaaaaagataattttgtttttwaaaaaaatctatgtactcaatcatttcataaaacaattacacaaatcagtctctaatctcctcacttcctcactctgctttctattctgatatattcattatt

SEQ ID NO: 172177 - DNA, 458 bp, Homo sapiens
ttgtggatgcaattcatatgcctagtgttcccttattggaatgtttagcatatgggagttatttatatcctactgctcgaggccatcaccaaggtcggatttttcactcatgcaaaaactcaaaaaawttgcaacctcaggcataaatgggttaaggttgtggactaggtgtatggaaattatcctagtgtgcccaatctaatagtaggagcccttaaaaatccaagagctttcttttttaactcaaaccagtgaagcagggagtaagaaggaagatcagagagatatgaagcatgtgaaggacttgacccacgctgctggctttgatgatggaggaaggtaaacataagccatagaatgtgggtagcatctaaaagctttgaaccctcccttgccaacagccagcaaatggaaactttattcttacaataacataaactgaagtctgccaaccacct

SEQ ID NO: 172178 - DNA, 490 bp, Homo sapiens
gaactcttaggctcaagcgatcctcctgcctcagcctcccaaaatgttgggattacaggcatgagccaccacaccccgcccatttctatttataactgcccaaattttgcttgctttctggatactgtttaatttttttcatttttctaaaatacttcatgctttccatagatatttgtttatttattatatttacaatatttggggctaattagctctgtcagaaatagcattgatcaaatctctcttggaaaacatttgctccatagaagcacttacttctaagattagtgtctgtagcctaaacatggcagatatttggtggttcccttgtcccaagttcgtggtattcatgtccttgtatgatcctcttcttttgattgaagtgagacctgtagcttccttacaaaaaataccatatgataaaggtgatggaatatatgtaattacattacatatcagwcatgaccacagtccaggccaggacctg

SEQ ID NO: 172179 - DNA, 382 bp, Homo sapiens
atccaatggaaagaactctcaatgaccatacctgtaataatttgggcaacaaaataagtacaatgatacttgattatagctcagaacaacattagtatattttagtctatactgatataagcaaattatatcaataagtacatggttgagagaaaataaatttcccatgcaggaaaatttaayttatacacatattccttcctcaagaagttggattataatctccctccttaaatgcacatagtgactttctctgaatgtgcacagtatggagagtggtgggattaagaatgacttaagagtggataaaactaaccaacaatcttacctcagccaaataattgaggtaaacataaacagagataagtcatgttaataatat

SEQ ID NO: 172180 - DNA, 506 bp, Homo sapiens
ttgatgaaaatcccactgcctttctaaaaagactaagagaggccttggtaaagcacacctctctatctcctgatgtagtcaaggaatagctaatcctaaagtttattactcaggaagctcctgatatcaggaggaagttgcagaaatgggccccgggaccagatagtacattagaggaccctcctgaaaatggccaccttggtcttttataatagagacggggaggcccaggaaagaaagaggagatacaggaaagaggcagaagttttaatggtcactgtgcaagcccacaaaccccagagttccyaaggtacacctgttaactgctaaactatggcaagaagagttatctctcttctaaagtttatccactcccatacaaggtttaatttctttcaccagggtgaaacagcttggggtagaatgttgttgttagtatatttcatgtttttctctgtaatctttggcactacattcttgccttgtataatacacatgtttaaccc

SEQ ID NO: 172181 - DNA, 574 bp, Homo sapiens
tactataatctctcattttgttttctagcttttgtgaatgtgttttcttgcatagatatttgttcaaattgttctttctttgtgtatgtgggagaaggggcactcactggagggttcttttccaccgtcttgctctacctcctcataatgttatttcttaatgaaagttttactattgaccaaaaaaaatcggatcaacaactttgaatgcgtagtaattaaacacaaagtacagtgtaacataaaatatttctttactgcattaacaattaaagaaacaattttgtttaaatatcatataaatacaacaaattgcctataccatacgtgtagaacttaaatttctcataaactagacatggctatgttaagtttcatcaatattaaacactacctcaggtgttttagatcaatgttcatggtttgtccacttctccttaccacccaaatcacaagcactatgttgacatttagaatcacagatttgtttttacaccttccagatttcataaaagttgwaccatatcacatgtactcatttgtctctcatttatcactgagtttatatttgtag

SEQ ID NO: 172182 - DNA, 298 bp, Homo sapiens
tcaacaaacctttaacaagaacgytttttcaggtggctatctaataatgaagtaatcaaaagttattcaaagttttattatacaaattaagcctctgtagaaattattttaatataaaataaataataagtatcattaaaatgcttggataatgattgatactgaactgttggctcagaatcagtgacatattgaaaatcaaagtgctaaaatgagctaggaggtacatctaactcttcctaatttcagtgtaagcaagtataccagttgtttcaaccaattaatatttacagaattc

SEQ ID NO: 172183 - DNA, 573 bp, Homo sapiens
tgatgatgttaactgtcattttaagaagcaactattgaagagackcatactgtaatatgtatgcatgaaattacataaaattttggatttgcttgaaaataatctggggtagaaggagtacataggaatataaattagaaagaatggctgaaatggatgatttttgaatctttgtgagggatataagaagtttattaacctatttattctattaatactttacatatgatgagaattttctataatagaatgttaagtaatattttctaaggtaactattcaaataatctttcaaaaaacttgataggcattcaaataattggtggtattagtgatatatcctttttttctttgagacagagtctggctctgtcacccaggctggagtgcagtggcacagtctgggctcactgtagcctctgcctcccaggttcaagcgattctcctgcctcagcctcccgagtagctggaattacaggtgcctacttggctaatttttgtagttttagtagagacagggtttcactatgttggccaggctattctcaaactcctgacctcagatgaccctcc

SEQ ID NO: 172184 - DNA, 573 bp, Homo sapiens
tgatgatgttaactgtcattttaagaagcaactattgaagagacgcatactgtaatatgtatgcatgaaattacataaaattttggatttgcttgaaaataatctggggtagaaggagtacataggaatayaaattagaaagaatggctgaaatggatgatttttgaatctttgtgagggatataagaagtttattaacctatttattctattaatactttacatatgatgagaattttctataatagaatgttaagtaatattttctaaggtaactattcaaataatctttcaaaaaacttgataggcattcaaataattggtggtattagtgatatatcctttttttctttgagacagagtctggctctgtcacccaggctggagtgcagtggcacagtctgggctcactgtagcctctgcctcccaggttcaagcgattctcctgcctcagcctcccgagtagctggaattacaggtgcctacttggctaatttttgtagttttagtagagacagggtttcactatgttggccaggctattctcaaactcctgacctcagatgaccctcc

SEQ ID NO: 172185 - DNA, 585 bp, Homo sapiens
  misc_feature (1)...(585): n = A,T,C or G
tgaaattacataaaattttggatttgcttgaaaataatctggggtagaaggagtacataggaatataaattagaaagaatggctgaaatggatgatttttgaatctttgtgagggatataagaagtttattaacctatttattctattaatactttacatatgatgagaattttctataatagaatgttaagtaatattttctaaggtaactattcaaataatctttcaaaaaacttgataggcattcaaataattggtggtattagtgatatatcctttttttctttgagacagagtctggctctgtcacccaggctggagtgcagtggcacagtctgggctcactgtagcctctgcctcccaggttcaagcgattctcctgcctcagcctcccgagtagctggaattacaggtgcctacttggctaatttttgtagttttagtagagacagggtttcactatgttggccaggctattctcaaactcctgacctcagatgaccctcccaccttgggctcccaargtggtgagattgagctaccgcaccggccgatatattttttaatatgatacaannnnnnnn

SEQ ID NO: 172186 - DNA, 581 bp, Homo sapiens
gtatatgtaccacattttcttcatccatttattcactaatgaatacttgggttgattacttatcttaacttttcgctgcaatgaacataagaatgcaaaaccctctaacatagtaatttaagtttctctaggttaatacacwttagtgggatttccagatcctgtggtagtgttatttttaattttttttgaaaaacctcataccattttccatgatggctgtaccaattttcattcccaagaacagtgtaaaaggatttacatttctccacatcaacaacacgtgttaccttttatctgtttaatgatagccatttcaacaggtgcgaagtgctatctcattgtttttttcatttgcatttccctgataattagtgatgttgagcattttttcatataccagttggccatttgtgttttcttttgagaaatatctattaggtgctttgcccatttcttttaattaggttgttttcttatcactgagttgtctgggtttcttatatattttggatattaactctttatcagatgtatggcttacaaacatttttttctattctgtaacttgcttcttaact

SEQ ID NO: 172187 - DNA, 607 bp, Homo sapiens
tacaaacatttttttctattctgtaacttgyttcttaactctggtgattgtttcctttgctgtgcagaaaccttttagtgtgatgcaacccctttgtttgttttcacttttgttccctatgctttgagattcacaaaaaataattttccaagatttatctgatggagctttgcccctatgttttgttctagtagttttacagtttcaaatcttacccttaagtctttaatccattttgagttaatttttgtaagtggtatgaggtaagaacaagacctgaaactttaaaactcttagaagaaaacatagaggaaatactacataaaattgttcttggcaatgactttttgaatatgacaccaaaagcataagcagcaaaagctacaataaacagtaggactatatgaaactaaaatgattctgtagagcaaataatttaaaaaaatgaaaaggcaacctatagaataggagaaaatatttgcaaattatatacctgataaggagttgatatgcaaaatacatagccaaaaaactcaatagctaaaaaaaaaacccataacctgattaaaaaatgtgcaaaggacctgaagagatattttttcaaaga

SEQ ID NO: 172188 - DNA, 629 bp, Homo sapiens
gctagtgggaagggggcaggaggtggtgatgattaatgtgtacaagaatataattagatagaatgaataagatctagcacttgatagcacaacagggtgaccacagtcaacaatgatttattacagggttaaaaataattaaaagtataattgaaatgctcataacacaaagaaatgatagttgcttgaggtgatggataccccatttaccctgatataattattatacactgatgcctgtattaaagtatctcatataacccataaatatatatgcctacttatgaactcaaaaaaaagaaccaaaaaaacaaaataaccagattattatttggttcagagaacattgttasttggaaaatacttcaacaaatggtaatttcaaaggcttaaaagggttgaatagtcagtttggagagttttttaaaaacagacaaagcaaaaatatttaacatagattatgtcacctttcgtgatactatgatcacataattgctaatatatgcaggtaaaataaaaaattaatactcaataataataaataaaaactggtagacaaattctatttctgagaaatatacagcaaatcctagcaggctatcttaaaaaaaaattgtatctttaaaggc

SEQ ID NO: 172189 - DNA, 588 bp, Homo sapiens
gaatctttcaaaaaaatttttttttcataaagactgtgagctagactttccctttgcctctacatataaatttgttttggtgcttgggagcagtatctctttaccactatccacctctttacctgtcctacccctacacagcaattaatttccctctcttagtagaggagaaatggtagttttccaaggacacactaaagcaatgcaggatgagttgcatactcttttaaatatcaaagaataaatcttagtatgtatctttaaataatcaaataatacaatttttaaagattcctcttttgttgttaaaacaataycctcagtgaataagatgaatcaatcaatcacctataccttgataaaacatctgttttatgccaaaacatgttcttggcattgaggagaggagaggatacctatacccttgcatctcacggtcttgtggagaagaaaatgagagaagaaagactttcatagtggcagaagagttaaaaactctacaaagcaccaagaaaattgaccagaagagtaatgaacaaatagaacaaaattggaagatgaggctggaaagtaggattggcatttttt

SEQ ID NO: 172190 - DNA, 589 bp, Homo sapiens
atctttggcatctttaagtctctaaaagacagttatgtataaaaagaggatttagagacagagcttttacaatagacttatcagtaattagataaaatgtayacattactatgtgttttatctcatcattctaaaacttatttttaaaagcacataaaggaggaatagactgggttctcttcagtgtggcctgcaaccgtaggaaagttcaggagaaagccacttatccattcattcaaatatttagtgagtgtgtgcctacttgcagctaagaatggaaaaaagaaagcacagttcctgtcctgaaagaggtttacacaaatgaaaaggacagacataaaagtgcaacattgtgaatgtctctcataatggttgacaatactaggggagctgagtgtttccacctctcatgttcaatagctaagatcttcgtgaagatgaattgctttggaaccaaccaaatttgaggtgaacatttgacatgctgcggaggtggggtgaccataaccatcttttacaagatgaaaatatgaactcagaaatatgacacaccctctcaaaatggtaagtagctttcaactagtaactt

SEQ ID NO: 172191 - DNA, 621 bp, Homo sapiens
ttacaattattatgtattatyataattcctcttgaacctgagtttcaaccatctttcaaaatggggaaaatagtaatcacacatacatgcacacacatgcaaacaatgtatgcactcatttattattcaacaaattttattgaacatctactatgtttgagcactgttctgcattctacagatagagctgtaaatcaaacagttgtaattctgttaacatgcagcagcattaaatctgattatgtatgcattaagttgtgcataaaattgtgataaaatctcattgtatatgcataaaaatgtatgcagcatagtatgaagcatactttaagtaacaaaagcaaccactgagaaaacactagactgaatactagaacagcctatttcaacaatcagaactacatttacaaacattcaaacccctcagtggacctaggattcagtatgaccctgaaatggtatttgtatgtaaggattaaagtctgttagttgtactgttttataaatacacataaacacatatataaatacatatacatatacatgtaaaagttctgtaatatatgctctataacacatatatgttcatatatgtatatgcatatacagagatataatttg

SEQ ID NO: 172192 - DNA, 642 bp, Homo sapiens
aacaaatgggattgcataaaaattaaagtatctgcacagcaaaggaaaaaaacagagtgaagagacaacctacagagcgrgagaaaatattttcaaaccatatatatcataaggagttaatataaaaaataaatgaggaacttaatagcaagaaaacaaaaaaaaaaattaaaaatgaacaaaaaacctaaatagacacgtcttaaaagaagagacatgcaaatggccaacaaatgtatgaaaaaaaaatactcaacaaataagtaaatactgaacaagtaaataaattataaataataggacccagtttagacaaactagtaactaataagcaagatgataaagctagaatgaacactgtggtgctggattagaactggcaatttcggtaagaattcatattcatattcatatttacatgtatttgtatacgtgtgtgtgtgcacgtgctcatctcagacacacttagtaacttaaaacaacaaagattcattcttacagtctggaagtcagaagtccaaaataggtctcactgggcaaaatcaaggtgtcagcaggaatgtgctccttctggaaactccagggagaatctgcttcttagccttgtccagcttctaaaagctgcctacatcccttggcatg

SEQ ID NO: 172193 - DNA, 572 bp, Homo sapiens
tttattacagtattacttataacagccataaggaggaagtaacccaaatgtgtattaagggattaatggataaatgatacgtgatatatccatctaatagaatattattcagccataaaaaatgaagtactaatgcatgctacaaaatggatgaaccttgaaaatattatgctaagtgaaagaagccagttacacaagactatacatgtgattccattcatatgattgttcagaatagggaaatctatagaaactgaaattggttacttaagtttggrgaggaatgggtgaatagggagatgacagctaaagggtacagtgtttcttttcaaggtgatgaagacattctaaaactaactgtggtactggtcacatatacctgtgattacatggaaaatcatcaaattatacattgtaaatgggtgaactgcaagatatataaattctatctcaataaaactgttagaaatcttataaaaatgagcaagcaagatgactaggggaaaaaaaaaactttttaaaaagcaatagaggtaaactcagtccaataataaaaaagtatgagattatga

SEQ ID NO: 172194 - DNA, 552 bp, Homo sapiens
ctgaaagcctcaaaactgatggatttgacccatcctctaccaaagaggcaacccattgaaccaaagaggcaactctgggtctactaccaaacccctatcctgtttctgtattgcaaaacaacaactttgtatatccattcttcattctgcagaagttatggatttagcgggatgtaaaaacttcctccagaagattttaactgactcactgacatttggtagaataaaaaggtcataaccaaatattcatgcaacatttccccactaattatatttagcctaactccctaataacacagatacagaaattcagttaaaggggttaagcaactcaaccaagtctaaataactasgtaacctaatgctaaattcgagatgctgaaaatatcctaaaacaaatattcatttaaaaagatctgtacctagagattctgaactagaatttgggaagacagattctgattagggtataataagaatggagacaataattgaaaccagagggaagagggcatttttaagagataatataaagatcatagcattgaagca

SEQ ID NO: 172195 - DNA, 613 bp, Homo sapiens
tgatcactgggctgtgagtgggttgctggcagtgagtgccatgcctcaggagcctctgatgaatgcttcatatggtgggcagtttctcaaccgtaattatttacttttgataccagtgtgaacaaggctgatatatttatatgatataaaactcagctaatctactttcgtgataacaaactattttacattttcaaactaaattttatttactaaagtcactttctccatttttttcttttccaaatagtattaatcataactccaggtctaagtaactaagtaatcacaactccagcctaagtaacgatataatgaaaagtgatacttaaatgtataatgtgctttttgagtgctctgttgaacatactttatcttagtaaagattttactcaaaattarttttgaccctatagtatggtagattttaagcaaaacatttgtctcttagtaaatattcattttcatgtactttaaagcaacaccagctactataaaaatcagacttctacttcaccaagagctatagacatatcaatacacattaatacagaaatccaactttgagaaatttgatcctgagaaataataagaaaaatagccacgtatatgt

SEQ ID NO: 172196 - DNA, 613 bp, Homo sapiens
tgatcactgggctgtgagtgggttgctggcagtgagtgccatgcctcaggagcctctgatgaatgcttcatatggtgggcagtttctcaaccgtaattatttacttttgataccagtgtgaacaaggctgatatatttatatgatataaaactcagctaatctactttcgtgataacaaactattttacattttcaaactaaattttatttactaaagtcactttctccatttttttcttttccaaatagtattaatcataactccaggtctaagtaactaagtaatcacaactccagcctaagtaacgatataatgaaaagtgatacttaaatgtataatgtgctttttgagtgctctgttgaacatactttatcttagtaaagattttactcaaaattagttttgaccctatagtatggtagattttaagcaaaacatttgtctcttagtaaatattcattttcatgtactttaaakcaacaccagctactataaaaatcagacttctacttcaccaagagctatagacatatcaatacacattaatacagaaatccaactttgagaaatttgatcctgagaaataataagaaaaatagccacgtatatgt

SEQ ID NO: 172197 - DNA, 576 bp, Homo sapiens
catttgcaaattgtattttaggggtaaggaaaactagtgtgaatgtgcctgtccaattagcaggtagacacatgtaggtagaggatccacagaggaagaagagaccttgtgcgaggcaaaactggagatgtaaagtaaaaaggtgagaaggagtgctgaaagggktgtcttgtacccagactcctagggatccagctagggcggcagctgtcagaggttgtaatggggactgatggggtaactgcatagaggaggaggttcagttttcatggtgtatgagaaaacgttgagtatctacgagcaacctttcactgttattttcggggctcggtataagtaaacaagaagagggcctgggaggagagtctgatgagcaagggaaagtagtcaaggatggagtgaaatacagagtaagtgtcttcctaaacaataattactgctaatgtttttgagtttgtcagtattgatagagggtttgtctgtaatgtggagctggaaggctccaattgtttcagtgatgtgtgtagttgggcttcggagatgaagagtaaaggaacatcgagaaggtgaaagatt

SEQ ID NO: 172198 - DNA, 576 bp, Homo sapiens
catttgcaaattgtattttaggggtaaggaaaactagtgtgaatgtgcctgtccaattagcaggtagacacatgtaggtagaggatccacagaggaagaagagaccttgtgcgaggcaaaactggagatgtaaagtaaaaaggtgagaaggagtgctgaaaggggtgtcttgtacccagactcctagggatccagctagggcggcagctgtcagaggttgtaatggggactgatggggtaactgcatagaggaggaggttcagttttcatggtgtatgagaaaacgttgagtatctacgagcaacctttcactgttattttcggggctcggtataagtaaacaagaagagggcctgggaggrgagtctgatgagcaagggaaagtagtcaaggatggagtgaaatacagagtaagtgtcttcctaaacaataattactgctaatgtttttgagtttgtcagtattgatagagggtttgtctgtaatgtggagctggaaggctccaattgtttcagtgatgtgtgtagttgggcttcggagatgaagagtaaaggaacatcgagaaggtgaaagatt

SEQ ID NO: 172199 - DNA, 576 bp, Homo sapiens
catttgcaaattgtattttaggggtaaggaaaactagtgtgaatgtgcctgtccaattagcaggtagacacatgtaggtagaggatccacagaggaagaagagaccttgtgcgaggcaaaactggagatgtaaagtaaaaaggtgagaaggagtgctgaaaggggtgtcttgtacccagactcctagggatccagctagggcggcagctgtcagaggttgtaatggggactgatggggtaactgcatagaggaggaggttcagttttcatggtgtatgagaaaacgttgagtatctacgagcaacctttcactgttattttcggggctcggtataagtaaacaagaagagggcctgggaggagagtctgatgagcaagggaaagtagtcaaggatggagtgaaatacagagtaagtgtcttcctaaacaataattactgctaatgtttttgagtttgtcagtattgatagagggtttktctgtaatgtggagctggaaggctccaattgtttcagtgatgtgtgtagttgggcttcggagatgaagagtaaaggaacatcgagaaggtgaaagatt

SEQ ID NO: 172200 - DNA, 613 bp, Homo sapiens
acaataggatggtcactagctgcagatggcaatttacagacaaattaattcatatcaaataatactgacaattgagttcctcagtcacattggccacgtctcaagtgctcagtagctgatgtgaygagtggctccctattggagagcactgaagtggagctttcggtcgtcacagagcattcatggggcaacctcagtctctggatgcttactccattgttagtttgggacagtttgtgcttaagatcaacaaattcaagatgccccacatcaagttcaacttctgtttatgccacacagcacatcgaatcacctttctttctttaaaagctgacaatttcactttgggtcagattgtatttttgaattcccttttccatcttcttcactgagcatctgtgaaataacccaagtggcaaaggcatttcaaaacttggagcaaaatggagataaaaggaatctgtctgaaagagtcacagaaatccagagctaaagccctcggaacagtcacaaagtctgcaggaggcagctgagacagcctggagtaaactctcaccaaagacaggagccttccatgtacactgcgatcggcaccagcaaaggaagtcttggg

SEQ ID NO: 172201 - DNA, 626 bp, Homo sapiens
actagctgcagatggcaatttacagacaaattaattcatatcaaataatactgacaattgagttcctcagtcacattggccacgtctcaagtgctcagtagctgatgtgatgagtggctccctattggagagcactgaagtggagctttcggtcgtcacagagcattcatggggcaacctcagtctctggatgcttactccattgttagtttgggacagtttgtgcttaagatcaacaaattcaagatgccccacatcaagttcaacttctgtttatgccacacagcacatcgaatcacctttctttctttaaaagctgacaatttcactttgggtcagattgtatttttgaattcccttttccatcttcttcactgagcatctgtgaaataacccaagtggcaaaggcatttcaaaacttggagcaaaatggagataaaaggaatctgtctgaaagagtcacagaaatccagagctaaagccctcggaacagtcacaaagtctgcaggaggcagctgagacagcctggagtaaactctcaccaaagacaggagccttccatgtacactgcgatcggcaccagmaaaggaagtcttgggtgaacgtgatgaatatgcaagtctaga

SEQ ID NO: 172202 - DNA, 553 bp, Homo sapiens
tttacaagtaagacataatatgattgtaaagctccattacatcaacatttacattttatggacttcaaaacgatagcatgctgtcccattctcatataagactcggaactctgttccataattcagttctgcaacatttaatgcaggcctattaggtgcatgtgacaggtgtttgtgacaaaacaaaacaaaacataacaaaacaaaaacaaaaacaaataaacaccatccctgttcctgttggcagggaagacaaatatgttaacgtatctcctgttgtaagtgccatgataaaggtaagcaagtgcactctggaagctcacataggggttacttgactcaattttaaccaataaggaatttagctagaaagggtggggagtggtttcaagcaagggaaataccaagagcaaaagtaaggaagcatgaggtggcacaatgtgttcagggaaacaacagcagtttgatcctagacagcacactgtctgacagaaatctaatgtgagycacaaatagaagctgctagtataacttaaaacatttctaatagcca

SEQ ID NO: 172203 - DNA, 579 bp, Homo sapiens
ggccctgctgacaccttgcctgcagtctcatgaggggggtcctgagcgagagcctcctacccaagacactcgtgaattccttacccttagacactgtgagatcatccatttttcttgttttaagccagcacatttyggggcaatttgttaggcagcaatggatgactaatacatgaagctacatggatggaacatgtgaacttagaaggggatggatcagagattgcctgagtctggcttttttctcccacctgtgtagaaagcctgaagtaatccccattctgactaaagataattgggacagcagagtaagtgaagcagaattggtcaggtacaatgcctgaaaatttggaaggaaaaatggtagcttgcataactcaaagcaaattagtatctacaaaatatatatcaggattttattgaagcgtataacaaatatttaaaaaacaaccctgtgagaaaactgaataattggtgatggtagtatatttggcaatcttatgaaacgatctgaatagataagaataatgtgtaggaaacgagaatgtttaagtttaataagaacagatgagagttctg

SEQ ID NO: 172204 - DNA, 533 bp, Homo sapiens
ttaaagtgtgtggcacctccccctttgctctctctctcctgccaccctgtgaagatgtgcttgcttccccatcacccttctgccatgattgtaagttttctgaggcctcccagtcatgcttcctgtacagtctgtggaactgtgagtcaattaaacctcttttcttcctgaattgcccagtctcaggtagttctttatagcagtgtgaaaatgaactaatacagccaggaacttacaatttgggggtcttttagccaaaggagggcctgctaatctgccagaggggttaaggactttcatttcagcctcaagtggctatgtaggatccactggtaggtaagacacatatatcccttatattaggggttctttgggctaatttggaagtgcagatggaaagaaatactatggaagaacttccatttactaagcaaacagatgggactttctacctcagaccagggtagcagggaaggattcctgagcaatatctgatggtctsaaactattaaagctactatccttaatgatcc

SEQ ID NO: 172205 - DNA, 429 bp, Homo sapiens
cctcccaaagccctgggattacaggcatgagccaccacccctggtcccatgtcacttttcaaagctgatcccctcagacctttctccaggctttcccaatagtttatctcctcatttaggcccccaccatttctatctccctgcccagtgtgctgcactccaggaccctcrgcccccagccctagttccaagccttggcccactgcagccccacctggccagcagctccttggtctggtcagtgaggatggcactatctgctttcaccatgcaagccagggcagagatgacacccgccttcagaagccgcttcacccgcatgtctataaagtccttcttgtcctgaggagatgaaaagatggcaatgtgggagggtcctgggtgccaggccaatcggtattggaaccaaagatggtgcatttctgaatt

SEQ ID NO: 172206 - DNA, 632 bp, Homo sapiens
ttattgttcattaaaaagatccggaagcctaaattcaggatccctcttttgtagtgcagttcactgcatgtgtaactgcaattcagtasccttcgtattatctgagaatcagatccgtgaatcaatggaaaaatactctgcctactcttattgctacaagtcataaactgtctttagtctatgtgccgagagtcccttttcttcctaccagatctatgagactgtggcagactctctaatttattaacttggacacaaacacagagtaaaatctgaatccctttaaaattcttgccacaggcctggcgtggtggctcatacctgtaatcctagcactttgctttgggtgggcagatcgtttgagcacaggagtatgagactggtctgggcaacatggtgaaaccatgtctctacgaaaaaatacaaaaaatagccgggcaaggtggcatgtacctgtagtcccagctaatcgagaggctgaggtgggaggattacctgagcccaggaggtcaagcctacagtgagccatgatcgtgccactgcactccagtctgggtgacagagtgagacgctgtctcaaaaaagcaaataaataaaatttcttgacacaatgttgtcttttgattttcatt

SEQ ID NO: 172207 - DNA, 632 bp, Homo sapiens
ttattgttcattaaaaagatccggaagcctaaattcaggatccctcttttgtagtgcagttcactgcatgtgtaactgcaattcagtagccttcgtattatctgagaatcagatccgtgaatcaatggaaaaatactctgcctactcttattgctacaagtcataaactgtctttagtctatgtgccgagagtcccttttcttcctaccagatctatgagaytgtggcagactctctaatttattaacttggacacaaacacagagtaaaatctgaatccctttaaaattcttgccacaggcctggcgtggtggctcatacctgtaatcctagcactttgctttgggtgggcagatcgtttgagcacaggagtatgagactggtctgggcaacatggtgaaaccatgtctctacgaaaaaatacaaaaaatagccgggcaaggtggcatgtacctgtagtcccagctaatcgagaggctgaggtgggaggattacctgagcccaggaggtcaagcctacagtgagccatgatcgtgccactgcactccagtctgggtgacagagtgagacgctgtctcaaaaaagcaaataaataaaatttcttgacacaatgttgtcttttgattttcatt

SEQ ID NO: 172208 - DNA, 475 bp, Homo sapiens
ctttgtgatgtaataaccagagctaaatctagtactgacttatttatattacaattctgtattaatctcccagactgcyatgtcaaagtttcacaaattgggtggctgaaaacaatagacatgtattgctcatagtactggaggcaagaaatctgagctcaaggtggcagcagggccatgctccctctcaaacctataaagcaatcctttcttgcctcttcctagcttctgatggtttgctggcaacctttggtgttccttggccagcagctgcgtaactccaatctctaccttcatctccccatgtatgtgtcctataaggacatcagtcatgttgaattaggggtccacctactcctgaatgacatcttcttaatataactaattacatctgccatgaccctatttccaaatatgaggtgctagggattaggattttaaaatatctttttggtgggggaaacacaatttaacc

SEQ ID NO: 172209 - DNA, 475 bp, Homo sapiens
ctttgtgatgtaataaccagagctaaatctagtactgacttatttatattacaattctgtattaatctcccagactgccatgtcaaagtttcacaaattgggtsgctgaaaacaatagacatgtattgctcatagtactggaggcaagaaatctgagctcaaggtggcagcagggccatgctccctctcaaacctataaagcaatcctttcttgcctcttcctagcttctgatggtttgctggcaacctttggtgttccttggccagcagctgcgtaactccaatctctaccttcatctccccatgtatgtgtcctataaggacatcagtcatgttgaattaggggtccacctactcctgaatgacatcttcttaatataactaattacatctgccatgaccctatttccaaatatgaggtgctagggattaggattttaaaatatctttttggtgggggaaacacaatttaacc

SEQ ID NO: 172210 - DNA, 496 bp, Homo sapiens
ttcagaacattaaactttgtgatgtaataaccagagctaaatctagtactgacttatttatattacaattctgtattaatctcccagactgccatgtcaaagtttcacaaattgggtggctgaaaacaatagacatgtattgctcatagtastggaggcaagaaatctgagctcaaggtggcagcagggccatgctccctctcaaacctataaagcaatcctttcttgcctcttcctagcttctgatggtttgctggcaacctttggtgttccttggccagcagctgcgtaactccaatctctaccttcatctccccatgtatgtgtcctataaggacatcagtcatgttgaattaggggtccacctactcctgaatgacatcttcttaatataactaattacatctgccatgaccctatttccaaatatgaggtgctagggattaggattttaaaatatctttttggtgggggaaacacaatttaacctataaca

SEQ ID NO: 172211 - DNA, 490 bp, Homo sapiens
acattaaactttgtgatgtaataaccagagctaaatctagtactgacttatttatattacaattctgtattaatctcccagactgccatgtcaaagtttcacaaattgggtggctgaaaacaatagacatgtattgctcatagtactggaggcaagaartctgagctcaaggtggcagcagggccatgctccctctcaaacctataaagcaatcctttcttgcctcttcctagcttctgatggtttgctggcaacctttggtgttccttggccagcagctgcgtaactccaatctctaccttcatctccccatgtatgtgtcctataaggacatcagtcatgttgaattaggggtccacctactcctgaatgacatcttcttaatataactaattacatctgccatgaccctatttccaaatatgaggtgctagggattaggattttaaaatatctttttggtgggggaaacacaatttaacctataaca

SEQ ID NO: 172212 - DNA, 426 bp, Homo sapiens
ttcttcaacttttcttatcatattgttgttctgtgtacccataggaagaaccaactctttattggccatatttagagtatctttaaaaatgtataatcccagccttgccttttccctytcctcactagaactgattgataaatatgagggaataaaatttcatgtctaaatattaaccttgggaaaagaattcatcctgctaaataatatcacgatgactttggaaaagaattttgattgatctatggaaatattaatagttatgagcatttataaccataggaattattaatacttatgagtatttataaccataggttgtagtgaaattatcatgcttaggaaagatatgttgtttcaaaatagattaatacagaacagaaagagccttagtacattgtcttagtgttccctacaacaaaaatt

SEQ ID NO: 172213 - DNA, 578 bp, Homo sapiens
ctgctagaatccttgtgaggattaaatgagttcmgaaacatgtaaagaacataggataatgcttggtacatagtaagcctcattgtcatcatcactgtcatcgatgccatcatcatcatcatcatcgttatctttcctgtgatcctgacactctgctcagggctgagtgtgccaggacaaacaaggcagcacaggcacctgtcctcatggagcccccagccttggaaaagagtccagcaggaagtgatttgcagggagggagggcatgggaagctcaggccatggaaggaagacagaatctgcacagtgcctggtggtccagggtggtgtgctgggggaggatggagaagctctattttatgctgtttttggcctggggctggaagactatagtgaggcgaaaaatgagtggaacaaagtgacagaggtgacagaacaaagccttgcaccctctgaggtcctccctctccaggaacaatccaggccagggctatagagggctggtcctatgtataaggccacctggggcctcagcctcaatgtggcatctaggtggataagtgaatggaccttactgc

SEQ ID NO: 172214 - DNA, 578 bp, Homo sapiens
ctgctagaatccttgtgaggattaaatgagttccgaaacatgtaaagaacataggataatgcttggtacatagtaagcctcattgtcatcatcactgtcatcgatgccatcatcatcatcatcatcgttatctttcctgtgatcctgacactctgctcagggctgagtgtgccaggacaaacaaggcagcacaggcacctgtcctcatggagcccccagccttggaaaagagtccagcaggaagtgatttgcagggagggagggcatgggaagctcaggccatggaaggaagacagaatctgcacagtgcctggtggtccagggtggtgtgctgggggaggatggagaagctctattttatgctgtttttggcctggggctggaagactatagtgaggcgaaaaatgagtggaacaaagtgacagaggtgacagaacaaagccttgcaccctctgaggtcctccctctccaggaacaatccaggccagggctatagagggctggtcctaygtataaggccacctggggcctcagcctcaatgtggcatctaggtggataagtgaatggaccttactgc

SEQ ID NO: 172215 - DNA, 392 bp, Homo sapiens
tttttgctttttgtttctttttatgccttatatagtcaaactttagcctgcagtttagtgtgtactgatgccaaagccacagtgtaatggtaatatgtcattttgaaatttctttgtagaaaatcatgcttttgcttttacaactcgtttacaataaatgaagaagaatgcatcacttgataattggcagaaggctaaattttgcctgtattcataaatgttattaaagatcgggttaaacacaaaccttgtaattcacttccaataacatatcaatctaaaaactgtatttgacataaaataacttctttatctggtagtaccaaaaataacaattttttttttaacacttaagagtgtttccaagagaaamtattatggtgagaggaatt

SEQ ID NO: 172216 - DNA, 432 bp, Homo sapiens
tccaggaatgaacagcagaagccctgcaggagccagctgatttctttctggagcccctgaccactagccatatagcaattacttccttccccctccaggtagatagaagttgttttcttttctgggggtggaggagtgcactgggtagagagagggaaatccctgtatggcaagtgggaaaccaggcagtttcaagacggatgttgggaagggcttggtcaaccatcctttggggacatttcttgggccatagctgcaggcgccacaaaaattctaaataaggatgacgaaagttgtgagaatcaattattatctgccagggaatttccaaggttcctctctgggcttaaaaataactcacattgwaagaacaaagagaatggaaggagcaattagttgaaagtaactgagaagttaaaggagggagaattc

SEQ ID NO: 172217 - DNA, 609 bp, Homo sapiens
agcttcctgccatgctgttggcctggaagcccacctgactggtccatagtgacgtcctgaagagccagtctgtaaaataaccaacaacttgtttagcttttggatagactccacacctcctctttctctgcaaagaaaaatcttgaatatttatggatgmcaattagggaaagtattgaaaatagtgaaatataattaaaaacaacatgtatttttcatgttatgaaaaatattgaaagaactgatattaatgaaaattaatattttattttccatctccccagtgtaactaatttgtggcaatcaccccctaccaagagcagtaatgctgtgtaaagctggctttctggagtccgctggatccatacgaagtgtgatccctggtttcctctgttacttgctgcatccaagccaggggagcaggagatgctcagctctggtgcctttgattttatgtcattgctgccttcctgcctgctcagttcacccacccccgtttccctccgtatggaggcaacagcatttcaggatgtaccttggggtgtcagggtagctgcaagtaagggtttttatgatcctcatggtctcattgatacagacaggagacag

SEQ ID NO: 172218 - DNA, 609 bp, Homo sapiens
agcttcctgccatgctgttggcctggaagcccacctgactggtccatagtgacgtcctgaagagccagtctgtaaaataaccaacaacttgtttagcttttggatagactccacacctcctctttctctgcaaagaaaaatcttgaatatttatggatgccaattagggaaagtattgaaaatagtgaaatataattaaaaacaacatgtatttttcatgttatgaaaaatattgaaagaactgatattaatgaaaattaatattttattttccatctccccagtgtaactaatttgtggcaatcaccccctaccaagagcagtaatgctgtgtaaagctggctttctggagtccgctggatccatacgaagtgtgatccctggtttcctctgttacttgctgcatccaagccaggggagcaggagatgctcagctctggtgcctttgattttatgtcaktgctgccttcctgcctgctcagttcacccacccccgtttccctccgtatggaggcaacagcatttcaggatgtaccttggggtgtcagggtagctgcaagtaagggtttttatgatcctcatggtctcattgatacagacaggagacag

SEQ ID NO: 172219 - DNA, 537 bp, Homo sapiens
tcccttccccatcccttacttcccttcctgaacaattcagcctttgggtgcagaacaaggcaggcatgtgagaagggctgccctagctcaggggcctcagcttgagtagcagggtgagaagcctatccacagacaggagcagcccagggagagacgtgaaatgcttgctgggcatcactgcaatggcaggcaagtccacctggctgcaaagcaaagccttcagggatctcaggacaaggggaagggcctgtaggatttcccctgcacccgaggccaggggtgtctgcacattaaccactccagcctcctccccaggggttttccaacccaccttccctgtgctygtgacccccgccacctggaagagactttgtcctgccagcgccagccatggggtttgatgtcaaagggtcactcggccactcttcactgagttcccaccaggcttgggtctccagggctctgcctgagtccgtcctgaacctcatgtaacactgcagtggccaagaggccccatgggaagctgagccacaggtc

SEQ ID NO: 172220 - DNA, 608 bp, Homo sapiens
tggtcagtggtttcagaatctttggccttttctgactcagtcatgaagcctctagggctggagaactcccaacctgggacaaccggatgaagcatccagggggcattccaccagcagccactgggactttaactgtaacactgaagctgtacttagataagcaagagctgatttcacacaagttcttacttctctgtactttagctgttagcactctcagggtcaatgccttgtaccgaaggaaatacttcctgctgcactgataactcatgtttcattataacatagggaagatgcatgacggtctccatatgcagatactgtgycattagtcaaatgaatcattccagcaggtgcctgggaaaggctggggccagctgacatctttatgatgattatatagtctttgtgtctcatgcaactaaaaatagctctctaagatgaaaaatttgaattgaagcacattttctgcatagagaaaaatagtgcccattaaatcgtttttgaatctgcttggtgtggcgctttcttttgaacgtggcttttttttttttttttttttgccattatcggccagtaagcagggatggaaaccatcctgttggtta

SEQ ID NO: 172221 - DNA, 608 bp, Homo sapiens
tggtcagtggtttcagaatctttggccttttctgactcagtcatgaagcctctagggctggagaactcccaacctgggacaaccggatgaagcatccagggggcattccaccagcagccactgggactttaactgtaacactgaagctgtacttagataagcaagagctgatttcacacaagttcttacttctctgtactttagctgttagcactctcagggtcaatgccttgtaccgaaggaaatacttcctgctgcactgataactcatgtttcattataacatagggaagatgcatgacggtctccatatgcagatactgtgtcattagtcaaatgaatcattccagcaggtgcctgggaaaggctggggccagctgacatctttatgatgattatatagtctttgtgtctcatgcaactaaaaatagctctctaagatgaaaaatttgaattgaagcacattttctgcatagagaaaaatagtgcccattaaatcgtttttgaatctgcttggtgtggcgctttcttttsaacgtggcttttttttttttttttttttgccattatcggccagtaagcagggatggaaaccatcctgttggtta

SEQ ID NO: 172222 - DNA, 295 bp, Homo sapiens
ctcagctacaatactttgattagacagcaagtggaactgtagatctaatattcaagggagaaaatgggcaagaagtatttcccatttgcttttcccttattttttgtatttcacattcartaactttgtcccatagaatttcaacatgtgttagttgttggatctaaaattattaaagcacatcagtgcatcactaaggaccatacttggctgcctaatcacagtttattcccaaatcttactggatcaaaccacattcatcctctggaattttccagtctaactccaaatgaaa

SEQ ID NO: 172223 - DNA, 569 bp, Homo sapiens
cattgcagaactgcctactacaagctcttttgttaattttatcactgatcagtatgaagactggctattaaaaataatgagcgctacagtggcttgttagaatagcaggttagaaaaggtccctcactgctaactactccctactcctacataagcaaggtgaaagactttatctagcaaggccctagggtgatgcctgaggcttaactctgaaatagcatgtccagtcactaggttagaggatggttcacagtaaggacaaaattttgcccctgkagtcgtcacatccaagttgtgacgcaccttgagtaaactcttcctgcgagatgtggtggagtgcctaaagagacagctggaacttcattaggcttagaaactaggatagtagagctgttttgtgcctgattactaataaatcatagataataataaataataaaaataactagtaaatagataataaatacatatctgtatgtacagcagcatttatcatgaaatgtattttcactatcactagctcgtaagtctgcggggagcagctgaacgatacccacctaaaacttaga

SEQ ID NO: 172224 - DNA, 569 bp, Homo sapiens
cattgcagaactgcctactacaagctcttttgttaattttatcactgatcagtatgaagactggctattaaaaataatgagcgctacagtggcttgttagaatagcaggttagaaaaggtccctcactgctaactactccctactcctacataagcaaggtgaaagactttatctagcaaggccctagggtgatgcctgaggcttaactctgaaatagcatgtccagtcactaggttagaggatggttcacagtaaggacaaaattttgcccctgtagtmgtcacatccaagttgtgacgcaccttgagtaaactcttcctgcgagatgtggtggagtgcctaaagagacagctggaacttcattaggcttagaaactaggatagtagagctgttttgtgcctgattactaataaatcatagataataataaataataaaaataactagtaaatagataataaatacatatctgtatgtacagcagcatttatcatgaaatgtattttcactatcactagctcgtaagtctgcggggagcagctgaacgatacccacctaaaacttaga

SEQ ID NO: 172225 - DNA, 564 bp, Homo sapiens
aaatgtcacattgcagaactgcctactacaagctcttttgttaattttatcactgatcagtatgaagactggctattaaaaataatgagcgctacagtggcttgttagaatagcaggttagaaaaggtccctcactgctaactactccctactcctacataagcaaggtgaaagactttatctagcaaggccctagggtgatgcctgaggcttaactctgaaatagcatgtccagtcactaggttagaggatggttcacagtaaggacaaaattttgcccctgtagtcgtcacatccamgttgtgacgcaccttgagtaaactcttcctgcgagatgtggtggagtgcctaaagagacagctggaacttcattaggcttagaaactaggatagtagagctgttttgtgcctgattactaataaatcatagataataataaataataaaaataactagtaaatagataataaatacatatctgtatgtacagcagcatttatcatgaaatgtattttcactatcactagctcgtaagtctgcggggagcagctgaacgataccca

SEQ ID NO: 172226 - DNA, 565 bp, Homo sapiens
aagccaggtagaatgtcccaccacttctgggagtgaccagctaggatttgtgagggagctatgctgttagctggtacctcagattgtgtactactgctggcaggtacacagagctgccaccaagatctgtaggctggttgccatgggctctgtctccttgctttatctctacctgaccctaggtggtctagccatgctgttaccctctgtgttccttatgaagtgagactggagtggacttcttgggaagcatatcagaatgccagggaaactggatgtctgttttctattctattttcccactgtagaaactgtgggccctgggaaattttttctttsttgaactgagccatcttggggaaaggaggagcagtgggatcaaagtgagataatttctcttatccttcaaaggcaggtttttttttgtttgtttgtttgtttgtttgtttgtttgttttggttctgtgttctgtggtccatgcagctttctcaggcctttccaagttttgggaacacaagggtattcttgtctgtgaatagttgctagttgaactttctttgggag

SEQ ID NO: 172227 - DNA, 575 bp, Homo sapiens
aaagcatttggcatactcctctttcattgaatatatttgaagaacattttctttgtgttaataaacaaaataagtgagcaaaataaactttaatctctgaaatttggccaataaaaaaaaagaagcaaacatggtttagtaggatgccttgtcagtgttgaaaagtgggcccagaaggtctctactggggtgcaatcaagcgctcagtccttcagctctgtgcttgtcaaatccagggagcccagagcaagctaaatggctgttatgcttgataacagagctaatattaaaaataactttaagatactggaatgctgttaaaaactaagaaaagttaaaattcataggaaatgtatttataatatgtatatctccatatattttacattttaaatatatttgcattattgccgttaatccactcttagagctgaccaacagtgagacagactccttacagagaacactaggagagagtttacaaagtctatacagggaggcggtcagtgtaaggtgcagggtgacctttgttgaggagmtgaagaagtcttccttgtattcagagcctgactgaa

SEQ ID NO: 172228 - DNA, 462 bp, Homo sapiens
aagaaccagtgcaaaactctggcaattcaaaaagccagagagtgtcatcttacctccaaatgaccacatgagctcgacagcaaggattcttgattgaaatcactgaaatkatggcatagaatacagaatttgcatggcaaataaggtcgtccagatttaggagaaagttgaaactgaatccagggaatctaaggattccaataaaatgatacaggaactgaaagatgaaatagccattttaagaaagaaactgttcttctagaggtgaaaatctacaagaatttcataatacagtcagaagtattaaagcagaatagaccaatctgaggaaagaatctcagagcttgaagaccagttctttgaatcaactcagttggacaaaataaaaaaaataaaaatgaacaaaacctctgggaaataagggattatgtgaagagaccaaacctacaactcatttacatt

SEQ ID NO: 172229 - DNA, 451 bp, Homo sapiens
tcagtattattcagttttaagaaaaaataatttttctttgaaatgatcaatttttagattgaatttttatttgataaggtttgatttaattaattaaccatcagttacaggtttttgcaggatttctagtactataactaatgattcactgtgatttttgctgttgcttctcaccactaatacttagtcttttgtgatagccttgaacagcatccttgatggaaacagtaacaattttgatgaaatattttgctctatttgttatggtggaaagtcagtctactragcttttcctatgagatgtagcttgcctgtgaaggattctgattttggtaattttaagaaggcaggagaacactgtgggacacttacttggaatgaagttcccttgattttaaaaagaatttccttgcactgtgggagtctgttagtctatttcagagattattgt

SEQ ID NO: 172230 - DNA, 451 bp, Homo sapiens
tcagtattattcagttttaagaaaaaataatttttctttgaaatgatcaatttttagattgaatttttatttgataaggtttgatttaattaattaaccatcagttacaggtttttgcaggatttctagtactataactaatgattcactgtgatttttgctgttgcttctcaccactaatacttagtcttttgtgatagccttgaacagcatccttgatggaaacagtaacaattttgatgaaatattttgctctatttgttatggtggaaagtcagtctactgagcttttcctatgagatgtagcttgcctgtgaaggattctgattttggtaattttaagaaggcagragaacactgtgggacacttacttggaatgaagttcccttgattttaaaaagaatttccttgcactgtgggagtctgttagtctatttcagagattattgt

SEQ ID NO: 172231 - DNA, 605 bp, Homo sapiens
gttttctggttccttctcatttgggtaagctctgttagagggaaggtctagggctgaaggctgttgttcagattcttttgtcccatggggtagtcccttgatgtaatactcttccccttttcctatggatgtggcttcctgtgagccaaactgcagtgattattgtctctcttctgagtctagccacccagtgagtctacctggctccgggctggtactgggggtggtctgcatagagtcctgtgatgtgatccatctatgggtctctcatccatggataacagtggctgttccagtggaggtggcaggggtgtgcaatggattccatgaggatctttagctttggctgtttaatgctctatgtttgtgctggtggcacttcccagttgtagtagtgwggagagggaccagcagtgggcgggaccctagatctcccaaggttgtatgctctttgtgttccattaccagggtggatagggaaggaccattaggtgggggcagggctaggcatgtctgagctcagactctccttgggtgggtcttgctgctgctgctgctgctgctatgggggatggaggtgagattcccaattattggagttgtgt

SEQ ID NO: 172232 - DNA, 680 bp, Homo sapiens
cttgcaaacatctgtcttctctccctgtaatgctcgaagaggaaatcacagctagtgagcaatcatactacatgactcagaagggcactcttggagtgtgcctttgctattacctaactataaaactttggctattaaattcccaatcttcagtttgtctcataaagattaaaatgactccatggttgagtatttctgagatcaaaataaacaacagtatccctagcacatacttagtataaacaaagttataaaaatgtaagactcataaggtgacagaaaacaamtttattctctgtccgtaccaatccaatctatcctgacttttgggtaaaatatgaggcaggcctgtgccttttttggtcattcccaggttaaaaaaaaaaaaagaaaagaaaaatccccttcagaattttaaagaagggcactcttattctataaacttatgttccacaaaatagtcaaaatattgttttatttgaagttagaatccccttcttcagctttgctaaaggcaggaacttgaaatagaaacaaggaaacaagggtaggggaagctagaggggagagtataatagatttcttttctccttgatctgtcagctcctttctcaccttcatgactattatttcttagccctccatggccagagtgaagaaaaagatctataatttaaaag

SEQ ID NO: 172233 - DNA, 680 bp, Homo sapiens
cttgcaaacatctgtcttctctccctgtaatgctcgaagaggaaatcacagctagtgagcaatcatactacatgactcagaagggcactcttggagtgtgcctttgctattacctaactataaaactttggctattaaattcccaatcttcagtttgtctcataaagattaaaatgactccatggttgagtatttctgagatcaaaataaacaacagtatccctagcacatacttagtataaacaaagttataaaaatgtaagactcataaggtgacagaaaacaactttattctctgtccgtaycaatccaatctatcctgacttttgggtaaaatatgaggcaggcctgtgccttttttggtcattcccaggttaaaaaaaaaaaaagaaaagaaaaatccccttcagaattttaaagaagggcactcttattctataaacttatgttccacaaaatagtcaaaatattgttttatttgaagttagaatccccttcttcagctttgctaaaggcaggaacttgaaatagaaacaaggaaacaagggtaggggaagctagaggggagagtataatagatttcttttctccttgatctgtcagctcctttctcaccttcatgactattatttcttagccctccatggccagagtgaagaaaaagatctataatttaaaag

SEQ ID NO: 172234 - DNA, 574 bp, Homo sapiens
atttaatactatttttatcgaactaccaacgacattaattttttaaaaatttcaatagctgttggggtacaggtggaatttgattacttgagtgaattgtatagtggtgaagtctgagattttagtgtacccatcacccaagtagtatacattgtacctaatatgtagttttttatccttcacccctcccccaccctcctccttctgagtctgcatccaagttgctgcaaaaaaatttcattctttcttacggctgagtagtattatatggtgtatatataccatattttctttatccattcattggccaatggcttttcttcagacaattaggaaaaagtattctaaaattcatatgggaccaaaaagactccaaataaccaaagcaatcttaagcaaaaagaacaaagctggcggcatcacactatttgacatcaaactataatataaggctgcagtaattagaacagcatagtgctggtacaaaaatagccacatagaccaattgwacagattagagaaccctgaaataaagccaagcacttacagccatatgattattgatgaagctgat

SEQ ID NO: 172235 - DNA, 544 bp, Homo sapiens
agttagtttttgcaggggtgaactagttctcacaagagtgagttggttctcaagatagcaggttattatgaaagcaaacttaacttgctcttgaggtctttttcacatgcttcacttacttttgtgttcttccaccatgaaataacacagcaagaaagccctcatgaaatggtactgccatgcgcttgggctttccagcattcagaactgcaagaaatmtatttcttttctttataaattactcagtttatggtattctattattgcacagaaaataaactaagacacctttcctccgcttttcaataataagtacctcatttttgtctgagacctcaccaatatcacctttagtattcatatttctaccaagagtcccttcaaggcagtctaagctttttcagcaggcacttcaaaactcttgcacctccaaccatcacctagttccaaagctactttcacatttttcactatttgttacagcatcaccctaccttttggtaccaaaatcttgtctgttagggcaatcataacaaaataccag

SEQ ID NO: 172236 - DNA, 592 bp, Homo sapiens
attttctaactgaggagactatagggtaccaggttgcatttcattttttcatgaaatagctatactcacattaactgttatttgtgctttggggaacactttttttttccactctgagtcatgtaacgtcaaaggcaaaatgagcagtagtggccggtggtctagctttggttgtaggtctyctctgcctttcatctacctacctctaatcttaagaaaggtattgtccacatgatcttggtattctcccatcattccacactggtattttaagacaaaaaccagaatgataaaacttacttatttgctggtccaggaattctatactctttgtgcctcacattgaaggttgttggtaaacttttaattcctcaagataatcacagcaccttaaatttgcctgtttctataagagtgggaggcatttttatgtaaataatctcttttgatcattatacaatattttgacgtaactaatgaattattattgtcctcactttgcaaatgttctgagccaggccttgtgattagtgttgtcgatacgttattgaataaaattggcatggtttctttcctcatgaaaattagagtt

SEQ ID NO: 172237 - DNA, 480 bp, Homo sapiens
acctgaaaccataaaaattctagaagaaaacctagaaaatactttctgggccttggctgaggcaaataatttatgaataagaccccaaaagtgaatgtaacaaaaacaaaaataaaaataaataaattggacctagtgaaactaaaaagcttctgcacagcaaaagaaatacttgtcagagtaaatacacaacctgcagcatgggagaagatacttgcaagttatgtatccaacaaaggtcttatatccaaaaatctacaaggaacacaagtaaaccagcaagaaaaaatccctaataaacccattaaatagtgtgcaaatgaaacgaatagacatttctcgaaatagatatttttcatatatacatgaccaacaaacatatgaaaaaatgttcaacgtcagtaatcatcagagaaatrcaaattaaaaccacagtgagatactaccttaccccagccagaatggccataggccataatt

SEQ ID NO: 172238 - DNA, 410 bp, Homo sapiens
catacaacctaccaagattgaaataygaagacatggaaaacctaagcaggtcaataactagtaacaagattgaaactataatataaagtctcccagtaatgaaaagcccaggacctaattgcttcactgctgaattctatcaaacttttaaagaagaactaaggaataactggctagccacatgaagaagattgaaactggactccttttttacaccatatacaaatatcaactcaagatgcattaaatacttcaatgtaaaacctaaaactataaaaaccctggaagataacctaggaaataccattctggatataggacctggcaaagatttcatgacaaagacaccaaaagcgattgcagtaaaaataaaaattgaaaaatggggcctactgcaaagcaagcaaact

SEQ ID NO: 172239 - DNA, 417 bp, Homo sapiens
acctaccaagattgaaatatgaagacatggaaaacctaagcaggtcaataactagtaacaagattgaaactataatataaagtctcccagtaatgaaaagcccaggacctaattgcttcactgctgaattctatcaaacttttaaagaagaactaaggaataactggctagccacatgaagaagattgaaactggactccttttttacaccatatacaaatatcaactcaagatgcattaaatacttcaatgtaaaacctaaaactataaaarccctggaagataacctaggaaataccattctggatataggacctggcaaagatttcatgacaaagacaccaaaagcgattgcagtaaaaataaaaattgaaaaatggggcctactgcaaagcaagcaaactatcaacagactaa

SEQ ID NO: 172240 - DNA, 559 bp, Homo sapiens
gttgacaacaatagaaggaactggttgtgcaatacacaggcactcttcaytattttcacaagttctctgtaaatctgaaattattctaaatttttaagcactatgtaataccacctatataatgcacaacctatataatggttaaaatcactgcaaatgccatttggcaggacaggagattgaggctcaaaatacattgggggacctttcaaaggacacagagctaataaataagtaagtattggagccgatggtaggccgacaatgtgggacctgagtgcttttcactctgcagcctgattctgcaaatttgtagaaactaagtccaggaaatgacaatcaaagatgaactgccgcaggcagcaagtataaaatgctggtattccacttatgaacaggatttaataatccttccttactcctagttttcagtgtttaataaaattgctatgactttcttcaaacatttgctttcttgatcaagaaagaaaccttttctattggaagtagtccaattactattaattcattttctaaaaaagcaagaggaatgaaacta

SEQ ID NO: 172241 - DNA, 429 bp, Homo sapiens
aatgcaagccacatataaaatttcaaattttccagtggccacattataaaaaataaaaagaagcaggagacaaaaattttaataattattttcttttacctagtacatccaaaatattatcatttcaatatgcaaacaatatacaaattattgagatagtttacatcctttaattcatctcaagttttcaaaatctcatctctatttttcacttaaaacacttcttgtttcaaactagtcatatatcaagtgtgtgcagccacttgtggttagtggctgtcatattgggctgtgcaggtctaataggtttaatagagaagagttgtgttcacatcttgtgcttaccacttaaawgtctggtgatgtctaacaagtaacataacttttgagccacagttttctcatctgaaaaaaatgtaaattgggaat

SEQ ID NO: 172242 - DNA, 443 bp, Homo sapiens
tgttgagctgagattgcatcactgtactccagcctgggtgacagaacgagattttgtctcagaaaaaaaaaaaaaaaaaaaaaaaaaatatatatatatatatatatatatatgtatatatatgtatgtatctatatatatattcactgtcacaracaaaggttttattcttctctaggtattcctccttaaagccacttttttcctcaaaaattcaaatattcaggaaagacaatgcctatggggactaggaggaacaggactagtttaaaccaacataaaatgtcctcatctgtcctcttagctgaagttagttaggttttaggggttattttcatcttaaaaatgtatacccagaaaacctaacataatttgtctagatagaaaattttcaaacatgtttatgccaaattatttttcccctatgattttcaatcccaaat

SEQ ID NO: 172243 - DNA, 443 bp, Homo sapiens
tgttgagctgagattgcatcactgtactccagcctgggtgacagaacgagattttgtctcagaaaaaaaaaaaaaaaaaaaaaaaaaatatatatatatatatatatatatatgtatatatatgtatgtatctatatatatattcactgtcacaaacaaaggttttattcttctctaggtattcctccttaaagccacttttttcctcaaaaattcaaatattcaggaaagacaatgcctatggggactaggaggaacaggactagtttaaaccaacataaaatgtcctcatctgtcctcttagctgaagttagttaggttttagkggttattttcatcttaaaaatgtatacccagaaaacctaacataatttgtctagatagaaaattttcaaacatgtttatgccaaattatttttcccctatgattttcaatcccaaat

SEQ ID NO: 172244 - DNA, 443 bp, Homo sapiens
tgttgagctgagattgcatcactgtactccagcctgggtgacagaacgagattttgtctcagaaaaaaaaaaaaaaaaaaaaaaaaaatatatatatatatatatatatatatgtatatatatgtatgtatctatatatatattcactgtcacaaacaaaggttttattcttctctaggtattcctccttaaagccacttttttcctcaaaaattcaaatattcaggaaagacaatgcctatggggactaggaggaacaggactagtttaaaccaacataaaatgtcctcatctgtcctcttagctgaagttagttaggttttaggggttattttcatcttaraaatgtatacccagaaaacctaacataatttgtctagatagaaaattttcaaacatgtttatgccaaattatttttcccctatgattttcaatcccaaat

SEQ ID NO: 172245 - DNA, 392 bp, Homo sapiens
gattagcaatagcagggagcyatttaccttccctgtgcctaaaggagcaagggaagtaaaatttggatctataggagagtggcagtcctacagtagctgtggccatagagggatgtagccactggcactgttggtactgggcacagagctcggggagatagaggccaactagtaaaacaccatgctttctgttctccttttctctgatcccctatcagtgtctcttattggttgactccaaagggaagcttggaagtgaaaaagcaaaggagatgcagtccacaggggtcagcctccctaattacaagcagggcacagaaggacaaaccttggattatggggttttggggttaaaagagagtaacagaataactggtatgtttgcattgctg

SEQ ID NO: 172246 - DNA, 631 bp, Homo sapiens
tcaagagtggtatgtagaacatctatggcaattagaaatttgagcagtggtgcattttttaaatgcttaaaagtgagtaaatagaaacatgtagagttcagctagagttttgaatggagccaagagtggcagtttttgtttgtttgttttgccaaaaacatgtttgtcaagaatataatttccttttctttagtttccaaatatgtgcagtattaccattttgtatgtcaacaaatactatttattgatagtttggtaaattaatcttctttaacccatctgtcttgtttacctgagaatttttgttttcttagtttactgcatttgttaaaactacttctacagattagtacttagcttctctcttttcctctcaccgtgtcattacattttgttatattgggctacttcycattattgattttctgtaaattcttcataacagatcttgtagcagagtccctttgagaaaagtaactgaaaattataacaaatattttacaggtacttactcagcaaaaccttttagccagctttgttttttttaatatttagaatccattcatcattggttgctttgttttccgtgtcacattcttattatttaagtgactagtctatttaggtacta

SEQ ID NO: 172247 - DNA, 582 bp, Homo sapiens
gaattcaggcagaaaaaataattgcactaaataagtatgagtaattcttccatgttatttttttgtttgtagaagtaattgcaatatatctaatcaaaatcacctttattttattgataatcctgagattttgatgtctcaaagagcaggaaaatctgtagttaagtcttggttagactcctatactttaaatacttgtgtagcttayaacttttatttttttgcttggtttgattttgcatgaggggagataaatatcaatcaatcccaaaagtaatcccactctatatatgctgtcagatgaagcaccatattgttggactgtatgtattctaagaattttcctggtgttcttcacccctgatatgatctacatctgaggttttgtgatgctacttgtttctcaccagagagtctagaagaggagcatttttagaatctctaggaaaagattgaaacctcggacaattttctcagtcctaggatgctgatataatttaaattacaattaatattaaacatactcttttgctataggttctcatactctgggtatcctttactactagtccagtacaatag

SEQ ID NO: 172248 - DNA, 556 bp, Homo sapiens
cactacagtgtaatgctatgcactggggcaagacagtccaaggggtgattacatttaatcattcytcacccagtattatgtaacctgtaccaagtgagccaggcttaatgccattactcacagagatttacatatagaatatgaagttttaagtcctttgtttctttatatgaatatttgtggctcttatataaatattcctaaagaacaagctctgaaaaagtggaataattccaaatgttgaaaatagttttggactctattttgcaagtgttaacaggtttggacacatcagtcatttacacttaaacaaattaactcatagtatttcctatgaaaaacaactcccactggtctctctttagatattatttaacttttattagatgtgcccatttgcaagggaatatttctgtatgtgtttcttgttttagtgcagaattttctgtaaatcattcggtctacatctataacttttaaatatattttatatattcacgctttctattaatcttcttactttttggttttgacttttttcccctttacattttgt

SEQ ID NO: 172249 - DNA, 556 bp, Homo sapiens
cactacagtgtaatgctatgcactggggcaagacagtccaaggggtgattacatttaatcattcctcacccagtattatgtaacctgtaccaagtgagccaggcttartgccattactcacagagatttacatatagaatatgaagttttaagtcctttgtttctttatatgaatatttgtggctcttatataaatattcctaaagaacaagctctgaaaaagtggaataattccaaatgttgaaaatagttttggactctattttgcaagtgttaacaggtttggacacatcagtcatttacacttaaacaaattaactcatagtatttcctatgaaaaacaactcccactggtctctctttagatattatttaacttttattagatgtgcccatttgcaagggaatatttctgtatgtgtttcttgttttagtgcagaattttctgtaaatcattcggtctacatctataacttttaaatatattttatatattcacgctttctattaatcttcttactttttggttttgacttttttcccctttacattttgt

SEQ ID NO: 172250 - DNA, 556 bp, Homo sapiens
gaattcatacaacacaattctttttctattttgtgcaatgtaaagactcaatgattagttcatcaacagctgtagttcagtgaaattacatcatttacacctgacctgaactagtgtctgatgttgattcacatagaacagcatcccaaggctgggatgatgagattacagtgtgtgtaacctgggaagcaataatgtaatagcatatgtgtagcgattttaagaatgaaacgttttaattttatattttcaatttgtgatattcttcccagtccaytgacttaagaaagtcaatgttttcttatgacttttctatgtaacaccctcttcttccaatgttcttatgtttttttaagctcttttaaactcttttctccttatttgtcactaatttcttcacttgaccttattttgttcttcatcttaattcctattctttctttgatgctcttctctaacttccttattctgtctttcacttttctgtttttatttcatgtgcatcatctgcaattttaaaaagctccagtgcattccataggcattaatttaattc

SEQ ID NO: 172251 - DNA, 409 bp, Homo sapiens
cttcaaaggagagaaatcatgtaatagtaaccatttgagtactaatatattttttaaaaggcgaacaaaaattagccattttcactgatacagcaatatgactgtgtctatatttgttcttatgtttcttatatatattaaatgaaagtttaaaaataaacacaaaataattataattagaagactcattaatttagttttacatatgctcgttaatttaatttaaaaatatttaattgagaacctagtctcaattaattaagcccaaaatattataattgtcttttacataaatgagaaactttttttcaataaaatgtcactattccatatgttggccctgtaatggttaaaaaatgaacatggttcctgccctcgaattaatkagcaagataatggcagaaaatgg

SEQ ID NO: 172252 - DNA, 569 bp, Homo sapiens
ttggtctgtagtttgtttgagtgttctttctttctttctttctttctttctttctttctttctttttctttttatatgtcatctttgtctggttttgctatcrgggtaatctggcctcatagaatgagtttggaattaccctcacatcctacattgtttggaatagtttgagtaggattgatattagtgttacaggatcctttgggtgtcacttcattagccagcaacctctgtggccagtggcacctttgcccgagttttgcttgcgcccactgggcccactcagcctgacaagcatactcggcttgcacttctggcctggatcccatgcctgccaagcatgtggagcagcaaggagtgtgtgagcaagtgagcatggggtctggttactgtgcatagccaggcatgttggctgcggtagggtgggcagctccaggcactggtatgggtgccggctccctgcaaggctgcagctggacaaggtgtcccacaacagcttccacagctggcactggggaatgtggtggcacctggaagcttggagacgccaggaactgcagagcccccaa

SEQ ID NO: 172253 - DNA, 514 bp, Homo sapiens
ggagcagcaaggagtgtgtgagcaagtgagcatggggtctggttactgtgcatagccaggcatgttggctgcggtagggtgggcagctccaggcactggtatgggtgccrgctccctgcaaggctgcagctggacaaggtgtcccacaacagcttccacagctggcactggggaatgtggtggcacctggaagcttggagacgccaggaactgcagagcccccaaaggggtgtcacagccctggctcagggagctcctaggtctggaacacctgaagggctgcagctcttctctcttctctccttttcattgcctgcaatgtggtaagcaaggggcgtgtttcagctccttttgtgttacagctctttcagccctggcattcagtgggtcccaagttattgtcccatgtccaggaagaatgagatatgtagagaagtggaggataagaaagatgaagagtagctttattgagtgatagagcagctcagaggagaccttcagtgggtagctcctc

SEQ ID NO: 172254 - DNA, 514 bp, Homo sapiens
ggagcagcaaggagtgtgtgagcaagtgagcatggggtctggttactgtgcatagccaggcatgttggctgcggtagggtgggcagctccaggcactggtatgggtgccggctccctgcaaggctgcagctggacaaggtgtcccacaacagcttccacrgctggcactggggaatgtggtggcacctggaagcttggagacgccaggaactgcagagcccccaaaggggtgtcacagccctggctcagggagctcctaggtctggaacacctgaagggctgcagctcttctctcttctctccttttcattgcctgcaatgtggtaagcaaggggcgtgtttcagctccttttgtgttacagctctttcagccctggcattcagtgggtcccaagttattgtcccatgtccaggaagaatgagatatgtagagaagtggaggataagaaagatgaagagtagctttattgagtgatagagcagctcagaggagaccttcagtgggtagctcctc

SEQ ID NO: 172255 - DNA, 389 bp, Homo sapiens
gtgaaaccccatctctactgaaaatacaaaaagcagccaggtgtggtgttgcttgcctgtaatcccagctactcaggaggcagaggcaggagaatcgctttaaccttggaggcggaggctgcagtgagccaagattgtgccactgcactctagcctgggcaatgatgcaagactccatctcaaaaaaaaaaaattatctctggattacttataatacctaatacaatgtaaagattatgtaaatagtcatactatattgtttttagagtttgkctttttttatttttatttttgtttaatttttgatctgcagttggttgaatcaatggatgtggaactcatgaatacgaaaggcctgctatatatacacacacattgatatagctata

SEQ ID NO: 172256 - DNA, 609 bp, Homo sapiens
gggaatgtctaaataactgaaggcaaatcacagcaggatgtaaacgtgcttagagtcttctactagggcagcatcacggtgtaattcctgactctgtgcatatgcagcatgaaaacctgcctagtagaaaaagaaaaatggaagaaattttggaccagtgccgttagytcacttgaatataaatgtagccaaatcctccagtctctcaaaacttgcattactagattgaggatcttcatgccactattttatgtaaatgtatttaataactatcttccaaaaaaaagtctaagtaaatctgtgatgttctttctaaccagcaaaacaatagccactatgactaatctttgttaagcttctgtaagagaattacatggcatgcgtaagtgtgatttcttattaattagccttttttaaatagaaaaaaattatatttctacttatgtatatgtgcaagagatttttaaaatccagttttcttaaaattgaagtttttgtttagtacaatgaatgttcaaataaagatcactttcaaacatgccattttaatatcacattagatatacactaaaatacatgaaaatcatttatttatcaaatatttattga

SEQ ID NO: 172257 - DNA, 560 bp, Homo sapiens
ataaaaacaatgttttgcttatttagctggtttcatagttgtgccttttaaaagaatgttagtccatgttactttgcagtgcttttctgtccatttagtaatgttggcaacagtgatccagcttgcgagccccaaggttacatctatagccccagcatgggacgggagacctgctgggtgtggggaagaaggagagccattcccacagtagcctgacacccctgaacacagggcttcctgggtgtacatccctgggatgtatccactcagtcccctrtggacatgattctttaggattgcagcctgactttcatttctttccaatggagaaagagttctattttcattgttacatatgtgattatgaacatttccaacaaaacatagcaaataaaattatccctttaacctcacatctgtccctcctccctcccactcagtgatatcattgttaatggtttgccatgcattttttccagactttctggacatagaaaataaattttcaaaaaaaaaggtgtatattacatatggtactctgtagtctctttttttctgaa

SEQ ID NO: 172258 - DNA, 587 bp, Homo sapiens
tgaagaaagacaatttaatgggtgataattttgtatagaattttcaaattgatttcttggtagtaaattgttcctcaattgtagtgccttctccacactcattagacagcaagccttctttctaaatgcattcataaccattaaagtgttgtctctagtttcctgtcatttgaaacaggtcataacttcaggcacaaacatttaaaggacractatactttcacaatttcattagtgttctagcggagtcggaatgtgctattgaagtttatagagctttgcagttcctgatggaaactattcggctctactcatcccaagagtagagataatctttctctttgtacagaaagttgtttcacttcaattccactctgcctgagttttatttatcagcctgatctatggctagaactatatagaagctccctagaacctgtttataattcacctcccctcctctttctccaaaaacaccctgggaatagaacaagctcattgccaaggaaactccctggcagtaaagtactgtttggtcctattttctactggcttctttgacttgttgggagatggtgtttaaatgc

SEQ ID NO: 172259 - DNA, 419 bp, Homo sapiens
tgaattcaaataaattcaacctttggactctgccccccagaacattgagcatttatattcactcacctgaaattattaatatttatgtggaaaagcctggaaataactgaaatctctcattgctgtctcaaagatatgtttgcgtgacctatctcaggtcacacagtctgttagaattagagctggaaatagaacccaacacttcccaaaagctgyggaaaggccttggcatcaaatattgccttctctgtcaccaccagagaaggctaaaaagagacatcattaattaattaatcagatgcttttgagggattaaggcagtaaggaaggaaagaaaaaacattttggtattaaccacatactcagcaacttggttttatgaattaacaaaacatggagagataagctgaggctcagag

SEQ ID NO: 172260 - DNA, 419 bp, Homo sapiens
tgaattcaaataaattcaacctttggactctgccccccagaacattgagcatttatattcactcacctgaaattattaatatttatgtggaaaagcctggaaataactgaaatctctcattgctgtctcaaagatatgtttgcgtgacctatctcaggtcacacagtctgttagaattagagctggaaatagaacccaacacttcccaaaagctgtggaaaggccytggcatcaaatattgccttctctgtcaccaccagagaaggctaaaaagagacatcattaattaattaatcagatgcttttgagggattaaggcagtaaggaaggaaagaaaaaacattttggtattaaccacatactcagcaacttggttttatgaattaacaaaacatggagagataagctgaggctcagag

SEQ ID NO: 172261 - DNA, 593 bp, Homo sapiens
aagcttgatgtctcttggcctgacctcatttactcccagctcagggccagagctagtgtgtgtggctggtgtaactcaacccagtaccaacttgtcagatggctgtggtcccctgggactttccaggcactgtgcagggagaagcagactgggagcwtgcaggtgcctctgcctctggattccacggggcacagcagggcagggaggaagagggtggcaggaggagacaaggggcatcagttaattaccaattaccaggcgcctttgcaaacacaaagcctccacctgaatgataaacgttattaatccagctccattttgccagccgcaatgtttctacttgcaaatttagagaattctccaagggagcagcagattgcttatcccacaaaacttccatcttagctcatatactgactggctgaggcctgcaggataaaattctccttggcaaactatctacaacacaagttgcataacatctatgcaaataacagagaagagaaactttaagaaacatgccatatatgtttttacctaaacacagtcactcacatttttaaggcactttaaaacttataaaatacatgcat

SEQ ID NO: 172262 - DNA, 579 bp, Homo sapiens
ctcatttactcccagctcagggccagagctagtgtgtgtggctggtgtaactcaacccagtaccaacttgtcagatggctgtggtcccctgggactttccaggcactgtgcagggagaagcagactgggagcttgcaggtgcctctgcctctggattccacggggcacagcagggcagggaggaagagggtggcaggaggagacaaggggcatcagttaattaccaattaccaggcgcctttgcaaacacaaagcctccacctgaatgataaacgttattaatccagctccattttgccarccgcaatgtttctacttgcaaatttagagaattctccaagggagcagcagattgcttatcccacaaaacttccatcttagctcatatactgactggctgaggcctgcaggataaaattctccttggcaaactatctacaacacaagttgcataacatctatgcaaataacagagaagagaaactttaagaaacatgccatatatgtttttacctaaacacagtcactcacatttttaaggcactttaaaacttataaaatacatgcatattcagtgcc

SEQ ID NO: 172263 - DNA, 579 bp, Homo sapiens
ctcatttactcccagctcagggccagagctagtgtgtgtggctggtgtaactcaacccagtaccaacttgtcagatggctgtggtcccctgggactttccaggcactgtgcagggagaagcagactgggagcttgcaggtgcctctgcctctggattccacggggcacagcagggcagggaggaagagggtggcaggaggagacaaggggcatcagttaattaccaattaccaggcgcctttgcaaacacaaagcctccacctgaatgataaacgttattaatccagctccattttgccagccgcaatgtttctacttgcaaatttagagaattctccaagggagcagcagattgcttatcccacaaaacttccatcttagctcatatactgactggctgaggcctgcaggataaaattctccttggcaaactatctacaacacaagttgcataacatctatgcaaataacagagaagagaaactttaagaaacatgccatatatgtttttacctaaacacagtyactcacatttttaaggcactttaaaacttataaaatacatgcatattcagtgcc

SEQ ID NO: 172264 - DNA, 437 bp, Homo sapiens
ccatggtttcatgactctcaatctctacttaaccaggaactcctacacttttatctctttattagctagtccatggtcacatactcaaatagagtcttctcagcagccagggtcactataacatatttttttaaagggacagaaattattggtgtgaaggggagtgagagagtggaatattaattgtgagagatatgcaatgtacattgaastcctgctagatcctaggcatcatactgagaatttatttaatccttaccaaaacctattcaatggattgcattgtccccattttacagatgagaaaataggagctccatgtagctcacccagctagtgtgtctccaacagaggcaaggccccagcatggacctgtctgactccaacgccagtgttattccagccccactcactccggctcatgagtgcagggcaat

SEQ ID NO: 172265 - DNA, 313 bp, Homo sapiens
aaagggcgaagatgtagactgcagtgagagaagcaacccttcttgaaattaataattcaaggtaaaattacaaaacttaattgctccctgtcagccgcagctcatccttgtctaccgttattttgcacaaattgatttggcagccaccacattcatttttaaaggactttcttattatctatagcctgttaatatgttcattcttcacccttgtaagtaattccaggcagatttttactcmtttaccatgaatgaagctcacatttcagaggagaagggaaattgtccaagaaatgtcatcccagaggacaca

SEQ ID NO: 172266 - DNA, 457 bp, Homo sapiens
caacagttacgtgacatctcctattcgaacttaaatccgcttaataaaatcatggcgattacttattttgtgacaggtacttgtgctaggtgttgagcccaaagtagtggcacagacctaatccctgtcctcaagtaacttaccaatgattcacaatctatttgtttaacagtgtaagagggggcagctccgagtggattactttatgactccctacctcagagaagattatagtccagaattttaatgctctcattcagggctgatgatgatgcagaggcataaataaaaggaaacactagtttgcgattggatgggggagaaaagggaggaaagtcatgtggggagggagggagcttgttgtgaagctgggaaatggaagggtggaaaccatgtstaggatggctttctggaaaaatagttgcaaagattttcatcaccacggagtcctgttctt

SEQ ID NO: 172267 - DNA, 560 bp, Homo sapiens
ataaaaacaatgttttgcttatttagctggtttcatagttgtgccttttaaaagaatgttagyccatgttactttgcagtgcttttctgtccatttagtaatgttggcaacagtgatccagcttgcgagccccaaggttacatctatagccccagcatgggacgggagacctgctgggtgtggggaagaaggagagccattcccacagtagcctgacacccctgaacacagggcttcctgggtgtacatccctgggatgtatccactcagtcccctatggacatgattctttaggattgcagcctgactttcatttctttccaatggagaaagagttctattttcattgttacatatgtgattatgaacatttccaacaaaacatagcaaataaaattatccctttaacctcacatctgtccctcctccctcccactcagtgatatcattgttaatggtttgccatgcattttttccagactttctggacatagaaaataaattttcaaaaaaaaaggtgtatattacatatggtactctgtagtctctttttttctgaa

SEQ ID NO: 172268 - DNA, 396 bp, Homo sapiens
ttaaaaatagcttctacatattttccttccgattcaacttttataacaccaagttaaggcattcgcrttttgaaccatcttacctaataaaacaattacaagtataatacaagtttatcagttccaatggttttcatagaaacaaagttaatttaacttgcctaccttagggcaacctcagaaatgaattgaactaaattccagtctacttctgcctctgctcttgaaatcttttagaatcgctgaagaggctgacctatttggctctcttgagaatcaaatggatgtctcttgtacatggaagggatacagaagtaaaccacttgacctctcatgaccagttgcttaagcttctgccgttgcattaaagctgatagagcccagaaaaaaaactgt

SEQ ID NO: 172269 - DNA, 468 bp, Homo sapiens
aaatgcttcactgcattaatttagtatagataatagtccagattttagagtattatcttattaatgagaaatacttatgtgaagttgtattaaattaagggctagcttgagtctaagataaagtaacaagataaaaaatctttttggttttcattagaatgacatctacagctaagttttttatgcttctcttgaaatatgaggtacttccttagtaagaaaaattttggaaaggtcccatgaaacacwtctcagcagtcttttcacagcagtttaagattttcaaaatatatctgctcagggatggaaaatttaaaattcttgagacttcaactgtgtttctgacttatttagtaggtttgtgtcactgttaaggcatgaggacacattctccattatgtgttgtcacaccagtaacaaaggaaggtggttaaaaacccacgaaagtggttttgtaaactctctatg

SEQ ID NO: 172270 - DNA, 391 bp, Homo sapiens
gaattcctactcccttctctttctctaataacatagacattaaataattcatcacataattcatactgtgttaggtattaaagggggtatcagaatacaattttaaaataaaaccaacaaacatgacaacttctattaaaggccagtagttgttgaagaaacactaaaaagaaagttattattttgaataaaagaagcttaccaagctatgtgtggcttggtaagtatgtaattaamgatccagggagttgcataattttattaaaatggaactgtaaatcaaatggcttaaacttttataatgtcaaacattggttgttacaaatgagggtgttcattgaaggccatataatgcctttataaaatgtgtagcaagaaacttcaggaacgt

SEQ ID NO: 172271 - DNA, 579 bp, Homo sapiens
cctctacagcagtgagtgagaggatagcctatcatgaggtgggagtgggggtgttgccttaacttccaaatgctaactgggtgtagaatctatctggcaagttatttcatctcaggcctttaaaattattattgtattgacttctacatgatatttgtattatcttctgccagtctacattttgttcctttgtaggtaacctgttttctcactatgataamtctgaatagttacactttatgtttgaggtctacaatttcactgtgatgtgtatatttctttttatttctgtttcttggtatctgtgatccctgaatcttaaagttcttattctgtttttcttacaactcatattcatcaattctggaaaatccacattatctcttcaagtatttcctcttacccatttttaatattttttcatgttggaattcttaagttggactttctcattctattctgtcctttcatttgtatctgttaatagagtgactaaccattcagatttgcccaggaaaaaggggtttcttgagacgtgggaccttgaatactaaaaccaggcaaaccaaggtcgttggt

SEQ ID NO: 172272 - DNA, 549 bp, Homo sapiens
aaaattattctatttttccaatctttagtctctgctaaagcagttagaaaaaggttttgattgaatgtcacaaaacaaaaacaaaaacaaaacaacacaactcttcagccagagtaagactcaagcaaaatggatgtattaacaacttatgccaggcgtggtggctcacgcctataatcctagtactttgggaggccgaggtggggtggtgggtggattgcctgagctcaggagttcgcaaccagcctgggcaacacagtgaaaccccatctctactaaaatacaaaaattcagcctggtgtggtggtgtgtgcctgtagtcccagctacttgggatgctgagtcaggagaatcgcttgaactcgggaggyggaggttgtagtgaaccgatatcatgccactgcctgggcgattccgtctccaaaaaacaaaacaaaacaaaacaacttatactttatgacatgaggagcgctgactcatttctaacctacttacaactagaaatgagagattcattgttttttttttttccccttttatttatttatt

SEQ ID NO: 172273 - DNA, 549 bp, Homo sapiens
aaaattattctatttttccaatctttagtctctgctaaagcagttagaaaaaggttttgattgaatgtcacaaaacaaaaacaaaaacaaaacaacacaactcttcagccagagtaagactcaagcaaaatggatgtattaacaacttatgccaggcgtggtggctcacgcctataatcctagtactttgggaggccgaggtggggtggtgggtggattgcctgagctcaggagttcgcaaccagcctgggcaacacagtgaaaccccatctctactaaaatacaaaaattcagcctggtgtggtggtgtgtgcctgtagtcccagctacttgggatgctgagtcaggagaatcgcttgaactcgggaggtrgaggttgtagtgaaccgatatcatgccactgcctgggcgattccgtctccaaaaaacaaaacaaaacaaaacaacttatactttatgacatgaggagcgctgactcatttctaacctacttacaactagaaatgagagattcattgttttttttttttccccttttatttatttatt

SEQ ID NO: 172274 - DNA, 467 bp, Homo sapiens
ctggcatatgttatattcttgatgtgtttttgaaacaaatgaatgaatattaattggcttaacacttccattttgcacagagagccagtatgacatgaactcacctatttgaaacaggtctccttgagatccccagtttactctagcctgactcccttccttatagcctagaggtattgctgatattctctgagtgccaatgtgccgattccagaccattttgtttgcctattatgtaaaatttttcttctrttgagctctataccaacccattggtattattattattattattattattttgagatggagtcttgctctgtcatccaggctggagtgccgtggcatgatctcagctcactgccacctccgcctcccagattcaagtgattctcctgcctcagcctcccaggtagctgggattacaggtgcccaccaccacaccctgctaatttttgtatttttag

SEQ ID NO: 172275 - DNA, 279 bp, Homo sapiens
actgccatagaacaacagttaaatgacctattagaaaggggggaataaaaaatatattccttgtcaccagtgtcacagagacaaaaatgagataatttcaagaggaaggggcttagtcagtagtgtcaaatgttacaacgtggtcaagaaagatgaagscattagatgtggtgattgtaaggtaactagtaacttagaaggaagcaatttccatagcttgattttggtagaagccaaaagaaaaagagttgaagttggaacaaataacgaaaaagtcca

SEQ ID NO: 172276 - DNA, 567 bp, Homo sapiens
ttcctatggagagaacaacctaagagaaagactttgcccaggtagtttttcattgttgttttgttttttgtttaagggagtgaggagtagaggtctgcgaaaagtgyatccagaaagcagggaaaagccaggtgtgatgctcacacctataagcccagtgactttgggggaggctgaggtgggagaatcacttgagcccaggagtttgagaccagcctggacaacatagtaagaccctctttcaacattttttttaaaaattagctggctttggtggtgcacacctgtagtaccagatactcaggagactgaggcaggaggatcatttgagcccaggaagtcaaggctgcagtgagctatgatcataccactgcattctagcctgggtaacagagcaagattctgtctgaaaagattaaaaataaataaagaaataaaaataaaggagcaaaggcagatataggagtatgcctgtgggctggtcctcccttcagcaggcacctgagtcttggtccctctgagatccttttagtcagtgtgatggtcaataacaggtgtcaagttgat

SEQ ID NO: 172277 - DNA, 511 bp, Homo sapiens
gaattcttattttattttattttttaaaatctgtataaagtggccaggcacagtggctcatgcttataatcccaatattttgggaggctgaggctggagggttgcttgagaccaagagtttgagaycagcctgggcaacagggtgagacctcatttctgcaaataaaaataaaaataaaaaaattagctgagcaaggtgacctgtgcttgtattccccactactccagaggctgaggcaggagaattgcttcagcccaggagtttgaggctatagtgagctacgatcatgccactgcactccaacctgggctacagagtaagaccccatctcaaaaaaaaaaaaaaaattatgggttacaagtgtaatttatggatagattgcataatggtgaatcagggcttttagagtatccatcactcaaataacgtacatcgtactcattaggtatgtttttattatccacctccctctcaccctctctcatgcttctaagtctccattttgtatca

SEQ ID NO: 172278 - DNA, 511 bp, Homo sapiens
gaattcttattttattttattttttaaaatctgtataaagtggccaggcacagtggctcatgcttataatcccaatattttgggaggctgaggctggagggttgcttgagaccaagagtttgagatcagcctgggcaacagggtgagacctcatttctgcaaataaaaataaaaataaaaaaattagctgagcaaggtgacctgtgcttgtattccccactactccagaggctgaggcaggagaattgcttcagcccaggagtttgaggctatagkgagctacgatcatgccactgcactccaacctgggctacagagtaagaccccatctcaaaaaaaaaaaaaaaattatgggttacaagtgtaatttatggatagattgcataatggtgaatcagggcttttagagtatccatcactcaaataacgtacatcgtactcattaggtatgtttttattatccacctccctctcaccctctctcatgcttctaagtctccattttgtatca

SEQ ID NO: 172279 - DNA, 418 bp, Homo sapiens
aattctttaaaaaaaatttatgagactattggggaaatgtacaaactgcacaratggctatttgataatattaaagaactattgctagctttttaggatgcaatattggtattatgattatgcatatttaaaaattcttatcatttagacacgcgttctggaaaatgtatagatacctgggatggggcagtatagatgagaaaagattggccataaataaagaattgtgaaagctgagtgatgggcacctaaggttcattgctatgatttctatttctgtgtatgtttgagattttgcagaacaagtgtaaaatggtgagcatagcagacacccctgttatcacattatttataattactaaataaataaggaccattgagttacttatagttgggataaggccagagatacttacaa

SEQ ID NO: 172280 - DNA, 513 bp, Homo sapiens
gaattcttatttttttaacttttattttaagttcagtcatatatgtttgttatataggtatataggagtttgttatatgggtaaacttgtgtcataggggtttgttgtacagattatttaatcacttaggtattagtctagtacctattggttctttttcctgatcctctccctcatctcaccctccacccttygacaggccccagtgtgtgttgttcccctctatgtgcccatgtgttctcatcatttagctcccacttataattgagaacatgcagtatttggttttctgttcttgggttagtttgctaaggataatgacctctagctccatccatgtgcctgcaaaggacatcatcttgttcttatttatggctgcatagtattccatggtatatatgtatcacattttctttatgtagtctatcattgatgggcaattaggttgattccatatctttgctattgtgaataatgctgcaatgatcatatgcatgcatgtgtctttataat

SEQ ID NO: 172281 - DNA, 610 bp, Homo sapiens
ggtgcaattgtggctcactgcaacctcttcctcctgggttaaagcaatcytcccacctcagcctcccaagtagctgcaactacaggcatgcaccaccatgcccagctaatttttgtattttctgtagagtcaagtgttttgccatgttggccaggttggtcttgaactcctgacctcaagcgatccacccgccttggcctcccaaattgatggaattacaggtgtgagcgacagcgctagaccttctggtgctttggggtaatttattgaaaaactagttagtctttctgcacatgcaatgagatttgcaaaaatattctcaggtagagagggaggggttggaagagacgttatttgggtcacgtactctatatggtccctctggaccaaccaaaataacaatctcatctccctgagattttcaaaaagtctcagggagatgaggttcacttccctgaaaagagtgtgtctaggcagcaggtctccctgtgagtcacaggtgggtcgaagaaaagtttgtagagtctgtcattcaagggttggaggtgggtatccagaaatttttggtatagcttcaggctgaagtggaaaggttaactgcagagttcca

SEQ ID NO: 172282 - DNA, 500 bp, Homo sapiens
agtgtcccaggtcagaccagggcacctagatttgcctgcagagaatgtttcttcctaaaggatattttgttaccaagtacatttttgagcatttattggcaaaactcgaagtggttgtgagaactagatggaataatatatttcaatgctgtattgggmataagtaggagaatatccttgtttgtagagagtgcttaataaagtcttagagagtggggctatcaggtcttcaacacactgtgaaattgttccagttgggagcgatactttgtgacatacatactacatttttgtaagcatgaaattgatctttttttaagtaaaaaagaacacttagtcatgagcaagtaaaatgttctcaaaagcattttgtaatggccctaaaccaatgttattaccagtctaagctgaagaggtttactgcagattgacaaagaggatgattttgtgattccttaaagcatatgacatccacagttcctgcattgtccagagctata

SEQ ID NO: 172283 - DNA, 500 bp, Homo sapiens
agtgtcccaggtcagaccagggcacctagatttgcctgcagagaatgtttcttcctaaaggatattttgttaccaagtacatttttgagcatttattggcaaaactcgaagtggttgtgagaactagatggaataatatatttcaatgctgtattgggaataagtaggagaatatccttgtttgtagagartgcttaataaagtcttagagagtggggctatcaggtcttcaacacactgtgaaattgttccagttgggagcgatactttgtgacatacatactacatttttgtaagcatgaaattgatctttttttaagtaaaaaagaacacttagtcatgagcaagtaaaatgttctcaaaagcattttgtaatggccctaaaccaatgttattaccagtctaagctgaagaggtttactgcagattgacaaagaggatgattttgtgattccttaaagcatatgacatccacagttcctgcattgtccagagctata

SEQ ID NO: 172284 - DNA, 500 bp, Homo sapiens
agtgtcccaggtcagaccagggcacctagatttgcctgcagagaatgtttcttcctaaaggatattttgttaccaagtacatttttgagcatttattggcaaaactcgaagtggttgtgagaactagatggaataatatatttcaatgctgtattgggaataagtaggagaatatccttgtttgtagagagtkcttaataaagtcttagagagtggggctatcaggtcttcaacacactgtgaaattgttccagttgggagcgatactttgtgacatacatactacatttttgtaagcatgaaattgatctttttttaagtaaaaaagaacacttagtcatgagcaagtaaaatgttctcaaaagcattttgtaatggccctaaaccaatgttattaccagtctaagctgaagaggtttactgcagattgacaaagaggatgattttgtgattccttaaagcatatgacatccacagttcctgcattgtccagagctata

SEQ ID NO: 172285 - DNA, 475 bp, Homo sapiens
aactgcttcttataatggctgaactgatttatattcccaccagcagtgtataagcattctcttttctccataaactcactagcatctgtcatttttaagtttttaataatggccattttaactggtgtaagatggtatctcactgtggttttgatttgcatttttttaataattagtgattttgagcactttttcataygctttttggccgtttatatgcttttttgaaaagtgtttggtcatatactttgtccactttttaaaatagttttttttttgcttgttaatttgcttaagttagttggaggttttttaaggaaaaaaccagaataagagaaaaagaggaaaatataataccacagaaaacacagactgtggtaagtattgcctcgtggatatatgtgtgtgtgtgtgtgtgtgtgtgtgtgtgtgtgtgtgtgtgtgcatatatatatatatatatatatatatttat

SEQ ID NO: 172286 - DNA, 475 bp, Homo sapiens
aactgcttcttataatggctgaactgatttatattcccaccagcagtgtataagcattctcttttctccataaactcactagcatctgtcatttttaagtttttaataatggccattttaactggtgtaagatggtatctcactgtggttttgatttgcatttttttaataattagtgattttgagcactttttcatatgctttttggccgttwatatgcttttttgaaaagtgtttggtcatatactttgtccactttttaaaatagttttttttttgcttgttaatttgcttaagttagttggaggttttttaaggaaaaaaccagaataagagaaaaagaggaaaatataataccacagaaaacacagactgtggtaagtattgcctcgtggatatatgtgtgtgtgtgtgtgtgtgtgtgtgtgtgtgtgtgtgtgtgtgcatatatatatatatatatatatatatttat

SEQ ID NO: 172287 - DNA, 569 bp, Homo sapiens
ccacatcttaacaaacagtgttttttttctagagatgagggggtctccctatgttttccaagctggtcttgaactcctagatttctgctaccctccctacttgatcttgcaaacatctaggataacggggataagtccccgcacctggtcttaactatcagtttaccaggaggtttaacagggaayttccttgaaaatgtgtattccattgcagccacctctaaggccagacaatctactaagctatatttctgcacccaagtgcactgctccctctgtgatgccacatgccctcagcatgaagtcccataaggagaacaaggcaaggaggcaaccaaatgttctgagtggaaattattgtgaagggctggcattagaagagcatcagtattgcagtgctacttgactagcaaaacactctctggcttatgttgctggatatttttttcctcaaacttttgctaatactgaatactagggttgatatgagaaccttactatgctaagtctagttaaatgccatttcattgaagatatattgctttatggaatataataagtattgaaaa

SEQ ID NO: 172288 - DNA, 630 bp, Homo sapiens
accaaacacctcatgttctcactcataggtgggaattgaacaatgagaacacttggacacagggtgaggaacatcacacactggggcctgtcatgrggtcgggggcagtgggagggatagcattaggagaaatacctaatgtaaatgatgagttgatgggtgcagcaaaccaatatggcacatatatccctatgtatcaagcctgcacgttgtgcacttgtaccctagaacttaaagtataataaaaaaaattatattttgagactcatagcaattgccctcgttctgcaaacatttctagaggtagcaggccagtggtgctcacagcagtgtctagcatgcagtatctgttctattgttcatgaaaattgtctcacatagtctagcagtgggcagcagcaattaggtgttgacatcatttccctgagtcttgtttaatagactccttaataaatcattttcctactattaaatataaattttgcagatatttagagataattggcttatgataattgcaattaaggaaccttgaggacatgttagaaatcacaaagtttaggatattttgcaaatgttatgcttccaatagctaggttaccctaaaacctctcttacaaagtatgcttc

SEQ ID NO: 172289 - DNA, 626 bp, Homo sapiens
ggggttccttgtcatgtagatgaatcctatgggtagtaaataaagtagatggtgaatgttgattatcagaccttagaaaaaaatgtcagactctttggaaaagacttagtaaggggagragattctctatagaatgcaaatttcccccacaacaggtagctttgcagggccacttcagaatatgtcaaagaaatatttttaggataaaatattttgattttctccagggcctattatctgtcacattggagtatggtatcttattgctaaaaagtatctgtttcatcagtccagagatctctgttgtaatgataatgctggtcagttgtgtctgaactccaaagggaggagagtataatgaggcacatctaaacccacctgccagtcatggcctaatctagttttccaaatttctttgaagtgctttctgtcaaaagaggagtccattcagcaggttggtgacctacaacttaatttttggttttaacacacagaaaaacaaaatcactgcacaaattcaatctgaaatagattggtaaagaaaaattaagtgcttcctgaatattcctacatgtcaaagaaaaagaaattattagaattcagatgagaaatacccctcatacaaa

SEQ ID NO: 172290 - DNA, 626 bp, Homo sapiens
ggggttccttgtcatgtagatgaatcctatgggtagtaaataaagtagatggtgaatgttgattatcagaccttagaaaaaaatgtcagactctttggaaaagacttagtaaggggagaagattctctatagaatgcaawtttcccccacaacaggtagctttgcagggccacttcagaatatgtcaaagaaatatttttaggataaaatattttgattttctccagggcctattatctgtcacattggagtatggtatcttattgctaaaaagtatctgtttcatcagtccagagatctctgttgtaatgataatgctggtcagttgtgtctgaactccaaagggaggagagtataatgaggcacatctaaacccacctgccagtcatggcctaatctagttttccaaatttctttgaagtgctttctgtcaaaagaggagtccattcagcaggttggtgacctacaacttaatttttggttttaacacacagaaaaacaaaatcactgcacaaattcaatctgaaatagattggtaaagaaaaattaagtgcttcctgaatattcctacatgtcaaagaaaaagaaattattagaattcagatgagaaatacccctcatacaaa

SEQ ID NO: 172291 - DNA, 626 bp, Homo sapiens
ggggttccttgtcatgtagatgaatcctatgggtagtaaataaagtagatggtgaatgttgattatcagaccttagaaaaaaatgtcagactctttggaaaagacttagtaaggggagaagattctctatagaatgcaaatttcccccacaacaggtagctttgcaggrccacttcagaatatgtcaaagaaatatttttaggataaaatattttgattttctccagggcctattatctgtcacattggagtatggtatcttattgctaaaaagtatctgtttcatcagtccagagatctctgttgtaatgataatgctggtcagttgtgtctgaactccaaagggaggagagtataatgaggcacatctaaacccacctgccagtcatggcctaatctagttttccaaatttctttgaagtgctttctgtcaaaagaggagtccattcagcaggttggtgacctacaacttaatttttggttttaacacacagaaaaacaaaatcactgcacaaattcaatctgaaatagattggtaaagaaaaattaagtgcttcctgaatattcctacatgtcaaagaaaaagaaattattagaattcagatgagaaatacccctcatacaaa

SEQ ID NO: 172292 - DNA, 626 bp, Homo sapiens
ggggttccttgtcatgtagatgaatcctatgggtagtaaataaagtagatggtgaatgttgattatcagaccttagaaaaaaatgtcagactctttggaaaagacttagtaaggggagaagattctctatagaatgcaaatttcccccacaacaggtagctttgcagggccacttcagaatatgtcaaagaaatatttttaggataaaatattttkattttctccagggcctattatctgtcacattggagtatggtatcttattgctaaaaagtatctgtttcatcagtccagagatctctgttgtaatgataatgctggtcagttgtgtctgaactccaaagggaggagagtataatgaggcacatctaaacccacctgccagtcatggcctaatctagttttccaaatttctttgaagtgctttctgtcaaaagaggagtccattcagcaggttggtgacctacaacttaatttttggttttaacacacagaaaaacaaaatcactgcacaaattcaatctgaaatagattggtaaagaaaaattaagtgcttcctgaatattcctacatgtcaaagaaaaagaaattattagaattcagatgagaaatacccctcatacaaa

SEQ ID NO: 172293 - DNA, 398 bp, Homo sapiens
aagggttgggagctggcaagctcagactggtaagcagtggtggtcaaactgaatcctagaattatattaagttatctcagaagttgtgggtaaatttgctttcaggttacaataagccaaagcagtgaagcttgcagagaattttgttactgaaatgccagggattcagtatagatcctgcggctcaccacacagaaagccaatcactaagacaacaagtgttgycaaagaacaggctttaatcaggtgctgcagccgaggagacgggacaccattctcaaatgtatctccctgacaaaataaattaggggtttatatagcagggaagaaatgtggaaaacaggaattagagaggggtaaggaagataatttagtcaacaggaagctggaggtcagtt

SEQ ID NO: 172294 - DNA, 563 bp, Homo sapiens
ttcctgaaaaaagaactcagattaacaaatgtaactaccttgagttttaagactgggggagtcagtttctatgtttattcaaaaaatcataaacattagttccatgggataatagggyctatttcaattgcattcttcagacaatattttgcaccctgagtggttttccctcctggtttcttggctctgttgggtatgtcaagaatgaccgaattcctatgattaacttttacactacaacctttcaaagccaaggatatagtagtcaggaaggttgacagtagaagcaggattctctggtactccctcagaaaatagaatgcatctgccactgaagtatgggctatctaaccatgtggtcctcagtcctgtctgaaagcttaagggtggggttgcagctgctctcagcttcctatagcatctttcaggtttttcccaggcacatgtgttgacaaggaagaaaacggtgggaatcgccatgtttgggtgaatccagtttctaatggctatgatttgcataggaaagcttcccagcctggctctaagagccagggctttctggc

SEQ ID NO: 172295 - DNA, 523 bp, Homo sapiens
actcagattaacaaatgtaactaccttgagttttaagactgggggagtcagtttctatgtttattcaaaaaatcataaacattagttccatgggataatagggcctatttcaattgcwttcttcagacaatattttgcaccctgagtggttttccctcctggtttcttggctctgttgggtatgtcaagaatgaccgaattcctatgattaacttttacactacaacctttcaaagccaaggatatagtagtcaggaaggttgacagtagaagcaggattctctggtactccctcagaaaatagaatgcatctgccactgaagtatgggctatctaaccatgtggtcctcagtcctgtctgaaagcttaagggtggggttgcagctgctctcagcttcctatagcatctttcaggtttttcccaggcacatgtgttgacaaggaagaaaacggtgggaatcgccatgtttgggtgaatccagtttctaatggctatgatttgcataggaaagcttcccagcct

SEQ ID NO: 172296 - DNA, 592 bp, Homo sapiens
  misc_feature (1)...(592): n = A,T,C or G
nnnnnnnngggttattgtcttatttttgatgcagtattctataaataatttattaaacctggcatccttgggtgagcayagatttttcaactttggtgttatattgtgtttgcttttaaaaactgcttctgaggccaggtatggtggctcttgcccatacccagcactttgggaggccaagatgggtggattacctcaggtcaggagttcaagaccagcctggtcaacatggcaaaaccatgtctctactaaaaacacaaaattagccaggcatggtggtgcgtgcttgtagtcctaaccactcgagaggctgaggcaagagaatcacctgaacctgggaggcaaaagttgctaggttgctgtgagccaaattcgcaccattgccctccagcctgggtgaaaagagcaaaactctgtctcaaaaaaaaaaaaaaaaaacccaccaaaaactgcttttgaatggagttgtacatataatttttatgaaaaaaattaacaagtgcataagttcataatagaaaaaccaataatactccaggcacaagttagtactaaaaaaattatgttgaatattctctaatacaacatgctt

SEQ ID NO: 172297 - DNA, 598 bp, Homo sapiens
catccttgggtgagcatagatttttcaactttggtgttatattgtgtttgcttttaaaaactgcttctgaggccaggtatggtggctcttgcccatacccagcactttgggaggccaagatgggtggattacctcaggtcaggagttcaagaccagcctggtcaacatggcaaaaccatgtctctactaaaaacacaaaattagccaggcatggtggtgcrtgcttgtagtcctaaccactcgagaggctgaggcaagagaatcacctgaacctgggaggcaaaagttgctaggttgctgtgagccaaattcgcaccattgccctccagcctgggtgaaaagagcaaaactctgtctcaaaaaaaaaaaaaaaaaacccaccaaaaactgcttttgaatggagttgtacatataatttttatgaaaaaaattaacaagtgcataagttcataatagaaaaaccaataatactccaggcacaagttagtactaaaaaaattatgttgaatattctctaatacaacatgctttttcccttcatgaacaatttgtgttttactgagaagagtcattgtttatggtagactacagatgaata

SEQ ID NO: 172298 - DNA, 598 bp, Homo sapiens
catccttgggtgagcatagatttttcaactttggtgttatattgtgtttgcttttaaaaactgcttctgaggccaggtatggtggctcttgcccatacccagcactttgggaggccaagatgggtggattacctcaggtcaggagttcaagaccagcctggtcaacatggcaaaaccatgtctctactaaaaacacaaaattagccaggcatggtggtgcgtgcttgtagtcctaaccactcgagaggctgaggcaagagaatcacctgaacctgggaggcaaaagttgctaggttgctgtgagccaaattcgcaccattgccctccagyctgggtgaaaagagcaaaactctgtctcaaaaaaaaaaaaaaaaaacccaccaaaaactgcttttgaatggagttgtacatataatttttatgaaaaaaattaacaagtgcataagttcataatagaaaaaccaataatactccaggcacaagttagtactaaaaaaattatgttgaatattctctaatacaacatgctttttcccttcatgaacaatttgtgttttactgagaagagtcattgtttatggtagactacagatgaata

SEQ ID NO: 172299 - DNA, 450 bp, Homo sapiens
taagttctcattcttttaatactcaaaatgtcctttaatttttaatttttgatagtcatatcattatccctaggtattttagcttctatcttaaattctaaaataattttgaaayaggagaaagtattctttattactatatgtattaaacatcatggttttcaaattgaactgcaaatgtatcttttcattgcttcttgatgacgcccttcaccctatccatattgtcactaccaagtggtgattacttttcaggttcacatacttattcttcagaaaaatcttctctgtgccttataaagaatatgattgttggcattcaaaagccagcgaagtatacattattagcctgttgcctaactcatttctttaagaaactacactaattacccacatacttatgtttttatttcctcattatttctggagaaaacaaatactgctaacgtg

SEQ ID NO: 172300 - DNA, 450 bp, Homo sapiens
taagttctcattcttttaatactcaaaatgtcctttaatttttaatttttgatagtcatatcattatccctaggtattttagcttctatcttaaattctaaaataattttgaaataggagaaagtattctttattactatatgtattaaacatcatggttttcaaattkaactgcaaatgtatcttttcattgcttcttgatgacgcccttcaccctatccatattgtcactaccaagtggtgattacttttcaggttcacatacttattcttcagaaaaatcttctctgtgccttataaagaatatgattgttggcattcaaaagccagcgaagtatacattattagcctgttgcctaactcatttctttaagaaactacactaattacccacatacttatgtttttatttcctcattatttctggagaaaacaaatactgctaacgtg

SEQ ID NO: 172301 - DNA, 450 bp, Homo sapiens
taagttctcattcttttaatactcaaaatgtcctttaatttttaatttttgatagtcatatcattatccctaggtattttagcttctatcttaaattctaaaataattttgaaataggagaaagtattctttattactatatgtattaaacatcatggttttcaaattgaactgcaaatgtatcttttcattgcttcttgatgacgcccttcaccctatccatattgtcactaccaagtggtgattacttttcaggttcacatacttattcttyagaaaaatcttctctgtgccttataaagaatatgattgttggcattcaaaagccagcgaagtatacattattagcctgttgcctaactcatttctttaagaaactacactaattacccacatacttatgtttttatttcctcattatttctggagaaaacaaatactgctaacgtg

SEQ ID NO: 172302 - DNA, 328 bp, Homo sapiens
gtgtacaccccccacaatattgggagtaatatcatactctcccctcctggatattacaaacaataggacaggggcgtgtatacacaaaaagtttatgatattgaaagtaatatcatctccaatcacccctgratattatgaacaatatcacagggaggtgtacactccctgagatattgggaataatatcatcccctcctcccctggatattaggaacaatgtcacaggggtatgtacaaccccgtggtattgggcgtaatatcatcctctccccacctggatattatgaacgatattacaggggggtgtacacaaaaggtgtttacg

SEQ ID NO: 172303 - DNA, 601 bp, Homo sapiens
agacaaagccattctggaagagctatgatgagatgtttcaaaaatgagccacaatccaaaaaaatgctttccaagtgagtattaatcaaaatgccattaatgagcagggggcttttaataatgaggatgattcaacacatggacttcagtcagtcagctttcccagcttccccagggagtatcatgaaccaatgttatggaggtccctgtggggactcaataatatgactttcaactaactgagacctacagggctaccggcttttctgaacatctaatttgtcaagaagaacccctaacattgtatgatacatcagggctcagactaacagcttgtattaggtgatactagtggacctcakgtaacataaggaaagcactggttattttcctatatatgaatttgccattcttatcggttatgtttctgcataaaatattatttgaggattttccaagtgctttcatcagaatcaggaaattcttccataaaatggctttggatcaagcaagttatttacctcaaaaaagaagagcgaagtgtagcttatgatcttgtcttgtgcacaggtgcaactttccctatagacagggaaaaacc

SEQ ID NO: 172304 - DNA, 592 bp, Homo sapiens
atctccaagtactccctttgctattccctcaccctgcccaccccttgttttccacagtgaaggaagatactctcattttgatagaaacatggcaagtgaagatacygtgcccacaagactgtgctgcctggctgtgacccagaccaggaaattgagtacatttgagtgagatcaggcacttcccctccctcatctcaatccaaaagcactctgtagtaacacatctgatgggcattcttcaccacctatgggacttaggaagccaaggacatgaggaatagcctttccagactctaccatagagaaattattgccagaacctagagaataaaataaatacagaagaagctggtgacaataacgaaatgagccattcatatatgtatgttaaataatttagtcttttcaatacaccctttctttaaaaaaatcaaagtgctatttttagccacctttataatatagaccacatattaaataatatgtacacagattaatggctcatgagagaagatcattttttcctggacggtgttgggctgaacagattggagattccccacattttggggagcacaatgctacgtgggga

SEQ ID NO: 172305 - DNA, 592 bp, Homo sapiens
atctccaagtactccctttgctattccctcaccctgcccaccccttgttttccacagtgaaggaagatactctcattttgatagaaacatggcaagtgaagataccgtgcccacaagactgtgctgcctggctgtgacccagaccaggaaattgagtacatttgagtgagatcaggcacttcccctccctcatctcaatccaaaagcactctgtagtaacacatctgatgggcattcttcaccacctatgggacttaggaagccaaggacatgaggaatagcctttccagactctaccatagagaaattattgccagaamctagagaataaaataaatacagaagaagctggtgacaataacgaaatgagccattcatatatgtatgttaaataatttagtcttttcaatacaccctttctttaaaaaaatcaaagtgctatttttagccacctttataatatagaccacatattaaataatatgtacacagattaatggctcatgagagaagatcattttttcctggacggtgttgggctgaacagattggagattccccacattttggggagcacaatgctacgtgggga

SEQ ID NO: 172306 - DNA, 450 bp, Homo sapiens
ctgggggatatatgcttaatgcagctcccctgaatttgtgagcagtttccttccctgaagcccctgccaggcagccmtgtggccagggcctgtggttcctctcagattctcagccctgtggctcaggagagcagctgcttcctccacagcccagggccagtgcctggcagctctcaggcactgccagcctgaccttagccctgggctaaggaccctattccaaatgtctcctcatttattgcagtatctgaaagtctgtcttgttcttaaactcaaagtccacatttccacaattgctaaagctagcatttgccatctgaaaatttagaaatgtgaattcattgtcactctcagaaactgccctcttccaactctaccagacagagttgcccatatgttctcttctctccacacaactttacttagaattatagtgaaatgtaacatgtg

SEQ ID NO: 172307 - DNA, 450 bp, Homo sapiens
ctgggggatatatgcttaatgcagctcccctgaatttgtgagcagtttccttccctgaagcccctgccaggcagccatgtggccagggcctgtggttcctcycagattctcagccctgtggctcaggagagcagctgcttcctccacagcccagggccagtgcctggcagctctcaggcactgccagcctgaccttagccctgggctaaggaccctattccaaatgtctcctcatttattgcagtatctgaaagtctgtcttgttcttaaactcaaagtccacatttccacaattgctaaagctagcatttgccatctgaaaatttagaaatgtgaattcattgtcactctcagaaactgccctcttccaactctaccagacagagttgcccatatgttctcttctctccacacaactttacttagaattatagtgaaatgtaacatgtg

SEQ ID NO: 172308 - DNA, 512 bp, Homo sapiens
ctgcctttctacagtttttcaggaagaggaaacattttctgcttctctcgctgaggtttttttttaaccacccattaggaacctatagatttcaggatggaacactgggattccctcagcactaaaggaggaaaattgyaaacagagctgaaagtgcaatgtgcaaaggtcaggctgaggaaggttcttagccagtagaccaagggcaggaaggacactgcctcctcagtctcccactttgtgattcttgtcccctgacctcagaattccttgtcatgtttgttttgtctccaagggaagggtttgaattacagaatttaaggctagagtgggcctcgtgcagttaacattaaccctctctctccttcgctggccgaggtgaagtccaggaacatgtagttctgacgtccactctctcgggggatcaccagttcacccatctcacccggcaagcttggccctagtttggcgacaggcatcttccacccacctgggaggcagggttcaatact

SEQ ID NO: 172309 - DNA, 465 bp, Homo sapiens
aagtgcaatgtgcaaaggtcaggctgaggaaggttcttagccagtagaccaagggcaggaaggacactgcctcctcartctcccactttgtgattcttgtcccctgacctcagaattccttgtcatgtttgttttgtctccaagggaagggtttgaattacagaatttaaggctagagtgggcctcgtgcagttaacattaaccctctctctccttcgctggccgaggtgaagtccaggaacatgtagttctgacgtccactctctcgggggatcaccagttcacccatctcacccggcaagcttggccctagtttggcgacaggcatcttccacccacctgggaggcagggttcaatactctgcctctgaccttgtttccttcttctgccatctgcttaggcagccagaagtggttgtccagccagcacctgggctttggccctcctcaagcaggtgaaggaag

SEQ ID NO: 172310 - DNA, 465 bp, Homo sapiens
aagtgcaatgtgcaaaggtcaggctgaggaaggttcttagccagtagaccaagggcaggaaggacactgcctcctcagtctcccactttgtgattcttgtcccctgacctcagaattccttgtcatgtttgttttgtctccaagggaagggtttgaattacagaatttaaggctagagtgggcctcgtgcagttaacattaaccctctctctccttcgctggccgaggtgaagtccaggaacatgtagttctgacgtccactctctcgggggatcaccagttcacccatctcacccggcaagctkggccctagtttggcgacaggcatcttccacccacctgggaggcagggttcaatactctgcctctgaccttgtttccttcttctgccatctgcttaggcagccagaagtggttgtccagccagcacctgggctttggccctcctcaagcaggtgaaggaag

SEQ ID NO: 172311 - DNA, 465 bp, Homo sapiens
aagtgcaatgtgcaaaggtcaggctgaggaaggttcttagccagtagaccaagggcaggaaggacactgcctcctcagtctcccactttgtgattcttgtcccctgacctcagaattccttgtcatgtttgttttgtctccaagggaagggtttgaattacagaatttaaggctagagtgggcctcgtgcagttaacattaaccctctctctccttcgctggccgaggtgaagtccaggaacatgtagttctgacgtccactctctcgggggatcaccagttcacccatctcacccggcaagcttggccctagtttggcgacaggcatcttccacccacctgggaggcagggttcaatactctgcctctgaccttgtttccttcttctgccatctgcttaggcagccagaagtggttgtccagccagcacctgggctttggcsctcctcaagcaggtgaaggaag

SEQ ID NO: 172312 - DNA, 489 bp, Homo sapiens
ctacgttttgactttcagggagtccagattgttactcaatttagaagtttaggccgagtgcggtggctcacgcctgtgatcccagcactttgggaggctgaggtgggtgcatcacctgaagtcaggagtttgagaccagcctggccaatgtggtgaaaccccgtctctactaaaaatacaaacaattagctggatatggtggcacgtgcctgtaatcccagctacttgggaggccaaggcgggcagwtcacgaggtcagttcaagaccagcctgaccaacgtggcgaaaactgtctctactaaaaatacaaaaattagccagacatggtggcgggcgcctgtaatcccagctactcgggaggctgaggcaggagaatctcttgaacctgggaggcggaggttgcagtgagccgagatcgtgccactgcactccagcctggacaacagagcaagacgctatctcaaaaataaaatagaagtttaataaat

SEQ ID NO: 172313 - DNA, 466 bp, Homo sapiens
aatccagctttgtttgtcaaaaacaaatgcattcattccatwtggagagtaaaacagtctttttttcatgagcataatggtgaaagctaattaaatttatcataaattacacccttaatatttgttctcaagatcattagtctataatgtaaacagacagattcacaatagttaatgttaacagttttctaaaattcagaactttaaaggtttattcatttattccctaagcatcagtttaaaaaaatgttttaaagagcatacacattaaaaagtatgatattagatgaacaactaaaaattagactaaaaacatcgccaaattggattttatatagtaatattgttacattgagaggtaacattttggcaaccatttgctgcaaacctacaaattctgtaaaagcttctaaagattaatagcactatcagtcagttgcatcattatctcattgaaaatgaattc

SEQ ID NO: 172314 - DNA, 466 bp, Homo sapiens
aatccagctttgtttgtcaaaaacaaatgcattcattccatttggagagtaaaacagtctttttttcatgagcataatggtgaaagctaattaaatttatcataaattacacccttaatatttgttctcaagatcattagtctataatgtaaacagacasattcacaatagttaatgttaacagttttctaaaattcagaactttaaaggtttattcatttattccctaagcatcagtttaaaaaaatgttttaaagagcatacacattaaaaagtatgatattagatgaacaactaaaaattagactaaaaacatcgccaaattggattttatatagtaatattgttacattgagaggtaacattttggcaaccatttgctgcaaacctacaaattctgtaaaagcttctaaagattaatagcactatcagtcagttgcatcattatctcattgaaaatgaattc

SEQ ID NO: 172315 - DNA, 452 bp, Homo sapiens
taaataggagccaaatatgatattttttgcagtggtaggttatgtttaatagggttttatgcttaagtactgtcagtacatcctggtggaataacgcgtggcagcaatggaaatmatctcttttgtcctttttgatgagaacttgatattgaccacgtttaatatatcagggcccatctactggctacggtggctgtctagctgtcttctaggtggcatggattgtaccctctgtactccttagtattgagtaggttattatgatttagagagctacgttctttcttttttcttttcctttaggttgtgtttttggcgaggggtatgttggaatatagaacaaattcaatagcaaatatataccagcatgtccccaattcagtaaatcttaggtttttgagtgagataatatttaaatcgatttttaaaaattattacagaattaaaatatt

SEQ ID NO: 172316 - DNA, 449 bp, Homo sapiens
cttccctgtgactttgaacttctcattctcacaatgcttttggacagactttatttttcagaatcagagataacgggcagatgctaatgggctgagctttgctgtgagctctggggtggggcctagatgggatcctcctgtgggtgtcagcactgggtgttaccacgtcagcgttcccctgccttagatggattgtktctctttgacgttgggatggtttcctaacccacgtctgcagtgaatcagcccctgatagaggaatgattcagtggactcctgtagtcgggtacccaggttgaaggagacacattcaaagacactggtatcactcaggatgtctgaggctgcaactcacaggagatccagctgatagtgacttcaaacataaccatgtgtgtttatctcatgcagcaggaagtctagggatttatggctccagggttacacag

SEQ ID NO: 172317 - DNA, 511 bp, Homo sapiens
ggcctctcttgggcatctctctcctttagcagggagaaaactccttcccagacctcatgcctttctcagagcctacaggtcaggactgggccacacagtgatgtctgaggcaatacctggcaaaggagagtgaaatcatcatggtttggagcctctgtgctatctcccgtggtagctcctaataaccacataaagcaatttagatttaaattaaaattaaataaaatttaaaatttaggccgggcgtggtggctcacgcctgtaatcctggcacttttggaggctgaggtgggtggatcccctgaggtcaggcgtttgaaaccagcctagccaacttggtgaaactccrtctctactaaaaatacaaaaatcagccaggtgtggtggtgcatgccagtaatcgcagctactcaggaggctgaggcaggagaatcgcctgaacccagaagacagaggttgcagtgagccaagatagcgccactgtactccagcctgggtgacagagcgaggc

SEQ ID NO: 172318 - DNA, 374 bp, Homo sapiens
cacacagaaatatagaggcataaagtgggaaatcagggrtctcacagccttcagagctgaaagccccaaacagagatttacccacgtatttattaacagcaagccagtcattagcattgtttctatagatcttaaattaattaaaagtatcccttatgggaaaagaagggatgggctgaattaaaggaataggttgggctagttaactgcagcaggagcatttccttaaggtacagatcgctcatgctattgtttgtggcttaagaatgcctttaagtggttttccaccatgggtgggccaggtattccttgccctcattttggtaaagccacaactttccagcatgggcattagggccatcatgaacatgtca

SEQ ID NO: 172319 - DNA, 526 bp, Homo sapiens
tcttactacaaaaatgataactgtgaggcaatgcatatatatgttaagtagctagatttaaccattccacaatgyatatacacttcaaaatatcatgttgtgtatagcaactacatacaatttgacctgttaatttcaaaaaaaatttaaacagaattttgtaaaagtattttactagagagttaagtatattattaattcatttcctttgttatataaactttgtaaaattataattgtatcatatttattatatgttaaaatgtacaatatgcaaattatgataatcatactaaaaccacatattacctaatcaaattagtaattcattataattatgatataaacactaaaattatattgattttatttattataaaatttttatattttgcataattgtatatttatattccactatgttatcatagttataatataaatattaaaatcatgatttatagtattatattgtgactattgaattcgagtttaatgtagtttgatttcctttatatataaattc

SEQ ID NO: 172320 - DNA, 526 bp, Homo sapiens
tcttactacaaaaatgataactgtgaggcaatgcatatatatgttaagtagctagatttaaccattccacaatgcatatacacttcaaaatatcatgttgtgtatagcaactacatacaatttgacctgttaatttcaaaaaaaatttaaacagaattttgtaaaagtattttactagagagttaagtatattattaattcatttcctttgttatataaactttgtaaaattataattgtatcatatttattatatgttaaaatgtacaatatgcaaattatgataatcatactaaaaccayatattacctaatcaaattagtaattcattataattatgatataaacactaaaattatattgattttatttattataaaatttttatattttgcataattgtatatttatattccactatgttatcatagttataatataaatattaaaatcatgatttatagtattatattgtgactattgaattcgagtttaatgtagtttgatttcctttatatataaattc

SEQ ID NO: 172321 - DNA, 526 bp, Homo sapiens
tcttactacaaaaatgataactgtgaggcaatgcatatatatgttaagtagctagatttaaccattccacaatgcatatacacttcaaaatatcatgttgtgtatagcaactacatacaatttgacctgttaatttcaaaaaaaatttaaacagaattttgtaaaagtattttactagagagttaagtatattattaattcatttcctttgttatataaactttgtaaaattataattgtatcatatttattatatgttaaaatgtacaatatgcaaattatgataatcatactaaaaccacatattacctaatcaaattagtaattyattataattatgatataaacactaaaattatattgattttatttattataaaatttttatattttgcataattgtatatttatattccactatgttatcatagttataatataaatattaaaatcatgatttatagtattatattgtgactattgaattcgagtttaatgtagtttgatttcctttatatataaattc

SEQ ID NO: 172322 - DNA, 379 bp, Homo sapiens
aggtagcattaaaaattccatttccttcattttccatgtactatgcttaattttttcccacattctccatcatatctatcaaatgtcttccagtgttcttttttaaatgctcaaacatcagataatctggttttaaaagagatctctccatcagcagagagctgtatattcaktgatagtcccaaatacctatacatgcaccttttaacaagaaacttttcatctcctccttggctgtaggtgtcctgagaatcagtctgtcctgaaaggagaaactggaagctctgttctcagcatgtagtttttctttaaacttactgtattcaaccatgagcttcacccctgccctatgtaagggaccccttaagctgcagtgcca

SEQ ID NO: 172323 - DNA, 565 bp, Homo sapiens
aggatttgcggtcctaaaggaccttagtgcctcattcaggtatttcccacctagaggttggcctgtggaattactgatgctgttcatttttttagctgtatgagcattttgtttctgaatctagatccacctcttcctctcactctgtatgttgtactcattttcagctataatgttgcatttgtttcatagtataataaaatatcacccaagaaatctaacagtacagttgttagcagctatcagcaaacaaatgtattaaaagcttgggttgattgtgtgtgttccacaaccagctgaacaacttccaaagagaggaatgttaatatcagaaacccacaaccctctttcccccttttccgttaatatttactaaagtaattcttgttttagagttttctacttacttccatgtaagataaattattgaactcaaactgtgataaactttacttaaaatacatgtcatgtgtgtatgaataacgccaagtttacttcttacaactcagacctcagtgctmcctggctggtgctgctacatctgaggggatgcaatgaggctggt

SEQ ID NO: 172324 - DNA, 543 bp, Homo sapiens
acttattaatatagttacaaaaacttaaaacaaggtattaacaaattaaatccaccagtatatagaaataataatacagtatgaccaactagtattttcttagaggaatgcaaagacagtttctttaggaaatttatcaatataagacactatgaaattaaagaaaaaaatttattaaacccwatagtcattttaaataaaaatttcatgtaaaacagtataggagaaaactcctgtaatataaccaagactatctaccaaagtcaatactgacacatcaaatatatgttagtatttttcctaaaatcaaaaaagattagaatctgcaactcaaaagtttatgtcatatgctgtagaaaagactaaatgatcaacattgaaatatatatcgatgaagttactaagcacaaaatatacttcaaaaccatacagacatttacatcaataaagtcatataaagtgaaaaaaatcagattactcccagatttcttcaaagcaatcatcagaaagaaattctaatgatgtctacagatttccaaggga

SEQ ID NO: 172325 - DNA, 218 bp, Homo sapiens
tagtctgggcccagaatttttccaggggaattctctgggtaaaatttgggtcacctagtgagccctccactgttcaaagtctctttactagaccactgtgggcaattctcaatctattccacctgattccactgtagacaacccttcacctattccacctgattccctrcttggaaatgtcccagaccacattaataaacaggttaacccgctgggca

SEQ ID NO: 172326 - DNA, 446 bp, Homo sapiens
cagcaggcaaagagaatgaggaagatgcaaaagcggaaacccctggtaaaaccatcagatctcatgagacttattatctaccatgagaacagtatgggggaaccacccccatgattcaattatctcctactgggtccctctcacaatacatgggaattatgggagwacaattcaagataagacttgggtggggacacagagctgaatcatatcactaccctatacctgaaggaaactaacatgcttaccctcaaagacacagagatgccaagaggaatctgggcagacaggatttgctaagatcccccaagttgtcaccattaggtcttatcctctttgtccaatcatacttccccacaacctttttatcaaacctagcataaaaatatacaagtttacctgttttttttcaattttcattgctaaaggctccgatgtcacgttaa

SEQ ID NO: 172327 - DNA, 575 bp, Homo sapiens
tctcctccctgggtttgctgctttggtccctctgcccttctgggcaggcctatagaacatgccaagccagttccctctcctacatggctcacatctcatccacagtacacactcagacatcatttgccctgacaactcttgagagcagactgatccccaggctgcactgatctggcccttatttccacatcagaatttctcagactggcatcctactgttgccaaactgaacttgggtcagcctgcttggcaaggcaaagccaaacactgacattgggactgcagtgaaagaagtgaggcatttattgcagtgtgccaagcaaggagartcaggcacctaatgcctaagacctgaacttcctgatgccttacaggtcagagttgttttttatttttaagacagagtcttgctctgtcacccaggctggagtgcagtggtgcgatcactgccgcaacctccagggctcaggtgatcctccaatttcaacctcacaagtagctgggaccacatgtgtgtgccaccacacctggctaatttttttattatttgtatagacagggactccctatgttgc

SEQ ID NO: 172328 - DNA, 575 bp, Homo sapiens
tctcctccctgggtttgctgctttggtccctctgcccttctgggcaggcctatagaacatgccaagccagttccctctcctacatggctcacatctcatccacagtacacactcagacatcatttgccctgacaactcttgagagcagactgatccccaggctgcactgatctggcccttatttccacatcagaatttctcagactggcatcctactgttgccaaactgaacttgggtcagcctgcttggcaaggcaaagccaaacactgacattgggactgcagtgaaagaagtgaggcatttattgcagtgtgccaagcaaggagaatcaggcacctaatgcctaagacctgaacttcctgatgycttacaggtcagagttgttttttatttttaagacagagtcttgctctgtcacccaggctggagtgcagtggtgcgatcactgccgcaacctccagggctcaggtgatcctccaatttcaacctcacaagtagctgggaccacatgtgtgtgccaccacacctggctaatttttttattatttgtatagacagggactccctatgttgc

SEQ ID NO: 172329 - DNA, 584 bp, Homo sapiens
gattctaatataggtggttgctaacttacagtgccccattttttctaaacaaatgtgtcagttgctaataagaagaatgattatttttcatagctttcaagatagaccrtatcaaccgatatttattaaatgcctatttcatataaacaattcagcatttacttctgaaattatttttgactggggagaaatgtatgccttatacccttagttttgaacttgagcagaacaagataagaaaagaggtttgaatatagcaggagactgggtgttttatggctttttttttttgtcctttagccaaactatctgtcatcaagggagctgattcctgatgagctgatttaaagccaaggtttaggagggtggactgaaaggcagatgaaggaaaacaagtaaacctgttaatgatctgtacatatggagttttatagcttccaaaatgtacctaacggttttcatttttgtgagccatagtctaaaggataatggcaaaaccaacttggatggcaaaaaatgaagactgtttaaaccaagtaggtttggaaatgtctcaaaatgcaaattactactgtatttgttaa

SEQ ID NO: 172330 - DNA, 559 bp, Homo sapiens
aacctcattactaatatgtgagatgactactttcaagaatagattgtaaattttggcattttggataatttgatatatagcaatagatatctatctattacaactatgtgtaatagatactaatacacctatgaactagggagtggactcatcccattttacagatagagcaattaaggtaagttgagtaatgtgttcaagattacttggtggcrgagcttggctttgccctcaggattgtctaagccaattaacctgtattctataaaaacaactcatatttattcaaccctagagctagattctgtttggagcactttatagtattaattcattcaatgcctacaacaatcctataatgtattctttctggattgttggccagccaagatttagccgcaacctagctttctaggtgagtctccccaaaacagtttgttcccaaaatatgcctggtgttttccaacccttaagcctttggtcaaatacatcaacattttaagatgccttccctatgtctctctgccgtcccatttttcaaaatccagatcagttttca

SEQ ID NO: 172331 - DNA, 559 bp, Homo sapiens
aacctcattactaatatgtgagatgactactttcaagaatagattgtaaattttggcattttggataatttgatatatagcaatagatatctatctattacaactatgtgtaatagatactaatacacctatgaactagggagtggactcatcccattttacagatagagcaattaaggtaagttgagtaatgtgttcaagattacttggtggcagagcttggctttgccctcaggattgtctaagccaattaacctgtattctataaaaacaactcatatttattcaaccctagagctagattctgtttggagcactttatagtattaattcattcaatgcctacaacaatcctataatgtattctttctggattgttggccagccaagatttagccgcaacctagctttctaggtgagtctccccaaaacagtttgttcccaaaatatgcctggtgttttccaacccttaagccyttggtcaaatacatcaacattttaagatgccttccctatgtctctctgccgtcccatttttcaaaatccagatcagttttca

SEQ ID NO: 172332 - DNA, 429 bp, Homo sapiens
atttactaaatgaggcaaaatatctaaagtatttagtaaagtgtgtaacatggaaagctcaaatatgtgatggcagatataggtattatcctttttctcacccttttgaaccaaaatagtctgtaagacaataacattatgagtagttttgaagatcaattatttttattatttttaatagataaataataattatatgtatatttgtggtataaaatgggatgttttgatacatgtatacaatgcaaaatgattaagttaagctaattaacatagtcatcacctcacttattttttatggtaagacatttgaaatttactctcttagcaatttaaaaatacacagtatgttattcatagctatagtcacaatgctgtgmaatggatctcaaaaacttttacctcttgggaacacttattctatttgat

SEQ ID NO: 172333 - DNA, 423 bp, Homo sapiens
agatgctaggctggatacttaaactacctaatcatgagtcttcaaacgtatgtggraagtatttggtcttgaaacaggtgataaaacagtttcccagtgtaatcctttgttactcatgattttatgtgtttgtgcttttgtcaacattgggcaaaacatctaattatctgtactctcctatcctgaatgccacttggtggcaagggtgctctcatttttgaatcctctctggtgtctggtagacatattggtatttcagctaatttaatttaattcttataaaacatgtgtatgtatcagagagctgagggaaatgactcatgtacaattgggaagggcaaaacctttcatttatggatttctagctgctaaactgttgatttaatatattaatctttccagatacttataaaccagatatag

SEQ ID NO: 172334 - DNA, 597 bp, Homo sapiens
ggagctttgggtcattttgcccataatagggcaaaatgaacttcagatcacatgttgctctggtttgccaaacaaagtttaatttaggaaaagaataaaaatgctatgaggaaacttaactacatcccagartaaagctcaataatatttacagaaatccaaaaatgttcagcatccaacaaagtgaagttgactccttgtcctttgtattatcagatgtgtctccttctttcctctcctctgtccaactcagaaaggttctagcttaaaggatctgtgggcacctgctccaaggaagccccagactgatgtaaatagcttacttttagaaatggtgacatagatgatttctgttgtagacacatttcctagttcataaaacggattaacagtctctttatttgttcttggcttctaccaccatgcagaattttataagaacttggctcatggaggtggtgtactctgataatgatccagaaaggaacatttaatttagtaatttattggtactggggaagaaagatgctctggtatagcattctcatttccttttattattccaattttacaagcatgcagaccatctgtcttcac

SEQ ID NO: 172335 - DNA, 597 bp, Homo sapiens
ggagctttgggtcattttgcccataatagggcaaaatgaacttcagatcacatgttgctctggtttgccaaacaaagtttaatttaggaaaagaataaaaatgctatgaggaaacttaactacatcccagaataaagctcaataatatttacagaaatccaaaaatgttcagcatccaacaaagtgaagttgactccttgtcctttgtattatcagatgtgtctccttctttcctctcctctgtccaactcagaaaggttctagcttaaaggatctgtgggcacctgctccaaggaagccccagactgatgtaaatagcttacttttagaaatggtgacatagatgatttctgttgtagacacatttcctagttcataaaayggattaacagtctctttatttgttcttggcttctaccaccatgcagaattttataagaacttggctcatggaggtggtgtactctgataatgatccagaaaggaacatttaatttagtaatttattggtactggggaagaaagatgctctggtatagcattctcatttccttttattattccaattttacaagcatgcagaccatctgtcttcac

SEQ ID NO: 172336 - DNA, 360 bp, Homo sapiens
ttaaatttatggtattacagaygtttaatcagaatccagtgaattgtggcttggctggaagatcttcaggcaagaccctatcagaactcaataatgagacaaagatgaattttcctaacattttagtgcatttattaccctatagaggcaagaggatggctggtttctacaacagaaaatagatgaaccccaacacatggggagtcatttaatactaaactaaaagaatcctgcagaatatactacaggaaacattgctgggagatgaggagggcttctccagctctactttttattattgaataagaggaagacagggatgcccattaaataattggaatggctgtctcagcttgcatt

SEQ ID NO: 172337 - DNA, 360 bp, Homo sapiens
ttaaatttatggtattacagatgtttaatcagaatccagtgaattgtggcttggctggaagatcttcaggcaagaccctatcagaactcaataatgagacaaagatgaattttcctaacattttagtgcatttattaccctatagaggcaagaggatggctggtttctacaacagaaaatagatgaaccccaacacwtggggagtcatttaatactaaactaaaagaatcctgcagaatatactacaggaaacattgctgggagatgaggagggcttctccagctctactttttattattgaataagaggaagacagggatgcccattaaataattggaatggctgtctcagcttgcatt

SEQ ID NO: 172338 - DNA, 432 bp, Homo sapiens
ttctctcccaccctctattccacacgcaccaaagagtcacagttttttgggttttgccatgtatttcagcctatgggactaaccaagactcttatcagtctggaatttctatcattctaacaccacccccacagctttagctcctcctcctaaataccttagcactttctttgtggtttaagttactgctctcctacttccaacagagggtgaaaaaatgattgctcatcttgctttcaatgaccacaagaaatattaaattcttctggcccaaaagaacatttcccacaagcatcattttaaatcttaattacaggtttatgtattattcaggcaatgttagaaactcagctttggaatagcattataccrttagtcttcatttgctctctttggtctttcccccaacttccaaataatggccattctaat

SEQ ID NO: 172339 - DNA, 417 bp, Homo sapiens
tggcttgcactatagaacaatgaaagatctaccagtctgtttcttatatgtcacccttggcccacctccccatccccggctaggctagtctctccttgtgctctgagttcctcatttctgtcctacccttcctctcaatcacccacatattgcagtttacaatctgtgcattttagggtgaaagtagaaagctctggccctaaagtaggcaaggcagtctaagcatgaatctgtttttgaaggctttagtctgctttgaagacaaagatggatttggtggagcgggaggggattggaggcttagtacttccaggattgaaggaagacgcatccrtccaggagcattttgagtacttccccggctggaatggggagaggttgggagtctttgagcgcttagtgcctctgaggtggggg

SEQ ID NO: 172340 - DNA, 596 bp, Homo sapiens
gtgcacatatttatagatcctcttgggaatttgtgagtccaatttgtggaaatattcatcttagaaaataatgtcaaattgttttccaaagtagatgcattttacattactgccagcaatcaataagagacctcagtgatctgaaatttgagggaaacttcttaatttttgccagtcgaaactgtgtaaaatggtatctcaatgagatcttgaggttcttagatatggttagaggctaaaaaattcctgagattgatcaaagagcatgatttctgaatttatattttaatagaggaattgaaaagaaaattggtcatcactaaattataaccctggaaaagtaawgggaagaatcatcataaaccagaaaatactaaagaaattttaaaatatgagcaaaaagagacatgagaaagttagagctgggagttaaagcatgtgaacgataataataagagggagaagggaacagattgaggaggaaaaaataattaatatgcagaagtaaatgtgattacatttttcccctttgtaaatattcacaggtgatgaagaccttgcctaatgaggataaaaattaattaaacaccatcatt

SEQ ID NO: 172341 - DNA, 533 bp, Homo sapiens
tactggttaccttaaataattatccattttttataactttggaataaaactatcttattaattttggtatatggataaaactacagcttaytgatattggaatcttcatttatttcatattttctttttctcagagttcataagatatctaatatgagtttatggtaaagttttgaattaaccaaatagcatccatcaaaatctatgcagagctatattatgaaaataacctttcatgacaacatgaaatttaaccattatatgttttaatatccatattaatcctgaataggaaaaaaggtggctttgacaagtacttcataatagctaacaaaattcaaccaattgtagaaaattccttaaaattatactttgatagtgaaatacaatattaaagtttgaaaatcataaaatagataacgaacacttttttcagttattttgtagatgacactatttccacttgattgtcccaaataaagaaaatagtaaatttgagatgatacagaagccaattaatggaccaatatgac

SEQ ID NO: 172342 - DNA, 505 bp, Homo sapiens
gccagcatggtatggtattartatgtctcagaagccaaaaaaataacgtggcacagaaacaacttgtcccaagcttcaaggggggcatgggctttggagacctgtattctgtattaaaggcttctatgaataaactttctgagagtcttgaggttcctgaaggttttgtccttgtcttgctcctcctctccgtctttttgacccactcatctactttataatttccacatccacaagactctctagccttagtctctcctaacacagtcaagttcttatgttgggtaggcatttccaatagaatactccagagatatcttaaaataaacttgccaaaacataaactaatcaccatttcctgacacccggccattcttttttttttttttttttgtcaagacaaggtcttgctctattgtccttcaacctcctgatgggctcaaggattcctagcagctcagcctccagagtagcagggaccactggctcacacctccatgcccag

SEQ ID NO: 172343 - DNA, 589 bp, Homo sapiens
gtttatgcattgtgttataatttagaggtcacattttatgaatcaattatcttgagataatttttaaacttctgatttttcagacacatgtctaaaaaagaagctaaactcacatttaaaggcataagtttctctatatacttatgaaaaacttatataagaatcaacagttgaaatacaattagagagagaacacaagcctaccttaaatttaatttttcaaatggtgtacagaatccaggggcatctaaatatatatcttcagaatataaatagcagtagtgggtaattatcctaatttcagcattctggaacattttctttagtagtctttctaaaagamtcttaataatcacaatagcagttatgtaatcttcctcctagcatttctcttaagctttaaaaatgagtatatttttgacatttttccactattgcttttattgcatctccaaatttctttgtcattgtcatctgccaatttcaataattgattacttctatactttcatgtctgccaaaaacctctgaaaaactgtaaggctttgaattaatgtggtaattatttattttctaatgtccttaagac

SEQ ID NO: 172344 - DNA, 560 bp, Homo sapiens
gtttatgcattgtgttataatttagaggtcacattttatgaatcaattatcttgagataatttttaaacttctgatttttcagacacatgtctaaaaaagaagctaaactcacatttaaaggcataagtttctctatatacttatgaaaaacttatataagaatcaacagttgaaatacaattagagagagaacacaagcctaccttaaatttaatttttcaaatggtgtacagaatccaggggcatctaaatatatatcttcagaatataaatagcagtagtgggtaattatcctaatttcagcattctggaacattttctttagtagtctttctaaaagactcttaataatcacaatagcagttatgtaatcttcctyctagcatttctcttaagctttaaaaatgagtatatttttgacatttttccactattgcttttattgcatctccaaatttctttgtcattgtcatctgccaatttcaataattgattacttctatactttcatgtctgccaaaaacctctgaaaaactgtaaggctttgaattaatgtggt

SEQ ID NO: 172345 - DNA, 500 bp, Homo sapiens
gtgcgtttgctttatttatcgtgaaaaatcactctgagtccctcttttctctccttaaccccctgcttttctttcccgagcgttttgtttgggagcctaagcgggatcccttctggtggcgcctgttgttcgggacatgggagacccaaatccccagtcagaggagactcttctgtccctgtcgggtccccgagggcagaacccgcaccgccggggccgcggtcctggggcggtgctggctgggcctctcccgagccgagcccgaagggcggtggagagcggcgctcagaaaatcgggctttgcacctgtgtgtgctgctggcgaccgctgcgcccccagtcgcccgagccttgtggsgtcagacgcaactcgcgcccagcccgggcagccggagtgcagcaggcgggcgcgcctcggtccggggcccggagttctgggcctcttccgccggcttcccggagccctctccccattgacttgaggggcgcttactcgcctg

SEQ ID NO: 172346 - DNA, 565 bp, Homo sapiens
attataaatattggcagtcagagttaaaaccttactttttatgatttctaatacagctattgactggagttttcagtttataatgaaaaataacccctttttatgaaaaaattgtaggtcaatgtttcctgaaactgtatgtcttcaacataatttgagggagactttaattgcctattttgtggttaaatgggacatgggacrtagtcacattgtttaaatcaggatttctaccttgcagagacagttctcgagtttcttaataccttcagcaactcactgcatctctttgtgacttggcttctctgcctgggagagaaatgcatataatgcactatttctgcactgtacagttttatgaaaataactttaaagtctttgatattgagatacattccactaaattgtttttatagatgtaatctaaattgcacatgtaatctaaaacatgtatacctatattaagaaacataatgtaaactttctagcaaactgtctctatcaaaagagtacctgtctaatgaaataaagagcttattaactcaaaggcatttgtatttgaggg

SEQ ID NO: 172347 - DNA, 453 bp, Homo sapiens
aacctcaaactccctacagtccgtgggttagaatttctaaaaagttatttctcctatcaaccaatgtggaaactttttcaaggatgctgtgaattcttcatttttgcaaaagataagaacaaatttaacaatgaargctatttttttagactgagagataggtagaaattttgtatacaagctccaccacatgtcattatcttattcagctgacaggtggtgctccagaacaatatgggcagtggggatgtgtgattagatttccatcagtttctgggacaaaccatgagctatacctttaagataaaaaccttttaatgtagtagttgaattaccgaaatttttatgtgcaagaatagtaacccaataaaataatttttacatgcaaataaccttatacattttaaatgtgttttagatgcaggcattgaactagactgggatgaagttttc

SEQ ID NO: 172348 - DNA, 453 bp, Homo sapiens
aacctcaaactccctacagtccgtgggttagaatttctaaaaagttatttctcctatcaaccaatgtggaaactttttcaaggatgctgtgaattcttcatttttgcaaaagataagaacaaatttaacaatgaaagctatttttttagactgagagataggtagaaattttgtatacaagctccaccacatgtcattatcttattcagctgacaggtggtgctccagaacaatatgggcagtggggatgtgtgattagatttccatcagtttctgggacaaaccatgagctatacctttaagataaaaaccttttaatgtagtagttgaattaccraaatttttatgtgcaagaatagtaacccaataaaataatttttacatgcaaataaccttatacattttaaatgtgttttagatgcaggcattgaactagactgggatgaagttttc

SEQ ID NO: 172349 - DNA, 543 bp, Homo sapiens
gtcaggtatgtctttatcagcagtgtgaaaatggactaatacatctaccatatacaatatacaaaaaccaactttatctggaataaagacttaaatggaagacccaaaacaatgacactactagaagaaaacattggagaaacaacacttcaagacattggtctgggcaaagattttatagttaagctcttaaagcagaggcaacaaaagcaaaaatagacaaatgaaactatatcaaactaaaaagtttctgcatagtaaaagaaacaacaaattgaagagacaactggcagaacrggagagaatatttgcaaactattcatctgtcagggactaatatgcagaatatacaatgagctcaaacaactcaacagcaaaaaaataaataatccaatttcaagatgggtaaagtatctgaacagatatttctcaagagatgacatacaaatggcaaacaagcatataaatatgttcaatatcactacttattagataaatggaaatcaaaaccccaatgagatatcatcacaccccagttagaat

SEQ ID NO: 172350 - DNA, 610 bp, Homo sapiens
cttgagcaatgatgatgggatccaatggataacttcttctccctttctttctccaggtggaataatattctaggaatcaatctgatcattaaggtggataaaagaaggagaattcagcaaagcagactacaaaggagatgcaaatgagaagcaaagaaaaccagaaaagggatgaaataattgaggggacaaattcttaagggaatgggagtgagagccagtaagtgagtggaggggagagccacagctgaatcagggaacctgcatccattgcaccaagatgaatgttaaagcatgtgagtacaagagtgagccacctggtaaatacggcagtggaaggataaggttctcttctaatttctttaattaactctgataaatttaaagcaatrttatcggctaaggggtaaggagaggtaaggtgtgttttgaatgtttgaaaagagaagatatgtgtaatagttgatgggaaatagaaatcctgagggtgatgtagtcagatgactagggaaagtattagaattagtggtggcaacccctgtctccttatttttatctttacccatgcatgacccaatttaaaacagacttttccataattattacagtc

SEQ ID NO: 172351 - DNA, 564 bp, Homo sapiens
aaatgattaatttctaaaagcccaacctttctaatgaaggaaattaggtttaaagcaagatatcctttcacctgtcaaatcaacagattttaagaataatattattgaatttattgaatgcataaatgtgataatactggtctgactaaagcagtaccctcaacactactagaaagaataaattaccacatctttttaagaagaaagtttaggctggatgcagtggctcacacctgtaatcccagcactttgggaggccgaggtgggcggatcacctgaggccaggagttcaagaccagcctggccaacatggtgaaactccatgtctactaaaagaaaataaatgcaaaaattagccgggtgtgacggtgcatgcctgtactcctagctactggggaggctgaggcaggagaatcgcttgagcctgggaggtggaggttgcagtgagccgagaatgcgccactgcactccaacctgggcaacagagtaagactccgtctcaaaaaaaaaaaaaaaraagaagaaaaaaagagaaagaaaaaaattagcttggaatataagaag

SEQ ID NO: 172352 - DNA, 549 bp, Homo sapiens
gtgagtgtacttgtgtatgtgtgcgcatattcctaaaaaccgacagtttttcttaaatacctccatgcctagtcttattattcaaaagaggtttttgaacctctaattttaaaaagaatatgtcatttgttatatatttgcttcyaattacttttatttcttctttctggagtggaaaaaatttaacttcaatattcacagattagtattattccttactattcttctctttcaccaaaattcttaaataagtagcatataaaaaatgccaagtaaactcaaatagaccatttacacatttaaaaactgtgcataaataaattataaattctaaacacaaattgtactttcccacttgtttagactgcactagttaacatatactaccaaacagagtgacaacttggtaaatgtggtatttttaaaatctccaattaacttattctgaagtatgtcctaaaggaattgatttcaccatagaatcttaagagactttgagttcagttgttcaaaaaagaaaatactttatgatgaatcagaaatgatgag

SEQ ID NO: 172353 - DNA, 564 bp, Homo sapiens
caactgtttgattttgatcaagttgcataacttttccaggcaccagtgtccttttatttttccatgaagagaatggtatcaacctcgccagtttgtctataagattatgagagacaaygtagatagtgtgctaagtaccgtgcctgacaaacagggagcatcaataattgatagctggtgttaatgcggttccatggattgcatattgcttaaactttgtccacaaacaagcaattttgacattttagtgacttcagagtttctatttcaagatgagttgaacttgacaaaagattggcgcaatgaaggggagagagaagaaggagaaacaatacagaagacaagagccctataagaacatttttcttttttttgtttttaacttttattttaggtccgggggtagctgtgtaggtttcttagatgggtaaattgtgtgtcgctgagatttaatgtattaattatccaatcacccaggaagtgagcataagatatggtagtttttcaaccctggctcccctctgagcctctcttgtctatgtctattagcccctggtgtctatt

SEQ ID NO: 172354 - DNA, 548 bp, Homo sapiens
gatctatctaaaataaagagcacatcagaaggtgggttctaacaagaagttaagagtgagattctcttaccaaactagaaattgttttaaacttcaattaaccaagactgaacctttcccattaaaaactcatatggatgataaaaataattttagtagtaggatctataaaacctaacttgacatgtattatggctgtggtcattcattccatttgagaattccaattttagtgctattttagttagatcatgtttccttaaaaattctgatggaaactacatacaaatgaaacttcaaaagcatataacttaactagatattaacaactttgttaatactcttacccattattaagcrgtagtcaaatgttaaatccataaataactgttactgttaaggtattcctaatataagtgaaaggttaactgaatcattcaaattgaaaatatttattctccattaatggtaaatcattttgcattcaatacccacattgttttagttggtacacttaaactgattagcatataggaattttatgactt

SEQ ID NO: 172355 - DNA, 554 bp, Homo sapiens
gtttatagtcagcctatggaagttggaatgtaggataggggatgcatttgtgatgtttctgagatagaatatttggaacagagattagaaattgagaatgtgaagataaggttactacaatagttttttacataatatataataaatactcattgagtgaaataataagtggactttaagaggattaaaaactgtaaataaattttatagattttattgacattaatgttgacataaaaatagaaaatacaccaccattcctttggtagaaaatgcacagcttaataattaataaaacaactatgtaattattgtcttaaaattatctggggactttttccttatgaattttgctatttcataattacttaaataaataaaaatgaaagaataattgaaaacagtttttctggcttattccggaacacttaagaatttaacatgtattaataatattttttccactgaccatataacctaacatacmttttgtgagaagtttttaaaataaagtggaaaagttatttcagttagaattgttagcacaaatcagt

SEQ ID NO: 172356 - DNA, 652 bp, Homo sapiens
aaccatcaattacattttacaaattaagaaagtgatcctaaagaataaatgactcatctactttatttttctgtatactacatacttcatttaatccttggagcagaggaggaaacatattttactaaccaggagagtaagaaaatctatctgatgtcacacattatgctctcttgagaaatgcgaattgcaaacaaaaggatttacttttctctagatatgtcttcatgtagatccagtccttggtctttttctccttatttcattcttctttgaggagctccaactgctcacagaatttcaatctgtatcataaggattctgagtctctcctattctgctgtgcaytaacactataattctctatctccatgtgtctataaaatattgctgattcatcgtttcattaacttagaaactgagagtgattttcaggtagttacaatcaattcttgatttctcttctaggaattaaaggctttctaaataaccaaatcaatttgaattcattgtcttctcaatgttgtgctcaagtattgtaaagttggattgcctcaagtggccttaaaaatattttgctgctatcaaaacttattcaaaaatcaattgctgatgtatacatatattttatatacagacatatacaaaatac

SEQ ID NO: 172357 - DNA, 587 bp, Homo sapiens
aagtaatgtgtttaatacttcttgttaatatttgttaaatctttattttagaaacatccactrcaatgaaatttaagctttctctagctcatggcaagattcgattacatatttgttgaataaagaaattacaataccagagaatgtgatttttacatttacattctttaaaaagaaaacagtgtttcattacttccagtatcaattgtaaaatctttacagatgccagttttaggatcttatgtgggataactattcattaaaatagaaaaacaagaatgtgaagcataacatttcactcaaaagcatactaggcatttggtcctaggaaacttttatactgaaataacattttagacaaaatagtgtcttacatggtgcttttattgtttagtggctatttccacatagatcctattcagatgatattttattgactaccactactgataaagcaaatacatatatagtgtattttgcctgttccaaaatttaatttttgtacatttgccattacttaattttcaagttcagttttaagtcttgaaatctagggcaaggaatagccagtctttaaacagaatctc

SEQ ID NO: 172358 - DNA, 587 bp, Homo sapiens
aagtaatgtgtttaatacttcttgttaatatttgttaaatctttattttagaaacatccactacaatgaaatttaagctttctctagctcatggcaagattcgattacatatttgttgaataaagaaattacaataccagagaatgtgatttttacatttacattctttaaaaagaaaacagtgtttcattacttccagtatcaattgtaaaatctttacagatgccagttttaggatcttatgtgggataactattcattaaaatagaaaaacaagaatgtgaagcataacatttcactcaaaagcatactaggcatttggtcctaggaaacttttatactgaaataacattttagacaaaatagtgtcttacatggtgcttttattgtttagtggctatttccacatrgatcctattcagatgatattttattgactaccactactgataaagcaaatacatatatagtgtattttgcctgttccaaaatttaatttttgtacatttgccattacttaattttcaagttcagttttaagtcttgaaatctagggcaaggaatagccagtctttaaacagaatctc

SEQ ID NO: 172359 - DNA, 587 bp, Homo sapiens
aagtaatgtgtttaatacttcttgttaatatttgttaaatctttattttagaaacatccactacaatgaaatttaagctttctctagctcatggcaagattcgattacatatttgttgaataaagaaattacaataccagagaatgtgatttttacatttacattctttaaaaagaaaacagtgtttcattacttccagtatcaattgtaaaatctttacagatgccagttttaggatcttatgtgggataactattcattaaaatagaaaaacaagaatgtgaagcataacatttcactcaaaagcatactaggcatttggtcctaggaaacttttatactgaaataacattttagacaaaatagtgtcttacatggtgcttttattgtttagtggctatttccacatagatcctattcagatgatattttattgactaccactactgataaagcaaatacatatatagtgtattttgcctgttccaaaatttaatttttgtacatttgccattacttaawtttcaagttcagttttaagtcttgaaatctagggcaaggaatagccagtctttaaacagaatctc

SEQ ID NO: 172360 - DNA, 417 bp, Homo sapiens
gttgtctcttctaatatacagttctagttgttccagattctacaggtataagaaggtgaagcttatgtcagtctagtgctctgtgggcctgtgtggagcagagcctccatccaaaatatatgaataagtaacataatcaataaattaatctctattgtgttaagccactgcaatttgaaattttgtttttactgaagtgcaaacttatcctatacttatcaaaatagaaatgaagaaatagttwcaaagagaagaaaattataatttttttgtttagttagtaaatcttcaggtaattagaaaaagtgatgctttttaagaacgacttcattataaatttctccactgagaatactaatttattatattttaagtatgcaaagtttataaaattaaataaacatctttgctatccat

SEQ ID NO: 172361 - DNA, 417 bp, Homo sapiens
gttgtctcttctaatatacagttctagttgttccagattctacaggtataagaaggtgaagcttatgtcagtctagtgctctgtgggcctgtgtggagcagagcctccatccaaaatatatgaataagtaacataatcaataaattaatctctattgtgttaagccactgcaatttgaaattttgtttttactgaagtgcaaacttatcctatacttatcaaaatagaaatgaagaaatagttacaaagagaakaaaattataatttttttgtttagttagtaaatcttcaggtaattagaaaaagtgatgctttttaagaacgacttcattataaatttctccactgagaatactaatttattatattttaagtatgcaaagtttataaaattaaataaacatctttgctatccat

SEQ ID NO: 172362 - DNA, 470 bp, Homo sapiens
ttaacttaaaaatgttaaaacttttacatggcttttgtttactttaaataataaaactggatcttgtttcttattatgtacaaaaatcagctcaagatagattaaagacttatatgtaagacctgaaactatgagttctaggagaaaacccgggtaaaactcttctggacattggtctaagcaatgaattcatcactaagacctcaaaagaacaggcaacaaaaacaaaaatagaaaaattgaattaattaaatgaaaaagcttctgtacaataaaataaataatcaacagagtgaatagataacctgcaaaatgggagaaaatactttcaaactatgcatttgaagagggaatagtatctcraacttatacagaactcccaacaactcaacaacagcaatgaattgaaacaaataattccattaaaaagtggacaaatgacatgaatggatatttttcattcaaatggc

SEQ ID NO: 172363 - DNA, 590 bp, Homo sapiens
gtacccaaacaaagagtgaattcaatttccattgcccatgattttatatrtatgccttccttgagccaattctctcttcagttgtatgtggactaacacacatacaattattggctcaaatactgtggatcttcttacactcagtcttgaatggcttataatctgtgacgacaagctccagattcttaatggagcttttttgtggtttctcacatggaaactttctctaacatacatatctctaataccatgggacctgctgggtcatatagtcctagacatgctggaaagtccttttcagctttataacttctaaaaactagtagccttcagtatcacctgataaatgtatctaatttgccattcctaattgaggaatgttttattaaaaatcaatcctgcaagcattacattcttttattagtagcaggttgtgcaaggtacactattatgtcctttattttgcaagtattttccagaccactactcacataaattttcttgcatagtatatccctgaacttttgtgaggtttactttccattctctaaagcccaaatgcattaccaaacaatctaaataatttgtgg

SEQ ID NO: 172364 - DNA, 418 bp, Homo sapiens
cattgtttcagatgcttattgactttatatatttatggaaaaatgtctatgttctttgctcatttttttaaattattatttgagatagagtcttgccctgtcggccaggctggagtgcagtggcatrttatagttcagtgcaaccttgaactcctgcatttaagcagtcttcccacctcagccttctgagcagctatggctgcaggcacccaccaccacacctggctaattttttttaaaggtatttttgtagagacagggtcttgctatgttgcccagattggtctcaaactcctagcctcaagcaatcctcccacctcaacctcacaaagctctgggattacagttgtaacccactgtgcccagccgcatttttgaaattagctgtttatcttttagttgttatttgtgagaattc

SEQ ID NO: 172365 - DNA, 571 bp, Homo sapiens
ttccattcgaagatgattccattcgagtccatttgatgattccattcgattccattcaatgatgattccactcaaatccattgratgattccattcgtttccaattggtgatttcattagattccattcgaggatgattctattcgagtccattcaatgattccattggattccgtttgataatgattccattagagttcattcgatgattcccttcgagtccattcgattatttcttttgattccatttgatgatgattccattcgattccattcaatgattccattccattccattcgatgatgattccattcgataatgattacattcgagcccatgtgatgattccattagattctattcaatgatgactccattcgaccacattcgatgatggcattcgagtccattcgatgatttcactcgattccacttgatgatgattccttttgagtccatttgatgattacattcgagtccatgagatgactccattcgattccatttcatgatgatgcaattcgaggctattcgatcatcccattttagtgcattcggtgattctctttt

SEQ ID NO: 172366 - DNA, 571 bp, Homo sapiens
ttccattcgaagatgattccattcgagtccatttgatgattccattcgattccattcaatgatgattccactcaaatccattggatgattccattcgtttccaatyggtgatttcattagattccattcgaggatgattctattcgagtccattcaatgattccattggattccgtttgataatgattccattagagttcattcgatgattcccttcgagtccattcgattatttcttttgattccatttgatgatgattccattcgattccattcaatgattccattccattccattcgatgatgattccattcgataatgattacattcgagcccatgtgatgattccattagattctattcaatgatgactccattcgaccacattcgatgatggcattcgagtccattcgatgatttcactcgattccacttgatgatgattccttttgagtccatttgatgattacattcgagtccatgagatgactccattcgattccatttcatgatgatgcaattcgaggctattcgatcatcccattttagtgcattcggtgattctctttt

SEQ ID NO: 172367 - DNA, 571 bp, Homo sapiens
ttccattcgaagatgattccattcgagtccatttgatgattccattcgattccattcaatgatgattccactcaaatccattggatgattccattcgtttccaattggtgatttcattagattccattcgaggatgattctattcgagtccattcaatgattccattggattccgtttgataaygattccattagagttcattcgatgattcccttcgagtccattcgattatttcttttgattccatttgatgatgattccattcgattccattcaatgattccattccattccattcgatgatgattccattcgataatgattacattcgagcccatgtgatgattccattagattctattcaatgatgactccattcgaccacattcgatgatggcattcgagtccattcgatgatttcactcgattccacttgatgatgattccttttgagtccatttgatgattacattcgagtccatgagatgactccattcgattccatttcatgatgatgcaattcgaggctattcgatcatcccattttagtgcattcggtgattctctttt

SEQ ID NO: 172368 - DNA, 571 bp, Homo sapiens
ttccattcgaagatgattccattcgagtccatttgatgattccattcgattccattcaatgatgattccactcaaatccattggatgattccattcgtttccaattggtgatttcattagattccattcgaggatgattctattcgagtccattcaatgattccattggattccgtttgataatgattccattagagttcattcgatgattcccttcgagtccattcgattatttcttttgattccatttgatgatgattccattcgattccattcaatgattccattccattccattcgatgatgattccattcgataatgattacattcgagcccatgtgatgattccattagattctattcaatgatgaytccattcgaccacattcgatgatggcattcgagtccattcgatgatttcactcgattccacttgatgatgattccttttgagtccatttgatgattacattcgagtccatgagatgactccattcgattccatttcatgatgatgcaattcgaggctattcgatcatcccattttagtgcattcggtgattctctttt

SEQ ID NO: 172369 - DNA, 561 bp, Homo sapiens
cattctgttaatataatgtatcagaattattgatttgcatatgttgaaccattgttgcatccttgggataaatttcagttggtcatgataaatgatstttttaatgtgtcggtgattttgatttgctagtatttctttgagaatttttgcatcaatgtttatcattaatattggcttctagttttcattttaaatgtgtctttgtctggttttggtatcagagaaatattggcctcatagaatgaggttggaagtattgcctcctcatctatttttcagaatagtttgtgtaggactgatattagtttttccttaaatgtttggtaaaattcagtagtgatgtccttgagttcttttctttgctgggagacatcttattatgccttctatctcttcacttgttatcagtcgcttcaggttttgcatttcttcattgtttaatcttggtaggttatatgtgtctagtaatttatctatttcttctaggttttctaatttcttggcagaagttgttatagtgatttctaataatctctaggatatctgcggtatcagctttaa

SEQ ID NO: 172370 - DNA, 515 bp, Homo sapiens
taaggaggaagtccactgccatgattcaatcacctcccaccaggtcctcctccaatactggaaattacaatttgacatgagatttggatagctacacagaggcaaactatatcgttctgtccctggcccttaccaaatctcgtgtctttctcacatggcaaaatacaattatctcttctcaaaagtcccccacagtcytaactcatttcagcattaactcagaagtctacagtacaaagtatcatcagagacaaggcaagtcccttccatctataagcctacaaaatcaaaaagaagttaattacttccaagatacagtgtggatataggcattgggtaaatatttcctttcccaaaggaagaaaatggccaaaacaaagtgctacagatcccgcgtaagtctaaaacccagcaggggagtcagtaattctaaaactccaaaataatatccttttgtttcatgtctcatatccaggccacagtgatgcaaggggtagtctcccaaggccttggac

SEQ ID NO: 172371 - DNA, 579 bp, Homo sapiens
tttaattgtacatatcactatcagtaatgtttacagccattcaacaagtccctaggaagttctaaactttctctcatcttcctgtcttcttccaagctctccaaactgtttcaacctctgcttgttacccagtttcaaagtagcttgcatattttaggaatggccctacttctctggtaccaattttctgtattattctgttcttacactgctataaagacatacctgaaactgggtaatttgtaaagaaaagaggtttaattggctcacggtactgtgagctgtacagacttctgcttctgagtaggcctcaggaaacatatactcagagcagaaagtgaaggggaagcaggcacaccttaaaatgtctggcaggagaagatgggggaaggtgctacacacttttaaacaagcagatcttaggagagctctgtcacaagaacagcaagggggaagtccacccccatgattcaaacacctccaaccaggtccctcctcctccaatactgggaattacaatttggtttgagatttagatggggacacagagcmaaactatatcaagcaactataaggaac

SEQ ID NO: 172372 - DNA, 369 bp, Homo sapiens
actcataggctttataaattgtgagkaatttatactatgaccaatcttaaaatgaaaattaacttattacatcatactccactaatggagtaggttagcttttcaaagggctttgaacactccacttattcctgctcacaatctcaatattcaagaagacgagtggattttttgagaaactgagatacttcagacattgtctacatcatatctatgtgttgcgtcatgcaggtccctccctcacaactaaagaatttatccaaaccgtcaaaaagtttctcatctaactgtcctcagatatccgtcctctttaggatttgcctcagctcaaaattactttgtgcaatgacatatcttgtgcactgacaa

SEQ ID NO: 172373 - DNA, 369 bp, Homo sapiens
actcataggctttataaattgtgagtaatttatactatgaccaatcttaaaatgaaaattaacttattacatcatactccactaatggagtaggttagcttttcaaagggctttgaacactccacttattcctgctcacaatctcaatattcaagaagacgagtggattttttgagaaactgagatacttcagacattgtctacatcatatctatgtgttgcgtcatgcaggtccctccctcacaactaaagaatttatccaaaccgtcaaaaagtttctcatctaactgtcctcagatatcygtcctctttaggatttgcctcagctcaaaattactttgtgcaatgacatatcttgtgcactgacaa

SEQ ID NO: 172374 - DNA, 575 bp, Homo sapiens
gctttgggaacaacacctctgactgatcctcaacacttcctactttcctgcttgtgcccgacaacagcccaggatgggtccgggtgaaccccaagggctctctcagacacagagaccaggatttcagcctcctgggcaccaggctgtcagctcctcagtacatgtttctcaacacagggatgggaaatgtacctttcgttctagtgctgaaagaaagacgcgcaactccgccctccgtttttgttaccaacctctgtgctgcggaaataattactgggctcgagactaacatcccttatggagctgagggtcccaaaacaagtccagagaaagcaaacaattactggtgcaatgacagggttctatcgcgctgtggtggaaagaacccagactgtgaaggcaggaaacccgwaacagtcggtcgcagttgcgcccttacctgagaggtgactgtggcaaatcccacaacctttagaatctcagggtcctcatctgaaaacacctccccctcccagagtggtcatgggaactgaatgggctgagggatgagaaggggctctgccgccctctaacag

SEQ ID NO: 172375 - DNA, 616 bp, Homo sapiens
tgaaactagatcatgatttagtcaaaattcaaagatatttctaattatatttactttgaggacatacataaacttttagggtagtaacttgcatttctgaaacaagaaaattaaaaaagaaaagctattctttagttgctgttgttcagaattgcaggacattgtggtacaaggaaaaccttttttatggtagagaacaaattttctaaactagatgtcttttgaggtacatcaaaattggtctgtatttattattatgcaaatttgcaccagttcccayagtgaatgccaaaaaaaggtgacagtttctttttgtatttgtgatttacattctttctaggacatgcagtttatagttttaatatataaagacttggaaaatagaatcaagttgcagtaaattttaaaagacttatccattgaagagagaatttcattgtagtgtagtcacccctctgtactcatgtatttcatatttgcaaatgcttctacttgctaaaatttatttacaaccccaatatctataatagcagtttagtggtcattcacagatttcagaggaaaagcaaaaattttgaattgcctaatgagttttcaactgaggttgaacaaagtg

SEQ ID NO: 172376 - DNA, 624 bp, Homo sapiens
tattttaaggatattagccttggataaaattggatgtaaggtagggaggggctgatgatagtagaaattgaaataacagattatattcaacagactataaaagcaggaggaaatgatatttgtctactttgttcattgctctttttgtrctttgcattcattcctttatcctcagtgtttagcagagtgtctggcacataatgggcatggaataaatattttttaattaacttgtttcccttaaagggtataggtcaaagaggatcagagtgttatatggcccttggaaaaaaacagattttaatgatcagagatgcaaaattagaaaatcctaggttcctaaaaagctaataattatgcaccctctcttaccaaactctcatcccactatggaagaaaaacaataaatgataataccccactccttttgttttttttctgttatcatgtattctgaatggcgagaaagtcagaaatacaatttgggtacatattacaactgattttgaatgcagattgtagactctttacccatttataaagcaatggaaaaatagtaatgtttattttaagcaaagtaagatcatgatttgaattatactttggcaagaaaattatggtagg

SEQ ID NO: 172377 - DNA, 624 bp, Homo sapiens
tattttaaggatattagccttggataaaattggatgtaaggtagggaggggctgatgatagtagaaattgaaataacagattatattcaacagactataaaagcaggaggaaatgatatttgtctactttgttcattgctctttttgtactttgcattcattcctttatcctcagtgtttagcagagtgwctggcacataatgggcatggaataaatattttttaattaacttgtttcccttaaagggtataggtcaaagaggatcagagtgttatatggcccttggaaaaaaacagattttaatgatcagagatgcaaaattagaaaatcctaggttcctaaaaagctaataattatgcaccctctcttaccaaactctcatcccactatggaagaaaaacaataaatgataataccccactccttttgttttttttctgttatcatgtattctgaatggcgagaaagtcagaaatacaatttgggtacatattacaactgattttgaatgcagattgtagactctttacccatttataaagcaatggaaaaatagtaatgtttattttaagcaaagtaagatcatgatttgaattatactttggcaagaaaattatggtagg

SEQ ID NO: 172378 - DNA, 624 bp, Homo sapiens
tattttaaggatattagccttggataaaattggatgtaaggtagggaggggctgatgatagtagaaattgaaataacagattatattcaacagactataaaagcaggaggaaatgatatttgtctactttgttcattgctctttttgtactttgcattcattcctttatcctcagtgtttagcagagtgtctggcacataatgggcatggaataaatattttttaattaacttgtttcccttaaagggtataggtcaaagaggatcagagtgttatatggcccttggaaaaaaacagatttkaatgatcagagatgcaaaattagaaaatcctaggttcctaaaaagctaataattatgcaccctctcttaccaaactctcatcccactatggaagaaaaacaataaatgataataccccactccttttgttttttttctgttatcatgtattctgaatggcgagaaagtcagaaatacaatttgggtacatattacaactgattttgaatgcagattgtagactctttacccatttataaagcaatggaaaaatagtaatgtttattttaagcaaagtaagatcatgatttgaattatactttggcaagaaaattatggtagg

SEQ ID NO: 172379 - DNA, 582 bp, Homo sapiens
cttctaaatatgtaacaaggtgtgtataaaacacatgggtcatgcacattttcagataattaagccatttcagaactttagaaaccagagtttaagtgttttattataaaatatcttactattcacctaacaaaatcyagacatctgtgttttgtcagcattcaattttctattttcataaattgtcatattcaaaggtatcgggtattttccatttatttttaagaaatatatatgttctgtggtataatgtaatattggacacatgttggtattctgattaaatcttttgtttactgaaagataagcattgctcataccttagaataccctagaatatatatttttttcctaaaaaaattaaatttatataagtgtatagacattaagaggacaggttctgaactcacacagtcggagttcaaatcttgacacttagggccgggcgtggtggctcacacctataatcccaacactttgggaggccgaggtgggcggaccacgagatcgagagcatcctggctaacacgtgaaaccctgtctctactaaaaataaaaataaaaaaaatttagtcgggtgtg

SEQ ID NO: 172380 - DNA, 460 bp, Homo sapiens
gtttttaaattgaatatctattaagcacaaggtaacaattcttaccacacacatcagttttattatttcccttttacaaataagacacagatgggtagtcagatgtctttgaggtaacacagcaagtagttaaactgggttaagtgattaacccaggttgagtatggttccaaaatctcttacagtgtcaggcaggctacatcagtgcagtatacgtacatcaggtttcacgaaaaattttttccagagaaaacacaaacccaaggaaccttcagtaartggtgccttatattagtggtttttagcaaaaggaagaaacttaagtgttttcctgctgcctgacaaaagtgaaaaacagtattttggtttttattgaagttagcatgtatgtttgtagcttgcataaaatagtactgaaatccaattgattatgaattcttggactaacagaacctggatg

SEQ ID NO: 172381 - DNA, 592 bp, Homo sapiens
tgttcagtttctgtggtggcaggctgtgtctccagtaacaactcagaaagtgaggatctctccaaacaaaagaaacaatttcagaaaagttatcactgtgccatgccaccatcttttcccagactcctgttttcctcccaacagccaatcattctcgttagtttctagagtagccccagaaaaggatacatatgtgtaaatttctgtgtccctcccccttctttataagtgaatagaaatttataaggttattgagtgagactttccctgatactgtgtagctggttagaaagacccagacctgagatcgaagtgtaccctatagtttagagaggattttgattggtagcrtttgggaatattggcaggaaagggaaactaatgtctcactccctgacttgctgcctgcctcacatggctggacaactggatatgagatttaaataggacatgaatgaaaagtctaaactaaactagactgaacattgtttaattatgacaatgagccctacccaagatgttgtttgtcacatgatggcaaaggagactttgacagagtgtggtgaaagtatttattcatattggtgacagt

SEQ ID NO: 172382 - DNA, 493 bp, Homo sapiens
agtccaggtgtttaagacaagcctgggcaacatggtaagatcccatctccacaaaaaaaacttaaaattagctgggcatggtggcaccgacctgttgtcccagctacttgggaggctgaggcagaaggatcactggagcccagaaggttgaggctgtggtaagctaaaattgtgccactgtactccaaactgggcgacagataagaacctgtaacctagtaaataaataagtaaatgaaaagaataattgaatcagaacactacctatggaaaattcacagaccartacattctataagtaaacaccaacagaatggctaactttcttcggcaaacaacaaaaaagacatttttctaatgcaagattagaatgtaatccttggaaaggatttttattcaaatattacccttcttagaattttgtcatatttgaatcaaaatcctctccaaggattacaacatcagaaattattttagaatgtttcagatactg

SEQ ID NO: 172383 - DNA, 493 bp, Homo sapiens
agtccaggtgtttaagacaagcctgggcaacatggtaagatcccatctccacaaaaaaaacttaaaattagctgggcatggtggcaccgacctgttgtcccagctacttgggaggctgaggcagaaggatcactggagcccagaaggttgaggctgtggtaagctaaaattgtgccactgtactccaaactgggcgacagataagaacctgtaacctagtaaataaataagtaaatgaaaagaataattgaatcagaacactacctatggaaaattcacagaccaatacattctataagtaaacaccaacagaatggctaactttcttcrgcaaacaacaaaaaagacatttttctaatgcaagattagaatgtaatccttggaaaggatttttattcaaatattacccttcttagaattttgtcatatttgaatcaaaatcctctccaaggattacaacatcagaaattattttagaatgtttcagatactg

SEQ ID NO: 172384 - DNA, 598 bp, Homo sapiens
aaacaaacaatatttaatggagctccaacatatctggtggttgacttgtcagtggaaactttacaggtcaggagagagtggtataacatgtataaagtgctgaagaaaaataacatttattagaagagtatatctggtgaaaatatatttcaaacatgaagaagaaataaagacttccccagacaggtaaaagctgagggatttcattaataccagaccttttcaacaagaaatrttgaaagaaagaaaagaacattagtgagcaataaaaaatcacctgaaggtacaaaactcacaataatagtaaggtagaaaactcactggaaatagaatattataacaccgtaactgtggtgtgcaaactacccttattctaagtagaaagactaaaggatgaaccaatctaaaataataactacaacaactttgcaaaacacattcagtacaaacaatataaatagaaacaacaaaaagttaaaaagtggggggatgaagttaaggtatattatttttattagttttcttttttcttatttgtttatgcaaatgatgctgttatcaggttaaaataatttgttataatatagtatttgcaaga

SEQ ID NO: 172385 - DNA, 598 bp, Homo sapiens
aaacaaacaatatttaatggagctccaacatatctggtggttgacttgtcagtggaaactttacaggtcaggagagagtggtataacatgtataaagtgctgaagaaaaataacatttattagaagagtatatctggtgaaaatatatttcaaacatgaagaagaaataaagacttccccagacaggtaaaagctgagggatttcattaataccagaccttttcaacaagaaatattgaaagaaagaaaagaacattagtgagcaataaawaatcacctgaaggtacaaaactcacaataatagtaaggtagaaaactcactggaaatagaatattataacaccgtaactgtggtgtgcaaactacccttattctaagtagaaagactaaaggatgaaccaatctaaaataataactacaacaactttgcaaaacacattcagtacaaacaatataaatagaaacaacaaaaagttaaaaagtggggggatgaagttaaggtatattatttttattagttttcttttttcttatttgtttatgcaaatgatgctgttatcaggttaaaataatttgttataatatagtatttgcaaga

SEQ ID NO: 172386 - DNA, 616 bp, Homo sapiens
cagcccttgggccaaggagtaatttcaaatttcaagtcttattatttaacaaatacattatgtaacgctataattgctataggtagtgatttctctgatggatctgggcaaagtacattgaaaatcttctgaaaataatctaccattctagatatcattaaaaacacttgtgattcatgggaagagagcagaatatcaacattaggaggagtttggaagaagttgattcctgctcttatggatgtccttcaggggtttaagattttagtggaggaaagaaatacagatgcggtgaacacagtgagagaactagaattagaagtgaaacctgaagatgtgactgaattactgcaatctcaggataacaatttaatcactgaggaattgcttcttatgaatgagccacaaaaatgtttctttgagatgraatctactcctggtgaagatgctgtgaacattgctgaacatgatgcatttagaatattacacaacttatttgataagcagtggtaggatttgagaggattgactccagtgttgaaaaaagttctactgtgggtaaaatgccatcaaacagcgtggcattttacaaaaaaaaaaaccaagggaaaaaaaa

SEQ ID NO: 172387 - DNA, 520 bp, Homo sapiens
taacatatattttaaatttttcccttgttaacttaaatttcaatatttcttcagtgttgtcaaatattaaaccacagtaatttttatrttaatcactcaagtagagataatgtaaagaaatagaagatttgaaagacattcatgaagagagggagagggaagaagcttgccctacaagatattgggaaattgtatatctatagtatctgatatggtttgactctgtgtccctgcccaaatctcatctccagttgtaatcctcacatgtcaagagaggaaggtgattggatcatgggggcactttaccccatgctgttctcgtgatagtgagtgagttctcacatctcatggttttgtatttggaagttcctccttttttttcttttccatgttgccttgtaaataaggtgcctgcttccccttccaccataattgtaaatttcctgagtccaccccagccatgcagaattgtgagtcaattcaaccacctttgtttgtaaacatgtccagaacatgtcac

SEQ ID NO: 172388 - DNA, 520 bp, Homo sapiens
taacatatattttaaatttttcccttgttaacttaaatttcaatatttcttcagtgttgtcaaatattaaaccacagtaatttttatgttaatcactcaagtagagataatgtaaagaaatagaagatttgaaagacattcatgaagagagggagagggaagaagcttgccctacaagatattgggaaattgtatatctatagtatctgatatggtttgactctgtgyccctgcccaaatctcatctccagttgtaatcctcacatgtcaagagaggaaggtgattggatcatgggggcactttaccccatgctgttctcgtgatagtgagtgagttctcacatctcatggttttgtatttggaagttcctccttttttttcttttccatgttgccttgtaaataaggtgcctgcttccccttccaccataattgtaaatttcctgagtccaccccagccatgcagaattgtgagtcaattcaaccacctttgtttgtaaacatgtccagaacatgtcac

SEQ ID NO: 172389 - DNA, 542 bp, Homo sapiens
aatatgaggcaagattttggaatcattcctgtggtgtagatttctaacactttgagactagataagctctaaaagatggtgcaaaaatggaagaacagatgactaatgacctaatgctgaaccacactcactgtcagagatgtataaaacaaccaactcaacagaaatagaagaggagaaagagagcaggaaggggaaaagaaaattcaagatagtacagatctctgaataccaggagaggtgagagcatcagcaaagagggcatgaccacattgcagagtgacaaaaagattttagctccagagaagaaagtataggtgaccttcaattttgtaaaaatagaggttacagaattcatagataagaaaacaagatagttttaaaacaattattttaaatattatctatgcttgttaatttttttaaattaatattataattctctattttaattgtttgaatgatagaaataatgtttgatatrtaaagtatgtttgatatataaagatgtttgatatataaagtaacattgaagcaaaatt

SEQ ID NO: 172390 - DNA, 520 bp, Homo sapiens
agtctaatctgacacaaggcaagtcccttctgcctatgagcctgtgaaaccaaaarcaagttagttacctggaggtatagtcattgggtaaatacttctcttcaaaaaggagaaattggccaaaagaaaggggctacaagccccatgcaagtccaaaactcagaaggacagtcattaaacctcaaagctcaataatctcctttgattttatgtctcacagccagggcaccctggtgcaagaggcaggttcccaaggtcttagacagcagagctctatggctttgtagggttatgtctcctgcagctgctttcataggctggcattgagtgcctgcagcttttccaggctcagaatacaagttaccagtggatctacatttctggggtctggaggacttagctctcttctcacagctccacaaggctgttccaaagtggggattctatgtgggggctctaactccacatttcccctcagcagtgccttactaggggatttccatgagggttctgccccgca

SEQ ID NO: 172391 - DNA, 520 bp, Homo sapiens
agtctaatctgacacaaggcaagtcccttctgcctatgagcctgtgaaaccaaaagcaagttagttacctggaggtatagtcattgggtaaatacttctcttcaaaaaggagaaattggccaaaagaaaggggctacaagccccatgcaagtccaaaactcaraaggacagtcattaaacctcaaagctcaataatctcctttgattttatgtctcacagccagggcaccctggtgcaagaggcaggttcccaaggtcttagacagcagagctctatggctttgtagggttatgtctcctgcagctgctttcataggctggcattgagtgcctgcagcttttccaggctcagaatacaagttaccagtggatctacatttctggggtctggaggacttagctctcttctcacagctccacaaggctgttccaaagtggggattctatgtgggggctctaactccacatttcccctcagcagtgccttactaggggatttccatgagggttctgccccgca

SEQ ID NO: 172392 - DNA, 520 bp, Homo sapiens
agtctaatctgacacaaggcaagtcccttctgcctatgagcctgtgaaaccaaaagcaagttagttacctggaggtatagtcattgggtaaatacttctcttcaaaaaggagaaattggccaaaagaaaggggctacaagccccatgcaagtccaaaactcagaaggrcagtcattaaacctcaaagctcaataatctcctttgattttatgtctcacagccagggcaccctggtgcaagaggcaggttcccaaggtcttagacagcagagctctatggctttgtagggttatgtctcctgcagctgctttcataggctggcattgagtgcctgcagcttttccaggctcagaatacaagttaccagtggatctacatttctggggtctggaggacttagctctcttctcacagctccacaaggctgttccaaagtggggattctatgtgggggctctaactccacatttcccctcagcagtgccttactaggggatttccatgagggttctgccccgca

SEQ ID NO: 172393 - DNA, 530 bp, Homo sapiens
tcaggtcattgcttatgcttatgaaacaggttgctagaagcagccaggccacatcttgaaatcttktagaagtttcttccaccagataccctgaatcatcactctcaagttcaaagtttcacaaatccctagagcaggggcataatgcagtcaagttctttgctaagacatagcaaaagtgacctttactttagttccaataagttactcatttccatctgagacctcctcagcttgaccacctctgtccatatcattatcagcattttagtcacaaccattcaacaagatttttaggaagttccaaaccttccctcatcttcctgtattcttctgagccctccacactcttccaacctctgcctgttacccagttctaaagctgcttccacattttcaggtatctttataacaatgcccacttctctgtaccaattttctgtattagtccattcttgcattgctataaggaaatacctgacactgagaggtttaattggttcatggttccgtatggctgtacagaaagc

SEQ ID NO: 172394 - DNA, 540 bp, Homo sapiens
tcaggtcattgcttatgcttatgaaacaggttgctagaagcagccaggccacatcttgaaatcttgtagaagtttcttccaccagataccctgaatcatcactctcaagttcaaagtttcacaaatccctagagcaggggcataatgcagtcaagttctttgctaagacatagcaaaagtgacctttactttagttccaataagttactcatttccatctgagacctcctcagcttgaccacctctgtccatatcattatcagcattttagtcacaaccattcaacaagatttttaggaagttccaaaccttccctcatcttcctgtattcttctgagccctccacactcttccaacctctgcctgttacccagttctaaagctgcttccacattttcaggtatctttatarcaatgcccacttctctgtaccaattttctgtattagtccattcttgcattgctataaggaaatacctgacactgagaggtttaattggttcatggttccgtatggctgtacagaaagcatgatgctgg

SEQ ID NO: 172395 - DNA, 478 bp, Homo sapiens
tcagtgatatttctcccatttgcttttgaaagaagagaaatatggctctgttacacctggctcaccggcggtcagagtttaaagttatctctcttgttccctgaacaattcctgttatcctgttcttttttcaaggtgcccagatttcatattgctcaaacacacatgctgtacaatttgtgcagttaatgcaattattatagagtcctgaggcgayaaacatcctcctcagctgataggattaagagattaaagtaaagacaggcataggaaatcacaagggtattgattggggaagtgataagtgtccatgaaatcttcacaatttatgtttagagattgcagtaaagacaggcataagaaattacaaaagtattaatttggggaactaataaatgtccatgaaatcttcacaatctacgttcttctgccatggcttcagctggtccctccgtttggggtccctgacttcccgcaa

SEQ ID NO: 172396 - DNA, 574 bp, Homo sapiens
ccaacaatatatgttagtgtgaaaagagcagcagtaagactcagcaatcagcaaaaaatattaaaagccagaagacaacataacaacatttttaaagaataaatacatagataggtaagttggggaagacaaaggcagagagagacagagagagagaaggtagtgcctttaacaataattaaaacatttagttccttatacatctccaactgagggaatttcaattgatccacatagtttgttttctactcttatgccaatttaatatatattcttttccaatgacttctggattgataaaaataatattttctatgagtcaatttcatattttataggcatatataattgaattcctaattttgtattaaagaaatctatattttacaacaccaaggacatatatgacatgaattatccttcatataattatagtccccttactttgttaggtccaatttacatamgttttagaatttcttaccattatattttaaaattgataaatacaaaattacatatatgtttgtatatgttatttttctaatgtaacagtgtaatatataaagaaaat

SEQ ID NO: 172397 - DNA, 503 bp, Homo sapiens
ttggcatctttgtcatgaatctttgcccaggcctatgttcagaatggtgtttcctaggttttcttctagggtacttgtagctttaggtttatgattaagtgtttaatctgagacagaggttggaaaaagatggccaaatagatggctccactgattcrtccccctgtaaggtcacaaatttagcaactacctacacaaaaagacacattcattagaaccaaaaatcaggtaagcactcacagtatcttgttttaactacatatcactgaaagaggcattgaggaaggtaggaaagacaatcttgaattgctgacaccatccctccaccatcccctggccgcagctatgtgtcactgggagaaaatctgtgcactttgggtagagagagtgaaacaactctgagatgctgcattgaactcagtgttgtcctgtcaacagcaaaaggcaatatcgagctgaactgagctgatacccacccacgtagggatcgtttaaacaggctc

SEQ ID NO: 172398 - DNA, 599 bp, Homo sapiens
agcaggagcaggcactttcaagcctgtgagggagaggggcttcctgggcctggccgagagtgtagggatgtccaggtctggagacatggctgggtggctgcagctgtgcctgggaatgcggggctccagccctgctaacttggtagagaacgttgctccaggttgttcctggcccctgstaggtccatggaagttgcagccccagccacgcctcccctgctgcatctggcatccctacagcagctgctccagatgggccaccactgccatcaataagttttgacatatttattaattagagtataagataagcttctgttaaccagaaaagagaaagggaccattaaatcagtgcataaaaaataaaaatttacttccactaatcctaatggataggacccaggttcgatacggtagtactgatggcttcaaaacttggctttcatcttggattcaaaaggtgttgatctaggttgtgccatcatccagacagaaggaagagagagagggccacaggaatgcattgcaaatcttttcaagttgagtcctggaagtggtaatcatcacttaaactcaacaactataggagtgaaaaaaac

SEQ ID NO: 172399 - DNA, 599 bp, Homo sapiens
agcaggagcaggcactttcaagcctgtgagggagaggggcttcctgggcctggccgagagtgtagggatgtccaggtctggagacatggctgggtggctgcagctgtgcctgggaatgcggggctccagccctgctaacttggtagagaacgttgctccaggttgttcctggcccctggtaggtccatggaagttgcagccccagccacgcctcccctgctgcatctggcatccctacagcagctgctccagatgggccaccactgccatcaataagttttgacatatttattaattagagtatmagataagcttctgttaaccagaaaagagaaagggaccattaaatcagtgcataaaaaataaaaatttacttccactaatcctaatggataggacccaggttcgatacggtagtactgatggcttcaaaacttggctttcatcttggattcaaaaggtgttgatctaggttgtgccatcatccagacagaaggaagagagagagggccacaggaatgcattgcaaatcttttcaagttgagtcctggaagtggtaatcatcacttaaactcaacaactataggagtgaaaaaaac

SEQ ID NO: 172400 - DNA, 595 bp, Homo sapiens
tggttatacatgaaaatagtttatggtcattgtccatttttattgcatttactcatcatactgatagataaattatatttcctgtgtttaattgtatgtgtcagcacacctctcagaaaacttcctatattcatkgagaattttggcacttgacctatattctttacccataagctcctgtaatgattatagataaatacagtgtcaatccatcatcttatccttactattcattgaaaagaaaatcgaattttgggattaatatggcccttagtaaactataatgtttatccagaaatgtaagacttgctccagatatgcaggacatttttttcaagtaataaaaaagaaaaaaaagaagaaatgtatgactgcctcagaaaagtgtgtgggggctatctcaaataagggtgtttacaggatatctttaactacattggtgtatcccttaaaatctggagcctagcccttaggtttccagaaacagaaatgaagaaatcatcaatctctcaaggagaagtctcagtaatcaagtcaagtgagacaaggctgatatatataaaatataaaggtatattaggttaaaataattgct

SEQ ID NO: 172401 - DNA, 539 bp, Homo sapiens
aaatattagctcacttgatttcacaacagctttgggagaaagattgggtgggtgtcgttatgctcattttctgtgaattggatgaagactaataaaatggacatggtcttggagtcataggaaaacttgggttcttagtctgttctgctcttaatagctgtgtgatgttgggaaattacttgacctctctgagcctcagtttgtttcmgcagaaaagtagggatattaccatcaaacagttatttttaggaataaacgagattatctatgcatgtctctagctcaatgttactaatcaggatcctgcacttaataaaagacaaaaatgagataagaggtcatgttggctgactttgggccagttgccctttgcattaagtcagatttaaggcagtaatttgctagtcattgtatcatgagccatggcccaaacacttgacagactttgaagatttgttattactttgccttatggaagcctaaaaagtcatgatcataaaacaattaacatttctgctgatctggaaaaaatgtcactc

SEQ ID NO: 172402 - DNA, 592 bp, Homo sapiens
cccactagtcaattttggcttttgttgcaattacttttggtgtctttgtcatgaaatctttgccttttcctatgtccagaatggtattgcctagattgtcttccagggtttttatagttttgggttttacatttaagtaatccatcttgtgctgctttttgtatatggtgtaagaaggggaccagcttcaatcttctgcatatggctagccagtaatcccaataagatgatgtgatttctttgtgtcttctcaaagcaagagtcttttcttgatctgattttggaataaaaggtgaattaaggaagtgaatattacccaagcaaaattctacttctcatgcatatttatgttcaaatttgggagaaaggaaacggtaacattttcaacattccaagcaccatttgcaagcaccgtacattttgctcatattttaggatatttataatatattatgattacattagtttgtcagggttgccatarcaaagtaccacaaactgggtggcttaaaccacagaaatgtcttacagttcttacagctctggaaactagaaactaaagaactgtagggttctttccatatgatgactt

SEQ ID NO: 172403 - DNA, 541 bp, Homo sapiens
aaactgaaattacccctttcaggattaaaaaagaaaaagaaagagaaagggggtaggaggaagcacattatttcaaaggcagcaaagcagtgatttattatcagtagttccttcttcaggaaaactgttttcagttatctgatctttgtgtctcagtctcaacaacttaacacaaaatattggtccaagccygaattagtcaggtttccataaagggacagaatagatagatagatagatagatagatagatagatagatagatagatagatagatacagacagacagacagacagacagatagacagagatataatgggaagtttgttaagttttaacttacatgatcacaaggtcccacaataggctgtctgcaagcttgaggagcaaggagaggcagtccaagtcttaaaactgaagaacttggagtccgatgtttgagggcaggaagcatccaagcacaggagaaaaatgtaggctggaagactaggccatttttgctgcctgatttatattcgcttgcagctgattagatggtgcc

SEQ ID NO: 172404 - DNA, 541 bp, Homo sapiens
aaactgaaattacccctttcaggattaaaaaagaaaaagaaagagaaagggggtaggaggaagcacattatttcaaaggcagcaaagcagtgatttattatcagtagttccttcttcaggaaaactgttttcagttatctgatctttgtgtctcagtctcaacaacttaacacaaaatattggtccaagcctgaattagtcaggtttccataaagggacagaatagatagatagatagatagatagatagatagatagatagatagatagatagatacagacagacagacagacagacagatagacagagatataatgggaagtttgttaagttttaacttacatgatcacaaggtcccacaataggctgtctgcaagcttgaggagcaaggagaggcagtccaagtcttaaaactgaagaasttggagtccgatgtttgagggcaggaagcatccaagcacaggagaaaaatgtaggctggaagactaggccatttttgctgcctgatttatattcgcttgcagctgattagatggtgcc

SEQ ID NO: 172405 - DNA, 541 bp, Homo sapiens
aaactgaaattacccctttcaggattaaaaaagaaaaagaaagagaaagggggtaggaggaagcacattatttcaaaggcagcaaagcagtgatttattatcagtagttccttcttcaggaaaactgttttcagttatctgatctttgtgtctcagtctcaacaacttaacacaaaatattggtccaagcctgaattagtcaggtttccataaagggacagaatagatagatagatagatagatagatagatagatagatagatagatagatagatacagacagacagacagacagacagatagacagagatataatgggaagtttgttaagttttaacttacatgatcacaaggtcccacaataggctgtctgcaagcttgaggagcaaggagaggcagtccaagtcttaaaactgaagaacttggagtccgatgtttgagggcaggaagcatccaagcacaggagaraaatgtaggctggaagactaggccatttttgctgcctgatttatattcgcttgcagctgattagatggtgcc

SEQ ID NO: 172406 - DNA, 542 bp, Homo sapiens
tttccatctgcagtcatttcaatcatacaaacaactccagggctgccaacaggcgttgtgtagctaaacgtaaaacagaagaggccattatgatatgtgtttttggcaagaaaggagtaacttcacacatggatagtaagtacttcttcattgagagaggtactttctggatcacaacaatcctgaaatatggacccagccaagtgtggacattttcaagtagataaaagatgtatttcttttctaacactgcgtttwattttccttctctcctactgactttaaaattggacatggaatgctttcagaaagttaaacctcccacaaaataaaaagagcttcatgtgtataagtagatattgacaaattttaagtgctaactgtggttgacatatggtctccctcatgtaggagattgttggaccagtaacatcaatgttaaatgatgctaaactccctaggtagaatttcccctccctggcctacagggaaattgaaatggaataagaaatgaaaggctgcatacccctgagcagagagat

SEQ ID NO: 172407 - DNA, 450 bp, Homo sapiens
aagcccatcctaacaaaccacttctttttaacttaatcacctctgtaaggccctatctccaaatatagtcaaactgtgagatactgggtgttaggacttcagcatatgaattttggggaaaaaacaattcagctcataacagataagtgctgtctaagagggcatgtggccagaaagcagaaagtaaggacaataactcgtcattcatttattcattcgtctaatgaatcctgagagcatgctatgtatcaggctatattctcagctcargaaattcagcagtgaacaaggcagacaagctcctgctttaggcagcttctatcccagctgagaagttgggaggggaaagccagaaaaactactcaaaaatcatgtgtgttacactctggaaaaatttccatgaagacatgtagtacaatataaggtttaaatatagatgtaaacacaagt

SEQ ID NO: 172408 - DNA, 384 bp, Homo sapiens
tgaaccgaattcacaccactgcactccagcctgggtgacaagagcgagactaggtctaaaaaaaaaaaaaaaaaaaaccatatttaggtatagtggatgtaggagccattcctacctctagggctgagaaacagtgctccaaggaacaaatcagaagacacacatatacactcacacacatacacacacacatgcacacttacacacacatacctacacacttgtgcacacacacacacacaccacctggtatgcagagcacgatggagagtgtggccattgagtgacaraaaagttcactgtgataccccagtccaagactgggaaagaagaagccatatactggggcgctgctgaaatgcactgggaagctaccctctggga

SEQ ID NO: 172409 - DNA, 600 bp, Homo sapiens
gaattcaagaaagaggcttccacaaatgcttataatttttagtggcaaaaaaaagcactcaaaaatgtatatattaggattgtaactattaaaaaaaaataggctggacacagtggctcacacctgtaatcccagcactttgggagggtgaggtgggcgatcacttgaggtcaggagtttgagaccagtctggtcaacatggcgaaaccccttttctactaaaaatacaaaaattagccaggcatggtagcgcacgcctgttatcccagctactcaggaggctgagatatgagaatcacttgaacccgggaggctgaagttgyagtgagccgagatcgtgccactgcactctaacctgggcaacagagcaagactctgtctcaaaacaaaaacaaaaacaaaaactaagcagaggaaaaagacttaaaggaagtaataccaatatggtaaactagttgtgttttggcagtgggtttctccaagaccgtgttccattttcccaactaatgtgatgtggttttaaaacttctataactaaaagagatagtctcctttaagaagctaaacctgggtgtcagtactgtcagttgttttgtgatt

SEQ ID NO: 172410 - DNA, 600 bp, Homo sapiens
gaattcaagaaagaggcttccacaaatgcttataatttttagtggcaaaaaaaagcactcaaaaatgtatatattaggattgtaactattaaaaaaaaataggctggacacagtggctcacacctgtaatcccagcactttgggagggtgaggtgggcgatcacttgaggtcaggagtttgagaccagtctggtcaacatggcgaaaccccttttctactaaaaatacaaaaattagccaggcatggtagcgcacgcctgttatcccagctactcaggaggctgagatatgagaatcacttgaacccgggaggctgaagttgcagtgagcygagatcgtgccactgcactctaacctgggcaacagagcaagactctgtctcaaaacaaaaacaaaaacaaaaactaagcagaggaaaaagacttaaaggaagtaataccaatatggtaaactagttgtgttttggcagtgggtttctccaagaccgtgttccattttcccaactaatgtgatgtggttttaaaacttctataactaaaagagatagtctcctttaagaagctaaacctgggtgtcagtactgtcagttgttttgtgatt

SEQ ID NO: 172411 - DNA, 600 bp, Homo sapiens
gaattcaagaaagaggcttccacaaatgcttataatttttagtggcaaaaaaaagcactcaaaaatgtatatattaggattgtaactattaaaaaaaaataggctggacacagtggctcacacctgtaatcccagcactttgggagggtgaggtgggcgatcacttgaggtcaggagtttgagaccagtctggtcaacatggcgaaaccccttttctactaaaaatacaaaaattagccaggcatggtagcgcacgcctgttatcccagctactcaggaggctgagatatgagaatcacttgaacccgggaggctgaagttgcagtgagccgagatcgtgccactgcactctawcctgggcaacagagcaagactctgtctcaaaacaaaaacaaaaacaaaaactaagcagaggaaaaagacttaaaggaagtaataccaatatggtaaactagttgtgttttggcagtgggtttctccaagaccgtgttccattttcccaactaatgtgatgtggttttaaaacttctataactaaaagagatagtctcctttaagaagctaaacctgggtgtcagtactgtcagttgttttgtgatt

SEQ ID NO: 172412 - DNA, 529 bp, Homo sapiens
aattaaaataaaaaaactcaaagaatgggttaatcagcagatagagacagagagacaattagaaactggaagatagctataaagaaattggctgggcacagtggctcatgcctgtaatcccagcacttcgggaggccgaggcaggcggattacttgaggtcagaagtttgagaccagcctgmccatcatggtgaaactccatctctactaaaaatacaaaaattagctgggcgtgctggtgggcgcctgtagtcccagaataaagatcctatcaataagccctgggatatatgacaacttgatttatgatggagagggcactacagatcagtggggaaaaggatggactattccattaacagtactgacacaccgaaagcagtagccataaaggaaagattattaatttttactacattaagagtttctgttcatcaaaagatgccataaaaacaagacaagccaagaactagaaaaaactacttgcaatacatatagctgaaaaaggattagtatcaagaatatttaa

SEQ ID NO: 172413 - DNA, 510 bp, Homo sapiens
agaaaaagaagttatctttcaattaaatttgtatggttttaattttttactatagaaataaagtacacagtttttcttttttttttaaaagtcaagtaacacagggagttgtaaaataaaagccaagtctccttctctttcctaatgaactctcttccacttcagatttttatgcatattcacgtatcaataaatgcatatactttctaaaaatcatattttaaaaactatcgtgcatcttggtgtttttcactttacaatgatgtatctttgagatctttgcacattaacacatgagacgttggtgtttctaacagttacagagaatgcaaagtcaccctgcaaaaggattccaaaatgtacaaaaattcacactttcaacagcacatttctctctaacactcagatgactrctcaaaaattttaacctctcacaatctaaaagatgaaagtgtatctcattgctattttattttttccgttatgagtatatttaggcattttttcaca

SEQ ID NO: 172414 - DNA, 598 bp, Homo sapiens
ctgagatctcgccactgcactccagcctgggcaacagagcaatactttgtctcagaaaaaaaaaaaaaaaaaaaacgaggtcagagaaaggacaacctttcgagatcaagaggtgattgcctaraagcccagtttgatggaaaggagagaacttgagctttgaagctgggagcattctcagttttacccacttccaaaaagttgagccatgggcagtaacttacctctctgaacctgagctttctcacctgattcaaggtggcaacaatgaaaatggaaaaagaggcagaagtaaagggatgtacatttggatggatgcggtaaaagaaaaggagatatttaggatgaatggcagatttctggctagaaagccttggaaacatgaactggaagggctagaaagagtctcaggtaggcagcaattgggcaggaagagaatgagttcaatttttgccgtgtggaatttgaagagcctacggagcatccatcagcaggacactggggatataagaggctcatacagcataggaaccaaatgagagatcctgattccagtcttgatcacatgggtaaaagcagatgtcatgggagggagaga

SEQ ID NO: 172415 - DNA, 598 bp, Homo sapiens
ctgagatctcgccactgcactccagcctgggcaacagagcaatactttgtctcagaaaaaaaaaaaaaaaaaaaacgaggtcagagaaaggacaacctttcgagatcaagaggtgattgcctagaagcccagtttgatggaaaggagagaacttgagctttgaagctgggagcattctcagttttacccacttccaaaaagttgagccatgggcagtaacttacctctctgaacctgagctttctcacctgattcaaggtggcaacaatgaaaatggaaaaagaggcaraagtaaagggatgtacatttggatggatgcggtaaaagaaaaggagatatttaggatgaatggcagatttctggctagaaagccttggaaacatgaactggaagggctagaaagagtctcaggtaggcagcaattgggcaggaagagaatgagttcaatttttgccgtgtggaatttgaagagcctacggagcatccatcagcaggacactggggatataagaggctcatacagcataggaaccaaatgagagatcctgattccagtcttgatcacatgggtaaaagcagatgtcatgggagggagaga

SEQ ID NO: 172416 - DNA, 384 bp, Homo sapiens
  misc_feature (1)...(384): n = A,T,C or G
nnnnnnnnnnnnnnnnnnnnnnnnnnnnnnnnnnnnnnnnnnnnacccatctatatctattgctctttatttgtggttcactggcacttggtttataaatagataaatattttctctgaaatcagtgcttaccacagaatttggcatattcagtgtttgaatagttgaatgmatgcatgcatggacatacgaggctgttcattaacttttaaatgtatctgattatattatctggcactgctttgtatttcgttaagtgaatcatgggagattgtccagtcccttaaaaatattttactctcttcatctgatctcatttttaagaagaaaacataggcatttaacatgactaattatcagtgaatccatgctaactgttgggga

SEQ ID NO: 172417 - DNA, 462 bp, Homo sapiens
acttaaaaagaaagaagacattccaatataccagtactggtttagtatcccttattcaaaatccttaggaccagaagtgttttggatttgggactttttcagagtttgaactatttgcattacacttatagttcaacatccttaatctgaaaatgcaaaatccaaaatgctccaataagcatttcctttgagtgtcaagtcagtactcaaaaattttcagattttgacgcattttggattttgagtttttggattacagatattcaaccatatcaaaaatgaaaagatagctctagactctgcagacatcaaacgaaaaataaamactatgaacatacatatgtaaatttgacaacatagataaaatagacaaattattcaaaaagtacaaagtaccacaactcctccaatgtaaaataaatgacttgaataatcctgtaaacaagtaggaatgttgaattc

SEQ ID NO: 172418 - DNA, 387 bp, Homo sapiens
agtatcccttattcaaaatccttaggaccagaagtgttttggatttgggactttttcagagtttgaactatttgcattacacttatagttcaacatccttaatctgaaaatgcaaaatccaaaatgctccaataagcatttcctttgagtgtcaagtcagtactcaaaaattttcagattttgacgcattttggattttgagtttttggattacagatattcaaccatatcaaaaatgaaaagatagctctagactctgcagacatcaaacgaaaaataaaaactatgaacatacatatgtraatttgacaacatagataaaatagacaaattattcaaaaagtacaaagtaccacaactcctccaatgtaaaataaatgacttgaa

SEQ ID NO: 172419 - DNA, 552 bp, Homo sapiens
gttttgtcattttattttttttgtaattagattttgtaatctctatctcctatgttcccatcaacaaacactatatcttgctcacaaataacacgagccacaagtataatctgccttttcttctcctgaggattttagttaatatctgtgcctttcaatcctgcattgcttgaagcagcagcaggcagcctatggctttcctgtaccctgagtcctgtctccctgaggatggcggagcccagggagaataggttaaggtggtaaggacctgtgaktgaaatttagattccatactcagtctgtatttgattctgggcaagcatttcaagtgtatcaatatttttcacctctcaaacagaatgaagctatttatgttaaaacacttaaaaagtgaaaagcactgtattcaaaaggggttcatgttcatacatgtacatgcacaggtttgagaacacaaaagcagcatgcatgtatgtttttatgagtaacaatgacggaaataggtattcaaattctttgcatttaccgagacactctctctgtttctgtttt

SEQ ID NO: 172420 - DNA, 552 bp, Homo sapiens
gttttgtcattttattttttttgtaattagattttgtaatctctatctcctatgttcccatcaacaaacactatatcttgctcacaaataacacgagccacaagtataatctgccttttcttctcctgaggattttagttaatatctgtgcctttcaatcctgcattgcttgaagcagcagcaggcagcctatggctttcctgtaccctgagtcctgtctccctgaggatggcggagcccagggagaataggttaaggtggtaaggacctgtgagtgaaatttagattccatactcagtctgtatttgattctgggcaagcatttcaagtgtatcaatatttttcacctctcaaacagaatgaagctatttatgttaaaacacttaaaaagtgaaaagcactgtattcaaaaggggttcatgttcatacatgtacatgcacaggtttgagaacacaaaagcagcatgcatgtatgtttttatgagtracaatgacggaaataggtattcaaattctttgcatttaccgagacactctctctgtttctgtttt

SEQ ID NO: 172421 - DNA, 552 bp, Homo sapiens
gttttgtcattttattttttttgtaattagattttgtaatctctatctcctatgttcccatcaacaaacactatatcttgctcacaaataacacgagccacaagtataatctgccttttcttctcctgaggattttagttaatatctgtgcctttcaatcctgcattgcttgaagcagcagcaggcagcctatggctttcctgtaccctgagtcctgtctccctgaggatggcggagcccagggagaataggttaaggtggtaaggacctgtgagtgaaatttagattccatactcagtctgtatttgattctgggcaagcatttcaagtgtatcaatatttttcacctctcaaacagaatgaagctatttatgttaaaacacttaaaaagtgaaaagcactgtattcaaaaggggttcatgttcatacatgtacatgcacaggtttgagaacacaaaagcagcatgcatgtatgtttttatgagtaacaatgayggaaataggtattcaaattctttgcatttaccgagacactctctctgtttctgtttt

SEQ ID NO: 172422 - DNA, 588 bp, Homo sapiens
caacgttggctgtaaatagttcatctgattcatttactaggtttattagttgaatttatcatgtgtttgtttactggttttatttgttcaatacttattatgtatctgaaaaggacacagagatatgagtgaaccaggctgtaagtcccataaggtcagaaaaaaaatctcataaagtccatgraatgtgaacaactataattgagccatgtaggaagcaaagataacattattttctgattggttgatctgaagaagttacatattaaaatcattgaatactaaggatgttttcatgtgctctttccaatactgtaacatgtaaacacacatggaggaattgaatttcattagaaactattatctgtgtgctatgaattgctcctagtcctggaacacatgttactttgcaaagaggatttgattgttcaataaaagattataagtcatttctattgagttcatgtgtgtgcgtgtggacatatgtgttggtatgtgttgcaatgttgggtaaaggtacacaaataatattcttagccttagatgatcttagcattaattgtcagtgaatgacctagaggaataaac

SEQ ID NO: 172423 - DNA, 443 bp, Homo sapiens
gccaatcctttgtgtgagctgctcttttgtttggtatactctatgcatataacttcactcccctcctttaccacgtaaatctcttttaatttttcagaggtcttcagttttaatatactgggaaagcctttaccttttcactagcatatgtcaaactccttggaatagctctcctggaactgtgttccttttctttccaaggtttgcctcaacttttcttaagtgtttggagatattctttacatacaataaaaatcaccctttttatgtggataattgggtgasttgtgtcaaatgtgtaaccaccactaaattcaagatacatatttgcattaccacaaaaagtgactcatgctcctttacagtccttctcctcagccttcagaccctgacaaccatcaatttctttttttacatttccatattggtttattataaaagtg

SEQ ID NO: 172424 - DNA, 321 bp, Homo sapiens
gtaagatgataggcttctatttgagtcttagttgttgcccctgattaatctgaagtctcacctcaggctgaaagccataaaaggtgggaaactcctcttatgctgtttctgtcatgcaagtgttcatcttcttccaggatcagcttgctatgagataasgcctagtgcctttggatagctgggttttttttaatattttgcttagagtgtatactttctatttgcagaagagttactttagtaggaactactcagttataatcagaagcagaacccctagttttcttatctataacatggggaataataattatgcatgtc

SEQ ID NO: 172425 - DNA, 518 bp, Homo sapiens
gaactgtaagtacaaagatagtggaaaaatacacaggttagttaattccagcaggtgtagatataagtaagagagtgtgatgattaatactgaggtacaacttgattggattgaaggatgcaaagtattgatcccctgggtgtgtctgtgaggttgctgccaaaggagattaacatttgagtaagtgtgctggggaaggcagacccacagttaatctggtgggcacagtctaatcagctgccagcaaatgtaaagsaggcagaataagcctgaaggagctagacaggcctaatctcccagcctacatctttctcccctgctggatgcttcctgccatcagacatcagactccaagttcttcagtttttagactgagactggctttccttgctcctcaggcttgcagacagcctattgtgggtctttgtgatcatgtaaggtaatacttaataaactcccctttatctatctatctatctatctatctatctatctatctatctatctatctatctacc

SEQ ID NO: 172426 - DNA, 462 bp, Homo sapiens
tccaccagtcccacctccaacatttgggactacatttcaatatgagatttgggtggggatacacatcctaaytatatcaagtattgaaaatgaaaagaaacaaaaaaaaaagttgcggaatgctgcaataacaatctcacatacgaaaaactgttcctgaatcaaataacagaccaaatggaaaaacaaacactcaaagatgtatttgaataaatcttttctgaaatgaaggaagacttgtattattgtattgaggtttttaatttaatttaaaatttatcagcatagacaatatggagttatttatgtacctgttgcctgtcagtgccccaatgaatgatgtatatagtccagacgttatgtcagaaggatctcactccagaggcatctattgccagtgcttcagctaatcacaacttgattaacacctggaacttttctaattagcatattgaatgtcag

SEQ ID NO: 172427 - DNA, 430 bp, Homo sapiens
gcagcatgaaggcaaatctataayggtgtgggccctggagcttataaagattggctcccatttttaagcaaatgtgtacagaaataccttaattttgtaatttactagagcatataatcataagaacatattacaaagggtcttcactctcagaagggctggtggaagtgagaacataagcttccttagcttcatggttaaatttgcctctggttagcacttatcacactatcttcaaaatacttctttatatttctgttgttctcacttaactccacatcctcagggccagaggtcacgtctttttaatcggtgtatatctaagatgcatttaaaaatgctcattaaacccttcagattggtttaatgaggattttttaaaggcatcttagatatacaccaggaagaggcagtcttgatattctcacac

SEQ ID NO: 172428 - DNA, 506 bp, Homo sapiens
ttgttattgtctgacatgtcaactcttagtcccagaacattttcccttgattctgtaacatttctcaacragggtagggggtgctgttggagctttgggatggataattctccctaacatgggacttcctaggtatggtaggagatttcgcatccctgaccttcacccacaaaaagtcaagggtggttacccattcacagccgtaactccaaattcccttaagcatttccttaggcccctggagaggtcattaccttcccctttaataacaatttatcctgatgctttgcctgccttttcacaatcatccattcttcctgcacctctactgtgataccttccctgactgtaccaacccacaaagagctctccctcctatgaatgtccaatatcattttcttggcactaatatattatcttgtggtatctatcatattgttattatataataaaatatgcactatgatataatgtgtatgtattatattcacatattatgttgttat

SEQ ID NO: 172429 - DNA, 594 bp, Homo sapiens
attcaagttgagctcaccaagtcaaaaacaccctttaaccttcaccattcttatcagagtacatgaagataacttaaagcacagtacctcgaatacacagtgattttggctcaaggtgattgcttttcttgcaaacctcaatatctgtaattggcttccacctggagctaaataagaaaagactcatacgatttcatttcacagttctcttctcaaaggaaagatatacactgcctgattccacggattctgattttgtatcctgaacattacagargttcagaacaggtttcctaatttcaagaagctccagagaaaaatgtatatattaaaaacaatgagaagtcaattaagggcttaactgtaagcctgagtgaaataggaattgaaataaggggattccagtgtggctggaagagttggaggaaatggaatttgagctcttagttgctttatttgtttttctggcttccttctgtatgtccagatgcacttttacactgaccagttctctttttagcaatatcttccccccagagtagagactttgattctcctaaatgctgctgaagaacctatgtggaaaagccaaat

SEQ ID NO: 172430 - DNA, 594 bp, Homo sapiens
attcaagttgagctcaccaagtcaaaaacaccctttaaccttcaccattcttatcagagtacatgaagataacttaaagcacagtacctcgaatacacagtgattttggctcaaggtgattgcttttcttgcaaacctcaatatctgtaattggcttccacctggagctaaataagaaaagactcatacgatttcatttcacagttctcttctcaaaggaaagatatacactgcctgattccacggattctgattttgtatcctgaacattacagaggttcagaacagktttcctaatttcaagaagctccagagaaaaatgtatatattaaaaacaatgagaagtcaattaagggcttaactgtaagcctgagtgaaataggaattgaaataaggggattccagtgtggctggaagagttggaggaaatggaatttgagctcttagttgctttatttgtttttctggcttccttctgtatgtccagatgcacttttacactgaccagttctctttttagcaatatcttccccccagagtagagactttgattctcctaaatgctgctgaagaacctatgtggaaaagccaaat

SEQ ID NO: 172431 - DNA, 594 bp, Homo sapiens
attcaagttgagctcaccaagtcaaaaacaccctttaaccttcaccattcttatcagagtacatgaagataacttaaagcacagtacctcgaatacacagtgattttggctcaaggtgattgcttttcttgcaaacctcaatatctgtaattggcttccacctggagctaaataagaaaagactcatacgatttcatttcacagttctcttctcaaaggaaagatatacactgcctgattccacggattctgattttgtatcctgaacattacagaggttcagaacaggtttcctaatttcaagaagctccagagaaaaatgtatatattaaaaacaatgagaagtcaattaagggcttaactgtaagcctgagtgaaataggaattgaaataaggggattccagtgtggctggaagagttggaggaaatggaatttgagctcttagttgctttatttgtttttctggcttccttctgtatgtccagatgcacttttacactgaccagttctctttttagcaatatcttccccccagagtagagactttgattctcctaaatgctgctgaaraacctatgtggaaaagccaaat

SEQ ID NO: 172432 - DNA, 602 bp, Homo sapiens
cctaattatcacacaagttccttttttgaccaactctaacccaaagcccatgggagaggaattctgggaaatgtacttcctggccttagtcaaggtaacaacaaagcacaatccaatatacttgactctgtttttcaccaaagcacctttcactacctgaaatattatacatttactttcttttttaaaaaatgtttattatagaatttaactttatgaagatagcaatttgctttgtcttctgctgttatcccaagcactaagaacaatgtctggcatataaagtatttgttgaatgaatgaatgaatgagrtttttggatatccttctagatgcctttctatgtatatatacgcacataacacatacacatagatataggaataaaattttacaaaataaaattatactctatacttacagctctgtaatatttttgttttttcacttattgtaaagtcatagacatcttagtattaacaataaccactgatcactgtcacatttaaaaattgttataaagaattccttcatttatgtagcaagctaattagttaattactaatgcaactgttaataatcacattactgcaattaattgt

SEQ ID NO: 172433 - DNA, 249 bp, Homo sapiens
gaggggcacccaccagatgccagccagagctctcctgtatgaggtgtctgtcgacccctgcttcgagttatctcccagtcaggaggcacgggagtcagggcctcacttgaggaggcagtctgtcccttagcagagttcaggcactctgctgggagatttgctgctctctgcagagctggcaggcaagaaagtttaagtttgctgaagctgcactcacagcygccccttcccccaggtgctctgtcccag

SEQ ID NO: 172434 - DNA, 454 bp, Homo sapiens
tgggagggaactaattccatgagctttcactctagtaaagaatattcaacaagactattyccttttgggagacaatcacagactactagatgttatgttcaagttcagaaaaatcacctacttagtcagaaaatcaatactaggctctgctactaactagctatgtgatcttagacaagttaacctctctgaagatcagtttttcatatgtaaaatgaagacaacatttctacctcatagaaagttataaaaaaaacagaatgggagataatttatgcaaaatatagcatccttcacctaataagtattcaaacaatgctgctatggctattatcatataaaatgccaagtatgatgcctggtataattatcattaatattattagctatatttattgttaggcatgtaagcgtcactgtttgaccaataattcaggacagagtctttattaaa

SEQ ID NO: 172435 - DNA, 430 bp, Homo sapiens
attaaacaaatgaagtaagtggtataaacttgctatgcccaaagttttcttctatgtaaaatgggaatgatgatactatcaacatcccatggttggtataagaactaaagggaataatatgcccttcaatccatattgacaatgagtcttatttttcctttcacatgttttaamcattagcctacatagaacaacaactcaattttggggagttactttgtatattcccgactctatgcctttattatgctctatctaacagcactatttcatgtaaggaacatttaatatgcttgcgtgtattgagtattgtatattgttaagcatacaaaaatgaaaatatgtaattcttgctcttgaaatatccaaactaagttgaaatgcattatgaaatttattgaatagtatttatataagcgtgtgtgcgtac

SEQ ID NO: 172436 - DNA, 311 bp, Homo sapiens
agatcttctgcataacatcgtgcctatagttagcaataatgtattgtgcacataaaaatatgttatgagggtaaatctcatattgtgctcttaacacaataaaaaataaaaaagaagcatggggtttgccataaaagtaaatttctccttaataacttctatcacattttgaaacagtatgcagaaggagggtaaaaagttaagcatgcaatctctacctgcagaacttaacattcctgctctttctcagatcrgaagtataaggtacctactggggcctcagctgaaaatttcaggagagccaccctgag

SEQ ID NO: 172437 - DNA, 570 bp, Homo sapiens
ttcattatactgaaacataatctttgcctacaaaaagcgaggtatttttatcctgtatattaaattcatcacatatttgtaaagaattaatttcctgtagaaattaggtataaaaattgggtatcccaaatgattatcagttagcattttattagtgtctctgatgtgtacagctgtataataaatacacatgatatataatctgtaaacactgtgcatgtctatttttaactttaagaattctaacaatgttattttatgaagtggaatacatttcagagaaatttgctcagatagtgcaacaaattaactttcagtctagatagttgggagatttggaaatcaaaggttatatttcatcttctygttaaaagacaaataatttcaaggctaaaccaaacattctgtttctctaaaaaggaatcttgaatcttgagactgttttgctagtgaatgtttttacttttcattttgttgtttaagcttgtttcacatgtgcaccatttggtctttagagttttaaattattttcttttgccaggactctgtgtccaccacctgaatgactat

SEQ ID NO: 172438 - DNA, 560 bp, Homo sapiens
  misc_feature (1)...(560): n = A,T,C or G
ataaattaactctgtctttttatgtatgtatgtatgtatatatgtatgtatgtatgtatrtatgtatgtatgtatttatttatttattttttgagatggagtttcactcttgttgcccaggctggagtgcagtggtgtgatctcagttcactgcagcctctgcccctctggttcaaggtattcacctgcttcagcctcctgagtagctgggattacaggcatccatcaccaggccctgctacttttttgtatttttagtagagatagggtttcaccgtgttggccaggctgatcttgaactcctgacctcaggtgatccacctgcctcggcttccgaaagtgctgtgattacaggcgtgagccaccattcctggcctttgtcttttctttctaattttcctttcgtcttttaaaatgaagcataatgtattaatctgtcaatgtgtatgactcagtgaatatttcagaaagtactcttctgacataaaattttaatcccaggattcataattgtataagtgaaatatgacacattttaaaattcnnnnnnnnnnnnnnnn

SEQ ID NO: 172439 - DNA, 540 bp, Homo sapiens
tctgtgtactcgggtttcctcccacactccaaagatgtgcaccttatgttagttgttgtgtttaaatggtctcagtctgagtgagtgtgagcatgtgtttgagtgtaccctgccatagaatggtgtcctggccaggagtgattcccacctggcaccctgagctgcctgagataggctctgkccacctggaaccctggaccacaatattcagcttactttttttttcttttgttttttttttgagacggagtcccgctctgtcacccaggctggagtgcagtggcgcgatctcggcttccctagtagctcatgccattcccctgcctcagtctccctagtagctgggactataggcgcccgccaccacgcccggctaagttttttgtatttttagtagagacggggtttcaccgtgtcagccaggatggtctggatctcctgacctcgtgatccacccgcctcagccttccaaagtgctggaattacaggcgtgagcctccgcgcccggcccagcttactgtttttaatcttttaaaatgt

SEQ ID NO: 172440 - DNA, 540 bp, Homo sapiens
tctgtgtactcgggtttcctcccacactccaaagatgtgcaccttatgttagttgttgtgtttaaatggtctcagtctgagtgagtgtgagcatgtgtttgagtgtaccctgccatagaatggtgtcctggccaggagtgattcccacctggcaccctgagctgcctgagataggctctggcyacctggaaccctggaccacaatattcagcttactttttttttcttttgttttttttttgagacggagtcccgctctgtcacccaggctggagtgcagtggcgcgatctcggcttccctagtagctcatgccattcccctgcctcagtctccctagtagctgggactataggcgcccgccaccacgcccggctaagttttttgtatttttagtagagacggggtttcaccgtgtcagccaggatggtctggatctcctgacctcgtgatccacccgcctcagccttccaaagtgctggaattacaggcgtgagcctccgcgcccggcccagcttactgtttttaatcttttaaaatgt

SEQ ID NO: 172441 - DNA, 540 bp, Homo sapiens
tctgtgtactcgggtttcctcccacactccaaagatgtgcaccttatgttagttgttgtgtttaaatggtctcagtctgagtgagtgtgagcatgtgtttgagtgtaccctgccatagaatggtgtcctggccaggagtgattcccacctggcaccctgagctgcctgagataggctctggccacctggaaccctggaccacaatattcagcttactttttttttcttttgttttttttttgagacggagtcccgctctgtcacccaggctggagtgcagtggcgcgatctcggcttccctagtagctcatgccattcccctgcctcagtctccctagtagctgggactataggcgcccgccaccacgcccggctaagttttttgtatttttagtagagacggggtttcaccgtgtcagccaggatggtctggatctcctgacctcgtgatccacccgcctcagccttccaaagtgctggrattacaggcgtgagcctccgcgcccggcccagcttactgtttttaatcttttaaaatgt

SEQ ID NO: 172442 - DNA, 631 bp, Homo sapiens
ttgttactcagctatataccttctaaattgcatgaaatctcttgagagtcctgatctagaatatttgagtaatatgtataaattgattttgacatgtagctaattgacacaaatcagtatgtcacatttgtaggtacctgattatggaggtaattatctcaacttctctaatgcacagttcttttagtgtgcacatatatttctaaaatgcttaactgtagccatagtctctgttgttttgctttacaggcattcatatacgttaaagatataaaaataattaaagaaaatcacttatatctccctcatctttattcttacattggaatacacagtctgttaactttttgagggatcaggcttatttatttttttcttgattcaagttttcacaattttggarctagtgcttggatagcgggcctcaggactctgcctagtgctctattctcacaaagaatagtagccaaaaaatatattgtatgctctggttctattgcttatatgttgtgtaacaaaaaaaaatatttttgttgttgttgttagcaattattttaactgttctgacggtataataactatttacttcacagagttatgggaaaatcaaatgagataaaaatatagtggc

SEQ ID NO: 172443 - DNA, 631 bp, Homo sapiens
ttgttactcagctatataccttctaaattgcatgaaatctcttgagagtcctgatctagaatatttgagtaatatgtataaattgattttgacatgtagctaattgacacaaatcagtatgtcacatttgtaggtacctgattatggaggtaattatctcaacttctctaatgcacagttcttttagtgtgcacatatatttctaaaatgcttaactgtagccatagtctctgttgttttgctttacaggcattcatatacgttaaagatataaaaataattaaagaaaatcacttatatctccctcatctttattcttacattggaatacacagtctgttaactttttgagggatcaggcttatttatttttttcttgattcaagttttcacaattttggaactagtgcttggatagcgggcctcaggactctgcctagtgctctattctcacaaagaatagtagccaaaaaatatattgtatgctctggttctattgcttatatgttgtgtaacaaaaaaaaatatttttgttgttgttgttagcaattattttaactgttctgayggtataataactatttacttcacagagttatgggaaaatcaaatgagataaaaatatagtggc

SEQ ID NO: 172444 - DNA, 509 bp, Homo sapiens
ctgccctttgcatttttacttatcctctacatagcaaggaagtgtgtaagattttgatttcgtttttacatttcatttaaatgtattttaccaaattgagaaagaaagtgcagggtgactagttttcacttttaatttttcttagcaggtgcttttaaaactttccaagtgaaattttaatcatttggcaatgtatttgaactctagcattcacctgataaacaattatttaagataattgcatattgatcattctttactttatgcacatccttcagtatttatatctatttctaattttgataaaatgttctgctccatgattctgagatcagtaatactatttaggatttytgtatcttctccatatttgttatttaaaatatagatttataagaaattccattgttcataaatttatagaaatcctattggaatataaatcaaatataagacaaatatatttaactggatttttgcatataaaaacatgcaacaagaatatattt

SEQ ID NO: 172445 - DNA, 563 bp, Homo sapiens
agcagaaaacatggaacagagaaaaacattacaaatatttctaagccaaaattgctatacaatttaaaataatgacatgacaattgtaattaacacaggatgctatgggtaaaatcaattagtatcaaaagaattatttacatttaaaaatattattcctttttttttttttttcttttttgagacagagtcttcactctgtcgcccaggctggagtgcagtgkcatgatctcggctcactgcaacctccacctgcagggctcaagcaattcttctgcctcagcctcccacgtaactaggactacaggcatgctccatcatgcccagctcatttttgtattttttactagagacagggtttcaccatattgtccaggctggtctcaaacttctgaccttgtgatcagcatgtctcgacctcccaaagtgctgggattacaggcgggagccactgcacccagccctaaacatattattgctattttctttgaaataaaaggtcaaaataaaatgtactaagtcaataaccacatatgatttaagcaaatacatgactagttaag

SEQ ID NO: 172446 - DNA, 563 bp, Homo sapiens
agcagaaaacatggaacagagaaaaacattacaaatatttctaagccaaaattgctatacaatttaaaataatgacatgacaattgtaattaacacaggatgctatgggtaaaatcaattagtatcaaaagaattatttacatttaaaaatattattcctttttttttttttttcttttttgagacagagtcttcactctgtcgcccaggctggagtgcagtgtcatgatctcggctcactgcaacctccacctgcagggytcaagcaattcttctgcctcagcctcccacgtaactaggactacaggcatgctccatcatgcccagctcatttttgtattttttactagagacagggtttcaccatattgtccaggctggtctcaaacttctgaccttgtgatcagcatgtctcgacctcccaaagtgctgggattacaggcgggagccactgcacccagccctaaacatattattgctattttctttgaaataaaaggtcaaaataaaatgtactaagtcaataaccacatatgatttaagcaaatacatgactagttaag

SEQ ID NO: 172447 - DNA, 563 bp, Homo sapiens
agcagaaaacatggaacagagaaaaacattacaaatatttctaagccaaaattgctatacaatttaaaataatgacatgacaattgtaattaacacaggatgctatgggtaaaatcaattagtatcaaaagaattatttacatttaaaaatattattcctttttttttttttttcttttttgagacagagtcttcactctgtcgcccaggctggagtgcagtgtcatgatctcggctcactgcaacctccacctgcagggctcaagcaattcttctgcctcagcctcccacgtaactaggactacaggcatgctccatcatgcccagctcatttttgtattttttactagagacagggtttcaccatattgtccaggctggtctcaaacttctgaccttgtgatcagcatgtctcgacctcccaaagtgctgggattacaggcgkgagccactgcacccagccctaaacatattattgctattttctttgaaataaaaggtcaaaataaaatgtactaagtcaataaccacatatgatttaagcaaatacatgactagttaag

SEQ ID NO: 172448 - DNA, 502 bp, Homo sapiens
tgttggcaagtgcggtgtgtatctttaaaagtataatttagcagatagtttcgaaagaagagcttttgaaaggatttggaaattagaaaggcattgagaggattttatttttcaaaggttcacaatgaatgagatcacataggcttgagataattattcttgcctgtaatgcaaattcaatggccaattttttttcatatactaaaaacactgaaaatraattctctgatctcagaaattcatgtttaatgttgtcaccctaggttatttttctttaattcaaaactttgctaacagaagtctagattatgaaaatatacttaaatgacgtgtatgtatttgtgcgtgcacatacaaatatccaagacaacatcagaatacaactttagttcttaatctacattttcctccccttcattttcctccacatccttttcaatcagcttaatttattttatttgaatacattcttttctccatgtgcttatttcttaagcacata

SEQ ID NO: 172449 - DNA, 577 bp, Homo sapiens
gctgtcccagactaagggagtggtaggtggggtatgaaaatgcccactccaggtatsaacagaagcaaaacagctctatagcctgagggttgtctttgatttagagtcacagtttcaagctattcaaagcaaaagtccacagaaacttggggagaggagcatgggaccaatgcaagggaatcttaggcaagtagatgaaacatcaacaaggtttactgaaaatggatttcatcttgaaaaggaaaagaagtattaagtcatgcagaccatctaaatagggagagaaaatcaatcttgatttaatctatatgaagaagcaattgaccagatgaaagcaaaggtttagaggtgagaataactggaaaataatgggaatactcccagtttggtaaatgatatgaaagaacatttaatagagctcctgcaattcttgagtatacctggggtggaagcatgtcctttattcctatattctgtttccttaaactctgtacctgcaactattgagatactaagaatatatatgggaaatgtgagaatacttcatatataataaacatatatctatatataggta

SEQ ID NO: 172450 - DNA, 577 bp, Homo sapiens
gctgtcccagactaagggagtggtaggtggggtatgaaaatgcccactccaggtatgaacagaagcaaaacagctctatagcctgagggttgtctttgatttagagtcacagtttcaagctattcaaagcaaaagtccrcagaaacttggggagaggagcatgggaccaatgcaagggaatcttaggcaagtagatgaaacatcaacaaggtttactgaaaatggatttcatcttgaaaaggaaaagaagtattaagtcatgcagaccatctaaatagggagagaaaatcaatcttgatttaatctatatgaagaagcaattgaccagatgaaagcaaaggtttagaggtgagaataactggaaaataatgggaatactcccagtttggtaaatgatatgaaagaacatttaatagagctcctgcaattcttgagtatacctggggtggaagcatgtcctttattcctatattctgtttccttaaactctgtacctgcaactattgagatactaagaatatatatgggaaatgtgagaatacttcatatataataaacatatatctatatataggta

SEQ ID NO: 172451 - DNA, 464 bp, Homo sapiens
aaacaacagctaaataggaagcccttgataagatcgatgatgaaaaagcatgttgaaaactcaggagaaatatcacaagaaatttctgcgggataaatgaagaaaggaagaggtggaggaaaaaagagagggatggaaaaagaggaagagtctacaatttgttgtyagttatgtctgtttcaatttccttactatctttccacatttttcctcagatcacaggattttgactctatcaaatgtgttttagaaacatgctttacatcttttaagttcttagtctactaagtcctttaaagctttagatgtgcataaaaagtgttttagcctttaatatgagaaaaaaagaatatttcacttgcataggaacaatatgaaatccttagtgaaatgcaggctttcttaaattcagtatatactcctaatttcctgaaagctatgttgacttaacttagtatgtccca

SEQ ID NO: 172452 - DNA, 464 bp, Homo sapiens
aaacaacagctaaataggaagcccttgataagatcgatgatgaaaaagcatgttgaaaactcaggagaaatatcacaagaaatttctgcgggataaatgaagaaaggaagaggtggaggaaaaaagagagggatggaaaaagaggaagagtctacaatttgttgtcagttatgtctgtttcaatttccttactatctttccacatttttcctcagatcayaggattttgactctatcaaatgtgttttagaaacatgctttacatcttttaagttcttagtctactaagtcctttaaagctttagatgtgcataaaaagtgttttagcctttaatatgagaaaaaaagaatatttcacttgcataggaacaatatgaaatccttagtgaaatgcaggctttcttaaattcagtatatactcctaatttcctgaaagctatgttgacttaacttagtatgtccca

SEQ ID NO: 172453 - DNA, 448 bp, Homo sapiens
acagaaaagatatcaaacatttccataaaagctgaaagttgttttaaccagtactgattatacatttctgaaagtgatattggagagatattgaaggctagggattcatgtttgtgtgcttgcatactttaaatttgcatgcagyctaatcaaaatgattgtagaatttaacaatcacactaacaatgcatgaaaatgtccaattttccatattattaacattgaatttttaatatttaaataatagaaaacaagtttctttttactattcttatagttgtttaattatcagtgagttcatcaatttatagttgttgaaatttacattttttatttcttaagttgcttaaattatctttgtatatcatattttcttttgaatatacttttcatatgcacagattaacacattaataggaacacatttaccttcttgatgctattcccc

SEQ ID NO: 172454 - DNA, 448 bp, Homo sapiens
acagaaaagatatcaaacatttccataaaagctgaaagttgttttaaccagtactgattatacatttctgaaagtgatattggagagatattgaaggctagggattcatgtttgtgtgcttgcatactttaaatttgcatgcagcctaatcaaaatgattgtagaatttaacaatcacactaacaatgcatgaaaatgtccaattttccatattattaacattgaatttttaatatttaaataatagaaaacaagtttctttttactattcttatagttgtttaattatmagtgagttcatcaatttatagttgttgaaatttacattttttatttcttaagttgcttaaattatctttgtatatcatattttcttttgaatatacttttcatatgcacagattaacacattaataggaacacatttaccttcttgatgctattcccc

SEQ ID NO: 172455 - DNA, 405 bp, Homo sapiens
aaatattattcatacaattttatagttttgttttttaatattgtccaattttagattttagacttagatgctttggattttaggcttagatgcttatatctgcaacttggtattctatttttttctatttgcacatgtcttgcccaattcataaattgtgttgaaaatacctgtcattagtctgtctaaaacaattatttctatttatttatttatttatttatttatttatttattwattataatagagatggagtctccctatgttgcccaggctggttttgaactcctgacctcaagcaatccttctacctcagcctccaaaagtgctgggattacagatgtgatctgtgctcaacctaaacagttctttctaattcaggtaaataattacatagctcaact

SEQ ID NO: 172456 - DNA, 549 bp, Homo sapiens
actaataagaacagatacaattatacaaaattatgctgtaagcataattttaagacaatggctatcccaaattcaaaacaactgtcagcgaaaaaacaattcccagtagttaatcactcgttttcctgtccccatcaaaagggtttgtgatgagcaagatcagggagaaaaagaatcatggtaaagagagaagaggagactagtgacagcctacatttgatataccactacttctagaaagagtaaaattacatcctaagtgtggatatgatacgaagcagggtaatcaacctcggcaccagtgacatttggagccagatgattcttccttgtggagggccgtcctatgcattgtargatgttgagcagcatccctagcctctgcgcagtagatactagtagcaaactttgctctaaacaatccctgcacttagattgtgacaatcaaaaatgtctccaatttccaatgttctatgtagcaaaaaaacagaaaaaaaaatgcccctttccactgacaaccattgatgtaaagagaaggaaattaaaatt

SEQ ID NO: 172457 - DNA, 596 bp, Homo sapiens
ctaagcaatatgtacagcccattgctcctaggctacaaaactgtgactgtattgaatattgtaagtaattgcaccaaaatggtaaatattcttgtattgttcagtaaaaatacactataamagataaaaaatggtgcatatgtttttggcacttaccatgaataaggcttgcaggactggaagttgctctgggtgtcagtaagtgagtggttagtgaatgtgaagttcttgaacattcctgtacactgctctaaaccttataaacactgtatatttagactacactaaattcataaaaatgttttcttacctcagtaataaattaaccttggcttactgtaacttttttgttctataaacttttaaatgttattaaacttttggattcttttgtaattttactcatgataaaacacaaacacattgtacagttgtacaaaatattttctttctacatagccttatcttacaaatccttttccatttctaaaattttcaattttcaattgtttatgttttaaactttcttttgttaaaaactaagacacaaacacacacgttagtctaggccatcacaaggtcaggatcatcatcac

SEQ ID NO: 172458 - DNA, 615 bp, Homo sapiens
atttcaatctggttaaaaaccattgctggggagctactgcaactttttggagataagaagacattcaggcttttggagctgccagaattcttgtcctggcatttttcctcatctgtaagggctaatgttctttcagtctttgaaggtgctgtcctttgrttggcacattttgtttttatgttctttattgcttcaggatttgactgtagtataaattgggtttagttaattggcttcatttctggatacttccagagggtcaaggctcagcttggtgctcttgggctggatgctctaaccctggggttgggaccaggcccacggctttgtcctctggctcctcaagacatagcaccaggtgtactgggatagctgaggtagtatgggctgctggcacagtgctctattgcgggccacgagcaacagtgctccagtggggcagtgatggggatgtgggaaatagccttctggtgaagcagtagtggctctgagagcaagagcactccagcagggcagtgcaggcaggcagtaaatcagctgagtggcaggggttccatgggggaaaaaaaaaacacactttgacaaggggcctttaagaaaagcacttcagtgtag

SEQ ID NO: 172459 - DNA, 484 bp, Homo sapiens
tggagaatgttacatgtgtgcttgagaagaagataaattctgtttatcttgggtgaaatgatctgtgtgcatctgttagaccaattaggtgtatggtgtttttcaaatctgtcatttctgttgattttctgtcaggcgttttttccataattgaaagtagtgtattgaagactcctactattattgtattactgtatatttctctcttcagttctgtcagtttgttttatgtattcagcttgttttatatacctgatgttgygtgtctacatattaaaatttgttaaattaatatcttgcgaataaattgacactttctaaatatatgtttccttgtctcttatgacagtctttttccctaacatctattttgtcttatataggtatatacatctttgctctctttcagttgttatttccaaaaaatatctttttctatccctttactttcagcctctgcatgtccttaaagctgaagtttatt

SEQ ID NO: 172460 - DNA, 456 bp, Homo sapiens
tgatcaggaaccataagccacttacatttaaagttattgttgatagggaattatttactgctgcattttgtttattgttttccatttgtcttgtaattcttttgtccctatgttttctctcttgctatttctttgtgttttcttaactttccatattaatatgakttgatttctttatctttttttgtgtgtaacttctacaggtattttatttgtgtttactatagggtttaaggaaaatatcttatagtttataagttgattttgtttttgtttttgcttgtttcaaggtattttctaatttcccttttgatttcttttatgtcccatgggttgtttaagggtgttttgtttaattttatttaatttcaaatgcattaattttttcttctgctttatttagtcttctgctaatctccagtagaatttctaattcagtatgatatggtatcaatc

SEQ ID NO: 172461 - DNA, 494 bp, Homo sapiens
cccaactctctcttgctcctacttcctctgtgtgagaccgctcattcccccttgtttttcatcatgactggaagcttcctcagggctccctagaagcaaaagccactatgctttatctacagcctgcagaactgtgagcctagtragcctcttttatatgttacccagtttcaggtctttatagcaatgtgagaatagactaatacaaattattatattcttatctccatgatttctgtttggtaacttttaatattttcctatcctttgaaattctaactttgttaggcattgttttcctgaatccaataagtatctttaggatggtgattttttagttgattttttgtttataatactttacctgtttcttcatattttttaactctctatgttggaatcatcatattagctaaaacaattatctctcccagtcttcacaaacttgctttgaacatgagaagaaactcattaattatactggacaggaattc

SEQ ID NO: 172462 - DNA, 493 bp, Homo sapiens
agaacgcacaatgggaaaaagatagttttttcaataaatggttttggtgaaattggatatctacgtgcaaaagaatgaaagtggacccttatttcacaccatatgcaaaaatcaactcaaaatggattcaagacttaaacataagacctgaattctaaaactattagaaaaaaaaaaaagagaaaacagagaaaaagcttgacattggtctttaccaagatttctctggatataacccaaaagtacaggcaacaaaatcaaaacatacaagtagtattacatcaaactaagatgcttctgcacagcaaaagaaacaatcaatagaatgaaaaggcaacctttcattggctaaagaagtgcggcagtgggctcatgcttaaactcagggaattcactggtcttaccatgttctccatcatsctgaagcagctggattgatagaatggtgggaggctttttgaagtcacaattacaatgccaactaggtgaaaat

SEQ ID NO: 172463 - DNA, 409 bp, Homo sapiens
tttggtatcaagagtggttgtagaggaacagaatattaaggatggagttttttcattagtttggtggtttctgagattggctgcttaatatgattagaccaaaaaatgttaaaactcaacttctgatagtatggaggaagctgatagtccttggcataaactatttagagaattatgcaaaataaatgcatttgacactcctgattcaccgctcgtgagaagcaaggagtttagttaccctatacataagayctttgaccatatgtggagaaccaaggaacataatgaagctggttgattgctcctaagttcagaggataaagtgatgaaagaaaattacgaactcagggcttctatctcttggcttcagaaacagatattgagcctcaaatctgctaagattaccctg

SEQ ID NO: 172464 - DNA, 452 bp, Homo sapiens
cccctgcaggcaaggaaacttatttatccctctggctactataaaatttttctttttkctttttgcttataattttgattacaataatttttaatttatataattttgcttataattttgattataatatatcttggtgtggtattctttgtggttattctacatgggattcactgactctcaaatttgtgtttgatgcttttaatcaaatttggaaaactttaagccaatatgtcttcacataatttttcagtgttcccaccctccacatttttggagcttcaatgacatgtatattaagctgctggatattgttccacgggtcgctgataatctgtttaatttttttcagcttttttttcctcaatatctttcagttgtgatagtctgtattactcaatcttaaagttcattgttctcttcttctgccatattgaaatttatattgacca

SEQ ID NO: 172465 - DNA, 534 bp, Homo sapiens
aataaactttttaaaaaaatcttgtgagtacataggaggtgttgtattatggggtacattagatgttttgatacaggcatgcaatgcctaataatcaaatcatcaaaaatggggtattcatcccctcgagcatatttcctttgtgttacaaacaatccagttatactcatttagttatttttaaatgtacaataaattatttttgtttgtaatcaccctgttgtgttatcaaatactaggtcttatctattatttctaactactttttgtatccattaaccatccccatcccccccaaccctcattacccttcctagcctctgtaaaccacccttctgctcagatgaacagtaaatttaatggaacatatagacactcacaatgcattttataggagacctggtgctcatagctgttcttcargttatgaagtctattgccactgattttttttgtcttttcctgacttctgaatagttgatactaggagtcaatagggtaatagccaaagtttaagatcaaaagtctctgata

SEQ ID NO: 172466 - DNA, 467 bp, Homo sapiens
ctgatagctttcaaaagtgaaaggtctaatgagcatttgttgtaagaaaaatgcagctgacaataaaatttggttttttctttgacatgcaatacaagatagttaagcctgccgaaaaaagttttagacaaaataattataaacagtgattaaatctattattaaagaagatagtgaagattacatytaaattataaaaatagatgaatatatcctttacagagaaaaaatcttgagatatataagtctgaaataatatgcaataaatatactaagcatatagtaagaatatgccaaaaatatgtcaatattaagtaaaaagattcagtaagtatggaatacaccacaaacatctgtatattaataaaactccatagttaagtgatgtgaattcctatttgaaatctagtggcctagaagatgccattttcaatttaaagtagcaaagttgtaaccaagttaatatt

SEQ ID NO: 172467 - DNA, 510 bp, Homo sapiens
atatcacactaaaaattaggttcatttctgcactttaaaaatgatattgatagttatgtatatgctaattataaaaatcacaagtgttctttatagaaaatttagaaggtatatcaataatgaagaagaaattaaaaattrcctatgcttctagaatttaaagacaggagatgttaatatttcattatatttttggacagttttcatatgtaattataaatacagatcataaacgagatttaactgtatatttaatcttttattcctatttcatttaatagtttattatgaacattttccatgtagttaaacatccttcacaagcaaactggataatgtgtgttctttaaccacttgaatataccataatttatttaatctttccacttttcttggacatttaggctgtgtctaatttttcaataacataatgattattattgtaaataaatttcaaactacatctctgctatttccttgaagtagggtctaaaatatgaatattatgat

SEQ ID NO: 172468 - DNA, 416 bp, Homo sapiens
cttaaaatcatttaagtcctctatatcatctttgttatttaaaaagtacttttaaaatgtgtattttcaaggtgggatttcatagaaatctatatcacagtgtataaaagcataggctctgaaatcagactgtgtatgaatttgaatccttgatctamaacttaatggtgtgaccttgaactagttactttatgtctttgtgcctcatttgtaaaatagaggtaataataatgagttaagacttagaaaaacaagttagagcccttagaacaatgacccacatatagctaaggacaactactgaaattattaatagtctctacagtacaatcatttgcttttcatgctttgccttcatttattcattcatagattcattcacttaataattttagaaaacctagtttacgccaggc

SEQ ID NO: 172469 - DNA, 514 bp, Homo sapiens
aaaaaggagctgtatggggagagagaatatggtcccatggagaattttctacaaatgtgcaagtgcaaacgcctgtgtggcttatgagaaggcactgcaggccttacgctgtttccaacattcccgacattttcacacctgggttggtgtctatgtggggtctgtgtgttgagaayacctgaacacctgctcctcttaaaatgagcccggaggttgtgccaggcacagctggagcagtgcagcgcctagatgtggctgtggaaggtgagattaccgcctccagggctcccaggctggctcctaccctgtgggctcctagcaccctatccccaccctccctgcaggaagcatggctgagtgctgggcacctcccaccctgggtcactcccagtgagtctgggaccaggagactctggtgaggctgtggggattggccttccctggggagctgcctggggctgccctccctcctgacggcccccagccccttctccgcatgttcaaaacaggaatt

SEQ ID NO: 172470 - DNA, 349 bp, Homo sapiens
cagttggtcagaacttctgggaattccacaaatatccagaaagaatctgatactaaaaagtaaagacattagagatcggattgaaagaaccagtgagatttgggataaatagtacttgttttgttaaataaaatgtgtctaagggaaaagacgatgtggtcttctccctttggttgttaggtgaggactgtttgaagcctgggagggcagggtctgtagaacttcctttatctgctccacacctgtactgtaaacagtggagctatgagtaatggkatgacaagctgtgccttctaaatcccaagagattctgctgaagagctgtgtcttaaagccctgggtcaacaca

SEQ ID NO: 172471 - DNA, 569 bp, Homo sapiens
ttgcctttgaactctctctttggcatctctttgggatagattccaaaatctttggtgtgggacctgaggcccttcacaggcagacactaagcccccttcagggtgccagttcagccctgctgtgtcctgggccttgccctgtggtgtgcccattgttgctggcctctgtcacttccatacactttatcttgcttggtatacaccattctgttcttgtccatctggggaatccgttggtccttcaagttctggctcacaggytggcccctctgaagcctcttggcatcgcctggaattctgtgagtacttgctgcacttggccgctgtggccgggtgtgctgctgctacgggcttacatgcctgtccccactggccttcactttctgtgcaggccagggactggagctgtttaaatcccagctccaagcacaggctgcgcctatggcagatgctcagtaaacgctgagctgaagtgaatctgtgtatttcagtaagagaaaaaaaaaagagctgaggatgcagccggtgaccggaatgtgaattgggctctattggtagtgtacccgagg

SEQ ID NO: 172472 - DNA, 569 bp, Homo sapiens
ttgcctttgaactctctctttggcatctctttgggatagattccaaaatctttggtgtgggacctgaggcccttcacaggcagacactaagcccccttcagggtgccagttcagccctgctgtgtcctgggccttgccctgtggtgtgcccattgttgctggcctctgtcacttccatacactttatcttgcttggtatacaccattctgttcttgtccatctggggaatccgttggtccttcaagttctggctcacaggttggcccctctgaagcctcttggcatckcctggaattctgtgagtacttgctgcacttggccgctgtggccgggtgtgctgctgctacgggcttacatgcctgtccccactggccttcactttctgtgcaggccagggactggagctgtttaaatcccagctccaagcacaggctgcgcctatggcagatgctcagtaaacgctgagctgaagtgaatctgtgtatttcagtaagagaaaaaaaaaagagctgaggatgcagccggtgaccggaatgtgaattgggctctattggtagtgtacccgagg

SEQ ID NO: 172473 - DNA, 387 bp, Homo sapiens
gatgtctaaacaacgaccaataccacaggtctttttcctgttgggatttgtgaacctgtctgatagcaagcatgcattttgaactgctttctactgggtggagtgtgtttgcgctatgctttgtgatgcattgttgagttctaacaagtctctgttctagatttagccaagtgaagtyagcagttttgataattacatgtcatttaggtaaaagattatgaccaaattgctataaaataggcattagagctgctagagactcattcactgtggatgctttagcaatctcatgcctcatggtgcccatatattgcccattggcttctgatataagaaacttcctttcttaactctggcctacaccccatgactgtggcaattgatggc

SEQ ID NO: 172474 - DNA, 555 bp, Homo sapiens
aactctccgaattcattgaaaggtaaataatggctgctggattggacaggtaaatcaaaattcaaatatgacaggtaagcctcttttttctttctttctttttttttttttttttccttctcatctcttccaagttagactcagcataacccaaatctggaaatgtgcatcaggcaagtgcagaaaaagatgcaagataaactctctctggacagatatctgagcaggggcccctctgcaaaacagagagacaaaacacccctgtgttcgttctgattttcttctctttgtcctaccccaacgcaagccccagtcttgatgctccacttctgtgatggtagccaggcactgcaacagkggctttgaaggcacctgaaactgagagagaaaatgaatcctccctgaccagagaaactggggaagcggactccttgatctgaagagtgtaggaagaatccctggttcttattcccctctcctttctcccactattttgccccaaatgcaggtaaagtaaccagatgttgaaaagaatgcaggttggcaaaatcttgg

SEQ ID NO: 172475 - DNA, 549 bp, Homo sapiens
aatggctgctggattggacaggtaaatcaaaattcaaatatgacaggtaagcctcttttttctttctttctttttttttttttttttccttctcatctcttccaagttagactcagcataacccaaatctggaaatgtgcatcaggcaagtgcagaaaaagatgcaagataaactctctctggacagatatctgagcaggggcccctctgcaaaacagagagacaaaacacccctgtgttcgttctgattttcttctctttgtcctaccccaacgcaagccccagtcttgatgctccacttctgtgatggtagccaggcactgcaacagtggctttgaaggcacctgaaactgagagagaaaatgaatcctccctgaccagagaaactggggaagcggactccttgatctgaagagtgtasgaagaatccctggttcttattcccctctcctttctcccactattttgccccaaatgcaggtaaagtaaccagatgttgaaaagaatgcaggttggcaaaatcttggctttctagcctcagaattcagg

SEQ ID NO: 172476 - DNA, 585 bp, Homo sapiens
  misc_feature (1)...(585): n = A,T,C or G
caaaaaaaagcttaagcagtattaacatacacttttcctacccccattcaagaaacaagagtccaggaaaatagttctaaagattcttaaaactcctcatccattaacaggtaaagaacttttgtctttcaaactcacctgagaagattaaactgaggaaataggaaacaaaatccaaaatacaagaggatgatgctaagttcttgctgtgcaaagacgacacagtaatatactacaggggtggagacagaagaaaccaaataaaatatttttacaaactgcagaaatccctgtcctgttttcatgcatcatcntagatgagggatggccagaggattcctctagtgcagggctgctcagaatgtggtccacacaccagcagcagcaacattatctggacatcggtaggarttcttggggcctgccacatcttattgaatttgaatctttgatactggagccaaatctctgtattcacaagccctcaggtggttagtttgaatgctaactttggagaagtaatagtagggaatgtacattacacaccattgaattaagattagtgcattcacagaaaagatgtat

SEQ ID NO: 172477 - DNA, 493 bp, Homo sapiens
aagaaaaaattctaatttaagaaaaaaagttcaaatgtattatttattacaaccaaatgcttttatgtaaaaccatacacattacataaaaatcattttcatacggcacattttctgttgaatgtgttcccctttgttaaagcagttttatccagtcttactataaactgaagattatgtggcttatcttttgacgattatatttttayagctgaacattcgttagtggtacttttcagatttgatcagggcaccatttagaatggcctgcctgtgtgaagtcgtggtgggaatgggcaggaggagaaagggttggttttaaaccaagctgtaagtgtagccggctgctctccaggcctccttaactgcaggcatgtttcttacaaatatcctgggagcatttcattaggcctacctatatatcaattcctttaggcctgctgtctaacaataacctaaaccaatatacttttataactttaatatctctaga

SEQ ID NO: 172478 - DNA, 468 bp, Homo sapiens
aagaaaaaattctaatttaagaaaaaaagttcaaatgtattatttattacaaccaaatgcttttatgtaaaaccatacacattacataaaaatcattttcatacggcacattttctgttgaatgtgttcccctttgttaaagcagttttatccagtcttactataaactgaagattatgtggcttatcttttgacgattatatttttatagctgaacattcgttagtggtacttttcagatttgatcagkgcaccatttagaatggcctgcctgtgtgaagtcgtggtgggaatgggcaggaggagaaagggttggttttaaaccaagctgtaagtgtagccggctgctctccaggcctccttaactgcaggcatgtttcttacaaatatcctgggagcatttcattaggcctacctatatatcaattcctttaggcctgctgtctaacaataacctaaaccaatata

SEQ ID NO: 172479 - DNA, 468 bp, Homo sapiens
aagaaaaaattctaatttaagaaaaaaagttcaaatgtattatttattacaaccaaatgcttttatgtaaaaccatacacattacataaaaatcattttcatacggcacattttctgttgaatgtgttcccctttgttaaagcagttttatccagtcttactataaactgaagattatgtggcttatcttttgacgattatatttttatagctgaacattcgttagtggtacttttcagatttgatcagggcaccatttagaatggcctgcctgtgtgaagtygtggtgggaatgggcaggaggagaaagggttggttttaaaccaagctgtaagtgtagccggctgctctccaggcctccttaactgcaggcatgtttcttacaaatatcctgggagcatttcattaggcctacctatatatcaattcctttaggcctgctgtctaacaataacctaaaccaatata

SEQ ID NO: 172480 - DNA, 468 bp, Homo sapiens
aagaaaaaattctaatttaagaaaaaaagttcaaatgtattatttattacaaccaaatgcttttatgtaaaaccatacacattacataaaaatcattttcatacggcacattttctgttgaatgtgttcccctttgttaaagcagttttatccagtcttactataaactgaagattatgtggcttatcttttgacgattatatttttatagctgaacattcgttagtggtacttttcagatttgatcagggcaccatttagaatggcctgcctgtgtgaagtcgtggtgggaatgggcaggaggagaaagggttggttttaaaccaagctgtaagtgtagccggctgctctccaggyctccttaactgcaggcatgtttcttacaaatatcctgggagcatttcattaggcctacctatatatcaattcctttaggcctgctgtctaacaataacctaaaccaatata

SEQ ID NO: 172481 - DNA, 516 bp, Homo sapiens
cttgtctaatatcaggacctatttatgccactgagttcaattttggcttgataacattacgatgtagaatatattcttagttaacttaggatatgggtatctatcaaataagccattccacagcaccattatcaaaccttttccaaatgaactgattggctgatctaatttattttatgatgaaatgttcccctttgcacaatgcagttaagatatttacatctaaaatacttgcatacttagcagcaaaataaatttcaacctttcaagacatgtaattaatacttatgtatccagcacatactaaccaacatcacatttattttgttaaattcaaggatatagtactgaccaaagcagtctgcattcatgactttgtaacctaactagaaagatgagatgataaacaagtagttaaaaagcatcagaatgcaagtgttgtgaaggagataatatggtgtgctacawacaaacacacacacacacacacacagagtatgtatacatatttgtgga

SEQ ID NO: 172482 - DNA, 476 bp, Homo sapiens
ctcctaaccactcagtttcttcaactgccttatccaaaaagtgaattcaaaaatcattctctatgattaagattctgatttatccttgataatgtattttttacttctgggaaatgagattttagtatttaaaactaaatggatggaaagtaaaaatatgtggtgttaatgggatatttgttcctgacttctattaggtaatgcattggggtcactgattttagccaaaggtgtttgagtttagttgtagtcagtctaaagtaatattctcagtcgtggctgctcatcagacgagatgcagtaaatagtcacaccaaggtcccartgactaaaaatgtaatttgattgatctgagatagggcgggtcgtgactgacatacatacctccagctgttatcactgccatgcagaaagttgtgagaacctctatcataaaatattaactgctatttttagcatctaaagcaattgtactg

SEQ ID NO: 172483 - DNA, 476 bp, Homo sapiens
ctcctaaccactcagtttcttcaactgccttatccaaaaagtgaattcaaaaatcattctctatgattaagattctgatttatccttgataatgtattttttacttctgggaaatgagattttagtatttaaaactaaatggatggaaagtaaaaatatgtggtgttaatgggatatttgttcctgacttctattaggtaatgcattggggtcactgattttagccaaaggtgtttgagtttagttgtagtcagtctaaagtaatattctcagtcgtggctgctcatcagacgagatgcagtaaatagtcacaccaaggtcccaatgactaaaaatgtaatttgattgatctgagatagggcgggtcgtgactgacatacatacctccagctgttatcactgccatgcagaaagttgtgwgaacctctatcataaaatattaactgctatttttagcatctaaagcaattgtactg

SEQ ID NO: 172484 - DNA, 561 bp, Homo sapiens
atggctcccctccttctcttcctcctctagtagttcccagtgtctgtttttctcacctttatatctatgagtacccaatgtttagctcccacttataagtgagaacatgctgtatttagttttctctttctgcattaattaacttaggattactctagtttcatccatgttgctgcaaggacatgacttcattcatttttatggttgtgtagtattccatggtgtatacgtgccacactttcttaattcagtccaccattgatgggcacctgggttgattccatgttgttgctattgtaaatagcactacaatgaacatatgaatacatgtgtcttgttggtagaattatttatttttcttttgtatgtacccagtaatgagattgctgggtcaaatggtagttctatttcaaatttttaaaaaaatcttcaaagtgtgttccacagtggctgaactaatttactttcccaccaacagtatgtaagcatttcctttgctccagcatcctcaccagcatctgttactttttgacattttartaatagccattctgactggta

SEQ ID NO: 172485 - DNA, 454 bp, Homo sapiens
aatttctgtatctcaaggaatataaccagtctaccaggctctgcagaccctagccctgtactttactgaaccttcctagatctgttattcataatttaaacacttgtcttaaagcaagttttccttgtggaaaaaaacaaattaatataacttatttttctcctgataaaagactrtttatttcatgtatggagaaagggcagtttggagcgtggagcatttccagacattaggtggaattacataaccaaaaacaaaaaccttcaacattgggggacagaagcaagaaataatctgtggcattgtggataatccctgagttagaagatgtgagtgtccatattcactgtggctctcagaagctttttgatcttgaatgaaacaccacagtttccatgtccccatctggaagggtgaaaatacctaacttgggattttgttgtgatcactgtat

SEQ ID NO: 172486 - DNA, 423 bp, Homo sapiens
aacatccaggacagctggtgtgttcttttctcaggagcctcatgacctccatctttgcttccctgcttttgctcttcatttcttatcctcttttcaatccagcttttgctgccttcccatgcacatggctcaagatggctgccccacaatggccacctcagccyttagttgcagatgagcagagacttcagtaacattcctggatccctgttttcatcgcctgggagaaagtctgattgtctcaccttggctcaagggatctatcagccgtagtctggcacagtgggaggcatgtggaaaccatgcatcacaaatatggttgccagggcccatgagagttatagctcttagagcacagagtttgagagctggataccataaatggtatctctgcaattagaatcttagaaatctacctgtgaa

SEQ ID NO: 172487 - DNA, 510 bp, Homo sapiens
taagtgtcccatggggcagacactccttttttcccagtcctgcaacctggattttytgcctcagctccattttgctgaaaataatgactttctgaataaagatggcaacacaattttttctccattttcagttcttacctgggaacctaattccccagaagctaaaaaactagacattagttgttttggttgctttgttggaatggaatttaaatttaaatgaaaggaaaaatatatccctggtagttttgtgttaaccactgataactgtggaaagagctaggtctactgatatacaataaacatgtgtgcatcttgaacaatttgagaggggaggtggagttggaaatgtgggtgttcctgtttttttttttttttttttttttttagttttcctttttaatgagctcaccctttaacacaaaaaaagcagggtgatgtattttaaaaaaggaagtggaaataaaaaaatctcaaagctatttgagttctcgtctgtccctagcagtc

SEQ ID NO: 172488 - DNA, 510 bp, Homo sapiens
taagtgtcccatggggcagacactccttttttcccagtcctgcaacctggattttctgcctcagctccattttgctgaaaataatgactttctgaataaagatggcaacacaattttttytccattttcagttcttacctgggaacctaattccccagaagctaaaaaactagacattagttgttttggttgctttgttggaatggaatttaaatttaaatgaaaggaaaaatatatccctggtagttttgtgttaaccactgataactgtggaaagagctaggtctactgatatacaataaacatgtgtgcatcttgaacaatttgagaggggaggtggagttggaaatgtgggtgttcctgtttttttttttttttttttttttttagttttcctttttaatgagctcaccctttaacacaaaaaaagcagggtgatgtattttaaaaaaggaagtggaaataaaaaaatctcaaagctatttgagttctcgtctgtccctagcagtc

SEQ ID NO: 172489 - DNA, 510 bp, Homo sapiens
taagtgtcccatggggcagacactccttttttcccagtcctgcaacctggattttctgcctcagctccattttgctgaaaataatgactttctgaataaagatggcaacacaattttttctccattttcagttyttacctgggaacctaattccccagaagctaaaaaactagacattagttgttttggttgctttgttggaatggaatttaaatttaaatgaaaggaaaaatatatccctggtagttttgtgttaaccactgataactgtggaaagagctaggtctactgatatacaataaacatgtgtgcatcttgaacaatttgagaggggaggtggagttggaaatgtgggtgttcctgtttttttttttttttttttttttttagttttcctttttaatgagctcaccctttaacacaaaaaaagcagggtgatgtattttaaaaaaggaagtggaaataaaaaaatctcaaagctatttgagttctcgtctgtccctagcagtc

SEQ ID NO: 172490 - DNA, 588 bp, Homo sapiens
  misc_feature (1)...(588): n = A,T,C or G
ngatgaagtgggtatatagtttcatacacacaaacacacacacaccacacacacaccctgatacataaattcaggaataatgattcagcaatgcaaaaggcaaaaatcgtatctgrggccatttttccataccaataattagaaatttaaataatctatgaagtaataaagtaagttagcatataattattgatatttattttaataactagaaccctccattttaaaagtgaaattatgttgaatatatcctgtttaagaaggcagagaaaattttaatgcattgatgaaagagagtaatggtaaatgtagaaatacagggatacttgatatctaagctttagctagctggaaagttattgaaaaaacttgataagcttttgctagctggaaaattattattcagcaatgctagatcttagacaggtctttgcgaatttctcctccataaaatgggactgataattatacccaatcgccagggtagagaagctcactatgtgtgaaaatcctttgagatctttgaagaagtcaagatgttttaaagtattagtgatattaaaatctattttggtttttgcaagaacg

SEQ ID NO: 172491 - DNA, 529 bp, Homo sapiens
gtagctttccatcctgcttttccaccccatggtgatttgcacagagtaatcactcatttattaaattttaagtgttaaagaagaaacagcaagatattcaaagagatagaaaataaaaaggytgaattcatgagaggctgaaacagacagcactactggtagtaatggaaggcaacttgagtgataagtagcccaaactgagatgtcagtctgtccagaatagcacctgtgttatttgtgtcattgaatcagccctggtacttggtcaagtgctctagtcagcagatcttggagactgaaggaatgactgccttgatcatctaactctgtaacaccagcgttgagagcggaccaccattgcctcactcctttctcaaataatggctgtcactctaaaatactgtgaaagatttggcatacacaagcctaatcatcctgaggagctctctccatttcaaaggagccatgagagtgttgatgaattgcctctgttaggaaactatacatttattccaatgattccaccatc

SEQ ID NO: 172492 - DNA, 529 bp, Homo sapiens
gtagctttccatcctgcttttccaccccatggtgatttgcacagagtaatcactcatttattaaattttaagtgttaaagaagaaacagcaagatattcaaagagatagaaaataaaaaggctgaattcatgagaggctgaaacagacagcactactggtagtaatggaaggcaacttgagtgataagtagcccaaactgagatgtcagtctgtccagaatagcacctgtgttatttgtgtcattgaatcagccctggtacttggtcaagtgctctagtcagcagatcttggagactgaaggaatgactgccttgatcatctaactctgtaacaccagcgttgagagcsgaccaccattgcctcactcctttctcaaataatggctgtcactctaaaatactgtgaaagatttggcatacacaagcctaatcatcctgaggagctctctccatttcaaaggagccatgagagtgttgatgaattgcctctgttaggaaactatacatttattccaatgattccaccatc

SEQ ID NO: 172493 - DNA, 529 bp, Homo sapiens
gtagctttccatcctgcttttccaccccatggtgatttgcacagagtaatcactcatttattaaattttaagtgttaaagaagaaacagcaagatattcaaagagatagaaaataaaaaggctgaattcatgagaggctgaaacagacagcactactggtagtaatggaaggcaacttgagtgataagtagcccaaactgagatgtcagtctgtccagaatagcacctgtgttatttgtgtcattgaatcagccctggtacttggtcaagtgctctagtcagcagatcttggagactgaaggaatgactgccttgatcatctaactctgtaacaccagcgttgagagcggaccaccattgcctcactcctttctcaaataatggctgtcactctaaaatactgtgaaagatttggcatacacaagcctaatcatyctgaggagctctctccatttcaaaggagccatgagagtgttgatgaattgcctctgttaggaaactatacatttattccaatgattccaccatc

SEQ ID NO: 172494 - DNA, 615 bp, Homo sapiens
tatgcaactggggaggagatacacatacagtacaataccaaaggcttgcatttgcatagcatattatgaaacatctttacattcttaccacagttaatcagctccatagccaggtgaaccaggtactatcatcctacttagtgaggttagacaacttagactcaggtgatttttgtttttagagacaagtctcattctgttgcaggctggagtgcaatggtgtaatcatagctcactgcagccttgaactgcagactcaggttttgaaaaaaggtctcattacctcctcaaattagtctycttcggcattacctccttacagtgctcattgtcatttcaaattccacacgttcagagacagatcttctataacttcctggtccggtcatcaatctcctccccacccgcttcacccaccttcaaatttactgttgatttgctctatccctatcctcacatctagccagacaccaagactggttgaattttcttttgacctcctagttcttgccgctgtccccacagtcccctgcatagccaaaatgtcctgttttatctcactgctaggtcagttcagctgcctttcccgcatcttgcttcatcctatgtatcact

SEQ ID NO: 172495 - DNA, 466 bp, Homo sapiens
actacgtacagtttcaagagccagaaggaagaatcaatctgccaagcaacgattagggatggaattgcttgtgcttcaaagtatatgctggattaacttctaaagtagttaattactttccagatcatgctgtggtgtcacgtggcctaaagagaaaactgcagccatccagacctaaggaggtggaagtaagggaaggtcacgatttctatcttttaggctgtgtctgatgggactggcttaaaagcaaaagaatcaaaaagcattttttgttttagccaaagcaatattaartaacagggtttttaaatctttaaatatattaagttgtttaaatgaatccactgatggttgttttaaacattataaacttgtaacctaaactgaagctgcttatcaaagatgcagtagctacattttctttgctgaactacattcagatccaaagcacttttacaatgaattc

SEQ ID NO: 172496 - DNA, 438 bp, Homo sapiens
tttgtcaatatctgccacaactagagaaaataacccatgagatatttggttcattgacactactaatggtttcagtcttgagacacttatcaagatattaaagttaaagggaccaaagtcatcttgttctatgccctcattttatagatcaggaaactgcatcagacttatgtacattatcaaagcttagaacgtaggcttcctggtcttcctgctccgatgttcgtccatgctgaccctcttctgctctacttatcatatgctaggctcaacgaatctttatcatcttgattatatcatctgtgttyctacatatagacgtatggagtactgtatgaaatgttactacatgaaaatgattcactagtaaactaggacctttatcaatatgtaaaattcaagtcacaacctcaaaggttaacttaatgttcaaaaaat

SEQ ID NO: 172497 - DNA, 475 bp, Homo sapiens
ggcaatccaaactctttggtttaaaagctgtcctaactcatttaccccctctggcattgtataatggaaaccaaaaaactgcattatgaatattataaagaccattcagatatgaatgtaaatatataagacatgtatttttwtacagcagtggcttcaggaattcacgaaattataaattttggtgttctggacagagttaccacctccctgatttttagtggagccctcttaaaataaagcataatgccaacagcaaccaaatcataagacaggttattttaaagcatggtgacaataattagctaagtaatcaaacatctttccaaagataaaataatacttccttaaatttagccttgaaaccctctctaatcccctggctctatttttttcttaatcccaatagggctggcaaatagaatattatttataactcaattttagaggataaacatgttttactattaaaaat

SEQ ID NO: 172498 - DNA, 475 bp, Homo sapiens
ggcaatccaaactctttggtttaaaagctgtcctaactcatttaccccctctggcattgtataatggaaaccaaaaaactgcattatgaatattataaagaccattcagatatgaatgtaaatatataagacatgtatttttttacagcagtggcttcaggaattyacgaaattataaattttggtgttctggacagagttaccacctccctgatttttagtggagccctcttaaaataaagcataatgccaacagcaaccaaatcataagacaggttattttaaagcatggtgacaataattagctaagtaatcaaacatctttccaaagataaaataatacttccttaaatttagccttgaaaccctctctaatcccctggctctatttttttcttaatcccaatagggctggcaaatagaatattatttataactcaattttagaggataaacatgttttactattaaaaat

SEQ ID NO: 172499 - DNA, 475 bp, Homo sapiens
ggcaatccaaactctttggtttaaaagctgtcctaactcatttaccccctctggcattgtataatggaaaccaaaaaactgcattatgaatattataaagaccattcagatatgaatgtaaatatataagacatgtatttttttacagcagtggcttcaggaattcaygaaattataaattttggtgttctggacagagttaccacctccctgatttttagtggagccctcttaaaataaagcataatgccaacagcaaccaaatcataagacaggttattttaaagcatggtgacaataattagctaagtaatcaaacatctttccaaagataaaataatacttccttaaatttagccttgaaaccctctctaatcccctggctctatttttttcttaatcccaatagggctggcaaatagaatattatttataactcaattttagaggataaacatgttttactattaaaaat

SEQ ID NO: 172500 - DNA, 475 bp, Homo sapiens
ggcaatccaaactctttggtttaaaagctgtcctaactcatttaccccctctggcattgtataatggaaaccaaaaaactgcattatgaatattataaagaccattcagatatgaatgtaaatatataagacatgtatttttttacagcagtggcttcaggaattcacgaaattataaattttggtgttctggacagagttaccacctccctgatttttagtggagccctcttaaaataaagcataatgccaacagcaaccaaatcataagacaggttattttaaagcatggtgacaataattagctaagtaatcaaacatctttccaaagataaaataatacttccttaaatttagycttgaaaccctctctaatcccctggctctatttttttcttaatcccaatagggctggcaaatagaatattatttataactcaattttagaggataaacatgttttactattaaaaat

SEQ ID NO: 172501 - DNA, 443 bp, Homo sapiens
cagggtatggtggctcacatctgtaatcccagcactttgtgaggccgatgagaamggatcacttgagccctggagttggagacaagcttgggcacgtggcaaattcctatctttacaaaagatacaaaaaattacctgggcttggtggcacatgcctgtagtcccagctactagggaggctgaggtgggaggatcacttgagcccaggaggcggaggttgcggtgagctgagatcacaccactgcactccagcctgggcagtggaaagagacactgtctcaaaaaaaaaaaaaaaaaaaaaagagagagagagagataggaattaagcacagtcatctaggcccagggtgaaagatggagtgacagaaaccatgaataggaaaagcaaaaattaattgaaacaatcttataagaaaacttaattatctattaccaccaaaagg

SEQ ID NO: 172502 - DNA, 443 bp, Homo sapiens
cagggtatggtggctcacatctgtaatcccagcactttgtgaggccgatgagaacggatcacttgagccctggagttggagacaagcttgggcacgtggcaaattcctatctttacaaaagatacaaaaaattacctgggcttggtggcacrtgcctgtagtcccagctactagggaggctgaggtgggaggatcacttgagcccaggaggcggaggttgcggtgagctgagatcacaccactgcactccagcctgggcagtggaaagagacactgtctcaaaaaaaaaaaaaaaaaaaaaagagagagagagagataggaattaagcacagtcatctaggcccagggtgaaagatggagtgacagaaaccatgaataggaaaagcaaaaattaattgaaacaatcttataagaaaacttaattatctattaccaccaaaagg

SEQ ID NO: 172503 - DNA, 447 bp, Homo sapiens
ttggcagggtatggtggctcacatctgtaatcccagcactttgtgaggccgatgagaacggatcacttgagccctggagttggagacaagcttgggcacgtggcaaattcctatctttacaaaagatacaaaaaattacctgggcttggtggcacatgcctgtagtcccagctactagggaggctgaggtgggaggatcacttgagcccaggaggcggaggttgcggtgagctgagatcacaccactgcactccagcctgggcagtggaaagagacactgtctcaaaaaaaaaaaaaaaaaaaaaagagagagagagagataggaattaagcacagtcatctaggcccagggtgaaagatggagtgacagaaaccatraataggaaaagcaaaaattaattgaaacaatcttataagaaaacttaattatctattaccaccaaaagg

SEQ ID NO: 172504 - DNA, 464 bp, Homo sapiens
aatgagaaattggcagggtatggtggctcacatctgtaatcccagcactttgtgaggccgatgagaacggatcacttgagccctggagttggagacaagcttgggcacgtggcaaattcctatctttacaaaagatacaaaaaattacctgggcttggtggcacatgcctgtagtcccagctactagggaggctgaggtgggaggatcacttgagcccaggaggcggaggttgcggtgagctgagatcacaccactgcactccagcctgggcagtggaaagagacactgtctcaaaaaaaaaaaaaaaaaaaaaagagagagagagagataggaattaagcacagtcatctaggcccagggtgaaagatggagtgacagaaaccatgaataggaaaagcaaaaattaattgaaacaatcttataagraaacttaattatctattaccaccaaaaggtaggggta

SEQ ID NO: 172505 - DNA, 473 bp, Homo sapiens
tgaattctatcctcctgcctattagatttcccaacacctgtgatctctcttagttctgggagagtagaatttggatgaagaatgaatacataagggaatgaggaaattagctgatccttttggcgatacatagaataagctcataagtttctttcatcctgcataactaaagatgattctgtgcttgtacattttgtgcatttgaggataaggaactcattccccccggcaccaytggttccattgggtaaagaaatatgtcacagtaatttgaaaaggatgccgagggtggtcttgcctaatgggaaatcttcatccaagtgagaaagaaaatgtcttatttgggagggtgtctcaatagtaggcagaactcaaaagtaagagatctaggtatgagatacgaaaaagtctggtcagatgtgcactcactgtaaagttctcttgcagcattctttataggtctggatcagggt

SEQ ID NO: 172506 - DNA, 590 bp, Homo sapiens
aattaatattaatacatccatttcctcccttacttatcatttttttgcggtgagaccatttaagatctactctcttagcaattttcaagcatgtaattaatacattattgctaactatagttaccatgctatacaatagatctccagaatttattcatcctgtacaactgaaattttgtaccctttgaccagcatatccycatttcacacacgtagatacccccagcccctggcaaccaccattctactctctgcttctatgaattcaacttctttagattccacatgagtgagatcatgcaatatttgtctttctgtgcctggcttatttcatttaacacaatgtcctccattttcatccacatcatcacaaatgacagaaccttcttcttttcttaaggctgaattatacttcattgtggatatataccacgttttctttactccatttacttgccaatgaacacaagttcattccataattttgtcattgtgaataatgttgtaatgatcatgggagtgcagttacctctttcacacactgatttcacatccttcgggcatatgcccagatgtgggattgctggatc

SEQ ID NO: 172507 - DNA, 573 bp, Homo sapiens
attcacaataagttgttttagaataaaatatttgtctaaatgagcagaaagtaataatttttggccatcaggtcacttaaatcactattttttttcyatgaaatgctttcaaatagaacaatccaggagaggctaacaaagaaacaggaagaattaaaacatatttaatatactagaatatttccaaagaggtactctaattattcttcacatttcatttttttcccatcaaaacttcagatgaagtataaaaaggtttacacatgtgatctaatgttacttgcagctatatgaccttgaacaattcacttgcatttacctggatctcagttcttccatttataaggagatggtaaaagtaagtggttcttctctcctcacacacaagtctaaaacccagatgatgctctatattcagttcctagaattttcaagtacacagacgcttgtggcagaaatttatagttgccaaccagtattcattctccccaatacccccttcttagtaaagaatcttaattttatttgggatggcaatgtatcaggttaaggactatacttcccaggtttcct

SEQ ID NO: 172508 - DNA, 527 bp, Homo sapiens
accatcagctataaactaatgtgaaacaagtttctcatgcagtggagtcctcaacaattgtgtgttctcatctgtgaactattaaaggataataatagcagctaacgattactgagcacttacaaaggcactatgtactacattgtcatgtttgaattctgctacagccctacgaaccagacattattatcctcatttgacacataaggaaactaaggatcagttcgttacataacatgccgatggctacccagaagctgtgggactcaaatatggaatctggctgataccaagtccattctcttaatgtcatattcttcaaaagaatatagcaaaggtgaatatttcagcttgtgcatatacaaataaatccccagtcagtgtttaccgtgatrcctggtacaagcagttaccaaaggactgagaattaattgaaatacaactggactagattataaaaccctctaactgctgtgggaggttcattctcacaataaacattgaaactgtagtctgttactctaatc

SEQ ID NO: 172509 - DNA, 558 bp, Homo sapiens
taactaactttaactccagtgtttgctgattttctgaaagtgaggtattgatatcctctattattattattatctcacagtctttctccttagatctattaatatttgcttcatatattttggtgctttggtgttggatgtatatattataatatcttctcgatgagtgaacccctttgtcattatataatggccttcttcatctcctgctaaaatttttgacttaacatgtattttatctgatatgagtaagtgacccttactcttttttggtttccattttcatgaaatatctttttccatctattcagtttcagtccatctatagcttcataggcaaagtgagtttcttgtagggagcatttaatttggtcttgtttcttaatccattcatccactgcatcttttttaattgaagaatttagtctatttacatacatattattattgataggtaagaacttactatkgccattttgttgccttcttttttagttgttttgtaactgttctctttcgttttttccatttcttactgtctccctttctggttaagtg

SEQ ID NO: 172510 - DNA, 558 bp, Homo sapiens
gttgttggatgaagcagtcttagatgttaattatattcagttggttgatttgtgtttttgaattcaactatgtcctttcaggttttctgctggctagatctatccatttctgatagagagagtgttgaagtgcaattataatcgtggatattcccctttgcagttcagtttttgcctcacatattcttatgctatrttaggtacatacacataaaggattgctatatcttcttgaataattgatggccttatccttactcatgatgttgttcagatatgccatttatgatatctgggcgaaagtacttcatgtgtgaaaattgctaaaagtgtaagaaattaatgccacattttgtatataaaattttctattgacattggacaacagtaaagttgttggttgcctacaatttattatttgataaacaattggactatatttttgaatattgatctgagaataactgcaaaatttttgtcattaccatcctggtatcccaactctctctttctctttggcttgttttttcctttttcgtaggtttttcttacctaagt

SEQ ID NO: 172511 - DNA, 617 bp, Homo sapiens
aaataataaggagtcttctattccagttgtggaatggtgtttggcaacactggttcctaattctcctaggatgaattattttaagatagaaaatataatttttgtttttaagtaggtagcccgttatgtaactgacattatcctaggtattttacatgttacgctattcctttacgcagtgatccttccctgtgattaaagcaagttgatataatttcaataatacttgtgcmcctgaaatcgcaaatgagaggttagatacagccaatgcctaaaacacataggtttgaggcatagataatttgatgaacaaaagcttttaaagagattgcaaatccagtggcttgcagctgtgcacaagtttactatgagactatgtaaaaacaccaaaataattcatttccacaatgttctctttatctgaatttgctttcatgtttcagagaaggcaattaacacagagatacagaaattgcctgtgagttggcagctatcctatcctttgagccaattaattgttgctgttttctttaaggcatttgattaagattcatccttcacaaacctcaagttggaacagccactttatttgtatccaagtcatccattcaaagagg

SEQ ID NO: 172512 - DNA, 534 bp, Homo sapiens
cttccaccatgattgtaagttttctgagtcctcccagtcatgctttttattaagcctgtgcaatttgagtcaattaaacctatttttgttttaaaattattttattttattttattttattttaagttctgggatacatgtgcaagatgcataggtaaatgtttgccatggtggtttcctgcacctatcaacccatcacctaggtattaagccctacaagcattagctatttattgtgatgcttttcctccctctacccccctgacagcccccagtgtgtgttgttcccctccctgtgtccatgtgttctcattgttcagctcccatttataagtgagaaaatgcaatgtttkgttttctgttcctgtgttagtctgctgagaataatggcttcaggcttcatccatgtccctgaaaaagacatgatctcattttttttggctgcatagtattccatggtgtatatgtaccacattttctttatccagtctatcactgatgggcatttgagttgattccatgtatttgctattg

SEQ ID NO: 172513 - DNA, 531 bp, Homo sapiens
gatttcattttctcactttcatggaaggttttaccctattacttcattatatctttttaaaatccttttgaattcacattatgagaaagcttaatagctaaagctagttagtgataaggtacttctggcatattaacaaacttgaatccaagccaaaatggaattttctattgctgtctttaacatttgaataatgtttgagaatatgttcatgtatttctgttaggttaatgtggtggtcttctgaacacacagttcctggtagtaaggtttgtctmacccacccacatttgtttaaaaagtgctaatttaatgaatttgataagcaattgatttctgggtgtgttcctattttgtcacaatttaggaagcttgaatgtatttcttagctttttagagaagattctccttatgaaacaaacatctttctttgagctaaaaacaaaacaaaacccataggttattaaagggaagtaaaaagtatttggtgtttaagaatttcactattgtaaaagagaaacattgtgatgt

SEQ ID NO: 172514 - DNA, 566 bp, Homo sapiens
atcggcccacctcggcctcccaaagtgtttatattacaggcttaaccaccatgcctggccaacattaacgcttttatctaggttaaattgtttcaggacctgtcctaagattttatgtcctacagaaggttgctttgacaatttttcaaagttgacaaaggcaaaaaaagcacttaattaatttaaaatgttatatttttgtggaatgaatgaaattaaaagaaccttcattttcaaagcaacaggaattgacaatttcagggtggagagtatggtgacttttatagccagcaggagaaagtggtaagaaaaggagagttattaagccagcacctctgaacacagtgaagctggtaggcaagggagagaatagaatctcagctagttcttcacgtagaaataagcaacagaataagaagttaaatctataaatgctatcttcctttatataaagcctcaggagacttcrtcaaaactcaactattgctaagagattttgaatgccatgaacacagtcaaaacaggttctcttcatagccaatgctggaagctgaactttctcctga

SEQ ID NO: 172515 - DNA, 438 bp, Homo sapiens
aacctcacactaagtagcagtgaactcaggtgctgaagaagtctgttcrccctgaaattcctccttggtcacagctttttcagcagcaacctgctctttcttttcaatcttttcaggatgtttgtagaagtagagataagtcataatctcccatgggtgttcacaggagatggcgccaagcacgtgcataacttcttggccaccatccaccacatcaggcccactgagtgagctgctgttgcatggggtggcaatgtccacatagcatggaggaaaacctgtgtgacctagagcaatggtagacaggttagcataacatgcctctatgagaggcttgtggtcagccctggaatcagtaaccaccagcaatgtaactcctgtaaggctgcctggatctggttaatgaagtttccaggaggaaatgatcatcaacaggag

SEQ ID NO: 172516 - DNA, 302 bp, Homo sapiens
  misc_feature (1)...(302): n = A,T,C or G
nnnnnnnnnnnnnnnnnnnnnnnnnnnnnnnnnnnnnnttccaattcccagacttcagggttgattcyctcttcaagtaggggacaacaaatgggtaacttgttccccatattcatgtagataatagcttcagctttggccaatatatccttacctaataagggtgtgggactttcaggcataacaagaaaggcatgtgaaaagagaaaagtctcccaattacaactgaggaggtgggagaaatacctggttacaggctgtcccaggattccttggatggtaacggatcttgaggacagtag

SEQ ID NO: 172517 - DNA, 570 bp, Homo sapiens
attctcattagtccttctagaatgcaaatcaacagatgtttacaactacagtccccatgatctgagtcaaggtcccagtggggatccatactggggatggcttgctgactggtagggaatttgtccctttctttggctgtcattytatcatttacttgactaagatgccaggtatctccaaactcttgggctgcagctaaagccacattcttttcattaaaggccatggtttgatctaacagtagcatgacatctctccaagtgaggttgaaggtttgccctagaccctttaggacatctatgtacctatcaggatcatctgaaaatttccccaggtctgccttgatctgctttaaatcagacagggagaaagggatgtgtacccagattgggccaaattcctctccccctacagcttgaaggggacataaccgatagcccaggtgtttttgtgggcctttggagatttctttgcttacttccttctgggcaggggagattagaggaggcttatcattaataggaaggggagctatagggaggctaggatatgggggtaagctgagaggt

SEQ ID NO: 172518 - DNA, 350 bp, Homo sapiens
ggggcctgtggtggcagacatggggagaaactcctctgtctatggaaagagaagggaagagtgggaaggatagggtggtttccgctccagctcagctgcagtagaatagagcaccaggtagatttcttcaggccctggcttctggatagcatctctgggcctggatagggctctgggcaagacccagtgcagtcccagtggtggtagccacagagrtgattgtgtggtatggtttggatctgtgtccccctcccaaatctcgtgttgaattataatccccagtgttggaggatgggtctggtgggaggtgagtggattatgagggcagatttccccattgctgttctcct

SEQ ID NO: 172519 - DNA, 386 bp, Homo sapiens
cctttgcttggcacttctcttcctrctgccatgtgaagaagggcttgcttgcttacacttccaccatgattgctaagtttcctgaggcctccccagccatgctgaactgtgagtcaattaaacctctttccatcataaattacccagtctcgggtatgtgtttattagcagcagactaatacaagttgtatcacagccttcaaatttttcatggtgccagaattatgctggtttcttctcatctggagaggctagcacttctaatttttctaattattttcttacaggtggatttttttttctttcttcatatattttttcttttccttctcctgccccttcctaggatgtgtgtctgtagaatatgttgagtaaggtcttgcagc

SEQ ID NO: 172520 - DNA, 386 bp, Homo sapiens
cctttgcttggcacttctcttcctgctgccatgtgaagaagggcttgcttgcttacacttccaccatgattgctaagtttcctgaggcctccccagccatgctgaactgtgagtcaattaaacctctttccatcataaattacccagtctcgggtatgtgtttattagcagcagactaatacaagttgtatcacagmcttcaaatttttcatggtgccagaattatgctggtttcttctcatctggagaggctagcacttctaatttttctaattattttcttacaggtggatttttttttctttcttcatatattttttcttttccttctcctgccccttcctaggatgtgtgtctgtagaatatgttgagtaaggtcttgcagc

SEQ ID NO: 172521 - DNA, 353 bp, Homo sapiens
ttcatatccataataacgaacgagaggctcttagtcytaaagtacacctacctgcatatcattatgatggtgctattgctgtaagtatttatggcagcattttctaacagcttcgtttttggggagcttggtgttaaaaaggtacttggctgtttgtccccgcttaggttttggataaccacttcagtagtaagatttcctaactcatgagagagagagagagagagagagaatgtgtatttgcagaacagttttgctagataataatgtttaagaattctttaaaactttaatagtgatgtagctgtttgtcagggaactcttgctttgtaaaatgttctaggatatatagt

SEQ ID NO: 172522 - DNA, 319 bp, Homo sapiens
ctttttctgtttgttttgtaatagattccaccttttcttaggaagttatacaaacgtgaactgtgatgtgataaagttaacttccttaaatatgttaratgcttagtatgtatagtgtttgggtgtatctgtgtgtatgtgtgtatagatatatatacacatataaatatataaaaaaactttgttagatgatccaggatactgcagagcctcaaggtcttccatttaatatgagttctcattgtgctatgctataaatttagatatggaaagtaggcatgtataattggttcagatgctgagaaaatgctcctttaaa

SEQ ID NO: 172523 - DNA, 388 bp, Homo sapiens
tattattctttcgatttccttcaaccatttaaaaatgtagaagtcattcatacctcacaggctatacaaaaasagttgggaggaaggatttggtctacaggccaaactatggtttgctgactcctaatctaaaagtgatgtgaatgtgagggcctttgtcaaagctccttgacatgcacaaaaacctccctccaggttattccttcataacgagggcttagcaataaaattgaccaaagaaattttaaaatgtaaagttgcggctctacccccaaaaatcttgttcagtggttcaggagagttgcttgggaatgtgtattttgaaaacactccctggacgtctcttacgtacagcacaggttttaaaacttgattttaaagttgttgt

SEQ ID NO: 172524 - DNA, 604 bp, Homo sapiens
gataggaggtaggaattaaatgaataggggcaatggtagagaatagcagaggggcctactttaatacagaaatcagagatggcttccatgagagacctgggggctgaacagtgaggagacacagtctgggagaagctgggacgtgggtgtccctgacacgatggacagcatgctctgagatcagaagccatatgtccctggaacactttgagtgagggttagtgtggcctgaggtggggttggaggagcaggcttaggccaggtcatgcaggacacagcaaagactgtgcatcttatttcragtttgacagtggaatagctcctattccatgatagggagggccttatctttctaactaactgttctattcctggttgctagcacggtacctggtacgtagcagatgctcaacatatatctactgaattaatgaatcgatcaatgattacgaccaaatgtaatcaagaaactgtagcacctacattcttatccatttggaataaattgattgcaactgtttgccaatattttgtttgtaactaattgtaattgtaatttttctcatgctttgagatgagacaaattaagtacaaaatgtgaatt

SEQ ID NO: 172525 - DNA, 532 bp, Homo sapiens
tcattctgactcctgaacttttacccacattaataatgtttaagatttgttatacatataatacatgagtgcattcatttattcaccattatcattttccactaaatacacattaattcactgcatgctttgcccaaggtcctaggcattatctttttcttttatttaatatcttccttctcacactagtgcagtagccagtgggtaccgatctcagttgccaccagtagagtccacaccaccrttatattttgcctcctttggctataagcttcctgttttttcacaacaaccaactattttcttggcacgggcagactgttctcatcctggacaaatgactctgtagaagagcagaggaaatagcagtgattcacagagtaaccaggctgagccctgaggcacagcaactttctaataataatattgccaatatttatttatccttgcaatatctgtacatgagttttgaaagagaggtccaattcagtgatattcacattaattttgacttataaaattatcacccatc

SEQ ID NO: 172526 - DNA, 587 bp, Homo sapiens
ttttgccaaaccccaaatgatttttgctttatctttctgaagatcaattttaaagtaataacactaaattccccacataaatcctccatattgaaaatgacaagggagataaaaataaacaaaagtagctaggggaattcccattaccatctcccacgagctgtcttgataaaacaaactataaccatcactgatcattctccactctcactgacttaagagtacaatgctcttgaattgtagtcacacaaagatacatttttagaaaataaagcaytgcaaaaaatcacagtgagaatattgactatcgaaattgcttaaacattgttcatttaaccaacaatagtattaaaaaatcttcaatttgtgaccatttaatagaaataaaaatatattgtgtgcatatctgagccataatttctgaaagaactccagtttttaaaatcataaggaaatagccccctaccactatatgaaatctagatagaatctcctatataccaaactctataaactttgcaatttgaaaataattgtaaacctagaaaagaataaaaacggttgatgtaggttcaacttgaaactca

SEQ ID NO: 172527 - DNA, 420 bp, Homo sapiens
aaaacagttggctattctatttcaaactcaggagagacttagaaaagatacattaatttgtaagcaattaccttataacataaaccattaaaacaagtgaaatagcattgggaggaggtgtagagataaaaggaaggaatataaacgggtgatgggtgcaccaggttctcacaaatctccacctaaagaacttactcatgtaacccaaataccacctgtaccccaataacttatggaaaaataaaattttttaaaaagccagrcaccagtgatatcgagacataagtgttatgtcattgttttgcatagactaggtgataaacatcatgttattaaaaattctgtcaatatataaacatttcatatatacaaaaaataaacaatctatagtgggtataaccagtacttaaacgaggattg

SEQ ID NO: 172528 - DNA, 420 bp, Homo sapiens
aaaacagttggctattctatttcaaactcaggagagacttagaaaagatacattaatttgtaagcaattaccttataacataaaccattaaaacaagtgaaatagcattgggaggaggtgtagagataaaaggaaggaatataaacgggtgatgggtgcaccaggttctcacaaatctccacctaaagaacttactcatgtaacccaaataccacctgtaccccaataacttatggaaaaataaaattttttaaaaagccagacaccagtgatatcgagacataagtgttatgtcattgttttgcatagactaggtgataawcatcatgttattaaaaattctgtcaatatataaacatttcatatatacaaaaaataaacaatctatagtgggtataaccagtacttaaacgaggattg

SEQ ID NO: 172529 - DNA, 420 bp, Homo sapiens
aaaacagttggctattctatttcaaactcaggagagacttagaaaagatacattaatttgtaagcaattaccttataacataaaccattaaaacaagtgaaatagcattgggaggaggtgtagagataaaaggaaggaatataaacgggtgatgggtgcaccaggttctcacaaatctccacctaaagaacttactcatgtaacccaaataccacctgtaccccaataacttatggaaaaataaaattttttaaaaagccagacaccagtgatatcgagacataagtgttatgtcattgttttgcatagactaggtgataaacatcatgttattaaaaattctgtcaatatataaacatttcatatatacaaaaaataaacartctatagtgggtataaccagtacttaaacgaggattg

SEQ ID NO: 172530 - DNA, 525 bp, Homo sapiens
cgactattttaacaacttctgctcccatatttatacttctctgttctttaactataagctatagtgttatataaaaaactacaataatacaaataaattaccccaaagaatgctttttgttttgtattaaggaaataaaatttgaagtcatatgactcaggaaagtaaataatatttattaaataaattactcaaatacctttttcactgtaggaagattatgatatacatttgaccaaaaaaagtctgttttactgttatatagcctaaaatgaaatgtttttaatttacagtgtmctgtgtaaagaaacaatagatattttttaaagcaacttcaggtttctagttttagctcctcattgcttttttgtgaccctccaacttgcagattgattttctatttgtgcttctgttgcagttttgagattctttgaataagctcatcagacataactacttagtagagctttatttctgagaagcaccattgtgacactcaacaattccaaattaattcccaatgca

SEQ ID NO: 172531 - DNA, 583 bp, Homo sapiens
tgtgtcattatttctagaatactacagtagttagaggaaaaagatttaaagttcattgcggtaattgctgtcaggtgcttttagtaagcatgtgctgccttgaacaaaggcaacctgctaggagtgtgaaagaagacagtgggctttggaagatgagagtgacaaaaacgtagattcgggaattcttgtgctcctgaaataattgcattcattttaaaggtggaagaagattaaaataacttttaatggttattcatatgtttatagcctttgagaaaacaaagactttaggcttctaaaactaataccttacataatttcagtaacaaagagtacaaaacctggtggctagcttgtcacagggatcaaggtagctggtatcactaggctaggcacaatccatgtgaagtgctgaggtgatccctactgtaacagcattcccctccctggaaacctgcaatttgcctcttagtcccagatggggaggaaactcccaaacagccgcaagccatacataatggcagggttcacatcctgacggggacaaagtagagamaaagagaaattcagaagagtcttcata

SEQ ID NO: 172532 - DNA, 548 bp, Homo sapiens
aaggttgaagtgaaaatgcaaacaattggcctttctccacatcagcatattgctttctctttggtgcctactgggacttaataccaccattctcccttcttgtcaccagtgaaggcccacaatgatgggtcagtaactgagaggggycctgtgaccctagaagatgaatcctcaaggaagaatctccagtggaatccctgaagtgcaggatattttgtaaggccaataaaatagggctgatcttccagaatatgattatacttttacatttctgaatataaatccttatcaagaagtgaaataaagtaactcaactattttctgaaatcaaagagaacatgtgttttaagtaaattaatcctttaaaatgcataccccgtagtaccatgagtcaaatttaattatagtattaggcccactgctgaattattatggtttttctgatacatttaaactgaggctttttagaccaacttgtaatatatttcaggcatcctctgtctagcaatttaaaggatctagaatttgtgggttatatatgctgttca

SEQ ID NO: 172533 - DNA, 548 bp, Homo sapiens
aaggttgaagtgaaaatgcaaacaattggcctttctccacatcagcatattgctttctctttggtgcctactgggacttaataccaccattctcccttcttgtcaccagtgaaggcccacaatgatgggtcagtaactgagaggggccctgtgaccctagaagatgaatcctcaaggaagaatctccagtggaatccctgaagtgcaggatattttgtaaggccaataaaatagggcygatcttccagaatatgattatacttttacatttctgaatataaatccttatcaagaagtgaaataaagtaactcaactattttctgaaatcaaagagaacatgtgttttaagtaaattaatcctttaaaatgcataccccgtagtaccatgagtcaaatttaattatagtattaggcccactgctgaattattatggtttttctgatacatttaaactgaggctttttagaccaacttgtaatatatttcaggcatcctctgtctagcaatttaaaggatctagaatttgtgggttatatatgctgttca

SEQ ID NO: 172534 - DNA, 339 bp, Homo sapiens
ttccaagacatatttcttttaaaataattttaactttctctgatttaagtttatctgataaacttgtgtattttctcagaaagatgtaacctaggggcctaacttttcctgtctttccttccttagccaaagygttgttcagaagccaggaaaattgagtttctaaactttttgctgcaaagggtgtcgatgctctgatgacagattaatccaggcacctgatttctgaagctctgtattaaaagcactgattcttttcagtaaggaatccaaaaaacaccatgaaagacagcagtgacacgaaaatccatgtagtgcatatctgagtgtgttaaaaca

SEQ ID NO: 172535 - DNA, 518 bp, Homo sapiens
gtgttgttcttctagtatggaattttttaaaggaaaagaggcattttcactttactcagaaaacatttatcaagagcttactatgtgccaagttatatagaacattctggggtataaaaataaatggacccagtcttttaatacacttactttatagtctggtaggaaatacatactttaaaaaaataaaataaaatgaaacaaaagctctaataaggatgcatacacagttctctgggaacatagatgtagaattaacctaactctggaaaagtcaagagaggcttcttayatgcaggagtgttcaatccaaacatgagggatgagtaaaaattgcatatatcaggcaggatacagagaatgtatattcaaggagaaaaagaggcttggagatataaaagataattaacagcttccctgatgttgagtgtaactgcagtttaaggagtggtaggaaatgaagcttctgaattagtaggttgtgatgcaaagacagagtcttctctgctaagctagtg

SEQ ID NO: 172536 - DNA, 513 bp, Homo sapiens
tgtcaaatgaattagggcagtagtttagtgagccaatgtgccaatttagaaatggattcttcttcctgctgaagagctcttttyaaaataaattacaatcataaagctgccacagtttactgtgcatagacatgttcagaattggctcttcttcatgagggctgcttggtgcaggtatttaagctactgccaataaggctaacagctcatcaaatagaaaatacgctgcaggaaaatacatgggttaagaaaaacagttaaataccgtgctgttattttgtatgtctgtttaagcttttctctcaaacaagttgacttacttaaattgttttttaaaaataaactctaaaagccttgaaaatagtgcagtcttaaaagtagtattgattttagtcaatgctaaaaacactttcaggggaataagatgagaaaccacatgaacaagtttgccaccaatagtggcaacagtgtatgtatgtcatggatttaagagagactcaaataaaaacaaat

SEQ ID NO: 172537 - DNA, 384 bp, Homo sapiens
gcctacttcatacctaggccgtatggtatatattgcctgttgttcctaagctacaaacctgcacagcatgttactgtactgaatacgtaggcaattgtaacccaatggtatctacatatacacagaaaatgtatcttaaaaataccctatttataatattatggcatcaccgctgtatatgttgtatatgtggtctatcattgaaaagttatcaggcatgcacatgactgtacatatttatgtcaaatattaaaatccagatggaacattagttagaataacaaaagcctaacaaaactcttaaatccaatcaatggattttgsttacatacatattttttagaagactgacattgcattaccacatagaagctgtgattcaaa

SEQ ID NO: 172538 - DNA, 384 bp, Homo sapiens
gcctacttcatacctaggccgtatggtatatattgcctgttgttcctaagctacaaacctgcacagcatgttactgtactgaatacgtaggcaattgtaacccaatggtatctacatatacacagaaaatgtatcttaaaaataccctatttataatattatggcatcaccgctgtatatgttgtatatgtggtctatcattgaaaagttatcaggcatgcacatgactgtacatatttatgtcaaatattaaaatccagatggaacattagttagaataacaaaagcctaacaaaactcttaaatccaatcaatggattttgcttacatacatattttttagaagactgayattgcattaccacatagaagctgtgattcaaa

SEQ ID NO: 172539 - DNA, 469 bp, Homo sapiens
cagtgcctgggttaaaagcttcaaaggacaggctgactctcttggtaggacaatgcagctggtgacttaaagttgtagccaatgctcattgaccattccaaaaattctaaggtccttaagaattatgctawatctactctgcctgtgctctataaatggaacagcaaagtctgggtgacagcacatttgtttacaatatggtttagtgaataagcctattgtttagacactgctcagaaacaaaaattcctttcaaaatattacagttcattgacaatgtaccttgtcacccaaaacttctgatggagatgtacaagcagattaatgttgttttcatggctgttaatacagcatatattcttcagcccacgctcaagggttaatttaaactttcaagtcttattacttaagacatacattttataaggctagaggtgccatagacagtgatttctatgatggatgtggg

SEQ ID NO: 172540 - DNA, 464 bp, Homo sapiens
caaaggacaggctgactctcttggtaggacaatgcagctggtgacttaaagttgtagccaatgctcattgaccattccaaaaattctaaggtccttaagaattatgctatatctactctgcctgtgctctataaatggaacagcaaagtctgggtgacagcacatttgtttacaatatggtttagtgaataagcctattgtttagacactgctcagaaacaaaaattcctttcaaaatattacagttcattgacaatgtaccttgtcacccaaaacttctgatggagatgtacaagcagattaatgttgttttcatggctgttaatacagcatatattcttcagcccacgcycaagggttaatttaaactttcaagtcttattacttaagacatacattttataaggctagaggtgccatagacagtgatttctatgatggatgtgggcaaagtaaactgaaaa

SEQ ID NO: 172541 - DNA, 561 bp, Homo sapiens
ttaatgaataaattatcctagcttggttcttctaaagacccctttgtgacctaatttaaataaatgtgggcttttgattacttacaaaatttccttcagagttgatcgaattctttgccgctttttaaatcactagatctatatccccatactaattttccttagttctttcattgcagaatctactttctaatatttatactttgttttttgcctcctctgcatttgaaaaccttcacctgactcatcattaaatctatgaatttatcggtactggaagttctgtcaatgatatcctagtgttttcagtgatatcattgtcattatgtcttccaaattcaatgagcagcctggagattgtgcttattcttcttaggtgctaaaacctattactaatttatctctttgmtgtcaattctgtagcatagagcaatatcaagattcacctcaaccccaactctgttcttgtgaaatgagtgatatatttatggtaaaatccaaccttatgttgtctatccttaggaatgagacatgtactaccatttggtcaaagccaagaca

SEQ ID NO: 172542 - DNA, 561 bp, Homo sapiens
ttaatgaataaattatcctagcttggttcttctaaagacccctttgtgacctaatttaaataaatgtgggcttttgattacttacaaaatttccttcagagttgatcgaattctttgccgctttttaaatcactagatctatatccccatactaattttccttagttctttcattgcagaatctactttctaatatttatactttgttttttgcctcctctgcatttgaaaaccttcacctgactcatcattaaatctatgaatttatcggtactggaagttctgtcaatgatatcctagtgttttcagtgatatcattgtcattatgtcttccaaattcaatgagcagcctggagattgtgcttattcttcttaggtgctaaaacctattactaatttatctctttgatgtcaattctgtagcatagagcaatatcaagattcacctcaaccccaactctgtycttgtgaaatgagtgatatatttatggtaaaatccaaccttatgttgtctatccttaggaatgagacatgtactaccatttggtcaaagccaagaca

SEQ ID NO: 172543 - DNA, 414 bp, Homo sapiens
gaattccatttgcttcctctggagtacccacatctscagactgtccgtgtatttctcacttagcaactctgtcttattcccttccttgcctggcaggtataacaaagtgttttaaatacaccatggcttttctatttccatttcaagcatacacagttaaatataaactttcttagaaattgtcttgattttaatgatcttacctgaaatgtattacatatttcacttaatcattttagcatattaacaatgttttgttattcaatattaaggcacatgtgtacatgtatatatgcattccttgaaaatcaatacataacaagcagcattactttgacagtacaaaaaagcatggcagaaatacatgaagcatattctaaaaattcattagagctgttctagtttcagctccaa

SEQ ID NO: 172544 - DNA, 514 bp, Homo sapiens
caccttcccagagcttcagttttttgatttgttaaatgagggataacaatttctaccaggcctcacttccaggatttttgtgaggatgagtacaacgatatatgtcaaagctctatataatgattgtataaaatctataataattgatataattctcagttgtgtgtgtgcctgtgtgtatgtttcatgaagtattgataatgatggcaattgttatagatttcatatgctgagcttcattttcctgctagaaattcatgatgcctgaacatgattccatctctcctgaatttgtacttgcagaatgagtagtattaacagataacccatagagaacctttttcaratgattgccaaacactgaaaggctttagatatttcctcctaatgtttatcttttcttatctttttaaaaaagaataatcatttccacttcttcagtactactggaaaaccacaaaaaaaaataaaaacttttctaggcctttcaaagtgtttcacatttactgccaca

SEQ ID NO: 172545 - DNA, 495 bp, Homo sapiens
agaactgttttgggctgtgcttcactaagtacaaaggaaggtaaaattcaatttgggccaggtttctaagagaacattactgagaaagaagtgtgaaaagaaaaataaagaaccataaaacatattttgacagttctccatgaaaaaccatagtagagcagtaaatgtctgcctctttataaggtgtcagtattttacaaaattctattaagataaaatacccacatcagagggaaaacaagacagtgaaaggatctttttctgaaacagaaaaaatcagcattaaatcattggaaagtgttgcaaatcccatttatttttcyccacatctcttgtatatcagggatttgtccattccattcagaattcaaagtaaatacagactgtctgcattttattatataatgccttgtcatgttgacaagttaatagggttggtcctgagaatattataaggaaagaatttcatctttttcagggtgacagcattcttta

SEQ ID NO: 172546 - DNA, 534 bp, Homo sapiens
atctgtaagcactgaggcctggatgttactttttacacttaaaagtatttcttgttatgttatgagtctcagaaatgtgctagtatatatcttcttgtagtaaatgtgatgctttcttaggactattatctcatttctttctggtaagacttctgaataatctaagcaaatgaaagaaaaggtctttctgtggaaggatgtgtgttaaactcaccctcttgctcagctgktattagtttacatgtatccaaactattgtgcagattcgttttctaagaggtaattcacttgtctacaccttgcctagtttactcatatgtaacatatattggtatttttcaaccatatagtcttttgtcacacttgtgactttttttccctaaggagttgcctttgaagatattttctcctagtccttattctattttcagtgaggggagaggaagagaacataaatagtattcttcctctatttattggaatgtacctttactgttttataatctagctatttaaaaaatctgtgaaaaataa

SEQ ID NO: 172547 - DNA, 302 bp, Homo sapiens
aagggatattttatgatggcaaaagggccagtcatacagaaagataaacatttattcatctaaaactgagcctcaaaatawaagaagtaaaactaacagaagtgaaggaagaaatagacaattcagcaataataaagactttaatactctactttcaataatgtatagaacaactagacaggagatcaacaaggaaaaagaaaacttgaacaatactatcaaccaattagacctaacagaaatctacaaaacattccaccaacaatagcagaatacacattcttctcaattacacatggaac

SEQ ID NO: 172548 - DNA, 517 bp, Homo sapiens
agatcttggaggctggctatcatactttgtcttagggttcagcatgaaagtttgtcctgtttcattcatgatgtccaccatgcatgggacatgagggtgctgccatgcatgctagcatgctgagggtctatttccctgaaatttctggatttaattcccaaaactttcagagattaagtagattctgtccaagacctaaaaactcacttccattttggatgtaactcttccaaaattaagccagtcccaayttcctactaatttattcttttaggagtcatgtcactgagaaggactgggacaatacctttccactttatttggaaacattttcagatccttcaattgttttttaacaatgccaggctgcttccatcactaatataagtacaaaatcctaaagacatggttccttctaatttctaatttatatgcattcttttgcaaaactagtcactaggaaatggcaacagaaaacctaaattacccttcaatattaccatattcatacccacat

SEQ ID NO: 172549 - DNA, 394 bp, Homo sapiens
aatttctggatttaattcccaaaactttcagagattaagtagattctgtccaagacctaaaaactcacttccattttggatgtaactcttccaaaattaagccagtcccaacttcctactaatttattcttttaggagtcatgtcactgagaaggactgggacaatacctttccactttatttggaaacattttcagatccttcaattgttttttaacaatgccaggctgcttccatcactaatataagtacaaaatcctaaagacatggttccttctaatttctaatttatatgcattcttttgcaaaactagtcactaggaaatrgcaacagaaaacctaaattacccttcaatattaccatattcatacccacatgggaattccacagtat

SEQ ID NO: 172550 - DNA, 555 bp, Homo sapiens
catcagttaattaagatatttattccctgcactagggttaccctacttatcagatgataataaaactcatttgaaaactaaagagaaacatttaattccaagtcatatacaaaagcgcatttatagatagatatcttgaggaaaagcaagatctgaacttctaaaatttaaattccaaggtttgagggcaggaggggttatttttactgtatttcaaagatgcaggcattcatgattaaaatttttttttctgatacattaaagaggattgatctggtagaggaataatcatacagaagttgaagtctaaagttctgaattcaaaktctgactctaatgagctctgttaccagagaaagtcatttaatttctccatgctccgttctctcacttgtaaaatgaaagtgcttgatagcctattttcttttgtgcatgtacattttacaatcgttatacatgttcatcatttttttaacacatgggtatgtcaagataacagcaaagttctccctactcattacccaacagtctcactactcagaggtaactatagtt

SEQ ID NO: 172551 - DNA, 590 bp, Homo sapiens
gccatagtgattagtttagaggtgaacaaaggagctcagtcaaggctgattgtagccaatgagtcaatgtattcaatgccagggctctaacttgaaagagagatgctctgtttccatgtgtactgcttttaattcatggatatccattttccctcacttttagtttttgttttgttttgctttaatcatttctactccctctcttcaggttgttgtttttttttttttttttctaactctggccaactttttccatgtcttattcttttggaactgcagtatcccaggaaccacccagagaacagaaaaacattttttgcttcagaaggattaggatctaggcaccatgtggaattcagttgaagagtttcttacatgttctttacaaaaacaacaaaacagaaaataataaatgaaacaactacyatcaaaaggcagctgacccagcacttcttttccttttttcttgaagtttggctgggcagcctgcaaaacaaagaaacgtattggcgatatgaggttcatatgtcagaactctttatcttgagtggggctgaaaacttaacttgaattgacttgagagagagaag

SEQ ID NO: 172552 - DNA, 583 bp, Homo sapiens
tttcaccacccggcagtgtgtctaaggctggtgatgaatggaaggtgagagtgacacttactaaatcagggtgtgtcctccgtgcagaggaacgaggagcaccggaaagccagagtgattcactgagcctgctttggctatctgtgaagactttattccaggctcacagcagggaaaaacatacttaaatcttgcctgcagagctctctgggaacaaaatctatcacgttactgtaggggcagagagagaaatcagctctgcaattgtggggtgtgtctagcgaccagtcactrctgtcaacatttaaacttgccctgcatgcgtcatgagatgctatcagcaatggcagtgcaacacagttctagccagtgggccggggagctccatgggcagctttgaggaggtaggaaacagtattaatgaacacagggtgagaaagggcttagtttaaaggctgtacgccatcaggagtaataaaagcaggatgctaagaaagagaacacttcattcatcctctctcatggttggtcattgtctccctaaactgagtatgcgcttgctacgaagcccagcctcccgtgc

SEQ ID NO: 172553 - DNA, 600 bp, Homo sapiens
tgcaatgttcttttttgttctttcttttcctaatgaagagtattgattttctttctaatttttactttgcttttagagaaagtttattttataacaaatatgactggttgacttaaatctggttcctgttcatatggatgttctctctgtgatcactggaatgaccaatttgaactagtttgtcttcatttatggtaaaattatacaactttccaggattcaggctgtataaaagtaaaatagtagcttragttctctcaaagcgtggagaaacttgtatactcaaaagagagatcgtgtaactaacctgcccaatgtgcacaggtaccctaatacttaaagtataataaaaaaaaaagacgtaaaaaaaaaaaaaaagaaaaaaaaaaagagagatcgtgattcctattggcatttcagaccttggagctagaggcagctatgcaggaaaacccaaggtagggggctgtgggggcccaggaactccagaattaaatgcagctcttgggcatttttaataggtgagtttcccaaataccattttgaaatgttacctctgaaatatcccagagcagactcagtctcaggggaagctataga

SEQ ID NO: 172554 - DNA, 578 bp, Homo sapiens
acacacccaagctttgatttacacaaatccaacatgggttcaaatccctgtgctgccaatttctagctggatgggacttttagggagtcacttagctccctaagccacactgcccttatttgtaaaaatgggtttactgatggtaaccatttcatagcgttaatatgagggttaaattaaacaagacagggtagcaaaagctcttgcacagaggctagcagatagacatatttaatatatagaagttaackataagcaaactgcaatgttggccatgaaatcaggtttcttagaaaaaaactacgttaattgcaatatttggaaagagtttgaaaacaacccacataaatggtaaatatgtaaatacagagtttctattgaggtcaatttttcccaaatcttccccaattatcattttataagggactaattgagggccttctgttccaagaagtaagcatctcctctggtaaatttttctctgacctgctttactctctgaggtataatcttctggtctccttgattcctcccaataagatttaacatgggagattatgttatcatatcacattcaa

SEQ ID NO: 172555 - DNA, 578 bp, Homo sapiens
acacacccaagctttgatttacacaaatccaacatgggttcaaatccctgtgctgccaatttctagctggatgggacttttagggagtcacttagctccctaagccacactgcccttatttgtaaaaatgggtttactgatggtaaccatttcatagcgttaatatgagggttaaattaaacaagacagggtagcaaaagctcttgcacagaggctagcagatagacatatttaatatatagaagttaacgataagcaaactgcaatgttggccatgaaatcaggtttcttagaaaaaaaytacgttaattgcaatatttggaaagagtttgaaaacaacccacataaatggtaaatatgtaaatacagagtttctattgaggtcaatttttcccaaatcttccccaattatcattttataagggactaattgagggccttctgttccaagaagtaagcatctcctctggtaaatttttctctgacctgctttactctctgaggtataatcttctggtctccttgattcctcccaataagatttaacatgggagattatgttatcatatcacattcaa

SEQ ID NO: 172556 - DNA, 578 bp, Homo sapiens
acacacccaagctttgatttacacaaatccaacatgggttcaaatccctgtgctgccaatttctagctggatgggacttttagggagtcacttagctccctaagccacactgcccttatttgtaaaaatgggtttactgatggtaaccatttcatagcgttaatatgagggttaaattaaacaagacagggtagcaaaagctcttgcacagaggctagcagatagacatatttaatatatagaagttaacgataagcaaactgcaatgttggccatgaaatcaggtttcttagaaaaaaactacgttaattgcaatatttggaaagagtttgaaaacaacccacataaatggtaaatatgtaaatacagagtttctattgaggtcaatttttcccaaatcttccccaattatcattttataaggkactaattgagggccttctgttccaagaagtaagcatctcctctggtaaatttttctctgacctgctttactctctgaggtataatcttctggtctccttgattcctcccaataagatttaacatgggagattatgttatcatatcacattcaa

SEQ ID NO: 172557 - DNA, 435 bp, Homo sapiens
ggaggaagatataacctagacctgtgctttccacaaatgaatgtgcacatgaaccacctgagggaccttgttagaaagcagattctgattcgttaggtctgggattgagctcatattctgcatttctaataagttctcaagagagtctcttgctgctggtccctggacaagtcaacctagagaccaraagagagaagtcttggatgtaaagagagcagctagacatgatctccataaagatgatgacagtgtctgcattatttaccactgtagcacatgctctgatacacagtccaccctgttcagtaatttgtttatttatttttgcctgatgatcttgaatacaaactctgaagatatgttcctttctttcctttcctgtcttctcttaaaacttgaaatgcctaagcaatgctacatttcttaaagcaaccc

SEQ ID NO: 172558 - DNA, 523 bp, Homo sapiens
gctgatgtttataaaaagaattctcaagcttgctcgaataaagaggaaggtaatttcaggttacaagaaacacctggtttaagaagaacatgaactttggaataagacagaattgagtttgaatcctgtcgctaccagttactaaccatgggacttgtgtgagcacactactyaagctctccaggtctcagttttctcagctgtaaaatgggaatagtaatagttctttctttatagggttgtttgaggatgaaatgaaacaatgtatgcacaatactgtatggttatgtgttcagaaatattagccattgtttgtttattggatactgagtttggatactgagtcttcatgaagatggaaatgaaaagttgataggaatggaaaatacttctgtgtccggaattggttccttcctgtgggtgtttggtctcacttcaagaatgaagctgcggacacttacggtgagtgttacagttcttaaagatggtgtgtctagagtttgttccttcagatgttcagatg

SEQ ID NO: 172559 - DNA, 525 bp, Homo sapiens
cttccccttttttcttttagtattttctctctcttgagggaactactcagttttctatttgtgtctcttgacttacatggtccaatggaaccgctaatcctaaatctacttgactatattctggtgcccatcaacaattgactatagattatcaatatcttagttcaaactaagttcaataaagasaatctgattagctgctggtcagccaatggatgaatactctaggtcaatttttcactcataatgtagtcaagctaatggtcaagttgttgacttttaaggtcaaataagtattgccattcatcctgactttgagacacaccatggttccttccaccaccctaggtcctctggccggtagtttcaaggccttgagtaaaatgctttccttgtctaaaatccaaaaggtctgttacttaatatgtttaggcttcttgtaaggtctgcaaacctttcaaagggacatttcaaaagcttctggacttagataattgtgtcaaaagggaaacagctgtttctgta

SEQ ID NO: 172560 - DNA, 271 bp, Homo sapiens
attaaccttccagaactacttgagagtatttccctccrtagctctgcaggtaacctgtttttttccaccaatctccccagccagatcatacattcaaaagaagagggctcacctacttgtttatcattaaaccccaggctctagcattaatgcctggcacatagtaggtgctccatgtatacttgttgagtgtataaacaaataaatacatgagtgattggctaaatgcctaatcctcagtgagacatggcaaatacacactgtaactttc

SEQ ID NO: 172561 - DNA, 609 bp, Homo sapiens
gtaagtgaaatacaagaggctcaacatcattagtcattagagaatgcacatcgaaactataatgagataccacagtgagatatcacttcacatccactaggaagactgtaatcaaaatgacagrtgtagtaagtgttggcaagggtgtggaggaattgctagtgagaatgtaaaatagtgcagtcactttggaaaacaggcaattcatcaaaacggtaaacacagagttaaccatatgacctaccaattctactcctatgtatatatccaggacaattaaaaatatgtgtccacagaaacacttgcacatgaatgctaatagcagcattattcaaagcagctaaaaagtagaagtaaactaaatgtttatcagctgataaatggataaataaaatgtggtatatctacacaatggaatattattcagtcataaaaaggaatgaagttctgatatatatcacaacttggatgaaccttaaaaacgttatactaactaaaataagccaatcagaaaagaccacataatacaggactccttttatatgaaatgtccagaatatgcaaattcatagaaacaaaaggttgattagagtttgtcaggggtttggg

SEQ ID NO: 172562 - DNA, 609 bp, Homo sapiens
gtaagtgaaatacaagaggctcaacatcattagtcattagagaatgcacatcgaaactataatgagataccacagtgagatatcacttcacatccactaggaagactgtaatcaaaatgacaggtgtagtaagtgttggcaagggtgtggaggaattgctagtgagaatgtaaaatagtgcagtcactttggaaaacaggcaattcatcaaaacggtaaacacagagttaaccatatgacctaccaattctactcctatgtatatatccaggacaattaaaaatatgtgtccacagaaacacttgcacatgaatgctaatagcagcattattcaaagcagctaaaaagtagaagtaaactaaatgtttatcagctgatmaatggataaataaaatgtggtatatctacacaatggaatattattcagtcataaaaaggaatgaagttctgatatatatcacaacttggatgaaccttaaaaacgttatactaactaaaataagccaatcagaaaagaccacataatacaggactccttttatatgaaatgtccagaatatgcaaattcatagaaacaaaaggttgattagagtttgtcaggggtttggg

SEQ ID NO: 172563 - DNA, 603 bp, Homo sapiens
ctgtctccaaaacacaaacaaacaaataaacaaacaaaaaaccaccaccaacaaaaaccctgagactgggtaatttatataaattatatgttaattaaatttatataaattatataacatataaattatatgttaattaaatttatataaattacccagtctcaggtatcttttttatagcaatgcaaaaacagcctaatacaacagtgttgtgtttgtgccccacctcctcctaggaggccctgtgggattgcaatttgagcagtgcagcaggaaggtccagtgttctctcccttctagtaaggggctagtggatgttgaaaattgtctccattctacccttgtctccgcttgtactttgacggtgtgtgaggattttttcttttcttatcacaaaagcaatacatgtttataggaggggraaaaaaagataatgaaagagaagaaaataaaaacaccaataattccaccaggcagagacagcctctgataacatatctgtttgtatctttagaatcacttggggagcttttaaggaatatcagtgtctgttgcccattcccagagattctgattcaaatagtccggagtgtgcaggactag

SEQ ID NO: 172564 - DNA, 417 bp, Homo sapiens
taggtgaaaaaccacgggtctagacatttagtgtataaaatgtatatttttaccaaaatgggcattctataatacagttttattacctgatctttataattttattacaaacatctttctatagaaggatgagagagcaaacccatcttttttaatgacctcacagtagaatttaatttgcttactcatttctttgtggttggaaaggcagaatgttttcacctgggctggggaaggggggtggggtggggaggktgtgggcaaaaaaggactgaaatatccatactggcatcagaaagctcacagatgcagagaaaactaagacaagctcagcttgggttatgacagatgacacaaatactagaattgtttgctataaagctatggttgtcagtgggaaagtctccgtataattgc

SEQ ID NO: 172565 - DNA, 417 bp, Homo sapiens
taggtgaaaaaccacgggtctagacatttagtgtataaaatgtatatttttaccaaaatgggcattctataatacagttttattacctgatctttataattttattacaaacatctttctatagaaggatgagagagcaaacccatcttttttaatgacctcacagtagaatttaatttgcttactcatttctttgtggttggaaaggcagaatgttttcacctgggctggggaaggggggtggggtggggaggttgtgggcaawaaaggactgaaatatccatactggcatcagaaagctcacagatgcagagaaaactaagacaagctcagcttgggttatgacagatgacacaaatactagaattgtttgctataaagctatggttgtcagtgggaaagtctccgtataattgc

SEQ ID NO: 172566 - DNA, 581 bp, Homo sapiens
tttgacaagtcaaacctgtccctgaggctggtaaggggcaatgtcctctggagcacacagttgtttgtacatgtgaatctctaaaaaatttcagggttctgttaggatgcaagagggaagtgttgtctggtatccatgcagcagggtctggtgtagttactgtatgtactcaggaggaactaagttggtttctctgggcactgagtgaggaggactgtgaggagaaagacgggtgatgtggcaggagatctgaggtgactgctctctcagttccgtgtccttcaatacattcttcctctttctcagactgcttttgtacaaactggcaaggggctgaatttctyatctaggttgacaaggagggaaaaggaacaaatgcaggagctagggatagaggagatctagggaagtggtagaagccattgggagggcagtgtagttgggttttagccaagttaatctacattgcaggttgcagacaggttgcacacatcacaggtggttgcagacagggcctcagcaaccacctgggtaacaagatggcagccacagactgtgtggattttaacctgatagcatca

SEQ ID NO: 172567 - DNA, 529 bp, Homo sapiens
gcaaataaacatttgtaatcggtactataaatcatgaaacagattaattatccagaaacatacaaaatcatcctctaaattgttctcctaatgtaccagctctccactgactcattactaaattatttgctagtgaatgaattttcttttcttcaaacgctttttgagctgggagaagttggcacagacaaaatgctttctgccaggggtgaggttatatccccacaaccctsaatcaactggttataaaaatcaaagaattctgctgaaccacaaggaagttttctcttgtggttatcggccatttattttgccacatcttcattaccattctgaaataaaattcacagataatataacctactgacatgtaatttaaataaacaaacattttccttcctaatatataggaaggaaaaaagaaagtcacttattataatatgcatttaatatttgcatgtttgggctctaaactggaaatcgtaataaagcagtcagatgatttcatctgtaacagaaaaacaaaagc

SEQ ID NO: 172568 - DNA, 602 bp, Homo sapiens
ggcttatatttctgcacaggcccagacaaaaagcaggggttttattattgcagaagtaggggaaaactgataccagaaagcagttaatctcagaaacttatgttgtatttgctgctctatacccactacctgatcaatctttgacataaaggtccccaaaatatctgttaaatgaaaatgagtgaatgaatgccrttctttggcttatattctctaaccactcctaatgtttgtagaattaagatccaaatctttaatgcaaactacaaagccctgcgtgatgtgaatcttgcccccctctccagccctgttccattcttccactcctccttccctctcttggctctagctatgttgacttccttcaattcctggaatattcctggctctctcccagttctcaccagggcaacgcacatggcatttcctctgtctgagatgtccttccctactctcttctaggcattttctactctttcctttttccttttctatcctgaattcctagaaaagtacccagggtatagaagatgctcaataattacctcttgactgacttaacctcaacacgtacttcctcagggagggtttcctaactctgt

SEQ ID NO: 172569 - DNA, 513 bp, Homo sapiens
tttaacaacaatgaagtagtagctcccttgtagtctgaaatgaagattacatgaaatartgcatattaaaacatgtagcacagatagcacataataaggactcaaaaattttataactattactaatttttcagggcaaagttaaacacaagagagaaaaagggaaaagtttacaaacttaatagaagcctcaataatcaactttttcctgttcctgattatacctagtccaataagatagctattagatacatgtgagtatttaaattcaaattaatgaaataaaatgaaataaaaacttttcaggcacactagccaaattttaatagccacatgtggctactagctatgaatagaacatttccaggattgcagaaagttctattggatggcaatgttgccacacttgctgcttgaaggccttaggtagagactttccagacatgggagccaagatgccaaggggatgttattttcctttcagcttataaaggatttccaatgctgcatcag

SEQ ID NO: 172570 - DNA, 592 bp, Homo sapiens
tagagaagctttgatatcaggagactttgaaggaaatattataattaggccattgctatgagtactaaagttatataaagtgattgcggractttagtaaaaagggggaacatgttgccaaaatctttaatgaatatgctgttgagaaataaagagggtaccatgctatggctgccacaaaaagagaagagagttgtttaaaatttcatggagtataagtaaagaaaaacggacatcaaattggacaagcaattatccggaagtggtaatagggaaaaaagatatgaataaaatgttgtggcatgtatggggtagagtagaatgggaagcccctatttcagaggatatcaagtgaagtaacaattttgttagagataaggaaacaaaaagtgcattttgaaggtatttgagaatacagaattcccttatgtctagccccctatctagttataactgtgagcaagttgtactcccacacctgagacttgcaggctcactaataacttctaatttaacaagaaagtctttcttgttgttgttgtgtctttcccattctaaatctgctttgatcctgttaagactggtagccttc

SEQ ID NO: 172571 - DNA, 592 bp, Homo sapiens
ttctgacatggcataaggagaaaataattgttttaagtaacattttaaaggaatgtatgtcagcaaaaatcctgtctagaattgggggtgcattcctcagagagagggcaagggttaccacagggggcctatgatctgtttgggcctatactaatgcagctattgtgttcccccatctgtactcttaggaaaacattctgagaatgttcccaagttctctgaatttcctcaggctagtcttagcggctcctyagtggaggttgatttttgcccaaaatcgtcgttcccattgcaacttgatatggggcacatattccataaaattcatcctagcattctcattatgtatctccacaaagctccctgtccttatttataacagaaatacttctccaaggagcaaaacatgattgtggaaaattatctttattactcttccaccacccttttatcttcttttgcctgagaagctgtttgcgcagacctatgaatctcttctttgtgacctctgcttgcatctcactttcccttttacagaataggaaactctcctgtcatcatcactttctgctcctctgcattcatttgcttt

SEQ ID NO: 172572 - DNA, 592 bp, Homo sapiens
ttctgacatggcataaggagaaaataattgttttaagtaacattttaaaggaatgtatgtcagcaaaaatcctgtctagaattgggggtgcattcctcagagagagggcaagggttaccacagggggcctatgatctgtttgggcctatactaatgcagctattgtgttcccccatctgtactcttaggaaaacattctgagaatgttcccaagttctctgaatttcctcaggctagtcttagcggctcctcagtggaggttgatttttgcccaaaatcgtcgttcccattgcaacttgatatggggcacatattccataaaattcatcctagcattctcattatgtatctccacaaagctccctgtccttatttataacagaaatacttctccaaggagcaaaacatgattgtggaaaattatctttattactcttccaccacccttttatcttcttttgcctgagaagctgtttgcgcagacctatgaatctcttctttgtgacctctgcttgcatctcactttcccttttacagaataggaaactctcctrtcatcatcactttctgctcctctgcattcatttgcttt

SEQ ID NO: 172573 - DNA, 562 bp, Homo sapiens
attgagttaaagtgtgttagatgagaaaaacacatagagaggagaccccaaaggcacaagaacacatattcaaggagaatggcaaaagaggaagcgacagtagcagtatataaaatgcatattttcatgaccagtcctcagattggcaatcatgtaaaaatgcattgagatttagaggctgctctcaacaaaccctaaatcatttgaataaaatcccttcatgtttctgtcttagtatcaatatggcaatgtctagaccaacatagtaattcacaaccaataaattgacttttaatttcaaccaagaaaaatatttcccagcttctgcaggaatattcccagccacttgagagaagaaaggtttaataacgtgattgtataaggaaaatggtgtaactagctcagttcaacatggtggttgtaacacagtggtattgctgtgaattccaagatccccatgtaatctctgtgcrgatatattgcttaatatctatgaacctctattttttgatatgcaaaataaaaaataataatactcaactcaatattccgttgtgaagat

SEQ ID NO: 172574 - DNA, 632 bp, Homo sapiens
ttaaatattgttaattgaattcccatacaactgttactcaggtcaagaaatagaatattgcattataatttggcttttgaaatgtagtcatcaaaattattatataaaaatacaattatataaaaatacaaaaaaattatataaaaatataatagttgtgtgtatttcaaaacacaactattataatgcttgctttaatttctaagcaatctttgaaatatttcagctaatatattcttcgaagaaagagctttcacaagtccttgttctctctgtagaaaacctgaaaacttgatttaaataatttaaaaaccgtcttgctttgtctrttaaaaacatctaggcacccatcgtagacaatgttagtattaccaggataaccatttattgtaatattgcaggtcaaaatcaatgatacctcacattagtttttcattgtgatgggaagttattaatgagtagctgctaaagtgccaacctgataataagtggatccctcttccatccaaaaaaatagaaaaattaaagaagaaaatgaaaaaggaaacgaaagaaatatatctattatggaacccagaaaattctggaattgatgagcttgatgatttgtcctatgaatatgtacatgagca

SEQ ID NO: 172575 - DNA, 632 bp, Homo sapiens
ttaaatattgttaattgaattcccatacaactgttactcaggtcaagaaatagaatattgcattataatttggcttttgaaatgtagtcatcaaaattattatataaaaatacaattatataaaaatacaaaaaaattatataaaaatataatagttgtgtgtatttcaaaacacaactattataatgcttgctttaatttctaagcaatctttgaaatatttcagctaatatattcttcgaagaaagagctttcacaagtccttgttctctctgtagaaaacctgaaaacttgatttaaataatttaaaaaccgtcttgctttgtctgttaaaaacatctaggcacccatcgtagacaatgttagtattaccaggataaccatttattgtaatattgcaggtcaaaatcaatgatrcctcacattagtttttcattgtgatgggaagttattaatgagtagctgctaaagtgccaacctgataataagtggatccctcttccatccaaaaaaatagaaaaattaaagaagaaaatgaaaaaggaaacgaaagaaatatatctattatggaacccagaaaattctggaattgatgagcttgatgatttgtcctatgaatatgtacatgagca

SEQ ID NO: 172576 - DNA, 578 bp, Homo sapiens
aaggaaaataattcaatgataaataaatgtggcattctagggaaatatggatgggtagacaattgacaccaattcttcttaactgtcaacaataaatacctaatttaggcaagcatcaacacaagctaccatgtcaattagaattaaaagtacacattttgattttaataagaaaaataaattttttgagtgaatgaggagctaaaagtggtggtgagagaaaagatttatggttaaagggtgataaacgtaagatctgttacagttttcacctctgaaaattctrttcacctccaattcattttgttactgctgctaaacaatccttatggaaagcaaaaccaatactactacttcagtgtagtaaagctgcttgcaagtggttggctgatctccctggaaagcagggttatatgagattgttgtgatgggtgtttatcagtgagtgtagcaggattgttcagtaaactaaagtacatattactgagcccatgtgcctccgtctctgtggtttttcctcactggacaagggcggggtggttaggaaaatgttggattgatgtccacagagtaagtca

SEQ ID NO: 172577 - DNA, 578 bp, Homo sapiens
aaggaaaataattcaatgataaataaatgtggcattctagggaaatatggatgggtagacaattgacaccaattcttcttaactgtcaacaataaatacctaatttaggcaagcatcaacacaagctaccatgtcaattagaattaaaagtacacattttgattttaataagaaaaataaattttttgagtgaatgaggagctaaaagtggtggtgagagaaaagatttatggttaaagggtgataaacgtaagatctgttacagttttcacctctgaaaattctattcacctccaattcattttgttactgctgctaaacaatccttatggaaagcaaaaccaatactactacttcagtgtagtaaagctgcttscaagtggttggctgatctccctggaaagcagggttatatgagattgttgtgatgggtgtttatcagtgagtgtagcaggattgttcagtaaactaaagtacatattactgagcccatgtgcctccgtctctgtggtttttcctcactggacaagggcggggtggttaggaaaatgttggattgatgtccacagagtaagtca

SEQ ID NO: 172578 - DNA, 585 bp, Homo sapiens
gtagtggcatgatcagttcacttcagcctcaaccttctcgtcctcccacttaagcattctgagtagctgagactacaggcscatgccatgacacccagctaatttttttttaattttggtagagaagggtatcactgtgttgccccgacttaattttttttatataagtagagtatactttaaaattttgatttaaaatttagtacacaaaatacacaagtcagtaagttagcttatcatgattatcaagtatcatgtactatatataattatatgtgctatacttttatccatcagaaagcacagtaagtttgtttacaccagcattgccccaaaaatgtgagtattgtgtttcacttcaacattacaaaggctaccgtgtcacgaggcaatagagttttttcggctttattatcatttatggaagcaccattgtatatgcagtccatcgttgtcttaaacattgttatgtagcatatactgtacttgaaactgacaagagtcattactgatgggttcatagactatacccaaatagtgccttattaaaacaatttgttataattaaacttagagctcaagctt

SEQ ID NO: 172579 - DNA, 450 bp, Homo sapiens
ttttctccaaggcttgcatttttatcttattaataatatctttcaataagaagtctaatgtgttcattctttctttctgttcattctttttatatctctttaaaggagcatattttcaagcctgcaaagattttctctttgatatatttgagttctagcacttacatgtagatattttataaatttgtcattaatttgtaggtatggcatgtgttaaagatcaatatgtgtattggttgattaaaatttttagttgtttcagcatcatttgttgaaagcacttttattccccaactgaattactgtggtaactttgtcagagtcgattgatcatatatgtctgggtctgttttggactctttcawtgatttgtatgtttgtccttagctttaaagttattactgaaatcagggagtgaaatctaccatgttttctttctttatgaatatt

SEQ ID NO: 172580 - DNA, 529 bp, Homo sapiens
atgcctaaataaattgaggtcattgggaaagtataatttatatgaaactatgaaaattatgttttttaagttccatataattgtcacggtttgatgaatttaaaagtgtatttgtagatataaattccaattttatatatcagatttttaagaggggattttacagttgaaatatcagtaaatcttatcttttttaaatggtgrcatgtgttataaaatgttttggaatacagtatatcacaataataaaagaaaacagtttaaaaatctactcttgcttaaaagtttctactactaaaatgtaatatggcaatattttcttctacattttgctaatacactacctggctcctcattttttcagcttcagtaatctataatttaatactgtccataaataatcatttttggcctagattgaagctattattagcaactattagcaatacctttagtgattttcagaagcaagtgagaaaaatatgttatcattattattccatgtcaaattcaagtaaccataattaga

SEQ ID NO: 172581 - DNA, 584 bp, Homo sapiens
atcaaatgcttatcaatggatgaatgaattgatttaaaaagttggtatatatgaagttamatattattgagccataaaatagaataaacttctgccatttacagcaatatggatggaattggaggccattatgttaagtgatataagccaagaacagaaagacaaatatctcatgttctcactcatgtagggaagcttaaaaactggattcatgatgatgaagtagcatgatggctgccagaggccacaaatggaagggatgaagggggcataaggggaaaaaaggataagtttatttattaccactgaattgtgcatttaaaaatggtagagagggtaaattaaaaattaacattaaaaaaataaaaacacattaagcaagggatgtgtaaagctacaaattggaagaatatgtgaacattccacatatttgaaaaagggtcataattacaatagtataactcttatgattttgtaagacacacacatttcatttcatacttaagcaggacttcaaatagatctaatttgccaataagcatcggaaaatttgctcagcattgttattcattttaaattaaaaa

SEQ ID NO: 172582 - DNA, 576 bp, Homo sapiens
agtgaatccttttatcaggaatcaactcactataattattcattgttatagaaaagaaatatagtcactattaaaggtgtagtttactaagggaaataatagttcatttatttggaggcttaaatctgctataaggaatcttcatgcgagataaatcatacttagatgaattcttgctgctcctagaataagcataagagctgttatatataagatgtatacatttaatgaccttgggtaaagataatacatttccactaggatgaaatgtaagtcctttggctagggctaccaaaaaaaaaaaaaaaacaaaaactgcttttgatgggctttccttagatctgtttttcatctttattcatattatttttgtggttaatcctttttaaaaatgaacatgttttacttgatatgtatttaactttgtaartgtgctaataaccaaatcttgccatggtttgccttatttatatgtatatctctaggtttttatcaaaccttatgctacctgaaggcagaagtcacatcttagacaccattttagcaactctttaaatataaattttcttccatgat

SEQ ID NO: 172583 - DNA, 595 bp, Homo sapiens
acagtgattctgagtaaaataaaacaacggatgactcttataagtgtcccagttcattgcctcgagtaagattccaggctgaagaataggaaagagaacccagacaaggagacagagtccatatattggtgaatccaaaacartatttgtgggacaaatatcagaaatgaagaagctgcataatgatgaagcttaaagaaactgcagacacagccactgaagtgtttggccgagaactgctgtgtgtgagtgtgtgtgcgtgtgcatgtggtgtgtgtgtgtgtgtgtgtgtgtgagagagagagagagagaagggaaagaataagctacccaataccagaaaaggaccacctataagttatgggtagaacaatcaatcaccacatttaaaacatggttggaaatgatgtcccaaccagcaagaccccttgtgacataggatgatcagtctgatgtggatggatatgtcctcattattgggaataagatgcttttgaatcaaggctgttctgaacccactgcgtcaaaacctcgggaaggattatagcaattctgtaccttcattccagaaaaaagttcaatgctatttagaaga

SEQ ID NO: 172584 - DNA, 578 bp, Homo sapiens
tcaagacagtgattctgagtaaaataaaacaacggatgactcttataagtgtcccagttcattgcctcgagtaagattccaggctgaagaataggaaagagaacccagacaaggagacagagtccatatattggtgaatccaaaacagtatttgtgggacaaatatcagaaatgaagaagytgcataatgatgaagcttaaagaaactgcagacacagccactgaagtgtttggccgagaactgctgtgtgtgagtgtgtgtgcgtgtgcatgtggtgtgtgtgtgtgtgtgtgtgtgtgagagagagagagagagaagggaaagaataagctacccaataccagaaaaggaccacctataagttatgggtagaacaatcaatcaccacatttaaaacatggttggaaatgatgtcccaaccagcaagaccccttgtgacataggatgatcagtctgatgtggatggatatgtcctcattattgggaataagatgcttttgaatcaaggctgttctgaacccactgcgtcaaaacctcgggaaggattatagcaattctgtaccttcattccagaaaa

SEQ ID NO: 172585 - DNA, 616 bp, Homo sapiens
taggaaaaaatgtatagtttgtatatggttcagcactatccccagtttsaggcattcacttggggttttgaaggtaatttcctatggataaagggggaatactatatatatttcagttgtcaaagcatactataatatttgtaattattttatagattatataaatttgagttgttttaactttgactattttgaataatactactatgactattcttccatataccttatggtgtaacaaatgtgtactttgttgaagatataagtaggagaggaattaatatgtcaggagaaatgcttatgttgttgaacttaacacattttgtccaaaagattttgaaagtggtgtgatatacaaatccagtgactgcttttgagagctggtaacactccatatctttgtctaaacttggtattaacaatctatgtattatagtcatgttagtggatacgcacttgtgtcatattatgttctagtttgtatttctaagctgactaaaaatattaatactatttcatgtttattgactccttgaattgtgattcttctgtttggggcttttgtccccactttcatatttgtctgtttcttatttgcttacattttcttattgac

SEQ ID NO: 172586 - DNA, 616 bp, Homo sapiens
taggaaaaaatgtatagtttgtatatggttcagcactatccccagtttcaggcattcacttggggttttgaaggtaatttcctatggataaagggggaatactatatatatttcagttgtcaaagcatactataatatttgtaattattttatagattatataaatttgagttgttttaactttgactattttgaataatactactatgactattcttccatataccttatggtgtaacaaatgtgtactttgttgaagatataagtaggagaggaattaatatgtcaggagaaatgcttatgttgttgaacttaacacattttgtccaaaagattttgaaagtggtgtgatatacaaatccagtgactgcttttgagagctggtaacactccatatctttgtctaaacttggtattaacaatctatgtattatagtcatgttagtggatacgcacttgtgtcatattatgttctagtttgtatttmtaagctgactaaaaatattaatactatttcatgtttattgactccttgaattgtgattcttctgtttggggcttttgtccccactttcatatttgtctgtttcttatttgcttacattttcttattgac

SEQ ID NO: 172587 - DNA, 534 bp, Homo sapiens
ttttttctatttctcatttgcctagttattttgtattatgacacattttgtatattatcaaatatccaggaaaacactaagtgttttgttttatagcaatataaataaaaatgcaacaaaatcagtttttatctgtcaaacaaaaacagttttctaaattagttggtcattgacaccttgcttcagcacatatgactgtgactgtaaatatcatcaagtgaatggcaggctcaaattttttaagggaagccaatcaaaagtagacccattcctgcgaacaaccttctgaaactagccaaccaatgatagtctcatcgaacacaattctccargcctgaatattaattttattctcccactgcacaaccagcccaaaaccaccatttaaacaaaatactcatataaaattagaagtctattttaaactactgtgcttaacaatgataactttccttttttaaaaataaataaaattttattctagttgtttcaaatcttatacaataatctcttcctaccacggtgtctagataa

SEQ ID NO: 172588 - DNA, 503 bp, Homo sapiens
ctgcacaagaagtcagagccaatcattctactcacaaggaaaaaacaaaacaaaacagaaaccgaaaaacaatgggaaataacatttgagatttcaccctaattaaaaatgtaactataaaccaaaaagtttctaagacgggtcccaataaattaagaagtttatgttaccaaggtgaaggatcatgacctttgacacagcctcgggaggtgctgaaaatatgtacccaaggtggttaagttacagtttgattgtacacattttagggagacagaagttatgacaaagacctagtaaggaaaagatattgtctacagaatgcaaattttccccataagaaacaactttcctgggccatttcaaaatataccaartgatctatttggagataaaatactttgatttccttttaaggcttgttgtctgtcatgtgatgttataccaatatctggttggagttggtatcttattgctacaaagcgtctattctgtcagtcctatga

SEQ ID NO: 172589 - DNA, 521 bp, Homo sapiens
ggggaaggctgaggatcaggagcagggtgtccctgctctctgcctagtcctgccatcctggaaagggcagacacatatccagatattctaccacatggaagactctgggaagctgtctctgccacacatgaagaatggataccactgggtgtctccaagtccctgttcactggaggagcatgcaggccctcctgtgaccccagaagctcggccagtttaacgagggcagggtgtccacctgagtgccagacaggtgcatggytcctccctaaagctgtcatctcctaagccaatgcagagacaccataaaggaacaggtttgcttcacagactctctcccagggcagaaccccacgctggccacttttactttgagcatgaagagctgtatgggtgggctcagtaagggctgctcctggcctgctccctcccacctcctccccctcgcctctgacttgaagcccaatctgggacctccgcctgccatgacagcaggtggccccatgaccacatggtggagg

SEQ ID NO: 172590 - DNA, 533 bp, Homo sapiens
agccccttctctctgcgccttgtcctccccctccctccaagagcagaactcttgcttcccattttgcaaccacgtttttctgtctttttcatccaggccacccagctccctaaagccgggccctccctgctrcctttcttgccccatgcaacctttccagcctcacaccccgttggccctggaaaaagatagagaagctgctggctgcgagcctgctgttctggggctccgggtagacctgtgacgttgctgtgccaggacccagcactcggactcatgtgccctgatccccaggaggccagggcccttgttttcctctgccacggctgctcctaatggtgaccattagatggtagctggtgtactgccacctcctccccgggcctggtacgggccggggctcacgccttcctgctgtaagtgctggtggaactgattgattgatgtgcctcttccccaagtgcctccccggcttcttagtgggggcagaaggaggaaggcaggaaatgttggccaattcccttgggacctgg

SEQ ID NO: 172591 - DNA, 527 bp, Homo sapiens
gaagttcttcacccgcagtgggggcttctcaaacacctgcccacagtagacaatctcccctgaagccttctttgtctttaactgagatacgaagtaccagaagtgggacctgttgacaaatgattaggcgcaaagatttgcatgtggtagtggggcagtgtgtggcattccggggtgtgcaggcagcgacccaccaccttgtactctcgtagtgtgcccgagaccttcatggcgtcctctccgcgctcrccgccacccgcaaaaggtacagtttatgtctttacagttaattgcacttgaagaaaataaaaatattttaccccaaagtatatttccttgacacattttgaaatggctgccacagagccagcagacagaagtggccttgcaaagctgtctcttgttgggcaaatttgcatctgtagagaatctccattaatgcagccagggcttccctttctaggcctttcacagatctgggagagattgagtctgacacctttacaagtctgaaaagacacgtttac

SEQ ID NO: 172592 - DNA, 527 bp, Homo sapiens
gaagttcttcacccgcagtgggggcttctcaaacacctgcccacagtagacaatctcccctgaagccttctttgtctttaactgagatacgaagtaccagaagtgggacctgttgacaaatgattaggcgcaaagatttgcatgtggtagtggggcagtgtgtggcattccggggtgtgcaggcagcgacccaccaccttgtactctcgtagtgtgcccgagaccttcatggcgtcctctccgcgctcgccgccacccgcaaaaggtacagtttatgtctttacagttaattgcacttgaagaaaataaaaatattttaccccaaagtatatttccttgacacattttgaaatggctgccacagrgccagcagacagaagtggccttgcaaagctgtctcttgttgggcaaatttgcatctgtagagaatctccattaatgcagccagggcttccctttctaggcctttcacagatctgggagagattgagtctgacacctttacaagtctgaaaagacacgtttac

SEQ ID NO: 172593 - DNA, 483 bp, Homo sapiens
atgtgctgtattagaacacttaatattgttaaaacgtgtatatcacccaaagtgatctatagattcaatgcagtttctaacacaaaagattcttaatctccaacagggtcagcaaacttcttaaaaggccacggaataaatattttagycacacagtctctgtcacaattactcaactctgccattccttgcaacatgaaaagcagaatatataaacaaatgggtgcagctgggtgccaatacaactttaataataggcggcaggaggatttggtcctttggctggggtttgccatcctttggtatagattgtatagaaagactgaaaactctatttaatcagttaattaactcatatgaatttgttaaaagatgagaaagcatcacaaaatgtgtgcctcaataacataatgactaggactcttctctggagtttaaaaggaattctctggcagtgtcttcaggccctatgccctggtggtc

SEQ ID NO: 172594 - DNA, 552 bp, Homo sapiens
ttgatgctgctgcagtatttaagcacacaatcagtgggcttatcctgttaaccaaggtaaaccaattagggtagtgctcaatttgtatgatgatctgcatgagatgcaagctcattttggtcacacgtagtatgcattagtttgcacaataacacagactgggtagcttaaagaacaaaaatccaagcaaggtgccaacagggtaggttccattctgagaccttttttcctagcttttagatggccaccatcttgctrtatcctaacatgaccaattctttgtgtgtactcaaagagaatgagtatgtgagctcactggtatctcttcatgtaaggatgatagtcctatcatatcatggccccacccttatgacccctttcaactttaattaccttcttgtaggccctgtctccaaatacagccacattgggggttacagctttaacatgaatttgttgagggcaagggggcattcagtccataggacagtaggaccataatggactgggaatttaaaaattggtccttcacctcagatagttcaagcagca

SEQ ID NO: 172595 - DNA, 533 bp, Homo sapiens
atcaaatataccattggtgcctacaaaagggagggtcacagatgcaggaattaatgcaattacaaaggtgtctgcgacatgaagcaaagagtaggatcattttaattttgtgtaattgaggcggtagtggtcatgggaaaagtggatagcagtgttcttatgagtgaaacacagtaagtacggatttttcatacttacaactttcttgtatttgttacttgtaaatcttgctccagagccatctataatgtgccatgacaatgcacccaacagtacattaccattctataaacttaacatgttttggcacaatcatttcaatttatgaatggtatataacagaaaccagaataaaaattgccaaaaactaaattagctaatactaaatctaatgaasaataaagctttgattatgctttgaaataaagtcagggaggaaactagataaaaaagactcctttggtattgaacttgacactgtggttaataacttggcacacaaaatgcctcttagcagattgctaaatacacat

SEQ ID NO: 172596 - DNA, 289 bp, Homo sapiens
gacaaaaattattcatgatatttgattgaatcctgatttgaataagcaaggagagtcactaattctaacctaacttcctccttttaatcttgttaaagatagaaaaacagartccagcaatgggagaggaattgtccaaagcctcacagctggtcagggactagagtttaagtctcctaactcttaattctctgttctattcctgaagtcgattctaaagcccattttagagtactgtcctgtcactgtgttattttaggccatgtcatcttgaggagccgtctgactc

SEQ ID NO: 172597 - DNA, 433 bp, Homo sapiens
aaaattaacccataatcaaagttaaaagaccaatgaaaaactacttttaataatctgtactacgtgcgataaagggcaaatatccacaacatataaagagtcctttaaaaaaattaaatttaggaggtaatgaaagagggagggaaggtggaggatgtgggttgaaaaactatctatactatgttcattatctggatgatggaaccatccataccacaaacctccatacagagtttttgtgcctatactcatgactcgcacctgtaatcccagtactttgagagaccaaggtgagaggatygcctgatcccaagagtttgagaccagcctgggaaacatgggacaataaatgcataaataaataaatacataaatattagcttgttgtggtggtacatgcctgtagtctcagctactagggaggctgaagggt

SEQ ID NO: 172598 - DNA, 561 bp, Homo sapiens
ctgctgggtggctagatccagaagagaaataacaaccacttcagtttggctctcaggaaactccatccatagggaaaagaggagagcaccacatcaagcgaccaccttgtgggaaaaaaaaagatctgaacagcagccctggagtcccagatcttctctctgacatagtctacccaaatgagaaggaatcagaaaaacagttctggttatatgataaaasaaggttctttaacaccctcaaaagagtacactagctcaccagcaatggctccaaaccaagacaaaatctctgaattgttttatttagagaggctgaagatggggccccaatcccttctagcttggagggtttctgctgctaagaaatctgctgttaatctgatagcttttccttgatggattacctcatgcttttgcctcacagccctgttttcagacttcttaaacaaaacaattatcatccaagaattttgtatccagtgaaactaagcttcataaatgaaggaaagatacaattttttttcagacaaacatatgctgggagaattcaccaataccaag

SEQ ID NO: 172599 - DNA, 601 bp, Homo sapiens
aatggaatagtaactcatatctcaatatgaatattgaatgtaaatatcctaaatgctccactctaaagatacagaattgataagaattcaccacccaagtrtctgctgccttgaagatactcatctaacacataagaactcacagaaacttaaggtaaaggggtggaaaaagaaattccatgcaaatggacaccaaaagtgagcaggggtagctattcttatatcagacaagagaaactttaaagcaacagcagtttaaaaaggcaaagaggaacattatacaatgataaaaggccttgtccaagaggaaaatataacacataaccctggagctccaaaatttagaaaacaattactactagaactaagaaatgaggtagagagcaacacaataataataatggggacttcaatactccactgaaagcactaaacaggtcatcaagacataaagtcaacaaagaaacaatgaacttaaactataccctagaacaagtggacttaacagatatttacagaaatttccatcaaaataccatcatcattcttcacagaactaagaaagacaatcctaagattcatatggaaccaaagaagagcc

SEQ ID NO: 172600 - DNA, 558 bp, Homo sapiens
ttaggaaaacaactaacagaaaggaataacatcaacatcaacaaaaaggatgtccactcagaaaccctatccaaagggcaccaacatcaaagaccaaaggtagataaatccayaaagatggggagaaaccagcccaaaaaggctgaacattccaagaaacagaacgcctcttctcctccaaaggatcacaactcctcgccagcaaggaaacaaaactggacggagaatgagtatgacaaattgtccgaagtaggcttcagaaggtggacaataacaaactcttctgagctaaaggagcatgttctaacccaatgcaaagaagctaagaaccttgaacaaaggttagaggaattgctaactagaataactactttagagaagaacataaatgacctgatggagccaaaaaacagcacaagaacttcgtgaagcatacataagtatcaatagccaaatcgatcaagtggaaggaaggatatcagatattgaagatcaacttaatgaaataaagtgtgaagacaagattagagaaaaaagaatgaaaataaacaaacaaag

SEQ ID NO: 172601 - DNA, 631 bp, Homo sapiens
gagtcactgcttcagagagtgcaaaccataagccttggcagcttccatgtggtgttaagcctgcaagtacacaaaatgcaagaattaaggctggggagcctctgcctagatttcagaggatgtatgaaaaggcctggatctccatgcagaagcctgctgcaggagcagagccctcatggagaacctcttctgaggaagtgaggaagaaaaaaatgaggttggagcccccaaacaaagtccccactggggcattgactagtggatctgtgagaagagrgccatcatcctccagaccccagaatggtagattgactagccatttgcaatttccttttagaaaagctgaagacactcaatgccagctcatgagagcagccaaaggggcaaaaccctgaaaagccacaggggcaaagcagaccaaagattgggaatccacccattgcatcagtgtgacctggatgtgagatatggagtcaaatgagattattttgtagctttaagatttaaagcttaaatcttgactgccttgctggatttcagacttacactgggcctgtaggccctttgttttggctgatttctcccttttagaatggggaaatttacccaatgcccataccttggctggatc

SEQ ID NO: 172602 - DNA, 422 bp, Homo sapiens
accattcatgaagaaaataagaatacaaacaaagagatagaacatattttttaaaaagcaaacaaattttagagttaaagagtacaaaaaactgaactggaccattcagaagaagaacccaacagcaggcaagatcaaacagaagtaagaattagcaaaatcaaaaatcagtcatttgaaattatgcagtcataagaacgaaaataaaataaaatgaaatatagggraaaacgctaaggaacttatggaagacaatcaagaggaacaaattaagaattaagaaagttctagaaagaaaaatgagagaaaagaaggaaaaagcttattccaagaaatagtagtcctaagcttcctaaatctgggaaagaaaatggacatacatattaaagaagtccaacaaactctaactagagtgaatccaa

SEQ ID NO: 172603 - DNA, 632 bp, Homo sapiens
ctggcccctgtaaaatattaaaccaacaatcgtcttcacaatggaggtggatttaccatgaagccagtgaaacccttaacctgcacagactccccttctaagactctgtccctaatttcatgttacttttcttaaaggagcccccaaagtgtatacagtataagcttcagacttgacaacatgtagcccatctctactcacaagtttataagcaaattaaaaatcaccaggcatttactagcctttattgtatactttcagacaaccacagagccacagaaatccttgaaacayggtttcaagggaaataatgtctggcatctcaatgcatttctaaaagccaacatctttctcttaagactagctattcctttttcacttctctattggtttaaacagtgttaccatttccctccatcacctggtaataatcatatggtctcaaatttaagcacaataattttcaagctatcagctatctcaattaactattactgatcactggtgccatggatagagcatgctggatttaactataagatagacctgagttcaaattccagcatagatatttactagttatgtgacctttggcagttaacatcttgaaacccagttttctcaactgtata

SEQ ID NO: 172604 - DNA, 590 bp, Homo sapiens
actcctgactctatcacatattggctcactctgttttttacactgctaagtttcagtttcctcactataaaatgggggcaatcatacttacatattctagttgttctaagggttacatggacatgagaagtgtctaacacaaagtgtgttcttaagaaagtcaatgttatgatttccattgcattaggacttaggggaattaaataacttgcctcaagttataaacaataactgacaaagccaggaagcaaactctgttctttkgaatgtccagttgaaattttagggtacaatattcttttcaaccctagaactcatagggcacttggtggactgttattccataatgagtccataataaatgtaactaacagactagacaaatgaagagttacttcaataaaaggaagaattgtggaattgtgttttctacattttcatataataatagtatatttgaaatagtagcaaaacacagcaatacagtactattaactataataccttattgattataaaagttgtacattaaataagtgaaatttgacatacacaagaaatcatagtgcttatttctaaatacaaccatt

SEQ ID NO: 172605 - DNA, 604 bp, Homo sapiens
aaattacctccagcaagactgatcctatttacattctcattaacagcactgggaaaatgtaaagctaaatctagtgaaagtttgctaagacttktcttttttttttttattttaaatcatagcatgggggcattttttttattatatattttttcttctcctttttttcagagacagaatcttgctctgtcatccagactggagggcagtgatgttctgaacatcgctcactgcagccttcaaatcaggctcaagcaatcctcctgcctcagccttctgagtcactggaataacaggtatgtgccactgggcctggctctatattttcagtatatttaaggcatgtcgaaaaaaaattgtatagaaaattagatttttgacataaaacgatagcttattttcaacttcctttagagtctctatctgcattgaagatatgtgagactcatccaggtgaattagtttacttaattttttttttttaatttttgccattgacacagttctattatgttgctaatgcctgcggtttagtgcatagttaggtaacttacccttcatttaagaaatgacaggattgtctttatttctttaataattgcat

SEQ ID NO: 172606 - DNA, 604 bp, Homo sapiens
aaattacctccagcaagactgatcctatttacattctcattaacagcactgggaaaatgtaaagctaaatctagtgaaagtttgctaagacttgtcttttttttttttattttaaatcatagcatgggggcattttttttattatatattttttcttctcctttttttcagagacagaatcttgctctgtcatccagactggagggcagtgatgttytgaacatcgctcactgcagccttcaaatcaggctcaagcaatcctcctgcctcagccttctgagtcactggaataacaggtatgtgccactgggcctggctctatattttcagtatatttaaggcatgtcgaaaaaaaattgtatagaaaattagatttttgacataaaacgatagcttattttcaacttcctttagagtctctatctgcattgaagatatgtgagactcatccaggtgaattagtttacttaattttttttttttaatttttgccattgacacagttctattatgttgctaatgcctgcggtttagtgcatagttaggtaacttacccttcatttaagaaatgacaggattgtctttatttctttaataattgcat

SEQ ID NO: 172607 - DNA, 422 bp, Homo sapiens
tggtgagaacgctgatggttcaccgttttcctccactttcagcctcagtgcaaaccctctgcccaaagcctcgctccagtacggaggagctgcgccttcaacacactttctctgttgccaggtaaccacttctccctcagcctagtctccaagggtcacgagccacttccgcctccccctctcgggcgctccaatcagcgacctgtgtagctgtcacgtgrgcctctggggcagaccctggagatcgggctcgcggcgccttccatcgtggctccgcgctggggcttgcggagcacgcttcccgcccctcggagcccgcgggcccggccgccccgcccccgggcgccctgagcgagcaggcggggagggcggggagggtccgcgcgttggtggtgctcgcctcgcagctgcgcccgccggct

SEQ ID NO: 172608 - DNA, 422 bp, Homo sapiens
tggtgagaacgctgatggttcaccgttttcctccactttcagcctcagtgcaaaccctctgcccaaagcctcgctccagtacggaggagctgcgccttcaacacactttctctgttgccaggtaaccacttctccctcagcctagtctccaagggtcacgagccacttccgcctccccctctcgggcgctccaatcagcgacctgtgtagctgtcacgtgggcctctggggcagaccctggagatcgggctcgcggcgccttccatcgtggctccgcgctggggcttgcggagcacgcttcccgcccctcggagcccgcgggcccggccgccccgsccccgggcgccctgagcgagcaggcggggagggcggggagggtccgcgcgttggtggtgctcgcctcgcagctgcgcccgccggct

SEQ ID NO: 172609 - DNA, 589 bp, Homo sapiens
gcttcatttgttgaggagttaaataaggtcctttcccactctgagctgtgaacttctagtgataaaagtgggatcaatgaggcacctatccttggatactgaaatgtcagattgaaacataaaaatrgtaatattcctgagtgaagtggatcctctcagcatcctggagaaacttccctagtcaagtctggaatttctgagctattgttcccaatagtggcaggtgttgggccaaatatttggcataattttagaggctgcatgggaacttttagttctttttctaaatggtccctgtctatcaactggtgctgataattgtttaggctggaacaaaaaattttatttcccaaattaaaagacaggaatgctgaatagtagaaagaacagatgtttgaggggcagaaagacctgaatcacttctctattactcatcatttttataaactttcacatgtttcatagagtctctgagccccagtttcctcgtttgtgaaatggtaataataatatctatttcatagatttctgggaagaaataaatacgaaaatgtgcataaattggtctagtactatcgtgaactgaatg

SEQ ID NO: 172610 - DNA, 421 bp, Homo sapiens
ccttgggcctgacctcaaggcataaatcagtggttcccagactttgagatttcatggtccacacaattaaacaaaaaaagccattcaaaatgaagtgtcaacttttattttgtcaagtacaaattttaaaaaccaagtacaaaaaaacctaccatctcttgataccattatttaaataaaaaggagtaaatttaatgtccaagagagaaacaaaggacaaaatctcagaacaaaaaaaaactttaattttaatctgtttagctttattaaaacctcactatgtctgagaagtgacatcagcaagatggtctactggaagcccctactgctcttcctccccaccatgagagccaaagcaatgaatgaacaactatattttarggaaaataactaagggagagcactgaagtacatcttagga

SEQ ID NO: 172611 - DNA, 564 bp, Homo sapiens
gacccaacaatcccattactggatatgtacaaagcattataaatcattctactatgaagacacatgcacatgtttattgtagcactattcacaatagcaaagacttggaaccaacccaaatgtccatcaatgatagactggattaaaaaaaatgtggcacatatacaccatgaaatactatgcagccataaaaaaggattagttcatgtcctttgcggggacatggatgaagctggaaactatcattctcagcaaactatcacaagaacagaaaaccaaacacagcatgttctcactcataagtgggagctgaacaatgagaacacatggacaaagggaggggaacattacacacctggacctgtcagaggtggggagctaggggagggatagcattaggagaaatacctaaagtaggtgatgggttgatgggtgcagcataccaccatggcacgtatatatctatgtaataaaactgcacattttgcacatgtaccccagaacttaaagtataataataataakaagaagagagtgatcaatggtcctgttgtgttgatgagc

SEQ ID NO: 172612 - DNA, 380 bp, Homo sapiens
taagttaatatcctcaaagcaatgagagaagcatttgtactcagtccagattggagtaggtgcattaagcacttctgaatgacagttttygaacaaaatctggtccactaactgttattaaagatatggaacaacttagtaacacttcaagagaaaacaatgaaattgaaaaaattagataattattaaatacaacaaactaaaaagtacacaaaagggaattgtggtatattattggtgttagaagagaatggtactagtattctctactagtagagaatactagtactactattctctactagccactgggtgcagtggcttacaacttaatcccaacactttgggagggggaggggaatcacttgagcccaggaatt

SEQ ID NO: 172613 - DNA, 504 bp, Homo sapiens
aatacattatgtccaagctttcttttcattgaagaagaattcataactatgcaaagcttgcaatttacattccataggaggatctctcagcttacctccatatcctagccttcctatagctccccttcctattaatgataagcctgcactaatgtcccccacccagaaggaaacaagcaaagaaacctccaagggatggcaaaaacccccaggctattggttatgtccccttcaagctgttgggggatggggatttggcccaacccaggtacatgaacccttctccttctctgayttaaagcagattaaagtagacctggggaagttttcagatgatcctgataggtaaatagatgtcccacagggtctaggacaaacctttgacctcacttggagagatgtcatgctatagttagatcaaaccctggcctttaatgaaaagaatgcagctttagctgcagccctagagtttggagatacctggtatcttagtcaagtaaatga

SEQ ID NO: 172614 - DNA, 491 bp, Homo sapiens
gttctttttctctggagaacccagaataatacaattatcagccattcatttgggcatatgaaaatttacaactcttaatcttatttaaaggcccattttaaaatgaaatttctcttcccattctttatgaacctataaacaaacactgtcttcaaagaagaaataagaacttcagcaaccataatttaattattgcaaacaattctttggtcatgaaacaacagctttgcaaagtggaactatttcatggtaccattttatggaaggacaacttaacagctacactgggaaaaacaattcagcataaaagtgataaaatcacccsgtttcacctctgccaatggctcatggtgtttctaaaacaaggggaaggaaatagccctaattatgtcttgttcaattgcatcatttaaagcattaacctgcttttagcaaggctgtttttgataatctatctttactaagcaaatgttgcttttctgccatctttt

SEQ ID NO: 172615 - DNA, 432 bp, Homo sapiens
aactccagtgttatcaaacatgtatatttggaaatagygtttactatagtgtactctctgtccttcaccaagccagtgacatacagtgtattcatggctctgagaggagatagagtaataaaacatacttggttttattttatgggcgatggattttgtgtgacttcgatgtaccagtgtaagttcattgattgggtgactctgatgtaccaaggtaagttcatacggtgtaacaaatgtatcactctgttgtgggctattgatagtggaacaggctgtgcacatgtagggagaggggtatatggaaactactttctactcaattttgctgtgaacctaaaactgctctaaaaattaaagtctatttaaaacaaaagtaggggaaataatctacacatgaaatccctaaagataattatggtgcctcattgt

SEQ ID NO: 172616 - DNA, 447 bp, Homo sapiens
atgtgtatctgacaactccagtgttatcaaacatgtatatttggaaatagcrtttactatagtgtactctctgtccttcaccaagccagtgacatacagtgtattcatggctctgagaggagatagagtaataaaacatacttggttttattttatgggcgatggattttgtgtgacttcgatgtaccagtgtaagttcattgattgggtgactctgatgtaccaaggtaagttcatacggtgtaacaaatgtatcactctgttgtgggctattgatagtggaacaggctgtgcacatgtagggagaggggtatatggaaactactttctactcaattttgctgtgaacctaaaactgctctaaaaattaaagtctatttaaaacaaaagtaggggaaataatctacacatgaaatccctaaagataattatggtgcctcattgtat

SEQ ID NO: 172617 - DNA, 454 bp, Homo sapiens
ttttttttcttcttcaatcacttaagcaaagcaactctcaagcctgactgtcctgtaaaaggtgaggtctccttcttgaagctgaatcactcccttggggtttgagggtcatttacctttggttagtacagcagatggaatgttgtatgcttggctcagggcttctggctgagtgccctggactgtgaggacagttgcttaactcagaaggtggcttcagattccccctaccatctttccagggctcccagctacttgagaaagctataaattactgttgttaaaatgttatacaagaaactaaaatayctcaacagcgtaaaaacccaagccattcaattattaattaaaaaggcaaatgatttaaatagatatttttcaaaagaagacatacaaatgaccaatagtatatgaaaaaaagttcagtatcactaatcatcagggaaatgcaaat

SEQ ID NO: 172618 - DNA, 490 bp, Homo sapiens
tttagaaaatgacacgttgataattataacgtagtatacttgtacacttgtactttacagttttgagagaattttcacctccagtattttactggagtctcagaataaccaagtgaatttcaaaaaaaaaaaaaaaaaaagtctgggaccaaaatctatgatcctttcctctagtacgtcagtctaactctctattgaaaacccccaaatgttgagaaaatcccatggaaataatatcccaactagatgataatattatttaggccatactttctttaamttttctgcaggataaaaagttctatacacttgggaaaggataggactacataatgtaacccttaggagctaggtttcagttaattgcaaagtctattttctactgttttctacatggtgtcatagaagttttatctggttaaaaaaatgggaaaaatgatttaagagtgcatttactgcctcaacattcatagcacgcaggagtggaaat

SEQ ID NO: 172619 - DNA, 558 bp, Homo sapiens
aaacaaatgggcaccccaaaggctaagtcatatacatataaatttaaaacaaataattcaaagtaatttttataatttttctcctccttagttaaaaggtttacatttccgagagacttgtcccttgacctggaatcaaacatgagctgcagagataaaagtatgaaatcatatcccctaggctacaaggtggagtgtcttttttgggaaaatctctcagggaagtcaaagcaggcagtttgaatatatgaagaatttcaatgtttaaatctgatttctgctttcttaatcttgccaagggaattttctaaggttatgtttcttttgcatcttttatagataccaataataaagcagtttaagacaaagagctctctaaaaagtttttttttaaatgtagccaatttatgtttttcaaatgtgattcaaacccccttttccccttgctagttcaaattcagaatgagaaaggacagagactcttaccactctcatttgactaggcactayaggcagggacctggaaaatccggctttgcaaaaaaaaaaaaaaaattt

SEQ ID NO: 172620 - DNA, 510 bp, Homo sapiens
ttcatcttgcagaaccacaacttaatacctattgatcaacgactcctcattttcccctctaaggcacgtggccaactaccattgtactctctgcttctgtaagtttgcctatttcagattcctcatgtgagtggaatcatgcagtatttattcttctgtgaagggcttatttcacttagcacaatatcctccagattcattcatttagtcatatatggcaggagtgccttattttttaaggtgaaataataktccattgtatttatatttgtcattctttaggtactaagtctttatgcatgtatttcctcaagccactttaattcttccatgagagctttatgccaaagcacatggttaagctgacttaagtgtcttgattctgcttacacaagtcttagctcattttttccctcacagacaggcccagtaaacagagcccaagtttccaacttactttgcttcagattactttctctcttccaaagctgctgaattggaaaaaatcaa

SEQ ID NO: 172621 - DNA, 347 bp, Homo sapiens
tctttttactggttcacatatttaaccctttagaacatgaagtgcttagaaaatcctaagtagcttcatgtatctattctaaaawgggattagaatgcaggaaaaataaaaggaaagcaagatgtcttttactattttttttttctgcaaagctttctctcattgattacttacttctcagcctgtcgcaggtgttctctggatgggtctgccttcatggtgcctctcctctcccaggagactggagaaaatgaagccttttccagagtttttgaggttgctaatgccaaattctgcaaggtcatagccaatgcatgtgctgggtataagtacatgtgaaagcactg

SEQ ID NO: 172622 - DNA, 608 bp, Homo sapiens
tgtcctatgtcattaagaaatctatttttaacttagaaggtgggcaatcactaactacatattcacgtgaaattattcattatttcatatacacttttggtctccacatacattttccttcatagttgatatctctcctataacctcagttacacaaataagatagccctggwtcacatggtaatgaagcaacaagtttgcacctggtaataaacaagacttccttatatttgaattgcattgtagaattcactatatatttcagacactcacaacctcagggaccaccataaaaaaagaaagaaaacaccagggctgagatcctggctatccaccaaggctgaggtggctgagactttcaaaacccatctgagttacattttcttcttttgaaaattaaatttctaagaaaaaaagaaatagcatttcttactgtgactctttttaaagcaaaagtggaaaattactttttgatggagaaccaaagcccttagacgtattaagaaaacgtattggatgatatcctctgtgaggtgacaggcattgtcataatcaaaaaaatgataactcagcaatcttatgtatattaacaggaagatgcacatctt

SEQ ID NO: 172623 - DNA, 556 bp, Homo sapiens
catctcagactaattagttatggccattgtcagtggttacatactgctaaattcagctgaaactataggtcaagcttattaaatgactttgaagcctttgatatgaagaaaaaatatttttaaaaatctgtacagaagaaaaatgcgtcagtgtgtattgtgctgtcaatttttttkttgttttgtttttttgagacagggtctcactcttgcccaggctagggttcagtggcaccatcagggctcactgcagcctcatcctaagtgaaagggatcctcccgcctcagactctcgagtagctaggactaccagcaagcaccatcatgattggctaatttttttttattttttgtagagatgaggtctccttatgttgtccagactgatctcaaattcctgggctgaagcaatcctcctgctttggtcttccaaagtgttgagattacaggtatgggccactgcttccagcccatgtggtcaattctttattaatattttcatattcatgtttcctatgactttacaggagatattccatgaattatatggaatatg

SEQ ID NO: 172624 - DNA, 505 bp, Homo sapiens
tttcttgctacttactatatttagattgtcaattataatatagataatactcttttgaaatattcttccactttctttctttttttacttcaaaaagtaaaaatgaaaaaaaaaagtaaagggcaagtttaaataaaaatcatgtcaatgtaatattttgccagaaagtttagatccrcaaatgtaaggatacatttacatacttccctctcacatgataccaccttctactgtactttgctttgtctgtcagaagatgcccacctgcatgcaaactttgtttcctccctgtgatttcctgaaaacttcatgtttgactctgcacccacacacttatgtgccttcgtttagaatattcttccttctcttgttttatctctgtctagctggagtcccttatcctcagtgtgacctcctgatgtcatgcatctctccctcagttagagactgctgtttacttaaattctgccctgcttcttggcattgagtagaaactgccttatat

SEQ ID NO: 172625 - DNA, 558 bp, Homo sapiens
tgtgtccacgctccttaattctcttggtcatgagacaaagaactctgggtgatacctcacaatgagaggctgctacattgtggtacattggtgagactgtaacattttgaggttgaagtttaatgtatcttggactatctctaaccactaggtgatagcagagtgctcaagatatgggggacccagactctcatattatacctgtctgaaagagcaaaaggcggtacacttcagttagaaactaacaaagattggtcacaaataaagtctaagtctgaattttcaagtcatagaaaacagttgcaatcttaaaagtatgctgtgcaactgctattgtagtccctgactgccaatcctttgataccaacttctactatgagatagaggtggaaaaaccttgatcagacttgactagaacctcygctgtgagagaaaggttggaaaaaaaggcagtcctctgtagagctctttccctgaatatcatatccagagaaagaaatcaaagccttcactcttaaaggaaagatggggtttgaaaacagcccaagtaaaaagtct

SEQ ID NO: 172626 - DNA, 549 bp, Homo sapiens
actctagactttaagtattatttttgttggggtaatagagctataaaagaggcaaaacacatctctaatttcagtacactaacattaaaagaagaattgccagaataaggattttaaaaatcaaacattttaggagtagtccagactktattggacaattgtcacagatgttttctaggattaagttggtccaagcaataaaatttagctggtaagtgacctatttttgagtttttccttccatctcataagcaagctattgccattctactattgtttccatggaagaatgctttctaggaggtagtatagcattgtatcgttcacaagtaaatatcttgggtgaaattaactaaagtataagagactgcaagatagtttaaagtaactttttagtgtacataaatcagtgccataaaggctttggttttctgataatgaagatgtcgaatatcccaaaacaggattgtgtcagctattaatttattccccattcattatgtaagtcaaatctaatgcaattgtattgcaataatgaacatgtcaatt

SEQ ID NO: 172627 - DNA, 562 bp, Homo sapiens
aaacttttgcatgcaataacatattttaaaatatttcaggtctaaaacagacctgacagatactaaatattcctctattcaacactttwttttctatctgattttactattggctctgaacatgtaaatgaaggaacatttaaataactttgtataccagaattacaaagaaataacaacatattatggactttgtctaagtaatatcaatccacctaaattgaagcctcttttctaaatctcatgaataattctgtcaggagagtaaatggtaaatccaggacacagtatctttacacagttacttgcttaatgactccctgtctgtatctggtgtcacaggaacaagcagaaagtttatccctggaaggtgatactatgaaagaaaaataagtgatgaatcacaatcagttaaaaatttatgccaaaagatacaaagaaatgtaatgacaggagaaaaaaataccttaacatatgtaattattattagaagtattcttctaagtataaaagttgcacatgtactctttttctgtttataaaagaaacttcatgtttgctt

SEQ ID NO: 172628 - DNA, 605 bp, Homo sapiens
tagtgacccagctaatggtcagaatgctgtaggttccgtttggatgatccaaacgttaaaacatgggacttcgatgtctgcataaatggctgataatttgccttttctttgtaagcttactatacaataaacaaaagacatatttgatactaaccaaacatggagaaggaacagacaataacactggacgaatatattcaagatgcaaatctttatgtggcattgaaagaagttcaggatcctacatttctgtatcacagatttttaattctccttgagtgtaaactactacctattgccatttaccaaaaaaaatactcatttccatagacatgtarcaatataaattgcctgaaaatgggataatgctttcatgcagtgaaatcttgataaaataagagaaagttacagctttttttttaataatgattataggatttaagagaacgggtatgtgacaatactctgaagaagtattttaggtggtgtaaaaacacttgtatctgggagcattgaaatctacagactgatatttcctttttgttttctttttcagagcaactgcttactggacattgaagctttatggccagctgccaaaaaaa

SEQ ID NO: 172629 - DNA, 394 bp, Homo sapiens
gctgtaaacatccactaaaaatatgttattattattttattattgctcctctcttctcaggttaggttttgacacagaattctttcaatgccatttcaccagttggaaacctctgtggctggtggcacctctgcctcggcttcacttttgtctgctgggcttgctctgcccacttggcccagcaggctgagctctgttcactccccagcccaaatcccacgatcaccatgggacccatgctcagcttacagcgggaccaggcatgctgtaagtggcttctgtagctgagtgctggcattcagacaaagggggatgtggtggcgcctgaaaacttggagacrccagcaaccgcagaccccaagaggtgttacagcttctgcttggggagtcccaa

SEQ ID NO: 172630 - DNA, 581 bp, Homo sapiens
gaagtttcatttttcaacttcccagtgaaaaataagtaacacagcatcacagaagggaaaatattctgtcccagaggacagtrccaggactttagcttatttcttttgcttctgtggttggttgtctttggccatttctcaagatgtgtaagcctctgataatattaataaaagcactttatttgcaacccatattagtcctggtttattacacatacccctaattatgattttaagtggccaaaataagaaattctggagactgtagaaaattttttttttctgggctccagatttagactaagggagagtgaccaatacaagtcatgggaccctgagaatgggaaggagaggcattgaattaaatatcactagtagagattcaagaatatgagaatccctagtcccaaccctaccattccatgatcttaatcgcctgaatggaaataaacaacataagaatacattttaccagctgggcgtggtggctcatgcctgtaatcccagcactttgggaggccgaggcaggcagatagcgaggtcacgagattgagaacatcctggccaagatggtgaaaccc

SEQ ID NO: 172631 - DNA, 467 bp, Homo sapiens
agtcagtatagaaacaaaccaaacttttcatctttatgtcatcattgactaaagacacatatatcatataacttcaggaactgtatttgcagtaaataaaaaagtattttaataaaaatatgtatattttatgtacacacattttttaagttggattaagtttaatcaaattaggatggctgagcatctaaatgaagtggtgatttttttagatgaggaaaataatcattttctaatgtggatgagcactgtatttttcctttmttttgcctgcttgcagttgtcttacagcaaaatattcatgagtgttatgtcctattagtagtgtatcagtggtccagaatatatgtgtattgcccttcccagaattagtagttttatatgacacagcaaatgtacttggtaatggacaacatccctttaattgtggtcttggtcttctagaaagactagcatgccataggttc

SEQ ID NO: 172632 - DNA, 535 bp, Homo sapiens
ccccaaacccctggctccatgaggagatgaacagaagaacagaaaaatggcagaatggcacggcctagaggagttcagctggggaggttggagaggagattggccgctggatggccaaactccaggaaaagattatcttctcactcccatcccccttccagctccccaaccatcccactgagagccacttccaccactcaataaaacacttgcagttatccttcaagtcygtgtgtgacctgattcttcctggacaccagacaaggacctgggtaccaagaggtcactgagctagttaacgcttaagccatctgcagatggcaaggctaaaacagcgcactgtaacacatgcccacttgggcttcaggagtcgcaggctcccacccctggatgctgctgtgtggccaaagcccaggggtactcaccccagttcctgcaccttctgtctgcatactccttgtctcataaggggtttgagtatgcactccagctgaacagatgagccacactcctgtcacatatcctgcaagggggt

SEQ ID NO: 172633 - DNA, 604 bp, Homo sapiens
tgacataaatacagcagagttctctttgtgaggattaaattagttgatacatgtacagctcctagaacagtgtcaggcatacagtaaacataatattagcatttcctattgttactcattcagtaagtgtttattgagtgttcagatctgttctatacatgggggataccttagtgaacaaattaaataaagtcaaggctctaagggagtttgcattctagtggaagaagacagataacacataagcaaatagatgtgtactccatataacaagagataatacaatcaagaaaaattaagcagagaaatgttttagagagtgataaataaatgggccttctgtttgctacckaagatttgaggaaagacctaattaaaatgaggagagacagatgcagatatctgtaaaacaacattcatggcagaaagcagaaaatgtaaaggtcctgaggcaggcatttgtttgtatagtgtaagaaacatcaaaagaaactaccatcagagtgaatgggagaattcactacagaatgggagaattcaacctacagaatgggagaacatttttgcaatttactcatctgacaaagggctaatatccagaatg

SEQ ID NO: 172634 - DNA, 565 bp, Homo sapiens
taagaaagggtccatttcaatatatgcgttcaccatcagctatacggggcagaaagaaggtggcaaagtaaaattaattttgaaatttctgggcagaattgacactcacatttctcaccatgaaaaatgatagagacatgcctaacttcaaaggaggtgtagaaatgtaatagtatcctgtggatggacagaagagaagaaaatgccagaggactgacatatgagaatatatatgtgaacccgggaggcagagcttgcagtaagccgagatcgcgccactgcactccagcctgggcgacagagtgagactctgtctcaaaaaaaaaaaaaaaaaaagaaacaaaacaaaacaaaaaagagtgtatatgagtagtaccaatgtgaaaagttttgctgttgataactctaataaaaatagttatgaacaatattttaagaaaacaattattccattttgacagatcattttaaaatctcactgatgaaataccrgaagaaacacatcgataagcaataataatgtcagtaatgataaagtatattgagcttgccacagcaaggaaga

SEQ ID NO: 172635 - DNA, 556 bp, Homo sapiens
ttcacagcctttgttcatgtaattttgtagttttcccactggaagtggaatttacttccctcccttctgatgatgggcctaactgtgtacttgttttaaccattaataggtatgaggaaaaggcagcagtgtgtaatcactaagtccaagccttaagaggcatccatattccattttgcttttcttaagcttcttccatccctatgagattttcagtgcactagaatccatgcctctcatttacatctaatacctggtttattcaatggttcagawagcataataaacatgtggggcagatgtggacccaaactgcagcttgaaatattgtccagctaagcccagccttttcaaccagacccctgattaacctaccagcacatgatcacaaatcaataaccactttaaatcaatgagtttctaggtgaactcttacgtggcacttttgtggcaatagttaacagaggaattcaccaagcagaaaatattttattggttatttaaattcaagcttaaagaaataagctactttggaaaaaaatgcatggaagtacat

SEQ ID NO: 172636 - DNA, 577 bp, Homo sapiens
tttacttgtttattgcatttgactgcagagagttctatcagagttgcagtttgggtttcttgttcattgctgtatacctagcaactgacaatatatttgaaagaaaatacagccaataggtaattgataaatattttttaatacactgataaacaaatgctataaatcagatgaacatcaaaatcatttaaawgggaaaaagtccctaacaaaattctctgtggagcatataatcctgtaaagtctccaaataaagtccactttgtagaacaatctatactaattaaaaataaacagaaataaaactgcaaatatctgagtttaacagtatcaaagtactagtggtagcattgaatctagttatagacacagaaatgtgttaatgtaattttgataattatggatatgatgttatgatataaattgtaaaaattcactatctaatataacaggtgtaataatttatttacaaaaagattaacaatgttaagaagaaaggcaggagaaggtatatgtaattcattattatttctaatgagagtctgtacattttgctttgtttctgaggtcgatacat

SEQ ID NO: 172637 - DNA, 577 bp, Homo sapiens
tttacttgtttattgcatttgactgcagagagttctatcagagttgcagtttgggtttcttgttcattgctgtatacctagcaactgacaatatatttgaaagaaaatacagccaataggtaattgataaatattttttaatacactgataaacaaatgctataaatcagatgaacatcaaaatcatttaaatgggaaaaagtccctaacaaaattctctgtggagcatataatcctgtaaagtctccaaataaagtccactttgtagaacaatctatactarttaaaaataaacagaaataaaactgcaaatatctgagtttaacagtatcaaagtactagtggtagcattgaatctagttatagacacagaaatgtgttaatgtaattttgataattatggatatgatgttatgatataaattgtaaaaattcactatctaatataacaggtgtaataatttatttacaaaaagattaacaatgttaagaagaaaggcaggagaaggtatatgtaattcattattatttctaatgagagtctgtacattttgctttgtttctgaggtcgatacat

SEQ ID NO: 172638 - DNA, 577 bp, Homo sapiens
tttacttgtttattgcatttgactgcagagagttctatcagagttgcagtttgggtttcttgttcattgctgtatacctagcaactgacaatatatttgaaagaaaatacagccaataggtaattgataaatattttttaatacactgataaacaaatgctataaatcagatgaacatcaaaatcatttaaatgggaaaaagtccctaacaaaattctctgtggagcatataatcctgtaaagtctccaaataaagtccactttgtagaacaatctatactaattaaaaataaacagaaataaaactgcaaatatctgagtttaacagtatcaaagtactagtggtagcattgaatctagttataracacagaaatgtgttaatgtaattttgataattatggatatgatgttatgatataaattgtaaaaattcactatctaatataacaggtgtaataatttatttacaaaaagattaacaatgttaagaagaaaggcaggagaaggtatatgtaattcattattatttctaatgagagtctgtacattttgctttgtttctgaggtcgatacat

SEQ ID NO: 172639 - DNA, 577 bp, Homo sapiens
tttacttgtttattgcatttgactgcagagagttctatcagagttgcagtttgggtttcttgttcattgctgtatacctagcaactgacaatatatttgaaagaaaatacagccaataggtaattgataaatattttttaatacactgataaacaaatgctataaatcagatgaacatcaaaatcatttaaatgggaaaaagtccctaacaaaattctctgtggagcatataatcctgtaaagtctccaaataaagtccactttgtagaacaatctatactaattaaaaataaacagaaataaaactgcaaatatctgagtttaacagtatcaaagtactagtggtagcattgaatctagttatagacacagaaatgtgttaatgtaattttgataattatggatatgaygttatgatataaattgtaaaaattcactatctaatataacaggtgtaataatttatttacaaaaagattaacaatgttaagaagaaaggcaggagaaggtatatgtaattcattattatttctaatgagagtctgtacattttgctttgtttctgaggtcgatacat

SEQ ID NO: 172640 - DNA, 554 bp, Homo sapiens
  misc_feature (1)...(554): n = A,T,C or G
atatggacaatatatacccctgatgtgacacactaagaggagcacatcacttttgttgtattctggccaaaaatgcattacctcaagttaatcataataagcagcaggtaaacctaaattagggatactctataaaataactaatcaggacttttcaaacatgtcaaggtcatgaaaaatcaagaaaggcagagaaatagccmcaagttgcaggagaccgaagacacatgacaactaaacgccatgtgggaatatggattagattcttcaacagtaaaaaaaaaaaaaaaaaaaaaaaaaaaaaaggatgctaatagaaaagctggagaaatccaaatatgatcaaacagttaatagcattgtaccaatattaatttattagttttgataatagtgttatggttatgtaagatcataaccttagagaaatatgggggaaagtcatacagggactctccatagtgttttgcaactcttctgcaaatctaatattatttcaaagtaaacattttttaaaagaagtaaattatcagcgttagaaatgaaagttnnnn

SEQ ID NO: 172641 - DNA, 505 bp, Homo sapiens
ataaatgaaacattattactgaaataaaatgatcacaatcttgaaactgtaattctgtcatttattacctgatcactgtgcaattaatatataaataaattgattgtaatctgttacactgttaaaaaaaaaaaaaaaaaaaaaaacccttacctgtggccatggatggggtgctattgacataagtaaatatttgtttggtttccaraaaatttaccttaccttgagagtctgctatgattgtttaaatgtaaatctatgttaatctggcctcttgttcatctttcccatggaaatattgcaaaggcaaatatttcagtttcgtaatttaaatatgtctaagattatgttcacaggcatacattttgtctttgaattacttaaaagagtctaccttatctaataccctataatccatatttctcaaggactactgatagtgaaataaggtgacatcaaatacctcaaactatttctctggtcatgccacctcctttccccgtta

SEQ ID NO: 172642 - DNA, 369 bp, Homo sapiens
ttgtttcttcatgaaaagcatcctcttttggaatattgcccatgtagatttattcctctttcattttactgacatctaaacaccttttgtgagtccaagtagaagagatattctattcatactatatttatgaaatgttattgycaatatatcttttatattttctttctatacatctggttctgctcctttctctatatctttaattcaagtgactttaacttgtggattgcttcaaaacaggtcaagtaatatagatgtaaggtgcacaaaaaagctaaatatacttcatcaaagtataaaggttttaaaattccaatgcttcatttaaatttatagagagggatcatagtaattattttgattata

SEQ ID NO: 172643 - DNA, 441 bp, Homo sapiens
tgattccatatgagtcaattcgatgatgattccatacgagtccgttggatgataattccatttgatttcattcaatccttctattcgattccatttgatgatgattccatctgaatccattctccgattccattcgatttcattcgatgcttctatttgatttcattcgwagatgattcctttcaattccgttcattaattccatttgattccattcgatgatgattccatccgattccattggatgatgattccattcgagtccattcgatgattccgttctaatccattctatgattccattcgagtccattcgatgattccattcgattccattcagtgatgattccatttgattccatctgatgatgatttcatttgattccattcgatgatgattccattggagtccattgaatgattcaattcaattccattcca

SEQ ID NO: 172644 - DNA, 599 bp, Homo sapiens
attcctttcaattccattccatgatgattccattcgagtccattcgatgattccattcaattgcattcgatgattccattatattccattcaacgatgattccattcgagtccattcgatgattccattagagtacatttaatgattgctttgttttcaattcgaagatgattacattggattccattctacgattccattcgattscattcattgatgattccacccaattccattcgatgatgattccattcgatttcaatgattctactcgattccattcaatgatgattcaattctattccgtttgatgattccattagattccattctatgatgattccattcgagtccattcgaagatttcattcgattacattccatgacgattccattcgagtccattcgatgattccatttgaatccattcgacgatgattccatttgatgctattcgatgattccattggattccattcgatgatgattccattcgacttgatttgatgtttctatttgagtccattcggttattttattagactacattcgatgatgattccattcgatgccattcaatgattccatttgattccact

SEQ ID NO: 172645 - DNA, 509 bp, Homo sapiens
attccattcgacgatgattccatctctttcccttcgatgtttccatttgattccattcagtgatgattccatttgattccatctgatgatgatttcacttgattcatttcaatgatgattccattcaagtccattcgatgattccattggagtccaaacgatcattccattcgattccattcaatgrtgattccattcatgtccattcaatgaatcctttcaattccattcgatgatgactccattcgagtacattcgatgattccatttgattccatttgatgatgattacattcaattccattcgaagatgattccattcaattccacttgatgatgattccgtatgaatccattcgctgattattccattcgattccattcattgacgattccattcgattccattcaatgatgattctcttctattccattcgatgattccggtcgattccattcgatgatgattccattagattccattcgattgttgcattcgattcccttcg

SEQ ID NO: 172646 - DNA, 509 bp, Homo sapiens
attccattcgacgatgattccatctctttcccttcgatgtttccatttgattccattcagtgatgattccatttgattccatctgatgatgatttcacttgattcatttcaatgatgattccattcaagtccattcgatgattccattggagtccaaacgatcattccattcgattccattcaatgatgattccattcatgtccattcaatgaatcctttcaattccattcgatgatgactccattcgagtacattcgatgattccatttgattccatttgawgatgattacattcaattccattcgaagatgattccattcaattccacttgatgatgattccgtatgaatccattcgctgattattccattcgattccattcattgacgattccattcgattccattcaatgatgattctcttctattccattcgatgattccggtcgattccattcgatgatgattccattagattccattcgattgttgcattcgattcccttcg

SEQ ID NO: 172647 - DNA, 509 bp, Homo sapiens
attccattcgacgatgattccatctctttcccttcgatgtttccatttgattccattcagtgatgattccatttgattccatctgatgatgatttcacttgattcatttcaatgatgattccattcaagtccattcgatgattccattggagtccaaacgatcattccattcgattccattcaatgatgattccattcatgtccattcaatgaatcctttcaattccattcgatgatgactccattcgagtacattcgatgattccatttgattccatttgatgatgattmcattcaattccattcgaagatgattccattcaattccacttgatgatgattccgtatgaatccattcgctgattattccattcgattccattcattgacgattccattcgattccattcaatgatgattctcttctattccattcgatgattccggtcgattccattcgatgatgattccattagattccattcgattgttgcattcgattcccttcg

SEQ ID NO: 172648 - DNA, 509 bp, Homo sapiens
attccattcgacgatgattccatctctttcccttcgatgtttccatttgattccattcagtgatgattccatttgattccatctgatgatgatttcacttgattcatttcaatgatgattccattcaagtccattcgatgattccattggagtccaaacgatcattccattcgattccattcaatgatgattccattcatgtccattcaatgaatcctttcaattccattcgatgatgactccattcgagtacattcgatgattccatttgattccatttgatgatgattacattcaattccattcgaagatgattccattcaattccacttgatgatgattccgtatgaatccattcgctgattattccattcgattccattcattgacgattccattcrattccattcaatgatgattctcttctattccattcgatgattccggtcgattccattcgatgatgattccattagattccattcgattgttgcattcgattcccttcg

SEQ ID NO: 172649 - DNA, 412 bp, Homo sapiens
tgattccatatgagtcaattcgatgatgattccatacgagtccgttggatgataattccatttgatttcattcaatccttctattcgattccatttgatgatgattccatctgaatccattctccgattccattcgatttcattcgatgcttctatttgatttcattcgaagatgattcctttcaattccattcattaattccatttgattccattcgatgatgattccatccgattccattggatgatgattccattcgagtccattcgatgattccgttctaatccattctatgattccattcgagtccattcgatgattccattcgattccattcagtgatgattccatttgattccatckgatgatgatttcatttgattccattcgatgatgattccattggagtcc

SEQ ID NO: 172650 - DNA, 536 bp, Homo sapiens
gaattcaaaggaatcatcatcgaagggaatcgaatgcaacaatcgaatggaatctaatggaatcatcatcgaatggaatcgaccggaatcatcgaatggaatagaagagaatcatcattgaatggaattgaatggaatcgtcaatgaatggaatcgaatggaataatcagagaatggattcatacggaatcatcatcgaatggaattgaatggaatcatcttcgaatggaattgaatggaatcatcttcaaatggaatcaaatggaatcatcgaatgtactcgaatggagtcatcatcgaatggaattgaatggattcatcgaatggacatgaatggaatcaccattgaatggaatcgaacggaatgatcgtttggactccaatggaatcatcgaatggacttgaattgaatcatcattgaaaggaatcaagtgaaatcatcatcagatggaatcaaakggaatcatcactgaatggaatcaaatggaatcatcgaagggaaagagatggaatcatcatcgaatggaatcaaatag

SEQ ID NO: 172651 - DNA, 517 bp, Homo sapiens
ccattagagttcattcgatgattcccttcgagtccattcgattatttcttttgattccatttgatgatgattccattcgattccattcaatgattccattccattccattcgatgatgattccattcgataatgattacattcgagcccatgtgatgattccattagattctattcaatgatgaytccattcgaccacattcgatgatggcattcgagtccattcgatgatttcactcgattccacttgatgatgattccttttgagtccatttgatgattacattcgagtccatgagatgactccattcgattccatttcatgatgatgcaattcgaggctattcgatcatcccattttagtgcattcggtgattctcttttattacattcgatgagggctccattcgagtccattcaatgattccattagattccactcgatgatgattccatttgagtccattcaaagattcctttcgagtccattcgataattctattggattccactaggtg

SEQ ID NO: 172652 - DNA, 517 bp, Homo sapiens
cacctagtggaatccaatagaattatcgaatggactcgaaaggaatctttgaatggactcaaatggaatcatcatcgagtggaatctaatggaatcattgaatggactcgaatggagccctcatcgaatgtaataaaagagaatcaccgaatgcactaaaatgggatgatcgaatagcctcgaattgcatcatcatgaaatggaatcgaatggagtcatctcatggactcgaatgtaatcatcaaatggactcaaaaggaatcatcatcaagtggaatcgagtgaaatcatcgaatggactcgaatgccatcatcgaatgtggtcgaatggaatcatcattgaatagaatctaatggaatcatcacatgggctcgaatgtaatcattatcgaatggaatcatcatcgaatggaatggaatggaatcattgaatggaatcgaatggaatcatcatcaaatggaatcaaaagaaataatcgaatggrctcgaagggaatcatcgaatgaactctaatgg

SEQ ID NO: 172653 - DNA, 524 bp, Homo sapiens
acagcggaagggaggaagagcaacatctggcccttgtcagattgtataagcccctgggctggcggccagatgtggccatcagcctccagcaggaggaagacatcagaggctcacccggcctccggatgctgtgcagatgtggccagctggagggaacacccaaccgcacacaaggactctggggtctgccaggaagtgagggtgtgaggggagggtgggtggctactggggcctgcctttccccagaactgcctggagccctgacagaggtgcttcagtaatgcctgttgagtgacaagtgtctctgcagctcacagaaggcccccagaccatttcccccrtggctcccgaaagacagtggcccagaagtgcggcaggcaggggtgaatgtgggagtcgcgggccggaaagcacagggcagggaggttgggcctttgccatacttttccagcaccggttcccaagctgtggtttggagctgagaagtctccaacttctcctcacagttgctagcctctcttgaa

SEQ ID NO: 172654 - DNA, 557 bp, Homo sapiens
cggaagggaggaagagcaacatctggcccttgtcagattgtataagcccctgggctggcggccagatgtggccatcagcctccagcaggaggaagacatcagaggctcacccggcctccggatgctgtgcagatgtggccagctggagggaacacccaaccgcacacaaggactctggggtctgccaggaagtgagggtgtgaggggagggtgggtggctactggggcctgcctttccccagaactgcctggagccctgacagaggtgcttcagtaatgcctgttgagtgacaagtgtctctgcagctcacagaaggcccccagaccatttcccccatggctcccgaaagacagtggcccagaagtgcggcaggcaggggtgaatgtgggagtcgcgggccrgaaagcacagggcagggaggttgggcctttgccatacttttccagcaccggttcccaagctgtggtttggagctgagaagtctccaacttctcctcacagttgctagcctctcttgaatggacagagaacagcctcgggttcagaggcagacaga

SEQ ID NO: 172655 - DNA, 557 bp, Homo sapiens
cggaagggaggaagagcaacatctggcccttgtcagattgtataagcccctgggctggcggccagatgtggccatcagcctccagcaggaggaagacatcagaggctcacccggcctccggatgctgtgcagatgtggccagctggagggaacacccaaccgcacacaaggactctggggtctgccaggaagtgagggtgtgaggggagggtgggtggctactggggcctgcctttccccagaactgcctggagccctgacagaggtgcttcagtaatgcctgttgagtgacaagtgtctctgcagctcacagaaggcccccagaccatttcccccatggctcccgaaagacagtggcccagaagtgcggcaggcaggggtgaatgtgggagtcgcgggccggaaagcacagggcagggaggttgggcctttgccatacttttccagcaccggttcccaagctgtggtttggagctgagamgtctccaacttctcctcacagttgctagcctctcttgaatggacagagaacagcctcgggttcagaggcagacaga

SEQ ID NO: 172656 - DNA, 607 bp, Homo sapiens
aacgtgccttatccattctataatataggttttgttgtattttttgtgttaaaaacaacaaaaaaagttgtagggcttcatcattaagctatgttaaaattatattattattgatgtgttctctcagaagtagtatactaagggaaacaaataaaacaaatatagatagtgtattttctgaccccaaagctcatattattttcattgtacatggcaacatgcatcaacattgtatttccccccttrcaataaattttctcattacctaccatcgtcagacctgttatctaaggcttgtcatcattcacacttaagatattgaattaatgcaatacaccaaacaattctgtctgtgattctgttcttgctatacacagctagatgattagccctatatcatgctggagtatactttataccttgaaatttatggtagaaaacttgattgaatgaggcaatggtcttaatgatacttccttaatgaactgaccattgagcaaatacaaatattatttgtgaataacaagtgatcagtgactttgcaatattctattaagtacccagagacagagtggatcaaaatgaataaaaataatgtaagcagctc

SEQ ID NO: 172657 - DNA, 562 bp, Homo sapiens
  misc_feature (1)...(562): n = A,T,C or G
gacacatcaatttttaacatttgtttgatggaacattttcttttattattaaaaatagatatartaaatgagagatgtttagaggcaaaaatgagaaaatttttccatccaaatanaattacttttattatcacatacatacttctgttagctatttacatgcgaatatattctacatagttgtattctttatgcacatggcttttctacttttaaaatcatattgtaaacatttttccttcttttgagagacttcataatttgaatgccaatcttattcttggttgatatcccataatttactaagttatttcctcttaaaatctgtatagtttcttattgatctgctttttcagtccattcctattgctataacacaatatttcagtctgagtaattaataaagaacatacattgattgctcacagtgatggaagcttggaagtccaagatcaaagaaccagcaggttcagtgactggtgagggcctaatctctgtttccaagatggcactatgaatggtgtgtcctcacatggtggaagatggaagggcaaaaagggca

SEQ ID NO: 172658 - DNA, 562 bp, Homo sapiens
  misc_feature (1)...(562): n = A,T,C or G
gacacatcaatttttaacatttgtttgatggaacattttcttttattattaaaaatagatataataaatgagagatgtttagaggcaaaaatgagaaaatttttccatccaaatanaattacttttattatcacatacatacttctgttagctatttacatgcgaatatattctacatagttgtattctttatgcacatggcttttctacttttaaaatcatattgtaaacatttttccttcttttgagagacttcataatttgaatgccaatcttattcttggttgatatcccataatttactaagttatttcctcttaaaatctgtatagtttcttattgatctgctttttcagtccattcctattgctataacacaatatttcagtctgagtaattaataaagaacatacattgattgctcacagtgatggaagcttggaagtccaagatcaaagaaccagcaggttcagtgactggtgagggcctaatctctgtttccaagatggcactatgaatggtgtgtcctcacatggtggaagwtggaagggcaaaaagggca

SEQ ID NO: 172659 - DNA, 571 bp, Homo sapiens
aagcattgctacagaaaataagactcacttgcaatatttattaccaaaaaattctactttatccttcattctattaatgtgggatatcacatttattgatttgtgtatgttaagccatccttacaccccaaggataaaaacacttgatcatggtgtatgatctcttaagtttgctgttaaatttggtttgctagtattttgttcaggatttttgcatctacattattcaaggatattggcctgtaattttcatctcttgtagaattcttagttggcctgggtaagaaagtaataatgctggcttcataaaatgagttttgaccctcctcctyaatgttttgaaagagtttgacaatgattggtattctttgttctttaagtgcttggtagaattcaactataaattaatcaaatcttgggcttttctgtgttaggaggtttttgattactgattcaatctcctttcctgtcattattgaaatcagatttctatttatagtatagttatgctatgctgaatgtttctaggagtttatctacttctgagttatacaattgaatgatgtataat

SEQ ID NO: 172660 - DNA, 571 bp, Homo sapiens
aagcattgctacagaaaataagactcacttgcaatatttattaccaaaaaattctactttatccttcattctattaatgtgggatatcacatttattgatttgtgtatgttaagccatccttacaccccaaggataaaaacacttgatcatggtgtatgatctcttaagtttgctgttaaatttggtttgctagtattttgttcaggatttttgcatctacattattcaaggatattggcctgtaattttcatctcttgtagaattcttagttggcctgggtaagaaagtaataatgctggcttcataaaatgagttttgaccctcctccttaatgttttgaaagagtttgrcaatgattggtattctttgttctttaagtgcttggtagaattcaactataaattaatcaaatcttgggcttttctgtgttaggaggtttttgattactgattcaatctcctttcctgtcattattgaaatcagatttctatttatagtatagttatgctatgctgaatgtttctaggagtttatctacttctgagttatacaattgaatgatgtataat

SEQ ID NO: 172661 - DNA, 591 bp, Homo sapiens
aaaataagactcacttgcaatatttattaccaaaaaattctactttatccttcattctattaatgtgggatatcacatttattgatttgtgtatgttaagccatccttacaccccaaggataaaaacacttgatcatggtgtatgatctcttaagtttgctgttaaatttggtttgctagtattttgttcaggatttttgcatctacattattcaaggatattggcctgtaattttcatctcttgtagaattcttagttggcctgggtaagaaagtaataatgctggcttcataaaatgagttttgaccctcctccttaatgttttgaaagagtttgacaatgattggtattctttgttctttaagtgcttggtagaattcaactataaattaatcraatcttgggcttttctgtgttaggaggtttttgattactgattcaatctcctttcctgtcattattgaaatcagatttctatttatagtatagttatgctatgctgaatgtttctaggagtttatctacttctgagttatacaattgaatgatgtataattattcatgatagtcttctttgatcctttatattt

SEQ ID NO: 172662 - DNA, 571 bp, Homo sapiens
aagcattgctacagaaaataagactcacttgcaatatttattaccaaaaaattctactttatccttcattctattaatgtgggatatcacatttattgatttgtgtatgttaagccatccttacaccccaaggataaaaacacttgatcatggtgtatgatctcttaagtttgctgttaaatttggtttgctagtattttgttcaggatttttgcatctacattattcaaggatattggcctgtaattttcatctcttgtagaattcttagttggcctgggtaagaaagtaataatgctggcttcataaaatgagttttgaccctcctccttaatgttttgaaagagtttgacaatgattggtattctttgttctttaagtgcttggtagaattcaactataaattaatcaaatcttgggcttttctgtgttaggaggtttttgattrctgattcaatctcctttcctgtcattattgaaatcagatttctatttatagtatagttatgctatgctgaatgtttctaggagtttatctacttctgagttatacaattgaatgatgtataat

SEQ ID NO: 172663 - DNA, 571 bp, Homo sapiens
aagcattgctacagaaaataagactcacttgcaatatttattaccaaaaaattctactttatccttcattctattaatgtgggatatcacatttattgatttgtgtatgttaagccatccttacaccccaaggataaaaacacttgatcatggtgtatgatctcttaagtttgctgttaaatttggtttgctagtattttgttcaggatttttgcatctacattattcaaggatattggcctgtaattttcatctcttgtagaattcttagttggcctgggtaagaaagtaataatgctggcttcataaaatgagttttgaccctcctccttaatgttttgaaagagtttgacaatgattggtattctttgttctttaagtgcttggtagaattcaactataaattaatcaaatcttgggcttttctgtgttaggaggtttttgattactgattcaatctcctttcctgtcattattgaaatcagatttctatttatartatagttatgctatgctgaatgtttctaggagtttatctacttctgagttatacaattgaatgatgtataat

SEQ ID NO: 172664 - DNA, 603 bp, Homo sapiens
tttggagactaaaatagattttctaaattattataataaaaatatatttcaacaaaatatgctggaggatgaattatctattttctctttaaaaatataaaattgttgttttgcaatcaggtgaccaaaaagtatacagcaaaaaacaaaagaaaaacatattatagaagtgtgtcagcatattttgataatatttacattagcttttgtgatttttatattttctcagcatttattaacttattaattatttttaaataaatagtaattatttatcattaatttatcartaaaagctgaaaaaatattaaaatctgacatgatataaaatgtttttatatttaatatttaattttataatagaaatatttaaaattttaaaaatataagtataaacatttttatactttttatttattaataaaatgtatctattcaagtattcattcgtgtacttattttttttaatttacaggttgtattctttgtctaagaaggctccacaatttttaaaagcttcaggtgccacaaattatttcctgactcaatcacataatttctctttctattccacttattcattttgtcaataagtaaacattg

SEQ ID NO: 172665 - DNA, 475 bp, Homo sapiens
cagagtttcctgcaacctattattgtaactgaatttcaaaactttgaaargaaatgggatctgcagggtctgctggtgcttattcatgagcaggctttactcagtgagcaataacaggggttgcaggtttttgtttgcacccattgatgggagtccataaaaaagtgtgcttccaggatcctattctacaccatcagttgttcaggcatgctgctgttccatactaatctctaccaacatcctgtttttagaacaactttattgaggcataagttacactatataacatgtaaattattatgcatatctaataatttttcccatttttagtgtactagtcaatgatgcttagtaaatttactgcattgtgcaaccatcacagcactcctgttcttcaacattgttattaccctgataagacccttcatgccagtttacagttaatcctcatttccactctcatccataggaattc

SEQ ID NO: 172666 - DNA, 639 bp, Homo sapiens
gttaaatccaacatattcaacatgccatgcaaaggcactggcaaaatcctggcacagaatgcacaataaactgtagagatgttactgctattaatgagagaagtacccttgagagcatgagatgcttcttgattcttccccaaaacaggattagtcagctttaggtttgtccctattacctccaaaccaaagaaaattagaagataaaaggacaatttgagctgctatataatccccttcggcaaatctcaactcgttaataacaaacacatgaacagagtcccaagtccctcggtgtactttatctcttctaaggctatattgaaagaaagaaaggaaggaaagaaggaagggaacaaagcagtctttgcctgccatctattctagttatatatatttttcctaatcsccaattacctctttagtccaattaagtctgtaaagggcattggagacagtgaagcaaaaataaatattcatttttgaagcaaagcaatttttgttctccttttcaaagcactaaagtacctctctaaattcaaggcttatgctgagtacctctcactgctgaagccaaatcaaggcatacctacagctgatcctgagtaaatctctcatttttaaacagatcaaacttca

SEQ ID NO: 172667 - DNA, 437 bp, Homo sapiens
aggcaataccattctggacataggaacaagcaaagatttcatgatgaagatgccaaaagcaatcacaagaaaatcaaaaattggcaaacaaaatctaattaaacttaagagcttcttcacaacaaaagaaagtatcaataaacaaataacctataaaatgagagaaaatatttgcaaactatgcatctgaaaaggtctaatatccagcatctattatattaggaacttaaataagtttacaagaaaaaaaaacccattaaaaagtgggcaaagaacctgaacagacacttttcaaaaaaagacatatatatggccaataagcatatgwaaaaagctcagtatcacactaatcattagagaaatgcaaatcaaaaccacagtgagattccatctcacaacagtcagaatggctgttattaaaaagtcaaaaaataaca

SEQ ID NO: 172668 - DNA, 625 bp, Homo sapiens
agcattatcactagctcatttcttgtcagtcaaacgtggaccttggtctttacaagtccagtaaaaaggagctgaactagtgtcaagttgaaagaggcctcacctagagcactcactgactgaagaattgctgtaaccccattaagagaatctgtgtagggttggaggctgtaaatctggagcygtttgggggtcataagtggccagataaaaaggcaagtaaaatgtcaagaatctgaaggtggagagtttcagtaatggaaggaggctttcaagtaactctaaattgtgaaatataacatggttagtaatggggcatggatttgaatttaatacttgtcttctaaattaaaaatttcttcaattatatcatttgagattaaaaatatgtaatcttcttcatctgagagtttgttctgtaatttctattttaaactattaaattctgtgctgtatagggagatataaaacattctgaggtatctttataattaatccatttttttctgcatgtaaattaatacacaccaaaggatactttgccagatgcctaaataactgaaaacactaacacctatctttttcacttattatttttctacttattttcatactttacatgtat

SEQ ID NO: 172669 - DNA, 625 bp, Homo sapiens
agcattatcactagctcatttcttgtcagtcaaacgtggaccttggtctttacaagtccagtaaaaaggagctgaactagtgtcaagttgaaagaggcctcacctagagcactcactgactgaagaattgctgtaaccccattaagagaatctgtgtagggttggaggctgtaaatctggagctgtttgggggtcataagtggccagataaaaaggcaagtamaatgtcaagaatctgaaggtggagagtttcagtaatggaaggaggctttcaagtaactctaaattgtgaaatataacatggttagtaatggggcatggatttgaatttaatacttgtcttctaaattaaaaatttcttcaattatatcatttgagattaaaaatatgtaatcttcttcatctgagagtttgttctgtaatttctattttaaactattaaattctgtgctgtatagggagatataaaacattctgaggtatctttataattaatccatttttttctgcatgtaaattaatacacaccaaaggatactttgccagatgcctaaataactgaaaacactaacacctatctttttcacttattatttttctacttattttcatactttacatgtat

SEQ ID NO: 172670 - DNA, 597 bp, Homo sapiens
actatcttaacatgcaaaaaaggtgtcccaaaaatgtgaatgtcatttcctagcaattctttttcttataaccaagaatccatatgtccttgttgtacttccatcttaaaacatcatcttccaaactaagcagcgttgttagaaaaccccattaagagcaaaccraaaaatacttcccactccgctttggggtgagagctctgttttagcaaagcatgatatcgtttctttttcctccaaacgacacacacttcccaagcatgttgacttttacatgcctagttttatttgctgtcagttttactgttgctgaagggactggtatctaggtcacacaagcttctattaatcgaattttaataacatggagtattaaagcagtattttttgtcccatacaaatgtctgacatttcaatttattaagaacagaaactttaaggattggttttaaaatgcatatcattttaataataaaggtcacaaatatttttttctcctacaaataatattttttaaaaaaatttagactacaagggacactgttcttaaaattgctttatcaatatcttgcccctaagatgaagaatataagctga

SEQ ID NO: 172671 - DNA, 597 bp, Homo sapiens
actatcttaacatgcaaaaaaggtgtcccaaaaatgtgaatgtcatttcctagcaattctttttcttataaccaagaatccatatgtccttgttgtacttccatcttaaaacatcatcttccaaactaagcagcgttgttagaaaaccccattaagagcaaaccgaaaaatacttcccactccgctttggggtgagagctctgttttagcaaagcatgatrtcgtttctttttcctccaaacgacacacacttcccaagcatgttgacttttacatgcctagttttatttgctgtcagttttactgttgctgaagggactggtatctaggtcacacaagcttctattaatcgaattttaataacatggagtattaaagcagtattttttgtcccatacaaatgtctgacatttcaatttattaagaacagaaactttaaggattggttttaaaatgcatatcattttaataataaaggtcacaaatatttttttctcctacaaataatattttttaaaaaaatttagactacaagggacactgttcttaaaattgctttatcaatatcttgcccctaagatgaagaatataagctga

SEQ ID NO: 172672 - DNA, 597 bp, Homo sapiens
actatcttaacatgcaaaaaaggtgtcccaaaaatgtgaatgtcatttcctagcaattctttttcttataaccaagaatccatatgtccttgttgtacttccatcttaaaacatcatcttccaaactaagcagcgttgttagaaaaccccattaagagcaaaccgaaaaatacttcccactccgctttggggtgagagctctgttttagcaaagcatgatatcgtttctttttcctccaaacgacacacacttcccaagcatgttgacttttacatgcctagttttatttgctgtcagttttactgttgctgaagggactggtatctaggtcacacaagcttctattamtcgaattttaataacatggagtattaaagcagtattttttgtcccatacaaatgtctgacatttcaatttattaagaacagaaactttaaggattggttttaaaatgcatatcattttaataataaaggtcacaaatatttttttctcctacaaataatattttttaaaaaaatttagactacaagggacactgttcttaaaattgctttatcaatatcttgcccctaagatgaagaatataagctga

SEQ ID NO: 172673 - DNA, 597 bp, Homo sapiens
actatcttaacatgcaaaaaaggtgtcccaaaaatgtgaatgtcatttcctagcaattctttttcttataaccaagaatccatatgtccttgttgtacttccatcttaaaacatcatcttccaaactaagcagcgttgttagaaaaccccattaagagcaaaccgaaaaatacttcccactccgctttggggtgagagctctgttttagcaaagcatgatatcgtttctttttcctccaaacgacacacacttcccaagcatgttgacttttacatgcctagttttatttgctgtcagttttactgttgctgaagggactggtatctaggtcacacaagcttctattaatcgaattttaataacatggagtattaaagcagtattttttgtcccatacaaatgtctgacatttcaatttattaagaacagaaactttaaggattggttttaaaatgcatatcattttaataataaaggtcacaaatatttttttctcctacaaataatattttttaaaaaaatttagactacaagggacactgttcttaaaattgctttatmaatatcttgcccctaagatgaagaatataagctga

SEQ ID NO: 172674 - DNA, 509 bp, Homo sapiens
aatcactactttaaggtttccagttggtgagggaaagtaagcatttccttctcagtgtcttctgagctggggtcattaaacagcacacaaagtgattagaagtttgaagacaatttcacaatgctgatgtcaatgcctgcagttagaaacaattaaaatattgattttttttcttattggatgagaatttactgagaatttatgtacaataaaatgtgtaaattttatgtgtactgttagttgagatttgacaagtgaatacaccatgtaaacatcaactcagtcaaaattgacagcattttcatcttctccagaaagttccctagtagttctttttagttaactctcctcttccaaaagaaaaacaaaataagtgaaaagtttactctscatcatagatttgctttgtctgctctagaacttcctgtaaattgatttatggaatatgtagtttttttacatctgacatctttccacaacatgtttttaaatttactcaaaatgttgaa

SEQ ID NO: 172675 - DNA, 442 bp, Homo sapiens
ttgtccctcaagactcaacaattctattaagtgcaaggtggaatcttctcattgtgactttgcccgcatgacagatgatactgagcacttattatgtgtttacagattttgcttatatccacctcttaaattgcayattcaagtcttttcccaattatgttaaattgtttgtcttttaaaattattgaatggtgagagttctttatatattgtagatacaagtcatttatcaggtgtatgatttctaaatatcttctactgcttcagcatgacttttataaagcagaagtttttaattattaataaatccaaatctcttttcatggttaaagctgtttgttccttttttaccttttaaaaaacagaatctactgtaagtcacaaagatatacttctatgctttcctgtgaaaaattaagacatttagcctgtaatttcaggt

SEQ ID NO: 172676 - DNA, 442 bp, Homo sapiens
ttgtccctcaagactcaacaattctattaagtgcaaggtggaatcttctcattgtgactttgcccgcatgacagatgatactgagcacttattatgtgtttacagattttgcttatatccacctcttaaattgcatattcaagtcttttcccaattatgttaaattgtttgtcttttaaaattattgaatggtgagagttctttatatattgtagatacaagtcatttatcaggtgtatgatttctaartatcttctactgcttcagcatgacttttataaagcagaagtttttaattattaataaatccaaatctcttttcatggttaaagctgtttgttccttttttaccttttaaaaaacagaatctactgtaagtcacaaagatatacttctatgctttcctgtgaaaaattaagacatttagcctgtaatttcaggt

SEQ ID NO: 172677 - DNA, 659 bp, Homo sapiens
gaaacttaggaggtgcatttccagaagtgcactaatctgggaaataagtaagtgacaaagtcacatgtcatcttcatgattttcttaagtaccagctttgcatttatgtgtttaacacagatatattatacatttatatatgcataaccatatataaacgcatctagatatgcacatataaacatgttttcctgattacatggagttcagaataatatagtaattataaacacatgtccctcaaaattcagtcctactgacatcatatttagtaataatctgattctctatgaacatattgtgaagtagatgccatttgtatttaataattcaactgtttaataaatcctgaaatgaatggataaaagtaaaatttccatgtaattgaatattttgtttttgaatttttagattgttttaaygaattacttataaatctgttacagtaaaaaaatagaaaattggagttgtttgttctgtcatttaaaacctttttgttcctccaccattggtcattttagactgttaataaaacatcaaaactatattcaggaaaaataaagaccttgaatgctggcaccaagcatctgtatattctataaaatcagaaagagaaaacctggaatgatggcttccacctggagtgacctcagaatcac

SEQ ID NO: 172678 - DNA, 585 bp, Homo sapiens
gcactgcaagttccgccttccgggttcacaccattctcctgcctcagcctcccgagtagctgggactacaggcgcccgccaccatgcccggctaattttttttgtatttttagtagagacggggtttcaccatgttagccaggatggtctcgatctgctgacctcatgatccacccacctcggcctccccaaaaaaatcttccaatagtatcaataatactatgcagtaatgaaagatgattggggtaaatacactgaattgactgacataaagcagattgaaacatgttgaggcaccaataagggggttaggaagtgaaaatgagtaactgtagacaattttttctagctcttcaatggagcagagataaagctgcagccaaagaacatagggtcaagagagaggaatgttgtgtgtgcatgtttgtggtatttaatatggtggagacaaaagtattygaaatattgaagggaaagatccagtgaaagaaaaagaacaataaaaaagtattaaaataggatatcaggtaagactataacaaattgtacagtaaacacttttaagtaattttatttaatggatca

SEQ ID NO: 172679 - DNA, 562 bp, Homo sapiens
atgggaaggacctcttcaaggagaactacaaaccactgctcagtgaaataaaaaaggacacaaacaaatggaagaacattccatgctgatggacaggaagaatcaatattgtcaaaatggccatactgccccatgtaatgtatagattcaatgccatccccatcaagctaccaatgactttcttcacagaattggaaaaaaccactttaaagttcatatggaaccaaaaaagagcccrcattgccaagacaatcctaagccaaaagaacaaagctggaggcatcatgctacctgacttcaaaatatactacaaggctaccgtaaccaaaacagcatggtactggtaccaaaacagagatatagaccaatggaacagaacagagccctcagaaataacaccacatatctacaaccatctgatctttgacaaagctgatgaacataagaaatggcaaaaggattccctatttaataaatggtgctgggtaaaccaactagtcatatgtagaaagctgaaactggaccccttccttacaccttatacaaaaactaatgcaagatg

SEQ ID NO: 172680 - DNA, 500 bp, Homo sapiens
ttgcatgtctttctcccttgataaaaagtgaacttctgaaaggcaggaarcatgatttattcattcttgcatccttcatagctgtggctggcacatgagaggtgctccataaaataagtaaatgaatgagttcaggtaccatgaatttatgactgtggttcagtgtttattgaactgaatatagacaagtgatattgagactttatgatttgtcaggcatggtcctaagtgttttgtatctatcatcccatttgatctttataatactttgaaatatttttcattcttctcttcctcttgcctctgtgctttatagaataagaaattgaggatcaagtgatagtttcccaaaatgatccaatttaagtgaggattctggtctcttgttcagtatgttatttgtctcaatggcacccacttcatagacagaaatatatagtatatgtgtgtgggtgtgtgggtgtggagtgggtggatgtatgtgtatggcagcacacgca

SEQ ID NO: 172681 - DNA, 562 bp, Homo sapiens
atgggaaggacctcttcaaggagaactacaaaccactgctcagtgaaataaaaaaggacacaaacaaatggaagaacattccatgctgatggacaggaagaatcaatattgtcaaaatggccatactgccccatgtaatgtatagattcaatgccatccccatcaagctaccaatgactttcttcacagaattggaaaaaaccactttaaagttcatatggaaccaaaaaagagcccgcattgccaagacaatcctaagccaaaagaacaaagctggaggcatcatgctacctgacttcaaaatatactacaaggctaccgtaaccaaaacagcatggtactggtaccaaaacagagatatagaccaatggaacagaacagagccctcagaaataacaccacatatctacaaccatctgatctttgacaaasctgatgaacataagaaatggcaaaaggattccctatttaataaatggtgctgggtaaaccaactagtcatatgtagaaagctgaaactggaccccttccttacaccttatacaaaaactaatgcaagatg

SEQ ID NO: 172682 - DNA, 666 bp, Homo sapiens
agatttcatgatttttattttacagaagtggaaaacaatgcttagcagataacaattttcaggatgtaacacagctggttagtgcatagtcagcatcatgtgtatatagcctgagatctttactaactccagagagaatgttaaattgaagagagtgggaagaaatctcaggaatttttccaacacatattgatatttaatgatctgttctcttaaatggggaacatctatgtagttcttggacaatttatttcaggggtctccaacccctttgccatggaatggcacttgtacatggcctattcagaactaggccacaaagcaggagatgarcagcaggcaagcaagcgaagcttcatctgtatttacagccactccccattgctcacattatcacctgagctctgtctcctgtcagatctgctgtggtgttagattctcaaggaatgggaactttattgtgaactgcgcatgcaaggaacgcaggttgtccacaccttatgagaatctaatgccagatgatctgtcactgttcccattaccccaagatgggaccatctagttgcagtaaacagctcagggctcccactgattctatgttatagtgagttgtataattatttcattatatattacaatgtaataataatagaaatgaagtgcaca

SEQ ID NO: 172683 - DNA, 666 bp, Homo sapiens
agatttcatgatttttattttacagaagtggaaaacaatgcttagcagataacaattttcaggatgtaacacagctggttagtgcatagtcagcatcatgtgtatatagcctgagatctttactaactccagagagaatgttaaattgaagagagtgggaagaaatctcaggaatttttccaacacatattgatatttaatgatctgttctcttaaatggggaacatctatgtagttcttggacaatttatttcaggggtctccaacccctttgccatggaatggcacttgtacatggcctattcagaactaggccacaaagcaggagatgagcagcaggcaagcaagcgaagcttcatctgtatttacagccactccccattgctcacattatcacctgagctctgtctcctgtcagatctgctgtggtgttagattctcaaggaatgggaactttattgtgaactgcgcatgcaaggaacgcaggttgtccacaccttatgagaatctaatgccagatgatctgtcactgttcccattaccccaagatgggaccatctagttgcagtaaacagctcagggctcccactgattctatrttatagtgagttgtataattatttcattatatattacaatgtaataataatagaaatgaagtgcaca

SEQ ID NO: 172684 - DNA, 666 bp, Homo sapiens
agatttcatgatttttattttacagaagtggaaaacaatgcttagcagataacaattttcaggatgtaacacagctggttagtgcatagtcagcatcatgtgtatatagcctgagatctttactaactccagagagaatgttaaattgaagagagtgggaagaaatctcaggaatttttccaacacatattgatatttaatgatctgttctcttaaatggggaacatctatgtagttcttggacaatttatttcaggggtctccaacccctttgccatggaatggcacttgtacatggcctattcagaactaggccacaaagcaggagatgagcagcaggcaagcaagcgaagcttcatctgtatttacagccactccccattgctcacattatcacctgagctctgtctcctgtcagatctgctgtggtgttagattctcaaggaatgggaactttattgtgaactgcgcatgcaaggaacgcaggttgtccacaccttatgagaatctaatgccagatgatctgtcactgttcccattaccccaagatgggaccatctagttgcagtaaacagctcagggctcccactgattctatgttatrgtgagttgtataattatttcattatatattacaatgtaataataatagaaatgaagtgcaca

SEQ ID NO: 172685 - DNA, 404 bp, Homo sapiens
cattatgtgaaacttcccccaaaaagtcataggttacatgagtcatacagtaaagagctgaatttatgttccttatcatttatttcatgaatcagtcagaaattaattttaccaaaaacaagaatgttcaacagatgctactgtgtgataagagtctacttctcaaattaattatcatgaacactgaaagtgcttcaggaatacaactgcctagttctataatttcctggctactgataaaaattttcaatgtattttattaggaaaagtaatacattaatatattttaaagtaaaatatggtttttactgtcttgcatattgcaattcaagtcayaactgctggtttctcatgcaagtcagtcacccaaggtaatataatgtgattgatgtaatcagaatggt

SEQ ID NO: 172686 - DNA, 547 bp, Homo sapiens
acatggccagacatattttatcctacaaatttgcttttgcaatattctataaataccttttttctttctaygcattattgtaatgaagcaccaaaaccaaaattacatgcacatttccaaatgctaagggtgaaatacaatatacaactttacacaattcgttttaatcagaggatgaacacagttccatggaaaagatctttcactgttcacatgttcatctgtttctccttatgcttcataaagcaatcattctgtgaagcactcttctttctgcatggttctaaagctaataaattagcacaattaatcagttatacagctcttgacacaaaggaggaaaaaatacacaagtatatattacctgtcttatactaacaaagcattttaaaatgaaacctgaataaattgattcactgcctagaattctatggtatttgcacaatcaaactgtttatctggaaaaattattatatatgacaaaagcaaaggagagttatcaactttatttattggatatatttttatcatttcaaaaggaaaacat

SEQ ID NO: 172687 - DNA, 271 bp, Homo sapiens
cgcactgcagccttgaacttgtggcctcagccttccaaaatgctactaggattacaagagcatgccaccatgccctaatttcacattcataacctgccaaaattaaagttattgggatgtatttttatatttttaattacatggagatggaaatttcagatcatcaagagasagagggtcacaggatccttagagtgtcgcttcaccaactggaaacctctagagctggtggcacctctgcttgagttttactcacactggctggcttgtt

SEQ ID NO: 172688 - DNA, 540 bp, Homo sapiens
tgttgattcaaaactgttaactactggtggcctttccactgggaagatgatcatggctgttttactcatatggtcacattcagatcctgcatagaaagagaagtacttatacaagttcctggcctcaaacactgaaatgggaaaaagaaaaattcttataaaagaaaaaaaaaaagacaagtaagtacaattcattggttgtactcagatcaaactgctgctctcatgcacttgagttgagctatcccctattccctgtgggtgggctctgggaggcagccaagaacacggacactggtgatttgggagcccctcaatgatattgtaaacaaaaatgaaagaggctggtttgwctttgatttttcccttgaatcagttactttttaaaaaccaattacttctagtgaatatttgtctttcctgttcagcaaattatttatttaaatagttcttaagaaacagctcttcggaattctgtttagaaggaatgctttgaacatctaagattccacgttcctttattagtcatatgctgcaatc

SEQ ID NO: 172689 - DNA, 392 bp, Homo sapiens
tatcaatatttcaaacttagagagagggcactcagtcagtgaacatatttattccaaataaaatgggaagtgaacaaacaatggtcaggggtggtagaaggacgtggcactgagtactgggattacacaaacctggggtcaaatttgggctcagctgggagttgttgggtaagtaacttcgcaaacttcagtatgctgatctttagaattattattacaattccataaactcttggagccagatgtattttggaattcaaaataaytcagaatttacacaagtaatatgatatgtacactacacatgtcatatctccctggtgatgtctacagtaataaataacagaaatgattttgtagcaaaatatccaaagcaggtgcaataaagaaag

SEQ ID NO: 172690 - DNA, 538 bp, Homo sapiens
ttttttttttttttgtattaatggtacttgtctttcctttccatatttggtgctcctttcaagatcttttgtaaggcacatctggtggtaatgaactctctcagcatttgctgagaaagatcttatttctcttttgctgagaaagcttastttgctgggatatataatttttggttgaagattttttctttaagaatgttcaatataggccccatctcttctggcttgtagggtttctgctgagaggtctactgttagtctgatggtgttccctttataggtgacttggcctttctctctaactgcctttaatatccttcctttcatgttgaccttggaaacttgattatgtgtcttgctaatgatctttttgtatagaatcttgcagtggtcccctatattttctgaatttgactgttggccgttctagagagtttggagacattctcatggttgatatcttgaaatatgttttccaagttatttgcttccttcccatcccttcagggatgccagtgattcataggtttgacctctt

SEQ ID NO: 172691 - DNA, 422 bp, Homo sapiens
aaagaaatctttttggaaattttctttggagattcctcttagagttagttgtacattctttaaaacattttcattgataacaaatgtatatttgagtgtgaattaaattcattttaaacagtgaaatgtcatttaatcttggtaaataaatgtaataaccaggctaactgattctcttctgagtcaaaaatacactgtaactatagcatgacaaggctacagataatatataaaaccacatcyaaaaaaaaaaaaatagggctttcaatgtgttctgagcaaaagccttattacagaaagtgtatgatctgccaaaaagtttattgttaggacagtatttacttttattttaggttctgattggtttatttagtagataatcatattttatattgacattgtacttagatttatagaaaata

SEQ ID NO: 172692 - DNA, 523 bp, Homo sapiens
ggatgagcctccttggtaggagatacagtatcmcagcagccctgtacaaatatatacacctataatttcagggttgttgtaaaatctaactcagacaattttacataacttctttgttttattttattttatttttaggtggcaaataatgatggtagatattcatggggtacaatgtgatgcttcaatacattgatataatcgtagctttgtacccgttgaccaatatttcccctttccctttccacccctccctgctccaacctctggtaaccacctttctactctatacgttgatttcaaatgttttagattactcacaatgagatgatatggtatttgtctgtctgtgtcttgtttatttcatttaaagcatttttctctaggttcatccatgttgtctcaaaaagaagtatttccagttttatcatggctgaattgtattctattgtgtatatatgccatatgttttagtacattcatctgttaatagagacttaggttgtttttgtatcttttctat

SEQ ID NO: 172693 - DNA, 415 bp, Homo sapiens
cactctgctggtggggtctggggtttttatgagtacaggatgggcatggggtgggccagggtggttttggaaaaggcaacatttgggtgggaaaacagaaatgcatgttctcactttgggctgcaggtccaagcttaagtgtgtggccctcattgaggaccatcctcttctccycggtatttccctacctcctgcctgtatcagaagcttatttatatgatgcatgtattgccttataaaaccagtatttgactatatatattttcctttgctttagatgtgtccccaaatttgaaattttatgttttcttaaaaaccttatagaaatcaaagtacgttctaatttatcatatgatttcttctttgttacatgatgtatttgaaactgtgtggtttaattttcgtacacattaga

SEQ ID NO: 172694 - DNA, 415 bp, Homo sapiens
cactctgctggtggggtctggggtttttatgagtacaggatgggcatggggtgggccagggtggttttggaaaaggcaacatttgggtgggaaaacagaaatgcatgttctcactttgggctgcaggtccaagcttaagtgtgtggccctcattgaggaccatcctcttctccccggtatttccctacctcctgccygtatcagaagcttatttatatgatgcatgtattgccttataaaaccagtatttgactatatatattttcctttgctttagatgtgtccccaaatttgaaattttatgttttcttaaaaaccttatagaaatcaaagtacgttctaatttatcatatgatttcttctttgttacatgatgtatttgaaactgtgtggtttaattttcgtacacattaga

SEQ ID NO: 172695 - DNA, 415 bp, Homo sapiens
cactctgctggtggggtctggggtttttatgagtacaggatgggcatggggtgggccagggtggttttggaaaaggcaacatttgggtgggaaaacagaaatgcatgttctcactttgggctgcaggtccaagcttaagtgtgtggccctcattgaggaccatcctcttctccccggtatttccctacctcctgcctgtatcagaagcttatttatatgatgcatgtattgccttataaaaccagtatttgactatatatattttcctttgctttagatgtgtccccaaatttgaaattttatgttttcttaaaaaycttatagaaatcaaagtacgttctaatttatcatatgatttcttctttgttacatgatgtatttgaaactgtgtggtttaattttcgtacacattaga

SEQ ID NO: 172696 - DNA, 453 bp, Homo sapiens
ctccttctctgccactctgccactctgccactctgtcactctgctggtggggtctggggtttttatgagtacaggatgggcatggggtgggccagggtggttttggaaaaggcaacatttgggtgggaaaacagaaatgcatgttctcactttgggctgcaggtccaagcttaagtgtgtggccctcattgaggaccatcctcttctccccggtatttccctacctcctgcctgtatcagaagcttatttatatgatgcatgtattgccttataaaaccagtatttgactatatatattttcctttgctttagatgtgtccccaaatttgaaattttatgttttcttaaaaaccttatagaaatcaaagtacgttctaatttatcatatgatttcttctttgtyacatgatgtatttgaaactgtgtggtttaattttcgtacacattagaac

SEQ ID NO: 172697 - DNA, 523 bp, Homo sapiens
ggatgagcctccttggtaggagatacagtatcacagcagccctgtacaaatatatacacctataatttcagggttgttgtaaaatctaactcagacaattttacataacttctttgttttattttattttatttttaggtggcaaataatgatggtagatattcatggggtacaatgtgatgcttcaatacattgatataatcgtagctttgtacccgttgaccaatatttcccctttccctttccacccctccctgctccaacctctggtaaccacctttctactctatacgttgatttcaaatgttttagattactcacaatgagatgatatggtatttgtctgtctgtgtcttgtttatttcatttaaagcatttttctctaggttcatccatgttgtctcaaaaagaagtatttccagttttatyatggctgaattgtattctattgtgtatatatgccatatgttttagtacattcatctgttaatagagacttaggttgtttttgtatcttttctat

SEQ ID NO: 172698 - DNA, 424 bp, Homo sapiens
agaattcctatggaattgtttggacaggagaatatattcattttcaaaaagaggctagtgatgctcaggacgattaagtaactagccaaaggttatgcagcttctaaaaacaaaatgctttttcagaaagtgtgggtacaattgaactctttttagttctgtcaaatttctctctttatcatgtacctgtagtttcagatgcattagtggctactttggctttcatgcctagaggagcatcatctgttgcaggmaggatgggtagagggtccagcagcctcttgtcttcctgcctgattcttcagtatttatctgccaaatcgaattaccacaagagggcacaatgacctatgaaacattctctccctatgctttctgtttcaaattgattcaaaataggagagatggagaaaaaaagaaaagg

SEQ ID NO: 172699 - DNA, 653 bp, Homo sapiens
aatttggattccattttgaaaatatactagtgccttcctccctaagttatagtcagtaaaataaattattctgacttcatgggaatcaacaaataaattggtttataaatataagtttaagttaacccgcaaaccatacaattctcattgactcaggagctacacaggcgagagaccatttaatacatgacctgtatgaaaatatagaaatagaagaaattcactgtggctaaagagcaagggtagaagctaagttaattaataatatatgcttgaagctttttaataattgagaaaaaaggtgatttgctatgcatgcttayttatattctgttctaaatcatgccagtagcaaagatattaccttgttccccacccaaatagagattaactatgtaattagtctgaaagtgtgtagcccagtgaaaaagcatacgaaaatggaaagaacatgaagattttaggggcacacacacacatacacacacaatatagtttcaaatccttagtccaacatcatctagctctgagatactaagacattttgttgttttgagtcttaattctacctcatatatttttatgaatattgttaaaagtgcctagtatgaatttgagaggtcacttagtcaatatcagttgaacctgaatgt

SEQ ID NO: 172700 - DNA, 338 bp, Homo sapiens
aagcgagaaaggaacatcaaaagctgagataggctawaactaggcctcttgcatcaaacaggcaagttgtgaatgcaaacgaaaagctctagaaggaaattaaaagtgccattccagtgaatgcacaaataataagaaagcaaaacactcttatattgctgatatgtagaaagttttagtggcctggatagaagatcaaagcagccacaacatttctttaagccaaaagcctaatcagagcaaggtcttaactctcttcagttctatgaaggctgagagagatgaggcaactgtagatgaaaagttggagtttagcaaggttggtttgtgatgcttaa

SEQ ID NO: 172701 - DNA, 338 bp, Homo sapiens
aagcgagaaaggaacatcaaaagctgagataggctataactaggcctcttgcatcaaacaggcaagttgtgaatgcaaacgaaaagctctagaaggaaattaaaagtgccattccagtgaatgcacaaataataagaaagcaaaacactcttatattgctgatatgtagaaagttttagtggcctggatagaagatcaaagcagccayaacatttctttaagccaaaagcctaatcagagcaaggtcttaactctcttcagttctatgaaggctgagagagatgaggcaactgtagatgaaaagttggagtttagcaaggttggtttgtgatgcttaa

SEQ ID NO: 172702 - DNA, 591 bp, Homo sapiens
tatcttcctgttccttaatgatgttctattaattctttaataaataactcaaaatattttattatatttgatgaagattttcttaataattttaaaaaataataatgcygctttttaaagaaacaactgcttgaacatcacaattatactagtatgtgtggtcatatcctctaattgtcagacaaaatacagattgatgcatttattatatataatatttattataatattctgtgtttatttacagtatatcttcaaacaaaaaaattccaaagatgtgaaaaattatgatactataatgtgtaacatcaaaggcagacataaaatttaatgtacaatagaatatcatccatgtagaaaactacactataaagactagaggaaaatacattaaatggttgaacatgacaatccgtgagtattgggattatagtgattagtcattcccatctttaaaattttcttgtcttctctttatcttttgctatgttcatgtattataaaagtattttattaatatatttactgttatttctccaagactgaaaaaaatcttcttttcttatttatttatttatttatttttgagat

SEQ ID NO: 172703 - DNA, 591 bp, Homo sapiens
tatcttcctgttccttaatgatgttctattaattctttaataaataactcaaaatattttattatatttgatgaagattttcttaataattttaaaaaataataatgctkctttttaaagaaacaactgcttgaacatcacaattatactagtatgtgtggtcatatcctctaattgtcagacaaaatacagattgatgcatttattatatataatatttattataatattctgtgtttatttacagtatatcttcaaacaaaaaaattccaaagatgtgaaaaattatgatactataatgtgtaacatcaaaggcagacataaaatttaatgtacaatagaatatcatccatgtagaaaactacactataaagactagaggaaaatacattaaatggttgaacatgacaatccgtgagtattgggattatagtgattagtcattcccatctttaaaattttcttgtcttctctttatcttttgctatgttcatgtattataaaagtattttattaatatatttactgttatttctccaagactgaaaaaaatcttcttttcttatttatttatttatttatttttgagat

SEQ ID NO: 172704 - DNA, 283 bp, Homo sapiens
agactgcttttccattttcaaggtgtgtatgttgattcagtggcttacttactgaaagctagttaatgtcccaggagtccatgaggctttgttttgttcagcctatttagtggttcctagcgttggctgaactggggaatgagcccttgccctttaaggaacttgcacttgtaggaatgagaaggtgacmccatatccatccccaaacgggataaaaaggcgagatttttggagcacatttggttttgtgaccatcatagaaattattcttgttccgctgttt

SEQ ID NO: 172705 - DNA, 283 bp, Homo sapiens
agactgcttttccattttcaaggtgtgtatgttgattcagtggcttacttactgaaagctagttaatgtcccaggagtccatgaggctttgttttgttcagcctatttagtggttcctagcgttggctgaactggggaatgagcccttgccctttaaggaacttgcacttgtaggaatgagaaggtgaccccatatccatccmcaaacgggataaaaaggcgagatttttggagcacatttggttttgtgaccatcatagaaattattcttgttccgctgttt

SEQ ID NO: 172706 - DNA, 538 bp, Homo sapiens
tattttaatggaagtaattacggggaggttgtttacttgtgctacagtggatagagcctggagttatttgccagaaacctgggttttaatctcagctctgtcaattattagctgtatgactccaagactttacttaatctgtctgagcctcagtttttacagtataaatatgagattttccatcacaaagtttttctgggacaatattctcatgcatgtaaaagtcctctgtgaattgtgataaattttactaattcacaatatcatcatcaatcattttrtaacagattatctgtgattgatagaaacacattttttaaaaatgtaattttaaggcatacggaaatctttctttacttccaaaataaacaacttgcaattaacggtacttacaatttttatgacccatgcctataaagaaaattctgttttcctaactcaaattccatcagtagaaatgcttagtatgaaatttggtgcttaaatattcagtgaatatttttcaaaagctacataaattgtcttctaaaatataaat

SEQ ID NO: 172707 - DNA, 538 bp, Homo sapiens
tattttaatggaagtaattacggggaggttgtttacttgtgctacagtggatagagcctggagttatttgccagaaacctgggttttaatctcagctctgtcaattattagctgtatgactccaagactttacttaatctgtctgagcctcagtttttacagtataaatatgagattttccatcacaaagtttttctgggacaatattctcatgcatgtaaaagtcctctgtgaattgtgataaattttactaattcacaatatcatcatcaatcattttgtaacagattatctgtgattgatagaaacacattttttaaaaatgtaattttaaggcatacggaaatctttcttkacttccaaaataaacaacttgcaattaacggtacttacaatttttatgacccatgcctataaagaaaattctgttttcctaactcaaattccatcagtagaaatgcttagtatgaaatttggtgcttaaatattcagtgaatatttttcaaaagctacataaattgtcttctaaaatataaat

SEQ ID NO: 172708 - DNA, 559 bp, Homo sapiens
aggttaggagggaaagtggtgaggaagtcctggcttgaggtcttggtggattaggtctatgataccactttctcccactgtgaataaagttggtatcctaaccccatttccaaagaactcaggcatcttcgagtaccttaactccaatcactctctcttgaattatatgctattgttgcctgatattttagttctgactccttttaccatcacagtgtaaatattttttgttttacagagacgttttaaaaatactcatttaagattacctacctatataccaacttttctaatccttgacattccttatctcctccttcctaaagtaaggtctttagatattcttttgaagttttgttgatagtaaactcctctgtttttgtgtataagaaaatatatttctttctcattcttaaaaaatttcytcattgggtgttctagttaagacttattttctcctaccactttgaagataactactgtcagtttataagtaaataagtacaactgacccttgaacttgagaagagatgcttaaactcttcataattaaacaaat

SEQ ID NO: 172709 - DNA, 638 bp, Homo sapiens
ggattatagcaatattaaatatacatgcatccaacactggagcacccagatatataaaggaaatattattagagctaaaaagagaaatagactcaatacaataatagctggagacttcaataccccaatatgcctgatgaatattgatgcaaaaatcctgaacaaaatactagcaaatcaaattcaacaacacattttttaaaaatcattcatcatgactaagtaggatttgtcacagggatgcaaggatggttcaacatacgcaaatcaatccaatgtggtacatcatattaacaaaatgaaggacaaaaaccatataataatttcaactgatgctgaaaaagcattttataaaatycaacatcccttcatcataaaaacatttaaaaaaactatagaaggagcatacctcaacataataaaatccatatatgacagacccacaacaagtgtcatactgaatgggtaaaaactgaaagcctttcctttaagacctagaacatcacaaagatggccactttcaccactgttattcaacatagtactggaagttgtagctagagcaaacaagagaaaaatataaagggcatccaaatcagaaagaaagaagtcaaattatcattatttgcagataatat

SEQ ID NO: 172710 - DNA, 638 bp, Homo sapiens
ggattatagcaatattaaatatacatgcatccaacactggagcacccagatatataaaggaaatattattagagctaaaaagagaaatagactcaatacaataatagctggagacttcaataccccaatatgcctgatgaatattgatgcaaaaatcctgaacaaaatactagcaaatcaaattcaacaacacattttttaaaaatcattcatcatgactaagtaggatttgtcacagggatgcaaggatggttcaacatacgcaaatcaatccaatgtggtacatcatattaacaaaatgaaggacaaaaaccatataataatttcaactgatgctgaaaaagcattttataaaattcaacatcccttcatcataaaaacatttaaaaaaactatagaaggagcatacctcaacataataaaatccatatatgayagacccacaacaagtgtcatactgaatgggtaaaaactgaaagcctttcctttaagacctagaacatcacaaagatggccactttcaccactgttattcaacatagtactggaagttgtagctagagcaaacaagagaaaaatataaagggcatccaaatcagaaagaaagaagtcaaattatcattatttgcagataatat

SEQ ID NO: 172711 - DNA, 601 bp, Homo sapiens
ggacaaggctagtagccaccaagacatggccatgtgggaagcataccgtcttgtgggtacatagcccatatgataattttcctgttttgkttttgtttttgttgttgtttttgagacagcgtctcgctctgtcgcccaagttagagtgcagtgtcagaatctcagctcactgcaacctccgcctcccgggtccacgccattctcctgcctcagcctcccgactacaggcgtgtgccgccacaccccgctaattttttgtatttttagtagagatggggtttcaccatgttagccaggatggtctcgatctcctgacctcgtgatccacccgccttggcctcccaaagtgctgggattacaggtgtgagccaccgcgcctcgccaatggtcttctggttttagaagaaggtaagaatgaaacttcttttatcatcagcttaacataaaggttgacattcttagagataatggaggaagctgatacaaaagaaaaccagaaactaaacccagaatataaaaacaattccagactcttggtaagggagaagcctgccccactggagaatcataaaacagagaatccgctatacaattgagggtc

SEQ ID NO: 172712 - DNA, 597 bp, Homo sapiens
agccaccaagacatggccatgtgggaagcataccgtcttgtgggtacatagcccatatgataattttcctgttttggttttgtttttgttgttgtttttgagacagcgtctcgctctgtcgcccaagttagagtgcagtgtcagaatctcagctcactgcaacctccgcctcccgggtccacgccattctcctgcctcagcctcccgactacaggcgtgtgccgccacaccccgctaattttttgtatttttagtagagatggggtttcaccatgttagccaggatggtctcgatctcctgacctcgtgatccacccgccttggcctcccaaagtgctgggattacaggtgtgagccaccgcgcctcgccaatggtcttctggttttagaagaaggtaagaatgaaacttcttttaycatcagcttaacataaaggttgacattcttagagataatggaggaagctgatacaaaagaaaaccagaaactaaacccagaatataaaaacaattccagactcttggtaagggagaagcctgccccactggagaatcataaaacagagaatccgctatacaattgagggtcataagcctg

SEQ ID NO: 172713 - DNA, 482 bp, Homo sapiens
gaggaagctgatacaaaagaaaaccagaaactaaacccagaatataaaaacaattccagactcttggtaagggagaagcctgccccactggagaatcataaaacagagaatccgctatacaattgagggtcataagcctgctattttcattttctctagacaaagaagtacatcttagtaaaaaactttgctattgagagttatgtggatgatggtatttggagcttaaagggtcaacagaactcttggttrtctttcctgacatgcaccttgcatatgatgcagtctgccaagcctggtctttactgcctatacctgctgatttacctgatcctctggcctgagaggaacataatttttgaccttatgagtaatcaaagatctgaccaattagacatccaaatagatgtatattaattatccaaaaggcctgtaagacttccccagatttcatcaggtagaatattgtcctctcctgtata

SEQ ID NO: 172714 - DNA, 256 bp, Homo sapiens
aatgccaataatgtattagacaatatgctaggattagacaaaactgtctcatgtaattcttacaaggctatgtgaagaatttttgttttyattttacaaaatgtgaaagcaaggtagggagtggttacacgactatcaaaggccatgaatttattccatatatattgactagatgccaataatgtgtccagcagttgtatgcataggaagcacaacatggaaccagacatgtaggatttctgtgatgtgagagtgc

SEQ ID NO: 172715 - DNA, 256 bp, Homo sapiens
aatgccaataatgtattagacaatatgctaggattagacaaaactgtctcatgtaattcttacaaggctatgtgaagaatttttgttttcattttacaaaatgtgaaagcaaggtagggagtggttacacgactatcaaaggccatgwatttattccatatatattgactagatgccaataatgtgtccagcagttgtatgcataggaagcacaacatggaaccagacatgtaggatttctgtgatgtgagagtgc

SEQ ID NO: 172716 - DNA, 604 bp, Homo sapiens
tttcagaagctgaacatatggggacattttatctttttaatgtccacatagtaatccataggatgaaggtgccatcattttttcaacaattcttttgttgatgcacactagacactgcaatttttctgctgtttaagcaatcatgtgatgaacatctttttgtatatgtattttttcaggttattattacctctaggattaattcctcaaagtgaaattttggagtacagcacttgaaattttaaataaaatttgccasgatattttccaaaagtttttagaaaattcatatatttttcataatgtataaaagtaccttttccccctgtaatttgctagtaccagatacatacaatcatttgaatgttggcttactgtgatctagcctcagtggcttattcttctcgtggattttgcattactcaaatttaaagggagtaaaacctccttgaaaagctttccccctaaacctttacatggtttacttccttatttcattcatatatatgatttattgttatctcccaacactagaatactagaatgtaagttctatgagttcagtgattttttttctgatttgtttatcactacatcccaagga

SEQ ID NO: 172717 - DNA, 604 bp, Homo sapiens
tttcagaagctgaacatatggggacattttatctttttaatgtccacatagtaatccataggatgaaggtgccatcattttttcaacaattcttttgttgatgcacactagacactgcaatttttctgctgtttaagcaatcatgtgatgaacatctttttgtatatgtattttttcaggttattattacctctaggattaattcctcaaagtgaaattttggagtacagcacttgaaattttaaataaaatttgccacgatattttccaaaagtttttagaaaattcatatatttttcataatgtataaaagtaccttttccccctgtaatttgctagtaccagatacatacaatcatttgaatgttggcttactgtgatctagcctcagtggcttattcttctcgtrgattttgcattactcaaatttaaagggagtaaaacctccttgaaaagctttccccctaaacctttacatggtttacttccttatttcattcatatatatgatttattgttatctcccaacactagaatactagaatgtaagttctatgagttcagtgattttttttctgatttgtttatcactacatcccaagga

SEQ ID NO: 172718 - DNA, 604 bp, Homo sapiens
tttcagaagctgaacatatggggacattttatctttttaatgtccacatagtaatccataggatgaaggtgccatcattttttcaacaattcttttgttgatgcacactagacactgcaatttttctgctgtttaagcaatcatgtgatgaacatctttttgtatatgtattttttcaggttattattacctctaggattaattcctcaaagtgaaattttggagtacagcacttgaaattttaaataaaatttgccacgatattttccaaaagtttttagaaaattcatatatttttcataatgtataaaagtaccttttccccctgtaatttgctagtaccagatacatacaatcatttgaatgttggcttactgtgatctagcctcagtggcttattcttctcgtggattttgcattactcaaatttaaagggagtaaaacctccttgaaaagctttccccctaaacctttacrtggtttacttccttatttcattcatatatatgatttattgttatctcccaacactagaatactagaatgtaagttctatgagttcagtgattttttttctgatttgtttatcactacatcccaagga

SEQ ID NO: 172719 - DNA, 592 bp, Homo sapiens
gcaagtaaaatatgaaggaaagataatcactagcgcaaagttagaaaaaagaaaaagcaaaaaagtgtaaaattaggaaaatgaaaacatactaatagaaaaatatgatgataaagtttgaccaaatgccatatttataaaaataaatgtgaataatttagatttgaattaaaagatgaatattctcaaattatatcaaaagtaaaatttaaatataagstgtttacaagggactcaactaaagcaaaataactgataaattttagcaataaagtgatggcaaaaatatagcatgtaagtaattcataattttttttaaaacctggctgggcgcgctggctcacgcctgtaatcccagcactttgggaggctgaggcgggcgggtcatgaggtcaggagatcgagtctgtcctggctaacatggtgaaaccccatctctactaaaaatacaaaatattagctgggcgtggtggcaggggcctgtagtcctagctactcgggaggttgaggcaggagaatcccttgaacccgggaggcggaggttgcagcaagctatattgcaccactgcactcgagcctggcgacagagcaa

SEQ ID NO: 172720 - DNA, 592 bp, Homo sapiens
gcaagtaaaatatgaaggaaagataatcactagcgcaaagttagaaaaaagaaaaagcaaaaaagtgtaaaattaggaaaatgaaaacatactaatagaaaaatatgatgataaagtttgaccaaatgccatatttataaaaataaatgtgaataatttagatttgaattaaaagatgaatattctcaaattatatcaaaagtaaaatttaaatataaggtgtttacaagggactcaactaaagcaaaataactgataaattttagcaataaagtgatggcaaaaatatagcatgtaagtaattcataattttttttaaaacctggctgggcgcgctggctcacgcctgtaatcccagcactttgggaggctgaggcgggcgggtcaygaggtcaggagatcgagtctgtcctggctaacatggtgaaaccccatctctactaaaaatacaaaatattagctgggcgtggtggcaggggcctgtagtcctagctactcgggaggttgaggcaggagaatcccttgaacccgggaggcggaggttgcagcaagctatattgcaccactgcactcgagcctggcgacagagcaa

SEQ ID NO: 172721 - DNA, 592 bp, Homo sapiens
gcaagtaaaatatgaaggaaagataatcactagcgcaaagttagaaaaaagaaaaagcaaaaaagtgtaaaattaggaaaatgaaaacatactaatagaaaaatatgatgataaagtttgaccaaatgccatatttataaaaataaatgtgaataatttagatttgaattaaaagatgaatattctcaaattatatcaaaagtaaaatttaaatataaggtgtttacaagggactcaactaaagcaaaataactgataaattttagcaataaagtgatggcaaaaatatagcatgtaagtaattcataattttttttaaaacctggctgggcgcgctggctcacgcctgtaatcccagcactttgggaggctgaggcgggcgggtcatgaggtcaggagatcgagtctgtcctggctaacatgstgaaaccccatctctactaaaaatacaaaatattagctgggcgtggtggcaggggcctgtagtcctagctactcgggaggttgaggcaggagaatcccttgaacccgggaggcggaggttgcagcaagctatattgcaccactgcactcgagcctggcgacagagcaa

SEQ ID NO: 172722 - DNA, 592 bp, Homo sapiens
gcaagtaaaatatgaaggaaagataatcactagcgcaaagttagaaaaaagaaaaagcaaaaaagtgtaaaattaggaaaatgaaaacatactaatagaaaaatatgatgataaagtttgaccaaatgccatatttataaaaataaatgtgaataatttagatttgaattaaaagatgaatattctcaaattatatcaaaagtaaaatttaaatataaggtgtttacaagggactcaactaaagcaaaataactgataaattttagcaataaagtgatggcaaaaatatagcatgtaagtaattcataattttttttaaaacctggctgggcgcgctggctcacgcctgtaatcccagcactttgggaggctgaggcgggcgggtcatgaggtcaggagatcgagtctgtcctggctaacatggtgaaaccccatctctactaaaaatacaaaatattagctgggcgtggtggcaggggcctgtagtcctagctactcgggaggttgaggcaggagaatcccttgaacccgggaggcggaggttgcagcragctatattgcaccactgcactcgagcctggcgacagagcaa

SEQ ID NO: 172723 - DNA, 582 bp, Homo sapiens
atttaggcatattgtacgtgagccttcatttattattcttgccctgggccctgccaatgccaaaggcaggtttgctcctaggaagcctgctttctaaccacaccaaatatttgtagttatttaacgcctggacttcctcaaacctcagtaactttgcacaggctattccctctgtctagaatgcctgagaatttccttgtacttatgaagcatccttcaagaggataaaaggtaaaaattaccaccactgttactgtatattaacattgctctggaagtactaaccaatacaagtagagaagaaaaaggaacaagaatacgttagagaaatgagaaaygaaactcacatcctttcatattgtatgattatgcagttaagaaacccaagagaatcaaccagaaaactatttttaaatgataggaaactattgtaaggaagagagttataaaattaatttataaaaatcagtagttttgctatacacaaataatacttgaatagaccacaaaaaactctttttaagatttaatttacaatagtaacaaaaagataaaatatctgtgactagaatttaaagaaat

SEQ ID NO: 172724 - DNA, 423 bp, Homo sapiens
ctggaacttccatgtccggtaagacaggaaaaactagagaagggaaaagatcatctttaatttttaaaaactaagtaagtatctcttakgccttggcagaaactatcctaatagagacagtttccagaaggtcttattctgtggcctaaaacaaaaatgtgttattccctcaagcttcctttttttttttttttgccaataacttaatagtttgttagtcaataatattacaaatattttaaaattatttaatataaatagttggcagcaaaccattccatttcacagttaaattacccgtacaacagacagactggggatttatacacctggaagataacactaaaataagctaaaatatttatcaaaaaatttaaactgaaggcgtttacctagtgtgcataaaagcacaagcttactttc

SEQ ID NO: 172725 - DNA, 423 bp, Homo sapiens
ctggaacttccatgtccggtaagacaggaaaaactagagaagggaaaagatcatctttaatttttaaaaactaagtaagtatctcttatgccttggcagaaactatcctaatagagacagtttccagaaggtcttattctgtggcctaaaacaaaaatgtkttattccctcaagcttcctttttttttttttttgccaataacttaatagtttgttagtcaataatattacaaatattttaaaattatttaatataaatagttggcagcaaaccattccatttcacagttaaattacccgtacaacagacagactggggatttatacacctggaagataacactaaaataagctaaaatatttatcaaaaaatttaaactgaaggcgtttacctagtgtgcataaaagcacaagcttactttc

SEQ ID NO: 172726 - DNA, 423 bp, Homo sapiens
ctggaacttccatgtccggtaagacaggaaaaactagagaagggaaaagatcatctttaatttttaaaaactaagtaagtatctcttatgccttggcagaaactatcctaatagagacagtttccagaaggtcttattctgtggcctaaaacaaaaatgtgttattccctcaagcttcctttttttttttttttgccaataacttaatagtttgttagtcaataatattacaaatattttaaaattatttaatataaatagttggcagcaaaccattccattwcacagttaaattacccgtacaacagacagactggggatttatacacctggaagataacactaaaataagctaaaatatttatcaaaaaatttaaactgaaggcgtttacctagtgtgcataaaagcacaagcttactttc

SEQ ID NO: 172727 - DNA, 590 bp, Homo sapiens
gctggcatcctgtttctgtagaattataagaaaataaatgtctattgtttaagcccscagtctaagtattttttatggtagcccatgctgactgatacattagacttcatcaaaatttaaaacgtttgttcttcaagtgacagcaaaccaacacagaaaaggatataatatttgcagtacatatatctcacataggccttatgttcagaaaagagaacaaaaaattacaaactttcgctgaccatctgtttgtttaaataaagttttattgaaatacaaccatgcccatttgtttacatattatatatgattgcttgtgcattttagtgacagagatgagtagttatgacagattgtttggccaatgagcccaggatatttctctctggcctttaagatcttgccaactcttgaacaagaatatacaaagaactcttataaataaataagaagtaaaacagcccaatgttaaaaacagatgaaacatttgaacagacattatatatttaattaattttttcctgcttgccgtctgtaaactacttttaaacccatctagttattttatctttgcagtgactgtatttttt

SEQ ID NO: 172728 - DNA, 590 bp, Homo sapiens
gctggcatcctgtttctgtagaattataagaaaataaatgtctattgtttaagcccccagtctaagtattttttatggtagcccatgctgactgatacattagacttcatcaaaatttaaaacgtttgttcttcaagtgacagcaaaccaacacagaaaaggatataatatttgcagtacatatatctcacataggccttatgttcagaaaagagaacaaaaaattacaaactttcgctgaccatctgtttgtttaaataaagttttattgaaatacaaccatgcccatttgtttacatattatatatgattgcttgtgcattttagtgacagagatgagtagttatgacagattgtttggccaatgagcccaggatatttctctctggcctttaagatcttgccaactcttgaacaagaatatacaaagaactcttataaataaataagaagtaaaacagcccaatgttaaaaacagatgaaacatttgaacagacattatatatttaattaattttttcctgcttgccrtctgtaaactacttttaaacccatctagttattttatctttgcagtgactgtatttttt

SEQ ID NO: 172729 - DNA, 607 bp, Homo sapiens
tttaattataagtgggagctaaacactgagtacacatggaaacaaaaaagggaacagcaggttctgrggcttacttgagggtgggaggtgggaggagggagatgattgaaaaaccacccattgaatactatgctaattacctgccttgagaaataattcatacaccaaactcctctgacactcaatttacccatctaacaaacctgcacacgtaacccttaacctaaaataaaagttggaagaaaataaatagataaaaagaaaaaaaaagaaaaatatcacttctccccccaaaaaaagaacaaaatggaaagtctattgaagattgtggagtcagttaagtgattcttgtggatatcaattaaatatcactatcccttttcctcaacatgatgaattactgctgtgcttgggagatgagagagtttagaggttcaaatgaaggtgtgtgtgacacggatacagttgccagactgaattgacaaaatgaagaccataactaaaaaaagaagagggtgagggataaaaaactatatatcgggtacaatgtacactatttaggtgacatgtgcactaaaatctcagacttcaccactatacaattcat

SEQ ID NO: 172730 - DNA, 607 bp, Homo sapiens
tttaattataagtgggagctaaacactgagtacacatggaaacaaaaaagggaacagcaggttctgaggcttacttgagggtgggaggtgggaggagggagatgattgaaaaaccacccattgaatactatgctaattacctgccttgagaaataattcatacaccaaactcctctgacactcaatttacccatctaacaaacctgcacacgtaacccttaacctaaaataaaagttggaagaaaataaatagataaaaagaaaaaaaaagaaaaatatcacttctccccccaaaaaaagaacaaaatggaaagtctattgaagattgtggagtcagttaagtgattcttgtggatatcaattaaatatcactatcccttttcctcaacatgatgaattactgctgtgcttgggagatgagagagtttagaggttcaaatgaaggtgtgtgtgacacggatacagttgccagactsaattgacaaaatgaagaccataactaaaaaaagaagagggtgagggataaaaaactatatatcgggtacaatgtacactatttaggtgacatgtgcactaaaatctcagacttcaccactatacaattcat

SEQ ID NO: 172731 - DNA, 252 bp, Homo sapiens
ctttcatgcccttacttattcctgaagctcatgttatcatcaatactatcatgtatttgatcattgtcctttgwttcatggaggtacttggggcggtgaaagtttcggtgaggctcagggatgatggtatgggttttctgttgtttctgtaacgaattcccagcaacttaatgtctaaacaatgcaggtatagatcttactgttctaaagtcctagaggtctccctgggctaaaaaggcattggtaatatca

SEQ ID NO: 172732 - DNA, 469 bp, Homo sapiens
tggcttaaaggagtacagttccgtgcatttgaacatgatatcatgatgtaaggtatctagaaagtggatatctataagagaagggcaccaatttgtacccaagtatggaaaactggaagcagattgaggtttgcgaagagtgtagaactcaagtcacaaggccagccttggaatatgaagtctgccttcatcaaataacacttctgagactcagtgtcttccacctgaatgtcccagaaaacagtacaatctaagtaacgtggctctttaagattcccctgacataaggcagaattaagtttgatgaaggaactggcaaattatagtgatgataatgagaaccctamagcttaatgaatttgtcaaagttacttagagtcaacagaagatcccaaatgtgaaactgattcctcttgatgcctttaaacaggtaaaggatccaattaggaactcttgataattctagaaa

SEQ ID NO: 172733 - DNA, 449 bp, Homo sapiens
ggtgatagcgtaattatatacatatttctttgtttggttggaattcttctttaaagtgaaaatttccttcatcagctgtgtggttcctaagaattcaagactatccagaactataggatggtgtttataggacacaacagctgacttgaatggactcccactggctaaagatgacacactttgaccgtcagtaagaatgataatttaaatgcatttcaatacatcaagtttgataaaagacacgagttcccaatgatgttaaagatatgcacattrattgtctttagaaaatagttgggaatcatttcattactttgtgaactgaaaaaaaaaaccaaaaagaaatcatgtgtcctacttttccttaataaacgcttgatcagattaatcaataacatttttaaaaatatgtttttatggaatcacttatgagatacatgttgtataaa

SEQ ID NO: 172734 - DNA, 508 bp, Homo sapiens
gattctagttccaggaactaattttaagacttgcttctttttttctccttttctccctcctttcttcttcctttctcttcccttccttcctcattatttcctccttccttccctccttcctcctttctttcttcttagtttcttttctttcttccttccatcctttcttcctcccacacttcaccaacttcttcgtctgtgtattttaccatcagttttctttaaaaaaaaaaaatgtgttcccttttgctactttaaaaaaatgcacttttagcacccgtgtttgtgtgtgtaactggcaaagtcatttttcctaatttgagggaaatgactatttcatccggtactttcggagccctgcgtatcagtcagaattaaagggttgggaaaagtgggagatggataccacaattttgacatgcctgttcaaacactttsaggtatgtctctaatatgcataaacaattcatctgtcattctagttgtcatcctttccccttgcataaaa

SEQ ID NO: 172735 - DNA, 584 bp, Homo sapiens
atcatttactagaaacatttgagcatcccaagaaagaagccttgccttaatatgcaatagataaagaaatgaaggaccatgtacaggtacttctgtgatagttgaacccctttcagttcccccttgctctgtgcatatagaatataaaattctttatgaatgcaactcttgatagaatccagggctggggatcagcttggaaaatgaagttgcagaattgtttagcattactcaacctcaagtttgtttaaattgaacaaactatgtttaaactcagcctaatctaaatctattaaatctagaggaaagrgttagtagatttctgctcaaaaatcacctacatttttgaatttacctaaacgcatgaatattcctgcttcctctagttccagggaagacatcacttgaaatattttaagtattcattattggtgcatgccacttaaaatgaattcattatccacctacaatatcagaattaattgtcatgattatccttaattcttagtaacacattatatagatatattagtattgaagatttaatggtatagtaaaactccatgacatgattttaaaactac

SEQ ID NO: 172736 - DNA, 548 bp, Homo sapiens
tttcattcaccgaagtaaaagcacctcataccacatcctatttcccttaatttattattaaattgataaaaattgtcttatgtacatgatgcctggaaatatgtatacattgtggaatggctaaattgagctaattaacatatgcattacctcacatagttaycatttttatggtgagaacactttacatccactctcccagcatttttcaagaacacaatatattgctttgttttgttttgagactggggggggggtctcactaggctgaccaggctggtcttgaactcttggcctcaagtgatcctcccacctctgcctcccaaagtgctgggattacagccatgagccactgggcctggccaagaatacaatatattgttaactatggtcaccaggtggtgcaatacatctcttgaacttatttctcctaactgaaattttgcatcctttgaccaacatctccccaatcttcccactccccagcttctggtaaccaacgttcttctctttgcttctgtgaatttgcctttttagcttctacatat

SEQ ID NO: 172737 - DNA, 548 bp, Homo sapiens
tttcattcaccgaagtaaaagcacctcataccacatcctatttcccttaatttattattaaattgataaaaattgtcttatgtacatgatgcctggaaatatgtatacattgtggaatggctaaattgagctaattaacatatgcattacctcacatagttaccatttttatggtgagaacactttacatccactctcccagcatttttcaagaacacaatatattgctttgttttgttttgagactggggsgggggtctcactaggctgaccaggctggtcttgaactcttggcctcaagtgatcctcccacctctgcctcccaaagtgctgggattacagccatgagccactgggcctggccaagaatacaatatattgttaactatggtcaccaggtggtgcaatacatctcttgaacttatttctcctaactgaaattttgcatcctttgaccaacatctccccaatcttcccactccccagcttctggtaaccaacgttcttctctttgcttctgtgaatttgcctttttagcttctacatat

SEQ ID NO: 172738 - DNA, 547 bp, Homo sapiens
tgtctattttaataatttagtagaggtttctattcaaacattcagtgaagatgttgctgtcttcaactatgtagaaaagaagacttttagggtgtctgttaaaagcaaagagctgctgatttttaacaggttagtaataaccttttaatcaagtatatgtcatgcagagactcaaatcctggtccaawagtgtttgagtatgttcgatggaagattccaatggtaaggatccgaattcttcctacatcttagagggaatggagcaggatgttatggcaatggagggggtcagccccaaaggtagctggcccaaccttaactgtggatgtttaaaaaaaaaaaaaaccaccaaatatttctatagcattctttttgctgcattttctttattttaagccacaggtctacttggagggtcatgcagcaagtggcttataaataaaatcaaagtctatgaatagtgtcattgcattaagagacagaattgctgggttctttcattatgtaaaaagctcacatcttgggaatccatgagttggtaggtttt

SEQ ID NO: 172739 - DNA, 474 bp, Homo sapiens
gaattatgaagaaattaaaaataaaactaccatacaacctagtgatccctattcaatgcatacccccaaaagaaatggaatcaccatctcataaagatgtctgatctcccatgcttacagcagcattattcacartacccaatatatgaaaacaacgtaagcatccatcattgaaggcatgaataaagaaactgaggtacatatatacaatggaatattattcagccctaaaactgagtgagatcttgccatttgtcacaacatagatgagcatggaggacacgagggtaagtgaaatgagccagacacagaaaagaaactattgcatgatctcacttataggtagatcctaaaaaataataattcaaatatacagagatcgagaacaacacattggttaccagggttgacagaggagggtagaaaatgcataggaaatgggaatatataggtcagaggacacaaagcagcagc

SEQ ID NO: 172740 - DNA, 411 bp, Homo sapiens
agcatcttgtaattaatgtaacatagacatgaataaacttacaataaaaccttaatattgttttcaggagtgagcaagcaatttggacttcaggtgtccttgcccataataggtatctagtttttattgtggaaaagttcatctttattgactcctttgaacattttattaatatatttgtgtttgtatctgtcagttaaacaaatatgaatttaatgagaaatgaatagactacctctattgaaggtagagcaatccataaaaattccatcctcaattcccttaactttcaaacatcgttcaggccaatatagcttacaccatttatgtcagatttcccaatattctgcctagttgacatccacayaccagcagcaacagaatcatgtgtgatgcatcgttcaattcttt

SEQ ID NO: 172741 - DNA, 388 bp, Homo sapiens
ttcaggccttaatctccatgagctacctagagcacacatatggaaaccaaaaataaaatttgaagtcccccaaccccccagtgatcagagtrgaatccctcctttatggcagagcactccaaagttaacttcaagaactggtttaggccatgacaggaaaggggcggttggacatactgcattataccctccccacttttggaattcaggaaaagtcaactagcatttgacatcaacccagaccttaaatctcataagaaatatttgcaatctattctctctaaatccagccacctggaggcttcatctgcatgataaagctttggtttccacaacgtcttatcataactcagacattcctttctattgatattaactctttcaaaca

SEQ ID NO: 172742 - DNA, 516 bp, Homo sapiens
acatatttcaaatttttgcagcaaaataaatttttactaacttgttataacatgtctaaacaggatctagtttgaggcactaagaaggaaaagatatccgtttaaaaagagttcctatcagagcaacatggattctgctaatatagaagcaagaaaaaacatgaaatttatggtgaagcttggaaggaataatcgtgaaatcaatgacgctttatgcaaagtttatgggaacaacttcgtaaakaaatcagcaatttacaaatgaataactcattttaagaagggaagagacaatgtttaagatgaagcccacagcagctgaccatccataccaatttttgaggacaaaaataatcttcatgccctaatttaagaggactgacaactaacagcagaaacaatagacaataccacagacctctcagttggttcagcatacgcaattctaataaattaaaattgagcagactttccacctcatgggtatgtatctaagccattggaacttggtcatct

SEQ ID NO: 172743 - DNA, 544 bp, Homo sapiens
ataatactgtcaattgatatattacatgtattggagttttgattgaaattgcatggaatctgtagaaatactttggggagaatgcaaattgtagcaatmttgtgtattccaacatatgaataaagtacacttctccatttatgtgggtcttgtttcacttctctaagcaatatgctgtggatttaagtgacaaggtgatatatgccttttgtaaaatatattttaaaatatttaatgcatttttataccttcagataacaattttaaatttttcttgataattatttgctactagtaaagagaaatacaactatttttgtattttatcaacataacatataactttgcttaattcatttttccctattagtgttttttcttaagattctttagttttctttaatgtacataagcaagtcatctctgaatgactttcaagtgacaaatttactttcacctttacaatctgtatgtgtcctaaatatttttatgccttctcgcactttttcagagcttgagtacaatattaaacagaaatggtgag

SEQ ID NO: 172744 - DNA, 544 bp, Homo sapiens
ataatactgtcaattgatatattacatgtattggagttttgattgaaattgcatggaatctgtagaaatactttggggagaatgcaaattgtagcaatattgtgtattccaacatatgaataaagtacacttctccatttatgtgggtcttgtttcacttctctaagcaatatgctgtggatttaagtgacaaggtgatatatgccttttgtaaaatatattttaaaatatttaatgcatttttataccttcagataacaattttaaatttttcttgataattatttgctactagtaaagagaaatacaactatttttgtattttatcaacataacatrtaactttgcttaattcatttttccctattagtgttttttcttaagattctttagttttctttaatgtacataagcaagtcatctctgaatgactttcaagtgacaaatttactttcacctttacaatctgtatgtgtcctaaatatttttatgccttctcgcactttttcagagcttgagtacaatattaaacagaaatggtgag

SEQ ID NO: 172745 - DNA, 542 bp, Homo sapiens
agtggtcttggtaaatgaccagtcacacatcttagaatctacagctctgaggatggaaaggcaaaaatctgtatagctcaaaatattaaacacagttattttactttgatctatatttatgtaagcttgaacatgggtaaatggcaatgtaattggtaggagatctaaccagaaatcttactgttcaagaagaagatttcttctgaaatccttcgggaagatttactcaaatagagtgccaagggaggggctcattgcagatgttgacaattttccattaaaatgcctaaaaggccagttaagtcagtattgtgtgaattcgaatacttttaaaacaacaaaaaaattkataccttgaaatgaacaatggatctatatatgagcttgcatatttatgtgtgtatgcatatatacctcccatatttatgcatattcatatttacatatgcattttttatatttaagtattgtttcaatcacttctattcctttttaaaaaatttacatatctatgaactacagtcaactcagctttggaccaa

SEQ ID NO: 172746 - DNA, 553 bp, Homo sapiens
tgggtgcagcgcaccagcatggcacgtgtatacatatgtaactaacctgcacattgtgctcatgtaccctaaaacttaaagtataataataaaaaaaaaaagaaaaaaaaagaagtatctgccatccattggactacatgtttccttttttaaacctttttaggtacaggggtacatatgcwggttggttctgtagataaattgtatgttgcaggggttcagtgtacatattatttcatcactcaagtgataagcatgtatgtgataggcagttttttgatccttaccttcctccaactttccaccctgaagtagggcctggtacctattgttcccttctttgtgtccatgtgtcctcaatgataagctcccacatataagtgagaacacatagtgtttgattttgtcttcttgcattagttcccttaggatactggcctctacatctatccacattcctgcaatggacatgatttgttcttttttatgtctgtgaagcattccatggtgtatatttaccacatttttgatatcaaatctaccattaatgggc

SEQ ID NO: 172747 - DNA, 553 bp, Homo sapiens
tgggtgcagcgcaccagcatggcacgtgtatacatatgtaactaacctgcacattgtgctcatgtaccctaaaacttaaagtataataataaaaaaaaaaagaaaaaaaaagaagtatctgccatccattggactacatgtttccttttttaaacctttttaggtacaggggtacatatgcaggttggttctgtagataaattgtatgttgcaggggttcagtgtacatattatttcatcactcaagtgataagcatgtatgtgataggcagttttttgatccttaccttcctccaactttccaccctsaagtagggcctggtacctattgttcccttctttgtgtccatgtgtcctcaatgataagctcccacatataagtgagaacacatagtgtttgattttgtcttcttgcattagttcccttaggatactggcctctacatctatccacattcctgcaatggacatgatttgttcttttttatgtctgtgaagcattccatggtgtatatttaccacatttttgatatcaaatctaccattaatgggc

SEQ ID NO: 172748 - DNA, 542 bp, Homo sapiens
tattgtactgtggctgagctggcactcaattacaagaagcagtccttccctctatttctctgctttccagagggagaggaggcttaccctacagctaccaccacccttggccaagaggagtactgccagaataccactgaagttgccttaaggcctaaggtctcttaagttggctagtggtgaatgctgcctagcctgggcagtgggctcccctctgacycagggcaggtccagaaatgccatctaagagtcaaatcctggacagggaccccaagatcccacttgatgctctacctgcctgtggcagtgttggtacctgaggtgtaaggcctttacttttttctctgcttttctcaagcagaaggagtttttccccatagccaccacatctgataatgtgctgagtctcgcctgaagccaactagtctcagaggctcaccaaggccctcagtgtagtactggggtatcaccgctggttatacaggacacaaaggcactgcatttagcaggtgatgaatgctgcaaggactgagtcctttcct

SEQ ID NO: 172749 - DNA, 571 bp, Homo sapiens
gtctcacaacacttaaaattatttccttcatcttgattttagatagcctgaagactgtatgcctttgtgatgatctttttgtgatgaatttcccaggagtactttaaccttcttatatttcattgtatagatctttagcaaggccacagttttcctcaattattctctcaaaaaaattttccaaacttttacatagattttcttcctcaggagcaacaattatttttaggtttggacattttatataatcccatatttcttggagactttattcattttaaaatcttttttctttgtctttatctgattttgkcaatttgaaagccttacttttgagatctcagattctttcttctacttgttctcgactattgttgaaactttccactgaattttgtatgttcctacgtgtgtctttcatttccagaagctctgattgttttttctttatgatatctatatttctggaaattttattcatattctaatttttaaaatttttttataaattcacttttacgtttctccagtatctccttgagtagcaaccttaataagcaaccatctgaat

SEQ ID NO: 172750 - DNA, 610 bp, Homo sapiens
agagcaatattgatgttccaagtagggagaaattgtgactttgcctctcatgaaggcctgagtctggagagtgctcctcctgtggggctgcaatcaccctgaattgttccaggaatgctgtctatacatgcagccatgctgtgttcctgtgggagaagccccagctgtgtctgcagtggtctaccaggggatacaccagtggggaataaggatgccttctccaagaygcttcatcatcatacaggctgcctgcctgttggggtaaaggtgcagactttccctactgcacccatcagtgcaattgtgtttctgctatgagtaactttccaccagcagaaggatctgggactcaagacctgctgttcaaattattttgtcccatggggtgttcccttgatatggtgttctcctccttcccctagaaataggactcctgagattcagacttcagtgattgctattgctcttctgggtctatccagcctgtagggcttccagattcttggatggttctggagaatgtctgcaaaggattcagtgatgtgacctttcttcgaatctcccagcagtgtgtactaacacctgctctgatggacgtagacggagaatg

SEQ ID NO: 172751 - DNA, 363 bp, Homo sapiens
tatggctagccagttttcccagcaccatttattaaatagggaatcatttccccatttcttgcttttgtcaggtttgtcaaagatcaggtggttgtagatatgcggcattatttttgagggctctgttctgttccattggtctgtatctctgttttggtaccagtaccatgctgctttggttactgtagtcttgtagtatagtttgaagtcaggtagcttcaggtctaaaacaccaaaagcaatgkcaacaaaagacaaaattgacaaatgggatctaattaaactcaagagcttctgcacagcaaaagaaactaccatcagagtgaacaggcaacctacagaatgggagaaaatttttgcaat

SEQ ID NO: 172752 - DNA, 637 bp, Homo sapiens
gggctgtaccttgcaaagccacaggggcagagcttcccaaggcagtgggagcccacctcttgcatcaatgtgacctgaatgtgagatatggagtcaaggaaaatcattttggagtgtaaagatttaataactgccctgctgaattttggactcaaatggggccttttgctgctttgttttggccaatttctccctttgtaatgggggtatttacccaatggttctgcatctccccccctgccattgtatctaggaagtaactagcttgcttttgattttacaggctcgtaaktggaaggcacttgccttgtctcaaataagactttagatgtggacttttgaattaatgctgaaatgacttaagaccttgcaggactgttgggaaagaataattgattttgaaatgtgactgcatgagatttgggaggggccaaaggtggaatgacatggtttgcctctgttctcatccaaatcttaccttgaattgtaataatctccatgtttcaagggtgtggccaggtggagacaattgaattatgggggcagtttcacctatattattctcatggtagtgaataagtctcatgagatctgataattttatacatgggaattcctgtacacaagctcttgcctg

SEQ ID NO: 172753 - DNA, 469 bp, Homo sapiens
gactgctatcatatgcccaagggacactatactattgggaattactgataatatataggygtaaaagacctatatgactcaggagcataaaagctagagaaagatacatatccaaaataatacatgagttggaactatatttgtgttgccactatataaattgtataaaatgctactgagagaggagagggagaaacatttgatgaactcagcttaatgaagaaagtgatactcgggcctcatagaaaactagaattttaaataatagggacaaagatttaagtgaaactgatagaaagctgtggaagaataagcatcacctacaaataaacaatctaagatggaaaatgagacccacattgtgggtggaagtggtagaagattagagtgggaaacaagactggggtcaggttctaggtttcaagtgccaagccatggagtttagactttattcagggaaagaaaagca

SEQ ID NO: 172754 - DNA, 387 bp, Homo sapiens
tattcacagattttactcaatctactataaactgtgtatcartgtggggagaattgacattttaattattttagctcttccaattcataaacatggtatatctctccatttatttaggtcttctttgacttcttttgttagcattttgtagttttcagcatgcaagttctatatattttgttgtatttaccctaaagtgtttcctgcttgttagtgattataactgtattgtatttttaattgaggtgtccacattttcatggctagaatatataaatacacttgattttcatacattggtttgtcttctatcctgtaaccttgctgagcttgcttattagctaaatagtttattaatatgattagtttaggagtttttgtggattt

SEQ ID NO: 172755 - DNA, 632 bp, Homo sapiens
gagtctgtctgagcaaggctgagtggtgggcacctctgcgcttctgcctggcttatgcatgcagcattagcctgacagggactccaggaaatacagcatcgctgctcccttgagggccagcctcttgggggatgccaggaagctgcacccttgtcggggggggctgtgtctgtcagggtggactgggaaagtggccagggaggtgcccagggggtgggagtgtatcctgccagaagagcccattctctctgacacactggatgctagacttgtattagaatattttggaggtctctagtaataaccatgtgagctctgaggtcctgagccagccaaattcagatgagtatctttcatgagatcctatgtccccacagtgctgtttggagagcgctgattacaagctctcagggaaaccctaaattaggagtgggagagaggaatgactgaagggcgaggaccgagaaccagtcttcctaatggctccggatcatggggtgggactggtgtcccctttccaaatggggagtggggaggcgagtggtgaaggggttcagygcctccctctgtgggcatggtgagggagaccccctgcaatgcaccttaccccgggagaggccaagaagggccag

SEQ ID NO: 172756 - DNA, 632 bp, Homo sapiens
gagtctgtctgagcaaggctgagtggtgggcacctctgcgcttctgcctggcttatgcatgcagcattagcctgacagggactccaggaaatacagcatcgctgctcccttgagggccagcctcttgggggatgccaggaagctgcacccttgtcggggggggctgtgtctgtcagggtggactgggaaagtggccagggaggtgcccagggggtgggagtgtatcctgccagaagagcccattctctctgacacactggatgctagacttgtattagaatattttggaggtctctagtaataaccatgtgagctctgaggtcctgagccagccaaattcagatgagtatctttcatgagatcctatgtccccacagtgctgtttggagagcgctgattacaagctctcagggaaaccctaaattaggagtgggagagaggaatgactgaagggcgaggaccgagaaccagtcttcctaatggctccggatcatggggtgggactggtgtcccctttccaaatggggagtggggaggcgagtggtgaaggggttcagcgcctccctctgtgggcatggtgagggagaccccctgcaatscaccttaccccgggagaggccaagaagggccag

SEQ ID NO: 172757 - DNA, 444 bp, Homo sapiens
ctttagttttcctgagaagtccttatccacgcagattttagtgataacactcagagttggcgctggtggatagtacctaygctgggcctttgtagaaatcacactggcagtgtgcgtaaggaaatctaaaatggcaccagtctttttactttctacaagtctgtcctggggaaataatctgaactgcaatccagatatatctataagcatatttattattataacattatttagagaatcagagaattacaaactatttccaatgtaatttccaattacaaacaatgtccaatatagggcagtggttaaatctagtcataatggtaatagtacgcagttaccaaaactatgttttcagagaatatttgtaagaaaaatactcatagtatgttatatgttaatataatatacaaatgaaaattgccagtaatccttagttttagg

SEQ ID NO: 172758 - DNA, 573 bp, Homo sapiens
ccaccatggctgctctagttgcatgctcattgtactagcttcagggacaaagctttgtcagcctgaactggttgagccatttgttttcttccttatgcagtgtatggtttatggtggacaccaacaagcaatasaaaagctgaattcctcatgtcccctccccagctgcacaccttgacttcagatgcccttgtctttgacctccttgtctttgatcttgtcttccttctcctcccatgcccttgaccagctggtgaaaccatttcttacaacccagaaaactatatattccacttcaggccacttctccttccacataaagtggatgaccaggtgtaccacacaattctgcccactgtttccagggccactcctgaatgtgactgcaacgcagccactgtcttatttctggtgtgcacctgctttccaagtttaacggtctctaactaaatttctcctccagctggtcatagaggatcccactggccacagggatgagctatggttggtgacatgcgggtctgttctacctgctcatgcagcttgctgttcccctggtcctgctcagacttg

SEQ ID NO: 172759 - DNA, 441 bp, Homo sapiens
cagagacttggagcagagatgtagagaatgttggaatatcccataacattcaacgccatgaaaggaagagacgccaggatggactgggatggaaaaatccactggccacagaagtaatggaaccacagggctgggggagaacttgagtgcacctatcaaaatggggctcatttcagagctgacaaaaggctgagagaatcttgaraggaagagaagggggaggaggaagaggagaggacggtaaggaagataggcaaactctgtgcatagtagttggaggaattctagcaaattttgacacaagacagtttgaaataatacgctgtccaaaaaatgccttcttttccagggtgataggggccagcagtacgcagagaaccacgaaagcagggctgggacttcagtggctggggctaatggaaaacagctaaaaggtgaagg

SEQ ID NO: 172760 - DNA, 446 bp, Homo sapiens
aaagtgtgatagataatggtgggagtatagagaaagagccaggtgagtagggagtcatgttgaggtgggagacaaaggcattcagwctagcatgtggcgtttcctgtagaaggcaagatggtcagaacagaagctgtggttacagtccaggcaccaaaaagatttgactccagtatgttttcagaaatgtcttatttatcagacagagcaaacttccatatgcatccatcccatgtacatttgtagggtttatctcctgtgtgtgttcttctgtatgatttcacgtggaaacttttagtgtatactttgttgcatatgtcataatcacatctgtgtatcctctgcttcctttgagttatccaccaattccatcagtaaaggtctcttcccaggctgcactatgacctaagggagattctcttgcaacaatgcttgttgcaaggggt

SEQ ID NO: 172761 - DNA, 561 bp, Homo sapiens
ctttaaatatctccttttacttagggctgattttaaaatcatgtggatttaaaaatttatgtggaagtgttttgtgacattgaaaataagagtctgtgaagaaaagctgatgctgccattackatctctttgtatctggaataattaacttttgtttattacaaaaaccttttttaaaaataggcaataaattaattgtgcagttcatcttggatttaggagaagttgattctatggttttttttttctttctttttgtagagacagagtctttctctgtcactggactgcagtggtgcaatcatagctcactgcagcccctaactcctgggctcaagcaatcctcctgcctcagcctctcaagtagctgggattacaggtgtgagctaccatgcccaacaagaaggtgattcttaaaaaagagaaaataatacacagagaaaaagtaaaacagttattgtcttcacatcaataaaaagggagactgagcatttcctaagtggaactatttatagcttataccaagctttaaactatactagatatttagttgattatatt

SEQ ID NO: 172762 - DNA, 561 bp, Homo sapiens
ctttaaatatctccttttacttagggctgattttaaaatcatgtggatttaaaaatttatgtggaagtgttttgtgacattgaaaataagagtctgtgaagaaaagctgatgctgccattacgatctctttgtatctggaataattaacttttgtttattayaaaaaccttttttaaaaataggcaataaattaattgtgcagttcatcttggatttaggagaagttgattctatggttttttttttctttctttttgtagagacagagtctttctctgtcactggactgcagtggtgcaatcatagctcactgcagcccctaactcctgggctcaagcaatcctcctgcctcagcctctcaagtagctgggattacaggtgtgagctaccatgcccaacaagaaggtgattcttaaaaaagagaaaataatacacagagaaaaagtaaaacagttattgtcttcacatcaataaaaagggagactgagcatttcctaagtggaactatttatagcttataccaagctttaaactatactagatatttagttgattatatt

SEQ ID NO: 172763 - DNA, 561 bp, Homo sapiens
ctttaaatatctccttttacttagggctgattttaaaatcatgtggatttaaaaatttatgtggaagtgttttgtgacattgaaaataagagtctgtgaagaaaagctgatgctgccattacgatctctttgtatctggaataattaacttttgtttattacaaaaacctttttwaaaaataggcaataaattaattgtgcagttcatcttggatttaggagaagttgattctatggttttttttttctttctttttgtagagacagagtctttctctgtcactggactgcagtggtgcaatcatagctcactgcagcccctaactcctgggctcaagcaatcctcctgcctcagcctctcaagtagctgggattacaggtgtgagctaccatgcccaacaagaaggtgattcttaaaaaagagaaaataatacacagagaaaaagtaaaacagttattgtcttcacatcaataaaaagggagactgagcatttcctaagtggaactatttatagcttataccaagctttaaactatactagatatttagttgattatatt

SEQ ID NO: 172764 - DNA, 199 bp, Homo sapiens
gcaggcttgatgcttgcacattagtctttaggctggaaaaatggaagtgaagaraaaggaataaagaatgaggagagcaaaagtgagattacatcaaaaattttactcagggctttcttccaaatatctggccattcctgtctcctttgcagagtcatcttcctctaatgcgatctagctgctgacaactcttaaattt

SEQ ID NO: 172765 - DNA, 554 bp, Homo sapiens
acatgtactttcctttgttttttaaacaaaagagattcgagatgctaggagattgttgggcaataaacaataaaaacagctgttttaatgaaagccaatacagatctatagtcctttagccttacttttgacatccaaaaagctctgaaaagaaaaaaatgctgtagctcatcacagttagtgataaaatctgactgaactgataggaggctaattacagtctttattcyatttcatgtgaacattcagatgtttcactgcagaagtattaatgtcattgcatggggaggctgccctacatctatgaggacatactgtacttactaactttctaaaattcaaaataattttatatctgagcacaaagttttcagataagggactgtgggcctgtctatattgcatgtacccttctttaaatacagtctttctttagagtccttgatagtgttctcttccggttttcttcccacctcaccagaagttccttttctgtcaccatcgctagattctactcctcttcccaggctctaaaagttaagagtgcctgttct

SEQ ID NO: 172766 - DNA, 549 bp, Homo sapiens
tgcaaaatataactactttgatatacttcaggggctttaccaactccaactatgttaaattgagtatgttgaatwggccatgtggacagccagtgctgtagagaaatgattgaaatgtccactcctgtatctaccaaatctttaaatttctttccctgaatagttatttcacaggtaggacatttatcagtaatttgattcacccagtaagctgctttgccttgcttatttgtgctttcaaattcacctgttcgtttaatttcacttttccacatttccatgaatggcacaatcaggagctgtgctatacgctctcctggctctgctttccagggaacataagtatatataacaatttgaatgtccctattataatctgaatcaatgactcctgtttgtacttgtactcctttcaaatttaaactagacctacctagaagtaatcctatcattcttgctggcaatatctgactggagacagcaacattctttaacagtcccattaaaaaaggagaaattggtccatattgattaatagcttgcttaaat

SEQ ID NO: 172767 - DNA, 549 bp, Homo sapiens
tgcaaaatataactactttgatatacttcaggggctttaccaactccaactatgttaaattgagtatgttgaattggccatgtggacagccagtgctgtagagaaatgattgaaatgtccactcctgtatctaccaaatctttaaatttctttccctgaatagttatttcacaggtaggacatttatcagtaatttgattcacccagtaagctgctttgccttgcttatttgtgctttcaaattcacctgttcgtttaatttcacttttccacatttccatgaatggcacaatsaggagctgtgctatacgctctcctggctctgctttccagggaacataagtatatataacaatttgaatgtccctattataatctgaatcaatgactcctgtttgtacttgtactcctttcaaatttaaactagacctacctagaagtaatcctatcattcttgctggcaatatctgactggagacagcaacattctttaacagtcccattaaaaaaggagaaattggtccatattgattaatagcttgcttaaat

SEQ ID NO: 172768 - DNA, 549 bp, Homo sapiens
tgcaaaatataactactttgatatacttcaggggctttaccaactccaactatgttaaattgagtatgttgaattggccatgtggacagccagtgctgtagagaaatgattgaaatgtccactcctgtatctaccaaatctttaaatttctttccctgaatagttatttcacaggtaggacatttatcagtaatttgattcacccagtaagctgctttgccttgcttatttgtgctttcaaattcacctgttcgtttaatttcacttttccacatttccatgaatggcacaatcaggagctgtgctatacgctctcctggctctgctttccagggaacataagtatatataacaatttgaatgtccctattataatctgaatcaatgactcctgtttgtacttgtactcctttcaaatttaaactagacctacctagaagtaatcctatcatkcttgctggcaatatctgactggagacagcaacattctttaacagtcccattaaaaaaggagaaattggtccatattgattaatagcttgcttaaat

SEQ ID NO: 172769 - DNA, 597 bp, Homo sapiens
catcctccttttccccctaccctttccagcctctggaaaccatcattcttctatccccaaatatgtacaattattgtgtattgaaaaagaatacagaaaataagaaaacagcattaatatagctacactatctaatctggcagtcattagtcatataacactgttgagtataatcaatcatcaacttacaatggttcaactcagtggttttttgactttatggtggtgtaaaagtgatgcaycttcagtagaaactacttcaagtacgcatacaacaattctgttttttactttcagtacagtattcaataaattacattaagaaaataagcaaaaaagaaaaaacccacagttcaataaaaaacacaaaataagataacaggaaataagttaaaactaggcagtaattacaaaaatgtggaactaaaagataaaagatttattaaagccagatagtcttagattaggttaagaaaaaaaagcccactaaatccagctacatgctgtttacaaaatacacatacataaaacttaataaaaaactttgataaataaaggataaaaactatttcagataaatgctaatcataagaaagc

SEQ ID NO: 172770 - DNA, 605 bp, Homo sapiens
tgcttgattctttatagttatttcaatctcttttcaaaaattgtatggcagaattctgaaytgcttttctgtgttgtcttgaatttctttgcgtttcctcaaagcagctcttttaaattctttatctgaaaggtcatacatcttcatatctccaggattggtttctggtgacttatttagttcacttggtgaggtcatgttttcttggatgtttttgatgcttgtagatgttcttctgtgttggggcattgaaaagttaggtgtttattgtagcctttttcactctgggcttgtttgtacccatcattcttgagaaggctttccagatattcaaaaggatttggatgttgtgcagtaaagcactgagctgtgtctgctttaggggacaccacaagcccagtaatgctgtggttcctgcagatttgtagaggtactgccttgatggccctggacaagatctggaagaattctctggattacaaggcagagattcttgttgtctttatttactttctcccaaagaaacaaattctctctctgtgttctgagccacctggagctgaaagagtgacacaagcatggctgtggctacaactactaggacc

SEQ ID NO: 172771 - DNA, 603 bp, Homo sapiens
tttttattcttttttcttttgtctcatctaactgttattttcaaatagcttgtcttgaagctcactaattccttcttctgcttgatcagttctgatatcaaaagactccgatgcattcttcagtttgctaaatgcatttttcagctctagaatttctgcttgattctttatagttatttcaatctcttttcaaaaattgtatggcagaattctgaattgcttttctgtgttgtcttgaatttctttgcgtttcctcaaagcagctcttttaaattctttatctgaaaggtcatacatcttcatatctccaggattggtttctggtgacttatttagttcacttggtgaggtcatgttttcytggatgtttttgatgcttgtagatgttcttctgtgttggggcattgaaaagttaggtgtttattgtagcctttttcactctgggcttgtttgtacccatcattcttgagaaggctttccagatattcaaaaggatttggatgttgtgcagtaaagcactgagctgtgtctgctttaggggacaccacaagcccagtaatgctgtggttcctgcagatttgtagaggtactgccttgatggcc

SEQ ID NO: 172772 - DNA, 603 bp, Homo sapiens
tttttattcttttttcttttgtctcatctaactgttattttcaaatagcttgtcttgaagctcactaattccttcttctgcttgatcagttctgatatcaaaagactccgatgcattcttcagtttgctaaatgcatttttcagctctagaatttctgcttgattctttatagttatttcaatctcttttcaaaaattgtatggcagaattctgaattgcttttctgtgttgtcttgaatttctttgcgtttcctcaaagcagctcttttaaattctttatctgaaaggtcatacatcttcatatctccaggattggtttctggtgacttatttagttcacttggtgaggtcatgttttcttggatgtttttgatgcttgtagatgttcttctgtgttggggcrttgaaaagttaggtgtttattgtagcctttttcactctgggcttgtttgtacccatcattcttgagaaggctttccagatattcaaaaggatttggatgttgtgcagtaaagcactgagctgtgtctgctttaggggacaccacaagcccagtaatgctgtggttcctgcagatttgtagaggtactgccttgatggcc

SEQ ID NO: 172773 - DNA, 454 bp, Homo sapiens
tgcttgattctttatagttatttcaatctcttttcaaaaattgtatggcagaattctgaattgcttttctgtgttgtcttgaatttctttgcgtttcctcaaagcagctcttttaaattctttatctgaaaggtcatacatcttcatatctccaggattggtttctggtgacttatttagttcacttggtgaggtcatgttttcttggatgtttttgatgcttgtagatgttcttctgtgttggggcattgaaaagttaggtgtttattgtagcctttttcactctgggcttgtttgtacccatcattcttgagaaggctttccagatattcaaaagratttggatgttgtgcagtaaagcactgagctgtgtctgctttaggggacaccacaagcccagtaatgctgtggttcctgcagatttgtagaggtactgccttgatggccctggaca

SEQ ID NO: 172774 - DNA, 603 bp, Homo sapiens
tttttattcttttttcttttgtctcatctaactgttattttcaaatagcttgtcttgaagctcactaattccttcttctgcttgatcagttctgatatcaaaagactccgatgcattcttcagtttgctaaatgcatttttcagctctagaatttctgcttgattctttatagttatttcaatctcttttcaaaaattgtatggcagaattctgaattgcttttctgtgttgtcttgaatttctttgcgtttcctcaaagcagctcttttaaattctttatctgaaaggtcatacatcttcatatctccaggattggtttctggtgacttatttagttcacttggtgaggtcatgttttcttggatgtttttgatgcttgtagatgttcttctgtgttggggcattgaaaagttaggtgtttattgtagcctttttcactctgggcttgtttgtacccatcattcttgagaaggctttccagatattcaaaaggayttggatgttgtgcagtaaagcactgagctgtgtctgctttaggggacaccacaagcccagtaatgctgtggttcctgcagatttgtagaggtactgccttgatggcc

SEQ ID NO: 172775 - DNA, 515 bp, Homo sapiens
gacacatgaggacaccagaaacatcccaggactcctaacatctcatgtcctgcgctaacctccagtatttcctcatcttcargagggtggatatgttacttaatggtatcccctaattccctggtaagtccatggtgatctgacatgcaagtgaacaggctgttttttcactttcttttttggcatctcaaatactgaatagagaattaggtccataacactgaagaacaatcagtaagtaaatgtgctatgattttatttatttatcctagttccccaggccactccagcaaatcagcacagattaagtccccatgaatgataagaatccacagttcgctggatctcacatccatgtgcttagggaggaccttggcccctgccagatctcctctgttttccttcagccttctagctccttggtcccagaaatgaatccatggggatttcagaggggacacaacagaatgacagatttcaagctcaagctctattctgaactgtggctacttact

SEQ ID NO: 172776 - DNA, 515 bp, Homo sapiens
gacacatgaggacaccagaaacatcccaggactcctaacatctcatgtcctgcgctaacctccagtatttcctcatcttcaggagggtggatatgttacttaatggtatcccctaattccctggtaagtccatggtgatctgacatgcaagtgaacargctgttttttcactttcttttttggcatctcaaatactgaatagagaattaggtccataacactgaagaacaatcagtaagtaaatgtgctatgattttatttatttatcctagttccccaggccactccagcaaatcagcacagattaagtccccatgaatgataagaatccacagttcgctggatctcacatccatgtgcttagggaggaccttggcccctgccagatctcctctgttttccttcagccttctagctccttggtcccagaaatgaatccatggggatttcagaggggacacaacagaatgacagatttcaagctcaagctctattctgaactgtggctacttact

SEQ ID NO: 172777 - DNA, 566 bp, Homo sapiens
ggccatgtggctttgcagaaagtgttcatagacacccaagaagtcagccattggatgataggacgctgtgtgaggaaggcttaacatgttctctgctttgctgctgtctctgccctatggaggtcctgttgaaaagttgactcactcatgtaaaaatgaacrtttcgaccatgtctgcctgtcagaggcattggttagagaccctctgcatgctgcccaaaagacaactttggaggcagctccgtgcatggtcaagggcaaacattatacatatttttattaagtatagaaactgtgtgtgtgtatatatatatatatgtctcacatgcataaatgtacagttgatcctcattatttgataattctgtacttgcaaatttggctactcacaaaaatgtatttgtaacccccaaatcagcacatgtggtgcttttgcagtcattctcggacatgggcagagtagcgaaacatttgagtcacctaaccggtgggtgcatttccagctggggacaaacaaggtgaagctctgctttctgttccagctctcaaactgtaaataagagttc

SEQ ID NO: 172778 - DNA, 566 bp, Homo sapiens
ggccatgtggctttgcagaaagtgttcatagacacccaagaagtcagccattggatgataggacgctgtgtgaggaaggcttaacatgttctctgctttgctgctgtctctgccctatggaggtcctgttgaaaagttgactcactcatgtaaaaatgaacatttcgaccatgtctgcctgtcagaggcattggttagagaccctctgcatgctgcccaaaagacaactttggaggcagctccgtgcatggtcaagggcaaacattatacatatttttattaagtatagaaactgtgtgtgtgtatatatatatatatgtctcacatgcataaaygtacagttgatcctcattatttgataattctgtacttgcaaatttggctactcacaaaaatgtatttgtaacccccaaatcagcacatgtggtgcttttgcagtcattctcggacatgggcagagtagcgaaacatttgagtcacctaaccggtgggtgcatttccagctggggacaaacaaggtgaagctctgctttctgttccagctctcaaactgtaaataagagttc

SEQ ID NO: 172779 - DNA, 441 bp, Homo sapiens
ccttgggggaacaagatggctgaggatagctaaacaaaaagaagcagacagacaaacgtaayctcaattaattactgctgataataatgggcagagtgtccctttatgtttgtataacatttggtccagaaacacactgaacaacttgtcaaagatcatatagaaaaatcaggtcagaaacagaattagaaccagaccaggtgtccttattcctgactcatctttgctctgctgtgctggcacacctccctggataacttgtctgcttctttatgagaatagtctcatttcatctttcaaatagcagtggtgttacccattattacttctgggcagtggcaggacaatataagcaggcaacttggctctggctgttgctgggcatggcaatgttttgcacggttaggaggagccatagcagtgatcgggtgcagctccccc

SEQ ID NO: 172780 - DNA, 526 bp, Homo sapiens
tctttttctatttctatgaggaatatcattgatttttgatacaaaaagaatgaatctgcagactgctttaggcagtaatgatattttaattatgaataatttcccatttcattgtgtcctattcagtttccattatcaatgttttcctttttgttgcgggaagtcagggaccccaaatggagggacctgctgaagccatggcagaagaacataaattgtaaagatttcatggacatttgtttgttcccaaattaatacttttataatttcttacgcctgtctttactgcaatctctaaatataaattgtgaagatttcatggacatttatcacttccccaatcaatactcttataatctcctatgcytgtctttaatctcttaatcctgttgtcttcgtaagctgaggatgtatgtcgcctcaggaccctgtgatgattgtgttaactgcacacgttgtttgtaaagcatgtgtgtttgaacaacatgaaatctgggcaccttgaaaaaaaggacaggataacagc

SEQ ID NO: 172781 - DNA, 505 bp, Homo sapiens
cctgcctcagcctcccgagtagctgggactacatacaggtgcccgctaccatgcccagctaatttttgttttttyagtagagacggagtttcactacgttgttcaggttggtcttgaacccctgaactcaagtgatccaccgccttggcctcccaaagttatgggattacaggctgagacactgcatctggccccaaccacattttttgaggcttggaactttcagcctcactcgctgaactccaggaggcaaaagggtctggagatttaatgaccaatggccaatgattttatcatgcctccatgaaaaccctaaacaatacggtttggagagcttctgttttgctgaacacaaggaggtgctggaagggtagtgtgcccaacagagggcatggaagtgccccttttcccacttaccttaccctgtgcatctctttcattggctgttcctgagatgcagcctttacattgagccagtaatagaaaataaactggccagatgtgg

SEQ ID NO: 172782 - DNA, 505 bp, Homo sapiens
cctgcctcagcctcccgagtagctgggactacatacaggtgcccgctaccatgcccagctaatttttgtttttttagtagagacggagtttcactacgttgttcaggttggtcttgaacccctgaactcaagtgatccaccgccttggcctcccaaagttatgggattacaggctgagacactgcatctggccccaaccacattttttgaggcttggaactttcagcctcactcgctgaactccaggaggcaaaagggtctggagatttaaygaccaatggccaatgattttatcatgcctccatgaaaaccctaaacaatacggtttggagagcttctgttttgctgaacacaaggaggtgctggaagggtagtgtgcccaacagagggcatggaagtgccccttttcccacttaccttaccctgtgcatctctttcattggctgttcctgagatgcagcctttacattgagccagtaatagaaaataaactggccagatgtgg

SEQ ID NO: 172783 - DNA, 505 bp, Homo sapiens
cctgcctcagcctcccgagtagctgggactacatacaggtgcccgctaccatgcccagctaatttttgtttttttagtagagacggagtttcactacgttgttcaggttggtcttgaacccctgaactcaagtgatccaccgccttggcctcccaaagttatgggattacaggctgagacactgcatctggccccaaccacattttttgaggcttggaactttcagcctcactcgctgaactccaggaggcaaaagggtctggagatttaatgaccaatggccaatgattttatcatgcctccatgaaaaccctaaacaatacggtttggagagcttctgttttgctgaacacaaggmggtgctggaagggtagtgtgcccaacagagggcatggaagtgccccttttcccacttaccttaccctgtgcatctctttcattggctgttcctgagatgcagcctttacattgagccagtaatagaaaataaactggccagatgtgg

SEQ ID NO: 172784 - DNA, 484 bp, Homo sapiens
gagacatgatgacaggagctccctccatcaccgtgcaccagaaagaaaagtgaagataagcacagggaagccagtcttaccatgtttgagcaactgaaccaatgtcagcctgagcctaccagcacaattactcttatgtgagaaaaacaggcatctccctatttggaaaatcacagctgactgcagtagtaaacaatccacaagttattcctggtaacactattcctacagccctaatctgtctcaaaaaaaaaaaaatcctaatgcagttatttccttttgcattcatgaggagatggaagaaatacccatatttgatggttggctgggaactgtctttggcrctgtatgaagtattttaatattgtaaacatgaaaagatgagaatcctggagaccccgtgggcatggagaaaaggaagtacattagagggtgttgtaggaaatattttcattccaggcactgctgtttaaactacccctaa

SEQ ID NO: 172785 - DNA, 605 bp, Homo sapiens
cttattttttaatcagattattattaccattattattattgtttttgcctttgatttgtatgagttccttacctatttttgacattaaccatctatcagatatatggtttgcagattttcttattttattgttttcttggctgtgaagaagctttttagtttgatgcagtccaacttgtttatatttgcttctgtttgctgtggtattcagaaattcattggcaagaccagtatcaagwtgttttttaaatgtgttttcttttaagattcttgagtatttatgtcttacatgtaggtctttattttcagttaatcatcaggtatgatgtaagattaatggtctaattttgttgttttgcttgtaggtattcagttttcccagcaccaagtatggaagggactatactttttcattgtgtattctgagtgcccctgtcaaagattagttggccttatatgcatggagttgtttctgggttctcccaatttttttgtccattcttgtgcatatatcatatggtttttattacaatagtcttcaaatgtagattgaaaccagaaagtataatgctcttagctttgttcttattcctcaagattgcttt

SEQ ID NO: 172786 - DNA, 278 bp, Homo sapiens
ttcttcttcttgctttataggagttttttagatatcacaatggttaatcttttgttatatgtgttacacatatttttctcctcatttgttacttgtcttttaattttgtttatagtgtctttayatagaggttttaatttacatggtcagatctttcacataaaaaaattcttcatctcaagattatcttttaaaaattttcatatattttatgtgaaaatttttttttcacactgagctctgtaggtttgtttggaatttccttttgtgtctagtgt

SEQ ID NO: 172787 - DNA, 278 bp, Homo sapiens
ttcttcttcttgctttataggagttttttagatatcacaatggttaatcttttgttatatgtgttacacatatttttctcctcatttgttacttgtcttttaattttgtttatagtgtctttacatagaggttttaayttacatggtcagatctttcacataaaaaaattcttcatctcaagattatcttttaaaaattttcatatattttatgtgaaaatttttttttcacactgagctctgtaggtttgtttggaatttccttttgtgtctagtgt

SEQ ID NO: 172788 - DNA, 278 bp, Homo sapiens
ttcttcttcttgctttataggagttttttagatatcacaatggttaatcttttgttatatgtgttacacatatttttctcctcatttgttacttgtcttttaattttgtttatagtgtctttacatagaggttttaatttacrtggtcagatctttcacataaaaaaattcttcatctcaagattatcttttaaaaattttcatatattttatgtgaaaatttttttttcacactgagctctgtaggtttgtttggaatttccttttgtgtctagtgt

SEQ ID NO: 172789 - DNA, 278 bp, Homo sapiens
ttcttcttcttgctttataggagttttttagatatcacaatggttaatcttttgttatatgtgttacacatatttttctcctcatttgttacttgtcttttaattttgtttatagtgtctttacatagaggttttaatttacatggtcagatctttcacataaaaaaattcttcatctcaagattatcttttaaaaattttcatrtattttatgtgaaaatttttttttcacactgagctctgtaggtttgtttggaatttccttttgtgtctagtgt

SEQ ID NO: 172790 - DNA, 349 bp, Homo sapiens
agattgctgtacaagtttttgtgtggacatatatttttatttctctgggatatatgcctaggagtgaaattgttgcattatacgacgactgtacatttagcattttgagacactgccagactgttttctaaagtggctacaccaaytgggtgcaatggctcacagctgtaatcctagctactcaggaggctcagttgtgaggatggcttgagcccatgagttcaagacaagcctgggcaagatagtgagaccctgtcttgatttttttaaaaatccagttaaaatgacaagaaaagaaatacccaagcaaagtggttacatgattttatgttcccaccagtaatgtatg

SEQ ID NO: 172791 - DNA, 383 bp, Homo sapiens
actttcctataagaggaggctttgacaactgttattaggagagaaatgtgacctgatttccattttagagccttcaacctggctgcctggtaagttgaaagttgagttggaagaratgcagattggaatcaggcagacagattaggaagctactgcaatagtccatgcaagaaatggcaataacctgaactgaggcagtggcataatgaaactggagaggaagggatggatggtaggtgatatggcttccctgtgtctccacccaaatctcatcttgaattgtaataatccccaggtgtcaagggtggggccatgtggagataattgaatcatggggggtggtttcccccatactgttctcatggtactgaataagtgtcatg

SEQ ID NO: 172792 - DNA, 383 bp, Homo sapiens
actttcctataagaggaggctttgacaactgttattaggagagaaatgtgacctgatttccattttagagccttcaacctggctgcctggtaagttgaaagttgagttggaagaaatgcagattggaatcaggcagacagattaggaagctactgcaatagtccatgcaagaaatggcaataacctgaactgaggcagtggcataatgaaactggagaggaagggatggatggtaggtgatatggyttccctgtgtctccacccaaatctcatcttgaattgtaataatccccaggtgtcaagggtggggccatgtggagataattgaatcatggggggtggtttcccccatactgttctcatggtactgaataagtgtcatg

SEQ ID NO: 172793 - DNA, 383 bp, Homo sapiens
cctgagtcttttgatggctttgggttttttgtttcactgtttacctttgagcctttgccattttcagagatgtcatggaaggccaccctctgatccctgcacaccagagagcccagcctgtagcctgcaggccttgtcctcctgaagtgccatcakgtggccgcgtgtgtgtgtgtgtgtgtgtgtgtgtgtgtgtgagtgtgtgtctctgtgtgtgtgaataggacatcacttctcgctcgctctgggtggctgtcaccatgattaaacaccgcctggtggcctcaatgcttgattggttgctaagcaccgtattcaggtcagacacatgttcataggtgtgttggggggggggcaacatgaaagctgtcctcgagcagctc

SEQ ID NO: 172794 - DNA, 383 bp, Homo sapiens
cctgagtcttttgatggctttgggttttttgtttcactgtttacctttgagcctttgccattttcagagatgtcatggaaggccaccctctgatccctgcacaccagagagcccagcctgtagcctgcaggccttgtcctcctgaagtgccatcatgtggccgygtgtgtgtgtgtgtgtgtgtgtgtgtgtgtgtgagtgtgtgtctctgtgtgtgtgaataggacatcacttctcgctcgctctgggtggctgtcaccatgattaaacaccgcctggtggcctcaatgcttgattggttgctaagcaccgtattcaggtcagacacatgttcataggtgtgttggggggggggcaacatgaaagctgtcctcgagcagctc

SEQ ID NO: 172795 - DNA, 383 bp, Homo sapiens
cctgagtcttttgatggctttgggttttttgtttcactgtttacctttgagcctttgccattttcagagatgtcatggaaggccaccctctgatccctgcacaccagagagcccagcctgtagcctgcaggccttgtcctcctgaagtgccatcatgtggccgcgtgtgtgtgtgtgtgtgtgtgtgtgtgtgtgtgagtgtgtgtctctgtgtgtgtgaataggacatcacttctcgctcgctctgggtggctgtcaccatgattaaacaccgcctggtggcctcaatgcttgattggttgctaagcaccgtattcrggtcagacacatgttcataggtgtgttggggggggggcaacatgaaagctgtcctcgagcagctc

SEQ ID NO: 172796 - DNA, 549 bp, Homo sapiens
aaataaacaagttatatatttcatttgttcgtgttttaataaaaccggaaaccactcactgtatacattatttttatatattcagacgaacactgaaaaagatgtagaaagatacgtactaaactgctaatattggttccctcaggccactgtgattagagtaggagatttctaacttgttctgtatcaatctctgtatttttggcttgttaataaccagtatctattrtcttgtatttgtaataaaaatatgatatactaaattcaaacaaagttctatattctaggcacaaccagatttttggataagtcaaatagccatatagtagatgcttgttgaatctaataataaacaccagcttcctttgcccttggataggatgattctgaggcatggtgttttactccgtttgccatttccctttcaggattaaactccttcagggttaaactccactgccacctgtgagaataggtctaataacgttctttttatgggctgctgttccctccctgtattactttcccacgttcctactgatatttcct

SEQ ID NO: 172797 - DNA, 501 bp, Homo sapiens
accaacagtgtaaaagcattcctatttctccacatgctctccagcatctgttgcaaaacaaacagtttatttcctatacaatttgctcattgtctataagattgggaaataaaggagaaaagtgtgacaagtgactaaataatttcagtgatgactaggacatttgtgaagtttatcagccaacaaaacataataaaattgagttggtccctagtctcccaaatatcccctctctgcagctctggagggctgtgacgtcaacgaggaataatggctcgygtccacggttctggttgttttctccttcagttttcacaattcttttttttttttttttttttttaagtgctaacctgctttctttctctctgccaggggtggatgtgattacaaagctcttctcagcctcaggtaaagattattgttacctgtggtcctgagagacctggctctatttctcaaaccttttgtatgtgtgctgggaaaccctagggttaaatg

SEQ ID NO: 172798 - DNA, 407 bp, Homo sapiens
ttgtatcccaaggttaaatcctacttgatagtatttatcaaggttaaatcctacttgataatgatggattagctttttaatgtgctgctgcatttagtttgctaggattttgttgaggatttttgcgtatatattcatcaaaaatataggcctgaagttttctttttttgttgggtcactgacaggttttgatatcagaatgatattgacttmataaaatgagtcaaagaggagttcctcctcttcaattttttgaagtagtttcagtagtaatggtactggctctttatacatcagttagaattcagctgtgaatatgtctggtcctgggttttttccggttagcaggcttttttaactgatgcgactttagaactcattattggtctgtttgggattcactttct

SEQ ID NO: 172799 - DNA, 421 bp, Homo sapiens
agaactggaacactcagacaaaataaggttgatggaattatttttaaattcataaaaatgggtatattttaatgcccttgaaatcattgctgattttattttatcactgttaaaagctattcaatttcagtactaattaaagaaacaaacaaaaataaaggcaccaatagatattttctcttctacattttcaaatatttattggccattaatgtcctctacatgggttgcyttataatattatattagagttacttaagagataccatataagtggacaaagattgtttctaaatctctgctattataattttatagcaatgattaccattgcatttaagactttatgtaattctcagtttttccattaaaataacttcctaaaggtaatattgttggccaaatggtatgtactttttaa

SEQ ID NO: 172800 - DNA, 421 bp, Homo sapiens
agaactggaacactcagacaaaataaggttgatggaattatttttaaattcataaaaatgggtatattttaatgcccttgaaatcattgctgattttattttatcactgttaaaagctattcaatttcagtactaattaaagaaacaaacaaaaataaaggcaccaatagatattttctcttctacattttcaaatatttattggccattaatgtcctctacatgggttgccttataatattatattagagttacttaagagataccatataagtggacaaagattgtttctaaatctctgctattataattttatagcaatgattaccattgcatttaagactttatgtaattctcagtttttccattaaaataacttcytaaaggtaatattgttggccaaatggtatgtactttttaa

SEQ ID NO: 172801 - DNA, 551 bp, Homo sapiens
gtgaaaatgctatgcctcacccataatttgaaaaagttgtaaaataaaattataaactgtgaatcatacattatacattatatacattatatatacatacatgcacattatatatacatatatacattatatacctatcagagtaaagtaacattggcatattcttgrcaataccaagtgctggctaggaaataaaaaaataggcactggtatttcttttgttgtcagtatcaactggagcaaacgtttcggaagctcatttgaatatatatttgccagttacactagcaatccatgaatctaggtagatgtactactttgccaagatataaatggaaggatatttatgggagcattgtttcaaatgtcatcaatctgtaaacaaaaacaaatttatctcaataaggctaattatattaattatggtagagtcttaaaatggaatactgtatagcctttaaagtagatgatgtgtatctatctgttgtgatatagaaatacctgtatagctaaaatgaattgttaattgaaaagtatgtggcataacaata

SEQ ID NO: 172802 - DNA, 560 bp, Homo sapiens
taaaacaaactccagcgtttcagtagatgtgtgcaagagaggtttatattttattcgcatagtagtccaatattgtttttcttgttcaacaagctgttttcttttatgtggtgaaacagggaaccagaatccttctactttggctttcactaggctctccttttaactaaaakcatgccttagttatacatgtcacttctattctcataacaagaattcattacgtggtcctacctacattcaaaggagatgggaatgggataaggtatggaaaatacagtccctggataggcagcttcttctcagcagcaactttttacaaataaattaaaacacagatagctaacaattatctctacaaaagtgactccctgtcattgctgaagctatttcttttagcatcagattcattcctaccttaatacgtctttcaaacagaacatcacataatttgagtggtactcaaaaacaaaataaccacaatttggtctggtattgtattgataacatttttgtgagattttcaacacaatattttcagtgccagagcaagggcagaa

SEQ ID NO: 172803 - DNA, 526 bp, Homo sapiens
ttcttctcctttttatttaattcaaaattcttatccgtccttctcaactcttacagggtctgtcaataagcttaatagaaataaatcggtttcacagaagtcaggctaaaagggttaacagtaaagacagatcctctgcactatctttttaccagggcctccracatattattgcagttgggttgtttagtgtgtcttgtccatgtacagctgtaactgggactttcgatcaatatattcctatgcttctcatttagttctctccctctttcttttaaatccaagtagatctcaaatataatatgtggaaactaaatctaaaaatgcttgtatgtctaaaaatgcccagctttgctttcatattatggagaatgtgggttggctagtttttttttttttttttcttcttcttttttttaaaagattccacagctcggatgatttctgtattgtcgctttatctcaagtgtttaaagtgttaagccagatatttagaaatctgactttttctttaatccttctctat

SEQ ID NO: 172804 - DNA, 526 bp, Homo sapiens
ttcttctcctttttatttaattcaaaattcttatccgtccttctcaactcttacagggtctgtcaataagcttaatagaaataaatcggtttcacagaagtcaggctaaaagggttaacagtaaagacagatcctctgcactatctttttaccagggcctccaacatattattgcagttgggttgtttagtgtgtcttgtccatgtacagctgtaactgggactttcgatcaatatattcctatgcttctcatttagttctctccctctttcttttaaatccaagtagatctcaaatataatatgtggaaactaaatctaaaaatgcttgtatgtctaaaaatgcccagctttgctttcatattatggagaatgtgggttggctagttttttttttttttyttcttcttcttttttttaaaagattccacagctcggatgatttctgtattgtcgctttatctcaagtgtttaaagtgttaagccagatatttagaaatctgactttttctttaatccttctctat

SEQ ID NO: 172805 - DNA, 521 bp, Homo sapiens
aacagcaccaaggggaggtgctaaaccttatgcatgagmaatccacctccatgatccagccacctcccacctatgcatgagaaatccacctccatgatccagccacctcccacctatgcatgagaaatccacctccatgatccagccacctcccacctatgcatgagaaatccacctccatgatccagccacctcccacctatgcatgagaaatccacctccatgatccagccacctcccacctatgcatgagaaatccacctccatgatccagccacctcccacctatgcatgagaaatccacctccatgatccagccacctcccaccaggtccccctccaacatagggactgcaatccgacatgagattttatggaaacacagatccaagctgtatcactcagcattcatataccaaagtatgtaagcatctgttgcagttattgaggatatacacaagtgaaaattcagttattattttaagatggcagatgcagacacaacttgtgcagtgacgttg

SEQ ID NO: 172806 - DNA, 416 bp, Homo sapiens
tcctgggttccagatgccacycaccatttctaaaactcattactaaactcctccccccagctccagagggtttactataatattttggatcaattcccatctgattggattctttgcccacctcatcctgggtcatctatgaggacagcctccaaaatcctcatttctcgcaccattgctttaaattacccattgagcccaaaactccagctcagccactgggctctcgccttcccaccctcgcagctggcccagcgaacgcggggctgtcgtggtgacttgaggacttctctcctgccttttcctgcagcgtcttctccctgaggaggcagcaggtctgtcttgcttgataaagtgaacaatttccttcatcttaagaagatgagggcaggagtgcgacagggaggcggcagacc

SEQ ID NO: 172807 - DNA, 416 bp, Homo sapiens
tcctgggttccagatgccactcaccatttctaaaactcattactaaactcctccccccagctccagagrgtttactataatattttggatcaattcccatctgattggattctttgcccacctcatcctgggtcatctatgaggacagcctccaaaatcctcatttctcgcaccattgctttaaattacccattgagcccaaaactccagctcagccactgggctctcgccttcccaccctcgcagctggcccagcgaacgcggggctgtcgtggtgacttgaggacttctctcctgccttttcctgcagcgtcttctccctgaggaggcagcaggtctgtcttgcttgataaagtgaacaatttccttcatcttaagaagatgagggcaggagtgcgacagggaggcggcagacc

SEQ ID NO: 172808 - DNA, 491 bp, Homo sapiens
cattgccaatgaaatgctgacccctgtcaggtccctaatgctaagggcactgatgggaaagaagcgggaccctgaaatatgggtcgacacagaggaggctgagaattgagaatgctgagcctcccaatcccttcatctcagccccctgcctgcttcctcctgcagaaacagctttcacttaaggtactgggacagttgtctctccagctgctgctgatcctgcaggcttcactctcatcacccctcacaacctccaggcaatggagagtctgattccagaaaatcccagatcgaaaagtacaaggctcactgtacacagccatcactgaaaatgtagtatgacttcatccatccctgtggcaggagtctgggaagaatcayggccacggactccaagggtgtcaggaggaggagaatggatcctaagggtgtcaggaggaggagaatggatcctaaggcttgctggagtccaacttcaggaaaaggaattc

SEQ ID NO: 172809 - DNA, 583 bp, Homo sapiens
gcaggtggtctgtggcctccccttggccctagtgcccccagcaccagggtagctggcccaggtggaggctgcattagacaccttcatggctccgagagggtggcatcttcatgggagtgtgagctgcctgccattagccccacaagaggctggcttgggtgtgcctgtctttgcctgttcaaaggggccaggctgtccaaacagacactggatcaaggacaagtgcagcacaggttaaaccactctcccgtcactgtagaatctcaccatggctcagggtaacttcccctggtgcatttctttctctatgtctagctcatcatatgagatataaaagaggaaaagacacaagctggttatctattgctgagtaacatattctctgaaaackcagtcttaaaacaacaatatcctaggctaggaattgggataggtacagttgagaaattctcctgtttcatgtggcatagggctaggtgcctcactggtctgcagttgccagctgagtggtctagagggctaagggcagctccctcctgtgtggcacctggcagagatggccggacagctggtctcacctgca

SEQ ID NO: 172810 - DNA, 599 bp, Homo sapiens
aagcttaggaaaggggtgatgtcctccctgggcttgacatgctgctgcttctctgcctgcatgaggtgactctgaggccaacacaccccccagtcctcattagcaccgaaggggaggctgaggactccagaaggccatgcagtgagtgagacatggctccaaggggtaggttgctggtgctcattccaggagagagcctgctgggaggaggtggttgaccgacagcccccagctcctgtgccttcaaggtccayggcagcttttcacagaggctgaggaccaagcatggccagtgggtgctggggcattgaacaaataaatgaaaagatgaatcctggagaaaggagctcctccctgggcagtctgaacgctggggccttctgcggagtgtggccaaggctctctcagagctgtaccgcagcctggggctcttcctgtcccctcctccctttctcaggtccctgagtcctgatctgagactcccccacctgccccacctcctttccctatgttccccaatggtgtttccctcaataaatctcctgcacacctcattccatctcagtgtctgcttcatggaggaccagaactgacacgct

SEQ ID NO: 172811 - DNA, 560 bp, Homo sapiens
tacctccaaggacagttttaaaatcccaaagtgcaggtatgtacggagcacctgttagaccaggcatttcacctggctgacaagtcatataattgctctgagcctcagagagactaagggatttgcccatacacatgcagctcatggaaaaactggaattcagacccgagtttccttccaccaggtccagagccttgggggaagcgtgggaaggtaagagggttgtgttggagtctgaggcgactgagctcagactccaggatggccaggtgtcagggcacgctctaaagtaacagtgactaaagcaacatgtggtgctgccacagagacagacatgaggctggagaaragaattcagagccttgagatagagccctgtcagatacatgaggagttaatcattcacaaatactcaagactaaataacggcgaaggggaaaataatttacaaaatgatgctgagatagctggagatcaattctgaaaagaaaaaagaagcatgtatattttgcatcatagactcatttaaacttagataaagatttgactataagaaatcc

SEQ ID NO: 172812 - DNA, 483 bp, Homo sapiens
ctcctctgctgagataaagacctctaggctctgcctcctgcactcgtctctgaacctgcctccctccttgagcctatgagcgctccctctgcccttcctgacagggcacatccaggagtgtgctcagacccccactgctttcatgtgtaagcctcctgaggacatgagcccttatcctagacccctccccaggctctcattgctgaccaggcccaggccttgtccctgcctgtctcagagtggagcccacaccatgcaggcagggagaggyaggatttggtggaagcagggagccacatgcctcactgtctacagaggacgtgagcctccctccagagtcagactcaggcccacgaactgggcagcaagaacgacagtgtgtgcccttcctgggcccccacctaggtctgaacagatgaaaccaaaccagctgcatggctgctggtggcagatgtagtctcttctaatggaccagcatccttg

SEQ ID NO: 172813 - DNA, 569 bp, Homo sapiens
gcaaacagcctgtctcctggaattatttgccaaaaccatcaaggcaattgttgaatgttgaggctttctgaggcagtagataacagttgacacaaataataagttaaccaaaaagcttaaaaggaaaagctgagaaattagatgtccttagggatagggacagtgaactgacattcttgggaatctagaagtccgtgcaggtgcatggggctgtgtgtacattcaggcctgggcacatgctcaaaaaagacctgagaagcccaagctctcacctctggctgacctgaagaatctgtacaacatgaagtgaaggctaaggtggaggtgtgaaccgcccagccaagagttgaaagtgtctcccccacacacagagcccatcagcaaagagtaggagacatacttgttccaggagtttaggaaatctctgttcaaacattagctgaccattaagctaacaaaacggaatgtcataaccacatgtgacaygtttgcattgtacattttactgaatttaagcaagtggagggtaatcatctatatcacagcgatacaatcagcaattaagtatt

SEQ ID NO: 172814 - DNA, 302 bp, Homo sapiens
tcagagtttaacttttcttttcattcagcrgtttggaaacactctgtttgtaaagtctgcacgtggatattttgaccacttagaggccttctttggaaacggttttttctcatgtaaggctagacagaagaattcccagtaacttccttgtgttgtgtgcattcaactcacagagttgaacgttcccttagacagagcagatttgaaacactctatttgtgcaatttgcaagtgtagatttcaagcgctttaaggtcaatggcagaaaaggaaatatcttcgtttcaaaactagacagaatc

SEQ ID NO: 172815 - DNA, 302 bp, Homo sapiens
tcagagtttaacttttcttttcattcagcagtttggaaacactctgtttgtaaagtctgcacgtggatattttgaccacttagaggccttctttggaaacggktttttctcatgtaaggctagacagaagaattcccagtaacttccttgtgttgtgtgcattcaactcacagagttgaacgttcccttagacagagcagatttgaaacactctatttgtgcaatttgcaagtgtagatttcaagcgctttaaggtcaatggcagaaaaggaaatatcttcgtttcaaaactagacagaatc

SEQ ID NO: 172816 - DNA, 524 bp, Homo sapiens
ttcaaaactagacagaatcattcccacaaactgcgttgtgatgtgttygttcaactcacagagtttaacctttctgttcatagagcagttaggaaacgctctgtttgtaaagtctgtaagtggatattctgacatcttgtggccttcgttggaaacgggatttcttcctattctgctagacagatgaattctcagtaacttccttgtgttgtgtgtattcaactcacagagttgaacgatcctttacacagagcagacttgaaacactctttttgtggaatttgcaagtggagatttcagccgctttgaggtcaatggtagaaaaggaaatatcttcgtatagaaacaagacagaatgattctcagaaactcctttgtgatgtgtgcgttcaactcacagagtttaacctttcttttcatagagcagttaggaaacactctgtttgtaaagtctgcaagtggatattcagacctccttgaggccttcgttggaaacgggatttcttcatattctgctagacaga

SEQ ID NO: 172817 - DNA, 524 bp, Homo sapiens
ttcaaaactagacagaatcattcccacaaactgcgttgtgatgtgtttgttcaactcacagagtttaacctttctgttcatagagcagttaggaaacrctctgtttgtaaagtctgtaagtggatattctgacatcttgtggccttcgttggaaacgggatttcttcctattctgctagacagatgaattctcagtaacttccttgtgttgtgtgtattcaactcacagagttgaacgatcctttacacagagcagacttgaaacactctttttgtggaatttgcaagtggagatttcagccgctttgaggtcaatggtagaaaaggaaatatcttcgtatagaaacaagacagaatgattctcagaaactcctttgtgatgtgtgcgttcaactcacagagtttaacctttcttttcatagagcagttaggaaacactctgtttgtaaagtctgcaagtggatattcagacctccttgaggccttcgttggaaacgggatttcttcatattctgctagacaga

SEQ ID NO: 172818 - DNA, 432 bp, Homo sapiens
agagcagttaggaaacgctctgtttgtaaagtctgtaagtggatattctgacatcttgtggccttcgttggaaacgggatttcttcctattctgctagacagatkaattctcagtaacttccttgtgttgtgtgtattcaactcacagagttgaacgatcctttacacagagcagacttgaaacactctttttgtggaatttgcaagtggagatttcagccgctttgaggtcaatggtagaaaaggaaatatcttcgtatagaaacaagacagaatgattctcagaaactcctttgtgatgtgtgcgttcaactcacagagtttaacctttcttttcatagagcagttaggaaacactctgtttgtaaagtctgcaagtggatattcagacctccttgaggccttcgttggaaacgggatttcttcatattc

SEQ ID NO: 172819 - DNA, 313 bp, Homo sapiens
gaattctcagtaacttccttgtgttgtgtktattcaactcacagagttgaacgatcctttacacagagcagacttgaaacactctttttgtggaatttgcaagtggagatttcagccgctttgaggtcaatggtagaaaaggaaatatcttcgtatagaaacaagacagaatgattctcagaaactcctttgtgatgtgtgcgttcaactcacagagtttaacctttcttttcatagagcagttaggaaacactctgtttgtaaagtctgcaagtggatattcagacctccttgaggccttcgttggaaacgg

SEQ ID NO: 172820 - DNA, 313 bp, Homo sapiens
gaattctcagtaacttccttgtgttgtgtgtattcaactcacagagttgaaygatcctttacacagagcagacttgaaacactctttttgtggaatttgcaagtggagatttcagccgctttgaggtcaatggtagaaaaggaaatatcttcgtatagaaacaagacagaatgattctcagaaactcctttgtgatgtgtgcgttcaactcacagagtttaacctttcttttcatagagcagttaggaaacactctgtttgtaaagtctgcaagtggatattcagacctccttgaggccttcgttggaaacgg

SEQ ID NO: 172821 - DNA, 432 bp, Homo sapiens
agagcagttaggaaacgctctgtttgtaaagtctgtaagtggatattctgacatcttgtggccttcgttggaaacgggatttcttcctattctgctagacagatgaattctcagtaacttccttgtgttgtgtgtattcaactcacagagttgaacgatcctttacasagagcagacttgaaacactctttttgtggaatttgcaagtggagatttcagccgctttgaggtcaatggtagaaaaggaaatatcttcgtatagaaacaagacagaatgattctcagaaactcctttgtgatgtgtgcgttcaactcacagagtttaacctttcttttcatagagcagttaggaaacactctgtttgtaaagtctgcaagtggatattcagacctccttgaggccttcgttggaaacgggatttcttcatattc

SEQ ID NO: 172822 - DNA, 432 bp, Homo sapiens
agagcagttaggaaacgctctgtttgtaaagtctgtaagtggatattctgacatcttgtggccttcgttggaaacgggatttcttcctattctgctagacagatgaattctcagtaacttccttgtgttgtgtgtattcaactcacagagttgaacgatcctttacacagagcagmcttgaaacactctttttgtggaatttgcaagtggagatttcagccgctttgaggtcaatggtagaaaaggaaatatcttcgtatagaaacaagacagaatgattctcagaaactcctttgtgatgtgtgcgttcaactcacagagtttaacctttcttttcatagagcagttaggaaacactctgtttgtaaagtctgcaagtggatattcagacctccttgaggccttcgttggaaacgggatttcttcatattc

SEQ ID NO: 172823 - DNA, 287 bp, Homo sapiens
gaattctcagtaacttccttgtgttgtgtgtattcaactcacagagttgaacgatcctttacacagagcagacttgaaacactctttttgtggaatttgcaagtggagatttcagccgctttgaggtcaatggtagaawaggaaatatcttcgtatagaaacaagacagaatgattctcagaaactcctttgtgatgtgtgcgttcaactcacagagtttaacctttcttttcatagagcagttaggaaacactctgtttgtaaagtctgcaagtggatattcagac

SEQ ID NO: 172824 - DNA, 313 bp, Homo sapiens
gaattctcagtaacttccttgtgttgtgtgtattcaactcacagagttgaacgatcctttacacagagcagacttgaaacactctttttgtggaatttgcaagtggagatttcagccgctttgaggtcaatggtagaaaagkaaatatcttcgtatagaaacaagacagaatgattctcagaaactcctttgtgatgtgtgcgttcaactcacagagtttaacctttcttttcatagagcagttaggaaacactctgtttgtaaagtctgcaagtggatattcagacctccttgaggccttcgttggaaacgg

SEQ ID NO: 172825 - DNA, 287 bp, Homo sapiens
gaattctcagtaacttccttgtgttgtgtgtattcaactcacagagttgaacgatcctttacacagagcagacttgaaacactctttttgtggaatttgcaagtggagatttcagccgctttgaggtcaatggtagaaaaggaaatatcttcgtatagaaacwagacagaatgattctcagaaactcctttgtgatgtgtgcgttcaactcacagagtttaacctttcttttcatagagcagttaggaaacactctgtttgtaaagtctgcaagtggatattcagac

SEQ ID NO: 172826 - DNA, 313 bp, Homo sapiens
gaattctcagtaacttccttgtgttgtgtgtattcaactcacagagttgaacgatcctttacacagagcagacttgaaacactctttttgtggaatttgcaagtggagatttcagccgctttgaggtcaatggtagaaaaggaaatatcttcgtatagaaacaagacagaatgattctcagaaactcctttgtgatgtgtgygttcaactcacagagtttaacctttcttttcatagagcagttaggaaacactctgtttgtaaagtctgcaagtggatattcagacctccttgaggccttcgttggaaacgg

SEQ ID NO: 172827 - DNA, 313 bp, Homo sapiens
gaattctcagtaacttccttgtgttgtgtgtattcaactcacagagttgaacgatcctttacacagagcagacttgaaacactctttttgtggaatttgcaagtggagatttcagccgctttgaggtcaatggtagaaaaggaaatatcttcgtatagaaacaagacagaatgattctcagaaactcctttgtgatgtgtgcgttcaactcacagagtttaacctttctkttcatagagcagttaggaaacactctgtttgtaaagtctgcaagtggatattcagacctccttgaggccttcgttggaaacgg

SEQ ID NO: 172828 - DNA, 313 bp, Homo sapiens
gaattctcagtaacttccttgtgttgtgtgtattcaactcacagagttgaacgatcctttacacagagcagacttgaaacactctttttgtggaatttgcaagtggagatttcagccgctttgaggtcaatggtagaaaaggaaatatcttcgtatagaaacaagacagaatgattctcagaaactcctttgtgatgtgtgcgttcaactcacagagtttaacctttcttttcatagagcagttaggaaacactctgtttgtaaagtmtgcaagtggatattcagacctccttgaggccttcgttggaaacgg

SEQ ID NO: 172829 - DNA, 307 bp, Homo sapiens
agaattctcagtcacttccttgtgttgtgtgtattcaactgacagagttgaactttcatttagagagagcasatttgaaacactgtttttgtggaatttgcaagtggagatttcaagcgctttggggccaaaggcagaaaaggatatatcttcgtataaaaactggacagaatcattctcagaaactgctgcgtgatgtgtgcgttcaactctcagagtttaacttttcttttcattcagcggtttggaaacactctgtttgtaaagtctgcacgtggatattttgaccacttagaggccttcgttg

SEQ ID NO: 172830 - DNA, 321 bp, Homo sapiens
gaattctcagtcacttccttgtgttgtgtgtattcaactgacagagttgaactttcatttagagagagcagatttgaaacactgtttttgtggaatttgcaaktggagatttcaagcgctttggggccaaaggcagaaaaggatatatcttcgtataaaaactggacagaatcattctcagaaactgctgcgtgatgtgtgcgttcaactctcagagtttaacttttcttttcattcagcggtttggaaacactctgtttgtaaagtctgcacgtggatattttgaccacttagaggccttcgttggaaacgggttttttt

SEQ ID NO: 172831 - DNA, 342 bp, Homo sapiens
agtcacttccttgtgttgtgtgtattcaactgacagagttgaactttcatttagagagagcagatttgaaacactgtttttgtggaatttgcaagtggagatttcaagcgctttggggccaaaggcagaaaaggawatatcttcgtataaaaactggacagaatcattctcagaaactgctgcgtgatgtgtgcgttcaactctcagagtttaacttttcttttcattcagcggtttggaaacactctgtttgtaaagtctgcacgtggatattttgaccacttagaggccttcgttggaaacgggtttttttcatgtaaggctagacagaagaattcccag

SEQ ID NO: 172832 - DNA, 342 bp, Homo sapiens
agtcacttccttgtgttgtgtgtattcaactgacagagttgaactttcatttagagagagcagatttgaaacactgtttttgtggaatttgcaagtggagatttcaagcgctttggggccaaaggcagaaaaggatatatcttcgtataaaaactrgacagaatcattctcagaaactgctgcgtgatgtgtgcgttcaactctcagagtttaacttttcttttcattcagcggtttggaaacactctgtttgtaaagtctgcacgtggatattttgaccacttagaggccttcgttggaaacgggtttttttcatgtaaggctagacagaagaattcccag

SEQ ID NO: 172833 - DNA, 342 bp, Homo sapiens
agtcacttccttgtgttgtgtgtattcaactgacagagttgaactttcatttagagagagcagatttgaaacactgtttttgtggaatttgcaagtggagatttcaagcgctttggggccaaaggcagaaaaggatatatcttcgtataaaaactggacagaatcmttctcagaaactgctgcgtgatgtgtgcgttcaactctcagagtttaacttttcttttcattcagcggtttggaaacactctgtttgtaaagtctgcacgtggatattttgaccacttagaggccttcgttggaaacgggtttttttcatgtaaggctagacagaagaattcccag

SEQ ID NO: 172834 - DNA, 342 bp, Homo sapiens
agtcacttccttgtgttgtgtgtattcaactgacagagttgaactttcatttagagagagcagatttgaaacactgtttttgtggaatttgcaagtggagatttcaagcgctttggggccaaaggcagaaaaggatatatcttcgtataaaaactggacagaatcattctcagaaactgctgcgtgatgtgtgcgttcaactctcasagtttaacttttcttttcattcagcggtttggaaacactctgtttgtaaagtctgcacgtggatattttgaccacttagaggccttcgttggaaacgggtttttttcatgtaaggctagacagaagaattcccag

SEQ ID NO: 172835 - DNA, 307 bp, Homo sapiens
agaattctcagtcacttccttgtgttgtgtgtattcaactgacagagttgaactttcatttagagagagcagatttgaaacactgtttttgtggaatttgcaagtggagatttcaagcgctttggggccaaaggcagaaaaggatatatcttcgtataaaaactggacagaatcattctcagaaactgctgcgtgatgtgtgcgttcaactctcagagtttaacttttcttttcattcagcggtttggaaacactctgtttgkaaagtctgcacgtggatattttgaccacttagaggccttcgttg

SEQ ID NO: 172836 - DNA, 307 bp, Homo sapiens
agaattctcagtcacttccttgtgttgtgtgtattcaactgacagagttgaactttcatttagagagagcagatttgaaacactgtttttgtggaatttgcaagtggagatttcaagcgctttggggccaaaggcagaaaaggatatatcttcgtataaaaactggacagaatcattctcagaaactgctgcgtgatgtgtgcgttcaactctcagagtttaacttttcttttcattcagcggtttggaaacactctgtttgtaaagwctgcacgtggatattttgaccacttagaggccttcgttg

SEQ ID NO: 172837 - DNA, 429 bp, Homo sapiens
cttcgtttcaaaactacacagaatcattcccacaaactgcgttgtgatgtgttcgttcaactcacagagtttaacctttctgttcatagagcagttaggaaacactstgtttgtaaagtctgtaagtggatattctgacatcttgtggccttcgttggaaacgggatttcttcattttctgctagacagaagaattctcagtaacttccttgtgttgtgtgtattcaactcacagagttgaacgatgctttacacagagcagacttgaaacactctttttgtggaatttgcaagtggagatttcagccgctttgaggtcaatggtagaaaaggaaatatgttcgtaaagaaacaagacagaatgattctcagaaactcctttgtgatgtgtgcgttcaactcacagagtttaacctttcttttcataga

SEQ ID NO: 172838 - DNA, 429 bp, Homo sapiens
cttcgtttcaaaactacacagaatcattcccacaaactgcgttgtgatgtgttcgttcaactcacagagtttaacctttctgttcatagagcagttaggaaacactgtgtttgtaaagtctgtaagtggatattctgacatcttgtggccttcgttggaaacgggatttcttcatwttctgctagacagaagaattctcagtaacttccttgtgttgtgtgtattcaactcacagagttgaacgatgctttacacagagcagacttgaaacactctttttgtggaatttgcaagtggagatttcagccgctttgaggtcaatggtagaaaaggaaatatgttcgtaaagaaacaagacagaatgattctcagaaactcctttgtgatgtgtgcgttcaactcacagagtttaacctttcttttcataga

SEQ ID NO: 172839 - DNA, 189 bp, Homo sapiens
ttaacctttcttttcatagagcagttaggaaacacwctgtttgtaaagtctgcaagtggatattcagacctctttgaggctttcgttggaaacgggatttcttcatattctgctagacagaagaattctcagaaacttccttgtgttgtgtgtattcaactcacagagttgaatgatcctttacacaga

SEQ ID NO: 172840 - DNA, 327 bp, Homo sapiens
tcctttgtgatgtgtgcgttcaactcacagagtttaacctttcttttcatagagcagttaggaaacacactgtttgtaaagtctgcaagtggatattcagacctctttgaggctttcgttggaaacgggatttcttcatattctgctagacagaagaattctcagwaacttccttgtgttgtgtgtattcaactcacagagttgaatgatcctttacacagagcagacttgaaacactctttttgtggaatttgcaagtggagatttcagccgctttgaggtcaattgtagaaaaagaaatatcttcgtataaaaattagacagaat

SEQ ID NO: 172841 - DNA, 327 bp, Homo sapiens
tcctttgtgatgtgtgcgttcaactcacagagtttaacctttcttttcatagagcagttaggaaacacactgtttgtaaagtctgcaagtggatattcagacctctttgaggctttcgttggaaacgggatttcttcatattctgctagacagaagaattctcagaaacttccttgtgttgtgtgtattcaactcacagagttgaatgatcctttacacagagcagacttgaaacactctttttgtggaatttgcaagtggagatttcagccgctttgaggtcaatwgtagaaaaagaaatatcttcgtataaaaattagacagaat

SEQ ID NO: 172842 - DNA, 207 bp, Homo sapiens
aggctttcgttggaaacgggatttcttcatattctgctagamagaagaattctcagaaacttacttgtgttgtgtgtattcaactcacagagttgaatgatcctttacacagagcagacttgaaacactctttttgtggaatttgcaagtggagatttcagccgctttgaggtcaatggtagaataggaaatatcttcctatggaaa

SEQ ID NO: 172843 - DNA, 200 bp, Homo sapiens
gaattctcagaaacttacttgtgttgtgtgtattcamctcacagagttgaatgatcctttacacagagcagacttgaaacactctttttgtggaatttgcaagtggagatttcagccgctttgaggtcaatggtagaataggaaatatcttcctatggaaactagacagaatgattctcagaaactcctttgtgatgtgt

SEQ ID NO: 172844 - DNA, 316 bp, Homo sapiens
tattcaactcacagagttgaatgatcctttacacagagcagacttgaaacaytctttttgtggaatttgcaagtggagatttcagccgctttgaggtcaatggtagaataggaaatatcttcctatggaaactagacagaatgattctcagaaactcctttgtgatgtgtgcgttcaactcacagagtttaaccttttttttcaaagagcagttaggaaacactctgtttgtaaagtctgcaagtggatattcagacctctttgaggctttcgttggaaacgggatttcttcatattctgctagacagaagaattc

SEQ ID NO: 172845 - DNA, 373 bp, Homo sapiens
taacctgtcttttcatagagcagttaggaaacactctgtttgtaaagtctgcaagtggatattcagacctctttgaggctttcgttggaaacgggatttcttcatattctgctagacagaagaattctcagaaacttacttgtgttgtgtgtattcaactcacagagttgaatgatcctttacacagagcagacttgaaacactctttttstggaatttgcaagtggagatttcagccgctttgaggtcaatggtagaataggaaatatcttcctatggaaactagacagaatgattctcagaaactcctttgtgatgtgtgcgttcaactcacagagtttaaccttttttttcaaagagcagttaggaaaca

SEQ ID NO: 172846 - DNA, 415 bp, Homo sapiens
tctgcaagtggatattcagacctctttgaggctttcgttggaaacgggatttcttcatattctgctagacagaagaattctcagaaacttacttgtgttgtgtgtattcaactcacagagttgaatgatcctttacacagagcagacttgaaacactctttttgtsgaatttgcaagtggagatttcagccgctttgaggtcaatggtagaataggaaatatcttcctatggaaactagacagaatgattctcagaaactcctttgtgatgtgtgcgttcaactcacagagtttaaccttttttttcaaagagcagttaggaaacactctgtttgtaaagtctgcaagtggatattcagacctctttgaggctttcgttggaaacgggatttcttcatattctgctagacagaag

SEQ ID NO: 172847 - DNA, 403 bp, Homo sapiens
ctcagaaacttacttgtgttgtgtgtattcaactcacagagttgaatgatcctttacacagagcagacttgaaacactctttttgtggaatttgcawgtggagatttcagccgctttgaggtcaatggtagaataggaaatatcttcctatggaaactagacagaatgattctcagaaactcctttgtgatgtgtgcgttcaactcacagagtttaaccttttttttcaaagagcagttaggaaacactctgtttgtaaagtctgcaagtggatattcagacctctttgaggctttcgttggaaacgggatttcttcatattctgctagacagaagaattctcagaaacttccttctgttgtgtgtattcaactcacagagttgaacgatcctttacacagag

SEQ ID NO: 172848 - DNA, 168 bp, Homo sapiens
ctttacacagagcagacttgaaacactctttttgtggaatttgcaagtggagatttcagccgctttgaggtsaatggtagaataggaaatatcttcctatggaaactagacagaatgattctcagaaactcctttgtgatgtgtgcgttcaactcacagagtttaacc

SEQ ID NO: 172849 - DNA, 168 bp, Homo sapiens
ctttacacagagcagacttgaaacactctttttgtggaatttgcaagtggagatttcagccgctttgaggtcaatggtagaataggaaatatcttcytatggaaactagacagaatgattctcagaaactcctttgtgatgtgtgcgttcaactcacagagtttaacc

SEQ ID NO: 172850 - DNA, 315 bp, Homo sapiens
tattcaactcacagagttgaatgatcctttacacagagcagacttgaaacactctttttgtggaatttgcaagtggagatttcagccgctttgaggtcaatggtagaataggaaatatcttcctatggaaactagacagaatgattctcakaaactcctttgtgatgtgtgcgttcaactcacagagtttaaccttttttttcaaagagcagttaggaaacactctgtttgtaaagtctgcaagtggatattcagacctctttgaggctttcgttggaaacgggatttcttcatattctgctagacagaagaatt

SEQ ID NO: 172851 - DNA, 399 bp, Homo sapiens
gaaacttacttgtgttgtgtgtattcaactcacagagttgaatgatcctttacacagagcagacttgaaacactctttttgtggaatttgcaagtggagatttcagccgctttgaggtcaatggtagaataggaaatatcttcctatggaaactagacagaatgattctcagaaactcctttgtgatgtgtgcgttcaactcacasagtttaaccttttttttcaaagagcagttaggaaacactctgtttgtaaagtctgcaagtggatattcagacctctttgaggctttcgttggaaacgggatttcttcatattctgctagacagaagaattctcagaaacttccttctgttgtgtgtattcaactcacagagttgaacgatcctttacacagag

SEQ ID NO: 172852 - DNA, 361 bp, Homo sapiens
tgaatgatcctttacacagagcagacttgaaacactctttttgtggaatttgcaagtggagatttcagccgctttgaggtcaatggtagaataggaaatatcttcctatggaaactagacagaatgattctcagaaactcctttgtgatgtgtgcgttcaactcacagagtttamccttttttttcaaagagcagttaggaaacactctgtttgtaaagtctgcaagtggatattcagacctctttgaggctttcgttggaaacgggatttcttcatattctgctagacagaagaattctcagaaacttccttctgttgtgtgtattcaactcacagagttgaacgatcctttacacagag

SEQ ID NO: 172853 - DNA, 291 bp, Homo sapiens
gaattctcagaaacttacttgtgttgtgtgtattcaactcacagagttgaatgatcctttacacagagcagacttgaaacactctttttgtggaatttgcaagtggagatttcagccgctttgaggtcaatggtagaataggaaatatcttcctatggaaactagacagaatgattctcagaaactcctttgtgatgtgtgcgttcaactcacagagtttaacctttyttttcaaagagcagttaggaaacactctgtttgtaaagtctgcaagtggatattcagacctct

SEQ ID NO: 172854 - DNA, 392 bp, Homo sapiens
gtgcgttcaactcacagagtttaaccttttttttcaaagagcagttaggaaacactctgtttgtaaagtctgcaagtggatattcagacctctttgaggcyttcgttggaaacgggatttcttcatattctgctagacagaagaattctcagaaacttccttctgttgtgtgtattcaactcacagagttgaacgatcctttacacagagcagacttgaaacactctttttgtggaatttgcaagtggagatttcagccgctttgtggtcaatggtagaaaaggaaatatcttcgaataaagactagacagaatgattctcagaaactcctttgtgatgtgtgcgttcaactcacagagtttgacctttcttttcacagagcagttaggaaa

SEQ ID NO: 172855 - DNA, 403 bp, Homo sapiens
ctcagaaacttacttgtgttgtgtgtattcaactcacagagttgaatgatcctttacacagagcagacttgaaacactctttttgtggaatttgcaagtggagatttcagccgctttgaggtcaatggtagaataggaaatatcttcctatggaaactagacagaatgattctcagaaactcctttgtgatgtgtgcgttcaactcacagagtttaaccttttttttcaaagagcagttaggaaacactctgtttgtaaagtctgcaagtggatattcagacctctttgaggctttcgttggaaacgggatttcttcatrttctgctagacagaagaattctcagaaacttccttctgttgtgtgtattcaactcacagagttgaacgatcctttacacagag

SEQ ID NO: 172856 - DNA, 345 bp, Homo sapiens
gatgtgtgcgttcaactcacagagtttaaccttttttttcaaagagcagttaggaaacactctgtttgtaaagtctgcaagtggatattcagacctctttgaggctttcgttggaaacgggatttcttcatattctgctagacagaagaattctcagaaacttccttstgttgtgtgtattcaactcacagagttgaacgatcctttacacagagcagacttgaaacactctttttgtggaatttgcaagtggagatttcagccgctttgtggtcaatggtagaaaaggaaatatcttcgaataaagactagacagaatgattctcagaaactcctttgtgatgt

SEQ ID NO: 172857 - DNA, 558 bp, Homo sapiens
agtctgcaagtggatattcagacctctttgaggctttcgttggaaacgggatttcttcatattctgctagacagaagaattctcagaaacttccttctgttgtgtgtattcaactcacagagttgaacgatcctttacacagagcagacttgaaacactctttttgtggaatttgcaagtggagatttcagccgctttgtggtcaatggtagaaaaggaaatatcttcgaataaagactagacagaatgattctcagaaactcctttgtgatgtgtgcgttcaactcacagagtttgacytttcttttcacagagcagttaggaaacactctgtttgtaaagtctgcaagtggatattcagacctctttgaggccatcgttggaaacgggatttcttcatattctgctagacagaagaattctcagaaacttccttgtgttgtgtgtattcaactcacagagttgaacgatcctttacacagagcagacttgaaacactctctttgtggaatttgcaagtggagatttcagccgctttgtggtcaatggtagaaaagg

SEQ ID NO: 172858 - DNA, 558 bp, Homo sapiens
agtctgcaagtggatattcagacctctttgaggctttcgttggaaacgggatttcttcatattctgctagacagaagaattctcagaaacttccttctgttgtgtgtattcaactcacagagttgaacgatcctttacacagagcagacttgaaacactctttttgtggaatttgcaagtggagatttcagccgctttgtggtcaatggtagaaaaggaaatatcttcgaataaagactagacagaatgattctcagaaactcctttgtgatgtgtgcgttcaactcacagagtttgacctttcttttcacagagcagttaggaaacactctgtttgtaaagtctgcaagtggatattcagacctctttgaggccwtcgttggaaacgggatttcttcatattctgctagacagaagaattctcagaaacttccttgtgttgtgtgtattcaactcacagagttgaacgatcctttacacagagcagacttgaaacactctctttgtggaatttgcaagtggagatttcagccgctttgtggtcaatggtagaaaagg

SEQ ID NO: 172859 - DNA, 558 bp, Homo sapiens
agtctgcaagtggatattcagacctctttgaggctttcgttggaaacgggatttcttcatattctgctagacagaagaattctcagaaacttccttctgttgtgtgtattcaactcacagagttgaacgatcctttacacagagcagacttgaaacactctttttgtggaatttgcaagtggagatttcagccgctttgtggtcaatggtagaaaaggaaatatcttcgaataaagactagacagaatgattctcagaaactcctttgtgatgtgtgcgttcaactcacagagtttgacctttcttttcacagagcagttaggaaacactctgtttgtaaagtctgcaagtggatattcagacctctttgaggccatcgttggaaacgggatttcttcatattctgctagacagaagaattctcagaaacttccttgtgttgtgtgtattcaactcacagagttgaacgatcctttacasagagcagacttgaaacactctctttgtggaatttgcaagtggagatttcagccgctttgtggtcaatggtagaaaagg

SEQ ID NO: 172860 - DNA, 312 bp, Homo sapiens
agaattcccagtaacttccttgtgttgtgtgcattcaactcacagagttgaacgttcccttagacagagcagatttgaaacactctatttgwgcaatttgcaagtgtagatttcaagcgctttaaggtcaatggcagaaaaggaaatatcttcgtttcaaaactagacagaatcattcccacaaactgcgttgtgatgtgttcgttcaacacacagagtttaacctttctgttcatagagcagttaggaaacactctgtttgtaaagtctgtaagtggatattctgatatcttgtggccttcgttggaaacg

SEQ ID NO: 172861 - DNA, 200 bp, Homo sapiens
atagatattttgaccacttagaggccttcgttggaaacgtgtttttttcatgtcaggctagacagaagaattcccagtaacttccttgtgttgtgtgcattcaactcacagagttgaacgttcccttagacagagcagatttgaaacactctatttgtgyaatttgcaagtgtagatttcaagcgctttaaggtcaatgg

SEQ ID NO: 172862 - DNA, 311 bp, Homo sapiens
gaattcccagtaacttccttgtgttgtgtgcattcaactcacagagttgaacgttcccttagacagagcagatttgaaacactctatttgtgcaatttgcaagtgtagatttcaagcgctttaaggtcaatggcmgaaaaggaaatatcttcgtttcaaaactagacagaatcattcccacaaactgcgttgtgatgtgttcgttcaacacacagagtttaacctttctgttcatagagcagttaggaaacactctgtttgtaaagtctgtaagtggatattctgatatcttgtggccttcgttggaaacg

SEQ ID NO: 172863 - DNA, 312 bp, Homo sapiens
agaattcccagtaacttccttgtgttgtgtgcattcaactcacagagttgaacgttcccttagacagagcagatttgaaacactctatttgtgcaatttgcaagtgtagatttcaagcgctttaaggtcaatggcagaaaaggaaatatcttcgtttcaaaactagacagaatcattcccacaaactgcgttgtgatgtgttcgttcaacacacagagtttaacctttctgttcatagagcagttaggaaacactctgtttgtaaagtctgtaagtggatattctsatatcttgtggccttcgttggaaacg

SEQ ID NO: 172864 - DNA, 312 bp, Homo sapiens
agaattcccagtaacttccttgtgttgtgtgcattcaactcacagagttgaacgttcccttagacagagcagatttgaaacactctatttgtgcaatttgcaagtgtagatttcaagcgctttaaggtcaatggcagaaaaggaaatatcttcgtttcaaaactagacagaatcattcccacaaactgcgttgtgatgtgttcgttcaacacacagagtttaacctttctgttcatagagcagttaggaaacactctgtttgtaaagtctgtaagtggatattctgayatcttgtggccttcgttggaaacg

SEQ ID NO: 172865 - DNA, 412 bp, Homo sapiens
tcacttccttgtgttgtgtgtattcaactgacagagttgaactttcatttagagagagcagatttgaaacactgtttttgtggaatttgcaagtggagatttcaagcgctttggggccaaaggcagaaaaggatatatcttcgtataacaactggacagaatcattctcagaaactgctgygtgatgtgtgcgttcaactctcagagtttaacttttcttttcattcagcggtttggaaacactctgtttgtaaagtctgcacgtggatattttgaccacttagaggccttcgttggaaacgggtttttttcatgtaaggctagacagaagaattcccagtaacttccttgtgttgtgtgcattcaactcacagagttgaacgttcccttagacagagcagatttgaaacac

SEQ ID NO: 172866 - DNA, 445 bp, Homo sapiens
gctgcgtgatgtgtgcgttcaactctcagagtttaacttttsttttcattcagcggtttggaaacactctgtttgtaaagtctgcacgtggatattttgaccacttagaggccttcgttggaaacgggtttttttcatgtaaggctagacagaagaattcccagtaacttccttgtgttgtgtgcattcaactcacagagttgaacgttcccttagacagagcagatttgaaacactctatttgtgcaatttgcaagtgtagatttcaagcgctttaaggtcaatggcagaaaaggaaatatcttcgtttcaaaactacacagaatcattcccacaaactgcgttgtgatgtgttcgttcaactcacagagtttaacctttctgttcatagagcagttaggaaacactgtgtttgtaaagtctgtaagtggatattctgacatct

SEQ ID NO: 172867 - DNA, 235 bp, Homo sapiens
tgaaacactgtttttgtggaatttgcaagtggagatttcaagcgctttggggccaaaggcagaaaaggatatatcttcgtataacaactggacagaatcattctcagaaactgctgcgtgatgtgtgcgttcaactctcagagtttaacttttcttttcattcagcrgtttggaaacactctgtttgtaaagtctgcacgtggatattttgaccacttagaggccttcgttggaa

SEQ ID NO: 172868 - DNA, 528 bp, Homo sapiens
gagagagcagatttgaaacactgtttttgtggaatttgcaagtggagatttcaagcgctttggggccaaaggcagaaaaggatatatcttcgtataacaactggacagaatcattctcagaaactgctgcgtgatgtgtgcgttcaactctcagagtttaacttttcttttcattcagcggtttggaaacactctgtttgtaaagwctgcacgtggatattttgaccacttagaggccttcgttggaaacgggtttttttcatgtaaggctagacagaagaattcccagtaacttccttgtgttgtgtgcattcaactcacagagttgaacgttcccttagacagagcagatttgaaacactctatttgtgcaatttgcaagtgtagatttcaagcgctttaaggtcaatggcagaaaaggaaatatcttcgtttcaaaactacacagaatcattcccacaaactgcgttgtgatgtgttcgttcaactcacagagtttaacctttctgttcatagagcagttaggaa

SEQ ID NO: 172869 - DNA, 470 bp, Homo sapiens
cttcgtataacaactggacagaatcattctcagaaactgctgcgtgatgtgtgcgttcaactctcagagtttaacttttcttttcattcagcggtttggaaacactctgtttgtaaagtctgcacgtggawattttgaccacttagaggccttcgttggaaacgggtttttttcatgtaaggctagacagaagaattcccagtaacttccttgtgttgtgtgcattcaactcacagagttgaacgttcccttagacagagcagatttgaaacactctatttgtgcaatttgcaagtgtagatttcaagcgctttaaggtcaatggcagaaaaggaaatatcttcgtttcaaaactacacagaatcattcccacaaactgcgttgtgatgtgttcgttcaactcacagagtttaacctttctgttcatagagcagttaggaaacactgtgtttgtaaagtctgtaagtgga

SEQ ID NO: 172870 - DNA, 412 bp, Homo sapiens
tcacttccttgtgttgtgtgtattcaactgacagagttgaactttcatttagagagagcagatttgaaacactgtttttgtggaatttgcaagtggagatttcaagcgctttggggccaaaggcagaaaaggatatatcttcgtataacaactggacagaatcattctcagaaactgctgcgtgatgtgtgcgttcaactctcagagtttaacttttcttttcattcagcggtttggaaacactctgtttgtaaagtctgcacgtggatattttgaccacttagaggccttcgttggaaamgggtttttttcatgtaaggctagacagaagaattcccagtaacttccttgtgttgtgtgcattcaactcacagagttgaacgttcccttagacagagcagatttgaaacac

SEQ ID NO: 172871 - DNA, 372 bp, Homo sapiens
ttaacttttcttttcattcagcggtttggaaacactctgtttgtaaagtctgcacgtggatattttgaccacttagaggccttcgttggaaacgggtttttttcatgtaaggctagacagaagaattcccagtaacttccttgtgttgtgtgcattcaactcacagagwtgaacgttcccttagacagagcagatttgaaacactctatttgtgcaatttgcaagtgtagatttcaagcgctttaaggtcaatggcagaaaaggaaatatcttcgtttcaaaactacacagaatcattcccacaaactgcgttgtgatgtgttcgttcaactcacagagtttaacctttctgttcatagagcagttaggaaa

SEQ ID NO: 172872 - DNA, 445 bp, Homo sapiens
gctgcgtgatgtgtgcgttcaactctcagagtttaacttttcttttcattcagcggtttggaaacactctgtttgtaaagtctgcacgtggatattttgaccacttagaggccttcgttggaaacgggtttttttcatgtaaggctagacagaagaattcccagtaacttccttgtgttgtgtgcattcaactcacagagttgaacgttcccttagacagagcagatttgaaacactctatttgtgcaatttgcaagtgtagatttcaagygctttaaggtcaatggcagaaaaggaaatatcttcgtttcaaaactacacagaatcattcccacaaactgcgttgtgatgtgttcgttcaactcacagagtttaacctttctgttcatagagcagttaggaaacactgtgtttgtaaagtctgtaagtggatattctgacatct

SEQ ID NO: 172873 - DNA, 387 bp, Homo sapiens
gccttcgttggaaacgggtttttttcatgtaaggctagacagaagaattcccagtaacttccttgtgttgtgtgcattcaactcacagagttgaacgttcccttagacagagcagatttgaaacactctatttgtgcaatttgcaagtgtagatttcaagcgctttaasgtcaatggcagaaaaggaaatatcttcgtttcaaaactacacagaatcattcccacaaactgcgttgtgatgtgttcgttcaactcacagagtttaacctttctgttcatagagcagttaggaaacactgtgtttgtaaagtctgtaagtggatattctgacatcttgtggccttcgttggaaacgggatttcttcattttctgctagacagaagaat

SEQ ID NO: 172874 - DNA, 321 bp, Homo sapiens
tgatgtgtgcgttcaactctcagagtttaacttttcttttcattcagcggtttggaaacactctgtttgtaaagtctgcacgtggatattttgaccacttagaggccttcgttggaaacgggtttttttcatgtaaggctagacagaagaattcccagtaacttccttgtgttgtgtgcattcaactcacagagttgaacgttcccttagacagagcagatttgaaacactctatttgtgcaatttgcaagtgtagatttcaagcgctttaaggtcaayggcagaaaaggaaatatcttcgtttcaaaactacacagaatc

SEQ ID NO: 172875 - DNA, 372 bp, Homo sapiens
ttaacttttcttttcattcagcggtttggaaacactctgtttgtaaagtctgcacgtggatattttgaccacttagaggccttcgttggaaacgggtttttttcatgtaaggctagacagaagaattcccagtaacttccttgtgttgtgtgcattcaactcacagagttgaacgttcccttagacagagcagatttgaaacactctatttgtgcaatttgcaagtgtagatttcaagcgctttaaggtcaatggcagaaaaggaaatatcttcgtttcaaaactacacagaatcattccmacaaactgcgttgtgatgtgttcgttcaactcacagagtttaacctttctgttcatagagcagttaggaaa

SEQ ID NO: 172876 - DNA, 445 bp, Homo sapiens
gctgcgtgatgtgtgcgttcaactctcagagtttaacttttcttttcattcagcggtttggaaacactctgtttgtaaagtctgcacgtggatattttgaccacttagaggccttcgttggaaacgggtttttttcatgtaaggctagacagaagaattcccagtaacttccttgtgttgtgtgcattcaactcacagagttgaacgttcccttagacagagcagatttgaaacactctatttgtgcaatttgcaagtgtagatttcaagcgctttaaggtcaatggcagaaaaggaaatatcttcgtttcaaaactacacagaatcattcccacaaactgcgttgtgatgtgttcgttcaactcacagagtttaacctttctgttcayagagcagttaggaaacactgtgtttgtaaagtctgtaagtggatattctgacatct

SEQ ID NO: 172877 - DNA, 523 bp, Homo sapiens
agtggagatttcaagcgctttggggccaaaggcagaaaaggatatatcttcgtataacaactggacagaatcattctcagaaactgctgcgtgatgtgtgcgttcaactctcagagtttaacttttcttttcattcagcggtttggaaacactctgtttgtaaagtctgcacgtggatattttgaccacttagaggccttcgttggaaacgggtttttttcatgtaaggctagacagaagaattcccagtaacttccttgtgttgtgtgcattcaactcacagagttgaacgttcccttagacagagcagatttgaaacactctatttgtgcaatttgcaagtgtagatttcaagcgctttaaggtcaatggcagaaaaggaaatatcttcgtttcaaaactacacagaatcattcccacaaactgcgttgtgatgtgttcgttcaactcacagagtttaacctttctgttcatagagsagttaggaaacactgtgtttgtaaagtctgtaagtggatattct

SEQ ID NO: 172878 - DNA, 523 bp, Homo sapiens
agtggagatttcaagcgctttggggccaaaggcagaaaaggatatatcttcgtataacaactggacagaatcattctcagaaactgctgcgtgatgtgtgcgttcaactctcagagtttaacttttcttttcattcagcggtttggaaacactctgtttgtaaagtctgcacgtggatattttgaccacttagaggccttcgttggaaacgggtttttttcatgtaaggctagacagaagaattcccagtaacttccttgtgttgtgtgcattcaactcacagagttgaacgttcccttagacagagcagatttgaaacactctatttgtgcaatttgcaagtgtagatttcaagcgctttaaggtcaatggcagaaaaggaaatatcttcgtttcaaaactacacagaatcattcccacaaactgcgttgtgatgtgttcgttcaactcacagagtttaacctttctgttcatagagcagtkaggaaacactgtgtttgtaaagtctgtaagtggatattct

SEQ ID NO: 172879 - DNA, 324 bp, Homo sapiens
tgtgcaatttgcaagtgtagatttcaagcgctttaaggtcaatggcagaaaaggaaatatcttcgtttcaaaactacacagaatcattcccacaaactgcgttgtgatgtgttcgttcaactcacagagtttaacctttctgttcatagagcagttaggaaacactgtgtttgtaaagtctgtaagtggatattctgayatcttgtggccttcgttggaaacgggatttcttcattttctgctagacagaagaattctcagtaacttccttgtgttgtgtgtattcaactcacagagttgaacgatgctttacacagagcagac

SEQ ID NO: 172880 - DNA, 510 bp, Homo sapiens
ttagggttttttagttatatgatcacatcatcagcaaacagtgacagttagacttcctctttactgatttggattcactttatttctttctcttgtctgattgctctggctaggacttccagcaccatttgattcttaaccttgaaggccagagtaaaaagccaagggttttgtgccagaccatccccacccccgagttggaggacaaactccaggagtcctcaactgaggcttggctgcctgaaatcatccagaaatagacaatcaactaaacccaacttaaattacaatcaagacctcaagggcctcaaagaatatacaatcaaaaatccccaactgaaggacagcaacttcaaagatgaaaggaacacccrcccaagcagatgagaccagtgcaagaagtctggcaactctaaaacccagggtgttttaccttcaaatgactggactagctccctagaaatgtttcttaactagactaaaatggctggaatgacagacatagaattc

SEQ ID NO: 172881 - DNA, 384 bp, Homo sapiens
atttttaaaaaccatgcaaacaacactcttggaccacacagcgcaatacaaatctaaattaatacaaagaagatctcttaaaattatacaataacataaaaaatgaaaaacctacttctaaatgatttgggagtaaaaaatgaaattaaggcagaaatcaagaaattatttgtcattaatgaaaacaaagataccacataccagcatctttgggatacacctagtgcagtcttaagaggaaagttaataatacaaaacacccacaaaaaaggcagaaatatctccaattaacagcttaacatcagacctagaggaacaaamaaaaaaaaaaaaaaccaaaggaaactatccacaaagctagcaggaaaaataaaatttcttctg

SEQ ID NO: 172882 - DNA, 384 bp, Homo sapiens
atttttaaaaaccatgcaaacaacactcttggaccacacagcgcaatacaaatctaaattaatacaaagaagatctcttaaaattatacaataacataaaaaatgaaaaacctacttctaaatgatttgggagtaaaaaatgaaattaaggcagaaatcaagaaattatttgtcattaatgaaaacaaagataccacataccagcatctttgggatacacctagtgcagtcttaagaggaaagttaataatacaaaacacccacaaaaaaggcagaaatatctccaattaacagcttaacatcagacctagaggaacaaaaaaaaaaaaaaaaaaccaaaggaaactatccacaaagctagcaggaraaataaaatttcttctg

SEQ ID NO: 172883 - DNA, 556 bp, Homo sapiens
cacatgaaaaaaatgcacaacatcactaatcattggagaaattcaagtcaaaaccataatgagatactgtctcacaccagtcagaacagctattactaaaatgtaaaaaawaaccacacacacaaaacaaaacaaaacaaaaaacagaatctgaggaggttgtggagtaaggggaacacttatacactgcaggtgggaatgtaaatttgttcggccgttgtggaaagcattttggtaatttctcaataaaactcaaagcagagttaccgtttaacccagcaatttcattattgggtatatacccaaaggaatataaaattttataccataaagacacatgcacattcatgttgattgcagaactcttcataatagcaaagacatggaatcaacctagatgcccatcaacaggagactggataacaaaaatgtgatacatataaaccatggaatattacacaaccataagaaagaacaagattatgtcctttgcaaaaacatggatggagctggaggccattaacctaaatgaactaacacagaaaaagaaaactaa

SEQ ID NO: 172884 - DNA, 476 bp, Homo sapiens
tcaaccctagtggaatggaatggaatggaatgaaatggaatggaatcaacaccagtggaatgcaatggaaatgaatggaatggaatggaatggaatggaatggaatggaatggaaaggaatcaacccgagtggagtggagtggaatggaatcgaatggaatggaatggaaagcaatgaaatggaattgaatagaatttattggaatgtaatggaatggaatcaaacctagtgcaatggacaagagtggaaggaatggaatggaatggaatggaatggaatggaatggaatggcaagaacccgagtggaatggawtggaatggaatggaatcaactcgtgtggaatggaatggaatcgaatgtattggaatggaatggaatcattccgagtggaatggaagggaatgtaatcaagtgggatggaaaggaatggaatcaacccgagtggaatggaagggaatggaatggaatggcaag

SEQ ID NO: 172885 - DNA, 476 bp, Homo sapiens
tcaaccctagtggaatggaatggaatggaatgaaatggaatggaatcaacaccagtggaatgcaatggaaatgaatggaatggaatggaatggaatggaatggaatggaatggaaaggaatcaacccgagtggagtggagtggaatggaatcgaatggaatggaatggaaagcaatgaaatggaattgaatagaatttattggaatgtaatggaatggaatcaaacctagtgcaatggacaagagtggaaggaatggaatggaatggaatggaatggaatggaatggaatggcaagaacccgagtggaatggattggaatggaatggaatcaactcgtgtggaatggaatggaatcgaatgtattggaatggaatggaatcattccgagtggaatggaagkgaatgtaatcaagtgggatggaaaggaatggaatcaacccgagtggaatggaagggaatggaatggaatggcaag

SEQ ID NO: 172886 - DNA, 316 bp, Homo sapiens
gaatctaccagaatggaatggaatggaatggaatggaatggaakcgaatcgaacggaatgggttgtacccgagtggaatgtaatataatggaattttatggcgtggaatggaatgaaacggaatagaatggaatggaatcaaatcgcgtggaatggaatggaatggaactgaatcaaacagagtggaatggaatggaatggaatggaatggaatggaatggaatggaatggaatcaccccgaatggaatggagtggaatggaatggaatagaatggaatggaatggaatggaatggaatggaatggaatggaatgg

SEQ ID NO: 172887 - DNA, 316 bp, Homo sapiens
gaatctaccagaatggaatggaatggaatggaatggaatggaagcgaatsgaacggaatgggttgtacccgagtggaatgtaatataatggaattttatggcgtggaatggaatgaaacggaatagaatggaatggaatcaaatcgcgtggaatggaatggaatggaactgaatcaaacagagtggaatggaatggaatggaatggaatggaatggaatggaatggaatggaatcaccccgaatggaatggagtggaatggaatggaatagaatggaatggaatggaatggaatggaatggaatggaatggaatgg

SEQ ID NO: 172888 - DNA, 316 bp, Homo sapiens
gaatctaccagaatggaatggaatggaatggaatggaatggaagcgaatcgaacggaatgggttgtacccgagtggaatgtaatataatggaattttatggcgtggaatggaatgaaacggaatagaatggaatggaatcaaatcgcgtggaatggaatggaatggaactgaatcaaacagagtggaatggaatggaatggaatggaatggaatggaatggaawggaatggaatcaccccgaatggaatggagtggaatggaatggaatagaatggaatggaatggaatggaatggaatggaatggaatggaatgg

SEQ ID NO: 172889 - DNA, 621 bp, Homo sapiens
tttgaaaattagaaattttacttttaaagtagaaaccattagtaaataaatgttaaaaaatactttaaagttaatgtttagaaagaattcatgtctattcttccccctttagaagtgaggagttgagcagaattttaccctcttcttcctaaccttcttcttttcagagcatttttcatggttctgctaggtaaagctacatctctgtgagtaatatcaacttcattttggcgtctgcaccattctgtcaagactctyatgatctggtctctaactcaactcctagagctccacctcctgccgttctcccttagtgctccgactctagccacacaaaccagccaaccaccagctctgcagagaccccatgatctttcccatctcaaagtcttgcacaagcaacgattcctcctgcttggaatagtcttcactttcatccccttttcctaattaatttccacctctcttttatgtctcaaatcaagcatcacttctacggcatactctgatagtactgtctttttcagttatggccattactataactcataactacacatttatttattgtgtgtgtgattatatgctgcctttttccttcactagtctttaagttttatg

SEQ ID NO: 172890 - DNA, 494 bp, Homo sapiens
gcttaacttacctttctgtgcaggcacaaagaatctggggtggcaattaaaacaaatacatggtgacttcatcaaaatacccatggactttttttaactttaaagataaaatattaaaaatgacatatttttataaaaagtatttgaaagcttctaacaaaaatgtctatattcacacggaagtataatctgtttttcagagattttccttcatgtatttctagtgttagttttaattttgacatctgagaagtcttaaattggattattttctatcattacccatgaacagggcaaataagaattttgcataattgcttttgcctctttctgatttttaaaggcaagaatacccattgctacaaattttaaaagtacasgaaagtatcaaagataacacaagcaaataaagcagacataatattaacagtaagagaaatactatagcattctaacatttgagacgtgtatataagattgtgtcaagtaagggg

SEQ ID NO: 172891 - DNA, 494 bp, Homo sapiens
gcttaacttacctttctgtgcaggcacaaagaatctggggtggcaattaaaacaaatacatggtgacttcatcaaaatacccatggactttttttaactttaaagataaaatattaaaaatgacatatttttataaaaagtatttgaaagcttctaacaaaaatgtctatattcacacggaagtataatctgtttttcagagattttccttcatgtatttctagtgttagttttaattttgacatctgagaagtcttaaattggattattttctatcattacccatgaacagggcaaataagaattttgcataattgcttttgcctctttctgatttttaaaggcaagaatacccattgctacaaattttaaaagtacacgaaagtatcaaagataacacaagcaaataaagcagacawaatattaacagtaagagaaatactatagcattctaacatttgagacgtgtatataagattgtgtcaagtaagggg

SEQ ID NO: 172892 - DNA, 568 bp, Homo sapiens
cagtgaccttcagatgtataatgaagtttaagttttattaattttaaataatagtattcattcgacactgaaaatgtttaagtttaattgagagtccacctcacaactttgacttgtttaactttaaccaataatattgttaaatgtaaatgacacaaatggggaatgataattattggtggaartatgtgcaagggaaatagctcataaaaggataactggaatgtagaattcttcttttttttcacttcttttattttccatactattacattcactcaaaaggcctaagtacatataacactttctcaaagatagatttattgttttttactcaattccaattattaatacttattaagatggtaaaacattaggaagatagcttgctgaagagaagagatgtaatgaatgtttgttaatagtttccatattgtctagagtttattaaggaaaatattttacttggtgatggtttgttctttattatcacaaatttttctttaagccttgatactttggggatattacagcttcttttcccaatattttattataaaataaagat

SEQ ID NO: 172893 - DNA, 568 bp, Homo sapiens
cagtgaccttcagatgtataatgaagtttaagttttattaattttaaataatagtattcattcgacactgaaaatgtttaagtttaattgagagtccacctcacaactttgacttgtttaactttaaccaataatattgttaaatgtaaatgacacaaatggggaatgataattattggtggaagtatgtgcaagggaaatagctcataaaaggataactggaatgtagaattcttcttttttttcacttcttttattttccatactattacattcactcaaaaggcctaagtacatataacactttctcaaagayagatttattgttttttactcaattccaattattaatacttattaagatggtaaaacattaggaagatagcttgctgaagagaagagatgtaatgaatgtttgttaatagtttccatattgtctagagtttattaaggaaaatattttacttggtgatggtttgttctttattatcacaaatttttctttaagccttgatactttggggatattacagcttcttttcccaatattttattataaaataaagat

SEQ ID NO: 172894 - DNA, 568 bp, Homo sapiens
cagtgaccttcagatgtataatgaagtttaagttttattaattttaaataatagtattcattcgacactgaaaatgtttaagtttaattgagagtccacctcacaactttgacttgtttaactttaaccaataatattgttaaatgtaaatgacacaaatggggaatgataattattggtggaagtatgtgcaagggaaatagctcataaaaggataactggaatgtagaattcttcttttttttcacttcttttattttccatactattacattcactcaaaaggcctaagtacatataacactttctcaaagatagatttattgttttttactcaattccaattattaatacttattaagatggtaaaacattaggaagatagcttgctgaagagaagagatgtaatgaatgtttgttaatagtttccatattgtctagagtttattaaggaaaatattttacttggtgatggtttgttctttattatcacaaatttttctttaagccttgatacttyggggatattacagcttcttttcccaatattttattataaaataaagat

SEQ ID NO: 172895 - DNA, 590 bp, Homo sapiens
tttttgactcctgaaacttctgttggggggctcagaattaatttcatgttgctgagctaagctaaagtttaatttcatgggcagcataggtgtccattcatttgtagaatggctaagtaaactgtgaaggactctacagtgatgagaagaaatggactagacaaatattatagccacacagaatgatctttaaaatatggggctgagcagggaagacagaaacggaataataaattttgcataaatcagctcataaaggaaagtgccartgggcaatttgatagaaacaatatttacaaatcaaagggggaggaaataaatgaagagttaatattttgaggatatgtgagtctacatggtcagcaatgacactgccactgctctctcttaaaatgattaagtaaatggatatctagatcttccaggtttttccaggggcttaatagaaaacctctaaataaggtaaaccaaatatcaaacatgtctagaaatccaattctgtaaccatagatctctcaggattcataaccgtgagatttcttctaccaactagcctcaatcagaaaaataaaggcataaaatctgtcatc

SEQ ID NO: 172896 - DNA, 590 bp, Homo sapiens
tttttgactcctgaaacttctgttggggggctcagaattaatttcatgttgctgagctaagctaaagtttaatttcatgggcagcataggtgtccattcatttgtagaatggctaagtaaactgtgaaggactctacagtgatgagaagaaatggactagacaaatattatagccacacagaatgatctttaaaatatggggctgagcagggaagacagaaacggaataataaattttgcataaatcagctcataaaggaaagtgccagtgggcaatttgatagaaacaatatttacaaatcaaagggggaggaaataaatgaagagttaatattttgaggatatgtgagtctacatggtcagcaatgacactgccactgctctctcttaaaatgattaagtaaatggatatctagatcttccaggtttttccaggggcttaatagaaaacctctaaakaaggtaaaccaaatatcaaacatgtctagaaatccaattctgtaaccatagatctctcaggattcataaccgtgagatttcttctaccaactagcctcaatcagaaaaataaaggcataaaatctgtcatc

SEQ ID NO: 172897 - DNA, 590 bp, Homo sapiens
tttttgactcctgaaacttctgttggggggctcagaattaatttcatgttgctgagctaagctaaagtttaatttcatgggcagcataggtgtccattcatttgtagaatggctaagtaaactgtgaaggactctacagtgatgagaagaaatggactagacaaatattatagccacacagaatgatctttaaaatatggggctgagcagggaagacagaaacggaataataaattttgcataaatcagctcataaaggaaagtgccagtgggcaatttgatagaaacaatatttacaaatcaaagggggaggaaataaatgaagagttaatattttgaggatatgtgagtctacatggtcagcaatgacactgccactgctctctcttaaaatgattaagtaaatggatatctagatcttccaggtttttccaggggcttaatagaaaacctctaaataaggtaaaccaaatatcaaacatgtctagaaatccaattctgtaaccatagatctctcaggattcataaccrtgagatttcttctaccaactagcctcaatcagaaaaataaaggcataaaatctgtcatc

SEQ ID NO: 172898 - DNA, 559 bp, Homo sapiens
ctacacaaacaacatctctacactgacattgtcaatccttggcatctgcactgagtaaaagtaaatatgattgttaaaatggtaaagtcatatgtcccacttgataattttataatgcttttaaattaattattaaacaactgtgaactaaattcctctaagagttacagaccctttagagaaaattaaaagaactgaagatcaaattttgggacaatttgtgggaaacctggaagagttttatccaacaggtaaaaaatgtcttaattaaagcatccaattattctctccaaaagacttagtacctactaagtgcaataaaggccctgaatttcgtgaggtctgactagaacactagagtagaggatgaatcaaccaagaatctggccctcatgcagcttatttagaatccttggcacattaatttaaaattgcctttttwtttaattacttcccttcaaattactgagtcgagatgtccatgactgtgattgaattgaaggtaataaagtccctaaggaagctctggaaggcacaatctctctacacggagagaaat

SEQ ID NO: 172899 - DNA, 610 bp, Homo sapiens
ccgattacttttacactaaaaatatatttctaaagtgattataaaaccatttgatagtgtctctaaattacttgtccatgagacagctaggtaaaatcccccattgatatctgatttgaatcagagattttcactaaaccaatgcatgtcttcatataaccctctgtagatgtctaccatgccaaatcttgccactgctgaaaaaaaacacatcagcagtattgataaatctatcatttatagatcatctaaataatcactatttggttattcatttgaacwtctatgcatctatgaatttgccttaagtaaaatgaaaccaatgtgtgaagacgtagctgagctcagattcctcattctaaccctttttctttgtctccatataatccatgctgagatttagtagttaatatttgccacttaaagagtttgtttacagaggtagaatgaatggttaaataaaaagtgtacgatatcaggaagcatttcaaatcacttaataaaataccagaaattggtttttagattccctccattctgtcaacatcaaaatatactcaagtagagtatttaggcttattggtgaacttagagtaaaatttatgtatta

SEQ ID NO: 172900 - DNA, 610 bp, Homo sapiens
ccgattacttttacactaaaaatatatttctaaagtgattataaaaccatttgatagtgtctctaaattacttgtccatgagacagctaggtaaaatcccccattgatatctgatttgaatcagagattttcactaaaccaatgcatgtcttcatataaccctctgtagatgtctaccatgccaaatcttgccactgctgaaaaaaaacacatcagcagtattgataaatctatcatttatagatcatctaaataatcactatttggttattcatttgaacttctatgcatctatgaatttgccttaagtaaaatgaaaccaatgtgtgaagaygtagctgagctcagattcctcattctaaccctttttctttgtctccatataatccatgctgagatttagtagttaatatttgccacttaaagagtttgtttacagaggtagaatgaatggttaaataaaaagtgtacgatatcaggaagcatttcaaatcacttaataaaataccagaaattggtttttagattccctccattctgtcaacatcaaaatatactcaagtagagtatttaggcttattggtgaacttagagtaaaatttatgtatta

SEQ ID NO: 172901 - DNA, 602 bp, Homo sapiens
ataatataaatataacatttaagagcccatgctctggaatcaaatggactcatttcaagtgtctgttatttaactttgaatgtggtggatcttggacaattaatttaacttctgatatggtttggatatttgtccccacccaaatcttatgttgaaatgtaatccccagtgctgaaggtggggcttgatgggaggtatttgggctataggagaagagcccttatggcttggtgctgtctttgcgacagtcagtaatttgttacaagatctggtcgtttaaaagtacctcctgccgactctctctctgttgctccattctcaccgtgtgaygtacctgctccccctttgccttccaccatgattggaagcttcctgaggcctcctcagaagcagatgccactgtgcttcctgtacagcctgcagaaccgtgagccaattacatctcttttcttataaattacccagtctcaggtatttctttatagcagtgcaagaatggcctaacacaacttctccgtgtcttaatattattctctggtaaaagccaattgtaaatctccttacttagccatgataagcgcttttcaaggattatcactttt

SEQ ID NO: 172902 - DNA, 545 bp, Homo sapiens
tactgtcaaaactgaactgcagtgtaatgacttttgttatcatggtttctaataactattcagcatgaattgaccctacatatgttttgctgcaataatgtgtcactaactcagaaagctaaaaagaaaataaaaaacagtcaacataatgctgtgtatgacttcatgataacctttactattaatattgttaaaacaattatattaataatagtcactatgcaaactatgggatcacatgtcagtaaaacctcagacacattgtgacagttctggctaaagaaacctatagagtacttcacagtaaaatatgtcctcctctgttcagcctgggcactagttactgactgtgctcttactacttccatatctgattgttacctctattgtagggagtcttggacaagtttccctacttcctataaggtgtttctttttccttttatgggctatctctttagttttttactttctrtatttttgcatctccttattgcaccatatttttatttcagcatctcttcactgccataaataagagaaag

SEQ ID NO: 172903 - DNA, 569 bp, Homo sapiens
attaatgttcatcaatactattgccctgaagttttctttttgttgttgttgtgtgtctgccaggttttcatgtcaggatgatgctggcttcatagaatgagttggggaggagtccctccttctcaattttttggaatagtttcagtaggtatgataccagctcttccttgtacacctggtagaatttggctgtgaattcttctggtcctgggctgtttttgattggtaggctatttattactgattcaattttggaacttgttattgatctgctcagagaatcagtttcatgctcattcastcttgggagtgtgtatgtgtccaggaatttatccatctctcctaggttttctagtttgtgtgcacagaggtatttgtagtagtttctgatggttatttttacttctgtggagctagtggtaatatcctctttgtcatttctaattgtgtttatttggatcttctctcttttcttctttattagtccagctagtggcctatctatattattatttttttcaaaaaactcactcctaggccaactgataaagatatcagtcatattggat

SEQ ID NO: 172904 - DNA, 574 bp, Homo sapiens
ttattagtaatttttttcactattaactcaacagatcagtaattttgatacatttcattagatccagtataatatatcataatgattttaaaggtatgctaattataaaatataatccaatgagtcatactaaatttctcaaagacatcctggaagaaatagacttagaataaaaattacatttttctgtctatgtgttgctacaattttaaaaatgtgctattgttattgtccagtgtcacatattttaatctcaaacatgtcacagaatgtgacctacttcaatatttccttatatatcaattatataagctacattagcaacaaacctaagaacatatgccatcacaaaacagttggtatatgcaattcaggtacaatttacattgctgtacaaagttgctttgcaaatttcctttagctatacaaaacaagaaataaaaactttaaygtattgcttaaattgtgaaagtatggggtaatttccttctactcttggcctatgccacttgtctatgacaatagcttgctatcaaatttaagacccttattcaggaggttaatgcgaggtagg

SEQ ID NO: 172905 - DNA, 523 bp, Homo sapiens
ttccttgtaaggtccttggaagactggagraaaaaaagtacaattgattgcgtggccaaatttctgttcatgcctgcttactgatttttgttcatttcacaaataaacaaggcatgaatacatcaacccacaaaccataaacaataaagaacttcatcctgtaagtttgctacggccagcagtttgtggctgaatctgctatttgtcataagataaatgataaagtgattgccatttgtcactgaatacacaagaggagtgctcagctgtgaaccactcaaatgcagacaacagtaaatactgccattcttatactaacttcctttaaaagggccccctaaaactataaaaataaaaggacatttgtgttttgggtaaaaattcataatcttttaacctaagaagataaattgtcaaataaacaataagcatctgagtactcccagttaaaaacctttatttactacaacatgaaatgcatgcaaacatgtgccatcttttataaagaaaggtgttttataaa

SEQ ID NO: 172906 - DNA, 523 bp, Homo sapiens
ttccttgtaaggtccttggaagactggaggaaaaaaagtacaattgattgcgtggccaaatttctgttcatgcctgcttactgatttttgttcatttcacaaataaacaaggcatgaatacatcaacccacaaaccataaacaataaagaacttcatcctgtaagtttgctayggccagcagtttgtggctgaatctgctatttgtcataagataaatgataaagtgattgccatttgtcactgaatacacaagaggagtgctcagctgtgaaccactcaaatgcagacaacagtaaatactgccattcttatactaacttcctttaaaagggccccctaaaactataaaaataaaaggacatttgtgttttgggtaaaaattcataatcttttaacctaagaagataaattgtcaaataaacaataagcatctgagtactcccagttaaaaacctttatttactacaacatgaaatgcatgcaaacatgtgccatcttttataaagaaaggtgttttataaa

SEQ ID NO: 172907 - DNA, 535 bp, Homo sapiens
ctaaaaaaaagggggaaaaaaagaagtttgaagaatgaaattggactccatcctcacaccacacacaaacattacctcaaaataaatcacagacctcaatgtaagagctaaatctataaaactctttgaagaaaatacaggagaaatttttgtgatcttaagttaggcagacttactagttattcacttaaaacaaaaaagacaaaaaatagatatattagaggttatcaaaatttaaaaatcttgtgtttcaaaggacactgtccagatagtaaaaagggaacccamggaatgagaaaaaatactttcaaatcatatgtataagggatttgtgtcaggcctctgagcccaagctaagccatcatatcccctgtgacctacacatatacatccagatggcctgaagtaactgaagaatcacaaaagaagtgaaatgtaaatggcctgttcctgccttaactaatgacattccaccacaaaagaagtgaaaatggccggtccttgccttaactgatgacattaccttgtgaaattc

SEQ ID NO: 172908 - DNA, 599 bp, Homo sapiens
acacattgctgttgtgcctaatgcagttgtttccacatagtgctgtcatccttaaattgttcttcccatctaccctccttggtcaagcttttctgtttcattcggggaggacatgttgccatgggatatcttattaattcaggaggggaagacttgtgggagatggctggtggacatagatgagataaaaattctcaccaatgataaagtatctgggaactaaaaggaccttgaacaatgccctgtccaactgcatcttgctacagaagaagaaataaggacaagggatggaaggggtgtacccaaggccataggtcataatcagctgctaaggcatcatcaggaccctgcatcttggtccagtaccacttccaccaacccctgttattttttgtgacacaacatcttttccttataaccaactcagatatataccaagctgctgtatccatgcgaggaccatccgagactgttcttttaacccaagagtttcccagaattccatagttactgctgaaaagagtgagagtgatcaagaacttycttaaaaggattttctctttcattgtgtttcattttcttcaacccatctcataata

SEQ ID NO: 172909 - DNA, 683 bp, Homo sapiens
agctaggtgttatatgtgctttcattctgagtctgtaaacctttagacctctgattctttcagccctaagctgatagtattattgtctaaaacctagcaattttctctgtaaactttatcattttgcattttataaaatcctttatacttacctatgtagagcttggagtttactatcctagggagaaggagtacaaggcaattaaaaaaaaaaaaagccccgtattcaaagcagaatgtttcaaaaagactctacttctgaaaaggggaaaaaatcaccattgttctgttggctgaatgtgttggaagtatctcaaagaagtacaattgaattaattatattttcatctctgtgtacccattcaagtctgagaacatgcacttcactgtagttttacctccttctggattacacgagaagctgcaagattatcaagatgtcagacattcctattgggataacatgacatctttactaaggacttctgtgggtctgatgttcttcttcctagaaaatcatatgaaagatactttaaaagtgccatgtacccacttgagcttattttttaattctgatttttaaaaatattttactacttaaagtgacatttaaaaagcatattaaacaamgatataagactctgacttcacaaattagtttttctaagaacatctaattagac

SEQ ID NO: 172910 - DNA, 593 bp, Homo sapiens
accacagtatgtaatatccattattgtatgggaattgtactcaagttagwccaatatggagtgatggttttaaaccttttagttaggaattaagtaaacaaatatttgtgaagcacccacccactaaatcatacaagtcactgaattaaggagagaaagtgaaaatattaatttgtggcttaattattaatagcatattaaaaatgtaaaggtttattatggttttagtcggagtttatccttcattacatatacaagtatgaaaggaaagaattatagcactaagccggtaagagaaaagcagcttgattctcttcagagtgaatagaaggaacataaccgtaaaaggaatataaacaataattccgagtgggagagaaataaattatttttaaaataattcaaggacatggcttaatgcaatgagataacatagacctgctaacctcattccagttaacaaagcacatttggttatattgtatcttttacagtttcatagtttgctgttttatagtaggaacaggataagctttaactgccttgttttcctttattcttccttttttgaccctgttaaatttaggaaagca

SEQ ID NO: 172911 - DNA, 497 bp, Homo sapiens
ttcccaggtaaataaaagctgcaggaattcatcaccagtagacctgccctacatgaaatgctaaagagtatcctgtaagttgaaatgaaaggatgctagacaacaacatgaaaccatataaaaatattaaaatttttgataaaagtgaatatatagacgaatatagaatcctgcagtattgtaatgttaatatgtaaatcacttttaattctggtatataatttaaaatacaaaaccattttaaaaacctataaatccataataatagaaacataatataaaaagatgtcatttgcaacatcagtagcatacagtgtgtgtatgggagagatgtaaaggggtagagatcttttatgtgattgaagttatcagtttaaaatagactcctataactktatttaatccccataataaccacaaataaaatacctatagaaaataatcctatgaactggttacaacatgtgccagtttcctcactgaataagaagaaataa

SEQ ID NO: 172912 - DNA, 471 bp, Homo sapiens
gaattccaggcccagaccagatctcactgccctggagtgaggattcctaggttggagctttcatttccccttaattgcaacatgatcctgagccaggtactgtgcttttctgggcctcagtttcttcatctgagatgtggcaggggttggagagatgatcttcaaagagccctcaccatggatgactttgcccctagaaggaaggggggtcagtgsttcccttccttgagtcggggcctggggcagcaaggagattccgcttatctcagatccctgggatcagagagagctggaccagcctcttatctggaagcccggggctcccacaagcaagtcacccaagcagttgatcacaagtctccccacaagaaaggggacgagacatggggggaatggaggagggagccttgtccagctgtggaacctaccaaagaccccagactccaagaagttaaacctccaggtctacag

SEQ ID NO: 172913 - DNA, 639 bp, Homo sapiens
agaaatcagagcagagaatcagggcagccagtccctgaaggaagagtctgtgacaaatcacaagtatgatcacagcacgaacttttctattctagcctggcctctaggaagaaaacagagagtgttaccggacttaaggggaaaaaggacatgcttgatgaaggacagaaccccattgttctccacatttcctggctcacagaaggccttcttcagttttttcttcacatcctccttccgatcaaggagatcaatcttggactcctagaagtcatagaacggaagaggacctcttgtggttgaaaatgagaatatgctcaactaatataagttaaattttgttttttcttctctgtcacccaggctggagtgcagtggcacaatcatggctcactgcagcctcagcctcctgggctcaagagattctcccatctcagcctcctggaaagctgggactacaggaatgtgtcaccaygcccaggtaattctattttttgtagagacagggtttcatcatgtggcccaggctggtctcaaacttctgggctcaagcaactctcctgccttggcctcccaaaaagtgctgggattaaaggtgtgagccactgtgcctcgctaaaaaaattctttttacaaaga

SEQ ID NO: 172914 - DNA, 494 bp, Homo sapiens
gctttagggattacatttagatctatgatccttttaaaatttattctgtatgtagtgcaagatatggattaaagcctgtaatcccagcactttgggaggctcaggtgggaagattgcttgagcccaagagtttgagaccagcctgggcaatgtggtgaaaccttgcctctaccaaaaaaaaattaaaaggttagccgggcatggtgacatacacctgtagtccttgctactcagaaggctaaggcaggaggattgcttaagcccaaaaaagggaggttgcattgatgcaccactgcactccagcctgggtgacagagtgtaagactgtctcaaaaaaaaaaaaaaaaaaaaaaaacatatatatatatatatgtatatatatatatayacacacacacacacacacacacacacacacacacgtgggaatgtaaggcttattttcttggcacatggatattcaattgcttctttaccatttattgaaaagactg

SEQ ID NO: 172915 - DNA, 470 bp, Homo sapiens
cagaaacacagccatcatcatataattttctttgtagagtgtggcctctggaggcagactgagtggctccgtcattgtgatgctgtgaacctcacttccacatagatggggaccttgcctgtctggtcctctggcattcacatcaccttgaacagtgccttacactccagagtaaagaatatgtcctcttcaaataaatgaagctgagtgacctygggctacttactctcaccccttttttctcacctacaaatggtggtaactgtccacctcccaggttgctgtaaggacataggaagactttgatgaaaatgcctggccagggtatatatagcacatagcagccttcctgttacttctcttcccattcagattagccaggaccctgccctccttccataggcgctcgcctcctccagaaagcctcccctgattatctgctgggctccaatcctggcatctgtcccaga

SEQ ID NO: 172916 - DNA, 376 bp, Homo sapiens
ctgtctcgtttttatgtgaagatatttcctgtttccccagaggcatcaatgggctcacaaatattcctttgcacattctacaaaatgactgtttagaaggtgctcaatcaaaaaaaaatttcaacagtgtgagatgaatgcgcccattcaaaggaagtttctcagaattcttctatctagtttttatgtgaagatatttcctttttcactrtaggccacaaagtgctccaaatatccacttgcagactctacaaaacgagtgtatccacactgctcaatcaaaagaaaatttcaactgtgtgagatgaatgcacacatcaaaataaatttctccaaaacttctgcctactttttatgggaagatatttcgtttttc

SEQ ID NO: 172917 - DNA, 536 bp, Homo sapiens
gcgctccaaatatccacttgcagcatctacaaagccagtgtttcaaatttgctcaatcataagataggttcaactctgtgagatgaatgcacacatcaygaagaagtttctcagaatacttctgtgtagtttttatgtgaagatgtttccttttccaaaataggcctcaaagcccaccaaatatccacttgcagattctacaaaaagagagattcaaaactgctcaatcaaaagataggttaaactctgtgacttgaattcacacatcacaaagaagtttctcagaatgcttatttgtagtttttatgtgaagatattaccttttccacaataggcctcaaagcactccaaatatccacttgcagattctacaaacagagtgtttcaaaacttctcaatcaaaagataggttcaactctctgagttgaatgcatacatcataaagaagtatctcagaatgcttttgtgaagtttttacgtgaagatatttccttttccacaacagtcctgaaagccctccaagtatccacttgcag

SEQ ID NO: 172918 - DNA, 457 bp, Homo sapiens
tgaaaaaacttcattgtgatgtatgcattcatctcacagagataaacctttcttttgatagagcagttttgaaactctctttttgtagaatttggtagtggagcrctttgaggcctaaggtggaaaaggtaatatcttcatataaaaactagatagaagaattctgacaagcttctttgtgatgtgtgatttaatctcacagagttgaacctttcttttgattgagcagttttgaaatattctttttgtagtatctgcaagtgggcatttcgagcgccttgaggcctatggtcgaaaatgaaatatcttcacataaaaactagacaaaagaattctgagaaacttctttgtgatgtgtgatttaatctcacagagttgaacctttcttttgattgagcagtttggaaacactcttttagtagagtctgcaagtggacattttgatcgctttgcggcc

SEQ ID NO: 172919 - DNA, 633 bp, Homo sapiens
aggattaaaacaattttgtgtgtgtggttgaatttatcaatttttttttctgctatgatttctgggtttgtatcataattagaaagatctttcccattctgaggttatgacatatttctttcttagcttcttctagtccttttgtgttttgttttgttttatacgtaagtgtttgatccwtttggaatcattccaaagtaaagtataaagacttgggaatttaattttcttttttcttagatgacaacctggctcttcttataccatttatttccttttttcctttcacatttgagatgctgtctttattataaatttccgtatgtatttgggtctatttcttgattttctgttcttttccattgatgtgcctttttagtcttttgtctgtgccagtgggctcctaagaatatgttttcatacctggcaaagctagttcctcctcactatgcttcattttcagaattccactggttattcttggttatttgctttctacttaaagtttagtttggtcatcctccctgcctcctccccgccaatgccccaatataatgctattggtattttcatttggatcatattatgtctatagatgatgtttaggagtcaaggtatgtatggtgtgagcat

SEQ ID NO: 172920 - DNA, 556 bp, Homo sapiens
tacaatgacttaaaatttttaccagtcctataggtgaaaacagatatggcaacattactttatacatgtaattgccagtgagttttaaaaatttttcttgtgttaaattcctgtttatattctttgcttttttatcagggtgttccaatttttgttattattttccgagaaatatttatatatgaaaaatacccattgtcatacatgytgcaaatgtttttcctcagttatcatataccttgaacttcatttgtgattttttttggccattttgctatttgagttttgtgtagttaagtatatgagcagattctcttcatgttatttgcctatggtgacatgtttatgaaatttttctccaattcaaacaatttctttagtaatttgtggtttaacatttttacatgtaaatatttaattcatctgaaatttgttttgtataataaggaaggctctacttgattttgccaaatggtgagccagttattatttattaaataatattatttattagtctgtccttccccatttatttggaatgtcatcagtatactac

SEQ ID NO: 172921 - DNA, 556 bp, Homo sapiens
tacaatgacttaaaatttttaccagtcctataggtgaaaacagatatggcaacattactttatacatgtaattgccagtgagttttaaaaatttttcttgtgttaaattcctgtttatattctttgcttttttatcagggtgttccaatttttgttattattttccgagaaatatttatatatgaaaaatacccattgtcatacatgttgcmaatgtttttcctcagttatcatataccttgaacttcatttgtgattttttttggccattttgctatttgagttttgtgtagttaagtatatgagcagattctcttcatgttatttgcctatggtgacatgtttatgaaatttttctccaattcaaacaatttctttagtaatttgtggtttaacatttttacatgtaaatatttaattcatctgaaatttgttttgtataataaggaaggctctacttgattttgccaaatggtgagccagttattatttattaaataatattatttattagtctgtccttccccatttatttggaatgtcatcagtatactac

SEQ ID NO: 172922 - DNA, 566 bp, Homo sapiens
ttcatccagatttctacactccagaagggtaaagaaaaagaaaaagaaaaaattttaaaaagatataggttaatgaaattttaaaaagacrtaggttaattgtaagttattgcaatataaacataagcctaactttatatgttattgcataggataaaagtttgaataaaataagctggacagatgagattcatatatgtgcttgtaaatgcactaaaaaaagaaaaaaaactgctgatgtaaaaatattgagttttagtttactcaatattttttaagtgtgatacaatagtattctactgtattattataatcatgtaaaaacaatatgttaatgctgggattatacaatcacagatgaccttttttgtaatgttttatcttactttttttcttcaaatgattcactaaaatacgaaagattttgttgcctgttgaactctccaggaattatcccttgcctcctattacaaaacagacaacactaaacacacaagtacccagtatttctccctaattcaacagctaaatttctgaattactttttggatgtttttgaaatcaca

SEQ ID NO: 172923 - DNA, 566 bp, Homo sapiens
ttcatccagatttctacactccagaagggtaaagaaaaagaaaaagaaaaaattttaaaaagatataggttaatgaaattttaaaaagacgtaggttaattgtaagttattgcaatataaacataagcctaactttatatgytattgcataggataaaagtttgaataaaataagctggacagatgagattcatatatgtgcttgtaaatgcactaaaaaaagaaaaaaaactgctgatgtaaaaatattgagttttagtttactcaatattttttaagtgtgatacaatagtattctactgtattattataatcatgtaaaaacaatatgttaatgctgggattatacaatcacagatgaccttttttgtaatgttttatcttactttttttcttcaaatgattcactaaaatacgaaagattttgttgcctgttgaactctccaggaattatcccttgcctcctattacaaaacagacaacactaaacacacaagtacccagtatttctccctaattcaacagctaaatttctgaattactttttggatgtttttgaaatcaca

SEQ ID NO: 172924 - DNA, 605 bp, Homo sapiens
acacctatgcacaatataaagagaacaatacttttattatgatatttgagaaatactgtagagtcctcaaatagatcctagaaattcaagattaaaaatatttgtgagaattgggtaatcaaggttggtcaacaaagagacatggaagaggaaaggcrtgtgtcgaaccttgaaatgtgaaagtgtttgagcattcatttgaagttcaaatttagcattcctttgacagttgtctgtataccatgagttaaaaatagaaaagtggaatgactattccaagtgggaggctggtttgagtagattcatttaggaggaaatctacacaaatatgggaagagtactggttttgataatgaacatcacctaacactttataagaagaagaattttctactggtgaatgtaaaaggtgagaaactataggaggcagggcattttaaggcggaataacacacatagaaaaccttggttatccaagataggtatgagggaccctcaatatctgaaataccaatcacagtgtccgagccctccagggaatctgagcaagtaataagctgcaaaattcatgactaatgttgctctccctgagaaatcaaacgtaa

SEQ ID NO: 172925 - DNA, 536 bp, Homo sapiens
tatcttcctacttctgtccatctttatttcttcaaggttgtttcagactcatcactcctcacctcacactttcttatatttttaagagtgacttctctgtacaatgtatttaggactgagataaactggttgtttaatcattattggatgaaatgtttcatgctaaagaaattaaatttatcaattataaatggcatactttatattccccagtattaggtatgtggagaatataacaaatcaaagaaataatctttgcattttggagatgagaaataattttaggaagattaaaatgacaacayaaaaaaccacaagagatgataaaaacacaaaatacaatttgatttctctatagacaataacttcaatagtagtgaattctgtgtgataaaatgagaaggtcttctggagcaggagagatatgagataaatttacagatcagacatataagcagaaaagggggagtaaaaggtttctacctgaaaaaaatacgaggacaaagcttcagagacaggaatccatcagtaaggta

SEQ ID NO: 172926 - DNA, 546 bp, Homo sapiens
atagtctatttccccaggctttcaagcttttgtatattgctttgatacacggagtcagaaaaagtgaaattgtactcgtctaagctgaggcctaatagtcctggcatacctctggtcttgattttggaatcctgcaatattgattcagtgggacctcggtaatgctctggattaatgatctctttaaaaaaaaatgggagtatgtrttttgttttcctgtccctgtgtcacaattgtatattgactgtgatgggtgaaggggggatggaaaatttgtcttttttgttcataagtatagaaactaataaaagttgcacaataaaaactgcctctggacctaatggagatcataaggccctgaacttcatgtgtgatatcattatgaaatgaggcttttatggtgtgttgggagagggtatgtttttctttaatgtgggaaggatatgaataattgtgacgaaagggcacagtgttgtaaacagattataaaaatggctacaattatttctctccttttatcaacactgctttgcaatgaaactttga

SEQ ID NO: 172927 - DNA, 558 bp, Homo sapiens
agtgacaaacacaatatcctctttgaattgatgacatgcrctgaccaatttgtagtaaatatcctcttgagtagtgatctttcgagagttgtatattatctttatcagtgtttttactttatgtcaagtcatcaagaaatcagtaagaacctgtatagatgtaaaggaaaaggtcatgtcagacagagaatagtatgacaaaggtctgacctggtaggacagggtaacagtttgaatggggtggagtggagagcaccaaagcgtgaagggacacactctttggagctaggcaaggaggtggaaggtagagctgaacgctggatagtggcttctagcccatcaggctttaaagctaaggaaatgacagccagttcttgaattattatgcataagcagtgtagttttacgttcggtttgcatttgagttccacaaactcaagtcttatacttactaacctatgtaacctagctggaggtaatttaacctttcacctaagagactgtgcaccacataaatatatcccactaaacccacattaactgtagctacaaatcacc

SEQ ID NO: 172928 - DNA, 558 bp, Homo sapiens
agtgacaaacacaatatcctctttgaattgatgacatgcactgaccaatttgtagtaaatatcctcttgagtagtgatctttcgagagttgtatattatctttatcagtgtttttactttatgtcaagtcatcaagaaatcagtaagaacctgtatagatgtaaaggaaaaggtcatgtcagacagagaatagtatgacaaaggtctgacctggtaggacagggtaacagtttgaatggggtggagtggagagcaccaaagcgtgaagggacacactctttggagctaggcaaggaggtggaaggtagagctgaacgctggatagtggcttctagcccatcargctttaaagctaaggaaatgacagccagttcttgaattattatgcataagcagtgtagttttacgttcggtttgcatttgagttccacaaactcaagtcttatacttactaacctatgtaacctagctggaggtaatttaacctttcacctaagagactgtgcaccacataaatatatcccactaaacccacattaactgtagctacaaatcacc

SEQ ID NO: 172929 - DNA, 363 bp, Homo sapiens
ggtaagaggcccaaagaccttgaatgttgaaaggagctatagatcttcaaagtcagacacataagacaaaaaaaaaaaaagaataaaaaatactgatatgcaaggaagacctgaataatgtaaaaccttggtttgaagtgggggaggtagaggaagaattgcaatcattctatttgyaaaacatccatggaaagtatattttagatttatttaataagtagtagattgccagctcattttttttttttttttaagcctgagagatcatcacagtgccagatgttaaggacaaagacagaataggatcgtggaaggttaagattatgaaagacaaaactcattcaatcctgcagaagtctttta

SEQ ID NO: 172930 - DNA, 368 bp, Homo sapiens
taaaagtgtcacaatggccaggtctagtagtcttatacctccaaagttgcgtagacaaaatctacaattgataaattaggaactgatccagttatttcatgttgttgttaaagttcacatgaattaatcatagcttttccctctatcagttttataagtcttctcaagtaaaatccatgaaggtagggctactgtttctctcttttattatttgctctgcacctgaattaaggccagacagccaaagattaaggatagagatcagttctggcacaaatcacccttgcawacttgagcaaatcacttcatgtctcaatacaaatactttctccagataagtaaagcaagtgaattggaatataatgtcc

SEQ ID NO: 172931 - DNA, 507 bp, Homo sapiens
tatgtaaaataaccaaacctaggaataattggtgttcctgaggaagaagagaaatcttaaagtttggaaaacgcatttgggggaataattgaggaaaatttcttcaggcttgctagaagtctagacatccaaatacaagaaactcaaagaacacctaagaaattaatcataaaaagatcatcacctagacacacagttagcaggctatctaaagtcaagacgaaggaaagaatcttaagatatgtgaggcaaaagcaccaggtaacctatcagagtaacagcagatttctcagcagaaaccctacaagctagaagtgattgaggacctattttcagcmttctttagcaaaacaattaacaggcaagaattttgtatccagcaaaactaagcttcataaatgaggaaagatacagtcttcttcgaacaaacaagtgctgagacaatttgtcattcccaagccagtgccacaataattactaaaacaaagctctaaatctttaaacaaa

SEQ ID NO: 172932 - DNA, 469 bp, Homo sapiens
gtatgtggagtatgatctttctttctttttttttttttttcaaaaggtattctcacaagtctaattatatgcaaatgaatagcaaaaaaattgttaggagacatagcaaactccttaactgttatcacaaggaatgagtaagatgtgagtaaaatgaatattttctattttaatttatgtttctctgtatttttgaatcaatgaaagttattgttataactactttattcacttttattgctgtgtagaattccattttacaagtaaatacaaatatggtwttaaatgaaaaaaagaaaagaggcatgcatagagtatggtactatttttataaagtttaaaagcaaagaaaaccaaactctattgtttaagaatacatcatagtaggtgaagctataaagagtaacaaaaacatagtaaccacaaaagccagggtaatggtttgctccagaaaggagggaagatgttt

SEQ ID NO: 172933 - DNA, 368 bp, Homo sapiens
gcacacaagtttgttccagagtctatttcctggggttcctggcctacaatgggcaataatgattgggtggtgaggagagatgagtttttcacattttgctgtcttaagcaaacttgaatagtttttaagaatctattatatcactttattttatttatttatttatttatttatttatttaattttttgagacaaagttttgctcttgttgcccaggctggagtgcaatggcgcagtctcggctcactgcaacctctgccttccggattcaagtgattctcctgcctcagcttcccaaatagctgggattacaggggcctgccaccacacatrcctactttttgttgttgttgttgttagacagagtc

SEQ ID NO: 172934 - DNA, 447 bp, Homo sapiens
cggtttctcttttactctgtactcatttttcttgaatctttatttgtgagaattattttgatctctttctctaaatagaatttgcatttgattctgccggatgcctgaatgcatggccccctcaaaaacactttagaactctctgtgcttaaggtttttgcaaaacacatctatactggagttgagcccacacacccatataaatcyagcttgttataattctcagggacaatttttgacctctttgtgtaacactaacatttgaggcaagaaattgattttctttgatttttttttcattgacccacacacggagtactccttgtgttccagctttatgagggaaaataacctattagtcccctatgcttgggcttattctaagctttcctcctttttcctgtgtcccttgtagctgctgggactggaatgctcaaatttacttga

SEQ ID NO: 172935 - DNA, 628 bp, Homo sapiens
ggctaattttagaaaaaaaaaatttgaagagacagtttctccatatgttgcccaggctagtctcaaactcctgggctcaagcagtcctcccacctcagcctcccaaagtgctgggattgttgttgtgagctgccaccaggcccagcctcgttttatatttgagaccaygccagatcttttcatctcgcagagtacttcctgagaatattaccccacaattgctagtaaataatatcatcaaaaagtcaagtaaataaacctttaaaatatgcaataaatggtcttgtagaaatcacaaacaattgtacttattggatgaaaatatctgttctactattataaaaaaattattgtggttaggagtaatttccagtgatagcattacatatacataaaatatatactttacagatccaattaaaggaggatgaatgtgaagaagttgaataaaagtgttgatactgagctctggagaactcttggataattccaagaggaagttttactgatgatggtgaagttattgatatcagtgatttaagtaatgatcccgaataagaatattttataaatgcaataatagtacaaaaaaatgtttcttatctttcaggtgtaaagttgatattgt

SEQ ID NO: 172936 - DNA, 414 bp, Homo sapiens
gcgatcccaatggaaattccagcaggagtttttgtagacattaacaagttaatcaaatttatttggaaaagcagaagaaactagaatagccaaaacatcttttgtcaaagaggaacagagctggaagactcgcactccctgacttcgaaacttactgtaaagatacagcaatctaaacattgtgtcagagaaaggataaacacatagatcatggaccataattgagaatacataaatagaccttcgtgtatatggtcaattgatttttgacaaagttgcaagggcaaatcaatgaaaatagtggtttaaaaaaatggtgctgcaacaattgaaagtcaatatacaaaacaaatgaacctcaatccataactcatcccatattcaaacttaatagrtgaagatttaaatgtaaaa

SEQ ID NO: 172937 - DNA, 597 bp, Homo sapiens
caggcagtcctgttctgggctccctccaggcttctgcagataggaggggggcagacacatgtgaatagaaggtgcctcaggtggggtccagtctgagctctggacttgagaacctgtgctcccagccaagacaaacccaccctccccttacccatgtcctcccccaaacccgttccccctccagaggggctggatcctcagatgggcagggctctactaagggagatactggtgtggctgctgyactccaggggtctcctggctgtcttctgggcctgagggagggagcagggctggccctgagcaaaccaaaccagcttgaagcgtggtgaagtttggcttttgaagttttctttctggcccatgcatccctcatttcttctcctcctcgtggcagcacgcccccgttcagttctgaagaggactcagagggagaccgtgtgcagcgtgtgtctctacagcccccaaaagttccttccaggatggtgccccggcccaaggatgactgggactggtctgacacagagacctcggaggagaatgcccagccccctggccagggctcaggtgagctggcacctttgggtgagtgggctg

SEQ ID NO: 172938 - DNA, 579 bp, Homo sapiens
atgtcccactagggcaaaggatgacacttgctgggccctccccaaccttcaccccaggccccccaaactcagagctggttctgtagagaattccagagtaaactctaagcatcctacatcctacctgaggcttccttcctggtgtggcagccctctgtggcccagcattgggcataaaaaacagactgacccctccagcaggcttctttgctggagcttctagctgcttctccaggtttttgaccatcgactgcaccagtgttcctggaaggtgaaaaagtggctgtgtcagtgggagaagcctagaaaatgaacatctcagttttgtggctcatgtccaggctccagtgtggatagagggaatgagcagaagggccaggaggaagaaggytgagcaaccacaaaaaaggagacagagaaggccaggccaacaggtacacagtgaacagaggcttggcatattctgaaaatgtgactgtgcaaacttaatgacatggctagtgacagaggcttaggaagctgtgcttccctctaatgagaggctgaggcaggacctctgctcagtgtggggaatgaact

SEQ ID NO: 172939 - DNA, 451 bp, Homo sapiens
aactccagcccatgggccaagtccagcctaccacttgttttataaataaagtttttggaatacagtaaaatgcattcatttatgtattgcccatttggctcctaaaatatttaccgtctgcttttttttttttttttgagatggaatttcgctctttttgcccaggctggagtgcagtggtgcagtctcagctcactgcaacctccgcctcctgggttcaagtgattctcatgcctcagcctcctgaatagctgagattacagatatgcaccaccacgcccagctaatgtttgtatttttagtagacatggggctttgctatgttggccaggttggtcttgaactgctgacctcaggtgatctgcckgcctcagcctcccaaagtgctgggattacaggcgtgagccacggtgcccagccaccatctgctctttacagaaaaagtttgctc

SEQ ID NO: 172940 - DNA, 373 bp, Homo sapiens
aaaaaataaataaataaaataaaataaaatataaaaaaaagagatgagaaacaaatgatcagatttgcagagyaatctttcaagaatttatcctatttacacatgcagaaatgtcaattacaacattactatcagggcaacaaattatcaagtaaagctaccaatcagaattataatctatgagaaaggagttcactcagcttatttccaggagtacctggagtcacggtaccaacccttagccaaccacttggggctaagtccttggagttaacatagtcaccaatgaagttgttttgtgctcctgaggcactgaggcatgacatgctcaattgccagcactgcctaacacaaatatcaagatgtgccatga

SEQ ID NO: 172941 - DNA, 393 bp, Homo sapiens
aagtggttctgcctcagcctcccgagtaactggaattataggcatgcactaccacacccagataacttttgtatttttagtagagacagggtttcaccatgttggccaggctggtctcaaacttctgacctcaagtgatcctcccgcctcggcctcccaaagtgctgggattacaggtgtgagccaccaggcccgaccaatgctaggtctttgcagtgggtctcatatcattccacgtacactgaggcgcacttgttgccagagaccaaaaactttactgagcaccctttcacccccagcgcccmcttggctgggtctatttccaattcttttagtctctggggctgatgaaatgaagatgggagggtagggcaagagaaacaagaagagcta

SEQ ID NO: 172942 - DNA, 606 bp, Homo sapiens
gtgccactgcacaccggcccctgcaacagtgtgagactccgtctcagaaaaagaaaaagaaaaagaaaaagaaaagaaaagaagtaggtggttggtctgggttctgatcctaatttctgggctagtactcccatagctatggccctcttctctgctacatacaaggagaagggcttagttagctctgggatgccaagagygagagcctgggtaagggcctgttttagcttggcaaaggcttctctcatttctggggcccattccattagctcattttcaggcccccttgttgcttcatatagaggctttgctatgagcccaaaatttggtacccatattctgcaaaacccagccattccccaaaaagaatgaagctgctgcttggtgttggaggcagggctcaaaccacatatggtctgtgctcattctggggatatttgccaggctccgggtgttaagacatatccaaaatattggaaccattggagggtaatctgagccatctttgtatcccgtattccaggaaattcaaagtttgtatagtattttggtcagaagccacccaggttggctacgcacaagaaggtcatccacatactagagtat

SEQ ID NO: 172943 - DNA, 584 bp, Homo sapiens
ttttctttgaggattcagagttggaaatgaagtgcctttggccttagagaataagatacaggcaaccacaacagcctggaattatcctcctttcctaaaataattctgctgtcccgagtgacttacagccctgtggacccaacccagggtagggcggagacaggaggcagggtagtgagatgtgctttgaatctatctatgtccaggagtacyccttgccctaggagatttggggaacaaagtaagaggatgtcaactctccatctcctggcaaagagccacttgcttgtgcagtttaattttttgtttgtttgtttgcctttatagggactgcacattatctaccttgaagtgctttttctggcagcatagttactgttaaaaaggagaagggaaattgagatgagaggggcggggcagaaacatttttaaatattgctttatgggtgagaaaggaagaaaatatttgcagacaaaaaaaaaatctgccaggaaataatttcttcttttataaaactacgaggttagtctaaatatgatctttgcaatctcttttagttcaaaactgattatttgaagattag

SEQ ID NO: 172944 - DNA, 591 bp, Homo sapiens
aattaaatgtcttccttctgattttatcaaagtatagaacattaccaacatggcatttcattttatataaaattttatttgttttctcatggaataattaattaatttgaatcatttaaattttctatactggcttcrtgagtcaaatttattttcattattttcagaagtatttaaagtataaaaatgcaaatatatgtatttaattatattaaaatgtaatacttttgtttttttaaaaaaggaactattagtatttgtgaacttcaaacatcgttgcaaattatttgacctgaacactattcttacatttctctacatcctcaccaacatttgttattttccaggtttttgtttgttattatttttcattacttggtgagtttgaagtggtatctctttgtggttttgatttgcatttacctaatgaatagtaatgttgggcaacttttcatgtgtttgttggacatttttataatcattttgaagaaatgtttattcaaacccgttgcccatttttaattggttcatttttatttttcttatttagtttcatgagttctttacacattctgaatacaagatccttat

SEQ ID NO: 172945 - DNA, 586 bp, Homo sapiens
aatgtcttccttctgattttatcaaagtatagaacattaccaacatggcatttcattttatataaaattttatttgttttctcatggaataattaattaatttgaatcatttaaattttctatactggcttcgtgagtcaaatttattttcattattttcagaagtatttaaagtataaaaatgcaaatatatgtatttaattatattaaaatgtaatacttttgtttttttaraaaaggaactattagtatttgtgaacttcaaacatcgttgcaaattatttgacctgaacactattcttacatttctctacatcctcaccaacatttgttattttccaggtttttgtttgttattatttttcattacttggtgagtttgaagtggtatctctttgtggttttgatttgcatttacctaatgaatagtaatgttgggcaacttttcatgtgtttgttggacatttttataatcattttgaagaaatgtttattcaaacccgttgcccatttttaattggttcatttttatttttcttatttagtttcatgagttctttacacattctgaatacaagatccttat

SEQ ID NO: 172946 - DNA, 591 bp, Homo sapiens
aattaaatgtcttccttctgattttatcaaagtatagaacattaccaacatggcatttcattttatataaaattttatttgttttctcatggaataattaattaatttgaatcatttaaattttctatactggcttcgtgagtcaaatttattttcattattttcagaagtatttaaagtataaaaatgcaaatatatgtatttaattatattaaaatgtaatacttttgtttttttaaaaaaggaactattagtatttgtgaacttcaaacatcgttgcaaattatttgacctgaacactattcttacatttctctacatcctcaccaacatttgttattttccaggtttttgtttgttattatttttcattacttggtgagtttgaagtggtatctctttgtggttttgatttgcatttacctaatgaatagtaatgttgggcaacttttcatgtgtttgttggacatktttataatcattttgaagaaatgtttattcaaacccgttgcccatttttaattggttcatttttatttttcttatttagtttcatgagttctttacacattctgaatacaagatccttat

SEQ ID NO: 172947 - DNA, 511 bp, Homo sapiens
tcttcttttgaaaactgtctgttcatgtccttcacccactttttaataggcttgttttcttcttgtaaatttgtttaaactccttatagatactggatattagatctttgtcagatgcatagtttgcaaacatcttctcccattctgtagattgtctgtgtactctgttgatagtttccttttctgtgcagaaactctctagtttcactagatcccatttgtcaatctctgcttttgttgcaattgcttttgggagtcttcatcatgaaaattttgcaatttcttatgtccagaatggtattgtgtagattgttttccagggtttttatagtttttcgttttacatttaagtccttaatccatcttaagttgatttttgtctatggtgcaaagacattttgtctacrgtgcaaggactttttgtctacggtgaaaagacttttaagttgatttttgtctgtggtgcaaagaaggagcccagtttcagtcttctgcagtatggctagccagt

SEQ ID NO: 172948 - DNA, 511 bp, Homo sapiens
tcttcttttgaaaactgtctgttcatgtccttcacccactttttaataggcttgttttcttcttgtaaatttgtttaaactccttatagatactggatattagatctttgtcagatgcatagtttgcaaacatcttctcccattctgtagattgtctgtgtactctgttgatagtttccttttctgtgcagaaactctctagtttcactagatcccatttgtcaatctctgcttttgttgcaattgcttttgggagtcttcatcatgaaaattttgcaatttcttatgtccagaatggtattgtgtagattgttttccagggtttttatagtttttcgttttacatttaagtccttaatccatcttaagttgatttttgtctatggtgcaaagacattttgtctacggtgcaaggactttttgtctayggtgaaaagacttttaagttgatttttgtctgtggtgcaaagaaggagcccagtttcagtcttctgcagtatggctagccagt

SEQ ID NO: 172949 - DNA, 400 bp, Homo sapiens
tcattctttcaaagggagtggggcctttcccatccacttttttctaagaggaacctgagttgtaaatgaaataaaatcatgtgatcttgctgtcataaatattcatcttgggtaagtgactatttttaataatcaaattctttsttatccagagaagttgagggtgactgtacttttcctaacccacctgtaaaactacctaaggaatatatataaatatctgtatatatctctctctatatatacttactcctgactgtaataattcttatttattactatttaatttatatggaactctcataagctatctcataaactcacaaatcatcattcaataaatctgacaaatatcaagtcatgtactacacacaactgacaaatgattagtatcaaaata

SEQ ID NO: 172950 - DNA, 501 bp, Homo sapiens
taacctaaactcctaccttaaactccctccttccttctatttgctttgtggagttggggtagatttctgttggggcagaccctgtggggtcattcacaccagaggatgaccccaactgycaaagcaaatagaaggaatagaaggaagggtataacaaagatgagagtggaaattgatgaaatagagactgaaaaaaaaaagatatttaaaaacccaaaagtcaattctttaaaacatctacaaaattgacaaaactttatttaggttgatcaaataaagcagactcacattactaaaatcaggaaagaaagaaggtacataattattgaccttagagaaataatggtggcagtgcatgtactaaagctggaatgatacagagaaggttagcatggcccatgcacaaggatgacatgcaaattcttgaccgttccatatagttacatagcggtaaagggttcaattccataagaagacctcactatcctaaatatatatgga

SEQ ID NO: 172951 - DNA, 468 bp, Homo sapiens
tctaacatgattcagaatgattggaacttcctctgtgagtgagaattgaggaagaatgtggtgtaaataggaattttagggaggttaatgatgtgctatgtgaggtaattcatcacttgttgcctcttgagaaaggtatttwgctacttcttaaaacttttagggggcccaattattttacttatgaataagataccaatttgagaaaaaactttgacacagagtaaaaaggctgagctataactgctttatagatcaaataatcctaatccacagagtgatgattataatttatatttgcataatgtttttgagtactttcccattcactgcctcttttgagcatcagggcaatcctttgatgaaagtaaaacatgatattattctaacagtaaaaaaagaaaagctaagttcaaagagtttgagtaagttatccattacacagctggcaaattatgaaacttaaaa

SEQ ID NO: 172952 - DNA, 615 bp, Homo sapiens
tttaaggtcttctctacactgtttattctagttagccattcgtctaatcttttttcaaggtttttagcttccttgcaatgggttcgaacatcctcctttagcttggagaagtctgttattaccaaccttctgaagcctgcttctgtcaactcatcaaagtcattatctgtccagctttgttccgttgttggcaaggagctgcaatccttcggaggagaagaggcactctgatttttagaactttcagcttttctgctctggtttctccccatctttgtggttttatttacctttggtctttgatgttggtgayctacagatggggttttggtgtagatgacctttttgttgatgttgatgctattcctttctgtttgttagttttccttctgacagtcaggtctcccagctgcacgtctgttggagtttgctgaagttccactccagaccgtttgcctggttatcaccagcagaggctgtagaacagcaaatattgccgaacagcaaatactactacctgatccttcctctggaagcttcatcccagagggtcagccacctatatgaggtgtctgtcggcccctactgggaagtgtctcctagttaggctacaca

SEQ ID NO: 172953 - DNA, 538 bp, Homo sapiens
ttaaggtcttctctacactgtttattctagttagccattcgtctaatcttttttcaaggtttttagcttccttgcaatgggttcgaacatcctcctttagcttggagaagtctgttattaccaaccttctgaagcctgcttctgtcaactcatcaaagtcattatctgtccagctttgttccgttgttggcaaggagctgcaatccttcggaggagaagaggcactctgatttttagaactttcagcttttctgctctggtttctccccatctttgtggttttatttacctttggtctttgatgttggtgacctacagatggggttttggtgtagatgacctttttgttgatgttgatgctattcctttctgtttgttagttttccttctgacagtcaggtctcccagctgcasgtctgttggagtttgctgaagttccactccagaccgtttgcctggttatcaccagcagaggctgtagaacagcaaatattgccgaacagcaaatactactacctgatccttcctctggaagctt

SEQ ID NO: 172954 - DNA, 538 bp, Homo sapiens
aaacgtgttcacacaaaagcctgtacacgctaataatcacagcatcattattcctagtggccaaaaagtagtgacatctattgattgatgaatggataaacaaatatcgtatatccttaccctagaatattattcagcaataaaattgagtacatattgatatattttacaatatgaacgaactttgtaaatgttaagtgaaaggtgccagtgacaaaagaccacacattgtatgattttattcatgtgaaatatccagaatatgtaaatctgtagagacagaaagtagatgagtggctttcagagtcttgcgggagagcaaaccaaggagatgaggagcaaccactaatggatttggggcttcctttatggggtgatgaaagtttttaaaaattatgtaaaggtgatgtttgcacaatgtgtgattatacttaaaatccaccaactttatctttaaaaggttgaatgttatggtatgtgaattacatcttaataaagctgatawatgaaaaaatccaaaaaatttaattgaatatcc

SEQ ID NO: 172955 - DNA, 470 bp, Homo sapiens
taatagtaaacaaaagacaatattgcaatcctggaggaattgcagaaatttgtgttaccatcaaggacttgaaagatgcagggttggtgattcctaccataaccccatttacctatttgtgcagaaaaaaaattgatcttgtgtgtgtgtgtgtgtgtgtataaatatatgtatatgtgtatgtgtgtgtttataatgtacatatgtttatcattaatgtatagaattaaaaatagagacacagagaggttatgcarcttgcctgaggttacccaactgggaattgtggggctggaataaaaagatagtttattgagactctaaaacctgtgaagtttacactgcatgaacaggagttttgtcctctaagagtgataggtatctgcagccgttccttggaagtctgctctttttcggtgagaaagtctaggagtcattgtcagtctattcagggagtgactgttgcttca

SEQ ID NO: 172956 - DNA, 633 bp, Homo sapiens
taaattttgtgtatatttttccttgattctatggtttagaacttytgcctccagaaaggtctaaaatacaaacttgaccatgtcatatctctgcctaaaagacttgtgctaaatagtatacaaaactaaattctgaaaaaagtataattttgatatactgtaattacaccctctattactttgtagttcaatctttcattttgtagaaaattgttatgtgttagtccattcttgcattgctacaaagaagtacctaaatctgggtgatttataaggaaaagaaatttgattggctcatggttctgtgggctttataggaagcatggtgctggcatctgcttctggtgaagcatcaggaagcttccaatcatggcagaggtgaaggggagacagcatgtcacgtggatgaaccagagcaagagaaagagaaggggaaggtccctaactcctttaaacaaccagttctttggtgaactaagtgagcaagaactcactcatcaccaaggagatggtgctaagccattcatgagggatccgttcccatgatccaaaaactcccaccaggctccacttcaacactggggattgcatttaaacatgagatttggaggggacaaatatccaaaccatatc

SEQ ID NO: 172957 - DNA, 568 bp, Homo sapiens
tctccagggcatgttggagacatttgtggtagaccctctcatcacagacccagaggcttaggaggaaaaaatggttttgtgggccaggcacagggtccctcagctgtgtgcactctagggacttggtgtctttcatttcagccactccagccatgactaaaagaggccaatgtacagctcaggctgttgcttcagagagtggaaaccccaagccttagcagcttctacatggtgttgagcctgccagttcacagaagtcaagaattgaggtttgggaacctctgcctagatttcagaagatgtatgaaaactactggaagcccaggcagaagtttgctgcaggggtgggtctctcatggagaamctctgctagggtagtgcagaaggaaagtttggggtcagagcccccacacagagtcctcactggggcactgcctggtggagctgtgagaagagggccactgtcctccagaccccagaatggtagatccaccaacagcttgcaccatgtacctggaaaaactgcagatgctcaacaccagcccgtgaaaccaaagccacaggggca

SEQ ID NO: 172958 - DNA, 482 bp, Homo sapiens
acaccagtcacattggctctgttggtcatggaggcggcattgctggcaaygatgagtgctggatgggatggtccttgggccctggggtctgtgtgcatcaattctcctaccttagggtctgtctcaccactgtgctgtactgcctgcttcttagagtgcagggagctgcataagcttaagtgctggtgtcatggttgtactgctggggctagctggggtcatggcaccacttgattgtacaccatgccttttgtgtgggcatggtgggatgatggtaaggcctcagaaatgtggagattcaagggctattggcccccaaggcaagatgcactctaacagtggccctgttcacaaaatggcatctgccatagtagcttaggtccgtgggagtggagagaacccagaaagggctccttttcttaggcaatgcaaccatatggactccaggcagcttcctatattgggctcagggcctgggagaa

SEQ ID NO: 172959 - DNA, 482 bp, Homo sapiens
acaccagtcacattggctctgttggtcatggaggcggcattgctggcaacgatgagtgctggatgggatggtccttgggccctggggtctgtgtgcatcaattctcctaccttagggtctgtctcaccactgtgctgtactgcctgcttcttagagtgcagggagctgcatargcttaagtgctggtgtcatggttgtactgctggggctagctggggtcatggcaccacttgattgtacaccatgccttttgtgtgggcatggtgggatgatggtaaggcctcagaaatgtggagattcaagggctattggcccccaaggcaagatgcactctaacagtggccctgttcacaaaatggcatctgccatagtagcttaggtccgtgggagtggagagaacccagaaagggctccttttcttaggcaatgcaaccatatggactccaggcagcttcctatattgggctcagggcctgggagaa

SEQ ID NO: 172960 - DNA, 574 bp, Homo sapiens
aagcatctctgttaaatttcaatccattgatcatggccctgccttctccaacatcgctactctcctgacttcactgaactcttggccctctcagcttctctaacactgtttatccgttttctttcctgaactccatctctatgccagtgaacagcaatggtcatgcctttggctcactattcttccaactgacacattctctttgagtaatctccacaagtctcatggtttcaatcaccacctytcagctcaggacctcttccctgagctatcatttgcctatccttgtctaaaaaaatctgtacttggttatccaacaaataattcaaactttggatgtctaaactggaatatgcttcccttctaaacctagaccatcccttttttcttattgttccctcaccaacacacacatacactacctaattcctgtctatcctttaagcttcagttcagaaatttacctttcccagaaaatctttactgaatctccatgttgggatagatctgtgcttttctaacacccccagcatatctcaattatggaataacacatgctactacataatttttt

SEQ ID NO: 172961 - DNA, 407 bp, Homo sapiens
ggttcatcatgaatcttaggcttgttgcttcttgctgcctagtagtaaacaataaacctgcttcatgtaatgtgtgtgtgtatgtttgtgtgtgttctgtctgtttggamtcaggcaagcagtgaaagtacaagccaagatgcagtggactgaagtggtaacacttacacagtaagtctgcttcacataattcatgcagtgagcaagatcaatctgacagaaccatggtttcctgctgaagcagtaaagccaatatccctcagtactgggcccatgggaaaaaaaaatcagcttgggaatgaagtgtctgtaaatacagctggatgatttatggagaaggaagtgtgataagtggagcatagattacctctctttttcccccagagatgtgagtgagctggctgcac

SEQ ID NO: 172962 - DNA, 407 bp, Homo sapiens
ggttcatcatgaatcttaggcttgttgcttcttgctgcctagtagtaaacaataaacctgcttcatgtaatgtgtgtgtgtatgtttgtgtgtgttctgtctgtttggaatcaggcaagcagtgaaagtacaagccaagatgcagtggactgaagtggtaacacttacacagtaagtctgcttcacataattcatgcagtgagcaagatcaatctgacagaaccatggtttcctgctgaagcagtaaagccaatatccctcagtactgggcccatgggaaaaaaaaatcagcttgggaatgaagtgtctgtaaatacagctggatratttatggagaaggaagtgtgataagtggagcatagattacctctctttttcccccagagatgtgagtgagctggctgcac

SEQ ID NO: 172963 - DNA, 310 bp, Homo sapiens
gttgtagcatgtgtcaggatttcttgcctttttaagctrcataaatatttcattatgtgtatatttcacattttgtttattcattcatccatttgtttatctcatagacatttgggttgtttccaccttttggcagttgtgactaatgctgctaagaacatgtgtgtacaaatatctttttgagttcctgctttcagttcttttggaattgctggatcttatggtaatcctatgcttaatttttttgaggaactgcagtaatgttttctatagcagctgcaccattttcctttaccaccagcagagcact

SEQ ID NO: 172964 - DNA, 490 bp, Homo sapiens
cttttagttaattcaatatctatagaagtaatgctaatgactggtttgctactaataaatatgtgggtaaatctctgtttggggctctcagctctgaaggctgtgagacccctgatttcccacttcacacytctatatttctgtgtgtgtgtgtctttaattcctctagcgccactgggttagggtctccccaaccgagctggtctcagcagcactgacatcaaaaaagaagaaaaacttcaaattaataacctaatggtgcatcttgactagaaaagggcaaacaaaaccccaaattagtagaagaaaagaaataataaagatcagagcagaaataaatgaatgtggaatgaagaaaatacaaaagatcaatgaaacaagaggttgtttatcttttggaaagataaacaaaattgacaaacctttagccagactaatgaagaaaaaaagggagaagacccaaataaataaaatcagaaatgaaaaggga

SEQ ID NO: 172965 - DNA, 440 bp, Homo sapiens
aggtctcatacctttaacaaccatgtcccctacctctttggagttcctccatgccttgctatgttgtcttttcactgtctacctgcaacccctggaaacaaggaccctttcagtgtaagagtttttattgctgacagacttaaggaaatagattgagaattaaaaaacggcagatgtgagaaaatgacaaagcttaaaaagattcttacagtagcagtccccartctctagtttttgactctctgcaagatattatctgaaagtcctgatattttgcccttggtttttatttctaggggtgggaaccgccaaacctctcccttctttttgacttcacccttggataccatcaaggccagaggatggaaccaagataacataaaataggtgctcctttgtgataatgggctatttgtatctctgagggcttccacacagga

SEQ ID NO: 172966 - DNA, 327 bp, Homo sapiens
aagggttgatgctgtgtacaagtatatcttgcacagaggaagaaagaactaaaaggttttaaagtggttttaaaggggcacaattccaaactcaaactggaattgagctgtgtgcaactttggcacaatgagcactgctgctcagctgtgaaaggagtttttgaaatgtgaaataggaaaagataactgagaaaaaagactgttgatcctaaggagactgttttctcggatttttaatctttctttgcmttcactggtttggaaccgccttcactgtgaatctctcctgggcaaacagaatgtgaattgttgccttcacacagcccc

SEQ ID NO: 172967 - DNA, 614 bp, Homo sapiens
ccttaagtaaatttagagaaagaatttagaacactcagaacctgtgacacagcattgcaatgttggttcctgtttctttttgattatcaatgataggaagatagacagtatccaaagcattcctggctaggtacaggggctcatgcctataataccagcattttgggatgctgaggccagaggatcgcttgagcccaggagttcaagaccagcctaggtaacatagtgggaccttgtctctacaaaaaaaaaaaaaattaattagctggtcatgggggggggcccctgtagtcccagctgctttgkggggctgaggtgggaaggtcacttggttcaggaaagtgaaggcttcagtgagcagtgacagggccactgcactcagcctgggtgacagagggagaccctgtctcaaaaaaacacaaaaccaaccaaaacccaaagcattccttgatataaccctgcaaggaaaccgccaagctggtacatattgcttttgttgatttccagggcttttcagatagcatatttcagcccagatttctttcctgaatccccaaactcacacgttaaactgcctgcttgaccatctccacctaacactttaaaacccaact

SEQ ID NO: 172968 - DNA, 514 bp, Homo sapiens
ggctcattaaaaagcggatattattgttaatcttccaataactactatttccaacaacaggctgaaggggctcagaaacgtttgttgagtaaaaacacaaggaaacagtagcacagatttcctgctctcctttacgatcgatgacctgtctaaggactgtgatctctgttcactacagattgtcacctgcattaatctactgtcacccattaacctatcaaataaggcagtctaaaaactccaggcgtccctttccgtaaggaccckgactgttgaactggaaagctaaaattcaaggcgtgacaattgccctttgtcccacattcctccaccggtcgcctgcttatttaaatggtgcgtcccctcgggtaccacttgaacaaaacctgcccagagcgctccctgtgtagattcgctggaagcagctggaggctccagttctcatctgctcaggtgtccacggcgccttggcgaactcggccactccagttcctcacgtggtgagcactcaggg

SEQ ID NO: 172969 - DNA, 621 bp, Homo sapiens
tgcatttccctaatggctaatgatgttgaaaatgtttttcagcgacttatttttcatctatgtatcttytttcatacattatctcataatgtcttttgctcatgttctaattcaattgtttgctttttttactggtgagttttgagtgttctttatgtattctgtatactagctcttggtcagatgtggtttacaaatattttcttacacagtagtttgtctttttatcctcataacagggtctgtcaaagtgcatttttttttttagtttggataaaggctagtttatcaatttgtcctttcatggattgggtttctggggtaaagtctaagaactttacctagccccagcttttgaagattttcttctatgtttcttttcaaagagttttagagttttacattttatatttaagtctacaatccctttggagttaattttgtataaaatgtgagacttaggttgacattctcttttcctctatggatgtgcaaccagcaccatttgtttttaggctttcttccattgacctgcctttacaccttcgtaaaacgtccattaggcatatttgtgtgagtctatttctgaattctctgttttctttcatttatttatgtgtc

SEQ ID NO: 172970 - DNA, 521 bp, Homo sapiens
  misc_feature (1)...(521): n = A,T,C or G
aatggtgaacattaaatgaccccatacagatgtaattgttaaacctagaatctggaaaactggacagaacaaataacccagtttcttctgcaaatatgttgcaatntaaatgaaaaggaatagaagggagattgtaaatttaaaaagagactttaaaagagcctcacaatacattcagtaaaaattgacagagaaatagcagcaatagaaaaatygataattatatctggagattttagcatccttctctcagcaattggtagaacaagtaaaacaaattccataaagatatcaaagatgtgataacactattagccaactaaacctttgaccttatagaacattacatccaaaaagcacacaatatacattctttttgagagcatatggaatgttcaagacagacctgatcctgggccataaaacaaatccataaatttcaaatgattaaaatcatattagttctctgaccaaagcagtattaatttaggaataaataacaaaaagacatgatagaaaat

SEQ ID NO: 172971 - DNA, 521 bp, Homo sapiens
  misc_feature (1)...(521): n = A,T,C or G
aatggtgaacattaaatgaccccatacagatgtaattgttaaacctagaatctggaaaactggacagaacaaataacccagtttcttctgcaaatatgttgcaatntaaatgaaaaggaatagaagggagattgtaaatttaaaaagagactttaaaagagcctcacaatacattcagtaaaaattgacagagaaatagcagcaatagaaaaattgataattatatctggagattttagcatccttctctcagcaattggtagaacaagtaaaamaaattccataaagatatcaaagatgtgataacactattagccaactaaacctttgaccttatagaacattacatccaaaaagcacacaatatacattctttttgagagcatatggaatgttcaagacagacctgatcctgggccataaaacaaatccataaatttcaaatgattaaaatcatattagttctctgaccaaagcagtattaatttaggaataaataacaaaaagacatgatagaaaat

SEQ ID NO: 172972 - DNA, 397 bp, Homo sapiens
gccagagaccaaggtgcaacagggctgtcctgggctgcaggaccagtaactgatgaagaatttcttctggccccaccactactggctgctttcttcccaaaaaggccatttctaatttttgcttgaaagcatagtatctgcctgcctgtttctatttccccratagttggcaggatgtgatgttgctttagactgcccttctgactcagtctgttcacccataaagcaagcataaaaatgtttataccatccctgactccatttggggttacaaattctttgaatgcctttggtgcatggtaagtacaaactattgcacctcatgttttaaagcaattgtgtatgcataagatctttatgccttcttttctctttccagaaaatagtccctttccag

SEQ ID NO: 172973 - DNA, 637 bp, Homo sapiens
gtgtatgtgtacacatggcaataatccactgtcttgattattatggcataataactgttaaaatcatatttttcttttcaaaaattgttttgctgttttaggttctttgcatttccaaaaaaattgtagaatcagcacttaaatttcttcaaaaaaagtgttgatattttgattgggattaagttgaatcaatgtcagttyggaaagattgagtgtcatttagctttttgtttatttacatattctgtaatttctctaagcaatgtcttattattttcaatgtacaaggcttccagatattttgttaaatttgtgcctatatattggattttttgagttttttacaaatagtatttttctgtaatttcaattgccagttattcattgctactacatagaaatacaattaacttttgtatattgaccatatatcttgtgacttactaaactcagttattagtgcttctagcttttttatagattccttaatattttcaacatagatgattaagaaatttataaaataaataagttttctttctttctaatctatatgagttttatttctttttcttgccttatactggttaggacctccagaataatgctggatacaagttatgtactagacatcctt

SEQ ID NO: 172974 - DNA, 637 bp, Homo sapiens
gtgtatgtgtacacatggcaataatccactgtcttgattattatggcataataactgttaaaatcatatttttcttttcaaaaattgttttgctgttttaggttctttgcatttccaaaaaaattgtagaatcagcacttaaatttcttcaaaaaaagtgttgatattttgattgggattaagttgaatcaatgtcagttcggaaagattgagtgtcatttagctttttgtttatttacatattctgtaatttctctaagcaatgtcttattattttcaatgtacaaggcttccagatattttgttaaatttrtgcctatatattggattttttgagttttttacaaatagtatttttctgtaatttcaattgccagttattcattgctactacatagaaatacaattaacttttgtatattgaccatatatcttgtgacttactaaactcagttattagtgcttctagcttttttatagattccttaatattttcaacatagatgattaagaaatttataaaataaataagttttctttctttctaatctatatgagttttatttctttttcttgccttatactggttaggacctccagaataatgctggatacaagttatgtactagacatcctt

SEQ ID NO: 172975 - DNA, 637 bp, Homo sapiens
gtgtatgtgtacacatggcaataatccactgtcttgattattatggcataataactgttaaaatcatatttttcttttcaaaaattgttttgctgttttaggttctttgcatttccaaaaaaattgtagaatcagcacttaaatttcttcaaaaaaagtgttgatattttgattgggattaagttgaatcaatgtcagttcggaaagattgagtgtcatttagctttttgtttatttacatattctgtaatttctctaagcaatgtcttattattttcaatgtacaaggcttccagatattttgttaaatttgtgcctatayattggattttttgagttttttacaaatagtatttttctgtaatttcaattgccagttattcattgctactacatagaaatacaattaacttttgtatattgaccatatatcttgtgacttactaaactcagttattagtgcttctagcttttttatagattccttaatattttcaacatagatgattaagaaatttataaaataaataagttttctttctttctaatctatatgagttttatttctttttcttgccttatactggttaggacctccagaataatgctggatacaagttatgtactagacatcctt

SEQ ID NO: 172976 - DNA, 432 bp, Homo sapiens
aagatagaaaactcttagaccccaaccgctccattccatccgaacaccacagaataatctgttcaccccacccacacccatgccagcctagattccatccccccagactgtcaccaggcaccctttgcctccctgctggcaatgacatgggaggcctagtggagaatcgggactttcaccatggcccagcagtgacaaagccacctcctccatgatgtcagtgaattccaccctgtggtgctcgcgtgtttcgggtggtcctagttaaccagcttcccagggaagcctcttccyttgagttcgctttgcatcattgttgagtcttgtacaccgtctgatgctcatgcattttattctggcagtgctcttaccagaagaatagcaggagcaggatggtgtcgtgggccagatttagtcacaggttagatgact

SEQ ID NO: 172977 - DNA, 383 bp, Homo sapiens
atctcataaccattccagccctgaaattctaggattcatctaatttgggactagtaggttccatcaaattagaacctttcaaagggcaggtaatatgcactgactgtttaagtttaatttcaagtaataaatttcagccaactacatggtaatcatgttaaacttgtaaggtctaaaaaaggttgtttttttgtgtgtatttccaattggtcagttttatgtattggtttagcttttgcttctctacacagattttcaatattgagatcaaatcttcacgagtcctaagaaatgacctacgttgggaagagaagtttaacacaycctaactcctaccaaaaggaaaagaaaaaaaaagggctacaaataatttaacgtttgag

SEQ ID NO: 172978 - DNA, 605 bp, Homo sapiens
aggaataatttttgagaataatctttaaagtttgctttgaccccagaaggtctcctcttaggaatacctttccctggttctgtttggtaaactaacaagactacagtttagcttattgctgtcatgaaactacccatattttcttatgtccatctcacaaaaatatccattgtttttgatatcatcttaaggcataaacttcctaacactcctcttcaaataaagtcaatacatttcaggaaggcttccgagctttcaattcttatggcctttctcttattggaaaaatctccaagccactrctcctagacagggggcaggcatagtggcctagctttcttgaagtgacattcctgtttcatgagtagggtgctgagcaggggagatattctctggtagtattgcctttctctccctacgttgaactctacattaatgaacaagctttggtaagaaaattattgctccagttctcttggactgtcatgcctggcacagaaattcttacctaccagggaggctaagtgaaaaaagagatcatcatacctctcagctgcactatcccggaatttagcctttgccatgtgaactgcagcagataataa

SEQ ID NO: 172979 - DNA, 416 bp, Homo sapiens
aacattcaatacatgcatatagttttagctgttatttatggttatatttaaatatggccatatgtaaaatatataaatatatgtatacatgcaaacacactcattcacacaatctccctgaaaacatgaaaatccaacagtgaagcagtgtgtattcaatctactgcagttaggagaagaacacctttacataatcttggaaatgtttcaaaataaaaaaaggttaggaaaaagtgtttactgggttttagattcaagagtggatgattttaaggagagtcttagaggggaaaayaattatttgagatggtcagaatttggcataatatctttggattgaagataaaagagaggagagggcctcgaactcagtcttggtgagcacatgtatctgacaggtaagctgtttgttgttt

SEQ ID NO: 172980 - DNA, 560 bp, Homo sapiens
tgctttgtttcctctgtagcccccagaattcacagcacagtgttctgcatattacttttaacatgtgaaaattggtgaaattttcaaaatattagcaaatcatatttattgagcccatactaggtgattggtattgggttaatcattatatttgtgaatctgttttattttctgtgaagttaaaatgatgtgctagataatatcaaagtttttaggcactgctattmttggcttttaaaatattctgcttgcctatcaatgtcagttctattaatttagggaggaaaaaggtgtttttttgcagtaccttcctaaaacaaacctgctcaatagttcaaggcgatctcaatttttccacagaagtctgcaacaaattctcaaatctgacagaaaagtacctacataatattgagaatataattttgatactgatgatatatgtatcttttgagtagactttctagagctttgttaaaattaaaattagtagactgatacttgtatatcggaagatttctaaggtagccaaaacaggcttctcatgaaacaggaaaggcatt

SEQ ID NO: 172981 - DNA, 587 bp, Homo sapiens
atgtattattccctcagagtaaaagtcatacatcatttctaaaatgagagaaagacaaagttaatagaatatattttgacatatttgattcaaaattgagtgtcttcatatatctgcattcatgatggcattctaaaggagagaaaataaagtcttacttgaaagcacaaacaaaagataagagaaactggcacattaacatctcagaaaatttctgttggtagtttaattgaagatcgtgaaaggaatcgtatactgttcctgaaagatacacttttatttaaaaagtcttgtatttttagcactcattggcacatgcaagtttcatttcgtatatgtcaaattttttcacatactaaaaaatgttgtatacacaaatcaacaaagatttaaaatataaaatcaaatgttatatttgtacaatgtgtctataccaatatgtattcatacatatgaytcaagatattcattatctcaaacttagaaccaagccctacatcagaaaaactaaattttagtaccatttcaacatgagatatttggctgcttgggttgattttgctgatttggccaactgggattgtatt

SEQ ID NO: 172982 - DNA, 597 bp, Homo sapiens
tacttgcctctttgttaacttttatttattaaatgttggagccaggattcaaaactgaagtaattccaggggcacacgctcttgtaattatactacactgcctctcaaatgggaggcagagaatgagccaacaaaggaaaccaaaaataatggtttcagcacaacagactcagaagacccaaggagaaggcatccaacactatggaaaagamtaaaagtccccactgatcaccaagtctgctgatcaacaggtcacgggagattgcatttccctttagagtgatttattgaaaaaaagaaaaaaaaggttacacaaaaggacaatttcatccatcctgaaatgagcccgggcactaacaatgtccgaaaggattatgcagacaatattaaaaaatatttttcattacaggatttacataaggagacatatgcttcctctttaagaaactacccacagaatacacaactcactgtgggaaaagggcaagcaaagtgtatttatggtttggtttttaaatgtaactatcatagaaaacataagaaatctatgctttggcatttccagagagcagctgctgagaaggcaatgagggtggg

SEQ ID NO: 172983 - DNA, 421 bp, Homo sapiens
ggattggcgtgggggcagaacaaaggaaactgatcaatacgactgaaaacataacttggagaaggggcttatacacagatttcttttattacaagtcattaggagcccccagtcttaaaacctaacttttccaactgaagggaaattaaaatgaaaaaataaaaaccctaatcgctagatgacatacagagtattctcaagcacagcatcttcctctcacactagcttggcttttctcctgagtagaggttctcaatctccttcccgcccccgccactrctggggacactcgacaacacctggaaagatttgtggttgttagaatttgggggagaggagaagggtgctacctggcattaaatgggcacagaccaggaatgctgccaaacatcaaagtgatacccaatactacccaaaatga

SEQ ID NO: 172984 - DNA, 407 bp, Homo sapiens
ctggattggcgtgggggcagaacaaaggaaactgatcaatacgactgaaaacataacttggagaaggggcttatacacagatttcttttattacaagtcattaggagcccccagtcttaaaacctaacttttccaactgaagggaaattaaaatgaaaaaataaaaaccctaatcgctagatgacatacagagtattctcaagcacagcatcttcctctcacactagcttggcttttctcctgagtagaggttctcaatctccttcccgcccccgccactgctggggacactcgacaacacctggaaagatttktggttgttagaatttgggggagaggagaagggtgctacctggcattaaatgggcacagaccaggaatgctgccaaacatcaaagtgataccca

SEQ ID NO: 172985 - DNA, 534 bp, Homo sapiens
aactgactcttttggtccctgactttggcttctgaatctttaaaagtttagcagtacagtaaccgctgtccaattaaaggtagcaggttgagaaaaggcttcagcgcttatctgcaggtgcaaggtcaaatgtgcccaaggggcactggcaatccgttgtccttcccttagaagaactgaggtggtattgacctagacacagcccaggtgcctctcccgattctataaggagacgcttctcaaactttaatgagagcatgaatcacctggaggatcttgttaaagcacagattgtgatttagtaggtctggctggggcctgagatcctgcatttctaatagattcccaggtgatattgatgctgctagtcccaggtccacaactggagcagggaggtccttgaaggagggttcccttaccttacagccaaagcaaacatgagrggggtaggaaaagaaaaagacagctgatggtttggtgacaagatgcactgaagccagagtggaggctgatggccacaaagaaccagccagt

SEQ ID NO: 172986 - DNA, 545 bp, Homo sapiens
gtctaagtcatctctcagatggcacaagtccaactctaatgcattaaaacagaagaaatctataaacaccttcatgtatttgatgagtaagttggggtttctttaactggctgtttattcctctgttcagaacaatacattaaaacaagaaccaacaacagcaagtcactgacattgtgccaagttattaaagacttttgtttttgtaaagtgggytgttgtattggggacatctatgctagagtccccaggacctacccctccattcctgtgcagtatccttttgtttttgactcactggattgagaattgtgaggtggttggacagtgttatctcttttgtagaaaactattaagaaagactggttttaaggggaggttatctaatttgcgtttccatgggtggtaaatatacccttcccactcatttatctctgtgtccctccacataattgcagatttggttctgtatgtcttttgggtaattttttgaatttcacttcccataagtggaattatgtgtcactcctgttagagactgttgg

SEQ ID NO: 172987 - DNA, 482 bp, Homo sapiens
aatagaataatacactggttctttatcaacagcagacttatgtcaattaaggcattaattgaaaggcattragaaaaagatatcctgtgaactggaattaggggtagtattctttcatttgaaatataaaaaggataattttgatgtttcatggacatttctaataagagcataaggagcctgcatcttcctgttacccacagtggggaactaatgcttcagcctggtggagttctcgctggatcgtgtaggagccacagacttagccagactgcctaacttcatatcttggctttgcgagggcaagttgctccacttctttgagtcactttttatctctttcaaaatggagacgataataatggtttctttaaagggttgttaaatgattaaatgattaatatatgtaaagtgctcagaacagtgtacataataagcactatagaagtgtaggctgttgttactgcacagtacttgaataa

SEQ ID NO: 172988 - DNA, 474 bp, Homo sapiens
caggctgggcgacagagcgagactctatctcaaaaaaaaaaaaaaattgataatgataatartagtgcagtctaaacaactataatacataaggaggaagaatttcccttccagaatctgtgtgagtccattgtttttcagtgttctgaaaacgaaaagagtactgatcagattgcataatttgctaaaataataaccaattttcaaaattgcttttatgtatcaagcattaacatatgtaaaagcagttcgtaaaatgctaaaaacagttttgatttagattatgaattattactgaaaatcaattaaaaataaggtagagaaaacattttcatatcctagtaataactaaatgttaaacattttaaaatatttgataattctgtttggcagatttgaatgtccaaaatatcatctctaagactttcaccagtataaacaaatggattccccaaattaatccccttctttcca

SEQ ID NO: 172989 - DNA, 586 bp, Homo sapiens
aaaattaaatatgtgatgggaagaaccgtttcttgatgaggaaaaaaaaagcccatagatggargtagaaaggaataaccatttttcctgcaaaataaatgatgaagacctacatctagacttggcctgacaatgtttttaaattacaaggctatggaagatgacttacaaacatccaagaaggaaataaaatatgttacctagaaagaacaaaaacataatgtcagtcttggacttcttcgctgcacactaaattacaggatataattattcaaagctattttttcagtaactaagagaaagaaagaactggcagtgagcaccaaaacaagttaattgaagacataaatctaaagtataaatatggccacaaagctaagttcaagtatactgcacttatttatgcacctcttcatatcctgttgatgccccatccccctggtctaagcacttgctctgcttcccaacctaagtagccctatcaaaggctcatgccattcctgcaataataattcctgcctcaatcgctattttatctcctgacaccaccagctggctcagcctttccaagtgggtgttaaagcat

SEQ ID NO: 172990 - DNA, 586 bp, Homo sapiens
aaaattaaatatgtgatgggaagaaccgtttcttgatgaggaaaaaaaaagcccatagatggaggtagaaaggaataaccatttttcctgcaaaataaatgatgaagacctacatctagacttggcctgacaatgtttttaaattacaaggctatggaagatgacttacaaacatccaagaaggaaataaaatatgttacctagaaagaacaaaaacataatgtcagtcttggacttcttcgctgcacactaaattacaggatatrattattcaaagctattttttcagtaactaagagaaagaaagaactggcagtgagcaccaaaacaagttaattgaagacataaatctaaagtataaatatggccacaaagctaagttcaagtatactgcacttatttatgcacctcttcatatcctgttgatgccccatccccctggtctaagcacttgctctgcttcccaacctaagtagccctatcaaaggctcatgccattcctgcaataataattcctgcctcaatcgctattttatctcctgacaccaccagctggctcagcctttccaagtgggtgttaaagcat

SEQ ID NO: 172991 - DNA, 470 bp, Homo sapiens
ggaattcattcatagctatgaaaaaagattcaattttattaattaaaacatgagagctatgatacattctgaataaaacagaagcaaaatgtaacactagcagttaaatgtgatttctattcaagacaagctgtctggttcttttgattaaagcctcctttctgatgactgytctgtcttcaatttcaagaactttttttttttttttttggtcaatctttgctatacaatggctatcaccattgaatggagagggtggccaccatttcccctgcattatttctaccataatcagtccatagtaatatattactgtcctcccataaaaattccagcctcctaaggtccttgcctgctctatttcagttagttggtaaagcattcctttcctatatcccacagtggccctctgtctggagaagggtctccagaatgcaatcagcatgatgactaacacagtcttacattac

SEQ ID NO: 172992 - DNA, 628 bp, Homo sapiens
tttgttatggcagacctagaaaagtattaatatagtagtaacatcaaagattactgatactaatcaccataacacataaaatagtaaggaaaaagttcaaaatattttggcaattatcaaaatgtgatatcaaaatgtgacataragaaacaaagtgagcacatgctattggaaaaatggtaccaatagacttacttgatgcagggttgtcacaaatcttcaattagtaaaaaatgcagtatctgtgaagcacaataatgcaaagtttaataaaataaggtatgcatgtatatatcacattttattgatccattattccataattggacagttggtcagtttccagcttttagctattgtgaataatgcttctatgaacattggtttacaaatatatgctcaagtccctgatatcaattattttgcatatatacttggaagtggaattgctaaatcatatgatgtatttgatgaattttcatatgttgaaacatccttgcattccagaaacaaatcccacttgatcataggtgtataatcacatgctgctgaattcagtttgttcatattttgttgaaattttaaaattttttacattaattttcataagagttattgatctgtattt

SEQ ID NO: 172993 - DNA, 427 bp, Homo sapiens
gtctcctttacttgtagcaaaatgaaataaacaaagaaaaaggaaatttcccccaagccaacacatagacaggaaaagacttcagaaatccaggaggaatgacaaacatttttaaaataacattggattttaaattaaagtcttaactaaaagtgttctaaaaatcaatgtgttccgcttaagggaaagagggaggactccaacacacttctaagcacacagtaggcactcaagaaatcactgttgattgctagcaaagcagtgacaaaaatcttgtgtttttctagaatagaagctgaatcaaggttttctctctgtctggatagtgtggmtgttccagagagtgtaacggtaaaaggacaagaaagtaagaaagaagcacttaagggagtgaaagagagactttggaattagcaaagacaagatc

SEQ ID NO: 172994 - DNA, 406 bp, Homo sapiens
atgtcaaatatttattttattaaaattgaaattcagtttaaggatgcatttgtctttaaaaatattaaacagatctttctgctattttattttatctttaaaaagaagaaagtgtattctccacactctacgatgaactcaaacaagtcagcaagaaaaaaacaaacaatcccatcaaaaagtgggttaaggcatgaatagacaattctccaaagaagatatacaaatagcccacaaacatgtaaaaaatgcttaacatcactaatgatcagggaaatgcaaatcaaaaccacaatgcaatccaccttactcctgcaagaatagcaataatttwaaaaaaatctgaaaaccatacatgttggcatggatgcagcgaaaagggaagacttctacactgctggtagga

SEQ ID NO: 172995 - DNA, 583 bp, Homo sapiens
tctaactaaccaatcctaaacctgcttaccctaccttaccccttccttcccatagaaaatacaataaaggctctagcacactttcccctcacttgcttcgcctcttgaccaactctggttcttccccatgtgaccctgcatgacrtcttgtacctgtttctagggatctgtgagtatgaaaacttcttccttcatgacagtcgctcctgtgtctgtgtgtcttatcatacctgactaacacaaatctcaggcacccttaccacaaaagaagtcagaatatcactatttcaaatagcaaggagaaaacaaagcgagctagaaagaaaagggaatctcagtaccataggaaagaataggccttatgttgtgacagtgttgaaggggttttgactccaagagggtcatgtgatgagaaggggaggctgctaaaattgacttgaagatgagttttcatagctgagaccacacagttttaactaagatttttaattgcggttgtcttaatggtagttggcaggggggcggggtggaggtataattttaagatctattttatggaatgtgtctattctcaagcaaccct

SEQ ID NO: 172996 - DNA, 258 bp, Homo sapiens
gagctttacatgcaaagctccagtgaagtctagtgctgtataatgctttaaatccacmatcaagcccttgttgatgcaaatgttagtcgcccaaagcagaatgggttaacgaattactgcagtggttttaggtgcatgggtttgacccatgtaaatcattttaataagtaaaattgaatctttgatacatatttgttgaggagcttgtcagatcactacctttcactgaacagtaaaacatggatcatttatttcacc

SEQ ID NO: 172997 - DNA, 630 bp, Homo sapiens
cctgacaatccctgcttggtaagtggaaatagtatattcaagaatgcagctatcccactgccagcagcaccttgtcttaacataaaaagtagctgctatcactctggggaaacctttattcatcactttgccatttacagcaaagctgctggctcaatgggaccttcaactcaagatttttcttgtgtgtccgtgcctctttccctgatggttcagctaacctgaaacccaactgtgtcctattttyacttattcttaggttgttgctaatgtcctagctgtttggtctgctatttggaatactacatattggtagattgaaggcacccattttggggatcatgaactctggaaacaaactgcaattgattatgtctgtattattcatgtaaattacaatggaaaggacctgttccgtaaggacactggctggatcatgctgcccaagtggtagtacagcttgaacagcagcctggacctgtttcagtgtcttttcttgttctaggccccactcaaaactagaagctttttgggttgctggataaatgggctagagcaacatatcccaatacgttgtctgcagaatccaaatagacccactaggccttgtgcctctttcttggtcataga

SEQ ID NO: 172998 - DNA, 630 bp, Homo sapiens
cctgacaatccctgcttggtaagtggaaatagtatattcaagaatgcagctatcccactgccagcagcaccttgtcttaacataaaaagtagctgctatcactctggggaaacctttattcatcactttgccatttacagcaaagctgctggctcaatgggaccttcaactcaagatttttcttgtgtgtccgtgcctctttccctgatggttcagctaacctgaaacccaactgtgtcctatttttacttattcttaggttgttgctaatgtcctagctgtttggtctgctatttggaatactacatattggtagattgaaggcacccattttrgggatcatgaactctggaaacaaactgcaattgattatgtctgtattattcatgtaaattacaatggaaaggacctgttccgtaaggacactggctggatcatgctgcccaagtggtagtacagcttgaacagcagcctggacctgtttcagtgtcttttcttgttctaggccccactcaaaactagaagctttttgggttgctggataaatgggctagagcaacatatcccaatacgttgtctgcagaatccaaatagacccactaggccttgtgcctctttcttggtcataga

SEQ ID NO: 172999 - DNA, 630 bp, Homo sapiens
cctgacaatccctgcttggtaagtggaaatagtatattcaagaatgcagctatcccactgccagcagcaccttgtcttaacataaaaagtagctgctatcactctggggaaacctttattcatcactttgccatttacagcaaagctgctggctcaatgggaccttcaactcaagatttttcttgtgtgtccgtgcctctttccctgatggttcagctaacctgaaacccaactgtgtcctatttttacttattcttaggttgttgctaatgtcctagctgtttggtctgctatttggaatactacatattggtagattgaaggcacccattttggggatcatgaactctggaaacaaactgcaattgattatgtctgtattattcatgtaaattacaatggaaaggacctgttcygtaaggacactggctggatcatgctgcccaagtggtagtacagcttgaacagcagcctggacctgtttcagtgtcttttcttgttctaggccccactcaaaactagaagctttttgggttgctggataaatgggctagagcaacatatcccaatacgttgtctgcagaatccaaatagacccactaggccttgtgcctctttcttggtcataga

SEQ ID NO: 173000 - DNA, 551 bp, Homo sapiens
atggcgtgacctcagctcactgcaacctccgccttctgggttcaaatgattctcctgcctcagcctcctgagtagctgggataacaggttccrccatacccagctaattttttgtatttttagtacagatggggtttcatcatgttggccaggctggtctcgaactcctgacctcaggtgatctacccgctttggcctcccaaaatgcccggattacaggcatgagccaccacgcctgccttaaagtgtctttatctggttttggtattagggtggtactggcctcatagaatgagttaggaggtaccccttctgcttctattatctgaaagagtttgtagagaattgttatcatttatttcttaaatgtttgatggaattagccatctaggcatggtaatttcttttttgaaggttatcaattatttattaaacttatttaatagataaaggcccatcatgttatgtatttatccttccttgtgtgaaattttggtaatttgtccttccaggaatctatccacctcatctaagttatatgttagatgaaa

SEQ ID NO: 173001 - DNA, 453 bp, Homo sapiens
aaaaataaatgtaaggattttcaaagcttttggttaatactgagagcaccacaagaaagatcactgaaggtttgagaaacataattggaaaatttgactacttttgccaccatacaaatgtatctgcctgaagggaaaatttaaacattaggactagggtgagattagagctttatgtataggataacttatgtataactaatagrcacctcccaaatgaacaatgtgaaaaagaatagcagtctcattttgaaaatactttaaaaaaagttttatgttccttaagcttctatttaaaatgagttgacccttatctgatttgatagttagttttcaaaggaagaatgagtcatgtcagaaatgttgtcaattttgcttttatgaggtttggcaaaggactttctattttctccatattttatgagatctcaaaatagatttaggaattccccc

SEQ ID NO: 173002 - DNA, 453 bp, Homo sapiens
aaaaataaatgtaaggattttcaaagcttttggttaatactgagagcaccacaagaaagatcactgaaggtttgagaaacataattggaaaatttgactacttttgccaccatacaaatgtatctgcctgaagggaaaatttaaacattaggactagggtgagattagagctttatgtataggataacttatgtataactaatagacmcctcccaaatgaacaatgtgaaaaagaatagcagtctcattttgaaaatactttaaaaaaagttttatgttccttaagcttctatttaaaatgagttgacccttatctgatttgatagttagttttcaaaggaagaatgagtcatgtcagaaatgttgtcaattttgcttttatgaggtttggcaaaggactttctattttctccatattttatgagatctcaaaatagatttaggaattccccc

SEQ ID NO: 173003 - DNA, 604 bp, Homo sapiens
gattcccgctggagactctgagggagaatcctttctgagcctccctccgagcttccgatgctgctggcaatgcttggtattcactggcttagagttgccccactctagtccctgtctccatcttcacatgaccttccctctatgtctccatagcttctctgtttaagtttctcataaactctcattgttaaatttaggggccaccttaatccaggatgatttcatctccagatccttaccttaatgatatatgcaaatatccttattccaaataaggtcacattctgatgttcctggtggaaatatttttggggagccacaattcaacacactatactatatttgtcaataactgaacagtttctatgtaaattccaygttgcatgagtttttggtgaatgttccccaggctgttttgtcatagacacgttaaccattatgtcatttgcaacatttatggtctcataatgttatcctttcattttgtgctatatacagaacatgaaaatcaaacatattctttatattttccttttctctgaacctaatttgccattttattaaaatgttcaatctcttctccggaaatctaatcgtatggtta

SEQ ID NO: 173004 - DNA, 631 bp, Homo sapiens
ataatgtaggtaagaaattctggtggaatagattggggggtgtgaagtggtcagtctttggttttagagacagtcttgctctgttgcccaggctggagtgggccagtcatagcttactgcagcttcaaactcctggactcaactgattctctccactcagcttcccaagtagctgggactacaggtcccaccacacctggcttattaatttaatttatttatttttgtagagacagggtcttgctatgtttcccaggttggtctcaaactcctggccttaagtgatcctgctgcctcagcctctggagtagctgggattacaggctaacgtcactgtccctgactgcatcagttttgaagttttagccattaggacttctcacggattaggatgtgcctggcagcaaaagtcaaacatgatctgaaggatttttgcctaagccacygggatcatgatgatgccataactgatatgaagaacaatccagaaggagcagatttagtgagggcggggagactggatattagaagcttcatttcagacctcttaactttgagatgtctattagacatccaagaggaaaggtccagtaatcagttgattacggagttcatagaagagatcatagta

SEQ ID NO: 173005 - DNA, 574 bp, Homo sapiens
gtttttaacagtatgaaactaaactttttaaattcttgcattttgtatctcaaagtctggtggtcttgagtcatgttagggggcactgatattagctacttatttttcttcaaaatataattcaggatctcatgtatttcagcagaggaccacaacatgttgacatatatttctgacaacaggacaatgctcatgacttaartcttagattcactgtattggcaatgttactagaaatgcacatataggtttttatagcatagatggtgttatcttttaaataaattttttattactgtggtaacacatgcccatttcagaaaatttacaaaattagtaaattataaagtaagtaataggaataagtcataatctcattacccagagatagtaactattaacatttctgtctttgtttcagttacgtttatatacacatgcatgaatgacattgaaattttaatttaatttatattgaacttcagctcatttgctgaagtcatttctactttttatagacaaatatgatatagcttttttccttttgtattgatttcaataatagtttactttc

SEQ ID NO: 173006 - DNA, 569 bp, Homo sapiens
gtttattatcttacatctgtggaagtctgaagtttgaaatgagtctcattagactaaaacctaggtgatggcagggctactttctgtcccagagactctaagggaggataattttctagccttattcatcttctagaggctgcacatattccttggctaagccccttctattttcttttcttttctactttttttttgttttgagacggagtctcgctcttctcgcccaggctggagtgcaatggcgtgatctcggctcactgcaacctccrcctcccaggttcaagcaattctcctgccccagcctcccgagtagctgggattacaggcacctgccaccatgcccagctaattttttgtatttttagtagagacagggtttcaccatattggtcaggctggtctcgaactcctgacctcaagtgatccacccgcatccgcctcccaaagtgctgggattacaggtgtcagccactgcacccagccccctttctattttcaaagccagcaattgcttatcaattctttctaacatagcatcactccgactctgactgactctattgctt

SEQ ID NO: 173007 - DNA, 533 bp, Homo sapiens
catgactatatatgattctatatctattttgtggcaatcttattagataaagatagtattataataaagcgaatactttgggctaggatcttctatggcattaactttttgatcttccctcccagattgaaaagactgctcagagatttgtgtgtccttttccctgccaagactcatagatatggccaggatgttctgtaacatacgcattacagtgccacagtaatcaaacttactgtctgtgcaagaaacatatggtacaagaataataattctatatttagaaaaagtaacttcagccaaagctttcaatttcttgaacttcatattcaaaaagtcaggaaaacattatgttatgtccagaaaatgattacattcatccataaaragaagtaagcataataataattatgtccttattaaaaactcaaagaatatatgtttctgagtaaagaatagacaatgaaaacaaagttcactaatgccagaatattgaggaagacagcccctggaggagggaggagactttgtaa

SEQ ID NO: 173008 - DNA, 469 bp, Homo sapiens
tcgtgcaggcaaacctactgtgctgccagtcatataaaaagcatagtacatacaattacctacggtatataaaactcgatagtgataataaagtactattttattggtttatgtatttactatattatgccttttattgttwttttagagggtactagttttacttataaaaataagttaaccgtaaaacagcctcaggcagtttcatcagaaggtattccagaagaaggcattgtattcataggcgaggactgttccatgcttgttattgtccctaaagatcttccagtgagaaatgtggcagtggaagacagtgaaactgaagatcctgaccttgtgtaggtccatgctaaggtgtgtgtttttgtctttatttttaataaaaaagcttaagatgtaaaaagaaataaattttaaaaatagaaaaaatctgttagaataagcatataaagaacgaagatgctggact

SEQ ID NO: 173009 - DNA, 463 bp, Homo sapiens
tgcagactttgatctgaactgtggacactgaagcagccaggttatccagttcctgtaagccatgttctttagccgggattttctactagagaaacagccaatgacatagcagcagccctcccagagacccgcaggaaggccacattcatctgtgcacctgctaatgggccttcaatttgcagaccaagaagctgaccytcagtttatttccagccctaatgaccaaggttctgaagccagtctagttcacttagggactatgcattatccttacctgcttaagcccctggtggttggtggggtggtagccatcccaacagccttggacctcactgcagatctagcaacagccatgtgatctggctccaacaccactagagtgcaatcccaggtgcaattctgtcagcccagggatccaacaagagaaagcttttattggcataaatcagtctaaaaagacggg

SEQ ID NO: 173010 - DNA, 553 bp, Homo sapiens
aattcttggagacacagtgcttattggaaagagcactctttccaataagaaaaagtggcttttagagtcagaagaatctgaatttgaatattagctctgtcaacattagctaacttctttggagcaagttgcttacctccatgatacacactctcctgttctgaaaaatgaggatgacaatggtttggatattgaggaacttatggttaaggattaatgaggaatgcttaacacactgcttcctgwcacataggcaacaaataaatactagctttcttctcccttggccttgataatctgatggtaagttcattaattccttagcagcagaagaacctaagaatttttttgtttgtttgttttaaggaattgagaattttattgtttaattctgtcttatataaacaactgaatctagctgttaagtagattatgttgtggaaaagggtagggcaaatatttaagagtgttgtgtgagtttttttcttccagtgaaattgaatgatgggcatcatggccacattctccagtttcagtccagaatcaaaagtga

SEQ ID NO: 173011 - DNA, 230 bp, Homo sapiens
tgtatctggggccttttgagcccaggtggagctgtagtagcagggatgcagtgagtagcttcccaaggtgatgcacagcagcagagccctgggcctgactcagaaaaccattccttccttctaggactctgggcctgtgatggaaggggctgtctcctcagagacttccgaaatgcttttgargccctttttcccattgtcttggatagtagcacttgactcccttttag

SEQ ID NO: 173012 - DNA, 649 bp, Homo sapiens
ctttttttccccctagcttgcctactggtggtgactttcgatgtcttcagctttatgtgggtgcctcagctttaaaatttcacattgtacagctaacagcttttgtcttctaccttgtgttgaggcggtcaggtaaaacccaagatgctgggcaggaggaattggcaaattctcctaatgggttaccttcagtactatctgacagatcatcttttagtattaagtctttcttattgtttccaacttccaaagataatccttatttttcagagagttctctttcaataattttatrtctatgtgtctacatgtgtctgtgagggggagtgtgtttattactttcaaatactctctagcaagagggttaatttggtcaccttattcactgtatgactggatctctatgcaattttatatcttaattttctacattcagttatttaatatatttggaaagtgtattaatccatggagtgaggtgggacactaagtgggaaaacattcagcttctcagttatttgtttagcaacactaactttttctttttatttgggatatttcttttattatgtacttcattttcacatatattgtctttgtttattgatctgcctgccagtttgtacactgctatggcactaatttagtt

SEQ ID NO: 173013 - DNA, 649 bp, Homo sapiens
ctttttttccccctagcttgcctactggtggtgactttcgatgtcttcagctttatgtgggtgcctcagctttaaaatttcacattgtacagctaacagcttttgtcttctaccttgtgttgaggcggtcaggtaaaacccaagatgctgggcaggaggaattggcaaattctcctaatgggttaccttcagtactatctgacagatcatcttttagtattaagtctttcttattgtttccaacttccaaagataatccttatttttcagagagttctctttcaataattttatgtctatgtgtctacatgtgtctgtgagggggagtgtgtttattactttcaaatactctctagcaagagggttaatttggtcaccttattcactgtatgactggatctctatgcaattttatatcttaattttctacattcagttatttaatatatttggaaagtgtattaatccatggagtgaggtgggacactaagtgggaaaacattcagcttctcagttatttgtttagcaacactaactttttctttttatttkggatatttcttttattatgtacttcattttcacatatattgtctttgtttattgatctgcctgccagtttgtacactgctatggcactaatttagtt

SEQ ID NO: 173014 - DNA, 511 bp, Homo sapiens
gggaagtgcagtggtgtgatcatagctcattgcagccttgaactcctgggctcaagtgatcctctgacctcagcctctctagtagscgagactgcatgcccacagaaccatgctcagctaatttttaaaacatttttttgttttttatagagacagggtcttgctttgctgcccaggctgttcttgaactcctggcttcaagtaatcctccttccttagcctcccaatgtgctggaatcataggtttaagctaccatatctggccagatttacttttaaaataaagtatgataaaattaatctgacactactatatttactgatactgtatcacatgataattagggattgcttttgtatagctaaatggacatctctttttcttttatttttctaatgcttacgacctgtctatatcagtgcaattagatttcccagaaattgtgcattattttcctccacagcatgttaatatacattaaaaacttgctgctcaaaatgtggtccataa

SEQ ID NO: 173015 - DNA, 541 bp, Homo sapiens
gtgttaataacaaggatctaaagttaaagcaatttgttctctgaaaggattttctatgtgtgataaacactaacttaagacatgaacttcstgacaactattctggcctttttatctgggtgttgggggctatgtcttgtttcttcatttgtgtaaatgagaatggtggaaaagtaataataattgacaagttattttatagctctagaatccacgttaccataattagcccagtcagctgcaaagtgcctgagtttactgttcaattccaatattatctatctacttttattttcttccctctgctttatttggatacctatatattttaaagtaaagagctgagcatagcattatgctccttaggtgagggattattttcctttttccacaatatgctaatagattgatgttcttaccgggttttgttgttgttgttgttttaacaggggctattttgttgtttttgcaatcatgaaagaatgtcttaaaatttgttactcaatatttttttttctctggaaaattcaagttactttaa

SEQ ID NO: 173016 - DNA, 516 bp, Homo sapiens
ctgacaactattctggcctttttatctgggtgttgggggctatgtcttgtttcttcatttgtgtaaatgagaatggtggaaaagtaataataattgacaagttattttatagctctagaatccacgttaccataattagcccagtcagctgcaaagtgcctgagtttactgttcaattccaatattatctatctacttttattttcttccctctgytttatttggatacctatatattttaaagtaaagagctgagcatagcattatgctccttaggtgagggattattttcctttttccacaatatgctaatagattgatgttcttaccgggttttgttgttgttgttgttttaacaggggctattttgttgtttttgcaatcatgaaagaatgtcttaaaatttgttactcaatatttttttttctctggaaaattcaagttactttaaaacggactcaggcattttccatcaatatctagtcttcttattataaaaagcatcaaactattatc

SEQ ID NO: 173017 - DNA, 619 bp, Homo sapiens
agtgccacacactttcaaacaaccagatctcatgagaactcactcactatcacaagaacagaaagggagaagtctgcccccaagattcagtcacttcccaccaggctccttctccaacatgtggggattacaattccacatgagatttgggtagggacacaaagcctaaccatatcatttcacctcagtccctcccagatctcatgtcctcacattacaaaattaatcatgccttcccaacagctccccaaagtcttaactcatttcagcattaattcaaaagtccaagtccataatttcatttgagacaaggcaagccccctctgcctrtgagcctctaaaatcaaaagcaagttagctactttcaagacacaatgggagtacagacattgaataaatgttcctatttcaaataggataaattggccaaaacaaagggtctacaggcctcatgcaagtccaaaatcctgtgaggaagtcattaaatcttaaagctcctaaataatcttgttggattccatgtctcacatccaggtcatgctgatgcaagaggtggctcccatgacattgggcagctcttcccctgtgtctttgcagggtccagccccactcctagctg

SEQ ID NO: 173018 - DNA, 467 bp, Homo sapiens
tctggaaaaatactagtcttgttgacataagtgctagttttcagtgctgacactccatagaggcagatatctccgttctcactttgcccttttctaacctcatggtcagctccttgagggcaggcactgtatgatgwtcactgtggcacatttgtttaaactccttgttcatgagtaaattgataaatattacaaacattaacactctgagaggtagggtgtgaagtgagcagagcctcctttgaggaacaaattaacctgggaacatttattgagaaccactgtcgatatctgattcatccctcacgtgtgttgaattgggaaaaaatggagttcatgtgactattaaaaaagccgaggaaaaggctgagaataagagtcaatgcttatagagagggtcgactgaaagaaagtgcctcagacatcagagatcaagagtgaccatgacaagttgacaaagccaacca

SEQ ID NO: 173019 - DNA, 467 bp, Homo sapiens
tctggaaaaatactagtcttgttgacataagtgctagttttcagtgctgacactccatagaggcagatatctccgttctcactttgcccttttctaacctcatggtcagctccttgagggcaggcactgtatgatgatcactgtggcacatttgtttaaactccttgttcatgagtaaattgataaatattacaaacattaacactctgagaggtagggtgtgaagtgagcagagcctcctttgaggaacaaattaacctgggaacatttattgagaaccactgtcgatatctgattcatccctcaygtgtgttgaattgggaaaaaatggagttcatgtgactattaaaaaagccgaggaaaaggctgagaataagagtcaatgcttatagagagggtcgactgaaagaaagtgcctcagacatcagagatcaagagtgaccatgacaagttgacaaagccaacca

SEQ ID NO: 173020 - DNA, 591 bp, Homo sapiens
tgtctacacaaaaacctggacatgaatgttttggcatctttatctattattgccaaaaactggaagcaactaaaatgtccttcaacagatgaatggataaagcaactgcgatgcatccatacaatgtaatatcattcagcagtacaaataaatgtgctaacaagtcacagactaacatagatgaatcttaaatattattagtgagtcaaagaagccagcctcaaaaggctattcttccaattatctgacgttctggaaaaagcaaaactatgtggccagtaaaaatatcaatggttgtgagaggttccagggtaggagatgagagctgaagttgtgaaacacatgagatgttttagatctgtgaaacgtaatactgtaatcgtaggtacatgactcatttgttaaaaccaatagaactttacagttcaaagaataaagcctaatgcatgtgaatttttaaaaatgtacatgtgtaaggttatgatataccttgatacactgtagaatgtgacaaaacaatctaactgtattacaaatgtatgaaasaacctcactgaagggtatttgggaaaaagttgttgagctaagtaa

SEQ ID NO: 173021 - DNA, 599 bp, Homo sapiens
ggaatgctggagctgataaattatatgaagttaaaataacccaacagagcattatgttccacaagaggactcaaggacacaccattcatggcactatcagggacacacttgttctctaagcagcaccagcatcgctaaacacctaattggtgggttttctctattggccaggattgatgggaggaaaggtagagatagtaatgcaacaactacaggcagatggaatgcttcactatggggcaccaagtgactacacagaactgcccattatgcagagtccactgacccaacagcagtccattcaggactgagtccaagcaggtcctgagggcccaagtaagctacattcgctgacagaccaaacttccaaattacccacaacaatcataccatttcccttccccaagctcaacatgaggaaaaaccccaaggttgatttatgggttctgtcagtgggtgaagccaaaatttgatagtgactgccctattttagagggagatctgaaagacagtggagaggggagaatatgtgtaattctttgacagcggccratgatgtggctgcagccaggggcctggaaggaaagaccaaaagactg

SEQ ID NO: 173022 - DNA, 599 bp, Homo sapiens
tataattatctttatgtttgtaataattatactggcttgcctcctaaaattaacaagagccttagacttctctgactgctaagatctatgcattcaagtatgaggtacgcataaattcaaactgctacaagctagttagttctactcattctgccacactaactagcacctccaatctagtcaggagcagggataaatggaccacacaggctgatctataactactaatggtgcacctcatgtctactgagttcttccaatatcttgtaaattacacctcttccattacaatttctataatgtccaggttctcccatgcaaaaacacccacaaagggtgataaaataataactctgtctcacacataaagtaacttaaaatattgcataaaattattttcaggttatctatataaggcagtggttcataacctttttggcactagggaatggttttatggaagacagttttttcacagaccagggtggtaggatgtttttgggatgaaactgttctactttagataatcaggcaytaagattctcataaggagcgtgccacctagatcccttccatgtggagttcacaatagggtttgt

SEQ ID NO: 173023 - DNA, 555 bp, Homo sapiens
taacttcattgagatatgatataatttacataaaatgcatttattgcaagtgtaccgctgaacagaaaagcaaatgtagaaaacggaattttcaaaacaattctggctgaaaatgtttcttaactgctgacagccaatgaatcctcagatctgggaggcacaataaattctggaagaaaaatgacaagagaaggaaggactaaaatatacgaagaaaagcaaataaataaataaaattgtgggtaaatctaaacagacactgatattctgaaacaataacaagtagaaaaataaaaggaatagaactaaaatactagaaactaaaacagtgaaagataaaagcaagtcaggagagttaaaggttcttaaggccttgtatatttcaggartgtaaaataaactaattttcaggactgctgcctggtacatatgttaaaacttgaagcaaaaccactaaaataaatatttaaagtgtacaacatcaaacagaaaaataaggtaaaaaaagtttaatcaattaaaagaggaaaatctgaagaacagaaaaccaggata

SEQ ID NO: 173024 - DNA, 601 bp, Homo sapiens
agatacataacttccaatttcaaaaattactacaaagcaatagtaatcaaaatagtgtggtacaggcataacgacagactatatagcccaatggaacagaaataagcgcatatatccatgaccagctcattatttataagggtgccaagtccattaattatggaaatactagtctcttccacaaatggtaaagagacaagtggatttccaactgcaaaagaatgaagttgaacccctacttcatatcaaatacattaattaactcaaaatggatttatgacctaaatatatcagagcaaaaactattaaatccctggaamaaaacataaggttaaatcttcacgctttcatacagcaacaaaggcttagatctgacaccaaaaacaagggtaacaaaagaaagcgcacgtaactttgacttcatcaaaattaagattttgtccatcaaagtatattatcaagaactttgcaaattggcaaagcagaaatgtttacagggtctaaataactggtacaatatataaacactaaacataagaaagctggaatggttttatattaatatctaacaaaataggcttcaatgtaagaaatattatca

SEQ ID NO: 173025 - DNA, 601 bp, Homo sapiens
agatacataacttccaatttcaaaaattactacaaagcaatagtaatcaaaatagtgtggtacaggcataacgacagactatatagcccaatggaacagaaataagcgcatatatccatgaccagctcattatttataagggtgccaagtccattaattatggaaatactagtctcttccacaaatggtaaagagacaagtggatttccaactgcaaaagaatgaagttgaacccctacttcatatcaaatacattaattaactcaaaatggatttatgacctaaatatatcagagcaaaaactattaaatccctggaaaaaaacataaggttaaatcttcaygctttcatacagcaacaaaggcttagatctgacaccaaaaacaagggtaacaaaagaaagcgcacgtaactttgacttcatcaaaattaagattttgtccatcaaagtatattatcaagaactttgcaaattggcaaagcagaaatgtttacagggtctaaataactggtacaatatataaacactaaacataagaaagctggaatggttttatattaatatctaacaaaataggcttcaatgtaagaaatattatca

SEQ ID NO: 173026 - DNA, 515 bp, Homo sapiens
attttgttatatatttcatttttgttagtgtaatggcatttcattgttttcaaattacagttgtttattacaagtacataggaaagcaattgactttttaaaacaatttttaactataaatttaagttatacaacatgtttatacacatatatgtatatattaaaataactattgcaagtcaagcaaactaacatatctattatytcacatcattatctttcttttcccctccaccccatggtaagagcatgactcatggtaaaatgactcttcttgcaagtttttagcatataataccgtattattaactagagtcctcgtgtggtacatcagaacatcagatctctagatttattcatccttcttaactacaactttgtacactttgattcacatctccttattactcccacccctgccctgcccctgggtaaccaccattctacttcctgcttttatgtattcaatgttttttttcttaaagtgagatcattctgtatttttctttctgagc

SEQ ID NO: 173027 - DNA, 609 bp, Homo sapiens
tagctgcacacataggattgatgaggacattagctcaggcatgttcttccaaagttgtggaaatgataaaacaatgtaaaaataaaatgggaaaaattgacagaaaaagaggaaatttcaccttccgatagttgcacttcctcaaacagacatcagaacagatcaaagacaatgaacacaaattttggctttaaagtttctarttgaacacaaatttgaaatgatccaccaagtatcagttaaaatcaatgaacagagcctaattcatagacataccctagtgaatgtttgaatttctagaataaagaaaacaagtattcaacaaagatgtaaaagtcatgctggcttcggattgtcttctgctaagaacagaaagcagtggagagcaatcccccttaggtgtgatggtggagaaagcatttcttcctgcagagggttagcacgactgtgggtgtggggccagccaaggtaggaggcaactcccaggaccttggggcatcacacacttcaagaaccctgagcacagaaccagctgcaaacttgtcaggctggtagaggaaggggttcctgcagtggcccctgaagccacagtactggggccagtcccat

SEQ ID NO: 173028 - DNA, 609 bp, Homo sapiens
tagctgcacacataggattgatgaggacattagctcaggcatgttcttccaaagttgtggaaatgataaaacaatgtaaaaataaaatgggaaaaattgacagaaaaagaggaaatttcaccttccgatagttgcacttcctcaaacagacatcagaacagatcaaagacaatgaacacaaattttggctttaaagtttctaattgaacacaaatttgaaatgatccaccaagtatcagttaaaatcaatgaacagagcctaattcatagacataccctagtgaatgtttgaatttctagaataaagaaaacaagtattcaacaaagatgtaaaagtcatgctggcttcggaktgtcttctgctaagaacagaaagcagtggagagcaatcccccttaggtgtgatggtggagaaagcatttcttcctgcagagggttagcacgactgtgggtgtggggccagccaaggtaggaggcaactcccaggaccttggggcatcacacacttcaagaaccctgagcacagaaccagctgcaaacttgtcaggctggtagaggaaggggttcctgcagtggcccctgaagccacagtactggggccagtcccat

SEQ ID NO: 173029 - DNA, 613 bp, Homo sapiens
gatttattagtgtatgtgcttggattacaatgtttttgttttcataataaaacttgtaattgtggggtattagataacaccatgctgtattcttcttaaatggtctttcagagtatcatttcatttgtgtctatatgataatcagatgtcaatggcagatgtcaatggtttccatttgtacaggattcaacacaacttatggcagtaaaataagcccttctaaaatttcggtgaattatcagagaggttcatcccggggcccagctcaaatgcaagtgtctccatttgttgaattaggaagtctatacaacaccayaccaacccatggcacttccactgtctggaatgcactttctagatatggaacttctctcccatcccccagaaatatctattcacaaatgttctagcctactgcacttaaccaccagactagctgctggtttcttccttgcgttgtatttattcacagttctccaatctatgtttattcattcgcttatttacatttgtgtatctgtagcctgtttcacaatgcattgccacttggtatcatgtatttgtccttgttgctagaggcaggctcatactggctttgataattgatcatgta

SEQ ID NO: 173030 - DNA, 354 bp, Homo sapiens
aggaagagtataaactacaagaagggctcctattcctgcatagcactccctgggagtcactgagaaagacaggatattaatttggcaggatagttttcaagctggcaggcgttttcttttgatgaagattatttcttccatagagacaaaatttgctttttttygtgcttgttttagtccctctttaaaaacttttgctcatttgaactcttagttaaaaatgattttgtactaggtccttactaggaaaacacacatgtccacatgaacaaataaatgtgcacaaacacatcaacatatttttagtttactgttagtgaaatgaaaatgtatcttaggaaaccagtttttttt

SEQ ID NO: 173031 - DNA, 624 bp, Homo sapiens
tttcttgtgcttttggtatcacgtaaaagaaatcaaaacagggagaaggcagagtaagatggccaaatagaaccctccagtgattatccctcctgctggaacaccaaattgaacaactgtccacacaaaaaagcaccttcataagaatcaagcattagcttggataccagctttgtggagtagagcaacaagtgggctcctggagtcttcagttccaggccatcgctcctggataggatttctggaccttctctgagctagggggtagcccactgccttgaaaggagagactcagaactggcagcattcaccacaagctgactgaagggcctttgggcctcgagtgaacattggtggtagccaggcaatacttgctgcaggcctggggcaatgatggtcatagagagagactactatgcttgagaataggggagtgaagagtgggaaagactttgtcttgmagctttggtgccagttctgctgctgtagaatagaggaccaggtagattccagtccttggttcccagatggcatctctgaacacagttagggctggaagaaacttaccaacaggaagtgaaggatatgagcctggctggactcactacctgcttattgtagagc

SEQ ID NO: 173032 - DNA, 599 bp, Homo sapiens
tatcaggcaaaataaagaattagtgagcttcaaggtaggctatttggaaatacacagtcagaaaagacaaaagacaaaaagatgaagcatgtctagaagatctagaaaatagcctctaaagggcaaatctaagagttattggccttaaggagaagggagagtgagaggttggggtacaaaggttattcaaagggatggtaacagagaagtttccaaacctagaaaaaggtatcagtattcaaggacaagaaaggtatagaacaccaagcaactttaacccaggtgagactacctcaagacatttaatagtcaacctcccaaaggtcaaggataaagaatggatcctaaaagcagcaaaagaraagaaacaacatacaatggagctccagtacatttgtgagcagacttctcagtggaaaccttataggccaggagagagtggtatgacatatttaaattgctgaaggaaaaaaaagaaaaaatttgtatcctagaatagtatatctggcaaaaatattcttcaaacatggagaagaaataaagacttccccagaaaaacaaaagctgagggatttcatcaccaccagaccttgcctata

SEQ ID NO: 173033 - DNA, 603 bp, Homo sapiens
ttaaattgctgaaggaaaaaaaagaaaaaatttgtatcctagaatagtatatctggcaaaaatattcttcaaacatggagaagaaataaagacttccccagaaaaacaaaagctgagggatttcatcaccaccagaccttgcctataagaaatgctaaggagagttcttcaatctgaaggaaagggatgttaatgaacaataagaaatcatctgaagtaaatacacaaaaaaacacagaatattataatactgcaatagtggtgtataaacactcatatctcgagtagaaagactgaaagatgaacctataaaaataataactacaacaacttttcacaacactgtatactaagatataaatagaaacaacaaaaagctaaaaagggggggatgaagttaaactgtagagttttttactagttttctctttgcttgtttgtttatgcaatcagcattaagttgttgtcagtttaaaataacaggttacgtgatattatttgcaaggctatggtaaccacaaatcaaaaaacacaacggatatgtayatataccaccagagaaaatcaccttcactaaaaggaatacaggaagaaaagaaagaa

SEQ ID NO: 173034 - DNA, 367 bp, Homo sapiens
cagcttttttttttttggattcagaacttaattgctgtagacytatggctggtttccatagctcttgtaaagttattttagccagtctctagttacttatttaatgttttcatgggggaatgagggcctggagcttcctagttcactggaagttcttgcatctcactctcaatgtattacattctgatgtctatctggatttcctagatctaatttgagtactcttttgttggctcaacaaaaaaagccattagttcaccatttgtattttctccttggtgcctacttttaaattagtttttatttgtttttctaattgatttatatgagttaattatatattctgaataatattcttctgttgatt

SEQ ID NO: 173035 - DNA, 464 bp, Homo sapiens
aatttccttatagaaaatgatgtagtatttgaatataacytatgaactttctcctttatactttaaattatttctagatcacttataatacctattaaaatgtaagtgctatgtaaataattgttatatggtattgtttaggaaataatgacaagaaagaaaagtctgtacctgttcagtacctatagagctactcctgtcctcctttttttggaatatattctacctgtggtttgttgaatctagggattcagaaccaactgacatggagggacaactgtactttcttgtttaagatattcctacttcgtgtttcttttagagcagccaaacttacattctaacaaaaaggaatatgttttctctttttaaaattacatttcacttcctaggcatttttgataaatgcaggtatttctccataaaatcgacaatagagaaagaatttccaaacataaaaaaaa

SEQ ID NO: 173036 - DNA, 464 bp, Homo sapiens
aatttccttatagaaaatgatgtagtatttgaatataacttatgaactttctcctttatactttaaattatttctagatcacttataatacctattaaaatgtaagtgctatgtaaataattgttatatggtattgtttaggaaataatgacaagaaagaaaagtctgtacctgttcagtacctatasagctactcctgtcctcctttttttggaatatattctacctgtggtttgttgaatctagggattcagaaccaactgacatggagggacaactgtactttcttgtttaagatattcctacttcgtgtttcttttagagcagccaaacttacattctaacaaaaaggaatatgttttctctttttaaaattacatttcacttcctaggcatttttgataaatgcaggtatttctccataaaatcgacaatagagaaagaatttccaaacataaaaaaaa

SEQ ID NO: 173037 - DNA, 551 bp, Homo sapiens
cataaaatcgacaatagagaaagaatttccaaacataaaaaaaactctgatagagattaaatgagacatgattcaatgagatttagagagagaaaaccccaggaggtaggaggaagatataaaaaggtgagtgggatagtttcatttgccttgaggatttgcttcccaatcttctctaccctgtttgacatcccaagagggtggcttctctgtacctcatcagtgatattcttttccttttggtttctggttgaactgagacactgagagacactggtaggagactggaaggcaggaggggagtgatttggaattttcacctcctgggcctctgcctttgtgrctgtgtgttggtgatgcagggcttctccacctgcctgctcatcctctcccaaccctacagctacagctatggctatggctgtgctctcaatggtaactgctccttccctgtccctttaagcttaggggaggaagtagtgctacaccattgccatttagggtgcttccctaggcattgtcttttccccttaaccctgtccatctttgta

SEQ ID NO: 173038 - DNA, 593 bp, Homo sapiens
ggttattggggaacaagtggtgtttggttacatgagtaagttctttagtggtgatctgtgacaaaacggggcagcctgtggcactgatgatttgggggtgactggtgctttgacagttttgatgaaagatgcaatgaaatcaaatctgtgagattttggtgcacccatcacccgagcagtatactctgcacccaatttgtagtcttttrtccctcatccccttcccaccctttctccctgagtccccaaagtccattgtgtcattcttatgcctttgcatcctcatagcttagtttccacatatcagtgagaacgtatgatgtttggttttccattcctgagttacttcactttgaataatagtctccaatctcatccaggttgctgagaatgccattaattcattcctttttatggccgagtagtattccatcatatatatattagtttctttacccacttgttgattgatgggcttttggttggttccacatttttgcaattgtgaattgtgctgctataaacatgtgtgtgcaagtatcttttttgtaaaatgacctcttttcctctgggtagatacccagtagtgggat

SEQ ID NO: 173039 - DNA, 593 bp, Homo sapiens
ggttattggggaacaagtggtgtttggttacatgagtaagttctttagtggtgatctgtgacaaaacggggcagcctgtggcactgatgatttgggggtgactggtgctttgacagttttgatgaaagatgcaatgaaatcaaatctgtgagattttggtgcacccatcacccgagcagtatactctgcacccaatttgtagtcttttatccctcatccccttcccaccctttctccctgagtccccaaagtccattgtgtcattcttatgcctttgcatcctcatagcttagtttccacatatcagtgagaacgtatgatgtttggttttccattcctgagttacttcactttgaataatagtctccaatctcatccaggttgctgagaatgccattaattcattcctttttatggcygagtagtattccatcatatatatattagtttctttacccacttgttgattgatgggcttttggttggttccacatttttgcaattgtgaattgtgctgctataaacatgtgtgtgcaagtatcttttttgtaaaatgacctcttttcctctgggtagatacccagtagtgggat

SEQ ID NO: 173040 - DNA, 572 bp, Homo sapiens
atttctgaaaattctgtgacaccattcattaaatgaatcagctgattatacagagccttgtctgtgcattttcatgcagaatccttgggtcgatgacagcagctggtgaattattggcaactgtgatggcatggatatctccagtcaagtgaaggttgaactcttccatgggatgaccagggcatatccactacccatgactccttctttccactccaaaagtcggtccttgggaaggttgcctcatacaggcaaaagaggtgacatgcagatgcatggtcagagcctgcacagcccagtcataactgtgctcttcccttctcctagaggagtgggcgtgatcccagtgactaagatgtattttccatctgcttgatcctttawcctttctagcacagacaaaaactttgtctttacttttgccattgattttaatttcatctgcaagcaatcccaactcattatgggtaaatggatcagtagaaaggtctgcttgactccatttggaactcctgcagtctggactgccagcctctcccatcccatcccatatggcccacctccctgtaatc

SEQ ID NO: 173041 - DNA, 482 bp, Homo sapiens
gatgtctcagtgctcttgagcccaggtgtacaggagcatcagtgaatgaccatgagggctcagtatttactccgcatcaaccaatacattttctagatggaatggataggattggttatacagatagagtctgttagccagagatgtattggaaaggtttttacatgtatgtagaattaacacagtgcctgatgaattaggtttaaatgtttgttgaatgcatacataaaaaataatcatgaatggcagctcccaaaatgtgccatgagggactttcatatcatttctctcttcttggaggaaactcttggatgtcctgcatgctcttcttcaacaygtaaattagaggaaatgatatcattggccttggaaagaaggcagctcctgagcagactcctgcatctcctgtccccactttcttctctccggagtcagtgagcagacctgcaatgaaagggaagagctgttctcaaaacaaccaa

SEQ ID NO: 173042 - DNA, 558 bp, Homo sapiens
caaggtggactctcctgataacccccagtctgaactaatgacatcacatcaaaaccccatgcctggagaattgactgtaaacactgtcttcctgcctccttgtacctataggaaccctcacatatagccaagtcctactatggtatttgtaaatcaagcatggacatataggatacagaatcagcaaagagcgaggcctggaagaggaatggatctggattcaagaggcctgagttctataggttgaacagtgttgtaagagccatcaaaaatattttttttgaaaagtggaaaataatgggcttttttgccactttttwagctactttatactgtctcctgagtactcaaattgcatttgtcagctctcctgtgtgagggtcaatctgagggacatcctcactgctgtgagcagctcagagcccactgtgatgtcccatcttctcttggtggtctcttctgtctgcttgagttacctgtggaagggttaaccactggcagagactagtcctgatttgtactgatcctaagttctcataattaaatgtttttatttgt

SEQ ID NO: 173043 - DNA, 558 bp, Homo sapiens
caaggtggactctcctgataacccccagtctgaactaatgacatcacatcaaaaccccatgcctggagaattgactgtaaacactgtcttcctgcctccttgtacctataggaaccctcacatatagccaagtcctactatggtatttgtaaatcaagcatggacatataggatacagaatcagcaaagagcgaggcctggaagaggaatggatctggattcaagaggcctgagttctataggttgaacagtgttgtaagagccatcaaaaatattttttttgaaaagtggaaaataatgggcttttttgccactttttaagctactttatactgtctcctgagtactcaaattgcatttgtcagctctcctgtgtgagggtcaatctgagggacatcctcactgctgtgagcagctcagagcccactgtgatgtcccatcttctcttggtggtctmttctgtctgcttgagttacctgtggaagggttaaccactggcagagactagtcctgatttgtactgatcctaagttctcataattaaatgtttttatttgt

SEQ ID NO: 173044 - DNA, 563 bp, Homo sapiens
aagatcgtactgtagatatttggtgaagtctcataagatttgtagtgtagataattggatggtaccaatgtcattttcctggttttgataatacattcaattaaaaagtcagtattactgtgggttggttgatgggcatacaggaactctctgtactattttagtaacttcttaatagtctacaattaattctgaatgaaaacttaaaaacaactgagagactggtttgttgtgtggactcactccaagaatattgaagtcaccaagaatgaggacatggggtatgctggaagggagtttgttaaccgagtacataggtagaaggtaatataatttgcattcaccaacccaacacgaaattaagcacatattaaatttttatcatatttrtttccaataactcttaaaatgagtacatacacttttacagacacaaggctgaatcatgcatctctactctcaccaataattgtacatatctttgataagaaggcaagggtgcctgcacacctggaatgggaatgacaactttcttcaacttcagaaagtctgaggttgatatg

SEQ ID NO: 173045 - DNA, 563 bp, Homo sapiens
aagatcgtactgtagatatttggtgaagtctcataagatttgtagtgtagataattggatggtaccaatgtcattttcctggttttgataatacattcaattaaaaagtcagtattactgtgggttggttgatgggcatacaggaactctctgtactattttagtaacttcttaatagtctacaattaattctgaatgaaaacttaaaaacaactgagagactggtttgttgtgtggactcactccaagaatattgaagtcaccaagaatgaggacatggggtatgctggaagggagtttgttaaccgagtacataggtagaaggtaatataatttgcattcaccaacccaacacgaaattaagcacatattaaatttttatcatatttatttccaataactcttaaaatgagtacatacacttttacagacacaaggctgaatcaygcatctctactctcaccaataattgtacatatctttgataagaaggcaagggtgcctgcacacctggaatgggaatgacaactttcttcaacttcagaaagtctgaggttgatatg

SEQ ID NO: 173046 - DNA, 494 bp, Homo sapiens
gcagctcccaaaaagtgccaagagagactttcatgtattttctcactttctggagaaaactcctggatgtactgcatgctyctcctccatatgaaaccaagaggaaatgatatcattggcctggtaaagaaggcagctcataagccgactcccgcatcccctccattcttcttcccagaggcagtgagcaaacctccaatgaaaggaaacagctgttctcagaatgaccaactgcagaggacactgttaagtggaaggtgcctataagagttccagtgagacctggtgactgagccagcctttgcaagatgctggatgaccctgtgattatcaggtgggagctgcttgagaaaaataccgagtattttctaaatttcacacctaggctgttgcactagaaattcaaagacatgaatccctgctcttaaagacctcagagtgtggtaggagagaaagatgtgtggacaaataattcaagtacactgttataagtg

SEQ ID NO: 173047 - DNA, 575 bp, Homo sapiens
acaaattcaggagctcctttttgctatcagaggccacctttgctctggaatcccgagaatgcacatgggcaggagctctccaggtggaaagaagatgcatcctcctctgggagtatagaggagcatctggagtgagtgcatccatcatgagctctcttaaagagacaagctgccacagctctgattggcccgaaaaggaaatgggaggaaaaggagaacctctgttatccacactcagagcactaaatactttgtccatttatatttagggtaatggtgtacttgtcttcctcatgaaacctgaagcttcataacaactaagtcatgmctgtctttttcactgtggtatgaccaacatttggcatgtgttccttaaagatcatctatggtattattttcttataacgtaagatgaagccaagacctagagaattaaagcgttttcctgagatcacaacacaaacagcaggtccagtaccagtccctggttcctggagccctcatgagacttctctgccccatcattcattatttcagaggagttcctgataaaccttgatgggagcacagaatca

SEQ ID NO: 173048 - DNA, 569 bp, Homo sapiens
tgatggctcactcctgtaatcccagcactttgggaggctgaggcaggcagattacctgaggtcacgagtatgagatcagctagtctctactgaaaatacaaaaagtagttgggtgtggtggcacaggcctgtaatcccaactactggataggatgagtaagagaatctattgaacccagtaragaaaagttgcagtgagccaagaatgcacctctgcactccagcctgggtgacggagactccgtctcaaaaaattaattaataaataaaataaataaactgggagatatttcgtaatgtatattatagccaaagtataaattttctctactgatacaaatttttctaaaatgatattaataattcaaaattcaaaaagctaataagaaaataaccttaagttacgattcacaacttctagaaaataaaaatggctcctaaacatatggaaagaggagaaatgcaactcttaataaaagacatgccaattaaaattacagagttatattttacttaccaaaatctaaaaaaccattaagttttatagcatacaacatggggatggcgtg

SEQ ID NO: 173049 - DNA, 539 bp, Homo sapiens
tatttgtggacagctctatctgtgttgagaagaatgattgatgagtgcccaaaacctgaaattgaccactgatgtgcctttaaaataaggactcagtgtggctttgccgaacccctagaagcattttgtacacagtgttttgggtagggtgtgggtctgagctgaattgctcagcaatagaacagaggaaagagtaagtgagggtgagcctgagtgccactgcagcaggtaattraagtgtgggaatatctgtggggcactactgagtattctgctgagtatacacaatataaacctatttcattctttctttcaggagatctttggttcgtttctttgttgatgcaaacatttgtatgtgaggagtccatgaggcgaaataggagatatgtagggcttggagtataaagagagatattcatgtagatttcaactggagaatgaggactgggtctaatctgggagaataagagcagctgatggagagtttattaggtattgtctgttttaattatctgaagagcctaggagttaagaat

SEQ ID NO: 173050 - DNA, 621 bp, Homo sapiens
cattttcctgtttggtcacataaaaattctgagagtttaaaagcggcacaaggacctacattccagttttccttgatgctgggtgccattttatgaccaggtgctgttcagtgaaagatgcacaaaagtgatgtaagcaagtcctggctcacaggaccaatagcaggagcaacrcatctcctttccttattttttttccatcatgctgaaatgctggtgtggctgggaaccatataggatcacaggtatgagggcaactctctagggactcgagagtagcagtttttggaattctgatgtacgatgccttggagcttcccgcactgatctcaaagagtgtcatttctggatattcacaggggctttcgcatatggcagatgtgtgtgctgctaccccagcacacaccaaaatctgcagatgctcaatttccttatataaaatgatgtgatagttgtacaaaacctatgcactttctcccagatacattaaatcacttctaagttacttagaataactgacaaaatgcaaatgccatgtaagttcttgttttactgtgttatttcagaagtaatgacaaggaaaaacaagtttgtacctgttcagtacatgcacacctccgc

SEQ ID NO: 173051 - DNA, 522 bp, Homo sapiens
caagcagggtaaaagacgaactgatacttcagcaagracatatatgcatgacaaataaacacataaaaagatgctcaacatcactaatgtttaggacaacaaataaaagtcacgagataccactctaccctctcaatatggctaaaatataaaatactgatagtttcaaatattggctgagatttgaaggaattggaggtctcatacactgccaatgagaaagtaaaatagtagagctactctgggaaatcttcttgcattttcatataatccagcaatccagcgtatcctagaacctggaaaatgtatcctagaaactgggaaactgtgttcacttaaaaatctgtacaggaggggggccaagatggccaaataaaaacagttctggtctgcagctcccagcgggaccaacgcagaagactggtgatttctgcatttccaactcaggtacccagttcatctcattgagactggttaggcagtgtgtacaacccacggagagcaaggagaagcagggtgggg

SEQ ID NO: 173052 - DNA, 602 bp, Homo sapiens
ggatgcaggagtctgctcatgagctgccttctttccaaggtcaatgatatcatttcctctcagttctatgtcaaggaagagcatgcagtacatccagggagtgttctccagaaaatgagaaatgataagaaaatctctcatggcactttttgggagctgccattcatgactatattttaggcatgaattcaactaacattcaaacataattcactaagcactgtgctaattctacataaaagcaaacacctttcaaataagtctctcactaatacattctgtatctataaccaatcctttccacttcatgaagaaaatatactgatggatgckgagcaaatgctgagccttcgtggccattcactgatgctctagtacacctgggctcaagggcactgggccatcacactcacaagaaccaactggatctgtttcttgtcctgcttttgccaattaggcttgtcaatataattacctaatttttcaaaatacagcacaagtcaatgaaatacgaatatgaaagaattgtggtttccataaaaactaatgtgaatgtgtaaatggacaataaaagcaggttccaaaattattgttagtttact

SEQ ID NO: 173053 - DNA, 602 bp, Homo sapiens
ggatgcaggagtctgctcatgagctgccttctttccaaggtcaatgatatcatttcctctcagttctatgtcaaggaagagcatgcagtacatccagggagtgttctccagaaaatgagaaatgataagaaaatctctcatggcactttttgggagctgccattcatgactatattttaggcatgaattcaactaacattcaaacataattcactaagcactgtgctaattctacataaaagcaaacacctttcaaataagtctctcactaatacattctgtatctataaccaatcctttccacttcatgaagaaaatatactgatggatgcggagcaaatgctgagscttcgtggccattcactgatgctctagtacacctgggctcaagggcactgggccatcacactcacaagaaccaactggatctgtttcttgtcctgcttttgccaattaggcttgtcaatataattacctaatttttcaaaatacagcacaagtcaatgaaatacgaatatgaaagaattgtggtttccataaaaactaatgtgaatgtgtaaatggacaataaaagcaggttccaaaattattgttagtttact

SEQ ID NO: 173054 - DNA, 602 bp, Homo sapiens
aggcgcccttgccttcttatcaaagacatgtgtaatcattggtgagagtaaagatgtaagattcagccttaaattgtatctgtaaaatgtatgtatttatttttaagagttattagaaacaaatatgataaaaatttaatatgtgcttaattttgtgttgggtgtatgaatgctaattatattaccttctagcctatgtgcctggtttgcaagcttcttcccagcatacccaattttctcattcttggtgacttcaacatccataaagatagtccatacaatgaagaggcatttcagttgtttttaagttttcattcagaattaattgtagactatgaagaagttactaaaacagtacagagatttcctgtatgcccatcacccaacctacagcaatactgacatgttaagtaaatgtagcaccaaaaccagaaaattgacattggtaccatctaattatctacactacaaatcttatgagatttcaccaaatatctacartacgatgttatcaaattttaccagtgtttgcatgcacttatttttggagtgaggtattccttctacgtttcattccacaatatttcatcacaggtgtagat

SEQ ID NO: 173055 - DNA, 595 bp, Homo sapiens
cttcaggtgctcagcttcagggatgatgaagtgatgatttaagcaacatgttcactccctggtaacctatgtaaaaattacagaaatggctctgccatttaaccaactctgtcttggcctaaccctcaaggtaggataaaatgtacctaaatgtcttacaaagtaaaatacagcctaccagtgggaaagctattgtgtccgagcttgtattttctctttcacagatgaattttgcccatttgtcatggcacccttctgccacccaggttcttgacttagcagggttaggggatatagggagctcaacaccaygctcctctgcctatctcttaatgaaacaatggagtgggctgttttgggagataactctcagtttctggagatgtagaagcagatgttcatgagtccttctcgagaatgctgggaaacagagggataagattagattcaaatgagtaaattgctgagtacctgctatgttccagaaattttcctaggtgacttgtgaataaaacgtagtccttgttttaggagcttatattttatagggggaaataacctccaatgttcttttctaaccagagattccaagatt

SEQ ID NO: 173056 - DNA, 417 bp, Homo sapiens
tgcatttgtgcttatatatctcttttcagaatatgtgggtaaggtgtgattttaccgtaaccatggactgaagataactactgttatgatcctgacagcctgagaaatttacgtctctacacagtgactgtaatcacagtaagtgaatgttcttctcaactatggggcagtgacctagagtctgaaaagtctgctgaaatgcttgctctgtatgactgtctggtatcagttgggcaccattattgtcaatgtatcaatgctggatatagatatagatggcgtgtgttttctattatctagcagtgacagcagagtatagaaaaagaaatctcaatgctcmtgcccatcatattggtccaattgttctggagctttgcaggatgcaaacacaaggaaggagagcagagacagggcaga

SEQ ID NO: 173057 - DNA, 560 bp, Homo sapiens
attagaggattaaaagaggtactatcaattaactcttcaaccaactgctgctgacacccagttgacagtccttgctttactcctgaaatgtgtatgaccatctctctcttcatgcaaagttgtgggtaaaatggaaatccacagtattttaaagtttcttccctgatccaactatgtgctgcttaaaagagaattactttagcttcaagtacacacaaagactgaaattaaaggaatggaaaatgatatcccactcaaatgggaagcaagacagtagaggtagctgtatttatgttagacaaaatatagatggtcataaattgccataagagatgaagaaggttattatataatgataaagaggtcaatacatcaagatgatataacaattgtaaatatatatgcacccaacataggaacactgttaatagaacagaagggagaaacaaaaagcaatataataatagggaacttcaataccccagtttcaataakggatagatcatccagatagaaaaatcaataaggaaatagcagacttgaacaatgctatagaccaa

SEQ ID NO: 173058 - DNA, 335 bp, Homo sapiens
taaaaaacaaaatcaagatggaaatttaaaaattattygaactgaaagacaatgacacaacctatcaaaacctctgggatagaacaaaggcgctgctaagaggaaagttcatagtcctaaacgcctgcatcagaaagactgaaggagcacaaactgacattctgaggtcatacctcgaggaactagagaaacaagaacaaaccaaacccaaatccagcagaagaaaggaaataaccaagatcagagcagaactaaatgaaattgaaacaataaaaaaatacaaaagataaatgaaacaaaaaactggtgccttgaaaagataaataatactgata

SEQ ID NO: 173059 - DNA, 596 bp, Homo sapiens
gggcatccaaatcagtagagtggaagtcaaactgtcactgtttacagaagaaaacttcagtccctgaaaactctaaggactcctccagaaagctcataaaactgataaaagaattcagcaaagttcctggatacaagattaatgtacacaaattagtagctctgttatacactgacagcaaccaagtggagaatcaaataaagatctcaacccctattataatagctgaaaaaaaaaaaaaaagcaagcttaggaatatacctaaccaaggagttaaaagacctctgcaaggaaaactacaaaacattgctgaaagtaatcacagatgacatgaacaaatggaaatacatcccatgctcatcratgtgtagaatcaatattgtgaaaatgactatactgccgaaagcaatccacaaattcaatgcaattcccatcaaaataccaccatcattcctcacagaattagaaaaaacaattctaaaattcacatggaaccaaaaaagaacccacatggccaaagcaagactaagcaaaaagaacaaatctggaggtatcacaatatctgatttcaaactgtacggccatagtcaccaaaa

SEQ ID NO: 173060 - DNA, 596 bp, Homo sapiens
gggcatccaaatcagtagagtggaagtcaaactgtcactgtttacagaagaaaacttcagtccctgaaaactctaaggactcctccagaaagctcataaaactgataaaagaattcagcaaagttcctggatacaagattaatgtacacaaattagtagctctgttatacactgacagcaaccaagtggagaatcaaataaagatctcaacccctattataatagctgaaaaaaaaaaaaaaagcaagcttaggaatatacctaaccaaggagttaaaagacctctgcaaggaaaactacaaaacattgctgaaagtaatcacagatgacatgaacaaatggaaatacatcccatgctcatcgatgtgtagaatcaatattgtgaaaatgactatactgccraaagcaatccacaaattcaatgcaattcccatcaaaataccaccatcattcctcacagaattagaaaaaacaattctaaaattcacatggaaccaaaaaagaacccacatggccaaagcaagactaagcaaaaagaacaaatctggaggtatcacaatatctgatttcaaactgtacggccatagtcaccaaaa

SEQ ID NO: 173061 - DNA, 313 bp, Homo sapiens
ggaacaaatcctggagaaacggatatgtgaccttacagagaattcaaaatagctgtgttgaggaaactcaaagatattcaggataacacagaggaagaattcagagtttcatcagataaatttaacaaagagattgaaataattttaaaaactcaagcagaaattctggaactgaaaaatgcaattggcttactgaagaatgcatgacagtcatttaacagcaaaatgggtcaaacagaggaaagcattagtgagcttgaagaaaggctatttgwaaatacacagagaagacaaaaataaacaatgaagcaca

SEQ ID NO: 173062 - DNA, 550 bp, Homo sapiens
actcattccaattacctgctctgtcataaccatttttcccaccaaaccactcaccctgtcactctttaaattagccagtcggaattagtttagcctgtgcggtctaaccctagccaataggggaacaacacagcagcaggggccacatgagtcagggataagaacctgtttccctcccttgtccaagtgtgctctcaccattgctccatctgtaagggtgcacccttctatagaagtgacttgccttgctgagaattaaaaagaaaattttatattcgagtgctatttcttttgtggcactgaaactttatttataamagagggatgccagtaaaattggggaaggaccacagggagaaggaaacttccagctgaactttgtgataatatcaactaagcgtgaattttccaggacacaatttgggggtgggaggcaaaaacaaagtgccaataaaagcacagaagccggggcaggaagggggcaatgcctgaaagccctgcttgctttctcagcaggcgggctttcctctggcaagttctcagcccctgg

SEQ ID NO: 173063 - DNA, 468 bp, Homo sapiens
actgtgtgtgttccctgcccaataaactgtgaaggagatcactgtgactatgactagaaaaagcctgtggaagtagatgtttttgccaaacagtacagggaaaatacatcttaaaaaataaaatgcaaagtcctatctagaattggttttattgttttgaaaacagctttatttttgcaaccggcagggtcagtacagatcatatgctcatttagcatcagttcagggcaagaaggggcaggggaaagtggggagaacagtggagaattaargaaaggggagtactagtgaacaaaaactgtcctgtgttttggtgcctgcagggaaaggaggctaagtggcctgcaggggaactgatactatttgcacttttcaaatacgtagagtgaacaattttagcctcatatcccagggcatttagctctagcctgaagttatagaaatgtgcttttactgcctggtggaatt

SEQ ID NO: 173064 - DNA, 518 bp, Homo sapiens
tggctttcttaatttagcttctgaatgcttatatctcatatgygtagcaaaataattgtacaagtggcaattaaaaaccatccactttttaatgaaaattatttaaaaacacaaagcatgctaccataagtcagattcatagaaaaaaaatgttaacgacacaggacacagaaaaaaagttaaacacagaaatacaatgaacagatactaggtaaattggaagttcaagaacttactgaaaatcaagagttagacttttcatccaaagagtctttttctcccaccaagcatctaaggttttcagtaaaagagcccagcccccttcccccaaagccagtggcttttgtcctgacctagaatagggtttgtggggactgtacctgagccgggcagtctgcaatttccaaattgacaagaagagactggaagataaagagcatgttcttacaggtgaagagcaattttgcaacttttcaaggcgacacccaggagaaagcttgcctgctaccaactgctgc

SEQ ID NO: 173065 - DNA, 260 bp, Homo sapiens
gcccagcagggcatcatatttgtatcaatcctataaattcctggcatcaggcctctttactcctagtaattaatctttttcataaatgctgtcatgtttagagctgttttattaagtttctgccttctaattttttctgcstcactcctttgcctcatcagtattaaaaatgaaaatagaaaaacaacaatagagcagccaaatagatggaacctaccagttacagctttcttttcttaccaagggagtctagatgcaaa

SEQ ID NO: 173066 - DNA, 533 bp, Homo sapiens
ctttctttccttcttctttcctagtacagactcacttatcagaaatatgagggcgtttgatcataattgaaagtaatcacctgatctgaaaagtcagaatatgttttcagggtagcagaaaatcaggagacttcaaagttgcatttgctttttatttaattaataaaaatttaaaagcataaaaataccagtggctattaaaagttcaatagctagaaacatacatacaaggtacatatgaaaaagaacagtatagagtcaacttacgtagtttctgagccgttcagcrtcaaatgatcacaatcacattgttaggaatcatctgacattgcaggtggttctcccaaaacatccagtttctcacttatcctttgatattatttgcacactgtttataatgcctatagttgtcagtctatgttaccagagactgttgctgaagttgccatggggctgaaaatatggttccctgtgtggggaatggtccaaacatgactagtgcctgcaggttcagaaaacttaatttgattgga

SEQ ID NO: 173067 - DNA, 533 bp, Homo sapiens
ctttctttccttcttctttcctagtacagactcacttatcagaaatatgagggcgtttgatcataattgaaagtaatcacctgatctgaaaagtcagaatatgttttcagggtagcagaaaatcaggagacttcaaagttgcatttgctttttatttaattaataaaaatttaaaagcataaaaataccagtggctattaaaagttcaatagctagaaacatacatacaaggtacatatgaaaaagaacagtatagagtcaacttacgtagtttctgagccgttcagcatcaaatgatcacaatcacattgttaggaatcatctgacattgcaggtggttctcccaaaacatccagtttctcacttatcctttgatattayttgcacactgtttataatgcctatagttgtcagtctatgttaccagagactgttgctgaagttgccatggggctgaaaatatggttccctgtgtggggaatggtccaaacatgactagtgcctgcaggttcagaaaacttaatttgattgga

SEQ ID NO: 173068 - DNA, 497 bp, Homo sapiens
gcattatttctgaggcctctgttctgttccattggtctatatctstgttttgtaacaaacctgcacgttgtgcacatgtaccctaaaatttaaagtataataaaaaaaaaaaatatatatatatatatatatatacacacatttaaggctaaggctggaggatcccttgagcccagaagttcaaggctgaaatgagtcatgatcgtgtcactgcactccagcctgggccacagatcaagaccctgtctcaaaaacagaaagacaactttttgcaactcaagtttcaatccttaacaaaaaaatttgaagtggtacaaatctttcctttaccatatacactttatttcaaaatatagggctgcagataaattaagaattattttccaaagaagttatttgagtctcctcttttcaaaaagaaaaagaattaacaaataagttaaactgcaaaaataaaatttaggaaataaagaacaacctataacacatattcaaat

SEQ ID NO: 173069 - DNA, 497 bp, Homo sapiens
gcattatttctgaggcctctgttctgttccattggtctatatctctgttttgtaacaaacctgcacgttgtgcacatgtaccctaaaatttaaagtataataaaaaaaaaaaatatatatatatatatatatatacacacatttaaggctaaggctggaggatcmcttgagcccagaagttcaaggctgaaatgagtcatgatcgtgtcactgcactccagcctgggccacagatcaagaccctgtctcaaaaacagaaagacaactttttgcaactcaagtttcaatccttaacaaaaaaatttgaagtggtacaaatctttcctttaccatatacactttatttcaaaatatagggctgcagataaattaagaattattttccaaagaagttatttgagtctcctcttttcaaaaagaaaaagaattaacaaataagttaaactgcaaaaataaaatttaggaaataaagaacaacctataacacatattcaaat

SEQ ID NO: 173070 - DNA, 497 bp, Homo sapiens
gcattatttctgaggcctctgttctgttccattggtctatatctctgttttgtaacaaacctgcacgttgtgcacatgtaccctaaaatttaaagtataataaaaaaaaaaaatatatatatatatatatatatacacacatttaaggctaaggctggaggatcccttgagcccagaagttcaaggctgaaatgagtcatgatcgtgtcactgcactccagcctgggccacagakcaagaccctgtctcaaaaacagaaagacaactttttgcaactcaagtttcaatccttaacaaaaaaatttgaagtggtacaaatctttcctttaccatatacactttatttcaaaatatagggctgcagataaattaagaattattttccaaagaagttatttgagtctcctcttttcaaaaagaaaaagaattaacaaataagttaaactgcaaaaataaaatttaggaaataaagaacaacctataacacatattcaaat

SEQ ID NO: 173071 - DNA, 497 bp, Homo sapiens
gcattatttctgaggcctctgttctgttccattggtctatatctctgttttgtaacaaacctgcacgttgtgcacatgtaccctaaaatttaaagtataataaaaaaaaaaaatatatatatatatatatatatacacacatttaaggctaaggctggaggatcccttgagcccagaagttcaaggctgaaatgagtcatgatcgtgtcactgcactccagcctgggccacagatcaagaccctgtctcaaaaacagamagacaactttttgcaactcaagtttcaatccttaacaaaaaaatttgaagtggtacaaatctttcctttaccatatacactttatttcaaaatatagggctgcagataaattaagaattattttccaaagaagttatttgagtctcctcttttcaaaaagaaaaagaattaacaaataagttaaactgcaaaaataaaatttaggaaataaagaacaacctataacacatattcaaat

SEQ ID NO: 173072 - DNA, 482 bp, Homo sapiens
aaaaataatatttaatgctaattttttcagaaaaaaagttaaaatggaaaaagaaatttttgaaggaagtaagtacagtgtatgatataccaaaaaatcaaataaatttattctttttccagcagtgctattcggaaaatgttatagaagttaaaacctgtttttgaaaataagcaaggcatagaaataaaaagagaaatgtaaaaaaaaaaaaaattagccaggcatggtggcaggggcctgtagtctcagctactcaggaggctgaggcaggagaatggcgtgaacccaggaggtggagcttgcagtgagccgagatcgtgccactgcactccagcctgggcaacagagccagactccatttctaaaaagaaaaaaaagaaaacttgtcaatcccaattatgaataaagttaaaaaaatagaaaaaaatwaaaaaatttaaaaagcacagatttttaaaaaagtgtacagccatgtaata

SEQ ID NO: 173073 - DNA, 353 bp, Homo sapiens
gtcagcatcatgacctctgagcttcattaaaggcgartaaaaatatctttggttttcaggaaaactcagttgctaagttgctttctctttattcatagcttctgtagatggtgactataaggttaatcattcttaagggatttaattcacaaattctaacttcaatgtagtaatatggaagtcaagaaaaggggaaaaacatttcaagcatgacaaacagaaatctacagaatcaatgtattcagtgagacataaatgttaaccatgatgttttaaaagtgacttcagtagttcttagcaacatctggtctggcaacattatgcattgtcttttctattgatatttttatgtc

SEQ ID NO: 173074 - DNA, 539 bp, Homo sapiens
ttttgccttctgcacacctgcaggccaaataccatgtggaagcttgggccttgcaccctctgartcaatggcctgatctgtactttggccccttttagccatgactagagctggagtggctgggaggcagggtgccatgttctgaggcggcacacagcaggaaggccttgggcctggcccatgaaacaattttttcctcttaggcctccaggcctgtgatgggaggggctgccacaaaggtctctgaaatgccatggagtaattttctccattatcttgactattaacatttggctcttctttacttatgcaaatttctgcagccttgaattcctccccagaaaatggttattttcttttctactgcatagttgggctgcaaatttcccaagcttttatgctctgcttccctttttaatataagttttattttcaggtcatttatttgtttatgcaaatgagcataggctttttagaagcagccaggctacatgttaaatgctttggtgcttagaatttttctgccaggtaccctaaat

SEQ ID NO: 173075 - DNA, 450 bp, Homo sapiens
aggtcccttccacaacgttgggaattacaatttggcatgagatttgtgtagggacacatagccaaaccatattaacaagttattgaaattggaagaatatgtaggaaacaaatagaaaaacatgccatgctcatagattggaagaatcaatgtgaaaatgaccgtattactcaragcaatctatagattcagtgcaattcctatcaaaataccaacctcatttttcgcacaattagaaaaacaaaactaaaattcatatggaaccaaggaagagctcaaaatagctaaagcaatcctaggcaaaaagaacaaagcctgaaggcaccatattacctgactttaaattatcgtacaaggatataataaccaagaatagcatggtactggtataaatagtatatatatagacaaagagaagagaatggagaacctagaaataatgacaaatat

SEQ ID NO: 173076 - DNA, 450 bp, Homo sapiens
taagtgatctgcctgccttggccccccacagtgctgggattacaagtgttagccaccatgccaggtcttatatatcttatcaaataatcagttttatttcatttatctttttttttttggtttcaatttcatttagttctgctcttatgtttgtattccttttcttctgctgggtttgggtttggattgttcttgtttctccagtcccctgaggtatgaccttagattgtctacttgtgctttttcagactttttgatgtaggcatttaatgctgtaagctttcctcttagcactgcttttgttgtatttcagaggttttgatagggtgtgccactattatcatccaattcaaakaattttttaatatccatcttgatttcattgttgacccagtgattattcaggagcaggttatttagtttatatgtacttgcctggttttgagggtt

SEQ ID NO: 173077 - DNA, 576 bp, Homo sapiens
ataggaatggaccataactctgtccttgcattttgaggctcttggcctccattttaatatcaaatcaaaccaaatacgagcccttgtcagccatttaaaaatggttagattggctgccagccttacaagacaaggggacaagcttgctggggagatcatgaagaatcccccagtaccctcaggctgctgggcatattggctatgtttcaaaacagtttcccttcctggaggacccagccatcgtatggagcttaaagaggtcctggagcaacaaagaatttctggccaggactacaccctggtgttatctgaaggcttctggaccaactccagccttcaactkcccaaccaaccatcagcaataggatctccagcttttctatcacaaatttcctcctttcctatctgtgattgccatgtctcctatcatctctatatatgcaatgctctggaaatttttacagttcagtgaaatagtcctgttaggaaaggtcagcaaatgccatagtaacagggaatatagcttaagagaatgctgtttttgtgattttctaggaacagaggatcttcccccat

SEQ ID NO: 173078 - DNA, 555 bp, Homo sapiens
ctctcctagccccactcttaaagggcctcacccagagaccaataatccaattaatgataaatcttataacaactgagtctttttctgtttgtctgtgtagttatgtgtgttatgtgtaacgtctataaaaagagctccaattgattggcttaaagaaaataagggcttaaatatttttaaaggaaagataaaagctrtaatgccttttagctcaagtgactttaacttttgagaaataaaaatagtcttaaggattattagtaaaatacaggtgtcatccaaatgcaaataggtggtctaaatcatataagtcagatactaggtttgctaaatatttccatgcaaactcctgctttacaacttcataaggcctggggacatgcaaaattatccatgtacctaactatgctggaaaaattcaaacttaatctgtgcctactacataatcaaaacaactaaccaggtttcacattaaagttaaaaattgctaaaagtcagcattataacatgtaattaaaatagacttacatgcaaggtgtgtaaaaacagtaaaat

SEQ ID NO: 173079 - DNA, 555 bp, Homo sapiens
ctctcctagccccactcttaaagggcctcacccagagaccaataatccaattaatgataaatcttataacaactgagtctttttctgtttgtctgtgtagttatgtgtgttatgtgtaacgtctataaaaagagctccaattgattggcttaaagaaaataagggcttaaatatttttaaaggaaagataaaagctataatgccttttagctcaagtgactttaacttttgagaaataaaaatagtcttaaggattattagtaaaatacaggtgtcatccaaatgcaaataggtggtytaaatcatataagtcagatactaggtttgctaaatatttccatgcaaactcctgctttacaacttcataaggcctggggacatgcaaaattatccatgtacctaactatgctggaaaaattcaaacttaatctgtgcctactacataatcaaaacaactaaccaggtttcacattaaagttaaaaattgctaaaagtcagcattataacatgtaattaaaatagacttacatgcaaggtgtgtaaaaacagtaaaat

SEQ ID NO: 173080 - DNA, 516 bp, Homo sapiens
cattactattattaagtataatcaccaggctgttcatttgatcttcaggactttattcacttggtttaactgaaatgttgtattttcagacctacatctccccgttatgcccattctcccaacccctgtcaaccatgattctgcctctatgccttgcctccagggcttgtttctgaggataggtcctaggatcacctatgtgagtaatatttaatgctacattgagayttgaacatcgttcaacatattcaaaacctcattaattttctctgtcttccttccatccagtgatctaagccagggcccaagtttcatctgtgacttctctctctctcatcttcatcctatatcaagttgttttgtttagaattcaaaaatattcttcgaaaccttctatatctctccatgttagtttgatttccctaggtgcagaggatgatatgggaattttaataaacgtgatttataaggggaaaagattgaaggaaacatactatagtagggaaggaaggatgt

SEQ ID NO: 173081 - DNA, 552 bp, Homo sapiens
tcctcccattttcttctagttttacggtttcagctcttacatttaaacctttattcattttgagttgctcttttttgtttatggtgtgagagaagggtccagtttcattcttctgcatgtggatatcccagtttttccaacaacatgtatggaagagactgtcttgagattcttgttggttggggtggagcaaaatggtgractaggttccaccaatcatccccctggcaaggacaccattttaacagctacctacacaaaaaaagaacgttcataggaaccaaaaatcaggtgaacacccacagtacttagtttcaacttcatattgctaaaagagacacagaagaggcaggaaaaacagtcttgtatcaccaacaccactgttcccccatcctctggcagggcagtgtggtgcagagtgtttctgtgccctgaggagagggatagccagtaattgtaaggcattgaactcagtcctccccttgttatagcacagagcaaaagcagaccaaactcaactggcacccacccatggagggtgcatttaaacca

SEQ ID NO: 173082 - DNA, 588 bp, Homo sapiens
tttattcagtgttactgggcttgtacagcagatacagtttagatgacaacatccaaatcctttcaaatatctggaaagcctttccaagaaggatgggtacaaacaagcccagaacataaagactacaataaatacccaactcttcaatgcccagacacagatggacatctactgtcaacaccaccatctaggaaaacaagatcccaccaaatgaaataagtaaggcatcagggaccaatcctgaagaaataaagacatgtgacccttcaggcaaacaatttaaaattgctgttttgagaaaactcaaagaaattcaaggtaacacagaaaagaaattcaaaactctatcraaaaaacttaacaaagagattgaaataattttaaaagaatgaagcaaaaattctcgagctgaaaaatgtatttggcatactgaagaatgcaaaaaagtcttcttttttttttataaaaaatgtaattttccaattattagatatatgtaaacactgatagatgactttattagtatgcatgtttgagaaaaataagggaaattgctcaacttaataggtgtgaaggcaacagaattac

SEQ ID NO: 173083 - DNA, 356 bp, Homo sapiens
gagacgtgaccccaaacccccagtagaatcagcacttccaccagccttggagagcctggttcaggacttcccagacccagccatgcctggctttgccccatccaaccactgtagcagcagagcataggacagggagtcctgggagttccatggccccaccccttacatgagacacccagagcttctgtaatgaacaaaatccaaggaaaaatcccactgctccctctctcttggaatgccrcctactggcttggaaatcaacctgcacagcttattaaactgcccacagaactgcacagtgctcagctggcttgtatctgcaagtgccacctactgacctggaggtaaaactaaac

SEQ ID NO: 173084 - DNA, 356 bp, Homo sapiens
gagacgtgaccccaaacccccagtagaatcagcacttccaccagccttggagagcctggttcaggacttcccagacccagccatgcctggctttgccccatccaaccactgtagcagcagagcataggacagggagtcctgggagttccatggccccaccccttacatgagacacccagagcttctgtaatgaacaaaatccaaggaaaaatcccactgctccctctctcttggaatgccgccyactggcttggaaatcaacctgcacagcttattaaactgcccacagaactgcacagtgctcagctggcttgtatctgcaagtgccacctactgacctggaggtaaaactaaac

SEQ ID NO: 173085 - DNA, 645 bp, Homo sapiens
tttggagtccactcctcacaacagtgtgccctggatgtgggacatagagtcaaaggagagtatttgggagctttaaagcttaatgactgcctcgctgggctttgaaattgcatggggcctgtagcccctttcttttggctgatttctcccttttataaagggaaagtttacccaatgcctgtactactattgtttcttggaagtacataacctattttgattttacaggcttgtagatgraagaaactaatctccagatgagactatggacttggacttggtacttttgagttaatgctggaatgaattaagactttgggggactattgggaagaaatgtttgtgttttgcagtgtgacaaaaacatgagattcgggaggatggggtggaaagatagagttttgatatttgttcccacccaaatcttatgttgaaatgtcacccccaatgttggaggtggggcctaatgaaaggtgtttgggtcatggaggtggatccctcatgacttggtggtgtcctcgtgatagtgagtgagttcttatgcgacagggttattttaaagtctgtggcatcttccccacactttgctcctgctctggctgtgtgacatgtctgctcccacttcaccttccaccacgagtaaaa

SEQ ID NO: 173086 - DNA, 645 bp, Homo sapiens
tttggagtccactcctcacaacagtgtgccctggatgtgggacatagagtcaaaggagagtatttgggagctttaaagcttaatgactgcctcgctgggctttgaaattgcatggggcctgtagcccctttcttttggctgatttctcccttttataaagggaaagtttacccaatgcctgtactactattgtttcttggaagtacataacctattttgattttacaggcttgtagatgaaagaaactaatctccagatgagactatggacttggacttggtacttttgagttaatgctggaatgaattaagrctttgggggactattgggaagaaatgtttgtgttttgcagtgtgacaaaaacatgagattcgggaggatggggtggaaagatagagttttgatatttgttcccacccaaatcttatgttgaaatgtcacccccaatgttggaggtggggcctaatgaaaggtgtttgggtcatggaggtggatccctcatgacttggtggtgtcctcgtgatagtgagtgagttcttatgcgacagggttattttaaagtctgtggcatcttccccacactttgctcctgctctggctgtgtgacatgtctgctcccacttcaccttccaccacgagtaaaa

SEQ ID NO: 173087 - DNA, 645 bp, Homo sapiens
tttggagtccactcctcacaacagtgtgccctggatgtgggacatagagtcaaaggagagtatttgggagctttaaagcttaatgactgcctcgctgggctttgaaattgcatggggcctgtagcccctttcttttggctgatttctcccttttataaagggaaagtttacccaatgcctgtactactattgtttcttggaagtacataacctattttgattttacaggcttgtagatgaaagaaactaatctccagatgagactatggacttggacttggtacttttgagttaatgctggaatgaattaagactttgggggactattgggaagaaatgtttgtgttttgcagtgtgacaaaaacatgagattsgggaggatggggtggaaagatagagttttgatatttgttcccacccaaatcttatgttgaaatgtcacccccaatgttggaggtggggcctaatgaaaggtgtttgggtcatggaggtggatccctcatgacttggtggtgtcctcgtgatagtgagtgagttcttatgcgacagggttattttaaagtctgtggcatcttccccacactttgctcctgctctggctgtgtgacatgtctgctcccacttcaccttccaccacgagtaaaa

SEQ ID NO: 173088 - DNA, 645 bp, Homo sapiens
tttggagtccactcctcacaacagtgtgccctggatgtgggacatagagtcaaaggagagtatttgggagctttaaagcttaatgactgcctcgctgggctttgaaattgcatggggcctgtagcccctttcttttggctgatttctcccttttataaagggaaagtttacccaatgcctgtactactattgtttcttggaagtacataacctattttgattttacaggcttgtagatgaaagaaactaatctccagatgagactatggacttggacttggtacttttgagttaatgctggaatgaattaagactttgggggactattgggaagaaatgtttgtgttttgcagtgtgacaaaaacatgagattcgggaggatggggtggaaagatagagttttgatatttgtycccacccaaatcttatgttgaaatgtcacccccaatgttggaggtggggcctaatgaaaggtgtttgggtcatggaggtggatccctcatgacttggtggtgtcctcgtgatagtgagtgagttcttatgcgacagggttattttaaagtctgtggcatcttccccacactttgctcctgctctggctgtgtgacatgtctgctcccacttcaccttccaccacgagtaaaa

SEQ ID NO: 173089 - DNA, 541 bp, Homo sapiens
attcaacaagaagttacaacaatcacaaatacataagcactcaacatgagagcacccagatacataaaacaaatactactagacytaagaaaaggtgtacagtggaataggaacagctccagtctgcagctcccagtgagactgacgtagatggcaggtgatttctgcatttcaaactgaggtacctggttcatctcattgggactgattggacagtgggtgcagcccacagagggtgagccaaagcagggcagggtgttgcctcacccaggaagtgaaatgggtcagggaatttccctttcctagccaagggaagctgtgagagactgtaccaggaggaacagtacactcctcccagatactgtgcttttcccattgtcttcgcaactggcagaccagaagattccctccagtgcctggcttggtgggtcccaggcccacagagcccagcaagctaagatccattgacttgaaaatctgactgctagtgcagcagtatgagattgacctgagatgcttgagcttggtggggggaggggca

SEQ ID NO: 173090 - DNA, 541 bp, Homo sapiens
attcaacaagaagttacaacaatcacaaatacataagcactcaacatgagagcacccagatacataaaacaaatactactagacctaagaaaaggtgtacagtggaataggaacagctccagtctgcagctcccagtgagactgacgtagatggcaggtgatttctgcatttcaaactgaggtacctggttcatctcattgggactgattggacagtgggtgcagcccacagagggtgagccaaagcagggcagggtgttgcctcacccaggaagtgaaatgggtcagggaatttccctttcctagccaagggaagctgtgagagactgtaccaggaggaacagtacactcctcccagatactgtgcttttcccattgtcttcgcaactggcagaccagaagattccctccagtgcctggcttggtgggtcccaggcccacagagcccagcaagctaagatccattgrcttgaaaatctgactgctagtgcagcagtatgagattgacctgagatgcttgagcttggtggggggaggggca

SEQ ID NO: 173091 - DNA, 467 bp, Homo sapiens
caaggactcaggggaaaaggatgggaagggggtgagggataaaagactacaaattgtgtgcagtgtacactgctccggacatgggtgcaccaaaatctcacaaatcaccactaaacaacttactcatgtaaccaaacaccacctgttccccaataacctatggaaagaaaatttttttwaaaaaaaattgatttcggggcagggcacagtggctcatgcctgtaatcccaggactttgggaggccaaggcaggaggttcacttgagcccaggaggtcgaggctgcagtcagctaccattgcaccactgcactccagcctgggtgacagaataaagccctagctcaaaaaaagtgatttcaagtatgcattgcaacatagttaataactattataaagaagcattggactattttgacttcgtccttatgagtttctatatacaaacaagacccccaccaaaaaagtt

SEQ ID NO: 173092 - DNA, 515 bp, Homo sapiens
  misc_feature (1)...(515): n = A,T,C or G
agatcttcaagtgtgtaattatctcagtaggtgaggccccarccagaaatcaggaatcactctaagcattttgaaaagagaacattaaatagagaggattggttactgaaggggatggaccaaaaggaatgttgaagcaactggaacatcaacaaggcaggaaggctgcagggagccaggcagggtcatgagaagagctcaagaacgagggccatccaggagctgctagaccttcaggagaaggtccagaaatggctctatgtacaaccaggcctcgcctgggcctcttcccaggcnactgtgtccattagcctttccaggtgtccatggtggtcctatccacaaacctaggatagatgcttcctccagtcatgcaacagatcataaattcttagtttttgattctgaaattgtccagagcccttttcagttggtttcagcaggaacaactatcagtccataaattccatctgtgagtaactaggaatattctgtgcattgaatgaagactgaag

SEQ ID NO: 173093 - DNA, 412 bp, Homo sapiens
gaattctcccctcaaagctgtgatagcgtcaccaggaagtggtggattttcacagagtgggacttgcttagaggagaagaaagtcccaatgggtcaaaaatggaggccgttcaagtttttttttgctgcggattcaattattcgcttgacgaaggaagaygagtaatagggttctcagcctgaagtctaggttacttcttacttcctcccacctggattgacttcaggagcgtgcaacttgtgtagttgcagggcccttggctcagaagagctccatggttggtttaagattctactgttattgtcttgaaattcttaaaaattttgtctttgaacccgtgttttgtaagtgaagtctatgggataatagagaatgtgtgtgcccatccatcgttcctgtcccacaatgttg

SEQ ID NO: 173094 - DNA, 611 bp, Homo sapiens
ctttactttctttccaactcagtctcttcccaggactaaccattttcaatagtttggaatatatttttccaggcatccttctatatatttacatatatacatatgtatgcagtatggaagctacagatacattaatttacataaccatatgtattgttctgtgatgtactttattyatttagccatatgtctgataggtgattatatgataatacatacatttctaccttatgttttttttttcctttttgacattctcaaagtattccataatacagagaaaccatacatttagccactctcctactgtaggacctttagttgagttcacatgttttaccacttaaatggcaaagcagtgagcatccttgtcagcatatgttgatattacgtgtgatgatttctcaagattaaatttttacagttagaattactgtgccaaaaaaattacataattctaattttgatacatattgcacattatcttccaagtagactttaccaatttacacaccaatcaccagtttcaacatttgatatattagtaattatttttccaaccttgtgaatgaacatttatctcattttcatgtgcattttgcttattgttt

SEQ ID NO: 173095 - DNA, 611 bp, Homo sapiens
ctttactttctttccaactcagtctcttcccaggactaaccattttcaatagtttggaatatatttttccaggcatccttctatatatttacatatatacatatgtatgcagtatggaagctacagatacattaatttacataaccatatgtattgttctgtgatgtactttatttatttagccatatgtctgataggtgattatatgataatacatacatttctaccttatgttttttttttcctttttracattctcaaagtattccataatacagagaaaccatacatttagccactctcctactgtaggacctttagttgagttcacatgttttaccacttaaatggcaaagcagtgagcatccttgtcagcatatgttgatattacgtgtgatgatttctcaagattaaatttttacagttagaattactgtgccaaaaaaattacataattctaattttgatacatattgcacattatcttccaagtagactttaccaatttacacaccaatcaccagtttcaacatttgatatattagtaattatttttccaaccttgtgaatgaacatttatctcattttcatgtgcattttgcttattgttt

SEQ ID NO: 173096 - DNA, 610 bp, Homo sapiens
tgcctgatctctcagcttgttagtgacttcactcttggtgggaacagaggatttaatcaaatagttggctgggtatctattctctgctagggtcataagaagaatatggattgtctataagaagaaagaggattctgctacagcctcagtttgatatattaaccttagattcagtcctctcagtgtgaagtccaattcccaaaatggttggttaaacaacccaaagttacattttgagttaaatgctggaaataccaacctcatacaattagtgaaaggtggaaagggtgaaggcagtrtatttggaaactgttttcagggcaagtatcactcagaatggatatttaaaaaagcaacactgctcataaaattttatatctttttattgtattcaacatgtatttataaagtatcctaggcactagaaatacagctgtggtggtagatttgtgcaagggtcaggatacaagtgacccttacctcaagagtttaatacttaagaaatgagacaaccaaacagctcatttgacgtgttataaagaggtgcacacaactaatttagtgtaggggggtttagctctttattaaaaagcaatgtttaaacagggaa

SEQ ID NO: 173097 - DNA, 610 bp, Homo sapiens
tgcctgatctctcagcttgttagtgacttcactcttggtgggaacagaggatttaatcaaatagttggctgggtatctattctctgctagggtcataagaagaatatggattgtctataagaagaaagaggattctgctacagcctcagtttgatatattaaccttagattcagtcctctcagtgtgaagtccaattcccaaaatggttggttaaacaacccaaagttacattttgagttaaatgctggaaataccaacctcatacaattagtgaaaggtggaaagggtgaaggcagtgtatttggaaactgttttcagggcaagtatcactcagaatggatatttaaaaaagcaacactgctcataaaattttatatctttttattgtattcaacatgtatttataaagtatcctaggcactagaaatacagctgtggtggtagatttgtgcaagggtcaggatacaagtgacccttacctcaagagtttaatacttaagaaatgagacaaccaaacagctcatttgacgtgttataaagargtgcacacaactaatttagtgtaggggggtttagctctttattaaaaagcaatgtttaaacagggaa

SEQ ID NO: 173098 - DNA, 582 bp, Homo sapiens
agaattcaaacaagatcaagttgttattctttgcaatctataaactagagttaacttggagtacgtctctggctaaaataaataaatgtaaacaatatttttaaaaaatgtaatctaatagaatacataaatagatacttagaaatggtcaaatgtaagttcattctattctccattattattttttaatgtgttttaaagcatttcaaagaagttctcatgtgaggaaagctagaaatctgtaaattgctaaatatatattacataatatctgctgtaggaggaaaagtctctggaaattttctagaagttatggcaggcatcatggcaaatttctaatagctttgcttttttggcattgagtcaaccctaaaagattattcctgcaatatttcacttcaaattatgtaatgttctattctttttgcgataaacaaatatgaaatgatggtgaataaatcagacagaaagcatatgatttatgactaggtgaaccttacacctttgcagatttgaacaattrcaagctttgcagattgaacaagttacttaacatctctccatcagtatctttatatgtat

SEQ ID NO: 173099 - DNA, 604 bp, Homo sapiens
aatccatgtatttatctaaactaatgtttatcataataatcatgatgggtgatgacccgtgagcctgcataatctcaatgttttcctgttatccattaatattaaatcttgtggttcactagggactaccacaaataggtttatgtgttcactgccagggtyacattaggtaaaaatggagacaattagctgtacttccttgtaagaatgtacgggcattgaagcactgacactgaactatttgccagaaactacccaaggagaagcacaaaactaattcataggaatgccagtttggcaagtgtcttttgtgaaatcactcattttccaggcagaatttagaaacagagcttccactgttagtgaaatttaatcactgtcaatgtcctgattgttgggatttgaaaaatagggaatccctccaaaagtggtacattcaccatctgcatgatactgaataaatcttcatagagacttggttacatcttcacaaattccagacattatctaagtgatttgattgggggtacttattaacagctgtatgtaaaatctactaggaactcctttattagatacaaatagatccttatatatttattaa

SEQ ID NO: 173100 - DNA, 604 bp, Homo sapiens
aatccatgtatttatctaaactaatgtttatcataataatcatgatgggtgatgacccgtgagcctgcataatctcaatgttttcctgttatccattaatattaaatcttgtggttcactagggactaccacaaataggtttatgtgttcactgccagggttacattaggtaaaaatggagacaattagctgtacttccttgtaagaatgtackggcattgaagcactgacactgaactatttgccagaaactacccaaggagaagcacaaaactaattcataggaatgccagtttggcaagtgtcttttgtgaaatcactcattttccaggcagaatttagaaacagagcttccactgttagtgaaatttaatcactgtcaatgtcctgattgttgggatttgaaaaatagggaatccctccaaaagtggtacattcaccatctgcatgatactgaataaatcttcatagagacttggttacatcttcacaaattccagacattatctaagtgatttgattgggggtacttattaacagctgtatgtaaaatctactaggaactcctttattagatacaaatagatccttatatatttattaa

SEQ ID NO: 173101 - DNA, 596 bp, Homo sapiens
aatttgccaaaaaccatgcagtatatggcattgaattttattaaacaaattatttcttttcttttttcttttgagacggagttttgctcttattgcccaggctggagtgaaatggcctgatctcggctcactgcaacctccacctcccgggttcaagygattctcctgcctcagcctcacaagcagctgggattacaggcatgcaccaccacacccagctaattttgtatttttagcagagacagggttcctccatgttggtcagtctggtctcaaactccctacctcaggtgatccgcccaccttggcctcccaaagtgctggaattacaggtatgagccactgcaccaggcctatttcttatttatttatttaagacagtatctcattctgtcacccaggctgaagggcagtggcatgattacagttctctgcagccttgatctcccaagctcaagcgatcccccctcctcagcctcctgtgtagctgggacgacagatgtgcaaccatgcccaactatgtattttttatttttagtacggatgaggtctcactatgttgtccaggctgatctcgaactcctgaactcaaacaa

SEQ ID NO: 173102 - DNA, 596 bp, Homo sapiens
aatttgccaaaaaccatgcagtatatggcattgaattttattaaacaaattatttcttttcttttttcttttgagacggagttttgctcttattgcccaggctggagtgaaatggcctgatctcggctcactgcaacctccacctcccgggttcaagcgattctcctgcctcagcctcacaagcagctgggattacaggcatgcaccaccacacccagctaattttgtatttttagcagagacagggttcctccatgttggtcagtctggtctcaaactccctacctcaggtgatccgcccaccttggcctcccaaagtgctggaattacaggtatgagccactgcaccaggcctatttcttatttatttatttaagacagtatctcattctgtcacccaggctgaagggcagtggcatgattacagttctctgcagccttgatctcccaagctcaagcgatcccccctcctcagcctcctgtgtagctgggackacagatgtgcaaccatgcccaactatgtattttttatttttagtacggatgaggtctcactatgttgtccaggctgatctcgaactcctgaactcaaacaa

SEQ ID NO: 173103 - DNA, 535 bp, Homo sapiens
ggtggagcgacagcccacctgggagccggaacaaggggagctcccacccccagccaagggaggcggtgagtgaccatgctaccctgcccgggaagccatgctttttccatggatttgtgcaacccgtggagcagatctcctcatgagcccatgccactaggaccttgggttccaagcacagagctgtgtagattctcagtggccgcctggctggagactgcacaagactactgagttctcagggagtggggcggcagccatcactacagctccagtctggcagttcccccccrctggtgccgcggaaactgggcagtttggacccaggaagaattccccagggtgtaccacagcagctgtggcagattgtggccagactacctctttagtctggacctggatccatcccttctcactgggaagggcctccctgcaagaatttcagcaactccagccagagttttatggacagaactctgatctctctgggacggagtccctgtggaaatgggctgccgtggtctccacggatcag

SEQ ID NO: 173104 - DNA, 596 bp, Homo sapiens
agctctactgccccttttacttcctctactcatagtcaggtttctgtctcttgaactgatctagctgttatgtatacgtctccagcaggacaaactctaggagaaacatgttaatgtgccacatgatacaattgagggtaaacatggaaaccatttaaccttggtacagttttcttcattaaacacaagagcattactggatgtttttcttattgcttgatgtcatttgaagttttgcactgctgccctcagctcatttgctttatttctagatttttttttttaactgagtgtttcctagctagattcatgactatggataaggttcaaactattagagaggcaaagttcctcagggaaagagccggcttctcattgttcttcattatttacatattctccygtatgtttctgaagcacttaacccaatttacattttaatgagctaccgtactgtacttaccaaatgcttagtgggtcaatactagaggttccattttaggaatctggaacaagtaataatcagaatgaaaataacaagagcatcggcagaactggcataaccagaaaaaaaccttcaaatttcaattaggatt

SEQ ID NO: 173105 - DNA, 528 bp, Homo sapiens
atgagcttggacatccttattacccaacaactatattatatttttatactagttgtttaattttgtaagtaaagctcacttgcagtattgagttatgagttagtcaagatgaacaaaaacaacataacagctaaagtttaaccttttaaacctctctttaaaaaaagagatgagcgttttggatgaaaatctaagtcagttatgtactctgtttgttttcttaaaactgatcaaactatggaacttaaaataacacttccatagcgacctctgaccatcattaggtgtaccaattatagtatagcagtaacatcagggattataaaagtttgtaggtctgtttgcctttattgtgtttacctttatagctcggttcttgtgayttttgagttcctttgtacgctttttatagattttcttcgactttcttgctgacacatttaactactatcattgcgcaagtcttcacagccccatcccctttttcgtttcctgcttcctaataggcagtgggtttggtaaccaaat

SEQ ID NO: 173106 - DNA, 521 bp, Homo sapiens
tgttgaatacctctaaatgtgagaaagtctgttctgaaatgaatttcacctccttgcagctctcagctgccctctaagctaggtatagcaattttgtctcctactctacaagaaaaatcttcaaatgtttgaatagacttgtgtcttccctcaatttcccttttgctagggaaacattcctagctcctccaactctcaaatctgtatcattttcatacatcctctggacatatttcaatacatcaagtttctcttaaaatgtgctgtccaaagtagaatgyaataatcaaacactgtaaagagccatacactggtaaaacaatgtgagaacattttttcacggttgtataacaatttggggccatattattgtctataataatagttttttagatgaacttctataattgtgcaatttatattttgaactttaagcaatttacaaaaagttctctttgttaaataatattttgttgattctaatgtagtgccatagatcatttcaaatctatattacatca

SEQ ID NO: 173107 - DNA, 459 bp, Homo sapiens
aaattttgagacattctgcaaacacccataagtgtaaatggattaagtggtgtatatagaatgtgtaagagacyagaatgttagaggctgagcattgaggcagtggccatagtgcatgaaataaacttcaaagatactaggcatttatatttgggatctacctatgagaattctcgcagtaaaaaagcagagttggaagtatttctggatttttttttaagcattagaaagaagtgagttgaactttgaaataactacatacgctatactctaaggaacatatgacagaccttcagtgagtgtgccttgagcattttgatttgaagaaatagtgaactgggttcatgtggggctttggattgttggcatttttgtcttgcttacaaaagaactaatagtcattgcttaaaaaatatataactggtcctctttgatatattgaatttatactgtttaaaa

SEQ ID NO: 173108 - DNA, 537 bp, Homo sapiens
agaattctcgcagtaaaaaagcagagttggaagtatttctggatttttttttaagcattagaaagaagtgagttgaactttgaaataactacatacgctatactctaaggaacatatgacagaccttcagtgagtgtgccttgagcattttgatttgaagaaatagtgaactgggttcatgtggggctttggattgttggcatttttgtcttgcttacaaaagaactaatagtcattgcttaaaaaatatataactggtcctctttgatatattgaatttatactgtttaaaaaggargaagatgtcatcagtttgctcgattgtttaatatagaaatccatctatattcaaatatagagtttatgtcaatagaagctctccctgttatattttctttccactgcatgagggaaaagactgcctttatttcatttatttctatattcctagtgcctagcacatatggtgcaatcaacaaatgtctggtgaatatggatgaacgaatgtatgaaatccttgagaacaatcaagactca

SEQ ID NO: 173109 - DNA, 573 bp, Homo sapiens
gaaaagaaaaaatgagaggaacaaggccaagaaacacagacaactactcctggaggtccaaaatccaaataagagtaggttcagaatgacaaaaaatgaaaatgtagaggaagaaacaggcaaggtggctcacagctacaatcccagcactttgggaagctgaggcaggaggatgactgaaggccaggagttcaagaccaacctsggcaacaacgtgagactcaaaattcattaaaaaatgtaaaaattaaaaccaggcgagatgcaatagctcatgcctgtaatcctagcactttgggaggctgaggcgggaggatcgcttaagcccaggagttcaagacctggctgggcaacatagctagaccttgggtctattaaaattaaaaaaaaaaaaaaaattagccaggcatggttgcacatgcctgtagtcccagctattcaggaggctgaggtgggaagatcacttgagcccaggatttcaaggttgcagtgagctgtgatcacaccactgtactccagcctgggttacagagtgaaatcctatctttctggaaaataaaacatcaagcaaag

SEQ ID NO: 173110 - DNA, 561 bp, Homo sapiens
gccaagaaacacagacaactactcctggaggtccaaaatccaaataagagtaggttcagaatgacaaaaaatgaaaatgtagaggaagaaacaggcaaggtggctcacagctacaatcccagcactttgggaagctgaggcaggaggatgactgaaggccaggagttcaagaccaacctgggcaacaacgtgagactcaaaattcattaaaaaatgtaaaaattaaaaccaggcgagatgcaatagctcatgcctgtaatcctagcactttgggaggctgagrcgggaggatcgcttaagcccaggagttcaagacctggctgggcaacatagctagaccttgggtctattaaaattaaaaaaaaaaaaaaaattagccaggcatggttgcacatgcctgtagtcccagctattcaggaggctgaggtgggaagatcacttgagcccaggatttcaaggttgcagtgagctgtgatcacaccactgtactccagcctgggttacagagtgaaatcctatctttctggaaaataaaacatcaagcaaagtttccagaacagg

SEQ ID NO: 173111 - DNA, 516 bp, Homo sapiens
ttcacctttgtagtagagaatgccccatgaaacatgatttcactctgaatacactgctgtacctcctcaaggttttccaagtacacatcagtgaaaatgaaataagctgataggttattgtaaggaatgcatgagaataattttgttctatgaaaaatgctcagaacaacaccagcacatgataggcacctagtaactgttcactagcagtactagctgcactactacaagtagcagtagcagtattagagccgccttcactgcctcaccatcttctcactcaaggtttagccctctctgcacattctactygcctgcttttaagaaatgttgctgtcagggcccagccttagcgattctgattttaattattctgggacaagtccatggtatttggtatttttaaagttcctcacataattctactgtctagccaaggttgagagccactgagctgcaaaacacaaattcatgtacttcataatccaggctgaatcccactttccagaagtaaaa

SEQ ID NO: 173112 - DNA, 622 bp, Homo sapiens
ttatttttattctcaaaattggatgtctctggttgaaccttctttttctgttgttttttgaggcggagtttcgctcttgttgcccaggttgcagtaaaatggcacgatctcggcttcaccgcaacctccacctcccaggttcaagcgattctcctgcctcagcctctggagtagctgggattacaggcatgcaccaccacrcccagctaattttgtatttttagtagagacggggtttgtccatgttggtcagactggtctcgaactcctgccctcaggtgatccgcctgcctcagcctcccaaagtgctggcattacaggcgtgagcctgtgtccggccagaactttccattaactactcaaacttccattaggctcatgaaataaaaacaggttgaattttctttatcaaaatgtttctcttttactatttttatttggatgtggtaaagctcatgaaataaaacaggctgaattttctatattaaaatttttttcttctaccattttcatttggatgtgataaaacttcctgctcaactggtatcaattactgcccttcgagaaaaggagaagagactacatgaaataatttaatgttgtaatccaaatgacctaccaa

SEQ ID NO: 173113 - DNA, 494 bp, Homo sapiens
agcagaataatacacttttaactccagctcgaagaatctgctgcctcatttcgtttttaataaaatgaaaggctttcataatatagtagtaccacaacaaagacattggtgaagggacaacaatttatccaaggaaagaaaatataatgttgaaaaaataaatgtacatagaatttttaataaagttatctttgtgaaaaacattctgacatcatctgtctgttgcaaaacatttattgatttggcctcataaagctaaataaattaaagaagtattttacaattaattgcacatcattatgaccaaaagtaatttttatggcattttactaggtcttcagggagtttaatttattcaygtccctgattaaatcaaaccaccccgaaggagatattgattcatattgccactaccgttgcgaacactggggtgtggaggctgcacggacagaccatctctgaggtcccagggtgggaggagagactctgaattc

SEQ ID NO: 173114 - DNA, 494 bp, Homo sapiens
agcagaataatacacttttaactccagctcgaagaatctgctgcctcatttcgtttttaataaaatgaaaggctttcataatatagtagtaccacaacaaagacattggtgaagggacaacaatttatccaaggaaagaaaatataatgttgaaaaaataaatgtacatagaatttttaataaagttatctttgtgaaaaacattctgacatcatctgtctgttgcaaaacatttattgatttggcctcataaagctaaataaattaaagaagtattttacaattaattgcacatcattatgaccaaaagtaatttttatggcattttactaggtcttcagggagtttaatttattcacgtccctgattaaatcaaaccacccygaaggagatattgattcatattgccactaccgttgcgaacactggggtgtggaggctgcacggacagaccatctctgaggtcccagggtgggaggagagactctgaattc

SEQ ID NO: 173115 - DNA, 517 bp, Homo sapiens
cggtgatctggctctagtaccccgtgtggcgcagctctgggctccgtcactggctgagcagccagttcagggctgagtcctgtgggaggatggtggggaggccccaagacttgctctgttaattgctagggttttaaaaaattcttcagaattacctttctaccagcaaatggtagttcagctgtgggatcagctgtcttggaaataaatactcttttgattgggaaacaggaagtgtaggaatctgtacatgaatcaattgcagttaagccccctttgaggtctggacagtgaggggaagtgtgtggagcaggtggggcctgaagagccggttgaaggccacggatgcctccgagaggaagtcggggtgtgggagggaggctgggcccccgtgatcggatccacgctgccrtcgtgttccctcagttccgctgctgtgctttcgggtctcctggagttgatgactggtgtgagatggaagctggttcctaacataatgttgtttctgctccaacag

SEQ ID NO: 173116 - DNA, 403 bp, Homo sapiens
cccagagttaggccaatggccaggcccagactgaggtcacacatcttccsaacccccaaggagtcaccccctcttcccaacacacacacacacacacacacacacacacacatatacaatgactaggagcatgatctctcccatgcaccttaatggaaggtcagccaaagctggttcaattcccaggcttagtcattgtgtgaccttgactaaatcatttacctatctgagcttcggtttcctcttctgcaaaaacagaataatcctgatatcaccaagtaattatgaagacatgaaaacagctaacattaactgagtatttaccatgtgccaggtgtggttctagaagctttgcgtgtacttttattatccctgttttcaccgacgaggaaagttaaataac

SEQ ID NO: 173117 - DNA, 415 bp, Homo sapiens
ccctcaatgatctcaaaacattaagcaatcgacactctcctaaattattttaagatggtcttgctctgtcaccgaggctggagtgcagtgtagcacgatcatggctcactgcagccttgacctcccagactcaagcaatcctcccacctcagcctcctgagtagctgggaccacaggtgtatagtaccatgyctggttaattttttaagtttttatagactgggtctctctgtgttgcccaggctggtttcggacttacggccttaagcagtcctcttgcctcggctcacaaagtcctgggattacaggcgtgaaccaccacacctggcctatttttcatatgtattttagttctaccttttttaaaaaagaaacttacagactatcttatataggaatcttggtgtttagttta

SEQ ID NO: 173118 - DNA, 407 bp, Homo sapiens
atctcaaaacattaagcaatcgacactctcctaaattattttaagatggtcttgctctgtcaccgaggctggagtgcagtgtagcacgatcatggctcactgcagccttgacctcccagactcaagcaatcctcccacctcagcctcctgagtagctgggaccacaggtgtatagtaccatgtctggttaattttttaagtttttatagactgggtctctctgtgttgcccaggctggtttcggacttayggccttaagcagtcctcttgcctcggctcacaaagtcctgggattacaggcgtgaaccaccacacctggcctatttttcatatgtattttagttctaccttttttaaaaaagaaacttacagactatcttatataggaatcttggtgtttagtttac

SEQ ID NO: 173119 - DNA, 414 bp, Homo sapiens
tttaccctcaatgatctcaaaacattaagcaatcgacactctcctaaattattttaagatggtcttgctctgtcaccgaggctggagtgcagtgtagcacgatcatggctcactgcagccttgacctcccagactcaagcaatcctcccacctcagcctcctgagtagctgggaccacaggtgtatagtaccatgtctggttaattttttaagtttttatagactgggtctctctgtgttgcccaggctggtttcggacttacggccttaagcagtcctcttgcctcggctcacaaagtcctgggattacaggcgtgaaycaccacacctggcctatttttcatatgtattttagttctaccttttttaaaaaagaaacttacagactatcttatataggaatcttggtgttta

SEQ ID NO: 173120 - DNA, 622 bp, Homo sapiens
gtcctgatatacacctaacagttgttcaataggtattcactgacttcttggtaaatgagttattatgtttcctacaccatcaggatgattttggtcataggaagcagagaattcaggaaaaaattgcttaaacttgtgctactgaaartatgtcccatagattgttggtcagaatacaaactgtttatttctgatctgcaagtagccaagtaattaagagcatgcatttagaaacatttatagcaactttaatgtatcatgacatccagtggctggtcatttattctaggaatttgtttttattgtattttacaatagtttttgtcctcaactgattgaaaattttaaaaaatctaatttcttaactacagggtgtttaagaagcacagatttagacaatgggtatttattaataacaaatctcatatagtaagaaatcaaggaagaaatagttgctgggttgggattcaataatgttcaacagtggtagggctcccagttgatgtttctcaggttcccttggtcttccagcttagctacaatatgccgtcagcagttacaagcctcatgcttccacatgaaaatactcaactggagaaggaagaggacagatgcagaacag

SEQ ID NO: 173121 - DNA, 393 bp, Homo sapiens
catttcactctgtgattctttgagttcaattattgtagattccacatgtaagtgcgagcatgtrgcatttgcgtttctgtgcctagctcatttcacttagcataatgccttccagtgaaaaacaagagcagtattgaagggttggctcaattgaagtttagcatgtcttgtgaaataatttttcttcctgttcatttgaaaacttatgaaaatattaaaaattggtactaaaaacataactgatatttttaaatgtcactcataagaacatacatattcatcacatttctcagtataaaccaagaaacataagaaaaaacatccaaaatacattttaacgtctttacaggctgctttagttttagttagaaataatatagagagtcaaagact

SEQ ID NO: 173122 - DNA, 502 bp, Homo sapiens
agacaatttcaaaagtagcaagagaaaatgacttatcatatacaaggcaaattcacaagactatcagcagatttctcaacagaaatcttgcaggccaggaaartgtgaaatgatatattcaaagtattggaggaaaaagattgctaaacaatagtattataccctgcaaagctattttttaatagctgctctttaaaaatgaaggggagacaaattctttccaagagagagggactttgtcactacttaacctatcttacaaaaaatgcttaaggaaggccttcaagcaatgtaaaagcatatgaaggtagaaatctcacaggcaaagtaatacacagtcaaatacagaataataaacactgtaatggtggtgtctaaaatacttacaacacgcaagataaaggtttggttaaattattaaaaataactatactaaaatttgataatgaatttagaatataaatttgataaataattcacaatgaatgaaatcagagtaatc

SEQ ID NO: 173123 - DNA, 600 bp, Homo sapiens
gtccccctgccatctgatgtcaccacgtgaatttaggatgaagcctgatgcccaagggccttcaaactccactctgtccaatccctttttctttgaacttggcagattagggtgacccagtcatacaaaaatatctgaaccagacagcttgaaagcaatggcagtttttcttcacttaagattttacmtaatttatcaactcaattttctatacttgaatattggtggaaaaaaggaaatgctgaattggatgcagctattctagacaattgaatctgtgtattatgcatgtgggcgtatttatgtatgatgcaccttcttccatttactgtacttgcagtggcttacatatttttatgtgcaagatatttatttatatctgcatccaaatgtctagccaagtactacgtatattataggcactcagtaaatgtttgttcaatcaaaatgactttaaaatagagtaaagatgatttaaaggaaggaagtgatcattccagatatctgaatacaacagaatattatcattgggccattcatttgattgtaagcttcttaaattcaggacactaacccctttgtaataaattgtgcaggatt

SEQ ID NO: 173124 - DNA, 600 bp, Homo sapiens
gtccccctgccatctgatgtcaccacgtgaatttaggatgaagcctgatgcccaagggccttcaaactccactctgtccaatccctttttctttgaacttggcagattagggtgacccagtcatacaaaaatatctgaaccagacagcttgaaagcaatggcagtttttcttcacttaagattttacctaatttatcaactcaattttctatacttgaatattggtggaaaaaaggaaatgctgaattggatgcagctattctagacaattgaatctgtgtattatgcatgtgggcgtatttatgtatgatgcaccttcttccatttactgtacttgcagtggcttacatatttttatgtgcaagatatttatttatatctgcatccaaatgtctagccaagtactacgtatattataggcactcagtaaatgtttgttcaatcaaaatgactttaaaatagagtaaagatgatttaaaggaaggaagtgatcattccagatatctgaatacaacagaatattatcattgggccattcatttgattgtaagcttcttaaattcaggwcactaacccctttgtaataaattgtgcaggatt

SEQ ID NO: 173125 - DNA, 616 bp, Homo sapiens
gctacccctagaggcaaggcttcctgccaataaagatcaacacttgcagagagcttaatgtctgctaaggactacaataggtgctatacattaattaaatwatttaatagttataaaaagcccatgagataggtgaaattattacccatattttaccaattaggaaattcaggaacaaagaggttaaataatttacccaagttagtcagtgcccgagctgggatttaaactgaggcaataagagaggcctgacatgagcaacatgaaaaagtaggagttccgagccttcatctcccaacgaaaagcaataattagacatttttcatgaagaaaatagctctgggagagtgcaagagtccagttacaaagctacagcaacacagtagtgcaaagagagagaaaggaagagagactattaaccacacagaagggtaggaagaacagtttcattctgccttcatcatcccatccctcaggcctatacagctcagtgtccagaggaatttcctcagcccatgagttcccttcatagaggaaatgaaaggcagagtgaatgaccagcttcactagtttttggagcactgcccatgtgaccaaaattatttcaccccaccca

SEQ ID NO: 173126 - DNA, 542 bp, Homo sapiens
ccaaccaacaaaaaaccagagcaataaacaaaaacacaaccaaggaccctaacagagtacacttcacttccctgctacctccactggagcaggtgctgatatctatctacagctgcaagacctgaagatgaatcacatcacaggactytttgcagacactccccggtaccagcccggagcccagtagctctaccgggtggttagacccagaagagcaaacacaatcactacagttcagccctcaggaagcctcattcctaggggaagagggagaacaccacaagggagccccctgtgggacagaagaatctgaacagcagctttgaatcccagatcttcactctgacatactctacccaaaagaaaagaaaccagaaaaacaattctggcaatatgacagaataagattctttaactgtctcaaaagatcaactagctcaccagcaatggatccaaaccaaaatggaatttctgaattgccagaaaaagaattcagaagtcgattattaagctaatcaaggaggcaccagagaaaggtgaat

SEQ ID NO: 173127 - DNA, 542 bp, Homo sapiens
ccaaccaacaaaaaaccagagcaataaacaaaaacacaaccaaggaccctaacagagtacacttcacttccctgctacctccactggagcaggtgctgatatctatctacagctgcaagacctgaagatgaatcacatcacaggactttttgcagacactccccggtaccagcccggagcccagtagctctaccgggtggttagacccagaagagcaaacacaatcactacagttcagccctcaggaagcctcattcctaggggaagagggagaacaccacaagggagccccctgtgggacagaagaatctgaacagcagctttgaatcccagatcttcactctgacatactctacccaaaagaaaagaaaccagaaaaacaattctggcaatatgacagaataagwttctttaactgtctcaaaagatcaactagctcaccagcaatggatccaaaccaaaatggaatttctgaattgccagaaaaagaattcagaagtcgattattaagctaatcaaggaggcaccagagaaaggtgaat

SEQ ID NO: 173128 - DNA, 542 bp, Homo sapiens
ccaaccaacaaaaaaccagagcaataaacaaaaacacaaccaaggaccctaacagagtacacttcacttccctgctacctccactggagcaggtgctgatatctatctacagctgcaagacctgaagatgaatcacatcacaggactttttgcagacactccccggtaccagcccggagcccagtagctctaccgggtggttagacccagaagagcaaacacaatcactacagttcagccctcaggaagcctcattcctaggggaagagggagaacaccacaagggagccccctgtgggacagaagaatctgaacagcagctttgaatcccagatcttcactctgacatactctacccaaaagaaaagaaaccagaaaaacaattctggcaatatgacagaataagattctttaactstctcaaaagatcaactagctcaccagcaatggatccaaaccaaaatggaatttctgaattgccagaaaaagaattcagaagtcgattattaagctaatcaaggaggcaccagagaaaggtgaat

SEQ ID NO: 173129 - DNA, 393 bp, Homo sapiens
taaacaaatttagtaaagttgcaggacacaaaaattaacataaaataattaatgtttctttgtacaaacaacaagccatccaaaaataaagttaagaaaataatcctatttaaaattgcaatgaaagaaaaataaagacttaggaataaacttaaagaagcaaaagccttgtgtggtaaaaattataaaatattgatgaaataaatcaaagaagacacagataaatagaactatatctgtgttcctggattattgaaattattattagacttattgttgaaatgtctgtactacccaaagttayttacagattcaatgtaatccctatcaaaatcctgatgggattctttacagaaatggaaaaaaaatctcaaaattcatacagaaccacaa

SEQ ID NO: 173130 - DNA, 607 bp, Homo sapiens
ggtgcgatctcagctcactccaccctccgcctcccaggtccaagcaattctcctgcctcagtctcctgagtagctgggattacaggcacccaccaccactcccacataatttttgtatttttagtagagacggggtttcaccatgttggccaggctggtctcgaactcctgacctgcagtgatccacccgccttagcctcccaaagtgcagggattacaggcataagccaccacgcctggcccatttagtgtttttttaatgtcatgcagtgagcagcccaaccaacactggcaagttcaagaattcctcactgcttaatttattgcggagtattggcaaccactggggatttctctgcaacgaacatgcatactgtgtatcttgggagccatgtgtcacagtcctcatatcagagattcaaacaattcattacaaccattaaaaactcagctactctctgctttcaagatttcaggagctcagatcagacaagtcctcataggctagagccccarcaattgacagtaacaaagtaagagcgagggtaacatgattgaaatgaaaagaaaacacaaatacagtctctgcaaatcctgatgccaccct

SEQ ID NO: 173131 - DNA, 536 bp, Homo sapiens
gcatgaattggtgggagtagtctaggcagaggagatcacaggacaaaatgaggagtttagaagcagcataatatatgtggcagagagtgccatatgttctccaaatctttcttcttttccatctcagtctcagagtttggtaacatttccaagcctagcttctagtcaggtatggccatgtggctgattatggcacaagaatgaggacataattaatatattatctttcacatctggcctttagaaactttccacatgcaaacctccattgtctccctctttcttctcaatcaggtgaaagctaggagagtgaagcaacaaagggaagacacagagacactggatgatcatatggaaagtcttccccaactaggaatgttcgcatgagtcaaagatraagttttattgtgttaagtcactaaaatttaggatgtttgttatatcagctaatattacttgccttaatcaatatagtatccatatgttatgctgatggtaagtaatggctatgaggcaggaaaaagagatgtcaatca

SEQ ID NO: 173132 - DNA, 570 bp, Homo sapiens
cacacagctacctccctacattgtcctcactgagaataacctcactccacctggttgaaaacccacagtgttgctgccactgcctactgctgagcattttgccagtctcctggggaccactctgcctctgcctatctctrccagcacctgaatacactaccagggtgcaagaggacaagtctgctggcctgtcccatttccctagtacttgtgcacccaggggcctagaaattgcccagcccagtccaccaccaattgcatctaagtactccccccagggtctgggttcaggccaacaaaacctgctgataacacacagctggcactcatccacatgcaccgccaacaagaaaaggtgaatggcccactaaacttgttgcagctaccacaaacaccaatagaacctcttgggtgccagtaggttactccaccaccactactgccattgttcatatcaaatccactgctaagggacccaagaaccctccaacatgcctggaccaccacggacattactgacatctgagtaagtcacctgaagccccaagaatcaggttgcttgaactcact

SEQ ID NO: 173133 - DNA, 576 bp, Homo sapiens
gatcatatatctagataccctaaagactcatccaaaagtctcctaaaactggtaaatgaattcagcaaagtttcaagatgcaaaatttaggtacacaaatcagtagctctgctatacaccagcagcaaccaagctgagaatcaaatcaagaactcaacccctttcactatagctgcaaaaaataaaataaaataaaatacttaggaatatacctaatgaaggatgtcaaagacctctacaaggaaaactacaaaacagtcctgaaagaaatcacagatgacacaaacaaatggaaacacatcccatgctcatgaatggtcagaatsaatatcatgtatatgaccatgctgccaaaaacaatctacaaattcaatacagttcccatcgaaataccatcatcattcttcacactagaaaaacaatcctctacttcatatggaaccataaaagagcttgcatagccaaagcaagactaagcaaaaagaacaaatctgggggcatcacattacccaacttcaagctatcctacaaggccatagtcaccaaaacagcatcatactagtataaaaacaggca

SEQ ID NO: 173134 - DNA, 576 bp, Homo sapiens
gatcatatatctagataccctaaagactcatccaaaagtctcctaaaactggtaaatgaattcagcaaagtttcaagatgcaaaatttaggtacacaaatcagtagctctgctatacaccagcagcaaccaagctgagaatcaaatcaagaactcaacccctttcactatagctgcaaaaaataaaataaaataaaatacttaggaatatacctaatgaaggatgtcaaagacctctacaaggaaaactacaaaacagtcctgaaagaaatcacagatgacacaaacaaatggaaacacatcccatgctcatgaatggtcagaatcaatatcatgtatatgaccatgctgccaaaaacaatctacaaattcaatacagttcccatcraaataccatcatcattcttcacactagaaaaacaatcctctacttcatatggaaccataaaagagcttgcatagccaaagcaagactaagcaaaaagaacaaatctgggggcatcacattacccaacttcaagctatcctacaaggccatagtcaccaaaacagcatcatactagtataaaaacaggca

SEQ ID NO: 173135 - DNA, 579 bp, Homo sapiens
aattttgaaatatacaatacagtattattaactatagtcactatgctgtgtaatagatctcaaactagagtccttatgtttgtaaccctgatcagcattggtttgaatatgtccttctaataagtattcataagaaagttctgcaattctcatgacttaagcctccctgacatataactatgaaatttataacatccatcagaccttttctctcttaagcttcagttacttatttcaccttttgttttattaactaatacttcatattctttasgctgaaacctaatttgtttttaattctttaggttgaaacctcctttcccaaattccccctttagcttgcttgccctgccaagagatgtattgaattcattttctacaatgcctgattaatcttccttaagtggaaacttcatcctgtcactcctcttcaaaaaaaataatgtctctgtaagctgccatttaatgccttaccaaaatagaattatttcctacttctccaggtctgcatcctcagttccatagggacagatttctatttcatgaacaacacatattcatacccttgaacatatgtag

SEQ ID NO: 173136 - DNA, 579 bp, Homo sapiens
aattttgaaatatacaatacagtattattaactatagtcactatgctgtgtaatagatctcaaactagagtccttatgtttgtaaccctgatcagcattggtttgaatatgtccttctaataagtattcataagaaagttctgcaattctcatgacttaagcctccctgacatataactatgaaatttataacatccatcagaccttttctctcttaagcttcagttacttatttcaccttttgttttattaactaatacttcatattctttacgctgaaacctaatttgtttttaattctttaggttgaaacctcctttcccaaattccccctttagcttgcttgccctgccaagagatgtattgaattcattttctacaatgcctgattaatcttccttaagtggaaacttcatyctgtcactcctcttcaaaaaaaataatgtctctgtaagctgccatttaatgccttaccaaaatagaattatttcctacttctccaggtctgcatcctcagttccatagggacagatttctatttcatgaacaacacatattcatacccttgaacatatgtag

SEQ ID NO: 173137 - DNA, 430 bp, Homo sapiens
tttattcactatcatgagaacagctcaggaaagacttgcccccatgattcaatgagctcccactggatctgtcccmcaacatgtagaaattcaagatgagattcaccatatcaatatacaaaggagaaaatgtgggaataagggctagggaaattgttagcaacaaccatctgggtgaccttcaattttatttttatttgtatttgttttccgttttttttttttttttttttttttttttattaaaaaaatacagggtctcactgtgttgcccaggctggtctcaaacttctaggctcaagcaatcctcctgcctcagcttaccaagtagctgggactacaggtgtgtaccaccatacttagctaatttttttttttttaaattgtagagacagggtcttgctatgttgcctgggatggtcttgaattc

SEQ ID NO: 173138 - DNA, 600 bp, Homo sapiens
cctgtgaaacccatgcttctaaaaagacaggtcgattctactttttaaatatatttaaacagagtagctttggatgaaaacatgatgttatgaccttgatattyttacatcaagtatattttcaacgggtcactagaaaaaaaaattgatgtagtaaaaagaatctacacaggatcaaactgataataactaaaatgatatatgttaactttgatattgacaaaaaactgactgaagaatctcattgtgttggtaagtcacaaaactacaaaagtgaactcttttaaaattgcactttatagaaataacacaaaataaaactgacaaaggtgaaagctttacacagaaaaatttgtaattgactttaaaaattgacaaaagaatcaaatcttcttgtcaaaaattatacctgcaaaatctagcccaggaaaattaggtttggtagaaaatgactacaaaagaaacctcaaaattgctgattggaaaagttggaaagatttaataaggacataaaatgggatcactgaataaagtctaaattatttcagtaaaataaaaatactgaaaattatttaatggcacaggaagaaatttgatcaa

SEQ ID NO: 173139 - DNA, 600 bp, Homo sapiens
cctgtgaaacccatgcttctaaaaagacaggtcgattctactttttaaatatatttaaacagagtagctttggatgaaaacatgatgttatgaccttgatattcttayatcaagtatattttcaacgggtcactagaaaaaaaaattgatgtagtaaaaagaatctacacaggatcaaactgataataactaaaatgatatatgttaactttgatattgacaaaaaactgactgaagaatctcattgtgttggtaagtcacaaaactacaaaagtgaactcttttaaaattgcactttatagaaataacacaaaataaaactgacaaaggtgaaagctttacacagaaaaatttgtaattgactttaaaaattgacaaaagaatcaaatcttcttgtcaaaaattatacctgcaaaatctagcccaggaaaattaggtttggtagaaaatgactacaaaagaaacctcaaaattgctgattggaaaagttggaaagatttaataaggacataaaatgggatcactgaataaagtctaaattatttcagtaaaataaaaatactgaaaattatttaatggcacaggaagaaatttgatcaa

SEQ ID NO: 173140 - DNA, 600 bp, Homo sapiens
cctgtgaaacccatgcttctaaaaagacaggtcgattctactttttaaatatatttaaacagagtagctttggatgaaaacatgatgttatgaccttgatattcttacatcaagtatattttcaacgggtcactagaaaaaaaaattgatgtagtraaaagaatctacacaggatcaaactgataataactaaaatgatatatgttaactttgatattgacaaaaaactgactgaagaatctcattgtgttggtaagtcacaaaactacaaaagtgaactcttttaaaattgcactttatagaaataacacaaaataaaactgacaaaggtgaaagctttacacagaaaaatttgtaattgactttaaaaattgacaaaagaatcaaatcttcttgtcaaaaattatacctgcaaaatctagcccaggaaaattaggtttggtagaaaatgactacaaaagaaacctcaaaattgctgattggaaaagttggaaagatttaataaggacataaaatgggatcactgaataaagtctaaattatttcagtaaaataaaaatactgaaaattatttaatggcacaggaagaaatttgatcaa

SEQ ID NO: 173141 - DNA, 600 bp, Homo sapiens
cctgtgaaacccatgcttctaaaaagacaggtcgattctactttttaaatatatttaaacagagtagctttggatgaaaacatgatgttatgaccttgatattcttacatcaagtatattttcaacgggtcactagaaaaaaaaattgatgtagtaaaaagaatctacacaggatcaaactgataataactaaaatgatatatgttaactttgatattgacaaaaaactgactgaagaatctcattgtgttggtaagycacaaaactacaaaagtgaactcttttaaaattgcactttatagaaataacacaaaataaaactgacaaaggtgaaagctttacacagaaaaatttgtaattgactttaaaaattgacaaaagaatcaaatcttcttgtcaaaaattatacctgcaaaatctagcccaggaaaattaggtttggtagaaaatgactacaaaagaaacctcaaaattgctgattggaaaagttggaaagatttaataaggacataaaatgggatcactgaataaagtctaaattatttcagtaaaataaaaatactgaaaattatttaatggcacaggaagaaatttgatcaa

SEQ ID NO: 173142 - DNA, 615 bp, Homo sapiens
atgattttatgctgggatcatagagaaccctggattttatgcaaatgagtgggaaaaaaattaacccaacacaaaaaagtaggtttatactgatcatacaggacaacacctttcaagattgtaaaaagttaaaacttttctctcttcacatcacctgtaatgatgacaccccataaagatttttctgtrtgtatccttagttttgcacaatcccctggccccagtgctgcatccccatatcccacttgagaagaatatgccaatagttaaggccacacaatagggtcagcacatcaagcttcaggacttacagcctccataaaagagaaaattctcctttcttatgtcactctctcaaagccagggttcctgaagaaaggatttctggcgtcattacacaaaggagatcctggaaattaaggtttgccatgggttatgtccagtactggaataaacacagaattattgaggtaccttcctctgtcttctttgcaaactcctcgttgcagctccttccttgcaaacccctctgtcttccttgcaaacccctcattgtagctcagaactctgctttggcattgcctcctggtaaagcccctgctgcgtccacccttc

SEQ ID NO: 173143 - DNA, 615 bp, Homo sapiens
atgattttatgctgggatcatagagaaccctggattttatgcaaatgagtgggaaaaaaattaacccaacacaaaaaagtaggtttatactgatcatacaggacaacacctttcaagattgtaaaaagttaaaacttttctctcttcacatcacctgtaatgatgacaccccataaagatttttctgtatgtatccttagttttgcacaatcccctggccccagtgctgcatccccatatcccacttgagaagaatatgccaatagttaaggccacacaatagggtcagcacatcaagcttcaggacttacagcctccataaaagagaaaattctcctttcttatgtcactctctcaaagccagggttcctgaagaaaggatttctggygtcattacacaaaggagatcctggaaattaaggtttgccatgggttatgtccagtactggaataaacacagaattattgaggtaccttcctctgtcttctttgcaaactcctcgttgcagctccttccttgcaaacccctctgtcttccttgcaaacccctcattgtagctcagaactctgctttggcattgcctcctggtaaagcccctgctgcgtccacccttc

SEQ ID NO: 173144 - DNA, 252 bp, Homo sapiens
cccagagcccattggtaaacctaagattgtaaaaatgtaaaacttttctctcctcaacgtcatctgtaataatgaaacccccaaaatatttactctatgtatcctgtagttttgcacaaytttgtggttacctttggccaagttacagattcttgatcagttcgatcatggttacttaccagggtcacatgacagaaagtcaacaacttatggaaaaagaacagtctttgctgctttgctcagaaggtaata

SEQ ID NO: 173145 - DNA, 440 bp, Homo sapiens
cccagagcccattggtaaacctaagattgtaaaaatgtaaaacttttctctcctcaacgtcatctgtaataatgaaacccccaaaatatttactctatgtatcctgtagttttgcacaactttgtggttacctttggccaagttacagattcttgatcagttcgatcatggttacttaccagggtcacatgacagaaagtcaacaacttatggaaaaagaacastctttgctgctttgctcagaaggtaatatgtacaaacttgcattattgcatatatcacaatacagcttgtttctgcatagcccagtcccctacaagactagaaccgtgaggccagtggtatttcctatatttgcatgttcagcatgtaacatactgcctggtacatggtagattctcaataaagctctgttgaagttaattgaaatgaaagtaaaa

SEQ ID NO: 173146 - DNA, 416 bp, Homo sapiens
cattggtaaacctaagattgtaaaaatgtaaaacttttctctcctcaacgtcatctgtaataatgaaacccccaaaatatttactctatgtatcctgtagttttgcacaactttgtggttacctttggccaagttacagattcttgatcagttcgatcatggttacttaccagggtcacatgacagaaagtcaacaacttatggaaaaagaacagtctttgctgctttgctcagaaggtaatatgtacaaacttgcattattgcatatatcacaatacagcttgtttctgcatagcccagtcccctacaagactakaaccgtgaggccagtggtatttcctatatttgcatgttcagcatgtaacatactgcctggtacatggtagattctcaataaagctctgttgaagttaatt

SEQ ID NO: 173147 - DNA, 556 bp, Homo sapiens
atgtcatcagcagttccaccctggcctcatcccggctgggcgtccgacaagcctgcgaggaaaagaaccccagagggcatgagcagaggaggacacagctgacagcccttcccggaaggtgccctgcacataccagcagatgcctgtaactatttctgcagtatgacgacctcactgctggcatcatcaactctaggaggggtggaaagaacctgggaggaagtcagaaatcctggaatccagtcccagccctgccaggaggcaggtctctccccttctatggttttcctttttttttttttttttagacggagtctcactctgtcacccaagctggagtgcagtggtgcgatcttggctcactgtaacttccacctaccaggttcaagtgattctcctgcctcagcctccctagtagctgggattacaggcgtgtagcaccatgccwggcttgtttttgtatttttagtagaaacggggttttgcggtgttagccagtctggtctgaaacttctgatctcaggtgatccacccgcttcagcctcccaaagtgctg

SEQ ID NO: 173148 - DNA, 497 bp, Homo sapiens
gtgcgatcgcggctcaccgcagcctcgacttctctgggctcaagtaatcctcctacttcagcctcccaagtagctgggaccacaggcacgtgccacaagctaatttcatttttgtattttttaatagagatggggttttgccccgtcaccccaccgctgcccctacaagtgctggctcccccaagctgcaagaaaggtgatcacatagatcgctcaattatgtcttcccaagtgactgtgtaacctctttacacaacttctacattaaagctcctcctgtttttgtktgttcaacgtacagacacacagacaaacacttgtcttacaaaaatggatttgtactaaatatacaactttgctgtgccttctttttctttttttaagagatgagggtctcgctctgtcgtccagggtggagtgcaatggtgcaatcatagctcactgcagccttgaactcctgagctcaagtcatcctcccacttcagcttctccagtag

SEQ ID NO: 173149 - DNA, 435 bp, Homo sapiens
tgaggctaggaattcaagatcagcttggataactcagttagaccccatcactacaaaattagttaaataaaagacaaaaggaaattacttttggcctggtgcactggctcattcctgtaatcctaacactttgggaggcggaggcaggaagattgcttaagcccaggagtctgggaccaggctgggcaacaaaatgagastgtcactgcaaaaaaaattaaaaattagctgggtatagtggtgcacacctgtagtcccagctacttgggaggatctttttttttttttttttttttgagatggagtctccctctcttgcccaggctggagtgcagtggcatgatctcggctcactgcaacctctgcctcctgggttcaaacaattctcctgccttggctgcccaagtagctgggattacaggcacccaccacctc

SEQ ID NO: 173150 - DNA, 495 bp, Homo sapiens
catttgttcaatttactgctgctacaaatgagagatgcattatttttctttttcaggggttatggtcaacmcaattttctccctacgtacagcattccattacatatattttgctcctaacttattttatattccagaggtgaaagcatataagaacaaatcagtaaaaactgtggtgatactttggcaccagaaataaagttcttttttaacattaagaactatggctaaaccaggacaaaggtgactcaaaatttccttaacttaagctgggtatggtagcacctgcctgtattctcagctactcaggaggctgaggcaagaagagaggatggcttgaagccaggagttctaggccagagtgcactgtgatcacacctgtgaagagccactgcactcctaggcaacaaagcaagaccctgtctttaaaaaaaaaaaaaaaagttaaaaaaatttcctttacttaaaggtttgtatgactatttagacatacat

SEQ ID NO: 173151 - DNA, 435 bp, Homo sapiens
tgaggctaggaattcaagatcagcttggataactcagttagaccccatcactacaaaattagttaaataaaagacaaaaggaaattacttttggcctggtgcactggctcattcctgtaatcctaacactttgggaggcggaggcaggaagattgcttaagcccaggagtctgggaccaggctgggcaacaaaatgagactgtcactgcaaaaaaaattaaaaattagctgggtatagtggtgcacacctgtagtcscagctacttgggaggatctttttttttttttttttttttgagatggagtctccctctcttgcccaggctggagtgcagtggcatgatctcggctcactgcaacctctgcctcctgggttcaaacaattctcctgccttggctgcccaagtagctgggattacaggcacccaccacctc

SEQ ID NO: 173152 - DNA, 495 bp, Homo sapiens
catttgttcaatttactgctgctacaaatgagagatgcattatttttctttttcaggggttatggtcaacccaattttctccctacgtacagcattccattacatatattttgctcctaacttattttatattccagaggtgaaagcatataagaacaaatcagtaaaaactgtggtgatactttggcaccagaaataaagttcttttttaacattaagaactatggctaaaccaggacaaaggtgactcaaaatttccttaacwtaagctgggtatggtagcacctgcctgtattctcagctactcaggaggctgaggcaagaagagaggatggcttgaagccaggagttctaggccagagtgcactgtgatcacacctgtgaagagccactgcactcctaggcaacaaagcaagaccctgtctttaaaaaaaaaaaaaaaagttaaaaaaatttcctttacttaaaggtttgtatgactatttagacatacat

SEQ ID NO: 173153 - DNA, 495 bp, Homo sapiens
catttgttcaatttactgctgctacaaatgagagatgcattatttttctttttcaggggttatggtcaacccaattttctccctacgtacagcattccattacatatattttgctcctaacttattttatattccagaggtgaaagcatataagaacaaatcagtaaaaactgtggtgatactttggcaccagaaataaagttcttttttaacattaagaactatggctaaaccaggacaaaggtgactcaaaatttccttaacttaagctgggtatggtagcacctgcctgtattctcagctactcaggaggctgaggcaagaagagaggatgkcttgaagccaggagttctaggccagagtgcactgtgatcacacctgtgaagagccactgcactcctaggcaacaaagcaagaccctgtctttaaaaaaaaaaaaaaaagttaaaaaaatttcctttacttaaaggtttgtatgactatttagacatacat

SEQ ID NO: 173154 - DNA, 495 bp, Homo sapiens
catttgttcaatttactgctgctacaaatgagagatgcattatttttctttttcaggggttatggtcaacccaattttctccctacgtacagcattccattacatatattttgctcctaacttattttatattccagaggtgaaagcatataagaacaaatcagtaaaaactgtggtgatactttggcaccagaaataaagttcttttttaacattaagaactatggctaaaccaggacaaaggtgactcaaaatttccttaacttaagctgggtatggtagcacctgcctgtattctcagctactcaggaggctgaggcaagaagagaggatggcttgaagccaggagttctaggccagagtgcactgtgaycacacctgtgaagagccactgcactcctaggcaacaaagcaagaccctgtctttaaaaaaaaaaaaaaaagttaaaaaaatttcctttacttaaaggtttgtatgactatttagacatacat

SEQ ID NO: 173155 - DNA, 396 bp, Homo sapiens
atgagaagggaggatcttttgagccctagaactcgaggctgtagtgaactatgattgcactattgcyctccagcctgggcaactgagtgagaccctgtctcaaaacaaacaaaacaaaacaaaaaacaacaacaaaagaaattattttggccgggcatgctggctcatgcctgtaatcccagcactttgggaggcaaggtaggtggatttcttgagcttagaagttagagaacagctagggcaacacggtgaagccccatctctacaaaaaaatatgaaaaattagctgagtatggtgttgcatgactgtagtcctagctactcaggaagtggaggtggggggatcacttaagcccaagagtaaaggccacagtgagccaagatcgtgccagggca

SEQ ID NO: 173156 - DNA, 400 bp, Homo sapiens
tgatgagaagggaggatcttttgagccctagaactcgaggctgtagtgaactatgattgcactattgccctccagcctgggcaactgagtgagaccctgtctcaaaacaaacaaaacaaaacaaaaaacaacaacaaaagaaattattttggccgggcatgctggctcmtgcctgtaatcccagcactttgggaggcaaggtaggtggatttcttgagcttagaagttagagaacagctagggcaacacggtgaagccccatctctacaaaaaaatatgaaaaattagctgagtatggtgttgcatgactgtagtcctagctactcaggaagtggaggtggggggatcacttaagcccaagagtaaaggccacagtgagccaagatcgtgccagggcaat

SEQ ID NO: 173157 - DNA, 400 bp, Homo sapiens
tgatgagaagggaggatcttttgagccctagaactcgaggctgtagtgaactatgattgcactattgccctccagcctgggcaactgagtgagaccctgtctcaaaacaaacaaaacaaaacaaaaaacaacaacaaaagaaattattttggccgggcatgctggctcatgcctgtaatcccagcactttgggaggcaaggtaggyggatttcttgagcttagaagttagagaacagctagggcaacacggtgaagccccatctctacaaaaaaatatgaaaaattagctgagtatggtgttgcatgactgtagtcctagctactcaggaagtggaggtggggggatcacttaagcccaagagtaaaggccacagtgagccaagatcgtgccagggcaat

SEQ ID NO: 173158 - DNA, 400 bp, Homo sapiens
tgatgagaagggaggatcttttgagccctagaactcgaggctgtagtgaactatgattgcactattgccctccagcctgggcaactgagtgagaccctgtctcaaaacaaacaaaacaaaacaaaaaacaacaacaaaagaaattattttggccgggcatgctggctcatgcctgtaatcccagcactttgggaggcaaggtaggtggattkcttgagcttagaagttagagaacagctagggcaacacggtgaagccccatctctacaaaaaaatatgaaaaattagctgagtatggtgttgcatgactgtagtcctagctactcaggaagtggaggtggggggatcacttaagcccaagagtaaaggccacagtgagccaagatcgtgccagggcaat

SEQ ID NO: 173159 - DNA, 400 bp, Homo sapiens
tgatgagaagggaggatcttttgagccctagaactcgaggctgtagtgaactatgattgcactattgccctccagcctgggcaactgagtgagaccctgtctcaaaacaaacaaaacaaaacaaaaaacaacaacaaaagaaattattttggccgggcatgctggctcatgcctgtaatcccagcactttgggaggcaaggtaggtggatttcttgagcttagaagttagagaacagctagggcaacacggtgaagccccatctctacaaaaaaatatgaaaaattagctgagtatggtgttgcatgmctgtagtcctagctactcaggaagtggaggtggggggatcacttaagcccaagagtaaaggccacagtgagccaagatcgtgccagggcaat

SEQ ID NO: 173160 - DNA, 267 bp, Homo sapiens
ctcatgcctgtaatcccagcactttgggaggcaaggtaggtggatttcttgagcttagaagttagagaacagctagggcaacacggtgaagccccatctctacaaaaaaatatgaaaaattagctgagtatggtgttgcatgactgtagtcctagctactcaggaagyggaggtggggggatcacttaagcccaagagtaaaggccacagtgagccaagatcgtgccagggcaatgagagcgagaccctgtctcaaaacaaaaagca

SEQ ID NO: 173161 - DNA, 520 bp, Homo sapiens
aatcttactgcaaagatcatgttccagacaagcagcattaacgtcacccaagaacttattacagatgaagaatctcaggcctgctgaatcagaacrtgcagcttcgaggagccacacccccgccccggctgatttattcggggaagagaagttcttttctattttgactgaacatgacattaaatgtgttttgcaaaattacctgtcccagattgttgtccatcctttatttctgtggctatattcgaaacagaatctttctcgtcactggtagcctgaatggggtttgaagcaaagtaatcgatacatgaagtaggtttcatagactatacagttaatagttcaacatataaatgagactttaattaccttctcagctggttgtttctgagaagacactgaaaagcaaaagggataatcactcatatgtacatatgataaatttatccatacattcatgcagtgttagcatcaagctggtatcttcttgcctgtactagtgtaggctttgatgttttct

SEQ ID NO: 173162 - DNA, 520 bp, Homo sapiens
aatcttactgcaaagatcatgttccagacaagcagcattaacgtcacccaagaacttattacagatgaagaatctcaggcctgctgaatcagaacgtgcagcttcgaggagccacacccccgccccggctgatttattcggggaagagaagttcttttctattttgactgaacatgacattaaatgtgttttgcaaaattacctgtcccagattgttgtccatcctttatttctgtggctatattcgaaacagaatctttctcgtcactggtagcctgaatggggtttgaarcaaagtaatcgatacatgaagtaggtttcatagactatacagttaatagttcaacatataaatgagactttaattaccttctcagctggttgtttctgagaagacactgaaaagcaaaagggataatcactcatatgtacatatgataaatttatccatacattcatgcagtgttagcatcaagctggtatcttcttgcctgtactagtgtaggctttgatgttttct

SEQ ID NO: 173163 - DNA, 320 bp, Homo sapiens
gggattacagccgtgagccaccgtgcttggcttaatcaacttttacatrtcaaaatatttgccatgattatggacagttacacttttagtactcaagaaataaatttctcgtttgtttttttctagtcagtttgatatgcaatagcatagcagcctctgaggtacttttatacaatggctatttcatcaaaaacagcactgtttttaaagaaaactgccaatgttttgatatccaagtgcatcccagttcactaacaaacatgaatgaagcacatatcattgatgtgtaacccctatagagagaagaaatgagttcctgt

SEQ ID NO: 173164 - DNA, 320 bp, Homo sapiens
gggattacagccgtgagccaccgtgcttggcttaatcaacttttacatgtcaaaatatttgccatgattatkgacagttacacttttagtactcaagaaataaatttctcgtttgtttttttctagtcagtttgatatgcaatagcatagcagcctctgaggtacttttatacaatggctatttcatcaaaaacagcactgtttttaaagaaaactgccaatgttttgatatccaagtgcatcccagttcactaacaaacatgaatgaagcacatatcattgatgtgtaacccctatagagagaagaaatgagttcctgt

SEQ ID NO: 173165 - DNA, 320 bp, Homo sapiens
gggattacagccgtgagccaccgtgcttggcttaatcaacttttacatgtcaaaatatttgccatgattatggacagttacacttttagtactmaagaaataaatttctcgtttgtttttttctagtcagtttgatatgcaatagcatagcagcctctgaggtacttttatacaatggctatttcatcaaaaacagcactgtttttaaagaaaactgccaatgttttgatatccaagtgcatcccagttcactaacaaacatgaatgaagcacatatcattgatgtgtaacccctatagagagaagaaatgagttcctgt

SEQ ID NO: 173166 - DNA, 320 bp, Homo sapiens
gggattacagccgtgagccaccgtgcttggcttaatcaacttttacatgtcaaaatatttgccatgattatggacagttacacttttagtactcaagaaataaatttctcgtttgtttttttctagtcagtttgatatgcwatagcatagcagcctctgaggtacttttatacaatggctatttcatcaaaaacagcactgtttttaaagaaaactgccaatgttttgatatccaagtgcatcccagttcactaacaaacatgaatgaagcacatatcattgatgtgtaacccctatagagagaagaaatgagttcctgt

SEQ ID NO: 173167 - DNA, 386 bp, Homo sapiens
agtttttattaattcagcaaaagaatactcagtcattacttatgtagagttcatttaccaagcattttctgatcattaaatgtgccatgaactgtcgaaacaaaaataaataaggtatcactaagtagttccataactacttccaacaaagaatgacctatcacagacaaagcctttaagacttcccaattccatgaaatagtttcaacttgacctttagcatttagattgcattaaatagcataaagaaatatatatttagttgagaacttctcagataatttctaattaaattttaaaagtagatggcaaaaaamcagcacttaaaaaaataaaattgcctgagatgctgtaaaccttcaatctaatcattttagaaaacatgt

SEQ ID NO: 173168 - DNA, 580 bp, Homo sapiens
tcaacacataccatggcttctggtgttcaataattgcactggcaaaggcttttatctatagctgtcattaaggaccatcaaaagtagtttgctttctgttagttagtaacacaccttgactgtctagcctcaggactatgccagtcaggctcttttgcagagccttcactgtgtctttatttcacagaaaatcatgctggccagttacatggatgatgtcattgatatggtttggctgtgtctccayccaaatctcatcttgaatttccacatgttgtggaagggacccggtggaaggtaattgaaccatgggggcaggtctttcccatggtgttctcatgatagtaaataagtcttacgagatctgatggttttatacgagggagtttccctgcacaagttctctctctttgcctgctgccatccatgtaagacatgacttgctcctccttgccttccaccatgattgtgaggcctccccagccatctggaactgtaagtccattaaacctctttgttttgtaaattgcccactcttgggtatgcctttatgatgttaattggacctagtaagaaggaa

SEQ ID NO: 173169 - DNA, 495 bp, Homo sapiens
ttcaataattgcactggcaaaggcttttatctatagctgtcattaaggaccatcaaaagtagtttgctttctgttagttagtaacacaccttgactgtctagcctcaggactatgccagtcaggctcttttgcagagccttcactgtgtctttatttcacagaaaatcatgctggccagttacatggatgatgtcattgatatggtttggctgtgtctccatccaaatctcatcttgaatttccacatgttgtggaagggacccggtggaaggtaattgaaccatgggggcaggtctttcccatggtgttctcatgatagtaaataagtcttacgagatctgatggttttatacgagggagtttccctgcacaagttctctctctttgcctgcwgccatccatgtaagacatgacttgctcctccttgccttccaccatgattgtgaggcctccccagccatctggaactgtaagtccattaaacctctttgttt

SEQ ID NO: 173170 - DNA, 463 bp, Homo sapiens
caatcagacaacagaaagataaaaagggcatccaaattggaaagaaagaagtcaaattattcttgttagcaggtaatataatgttgtatttggaaaaacctaaagacctcataagaaaactattagaaccgataaattcagtaaagttgcaaaagacaaaagcaacatacaaaaatcaggagcatgtctacgtgacaacagtgaataatctgaaaaagaaattttaaaagtaatggcatttacaatagccacacataagattaaatacctaggaattaacttaaagaagtaaaagatttctataataacaactataaaacactgatgaaagaaattgaagacgacaccaaaaaatggaaaaatattccatgtycacaaactggaagaatcaatattgttaaaatgcccatactacccaaagcaatctacagattcaatgcaatccctatcaaaataccaatga

SEQ ID NO: 173171 - DNA, 560 bp, Homo sapiens
taataataatcaatatatactaagtatttactatgggacagtcactatactgatttacaaaggttttcactatttcttaaaagaaattctaagtatgtaaacaaataagaaaattaatgttaactttattttgctttcaagaaaatctgtatttgtgggatgaagttagacctttaaaatgaacagaattactgagggctctagaaccaggctctccaggatcaaaccccagtaccacttcttaccagctgtgttgctctggaaccagtgcttagcctctctgtaaaatgaggatgataacgtgggaaatatgtgcttttttaatgttcaattataactgcaacatacaaaacaaatgaaaattcctttgacttgtattaaagataaatgatcctaataaaggaaagataaatgtagccyacttcataggattgctaggaaggttaatgtaaagcactgaaaaccgtgcttgacatgtagtaagcacccaataggtgtgtcagctgttggcatgaacgtctggatgcaaagacacatggggaacaacaggagaagggagt

SEQ ID NO: 173172 - DNA, 393 bp, Homo sapiens
ctcagtatagcagctcaatcatgtaaacacattataaacatgttaaaaagtaattactctggaggaagttaactatgttaaaatacaaattaagataaaattaagaatgtttctgctttcagagtcaagtacacagaatattttttaaaatgatgtttgcctttctgtakccagtcatcccaaggccttcatgccacatttactggtatttgtgcagtgtcacctgtgtgtcagactctgtgctaggtgttggctgaactaacttcttacaaatctgagaaatgtgttgagcatgtgggtacccatgactgctgtatttcagtgtggagcagttagccagagaaaagtcagtgtttctacccaagagaaggaattaatcacagttggatgcat

SEQ ID NO: 173173 - DNA, 612 bp, Homo sapiens
cctaatgacgtctgactacagccttgtgaggctcgagtagaggacccagctaaaccatgcccaaactctgatctacggaaactgagagaggaaatagatattgttttaagccataaagtttgtggtacagagtgagtatccctaatctaaaaatctgaaatctaaatgctcygaaatctgaaacttaatgagtactgaaataccactcaaaggatatgctcaatggagcattttcaatttcagatattcaaattagggatgatcaacaaataagcataatgcaaatattccaaaatctgaaacaaatctgaaatccaaagcacttctcaatccaagcattttgaatgagagatagtcaacctgtaaagtgtcacataacaataaataactaatgtatactttaaaatcttctgcaactctcatctgaaattgtttttctacctaggattcccctttcctagtgagatatttatcctttcacataaagacagcacagcaggacttccttcattaagcctttgtaaagaggccactgctgtgatatcactgagcacctctgtgcccagcactgttccagacaaccagtgaagttatcaccattttacagatggg

SEQ ID NO: 173174 - DNA, 612 bp, Homo sapiens
cctaatgacgtctgactacagccttgtgaggctcgagtagaggacccagctaaaccatgcccaaactctgatctacggaaactgagagaggaaatagatattgttttaagccataaagtttgtggtacagagtgagtatccctaatctaaaaatctgaaatctaaatgctccgaaatctgaaacttaatgagtactgaaataccactcaaaggatatgctcaatggagcattttcaatttcagatattcaaattagggatgatcaacaaataagcataatgcaaatattccaaaatctgaaacaaatctgaaatccaaagcacttctcaatccaagcattttgaatgagagatagtcaacctgtaaagtgtcacataacaataaataactaatgtatactttaaaatcttcygcaactctcatctgaaattgtttttctacctaggattcccctttcctagtgagatatttatcctttcacataaagacagcacagcaggacttccttcattaagcctttgtaaagaggccactgctgtgatatcactgagcacctctgtgcccagcactgttccagacaaccagtgaagttatcaccattttacagatggg

SEQ ID NO: 173175 - DNA, 402 bp, Homo sapiens
ttgcaaatatattctcccagcatgaggcctgccttttcatcctcataaccgtctttcacagagcatatgtgttaaaatttttatgaatttcaatttatcaccttttctttttatggattgtgctggtgggggctctaagatagggccaaggttttgttttttkctgaggtgtttggctgcagcacagcagttattgtctaaaagttttctgtcttcctagtccttagctaggtttttctccacacgtcttaggtctgtgctcattggcatttccatgttgccattgtctttagtacccaatctgggacatataaggcaaaaagaaaactgagggaactcacccccatgtcactccttgggtcttgagctccctagtctctaccttcttctctctaccactca

SEQ ID NO: 173176 - DNA, 608 bp, Homo sapiens
gacacagccctcaggagatcctgagaacacgtgctcaagttggtaggggtgcagcttggctttatacattttagggagacatgagatatcaatcaaatacatttaagatatacattggttcagtccagaaaggcagcacaactccaaacttccaggttataggtagatttaaaacttttctgattggcaattggttgagttattatccatagaraggaattgtctaggttatgataagaggttgtggagatcaaacttttatcatgcagatgaagcctccagatagcaggtttcagagagaataaattgtaaatatttcttatcagacttaaggtctgccttgatgttaatgctggagggtataaaaaggcacgtcagaccctcacttcccgtcaaggcctgaaccagtctttcaggttaaattttagagcacaccagcagatgaggaagtccattcagatggctgggggtggcttagaatgttgtttttggttttcaattcacaatgcagaactctttcattgaagaagtggttacacgaaaggggccccgatccggaccccaagagagggttcttggatctcatgcaagaaagaattcagggtgag

SEQ ID NO: 173177 - DNA, 406 bp, Homo sapiens
atctacctatgtatcattatccacgtctatcaatttttttatcatctatctcacacctgaataatatgctggttgtagaagaggctgggcagatgtaaggaatacatttctctggtttttaaactgcatgtgggttgattccattttaaaaacctagactatggaataactttggagaggacattctctctatttttttwaaaaaagttgcaatagaagaagcactcttaaaaagtatatgaacccacaaaagacttcaaatagccaaagcaattttgagaaagacaaaaaagctggagaatcacacttcctgatttcaaatatattatagagctacagtaatcaaagctgtatgatactggcatatggatcaatgcaacagaataaacagcccagaaattaacct

SEQ ID NO: 173178 - DNA, 406 bp, Homo sapiens
atctacctatgtatcattatccacgtctatcaatttttttatcatctatctcacacctgaataatatgctggttgtagaagaggctgggcagatgtaaggaatacatttctctggtttttaaactgcatgtgggttgattccattttaaaaacctagactatggaataactttggagaggacattctctctatttttttawaaaaagttgcaatagaagaagcactcttaaaaagtatatgaacccacaaaagacttcaaatagccaaagcaattttgagaaagacaaaaaagctggagaatcacacttcctgatttcaaatatattatagagctacagtaatcaaagctgtatgatactggcatatggatcaatgcaacagaataaacagcccagaaattaacct

SEQ ID NO: 173179 - DNA, 432 bp, Homo sapiens
ataacattggggttctttttatactcaagatgtttaactgttcaaaatgacaacaattacatcttttaagagtataataaaatgggtggaaaacagcaacacaactgacaaaagtgtagatgctaaataaaccaaagtttttttyttaaggagtaggaagaatccacagcttggggaaatctcagaattaaaaaaaaaaaaaaaaaaaagaggaaaaaaaatgtccttaattgcaaccattccgttatcaatagcgtcctaaaagagaaaaagcaaaaaaaaaaaaaaaaaaaaaaagttaacaattatagtttaatttgcctcatatttttccaactattaactgccaccttccaccttatactctaatattctaaagtaagccattaattagaaatgaggttttttatgctacaaaagtaaagttcacat

SEQ ID NO: 173180 - DNA, 294 bp, Homo sapiens
tcatgcttcattgtaagtttggctgggtgtagaaataattttccttgagatggaaataattttccttgagattttaaaggctctgctctgttctgttttactcctcatccccctaggttccagtgttctttttgagaagctgatgctcttctttatcctttttatgtgacttaatttttggaatcttgtaaggtctgtgtcccacaccattctaaaatttctcagtgatgtgactgggtatgggtctctttygtacatgtgttgggccctcagtgggacatcctgcaatttatg

SEQ ID NO: 173181 - DNA, 585 bp, Homo sapiens
cttctgaaggaaagacatacatagagattccatagtactggaaattgaacaatacacaaccaaaaataaaatgcacaagagtgattaacaaaaaatgcaaattgttaacaaataccaggaaaaagatacaccttattacgtcagagctattcaaatgaaaataataatgagagacaactattcccataggataaagaagaatgtattaaaacaatggcaatatagtgttagggaaatgaagttagcgaaagcagtaagagtggaggtgcttctcctgaagctgagaatctggaatctgggaagcaaaaccagaggcaggtattaaattattaaatgctcacatctataatcccggtgtatccggagttggttccktccagtgggttcatggtcttgctaacttcgagaatggagctgtggaccttcacggtgtgttacagctcttaaagatggcatggacccaaagagtgagtagcagcaagaaatgttgtgaagagcaaaagaacaaagcttccatagcatgcaaggagaccagagtgggttgccgctgctggctgaggggtggccagcttttattctgttatt

SEQ ID NO: 173182 - DNA, 573 bp, Homo sapiens
atgccttgtccttcaagctcgccctgctcaaatgccacctcttctgtggagtcttccctgactttgccaggaaagttaggacaaaaccttgtgccgagcctgaggtcagatgaggaaagacaaacatttgtcttcagaaggctcatcatctagcagggaagatcagcattacagaaaaaacaaaaacaaaacaaaaaacagaaaagaaatcctcactttataccagcaaatgagggccaagttcccaatgagagatacaagaagcaggagtgaggtgttcgtgtgggctgggaagtcaagaaaggaggtggggtttcctggaggagtggagctgggcggggtactgggatagggtaggaagagtatttcaggtagggaggagcatacagggaaggcatgtgagaaggwgggggccatgctggaaagctctggatgtgtggctgagcccggcactctatctaacaggcaacgggatatttgtatgagtgcaaacggctcagccctgcatccagtaggcaagagggaaactggcaggaaagtaaagttgagtgggaaaactatggctcaggaatt

SEQ ID NO: 173183 - DNA, 535 bp, Homo sapiens
tatttgtattttaccctcatgacagatcccaggaagtagagaagatgctaacactgtgttacatgctgaaaagtacgtagctcagcaactttctacatcacacagtgtgtcaattgttgagcttttataaaattccagactatctgattctgcagtttattctcattttctctcactttagaaagaaagggagcagccattcataggagtgtgaattagttcaaccattgtggaagacagtgtggcgattcctcaaggatctagaaccagaaataccatttgacccagcaatcccattattgggtatatgcccaaaggaatatagatctttttaaaactcttaactccacttgtggcgtaagtttccaacattggtcaatttgtattctttattattattattattattattattatttatttwttttttttttaaataagtctcgctctgttgcccaggctggagtgcaatggcatcatctcgggtaactgcaacctccgcctcctgggctcacatgattctcccacctcttgg

SEQ ID NO: 173184 - DNA, 478 bp, Homo sapiens
gcctcagggctgggaggaggctggggcccaagcaatgcggtctgcgctttgtttcccttgccgtgcactgccaagacctgcagtwcacgcccccagtcatcgttttgacaaccccaatatctcccacacttccctctgtctccagagcctttttctgaggctatttattactaagtacagaacagtctataaataattttcatgtcaaaagaaaagtacctgtgctagagagttacaatgattccaattaattttatgaccatttttatcattggagtttggaaacttggagtggaaatccagcaatattgccaacttttgcctggtatgagtggagtggcatttttatttcaccctgtatgccagccccttgccactgtcttcgtttcttcagttttcttgaagcagtcattttgaagagataaacaatgtatgtaaaaaattacatggaacctgcaaacacacttgagactaaaat

SEQ ID NO: 173185 - DNA, 481 bp, Homo sapiens
gaggaggctggggcccaagcaatgcggtctgcgctttgtttcccttgccgtgcactgccaagacctgcagtacacgcccccagtcatcgttttgacaaccccaatatctcccacacttccctctgtctccagagcctttttctgaggctatttattactaagtacagaacagtctataaataattttcatgtcaaaagaaaagtacctgtgctagagagttacaatgattccaattaattttatgaccatttttatcattggagtttggaaacttggagtggaaatccagcaatattgccaacttttgcctggtatgagtggagtggcayttttatttcaccctgtatgccagccccttgccactgtcttcgtttcttcagttttcttgaagcagtcattttgaagagataaacaatgtatgtaaaaaattacatggaacctgcaaacacacttgagactaaaatgcggagctgcttctag

SEQ ID NO: 173186 - DNA, 610 bp, Homo sapiens
gtacttttccataaagttgcaaggagagtaaacagcagtaacccaccactgctgatctctgctgataggaaagcccctggcttgcctcccggagtcaggcatttgaccctgctcagcaaagaacaagagccccaagttctggccaattctgcaccctcaaccacttccactttttcataaggagaagtttgtgaggtttccctctcctcatacattaaaytaaagagacagctgtaagcactataagatcttcatgttccttcatcgataagtaaggctgattattccattaaaacagactcctgttttgggaaagatgattcattttcttaaatttgcatctatttcctgaagtcctttggccccttaaagaagggtcaagctataataagatggaacaataaaacattcaatcagagagacacaaagagtattacatttaaaaaaaggattatatgctcttatcctgactgaagcatgcttcatagttgtgctttagaataacatctagattctactgaaaccttctaccttgagtgtgcattcacaaaagtaaagccgacattcaccaacagggttttctgccacatacttcattgtactaactgga

SEQ ID NO: 173187 - DNA, 439 bp, Homo sapiens
tggaaacctgctggtttcaagaagtctgctttcattaaattcttgtggctgcgcttctaaaaccctgacaccaagtgctagccatcacaagaaaacctgaagwcttgaagattcacttacctccccaaaaagaaggattctaggctaacatttggccccagaaaaaatccaaagaagtggtggctggctcaatcttttcttatttaactcaaactggctaacaaacactgaacaccaaaggcttttcatccagcttgtcccaggtaataggttgagagatgagatttaaagccctgtttttaagatggcataatcaacttggaggaagatattgaagaaatggttgtagagatgaaaagaagattgaggggaagtgacataaagtaggcaagctataaatagttgaatgaatagttgcatgaataaatggtaggctaag

SEQ ID NO: 173188 - DNA, 559 bp, Homo sapiens
gagtcttgggaataggaaatttaactacacttactatcactcccagtgaccttctcaggggatctgtgcttcctattcctacaactttgggctctacaatgttagaggcctgggtcactaaaggcagaccaccttttccaggagacacaacaagaacactattgagctacagcctatgcctgctgcaggggcactttgggatccttctgtctgtggtgcagaagattaaaaaagaggaatcaccayatcggtaagaataattgaacctgattatcagaaggaggaagggctgctttcacaatggaggcggggagaaatatgttttgaacccaggtgatctgcttggatgtctcttggtacttatttccttgagcaaatgtaactacaaatgaacaggtacagtactcctggcctgagaagaggatgttgacaagggacttggatcactgatggataaggatttagctatgacaagtagaagtggttgccaaggctaaaggtgatttagaacaaatagtaaagagatgatgagtatcagttatgttcccaagaccatctc

SEQ ID NO: 173189 - DNA, 588 bp, Homo sapiens
acccaattgaagggaaaaaaaatggtaaacagaggagcacttcgatttttttttactcatctactttccaaagtttagggattctggartaagaggaatctccctgaccacccgccaagcatttttaggttgcagttaggaatggtaactattatatgcatgtcacattaatagatatagggacaagaagaaagatgctggcatggtagactcagatttaaaaggctttggtgccaagagagtaattatatactcatctactctttcattcctgaatatagagcctggaacctgaggaagagaacaaaaatggaaagctttaaatagactgtgcctaatttttacgtctcaaattgattcattaatcactggattgaactaaatttaacttaaagcaattaagttatctgccattaagcagactgggtgggtcagaaattagaagccagttctaaaaataaagaatagcccattttccaaatctgaattagtgattgacaagtttacctccttgagacaactgtaggaacagcttttgaatagaaagtaagaaacaggatgatatctgtaaagtaggtttgagctagg

SEQ ID NO: 173190 - DNA, 493 bp, Homo sapiens
gaattctacatagtccagctgtgataaatccttgaatcttctcagacttttaaaaatgactgaatgtcactttgatataacttattccattctgccttaaagctttgattttgctggaaatccttttctatatcctgagtaaagagttatctgttgatgctactgacccaccagtaatggtaatgaactgttcattgatgtactgctaagatgtgagctcattcattcacakctttttgccctgttgcccgaatatcatacagtgctgattctacaataaaattgaaagcatcctcttgctggaatctttccataccttgaggcctgaataaaacccaaaggtcttagcagagagtactaggctttctgcgagctggctcagtttatctgctgacattcatgtcctgcctttcttcctcgctcaggtaacagatatgtagggccatcacttccaagtatacatggcacctcaccaccctatgccttttcaaat

SEQ ID NO: 173191 - DNA, 555 bp, Homo sapiens
tttctgccaatatcgtgcagttttgattactgtagctataagaaacgtcttaaaatcaggtagactaatycatcccactttcttcttaatcattttttttaaactattccagctcttttggttttttgcataagttttaaaataatcttgtttatacctataaaaagtcttgcagggaatttgaggggaactatgttaaatctgtaaaccaagtcaggaaaagtcaacatttttattatgttgggtctttcaatccagcagcattgtatgtttgcctactttataggtcttctgtaatttttttcatcagtactttccagttttcagtgtaaatgtcctgtgcatgttttctccaaatacacactaaagtatttcattttttgaacaattgtaaatgttacttttttaacattttggtgtccatgtgttaatttctagtatatagaattacatttgattctgtatattgatctatagtgcaaccttgctttattcactaactagttcttgagttttttttaatacactctttgagatttttttatatagatgata

SEQ ID NO: 173192 - DNA, 555 bp, Homo sapiens
tttctgccaatatcgtgcagttttgattactgtagctataagaaacgtcttaaaatcaggtagactaattcatcccactttcttcttaatcattttttttaaactattccagctcttttggttttttgcataagttttaaaataatcttgtttatacctataaaaagtcttgcagggaatttgaggggaactatgttaaatctgtaaaccaagtcaggaaaagtcaacatttttattatgttgggtctttcaatccagcagcattgtatgtttgcctactttataggtcttctgtaatttttttcatcagtactttccagttttcagtgtaaatgtcctgtgcatgttttctccaaatacacactaaagtatttcattttttgaacaattgtaaatgttacttttttaacattttggtgtccatgtgttaattkctagtatatagaattacatttgattctgtatattgatctatagtgcaaccttgctttattcactaactagttcttgagttttttttaatacactctttgagatttttttatatagatgata

SEQ ID NO: 173193 - DNA, 451 bp, Homo sapiens
tgccaccttcaaaatatatcccaaagtcttctacatttctccaaatccagtgccacctgaatccaaaccactttcatctctttcctggactctaatagtgtccaattttgtctcttttctttcattcttgtcctccctaaaacacattctccacacaacagccagagaagacttccaaaaaaatatttatatcagattgaaccacttccctatttaaaatcctttaatagcttttatttgctctcagagtaaagccctaactccttaccaaggcctcagatcctgagccatacatcctgcctacctctctgtctcactttgtaycctccccaccttctcaagatgctgcagccatgttgacctcattctatccataggataaaccaggagttttcccacccctaggccatcgatctcactgttgcctctacctggaaggcttttttttctg

SEQ ID NO: 173194 - DNA, 515 bp, Homo sapiens
ccattttaagggttccagatgactaaaggagtctcctaacaggttagtattctatatctgaaatacatatatgtgacatatgatataggagctgttggcagccaagactgcagtgggactgtttggtgcagttgcaaagatgaggcatttgataagggaggtgaatgttacaaacacaagtaactataataaaaatccatgtggagaaaagggccgctggacattaaaaaaatgatgttcactagaaattaagagaatgagaggtcatagacatttgagataatcaaaaatgcttaatgaaagagatggcatttgagatacatagaaagaagattgaaagtagcatctgatttgatagatgccactgaggggaagagcctctaaaggaacaacttaattcaaaaaagctgaaaggtacagaaaaggcacatrggtaccatagaatatgtgatccacagcagggcccaataggggataagactgaaaatgtaaatgtccctatattttctttggac

SEQ ID NO: 173195 - DNA, 519 bp, Homo sapiens
ctactcagactttcacttggatgttcattgacatgtcaaatatagctaatcaaaaatgaaactattgatttctaacttctcccctccctgccgcacttacctaggcctttcccactcattatttgcaataccattcatttaggtccttaggcttgaaatctcggggtcatttttaatttccctttttttctctcacatataagcgaacccttacagaaagtcctatgagatttgtcctcaagatagagccccagcccaaccactttcaccatcttcattcctcccagtctagtcaaagccacaattatctctcctgtgaagtgctgacctcctcattggtggctcctcattgaagagtctattcctcacactgaaactacgtgatycttcacaattgtaaataagatcacattacttctgtaccaagccttccaatgttttcccatctcatttaaaaaagtacagagtcctcattatggtctacaaacccctcaccacttggccctcttcagcctcatc

SEQ ID NO: 173196 - DNA, 563 bp, Homo sapiens
aagcttgctgcaaggtcagggcccccatggagaacctctgccagggcagtgcagaagggaaatgtggggttggagcccccacacagagtccccactagggcacagcctagtggaggtatgagaagagggctatcatcctccagaccccagaatggtagatccaccaacagcttgcacccatgtgccttggaaagccacagacactcaatgccagcctgtgaaagcagctgggagggggggctataccccacaaagccacaaggaagagtgkcctaaggctgtgggagcccatctcttgcatcagagtgacctgaatgtgagacatggagtcaaaggagatcattttggagctttaagatttgactgctctgctggattttgaacttacatggggcctgtagcccctttgttttggccaatgtctccagtctggaatgggtgtatttacccaatgcatgtaccctcattttatctagaaagtaactaacttgcttttgattttgcaggttcataggcagaaaggacttgctttgtctcagatgaaactttggagttggactctt

SEQ ID NO: 173197 - DNA, 563 bp, Homo sapiens
aagcttgctgcaaggtcagggcccccatggagaacctctgccagggcagtgcagaagggaaatgtggggttggagcccccacacagagtccccactagggcacagcctagtggaggtatgagaagagggctatcatcctccagaccccagaatggtagatccaccaacagcttgcacccatgtgccttggaaagccacagacactcaatgccagcctgtgaaagcagctgggagggggggctataccccacaaagccacaaggaagagtgtcctaaggctgtgggagcccatctcttgcatcagagtgacctgaatgtgagacatggmgtcaaaggagatcattttggagctttaagatttgactgctctgctggattttgaacttacatggggcctgtagcccctttgttttggccaatgtctccagtctggaatgggtgtatttacccaatgcatgtaccctcattttatctagaaagtaactaacttgcttttgattttgcaggttcataggcagaaaggacttgctttgtctcagatgaaactttggagttggactctt

SEQ ID NO: 173198 - DNA, 552 bp, Homo sapiens
gtgaattcagatggagatgggaaatttgttgggaactggagtaaaggtgactcttgctatgctttagcaaagagactggcagctttttgcccctaccctagagatctgtggaactttgaacttgaragagatgatttaggatatctggtggaagaaatttctaagcagcaaagcattcaagatatgacagagcataaaagtttggaaaatttgcagcctgatgatgaagtagaaaataaaaacccattttctgtagagaaattcaagcctgctgcagcaatttgcagaaataataaggaactgaatggtaatcactaatacaatggggaaaatatctccagagcatatcaagaccttcccggcagtccctcccatcacaggcccagaggcctagaaggaaaaaatggtttagtgggccaggtccagggcccccctgctctgtgcagcctcaggatatggggtcctgcattccagctgctttagctccagccatggctaaaaggggtcaaggtaaagcttgtgccattacttcagagggtgcaagccccaagc

SEQ ID NO: 173199 - DNA, 552 bp, Homo sapiens
gtgaattcagatggagatgggaaatttgttgggaactggagtaaaggtgactcttgctatgctttagcaaagagactggcagctttttgcccctaccctagagatctgtggaactttgaacttgagagagatgatttaggatatctggtggaagaaatttctaagcagcaaagcattcaagatatgacagagcataaaagtttggaaaatttgcagcctgatgatgaagtagaaaataaaaacccattttctgtagagaaattcaagcctgctgcagcaatttgcagaartaataaggaactgaatggtaatcactaatacaatggggaaaatatctccagagcatatcaagaccttcccggcagtccctcccatcacaggcccagaggcctagaaggaaaaaatggtttagtgggccaggtccagggcccccctgctctgtgcagcctcaggatatggggtcctgcattccagctgctttagctccagccatggctaaaaggggtcaaggtaaagcttgtgccattacttcagagggtgcaagccccaagc

SEQ ID NO: 173200 - DNA, 487 bp, Homo sapiens
ggtttagtaagtagtgctgggtcccaaggcgaggacatagggaaaccatggctggaacacaggtgtctggaaactcctaatcatagtttcctctgtgtccccttcagtgggaaaagtcacttcatctcctaatcttaaatgatcttccaagcaagaggagaggagggaatataagttttatttgtcccatccttttcagaaggtatctaagtcctttctgtgtgtgtcttccaaagacatggtaccaggacctaggggagctgagatttagagccttggggtgcaaactgaattgtcgggtcccagctaggagtacctgcctggaatttgtaagactstcacaacagtgccacatccctcagtttatccatgcaacagaaggtagaggtggtggcagtggcagcagcagcagtagcagcaaatctgtccccagttcaccacagtactgttttgctatgagtttaccttaagtttatgtgtgtcgtaa

SEQ ID NO: 173201 - DNA, 602 bp, Homo sapiens
agtttccctgcacaagctctcttctcttttctgccgccatgtgagacattgcctttcaccttccaccatgattgtgaggcctccctggccacaaggaactataatttcaataaatgtctttcttttgtaaattgcccagtcttgggtatgtctttatcagcagtaagaaaacagactaatatgycattattttgtggtgcaaatatttaaaatctatcatcatagtaattttaaatatacgttacatattattaactataatcatcatgctgtgaaatagatatttaaaacttattccttttgcctaattgaaactttgaaaccttgactaatatcttcttttcccatcgcccttgccccacaccctgcctccagctcctggcagccaccaggaatctaccctctacttttatgagttcaacgtttttagattccacatataaatgagatcatgtgggccattatatctgatctgaaagaaaaaaaacatctaactgagcctgcacgtatggatgacctgttaacagtttagggacaagaactgaaagtagggaaaatagcctggagtttaatatctaaaatcctaggttggacaatattct

SEQ ID NO: 173202 - DNA, 584 bp, Homo sapiens
atgaaccttttaatagcagttacacctggcattcaataaatatcttctgatgaataagtaaataaataaatttagtgtgttgtwataaactatctgtgaatgaaccttttaatagcagttacacctggcattcaataaatatcttctgatgaataagtaaataaataaatttagtgtgttgttataaactatcttattttctaactgttcatatgtatatgtcacttctaaccaactatacagtaagctccttgagggcataaatcttatttttcattcatttattcagcaaatacttattgaacacataatattccaagcacgatttcttggcactggagacaaagcagatataaacagtcacaaataactgcctttgacagttgtacagccctgtagatgcattaaaatttattgattcatatactggcaatggagaatgttatgatacttaaattatatttccataaagctgttaaaaaaatactactatcatggggtccactttcttggaaatctgttttaaaagaatgtttttgtagctagcacagtgtgggtataaaataaggactcaacaaatatta

SEQ ID NO: 173203 - DNA, 584 bp, Homo sapiens
atgaaccttttaatagcagttacacctggcattcaataaatatcttctgatgaataagtaaataaataaatttagtgtgttgttataaactatctgtgaatgaaccttttaatagcagttacacctggcattcaataaatatcttctgatgaataagtaaataaataaatttagtgtgttgttataaactatcttattttctaactgttcatatgtatatgtcacttctaaccaactatacagtaagctccttgagggcataaatcttatttttcattcatttattcagcaaatacttattgaacacataatattcyaagcacgatttcttggcactggagacaaagcagatataaacagtcacaaataactgcctttgacagttgtacagccctgtagatgcattaaaatttattgattcatatactggcaatggagaatgttatgatacttaaattatatttccataaagctgttaaaaaaatactactatcatggggtccactttcttggaaatctgttttaaaagaatgtttttgtagctagcacagtgtgggtataaaataaggactcaacaaatatta

SEQ ID NO: 173204 - DNA, 584 bp, Homo sapiens
atgaaccttttaatagcagttacacctggcattcaataaatatcttctgatgaataagtaaataaataaatttagtgtgttgttataaactatctgtgaatgaaccttttaatagcagttacacctggcattcaataaatatcttctgatgaataagtaaataaataaatttagtgtgttgttataaactatcttattttctaactgttcatatgtatatgtcacttctaaccaactatacagtaagctccttgagggcataaatcttatttttcattcatttattcagcaaatacttattgaacacataatattccaagcaygatttcttggcactggagacaaagcagatataaacagtcacaaataactgcctttgacagttgtacagccctgtagatgcattaaaatttattgattcatatactggcaatggagaatgttatgatacttaaattatatttccataaagctgttaaaaaaatactactatcatggggtccactttcttggaaatctgttttaaaagaatgtttttgtagctagcacagtgtgggtataaaataaggactcaacaaatatta

SEQ ID NO: 173205 - DNA, 497 bp, Homo sapiens
ttgggaattatattccagcagttcaattacactattacataagcaatgacaaagtatcttaaggactacgagaggagagtacaaggtacctaacccatactcaggcaatcccaaaaaaattacacctaaacacaatccagaagtaagagtcatcagaagaggagacagtggtgggaatatagcagtcagatgccttcagctgtaaggaatagaaaacacaaactggctctaacaagtacatttgttagatgacacaaagtcaatccgaaggcagggtgygcctcagagttgaatgagctgcaggttaagtgacgtcattgaagacgtgggtctttgccttctctgcttcactatctatggcattggtttcttcctatctccgtcttccttcataggtgtaggatggtggccagagcatttactagtacgtgcttctttgttcaaattgaagagagagaaataatagcttcccatcattctctcttaacagcaagaaa

SEQ ID NO: 173206 - DNA, 408 bp, Homo sapiens
ttgttcacagcaaaattactgatacagatgccaagaatgacttctaagaaaatatatatgctgygagtacatgaatgtaaaagtaggttttccttaactcacaaagtctgtaggtttttctacttataatattttacctataggaaaattaattttttctttcaattttagggtaaacatttcattcagttcttttcttggggaggaggcatcagtgggagcatattcctttcaattttgtataggtaatcatcacaggaataatttatgtgctgcataatatacagtttaatcaaaaatatgtattctgtagatactttctttaagacaggtcctatgttacatgtgaatcattagcctaagtggctagttgttatttacttttagctcagaccacaagaaaaaaat

SEQ ID NO: 173207 - DNA, 533 bp, Homo sapiens
ctcatcccattaataactattgcttcataattttcagatttataaaaattgttttttacttcctccactcacctcataaatgggctgtaaaggtaattrtagatgtataaatgagcttgagcactttggtgaaatttcagacaattccttttaacagagttctttaagaatccagacaaaaacatgaaaattcaagttcgttactaatagatgagtggttatttttaaataataatttatttcactcaaactttaaaatactaccaaatttgactatttctttgataatttttcctcatattttgacatatatggtatctagctctcctcacagcattttcagtccaagtccataactggaaaaatgaaacacctaagggaagaatcttatgaaataattggcatcttttacattttgagactctgtatttgactgtatcagggaattacctgcactccatgcttttcctcgcttctgctcgcagcagttctgaagggcttaggctgaagtccatgtccctctgtacaattgc

SEQ ID NO: 173208 - DNA, 533 bp, Homo sapiens
ctcatcccattaataactattgcttcataattttcagatttataaaaattgttttttacttcctccactcacctcataaatgggctgtaaaggtaattgtagatgtmtaaatgagcttgagcactttggtgaaatttcagacaattccttttaacagagttctttaagaatccagacaaaaacatgaaaattcaagttcgttactaatagatgagtggttatttttaaataataatttatttcactcaaactttaaaatactaccaaatttgactatttctttgataatttttcctcatattttgacatatatggtatctagctctcctcacagcattttcagtccaagtccataactggaaaaatgaaacacctaagggaagaatcttatgaaataattggcatcttttacattttgagactctgtatttgactgtatcagggaattacctgcactccatgcttttcctcgcttctgctcgcagcagttctgaagggcttaggctgaagtccatgtccctctgtacaattgc

SEQ ID NO: 173209 - DNA, 533 bp, Homo sapiens
ctcatcccattaataactattgcttcataattttcagatttataaaaattgttttttacttcctccactcacctcataaatgggctgtaaaggtaattgtagatgtataaatgagcttgagcactttggtgaaatttcagacaattccttttaacagagttctttaagaatccagacaaaaacatgaaaattcaagttcrttactaatagatgagtggttatttttaaataataatttatttcactcaaactttaaaatactaccaaatttgactatttctttgataatttttcctcatattttgacatatatggtatctagctctcctcacagcattttcagtccaagtccataactggaaaaatgaaacacctaagggaagaatcttatgaaataattggcatcttttacattttgagactctgtatttgactgtatcagggaattacctgcactccatgcttttcctcgcttctgctcgcagcagttctgaagggcttaggctgaagtccatgtccctctgtacaattgc

SEQ ID NO: 173210 - DNA, 621 bp, Homo sapiens
gtagaaattcctggactctcagggtagagctttcttccacaacctttccagtgattttgtaagtcactcaacacatgataatatctctrtttggaaataaactgttgtcttcagcctaactctgctctagcagacacatcaaagtttatgacctctttgatctccttttattatttaatcccaatttaaaatttttcttgtgtaatattatctggaacttttttattgtattggacttagaaaaataaacacttggatatttccattcactcagccaatttttgtaatcaatatttctccagagtccaatagactcttggtacaacaaataacaccttgacatgaatacatgtatttcattatttcactattccaacctgcttgatgtagaactttgaacctcctccccctgccatccaaatcgaaactttctctagtttctttgtctgtattgtaaatccacagatgtttcctctacctggtcataaacaatttttttgtgtttttctagtatgcagtttttactgatagcctctgtcttccatgctacttgagaataacatctatcatatgactactgctttctacatgagaatactgattcctgacaaggcaggggtt

SEQ ID NO: 173211 - DNA, 495 bp, Homo sapiens
tcatgactcctatgattctatgttgttctttcggcctgaagagtcccagaaggaaagaaaagaatagggagttgtaagattttatatatatatatayacacacacacacacacacacacacacacacacgattttaagatatgacattatatatgattttaaactatatacacacatatacatatatattttgtatatacatatgtatatatgtacatatgtgtatatataaatggatatatgtttagctaattgtttattactggacttgttccacaataggctggaagtattagtgaggatgctaatttgacataaatgcagaggttcagccagagattgtaaccagtaagctgaaagtgattggaaattcagagggacctcttttctccatattggatctctgttctttgttggacatctgcttaatacttctatatttgctgatcagcttacataaaagaaggttgatgtaccagcacttccaaggttatt

SEQ ID NO: 173212 - DNA, 400 bp, Homo sapiens
catttgctaaatacccatgcttatatgtctatctgtgcgwatacatatatgcatgtgtcatatgggtctcacagaactgataacctcaggttttattcaatggttattaaatatttgcttgtcaaagtttcctggtgctgcagcaatcagaccttttccattctacattgcttaaaaaactctaggccaggactatgattatagaattcacgtgtatgagtagtaaagagttaatactcccaaggagagagcactcattccctcttttcatgtttatttcttgagtgctcactgtgtgccagatattaatggagacgctgaataggccaacatgaagaagatatgcaagtctgcagagaggacaccagcagcctgattgaaattataataactaggcact

SEQ ID NO: 173213 - DNA, 575 bp, Homo sapiens
atctacaatgacacatcataatccccacagtccacagtttacaatggggttcactcatggtgttgtacgttctataagtttggacaaatttataatgacatatatctaacattatagtattatgcacagtgttttcactgcactaaaaatcctctgtgcttcacaccccatccccactgscaaccactaatcttttagctgtcatcattgttttgccttcccagaaagtcatatggttgaaatcatagtatgcaaccttttcagattgcattttttcacttagtaatgcacatttaaattccctgaatgtcttttcatgggttaatagcttatttctctttagtgctgaataacattccactgtccctgtgtaacagtttgtccattcacctactgaaagacatcttggttgtttgcaagtactggcaattgtggatgcagctgccataaacatctttatgcagatttatgtgtggacataagttttcagctcatttgagtagataccaaggagcatgactgctgtactgtatggtaagaatatatttagtttcgtgagaaaccatcaaattgcc

SEQ ID NO: 173214 - DNA, 575 bp, Homo sapiens
atctacaatgacacatcataatccccacagtccacagtttacaatggggttcactcatggtgttgtacgttctataagtttggacaaatttataatgacatatatctaacattatagtattatgcacagtgttttcactgcactaaaaatcctctgtgcttcacaccccatccccactggcaaccactaatcttttagctgtcatcattgttttgccttcccagaaagtcatatggttgaaatcatagtatgcaaccttttcagattgcattttttcacttagtaatgcacatttaaattccctgaatgtcttttcatgggttaatagcttatttctctttagtgctgaataacattccactgtccctgtgtaacagtttgtccattcacctactgaaagacatcttggttgtttgcaagtactggcaattgtggatgcagctgccataaacatctttatgcagatttatgtgtggacataagttttcarctcatttgagtagataccaaggagcatgactgctgtactgtatggtaagaatatatttagtttcgtgagaaaccatcaaattgcc

SEQ ID NO: 173215 - DNA, 585 bp, Homo sapiens
atgaataggtctttgaggaaagctacagttcatccacattgagcatgtcatataagtgagcattagacttttgttattgtacattattgattatttggagtcattgcttactttaaactgagcagtcctcttattaattatattgtccaagtagtgtggttttattttaagataactagaataaatctactgamgtaaagaaacctcacatcctatatccctgagagataacagatttaaaattgatttcaaaaatttagagcacttcaaattttgaagtgatggtcatatacttatttttcctacttaaagatttatgttacagtttttaaaatatgacaaatatgaaatgagtttcaagcaaaaataattagggaggaaaatcaattttagaaagttcatatcactaatgaattgtttgacatcaaaccacagagatagaggctacaattatttctgcatcattggctcactgtcctcataaatgctaccacgtattgccagccactaaaaatgattgcattactttttaaatttaactatgtggattgcatgctcttggaagaatttgtcctcaacgtataa

SEQ ID NO: 173216 - DNA, 585 bp, Homo sapiens
atgaataggtctttgaggaaagctacagttcatccacattgagcatgtcatataagtgagcattagacttttgttattgtacattattgattatttggagtcattgcttactttaaactgagcagtcctcttattaattatattgtccaagtagtgtggttttattttaagataactagaataaatctactgacgtaaagaaacctcacatcctatatccctgagagataacagatttaaaattgatttcaaaaatttagagcacttcaaattttgaagtgatggtcatatacttatttttcctacttaaagatttatgttacagtttttaaaatatgacaaatatgaaatgagtttcaagcaaaaataattagggaggaaaatcarttttagaaagttcatatcactaatgaattgtttgacatcaaaccacagagatagaggctacaattatttctgcatcattggctcactgtcctcataaatgctaccacgtattgccagccactaaaaatgattgcattactttttaaatttaactatgtggattgcatgctcttggaagaatttgtcctcaacgtataa

SEQ ID NO: 173217 - DNA, 546 bp, Homo sapiens
attgcatgctcttggaagaatttgtcctcaacgtataaacaaattcagagtatctgacattagagagaacaatgaaaattttatcattacatatgtctgaaattctaaaaaaagtttgatgattatatgaaccatgamggttcaacacataattgaattgctttggtgatcctatgtaaaaatagcttatgttttgtcaaggaagttgatctcactcattcccattactttgaatgccatatattttcatattctcaaatgtatattaccagcaccaacttgttttcacagctgcagacttacacatacaactggatgtttaaccagtctgcatgattgtctcagagtaatttcaaagttaaatgaccagaactgagtcctatatgtattaggcaaaaaactgtgtctaccccattaataacatcaacactcaaacagtttttaagccagaatctttacgtcaactgtgataattcaacttaattatctaagaaatctcatcattcttttgatacaactttatatatttaagataagctcatttct

SEQ ID NO: 173218 - DNA, 546 bp, Homo sapiens
attgcatgctcttggaagaatttgtcctcaacgtataaacaaattcagagtatctgacattagagagaacaatgaaaattttatcattacatatgtctgaaattctaaaaaaagtttgatgattatatgaaccatgacggttcaacacataattgaattgctttggtgatcctatgtaaaaatagcttatgttttgtcaaggaagttgatctcactcattcccattactttgaatgccatatattttcatattctcaaatgtatattaccagcaccaacttgttttcamagctgcagacttacacatacaactggatgtttaaccagtctgcatgattgtctcagagtaatttcaaagttaaatgaccagaactgagtcctatatgtattaggcaaaaaactgtgtctaccccattaataacatcaacactcaaacagtttttaagccagaatctttacgtcaactgtgataattcaacttaattatctaagaaatctcatcattcttttgatacaactttatatatttaagataagctcatttct

SEQ ID NO: 173219 - DNA, 212 bp, Homo sapiens
tgatgatgctacatttctaccaatagttcagtctgtttcygttaccaaaatctgtgatataattgatagtaaacctattacctagaaggcttttggcatttaaagtagaggggggaaaatattctgaattctccctgactgaaatctttggcaaaaaaggacatgcatcacttagttttacattttcttatttgcaaaacacatcatgtgat

SEQ ID NO: 173220 - DNA, 542 bp, Homo sapiens
aaatgtgcccaatgacttatatttaatttgaactgttttatgcttattccccaaacactgtttataaacacatatattaaaaagtaattatctttaaaaattttattacaatgtgtatatttcattaaacattattttatagtagtttgatamatttaatggatgtgagaattttcatgttattattaaatttgtaaatttgaatttgtatctatgtcctaatttattcaaggctctgtgccatagccatttcctagggaaaattttcttatggaaggttgtatttctcaggtgcgtctaatgagaaaactcatatcattaaataatatagtttggatgttgtccctgctcaaatctcatgtgaaatggaatctccaatactggagatgtagcctggtgggagggaaatgaatcatggggtcagatttctcgtgaatgatttaatatcattctcttggtactgtcctcaaaaaagtgagtgagttctcacaagatctggttgtttaaaggtgtgtcacatctcttctctctgtctctttgtt

SEQ ID NO: 173221 - DNA, 542 bp, Homo sapiens
aaatgtgcccaatgacttatatttaatttgaactgttttatgcttattccccaaacactgtttataaacacatatattaaaaagtaattatctttaaaaattttattacaatgtgtatatttcattaaacattattttatagtagtttgatacatttaatggatgtgagaattttcatgttattattaaatttgtaaatttgaatttgtatctatgtcctaatttattcaaggctctgtgccatagccatttcctagggaaaattttcttatggaaggttgtatttctcaggtgcstctaatgagaaaactcatatcattaaataatatagtttggatgttgtccctgctcaaatctcatgtgaaatggaatctccaatactggagatgtagcctggtgggagggaaatgaatcatggggtcagatttctcgtgaatgatttaatatcattctcttggtactgtcctcaaaaaagtgagtgagttctcacaagatctggttgtttaaaggtgtgtcacatctcttctctctgtctctttgtt

SEQ ID NO: 173222 - DNA, 596 bp, Homo sapiens
cacaccatgtacttaattacaccaacccaggaagcttggcttattactttcctgcctctttttttcttggatatgctaaactttcttcctgggttgctctttcgacctcaaccaggctaatgttctatactatatacttttcaagatcctttcaagtgccatcttcagctaaacaattctttgactctcatactcataactaaatttcttttacataaaagaattatttccctagacttctcagtataatttgtgttaaacttgtgtatgctatttattatattgtaatttgttttaaatgtgttatctgtctttccaattaaattcatgcattttaaggttagcaaatacatttcattataagcttcgtgtaatctaaactatttgaataacaaagcaggcatagctctctcaaatgtgtacgtctctcttgayatagtcaccacttcactgctagtttccgtagacagaaatgttatttaagctttatgtatgtttttaaactagtgtttccagtattaattgtattcattcaatcttgatttaataggaaataggttttctcttatttgcacaatatgctccccttaatttca

SEQ ID NO: 173223 - DNA, 535 bp, Homo sapiens
agtacatctgcttataggagaccctaagtggcacataaaggagttgtcatctcttttggacaatacggaatgaatatgaactatacagattgtgacggaacacactycaagcaagggaatcaaattttcctgaaactcaagaaataaaaattacaaaatgtgtattgagcctgataagtagtatagaatgttgacacatgtagtaatagagaagagctagaaagtaatctcaagaatgtgaattggggtacataagagatgtataaagttgaaaaatgaagggtaagtctgtaaaaagatctgctacctacaaaagcaatgccttccagtgaactcacgtgtcttatctcccaatctcccattgtttataatcccccatcccagattagagttctccctaaatcactctgcctaaagtagtctagttaaactcaatgaatatcacaccatttaatataagggatacttattgcatttctctgtgcttcttagccatatttgacaccactaatcttgtcctttttacttaaattat

SEQ ID NO: 173224 - DNA, 566 bp, Homo sapiens
aacctttgaaaggtcaaatggtatgccattccaagagttcagttttatttagcaggcttgaaaacagtgactgatcttatttctatatataacacgctattgtgatttgctgtgtagagtattactttaccagcaattgaatgatttcttgctttctccttttatctctgctttgtaatatgactactcttatctgaaattccaaagcaagaatagacagaacattttcatcatctctgagttctggatgcactgatcttcaaacacacacacacatttgcattgagatgtatttaacattagcaaagtgctatcttaaagttaaatttttaaaagtcctagtacattactatgtaacatttaaaaaatcctgtctaaggtaaagagaagtggcatatatatgtttatatatgttttwtatataaatatatgtgcatgtgcatgtaaagcattctaaagtgaaaaatttatttttgtcagtactaattacaaatcccaacgaacttaaaataactgttacacaatataaaatgatgaattcttcacttcatataaacattgaaaag

SEQ ID NO: 173225 - DNA, 566 bp, Homo sapiens
aacctttgaaaggtcaaatggtatgccattccaagagttcagttttatttagcaggcttgaaaacagtgactgatcttatttctatatataacacgctattgtgatttgctgtgtagagtattactttaccagcaattgaatgatttcttgctttctccttttatctctgctttgtaatatgactactcttatctgaaattccaaagcaagaatagacagaacattttcatcatctctgagttctggatgcactgatcttcaaacacacacacacatttgcattgagatgtatttaacattagcaaagtgctatcttaaagttaaatttttaaaagtcctagtacattactatgtaacatttaaaaaatcctgtctaaggtaaagagaagtggcatatatatgtttatatatgttttatatataaatatatgtgcatgtgcatgtaaagcattctaaagtgaaaaatttatttttgtcagtactaattacaaatmccaacgaacttaaaataactgttacacaatataaaatgatgaattcttcacttcatataaacattgaaaag

SEQ ID NO: 173226 - DNA, 206 bp, Homo sapiens
atttagttgttaaaaacactgaacagaaaaaattacattatattcacttcctattttttatattttttaacaaaaagcatttcatttcagtttagtctccatttgaggtgttacttcttttcagctcatttttaacattaacaacawggcttagagcagttttaatttacagaaaaattaagcataaggcacagattttcctaata

SEQ ID NO: 173227 - DNA, 576 bp, Homo sapiens
aatcttactttctcctcaaaacagtcatgtgtaattggttctaatcttcattaattagaactggatactggaaaacaatgtgattaagcacaccaggcttgacccttggtcttctgaggacaattcaatgactgcctgataaaaagtatttcaatccaataactttgttaaacagtagaagtaagaagagaagtgaaaatacactttttaaaggcaaaatgaaggtttccctatatggtggaagatgtatgttaagatttaaccctatcaggcaccaatctttgtgcatctgcatgtttttatagttttaatagatattgtgtttgtgtatctatgcatgcatatatatatgaaaatgtatatatttgaacatgtgattatatatgccagtttcatcaattttatttctgaaatatattatgaaaataaaatagtgtatataatgtagctttaaagtttgaagaatgttaataaaataaaacaagcatcacgacatagtattaaaagataacattaaaagtcctgactgtgcccstacataaaagcatactttttgctccttcagttaataatttt

SEQ ID NO: 173228 - DNA, 560 bp, Homo sapiens
aaattcagggcccttaagtggctgaagcatgatctagaaagatatgtcatgggatctagttaggtatttcctgtcctcttggccctatatattcctctccctttgataagggacataatcatggaaagccaaggacaatggtccctttttcttgagtctgaaygctatgattattgatacatctagattttatcaagtcattttttcaaaatctcatattcatgggaccacattttaaaaatagaatgccaatgatctgttctttgaagttggcaagcatgatagaagggtagaaactaaccccttttctaagggtgctaatagatgtatattggaaacatattttcagcacactttcaagtgatacaaagccagctgaattttttgtcctttttaacattttcttgttcttatacataattgtcttaatactactgacaattttgatatcaaagccttcaccttgatccatattgtgaaagttttgtattgctatgtaacaaatttacacaaatttagcagtataaaaaaactatcatttattagattgaagccatatt

SEQ ID NO: 173229 - DNA, 480 bp, Homo sapiens
attatttacccaaaagttattcaggagcagattgtttaatttctaygtagatatatggctctgagagatcttcttagtgttgatttctatttttattttgctgtgctctgagtgtaactggaataatttcagtttttcataatttgttgagaattgcttcatggccaagtacgtggttgatcttagattacgtgtggtgtgaaaataataatgtatatttttaggggtgcagtattatgtagatatctgttaggttcattttgtaaaaagtaaagtagaggttcctcttcaaagactttcctccccatctaattaggaataaacagtaacttctcttagaagcaaaatttattcaaatacctgtgctaacattcttaaatatctgctagccataataaagaaatcaatgtacgttatattcttagctcccacactttagcctaaatatttgccctgacatgcttatactggtccaagcaa

SEQ ID NO: 173230 - DNA, 480 bp, Homo sapiens
attatttacccaaaagttattcaggagcagattgtttaatttctacgtagatatatggctctgagagatcttcttagtgttgatttctatttttattttgctgtgctctgagtgtaactggaataatttcagtttttcataatttgttgagaattgcttcatggccaagtacgtggttgatcttagattacgtgtggtgtgmaaataataatgtatatttttaggggtgcagtattatgtagatatctgttaggttcattttgtaaaaagtaaagtagaggttcctcttcaaagactttcctccccatctaattaggaataaacagtaacttctcttagaagcaaaatttattcaaatacctgtgctaacattcttaaatatctgctagccataataaagaaatcaatgtacgttatattcttagctcccacactttagcctaaatatttgccctgacatgcttatactggtccaagcaa

SEQ ID NO: 173231 - DNA, 480 bp, Homo sapiens
attatttacccaaaagttattcaggagcagattgtttaatttctacgtagatatatggctctgagagatcttcttagtgttgatttctatttttattttgctgtgctctgagtgtaactggaataatttcagtttttcataatttgttgagaattgcttcatggccaagtacgtggttgatcttagattacgtgtggtgtgaaaataataatgtatatttttaggggtgcagtattatgtagatatctgttaggttcattttgtaaaaagtaaagtagaggttcctcttcaaagactttcctccccatctaattaggaataaacagtaacttctcttagaagcaaaatttattcaaatacctgtgctaacattcttaaatatctgctagccataataaagaaatcaatgtacrttatattcttagctcccacactttagcctaaatatttgccctgacatgcttatactggtccaagcaa

SEQ ID NO: 173232 - DNA, 480 bp, Homo sapiens
attatttacccaaaagttattcaggagcagattgtttaatttctacgtagatatatggctctgagagatcttcttagtgttgatttctatttttattttgctgtgctctgagtgtaactggaataatttcagtttttcataatttgttgagaattgcttcatggccaagtacgtggttgatcttagattacgtgtggtgtgaaaataataatgtatatttttaggggtgcagtattatgtagatatctgttaggttcattttgtaaaaagtaaagtagaggttcctcttcaaagactttcctccccatctaattaggaataaacagtaacttctcttagaagcaaaatttattcaaatacctgtgctaacattcttaaatatctgctagccataataaagaaatcaatgtacgttatrttcttagctcccacactttagcctaaatatttgccctgacatgcttatactggtccaagcaa

SEQ ID NO: 173233 - DNA, 285 bp, Homo sapiens
ggtttccttcttcagatttatcacctagcttagtttattttatattttatcaactgctctattactagttggtcaatacagatgcttgggtttaccgtgcaaacctcagaccccattccatctaaccttattctttctctgtcataaaaactccttcactagagctctattaaagaaaatcacaacaatcatgcccctccagcgaatttgttcattctctgctatatcacttagagctttcaccaatatmtttaagattatctacttctcctattttgggcaatt

SEQ ID NO: 173234 - DNA, 410 bp, Homo sapiens
attaaacatgaatcattaaataatgttaagtattttataatttctcataagcagtgcatttattatctgagaaatcaactctgaaaaaatataattgagaattgaattagtgtctgcttaagttggtaagtagtctttttgttttcaaccacactattactcttcacctataaattccattattatttttgatgtatagtcaacttatttctataatgaaattgcccttctggaaatgttggaattcaattcatgggtcgaattcytgtattatctcttcaaggcctggctgtgcaccacaacataatgtgatatattcctaagacttactccatagttctcaattaaattaactatattcaatcactatatgctaagtaatattaatatttaaaactatgccctgagtc

SEQ ID NO: 173235 - DNA, 362 bp, Homo sapiens
ctgactttttaatgatcgccattctaactggtgtgagatggtatctcattgtggttttgatttgcatttctctgatggccagaaaacctttaacttctttatggacaatgttaatctcacttgacttgtgatggattgatttaacctccatgtcactcagtcaagagctacctgactcacattggcctggtgtgtgaaataataaatgtcttattgtttaagacaacaaaaacagacaaacaaacraaaaacaagatggagaataaaaatctatctgaaacgttttcagattgtcattttgtttttctgttttctcttaccaattcctctttgctgagagctatggttggtagcatgtagtt

SEQ ID NO: 173236 - DNA, 483 bp, Homo sapiens
catcaagctccaaatctcatttcagacatgaagcctcctctccccccagccactatctggggcccagtttctctggccattcccttagcacatccctgtcactgatctctcttcatgcttattacygggatcatcaagaatttattgcatcattagtttttaaaatattggtctcacttggtaagatgaagttccttgggggtagatgtccatgtacgtgcacactgctgtctgtgggcaggtgcacaccgtattaagtattcagaggcagagcataaagagaaacaaagaaatgtattcaaagccactcaaactttggagtaaaactttttctagcaggcagtttaggtggaaatcctaagtatagtcaagattctattctatttcaattagtacaatttaattcttactcagaatagaagggaagaatatgcaaagagcaaaatgacataaagcattgttatgtcactatgtatttcccat

SEQ ID NO: 173237 - DNA, 601 bp, Homo sapiens
ctcagtcaactgattagggaccttaattacatttggaaaaatctcttttgctttataaggaaacataatcactgaaattatattctatcatattcactgtttctactcccaatcaattgggagaagattataatgagcacatacaccagaaaatgaggatttgggggttcatcatagaattctacctacacaaagggggttgccatttttccccattggcaaccatatggacatttcctagraacactgcaaatagttttatttttaaaaaaatatttaatagtgtgaaattaaattttgaaaaaaattaaaatgtttagctttattaagaacattttatttatttttatcttgatattcattcatgctcatttggatcttattttttagatactttaaaaattagctatggagtatctaaaaaataattttagtggtttgatgttttttacatttcctgattgacatttactcatgggagaggctgtgcacatggatctcaagtgtccctacacataacttctgagtgtgtcaaaccataaggcctaactgccctccctctgagtgatcctatagctagaaacataaccaattcagttga

SEQ ID NO: 173238 - DNA, 600 bp, Homo sapiens
gttccacacatctaaacaagcagatctcatgagaactcactcactatcacgaggacagcaccaaaccatgagagatctaccgccatgacccaaacacctcccaccaggccccacctccaacatgagggattacaattcaacatgagatttggtggggacacatattcaaacgatatcaagtacatttttaaaaattaccattttcaggtggcagagagaaacatttgcaaaagagaatagacaaatagctaggaggtgagatcaggtagagatagcttgctggcttagcctggaaaaatctgtattaataacgccatcaacaacagtgtctcttctgcttccctttctgggaaccatcctcaaaaattytgagcaaactggaaagggagattagaataaaaagcctagtttatgtacctgcctgtgactaagataaagataatagtgtgtaaatttatctgtggtgagttgaatcatgccccccaccccaccaaaaaaaaaaaaaaaaaaaaaagatgtacaagtcctactcctgggtacctacaaatatgttaccttgcttggcaaaaagtaaccttgcaaatgtgattaagttaaggt

SEQ ID NO: 173239 - DNA, 499 bp, Homo sapiens
tcttgtaaatatccataaaacataccacttagcattgttgtcaatgctctcccactttgctaatgcatgaccatagtgctagtcatgtgattacaaggtagtcacaacagggtagttaacacatcttacgctttrctagtgtggatatttcaaggggtatgctaatttttatcttgacttatagtcccatagagtggtcaggaatatgagaagttggttctccagggaaaactgtttcccaaatgtcatcggaacatgaaggggaacagaaaattaatcaagacagtgacattttttaaggtggactacacagggaggagagaaagaaaatgcattgatggtttaagtgtgttgggaagtatactagagcgtacagaactaaggcttggaaattgatgcatcaaacactcaatgacatattggcggataaacaagcaaaatgattgctaagtgactgtctgattcatgtatctatagtgtgtaaaaatccagagatcct

SEQ ID NO: 173240 - DNA, 590 bp, Homo sapiens
ttgggggaggggtgttgtttgttttgtttgtatttttacatctgaatatgttttactgaagtcctcctgggcttctgtaacccttctgcagagtaagtctgctgccacagctttcccccayctgtcctaactgtatactttaagtgcccttaatctgcaacttagttctcatttggtgaaagtcgcacttcacttgatgatgttgactttctcagcaaagggcaatggcagttactgaagatgccctttgcagcaaaatctcatataatcaattctactaaggcgagctgacactccagtgtacactgggcatccgtggatgctattcctccagttcctttatgaggtctgcaacgtttgggctgagatccaccaagcagttgtttgaagtgtgcaatggagtaggattctgcaagacagagacagaatcccaaccccaaacatggcagagtgatgaaaataccggagtccctagaacatggatgtgggactgggcctctactctgctacctgccacttccataactttgaggaagttccttatgccctaagcaactcagtgacctcatctggaaaatgaggagggaaac

SEQ ID NO: 173241 - DNA, 590 bp, Homo sapiens
ttgggggaggggtgttgtttgttttgtttgtatttttacatctgaatatgttttactgaagtcctcctgggcttctgtaacccttctgcagagtaagtctgctgccacagctttcccccatctgtcctaactgtatactttaagtgcccttaatctgcaacttagttctcatttggtgaaagtcgcacttcacttgatgatgttgactttctcagcaaagggcaatggcagttactgaagatgccctttgcagcaaaatctcatataatcaattctactaaggcgagctgacactccagtgtacactgggcatccgtggatgctattcctccagttcctttatgaggtctgcaacrtttgggctgagatccaccaagcagttgtttgaagtgtgcaatggagtaggattctgcaagacagagacagaatcccaaccccaaacatggcagagtgatgaaaataccggagtccctagaacatggatgtgggactgggcctctactctgctacctgccacttccataactttgaggaagttccttatgccctaagcaactcagtgacctcatctggaaaatgaggagggaaac

SEQ ID NO: 173242 - DNA, 565 bp, Homo sapiens
acagtccagcaggaaaacaagcagctggaagctcatcgtccagtgtgtttcactgtcccaagtagacttcagtattcctcaaaaatgtccctgacaacactctctattctcttccacttatcatatacagtagcaygcacaggaggaagattcactcaagtatgggcgacggtctgtgaagaagctggtgaaagtacacacacaaagtcttttttaattgtttgaaccaggacaattcagttgcactggattcagctgcagtactcactggcgttattccgttatctatttcttcctgcctcttggtaaaattgcatttccccaccctttctgagttctgacttgaccatctggtttgctttgggtaattaaacgtaagtgaaatagcaggtgtcacttccaggaggaagtttcgagagacggtggacgatgtgccaccttcccttttcttgacttgactgcccttgaagctcagagatgcaactgctcccagactgggcctccggagtgagggcagagagagcagagccctgccccctctagccggcgcacaacagcatgaatg

SEQ ID NO: 173243 - DNA, 441 bp, Homo sapiens
cctgttgacttcaattgtctcagaaggcatagcactcagaaaacacttgctgaatcagtaataattatcttggactttgattctctaaagataaaatagtcaattaacttgattacttcttattttccagttggtgaaaaaaggtgaatgcagtagtagccatgttggggaagaaaattctttatcctcacatgttctgttgggccttcccttctctctcggcagrtgtttactttgattttttatagtgcacatcccctaaggcaggactgtagtcattactgtggaattaatacgggctggagtatcaagggtggtgttctacccaagggattctcatagaatcagcagatttagagttggacacaacctgaggatcacttaatccaggtgctcctaaatggaggccttgagaggtgagatgtcagattttgctaaaga

SEQ ID NO: 173244 - DNA, 611 bp, Homo sapiens
tggctgtcccttctaatggctggactttgcggctgtagtggccagaagcataaagacgtgtaaagaggatttttcggtacatcgaacactgaatgtctggctatgcagcttctgtgattgatattcggttctgtgggytccttccttcttaagtgcagtctgtaaaggatggtggggaatagtaatttcaagaaagatttggcatgagtatcagtcgttgggtggtgggtgtgagaagggcgttgctattgggtgggtgaagtgttgtcacttagatgttgtcattttcccccatatagttttcattaaggtgacattgctgtggcatctgggtccaggcagggtatagcagccagcatctgaccacttgcagtcgtgaacatatatatatatgtatatatatgtgtgtatatatgtgtatatatgtatatatatgtatatatgtatatatatgtatgtatgtatatatatgcatgtatatgtatatatgtatatatatgcatgtatatgtatatgtatgcatatgtatgtgtatatatatagagagagagtttattaagtattaacttacacaattacaaggtcccacagtaggctgtctgcaagcttga

SEQ ID NO: 173245 - DNA, 486 bp, Homo sapiens
tgggcacaagagaaaggagtcaggttcaaaagaaaccatctacactgaaataggagaggaaaaaagagtcggcggcagagaggagaaaaacagagcatccgaggcctgtgaacatatcaratgttcactatgggtacaactagagtctcaaaaaaagaagagaaaaatgaagcaaggatatttttgaaaagacaatggccaacaatttttccaagctgatgacaccaaaccatagataaaaaatgctcagtgaatcccaagtaagatacatacaaagacaaccaaacttggtgcatcacaaacacactgttgaaaaacagatataaagagaaaatcttgaaagtaaccataggtaaacagaaacattacatacagagaaaaatgacaagaattatggctgacttctcgctgtacacaatggaagccagaaaaaaatggaatgccgtgtttaacacattgaaagaaaaaatttttaactaggaattc

SEQ ID NO: 173246 - DNA, 486 bp, Homo sapiens
tgggcacaagagaaaggagtcaggttcaaaagaaaccatctacactgaaataggagaggaaaaaagagtcggcggcagagaggagaaaaacagagcatccgaggcctgtgaacatatcaaatgttcactatgggtacaactagagtctcaaaaaaagaagagaaaaatgaagcaaggatatttttgaaaagacaatggccaacaatttttccaagctgatgacaccaaaccatagataaaaaatgctcagtgaatcccaagtaagatacatacaaagacaaccaaacttggtgcatcacaaacacactgttgaaaaacagawataaagagaaaatcttgaaagtaaccataggtaaacagaaacattacatacagagaaaaatgacaagaattatggctgacttctcgctgtacacaatggaagccagaaaaaaatggaatgccgtgtttaacacattgaaagaaaaaatttttaactaggaattc

SEQ ID NO: 173247 - DNA, 486 bp, Homo sapiens
tgggcacaagagaaaggagtcaggttcaaaagaaaccatctacactgaaataggagaggaaaaaagagtcggcggcagagaggagaaaaacagagcatccgaggcctgtgaacatatcaaatgttcactatgggtacaactagagtctcaaaaaaagaagagaaaaatgaagcaaggatatttttgaaaagacaatggccaacaatttttccaagctgatgacaccaaaccatagataaaaaatgctcagtgaatcccaagtaagatacatacaaagacaaccaaacttggtgcatcacaaacacactgttgaaaaacagatataaagagaaaatcttgaaagtaaccataggtaaacagaaacattacatacagagaaaaatgacaagaattatggctgacttctcgctgtacacaatggaagccagaaaaaaatggaatgccrtgtttaacacattgaaagaaaaaatttttaactaggaattc

SEQ ID NO: 173248 - DNA, 559 bp, Homo sapiens
aagcttacatatacccttttcttaggggaaaagcaagagaggatgtagccaatctaggggacrgtaaatgatttttgagaaagatgaatggggcctcagaagaatatgtgacagcctgtgacaacatctgtctggatggacgtccaccccagtcaccgttcctgtgataggagttaatctttcctgattgatgagatttctgggcaggtgatttaggacaattacatttctttccttcagaggaggcagaggatgtgacttctttaggtaaataagcagagttcagggaaagccccttcatgcttgtgcttttcccaggtgctctgagtttgaagtaatcagcatatcaaaatggcatattttgaggtgcaattttctgaacttcactttgattgtgattaatgttattcttattttatctgatctcctatttgtgtctccatctactgttaaaagatttcgtattcccagtgtcttccttttatcatatacattatgccatgtagagtccatttatccttatattgaaccaaaatttgcttgtcttcaacacaactct

SEQ ID NO: 173249 - DNA, 603 bp, Homo sapiens
ttgttattttcaattttacataatgataataaatgctgtaaaaaacatctttgcaaatagtgctatttatctcttttgttgttcattcagatagaatttaaatattgaattaaagcagtatacaaattttaatgctcgagtttcaactgcttactgactttttcagagacttatgccaacaamtataactacaaaaaatgtatgagtgattttttccatgtaagtactccagctttgacagctcttatctcataatcttctgcaaaaatgaataaaaaaatactgtcttactattttactgatttttttttttttttgagagagagagagtctcactctgtcatccagactggagtgcagtggcatgatcatggttcattgcagcctcaacctccccaggctcaggtgattctcccagctcagcctcccaagtagttgggaccacaggcacacaacaccatgcctggctaatttttacatttttctgtagagacagggttttgccgtgttgcccaggctggtcttgaacttctgtactcaagggatctacctgccttggccacctaaggtgctggcattataggcaggagccaccatgcctag

SEQ ID NO: 173250 - DNA, 603 bp, Homo sapiens
ttgttattttcaattttacataatgataataaatgctgtaaaaaacatctttgcaaatagtgctatttatctcttttgttgttcattcagatagaatttaaatattgaattaaagcagtatacaaattttaatgctcgagtttcaactgcttactgactttttcagagacttatgccaacaaatataactacaaaaaatgtatgagtgattttttccatgtaagtactccagctttgacagctcttatctcataatcttctgcaaaaatgaataaaaaaawactgtcttactattttactgatttttttttttttttgagagagagagagtctcactctgtcatccagactggagtgcagtggcatgatcatggttcattgcagcctcaacctccccaggctcaggtgattctcccagctcagcctcccaagtagttgggaccacaggcacacaacaccatgcctggctaatttttacatttttctgtagagacagggttttgccgtgttgcccaggctggtcttgaacttctgtactcaagggatctacctgccttggccacctaaggtgctggcattataggcaggagccaccatgcctag

SEQ ID NO: 173251 - DNA, 552 bp, Homo sapiens
acaagattaagacaccagagtaaccctccttctattggtaaataaataaatggaactaaagcaaacttattgattttatttttaatttaatatttatttttcccctaggactatagagtatttttgggtttaaaaaaaaaaaaaaccctaaatttagaatcagacacagtttggtttagatcccatctccatcattactgaccatgtcaccttcagaaatttaaaccactaaacatttattgactctgtactatatgccatgcaaatgaaaatataaaaaaattaatacaacatgttctgtctgccttcagtcccctcgcattctattcagagggatagatgagaaaagagacrtttaaaatgtgaaggaagtttctgggctcaaaagaagagtatctatctcagtctgtgtaggaaaggatgtgaatgtcagtgtgtgagagagagacagagagagagagaaagagagagaaaagagagagagaatgagaatgatgggagagagacagagagagagagagaaagagagagaaaagagagagagaatgagaa

SEQ ID NO: 173252 - DNA, 560 bp, Homo sapiens
taaaaaaatgtcaaaattatcccacaggataaaataaaatataaacccatcaaaatgctgtattaaatctaccaccaaaaatgcctctttcttttcaggaaaaaatacaaaactgtgatccacagagaatgaccctttctgatatgtatacatgcatgtcaacttttaattcatgattctaaattgagaaacctcaaacagctatttttaatatcccagccctattcttattttgcatttatatccatcatatatctcaaccagtgttattgtttattgtatcattacacaaatacatagatcatttccatgtttgctcttttggaaggggtttcctcaatggagttgacttatcctccaaatttgacccattcttttaggcccagttcacatcttctctccttctagcccttacctccctgtttaaacaytgaacacttttttctccttaaactactagagtacttgtattctggagtaaaacttttgaaatttgattaaatacagtgtaccatccatatccccagaagaacagtttatataaagtgatgtatatttta

SEQ ID NO: 173253 - DNA, 434 bp, Homo sapiens
gagtgggacacatttgccttctttcttcccaaagcacaagccagcacaggccccatcatctccagaatcaagtccaagttgcctttgtttgattttcagagtctcttggcctagtatcagtctgcttcttagctttacctgtcagtgctacactctcctcctrtactcacccaccccacccaacctttgttctggtcacacccaagcggttcaaggccccctagctggcccttcttcatcttcgctgaaatggcattccaggttagctctgttacagcagtcattgtgtactgggaagtggcaggatacaagatgcacaggtcatgaataaggggtccccagctatatttgagcccacacatccattttgtttggcccacaggatgtttgaaaatatttgaattgccaacctctaacaccctggagttttcaca

SEQ ID NO: 173254 - DNA, 418 bp, Homo sapiens
ggagtgggacacatttgccttctttcttcccaaagcacaagccagcacaggccccatcatctccagaatcaagtccaagttgcctttgtttgattttcagagtctcttggcctagtatcagtctgcttcttagctttacctgtcagtgctacactctcctcctatactcacccaccccacccaaccttygttctggtcacacccaagcggttcaaggccccctagctggcccttcttcatcttcgctgaaatggcattccaggttagctctgttacagcagtcattgtgtactgggaagtggcaggatacaagatgcacaggtcatgaataaggggtccccagctatatttgagcccacacatccattttgtttggcccacaggatgtttgaaaatatttgaattgccaacctctaac

SEQ ID NO: 173255 - DNA, 417 bp, Homo sapiens
gagtgggacacatttgccttctttcttcccaaagcacaagccagcacaggccccatcatctccagaatcaagtccaagttgcctttgtttgattttcagagtctcttggcctagtatcagtctgcttcttagctttacctgtcagtgctacactctcctcctatactcacccaccccacccaacctttgttctggtcacacccaagcsgttcaaggccccctagctggcccttcttcatcttcgctgaaatggcattccaggttagctctgttacagcagtcattgtgtactgggaagtggcaggatacaagatgcacaggtcatgaataaggggtccccagctatatttgagcccacacatccattttgtttggcccacaggatgtttgaaaatatttgaattgccaacctctaac

SEQ ID NO: 173256 - DNA, 417 bp, Homo sapiens
gagtgggacacatttgccttctttcttcccaaagcacaagccagcacaggccccatcatctccagaatcaagtccaagttgcctttgtttgattttcagagtctcttggcctagtatcagtctgcttcttagctttacctgtcagtgctacactctcctcctatactcacccaccccacccaacctttgttctggtcacacccaagcggttcaaggccccctagctggcccttcttcatcttcgctgaaatggcattccaggytagctctgttacagcagtcattgtgtactgggaagtggcaggatacaagatgcacaggtcatgaataaggggtccccagctatatttgagcccacacatccattttgtttggcccacaggatgtttgaaaatatttgaattgccaacctctaac

SEQ ID NO: 173257 - DNA, 343 bp, Homo sapiens
aatcaagtccaagttgcctttgtttgattttcagagtctcttggcctagtatcagtctgcttcttagctttacctgtcagtgctacactctcctcctatactcacccaccccacccaacctttgttctggtcacacccaagcggttcaaggccccctagctggcccttcttcatcttcgctgaaatggcattccaggttagctctgttacagcagtcattgtgtactgggaagtggcaggatacaagatgcayaggtcatgaataaggggtccccagctatatttgagcccacacatccattttgtttggcccacaggatgtttgaaaatatttgaattgcca

SEQ ID NO: 173258 - DNA, 617 bp, Homo sapiens
cttgtttctacccagtctctattctcagaccaggatgttctgattatttctgcaagtgatgcttcaaccttggggtcaatggggactttcattgtgttgactgcattgattctgaaagtctgattagatcaagtaactccactgagatgtaggcacaatgcaatccatacttagacgtgtcctcatgaaataggactttggaagtttgctaattttgccaaattgcatttaattctgaatattttagatatgttgacaaaatttaagattggcaaacttacagctaaaattcctaggaataatggaagatgtcaaaactgttggtgggcggaagtatttttcagacaatgacccttgatacgtctgtgagtttgtgtgtctcactaaacactcacatgaatgtcagtgcccatgcattcacccataaagagaaggcttttttagtgatgggaccatatttgtacrtggcacagcttgtaacctttcttgggccctattttcagggttccagacctgctgactgccttcatcagcttaactagttccaatacttcatagctgaaattcacagacgctctttcttcaagtaaattgacagtctgaaagtcaagtaacag

SEQ ID NO: 173259 - DNA, 403 bp, Homo sapiens
atagtttcgcattttccagaatgtcatctaaatagaatattttcatatgcatctgtttgagtctagcttttttcattccatgtaatgcatttgaaattcatcccatgtggttgcatgtatcaatagttcattcttttatattgctgaacagtattccattttatgaatatattaaacagtattccattttatgaacgtactagtttatctgttcctcagctaaggaatatttgggtggtttttaaatttcacttgggtaaatacttaggaatggaattgctgagctgcatggtaagtatatgtttaattttttctttttyttttttttttgagacagcatcttactctgtcacttaggctagactgcagtagcatgatcatagctcactgcagccttgaactc

SEQ ID NO: 173260 - DNA, 422 bp, Homo sapiens
tttccagaatgtcatctaaatagaatattttcatatgcatctgtttgagtctagcttttttcattccatgtaatgcatttgaaattcatcccatgtggttgcatgtatcaatagttcattcttttatattgctgaacagtattccattttatgaatatattaaacagtattccattttatgaacgtactagtttatctgttcctcagctaaggaatatttgggtggtttttaaatttcacttgggtaaatacttaggaatggaattgctgagctgcatggtaagtatatgtttaattttttcttttttttttttttttgagacagcatcttactctgtcacttaggctagactgyagtagcatgatcatagctcactgcagccttgaactcttgggatccagctatcctcctgccttagcct

SEQ ID NO: 173261 - DNA, 473 bp, Homo sapiens
ttagcttttgctgtataacaaaccaccctcattagtggcttaaaacaacaaccactttaattagctcatgattctgtgtattatcaatttgtgttgggctcattcaggtggttttactcgagtgatctgggctcaactgtccttgactgggcttactcatatatttaggggccccaaaagatgctgtgaatagccaaaggatggtacctccctctgcaaggtctctcattctccaggaagctgaaccagcattgttcatatggtggcagaggataacaaaagctataaaamcttggaaagcctagttcaggagtcaattataatttctgccacattctattggtcaaatcaaatcaccaggccagcccagatttaaagggtacagaaataaatttcccttcttgataggaagaatttgtgaccatttttgtaatctactacaccatcctagggttccttcagtttcttcagtc

SEQ ID NO: 173262 - DNA, 407 bp, Homo sapiens
ggaagctacacactgattaacccaatattacgtgctttggatattatgcaataggaaggacacagcacctctaatggagtcttattgactataaatttgaatcataatctaatcaagtctctagatctaactagtgtgcaagaaatacaggaaatagagaaacaagttaaaccattctatgaggtagtgattaactaaatgcattcctcagaataaaaataacagagtagtcaagttaaatgtggaggaggaaggcacttatagaataaaagaaaattcagagaaataataatcaaatgcaatcatgtcatatgattcayagagttaagcaaaactggacattttagtcatcgaagtggccacaaatctgtatgtccaggcaacatttcttatcatagtttctctcc

SEQ ID NO: 173263 - DNA, 407 bp, Homo sapiens
ggaagctacacactgattaacccaatattacgtgctttggatattatgcaataggaaggacacagcacctctaatggagtcttattgactataaatttgaatcataatctaatcaagtctctagatctaactagtgtgcaagaaatacaggaaatagagaaacaagttaaaccattctatgaggtagtgattaactaaatgcattcctcagaataaaaataacagagtagtcaagttaaatgtggaggaggaaggcacttatagaataaaagaaaattcagagaaataataatcaaatgcaatcatgtcatatgattcatagagttaagcaaaactggacattttagtcatygaagtggccacaaatctgtatgtccaggcaacatttcttatcatagtttctctcc

SEQ ID NO: 173264 - DNA, 407 bp, Homo sapiens
ggaagctacacactgattaacccaatattacgtgctttggatattatgcaataggaaggacacagcacctctaatggagtcttattgactataaatttgaatcataatctaatcaagtctctagatctaactagtgtgcaagaaatacaggaaatagagaaacaagttaaaccattctatgaggtagtgattaactaaatgcattcctcagaataaaaataacagagtagtcaagttaaatgtggaggaggaaggcacttatagaataaaagaaaattcagagaaataataatcaaatgcaatcatgtcatatgattcatagagttaagcaaaactggacattttagtcatcgaagtggccacaaatstgtatgtccaggcaacatttcttatcatagtttctctcc

SEQ ID NO: 173265 - DNA, 569 bp, Homo sapiens
tttcatatagtagaatccttattagtaaaaaaattgtggctatcttgacatttggccacttcattaattattgtgattcaattaaagcagttttttaaagacaggaggagagttgactgattttttcaatgaattaatttttgttcagcttaaatattcttattatttttgtaatcatttaacaacatcaataacagtcacagttttatttgttttatagaatgcttccccataggttatattcttaactaccacaatggcatttgagctcatattgtagacttaattttttaaaaaatgaggctgagagatcacacractcctgcagattttcacagtgcataaatagcaactccagagatgtccccacacaagcatctcctttctgcagaattgtccgggtgttttgggcatgcattcttcataagttcggtattttaaaatcagaagtgagtcaatgacagactttctttctttaaaaaggaaaaaaaatagtgatttttaatattttaaattaggagtaattaaaatgtcctacagaaaggcctgtgctgattctaactttcact

SEQ ID NO: 173266 - DNA, 528 bp, Homo sapiens
cctctgcaaatttccaagtctcattctaacttgtagtaaagctccaaagagcatccatttttcctctttcaacttttattacattgggtcaccttggcctttgaagagtctgtgtgattaagtgtaccctgaaatcactgcctcaaaaccacctgagatcaaaatacggatgcctattccccaccacaagcccactcaatcagaatatccagaggcaaggtgcagcccaaaagcaccccttgtttaggaactactgatttggtgagactaccagcagtacaccttatagcagttgagtatcgyagcaatttaatcatgcacctaatgggagtaggaggtgtgcaaactgcccttcatgagtaacctggagacactcacaagaaccaacttcaccatcactatcattctctatctctgactgaaaatgacatttacttcttcatagaggcaaacaggtattctaccactaacaggtcctcacattaaaattttgcttgaggctgcagtgaactatgatcatgccactgc

SEQ ID NO: 173267 - DNA, 470 bp, Homo sapiens
atggttgattagataaagaacatgtggtatatatacacaccaaggaatactatgtagccataaaaaatgaaattgtttcctttgtggcaatatagatggtgatggagacctaagtaaaatatctcagaacaaaaaatcaaatactgcatgttttcacttataaatgggagctaaacaatggccacacatggacatacagataaaaataataggcactggggactccraaaagggagggtggtagagggtgagtttgaaaaattacctactgggtacaacactatttgtgttttgggtacactggaagccaaatccccatcattatgcaatatacccatgtaatgaacatgcatttagacatgctgtctaaaattaaaacaaaattttaaaagttaatatgaactgaattctagaaaacccacagaatgggagaaatcatttgcacatattatatctgataagtgattaat

SEQ ID NO: 173268 - DNA, 590 bp, Homo sapiens
ttaacgagttaatatttgcttatgagtttttgataccattaaacgtagaggacatcagtggtatgaccaaagtttatcacagggaataaaaaaatactgcaggttttaaacttgctggccggctacagttcactctctttatgcaaatgaactataatgagtaagatcacatgcaattaaaataaatatcagtcagggatgaggttacatgatagstggcacacaatgggattcacataagggattttacagcaagtattttggtcaggatttgaatccaagagactactgagtttgcatttttaatccctaacataagcatttggaagttaaattgtactatagctttcaaaggttcacatggcttgctcagctgtgaaatgacagtaggaaaaaagtcttatatactgaaatcaaagaacaactgtttggtggaaatctaaaaggccaggttgaaaagagttcttagatatatcggctttagtaatacttcaaagtacctggaggtcaactgttgttcaaaaattttaattggaaaattccagaaataaataattcataagtttttaattgtgtgtcattcttagtag

SEQ ID NO: 173269 - DNA, 503 bp, Homo sapiens
gaacagttctgccagatagaactttagtattatagtttttattcctatcaggtcctccaaaatggaatttaattgatttctgacttaatttttgatgagaaaactgtggtaatctttgctcctatgtacaaaatatgtattttctcctctgactactttcaaaattttctttttttcactggtattcaacaatttcattagaaaatactttggtatcgttgtcttyagatttatccagtaaggttttttacagatcttgaatcagtaagtttatttgtttcatagaatatggaatttttttaagcacttatttttctctctttttgaactccaatccatgtatgtttaacatcttgatatttttaagctgtttactgaagttcctgtcagttctcaccatttatctttctctcttcttcactttggatatttgctattgctgtattttctctgatctcttttgaatagtgttaaatcagctattaatcccatccacagaattc

SEQ ID NO: 173270 - DNA, 394 bp, Homo sapiens
tcaagtgctcaataacagatgaagggatttgaaaaaaaatgtggtacataaatacaatggaatactattcagccatataaaagaataaaattctgtcattcatggcagcatggatgaaactgaatgacattaatttaagtgaaataagccaggaacagcaagttaaacactgcattttgtcactcatacctagaagctaaaaaaaacagttcatctcatagaagcaaaaagcagacsaaaggatactatactagaggccgcgatgggtaggggaaagaggggagagggagagatttgttaaagatacaaaattatagctaaataggaagaataagttctagtgttgtatagacgtataggatgcctatagtaaacaataatatatagcttcaca

SEQ ID NO: 173271 - DNA, 495 bp, Homo sapiens
atgaacagcagggtcagggtgagcttcagtggcttttctattgatgacatctggatccttaactgcttaaattgataagggtaacaagaataataaaccactacaagtgctaatgattctactcagataagtttgggacactgattattctgatccatttcacagataatagactaaaatagaaatttcaragcagaacttatttaagtcaaaggagatgtaatattactactatcagtgaatgagagaggtattgagcatctactctgagctcagcatgtctctagatgataagaaatataacattatttggcatgatgcctgcttcaaaaaatagtttggaggctgagaaaaaagatattaataatagaaagagtaattagcatttactgaatacctaaatgggaattctgcattcatatgtcttttaatccctgaagggaccctaccaggtaaatattaatattattctcttttgaaagatagataaaaaag

SEQ ID NO: 173272 - DNA, 586 bp, Homo sapiens
aatttttatagatacagtcaagattactctaaaatttcttaaggatgtctgagaaactgtaatagctataatgattttgacatagaagaataagctgggaggcatcagctaaagttattctatctatactaattaagattgtatggtattagtatcggattaaacacacagatcaatggaacagaataaaaatatgaaaatagaccatataaatattctcaactgatttttgacaaaattcaaaagtattccaatacaaaaagaaggtattatagcaattggacatagatagataaaaagaaacaaataaagaaagagagagagaaaaaaagaaaagagaaaagaaaagaaaaaagaaaagaaaagagggtgggagcagtggctcacgcctgtaatcccagcactttgggaggccaaggtgggtggatcatgaggtcaggagattgagaccatcctggctaacacggtgaaaccctgtctctactaaaaatacaaaaaattagcygggcatggtggcaggtgcttgtagtcccagctactcaggaggctgaggcaggagaatggagtgaacctgggaggtgaagct

SEQ ID NO: 173273 - DNA, 549 bp, Homo sapiens
cttgctagactcaagaaatccatggaacacctgcaagatattatacaaaatgaacttcgccaaagcatatagtcatgagactgtccaaggtcaaygctaaagaaaaaaattttaaaggcagctagagatgaaggttagatcacataaaaagggaatgccattgggttaacgtggagttctcaactgaagcctcacaagccaggacagattgaaggctatttgggaaagaaatcccaaacacaaaattgatatcccaccaaactaagcttcataagcaaaggagaaataaaatcttttgcagacaagcaagcattaagggaaagaattaccaccaggccagacttacaagagatctttaagatagttctaagtaaggagaggaaaaaatgataccttctatcacaaaaagagacttaattacatagcccacagaccatgtaaggcaaccatacaatagaaactgcaatgcaaccagctaacaaattcatgatagattcagaaccacacatatcaacattatcctttaatgtaagtggtctaaatgtcccc

SEQ ID NO: 173274 - DNA, 549 bp, Homo sapiens
cttgctagactcaagaaatccatggaacacctgcaagatattatacaaaatgaacttcgccaaagcatatagtcatgagactgtccaaggtcaatgctaaagaaaaaaattttaaaggcagctagagatgaaggttagatcacataaaaagggaatgccattgggttaacgtggagttctcaactgaagcctcayaagccaggacagattgaaggctatttgggaaagaaatcccaaacacaaaattgatatcccaccaaactaagcttcataagcaaaggagaaataaaatcttttgcagacaagcaagcattaagggaaagaattaccaccaggccagacttacaagagatctttaagatagttctaagtaaggagaggaaaaaatgataccttctatcacaaaaagagacttaattacatagcccacagaccatgtaaggcaaccatacaatagaaactgcaatgcaaccagctaacaaattcatgatagattcagaaccacacatatcaacattatcctttaatgtaagtggtctaaatgtcccc

SEQ ID NO: 173275 - DNA, 511 bp, Homo sapiens
tccttgaacaacagaaatccaggttctcaggtctttgacttttggaccttagagcagcartcctctaggttcacaggcctttggactcagactgaattacaccacagggatgtctgattctccagcttacagataacagattgtggtacattttggtctccataattgcataagccaattcctctaactagttccctcttatatatttatgtatatgctatcagttttgtttttctggagaattcttaataatacaacaagaatatgaatagcctcttatacagaggtggccagaagatgaagagagtaagggcaagtgcagtatagtgccagaagaacctcagagttagttgcaatggggttcgaattccaactctggcacttgttaatgtggtgggctcaggcaagcatttcacattgttgaaccttattttctcttctgtaaaaaaaaaaaaaaagaaaagaaaaatagaattgaccagggtgagtcatttttagaatttaagattat

SEQ ID NO: 173276 - DNA, 527 bp, Homo sapiens
aaaccacaaaaataataaactgcattatcaggagtttataatgcagtactaatgaattagccagaaacatactgggctgaatccagagagtctgggatgttttcacccctgatatttcactcttgcyatcttcactggttacactaagaagaagagtgcagtttttagagcaaggtagaatttaccttcattgtgctctgtgatttttatggttatagcatctgagtgcaatgaagatgagtgttttccccaaggctgctgaactaattaatgtcaaaagttgaatttgaacttatatctcctgatgactgtttctctaaaatacttccttccaagatttcactctttcaatataaaaaatacacgtatttttttcttctctgccctctcctttatctcgtcttaaccttttttgactaaaatgaagcaaaatgagggaataaataaagactttgtcttactttgtctattatatgattactgggatagattctttaataataattgagtaatacttggaataagtt

SEQ ID NO: 173277 - DNA, 575 bp, Homo sapiens
acatcggttttatatatctttgtaagagaaatgttcaatttctagttataaagataaaataagcattattaagcttttgaaaatgaaagaatagtattgattgtattaattagcatttattaagcacttaactggcacaatgcacaactccaaatactttatgtgggttaactcaaacatcacagaaaacctaaacaggtaggtcctttactcacttagcaagtrggggaaacgaattttcaaatcagttagtggttaaattgtgaataattaagagtgtccaccaaatgagagttgaacaactgacctatacatagaatgactctttgagggacgactgctgcattgttaataatttgaatatttaactcatgagctcatctaaaacatagctctgagaggtaaggactgaaaccccgaacagctagctcatcattgcatcgcgtgaggtccagtagggtacctggggtgacgtgcttgctgctcagctaatctctatttgtgagtgaatgaacaagtgtatacctgatattggtgcttttgttgctgggatatcagaggttagatatatagta

SEQ ID NO: 173278 - DNA, 602 bp, Homo sapiens
ttaaagaactaaaagtagaactaccatttaccatttgatccagcaatcccactgctgggtatctatccagaggaaaagaaatcattatacaaaaagatacttgcacacacatgtttatagcagcacaatttgcaattgcagaactataaagccagcctaaatgctcatcaatcaatgagactgattgatggcacaatcaatttattgtgccatcacaatggcacatgtagtatttcatggtatagtattccatggtattccatggatagtatttcatgaaatactactcagccataaaaaggaatgaaataatggcattckcagcaacctgggtggatttggagaccattattctaagtgaaataactcaagaatataaaaccaaacaccatatgtgctcactcataagtgggagctaagctatgaggatgcaaaggcataggaaggatacaatgcactttggggactcaaaggaaagtttgagagacaggtgagggataaaaaaacgacaaatagggtacagtgtacctgcccagatgatgggtgcaccaaaaatctcaggaatcactcactaaagaacttatccatttaaccaaacacca

SEQ ID NO: 173279 - DNA, 602 bp, Homo sapiens
ttaaagaactaaaagtagaactaccatttaccatttgatccagcaatcccactgctgggtatctatccagaggaaaagaaatcattatacaaaaagatacttgcacacacatgtttatagcagcacaatttgcaattgcagaactataaagccagcctaaatgctcatcaatcaatgagactgattgatggcacaatcaatttattgtgccatcacaatggcacatgtagtatttcatggtatagtattccatggtattccatggatagtatttcatgaaatactactcagccataaaaaggaatgaaataatggcattctcagcaacctgggtggatttggagaccattattctaagtgaaataactcaagaatataaaaccaaacaccatatgtgctcactcataagtgggagctaagctatgaggatgcaaaggcataggaaggatacaatgcactttggggactcaaaggaaagtttgagagacaggtgagggayaaaaaaacgacaaatagggtacagtgtacctgcccagatgatgggtgcaccaaaaatctcaggaatcactcactaaagaacttatccatttaaccaaacacca

SEQ ID NO: 173280 - DNA, 412 bp, Homo sapiens
gcttctctgttttcccacatgtattcataacacttattgctcagctggatgaagaaataagaaataaaactctgaaagctctgcttattttagaactctgacagctgcattatggaagggtaataactagtaatattatagagcagaggcatccaaggagttttcagtgcacaccatgtcatcagcaatatgtatgtatgcaggttgcttaactttttaaaagactggctatccctggagttgacaggtttcatgtttggtgtttgaacgttggtactgtgtgtgagggtctagtaatataactttttagtattcttccttaatatatttactayatcatgtgattatggtagaattgaacttaagcaacttgaacaatatgatgtaacaactgaacctaagattcagtcca

SEQ ID NO: 173281 - DNA, 569 bp, Homo sapiens
tgctctacaacatagtacctatagttaacaatatgatattgtgtactttaaaatatgttaagaagatagattccacattaagtattcctactgtgatgtgaatgcaaaagaaattgcagtttctgcattgctggaattttctgttttatattatatatattttatatttttttggttattttatgcatcattttcgtgggtatttctcactttatttttatctttgctgatgacttattacttgctgtttattttatgtttattttagagtatgaaaatgatgttagacaaraagcaaattcaagcaattttcttattcaagttcaaaatgagtcgtaaagcagccaagacaactcggagcatcaataacgcatttgacacaggaactgctaatgaacgtacagtgcagtggcgatttaagaacttttgcaaaggacagaagagccttgaagatgaggagcgtagtggctggtcatcggaagttgacaacaacaaattgagaacaatcatcgaaactgatcctcttacaactacatgagaagttgccaaagaactcagtgtcaaccatt

SEQ ID NO: 173282 - DNA, 569 bp, Homo sapiens
tgctctacaacatagtacctatagttaacaatatgatattgtgtactttaaaatatgttaagaagatagattccacattaagtattcctactgtgatgtgaatgcaaaagaaattgcagtttctgcattgctggaattttctgttttatattatatatattttatatttttttggttattttatgcatcattttcgtgggtatttctcactttatttttatctttgctgatgacttattacttgctgtttattttatgtttattttagagtatgaaaatgatgttagacaagaagcaaattcaagcaattttcttattcaagttcaaaatgrgtcgtaaagcagccaagacaactcggagcatcaataacgcatttgacacaggaactgctaatgaacgtacagtgcagtggcgatttaagaacttttgcaaaggacagaagagccttgaagatgaggagcgtagtggctggtcatcggaagttgacaacaacaaattgagaacaatcatcgaaactgatcctcttacaactacatgagaagttgccaaagaactcagtgtcaaccatt

SEQ ID NO: 173283 - DNA, 560 bp, Homo sapiens
ataataactgaagtttttagacactgatctgtagttccacctctatttctatattacaaaccatccttaatcccatccatctggccccatacaccacaatctactcacatggcatctgttataggttgaactatgtcccccagaaagatgtgctgaagttctaactcctggtacctgtgaatgtaattaaccttatttggaaagaagttctttgcagatgtgacttaagaagatgaggttatattggatcagggtaggattagggtccattgattggtgcccttataagaagaggaaatttggacacagaaataaaaaatacacagggagcaatttatgtggtaagtgacacagcgattagaatgataaatctgtaagccaaggaacatcaaagattgtaagcaaccactaaaagctagggaagaagcgtggaacaaactctygcatttctaagttgtactccagtagaactaacctgtgccagcctttcttcctctatttaactcattaaacacttactgatgactacttatgtgtcaagtagcagcctaaatattgtt

SEQ ID NO: 173284 - DNA, 503 bp, Homo sapiens
caattctaaagaatctcagtgatatagaagagaattatgaaaaccaatacaaagaaatcagaaaaacaattcaggataygaatgacaaatttatcaaagagatagatatcatacaaaagaaccaaacagaaattctgaaactgacaaattcattgaatatatcagaaaatacatttgaaagcttcaacactagattagatgaagaagaatctccgaactttaagaaaggtcttttgaaataaaccagtcagacaaataaagaaaaaagaagaaaagagaatgagcaaagccttcatgacacatgggacaccataaagggaccaaatattcaaataatcagggtctcagaagatgaagaaaggatgaaagggttagaaaaactatttaacataatattgcatgaaaacttcccaagtctagcaagataattagacatccagatacaggaggctctgagatatccttacagatacaatccacaaaatatcttctccatggcacat

SEQ ID NO: 173285 - DNA, 644 bp, Homo sapiens
tcaaactgtctaaagtcaaagacaaagaattcaaaaagcatcaaaagtgtctagtcacctacaagggaatctccactagactaaaattggtttctcagtagaaaccataccgggcaggaggaaatgcaatgatatattaaaagtttcaaaagaaaaactgccagccaatgatactatgtacagaaaaattatccttaataaattaagaaaaaataaagtcttttacaaagaagcaaaaacaagaaattcaacaccactagaccagctctataagaaatgctcaagggagtcctaaacctggaaggaaaaggacacatctgccattatgaaaacacacaaatgtataaaactcactggtaaagcacayatacaaaggaaaaagagaaagaactcaaatagcatcatgacagaaagctaccaaaccaaaatggaaaacaataaaagaaaaataaaggaacaaagaacatacagaacaaccaaaacacaattaacaatatgacaggaacaaaacctcatatattaatattaaccttgaatgtaaacagattaaattctttacttaaaagatatagactggctgaaaggttacaaaaacatgatccaactatatgctgcctataagaaacatactttacctataaaaa

SEQ ID NO: 173286 - DNA, 644 bp, Homo sapiens
tcaaactgtctaaagtcaaagacaaagaattcaaaaagcatcaaaagtgtctagtcacctacaagggaatctccactagactaaaattggtttctcagtagaaaccataccgggcaggaggaaatgcaatgatatattaaaagtttcaaaagaaaaactgccagccaatgatactatgtacagaaaaattatccttaataaattaagaaaaaataaagtcttttacaaagaagcaaaaacaagaaattcaacaccactagaccagctctataagaaatgctcaagggagtcctaaacctggaaggaaaaggacacatctgccattatgaaaacacacaaatgtataaaactcactggtaaagcacacatacaaaggaaaaagagaaagaastcaaatagcatcatgacagaaagctaccaaaccaaaatggaaaacaataaaagaaaaataaaggaacaaagaacatacagaacaaccaaaacacaattaacaatatgacaggaacaaaacctcatatattaatattaaccttgaatgtaaacagattaaattctttacttaaaagatatagactggctgaaaggttacaaaaacatgatccaactatatgctgcctataagaaacatactttacctataaaaa

SEQ ID NO: 173287 - DNA, 644 bp, Homo sapiens
tcaaactgtctaaagtcaaagacaaagaattcaaaaagcatcaaaagtgtctagtcacctacaagggaatctccactagactaaaattggtttctcagtagaaaccataccgggcaggaggaaatgcaatgatatattaaaagtttcaaaagaaaaactgccagccaatgatactatgtacagaaaaattatccttaataaattaagaaaaaataaagtcttttacaaagaagcaaaaacaagaaattcaacaccactagaccagctctataagaaatgctcaagggagtcctaaacctggaaggaaaaggacacatctgccattatgaaaacacacaaatgtataaaactcactggtaaagcacacatacaaaggaaaaagagaaagaactcaaatagyatcatgacagaaagctaccaaaccaaaatggaaaacaataaaagaaaaataaaggaacaaagaacatacagaacaaccaaaacacaattaacaatatgacaggaacaaaacctcatatattaatattaaccttgaatgtaaacagattaaattctttacttaaaagatatagactggctgaaaggttacaaaaacatgatccaactatatgctgcctataagaaacatactttacctataaaaa

SEQ ID NO: 173288 - DNA, 570 bp, Homo sapiens
caggtcacaaaacaagtctcaacaacttaaaaaatcaaaatcttattgagtatattctcagatcacatggaataaaattataaatcaataacaagagcaactttggaaactatacaagtacatggaaattaaacatgttcatgttcttaaataatcattgggtcaacatagaaattaagatgaaaatcaaaaaagttcttaaaacaattgaaaatgaaaatacaacataccaaaatctgtaagatacagcaaaagcagtactaagagggaattttatagcaataaacatcataaacaatctaaaaatgcaactcaagcaattagaaaagcaagaacaaacccatccccaaattaaccgaaatagagaaataataaagataagagtagaactaaacaaaataggtttaaagaacaatataagggtcaacaaaatgacatattggttcttcaraaagagaaaattgataaactaccacctaaaatagcaaagaagagagaacacctaaataaacaaaatcagaaaagaaagaggagacacgaccattgatacatgcattagtctgttttcat

SEQ ID NO: 173289 - DNA, 458 bp, Homo sapiens
taaaaccctatactcttgtatcatcttcttagtgaactccctccagttactctaccttatgcttaaattgtgaattctttaagagtctctatcagtttcatatggacataaatacaatttaattaatatgcaatgtttggcttttgcagcacaattccaaatgtaacagaatgtatgaagttatctcaatgattgatatagttagctcacatgttttkgagatggagttttggtaattttggtatgtatctctattcagacagctgttgacagatggaaatttggtttaagaactgttccagaacattcctccctttccaaaagatcatcaaatgcttttaataagcatattggagaagactagagagacagacatacaaaaatatccacaacaggtattttgataatagagagagaagggtaaaaagaaaaagaagaaaaaaagctctgacaagtga

SEQ ID NO: 173290 - DNA, 534 bp, Homo sapiens
aatataccattggtttgtaattgctccaaatcctttctcccacctccaaactttrtcaaggcatatcctcattcatccttatttagccaatgtttactgagcaccacatatgtgccaggaaacaaccaatgtattccagaattcactttactcagtcgtctacctcatatttgctaaattattctccttgttgccttcttgtaaccacccacattctgttataggacatttctgtatctactgaaattcagcactgtgctaggtagtataagagttacaaataggaagcaagcccagttcctgttactaagaatcttacagtttatatagagagatacataagtaagtgatagtgatcaattaaccaaaaacaaaaaggaagaaagaagaaaagaaagagaagcaaaaatagactgaacactattagaacagaggagatttcaccctagcctagaagtttacagagccccaaggaaacaaaaaaggaaacaaaaattttttaaagattttgtttgccctaaaattttgagaaag

SEQ ID NO: 173291 - DNA, 680 bp, Homo sapiens
tgaaggaagttctaatgtgggtaaaacgctaccaaacggtaccacatgctacaaataaatctttcctgaaaggaagagtcaattactgtggaaaacttcagtgtcttagttttaaaatttgccacagccgggccgggcgcggtggctcatgcctgtaatcccagcactttgcgaggcccagatgggcagatcacctaaggccaggagttcaagaccagcctgaccaacatggagaaactccgtctttactaaaaatacaaaaaacaaaaacaaaaacaaacaaacaaacaaacaaacaaaaacagttagccgggcatgttggcacatgcctgtaatcccagctactcaggaagctgaggcaggagaatcgcttgaacccaggaggcggaggttgcggtgagccaagatcatgccattgcactccarcccgggcagcaagagcgaaactcggtctcaaaataaataaataaataaaaataataaaataaaataaaatttaccatagccaccccatctttcagcaaccaccaccctgatcagtcagcagccaccaccctgatcagtcagcagccatcaacactgaggcaatatcttctgccagaaaaagatgattgactcactgaaggttcagatgatcattagcattttttagttataaagtattttttaattaaggtttt

SEQ ID NO: 173292 - DNA, 680 bp, Homo sapiens
tgaaggaagttctaatgtgggtaaaacgctaccaaacggtaccacatgctacaaataaatctttcctgaaaggaagagtcaattactgtggaaaacttcagtgtcttagttttaaaatttgccacagccgggccgggcgcggtggctcatgcctgtaatcccagcactttgcgaggcccagatgggcagatcacctaaggccaggagttcaagaccagcctgaccaacatggagaaactccgtctttactaaaaatacaaaaaacaaaaacaaaaacaaacaaacaaacaaacaaacaaaaacagttagccgggcatgttggcacatgcctgtaatcccagctactcaggaagctgaggcaggagaatcgcttgaacccaggaggcggaggttgcggtgagccaagatcatgccattgcactccaacccgggcarcaagagcgaaactcggtctcaaaataaataaataaataaaaataataaaataaaataaaatttaccatagccaccccatctttcagcaaccaccaccctgatcagtcagcagccaccaccctgatcagtcagcagccatcaacactgaggcaatatcttctgccagaaaaagatgattgactcactgaaggttcagatgatcattagcattttttagttataaagtattttttaattaaggtttt

SEQ ID NO: 173293 - DNA, 498 bp, Homo sapiens
caaaaccagaaagaagcgtattattgtaatctaatctattaagcacctggtatgtattaggtggtgttctaatgttttatgcatacatattttagtccttttaagaaaccctataggtattgttattttatgtacagtttggaggtttaataacttgcctaaaatcatacaaatgatgacagagccaggacacaaatcactggtgtctggctccagagctcatgctattaaccctgtgtgatcttggtcttcataacctctaaaaaaaagaagaagaaaataaggaagagagggagggagcaaaggaaggagacaaagagtttaacctatagttcaaggggcagaagggaattaattgctcatgatttatgctgtaggaaaacttaaaataaattcaattaaaaagtgctgaaatacaaaaaataaagktagaaaatggggtgaaaagaaagattgaagcccagggaacccaataaagggcctaaataataccattac

SEQ ID NO: 173294 - DNA, 596 bp, Homo sapiens
atgggggtgggtctttcctgtgctgttcttgtgatagtggagaagtctcacgagatccgatggttttaaaaactaagtttccttgtacaagctctctcttctcttgtctggcactatgtaagatgtgcctttcaccttctgccatgattgtgaggttttcccagccatgtggaactgtaagtccaataaacctatttcttttgtaaattgcccagtcttgggtatgtctctttttcaccagtgtgaaaatgactaatacagtttccatctgacggtactaatacagtttccatctgctgttgtcatagtgtagcaaagacaaagtcagaagacctggatttgatccaggatccaccactgaatagcttggttaccttggtaagtccacttaactaagccttaatttcctcatccacaacatgagaaaaataagtcttcatgatttttttttgtgtgacatcaaacacaatgtatgtagtatataytatggaagatatagtaggtactcaattaatcactaaatattattactattattactttcaccattattaactacttttccactattcaaggtatttttttttcttgaattc

SEQ ID NO: 173295 - DNA, 467 bp, Homo sapiens
gcccacatcactactcttgtgctttgggggcattattaagtaaaataagggttatttgatcacaagcactgcaatactgcaacagttgatctggtcactgagatggctcctatgtgactaaagggtgggtagtgtatacagcatggatacctggactaagggattattcsggtcctgggcaggatagtgagagattttatcatgcttcacaaaatggcacataatttaaaacatataaattgtttatttctgaaattttccatttaatatttttagaccatgattgatatgcaaaatcatggacaaattgaggaccactgtgctgtataattataaaaattagtgttataagcacaatgtgacaatttgaaaaaaaaagtttatgatgtaaaagaatgaagtaaaagatgtaaaattttacaaatacttataaatttaacagcttaaataatgatcttataaaacat

SEQ ID NO: 173296 - DNA, 608 bp, Homo sapiens
tgcacacacacgagcatatgcacgcatgtacatacacatacacacctacaaaaacagagcatatttttcatctgcctcacacccacgattagcatttgtcctagagatcaaatatagtgtccttttttatcttcccacaattgtctaactgagccattcctagcagagtaaacactatttgcttagtaagtatttgttgaattaaagattattgcacatgactgttagagtaggccactggccaaaggaagggactcaatatgcagcattttttttttttaagggacagggtcttactgtcaccgaggttgtagcagagtggtgcaatcacagctcactgtaacctcgarctcctaggctcaagtgattctcccaccttggcctccccagtagctaggactataggcctgtgccagcatgcctgcctatttaaaacattttttcatagagatgaggtcttgctatgtgcccaggctattcttgaactcctagctcaagcaattttcctgtctcagcctcccagagtgtgggatcacaggcatgagctatcatgaccaccctcatatgcagctttttagcctctgcagactctgcatccttgcctcact

SEQ ID NO: 173297 - DNA, 491 bp, Homo sapiens
taccgatcctgactggcccagtayagccgatggaagtcagaggtgctgttaagtgaactactggaatgaggacacagggaataacagaactagatggaagagattttttagaaagactagcaatagagccaaaccttctgtctattatatctaaccaatccggaatagattcaacagatgagagaagttttaggacaatacattccaatcacagcttagatagacaccaggcaacaaaactgctagagttgtaataaaagccaggcacagtgaaaagtaatggtcaaaatatcaaagagccaacgggctccacagaatcttgaggtcagcccagaataactccgtgcagcagggtggtatacagaatatagaatttggagcaaagtcaccccattatcttcccttttgtctccttaagaaatattctataaaatctatgtgatttgcctaaaatctggaattgggttttttagatggtgaagtagaggagg

SEQ ID NO: 173298 - DNA, 491 bp, Homo sapiens
taccgatcctgactggcccagtatagccgatggaagtcagaggtgctgttaagtgaactactggaatraggacacagggaataacagaactagatggaagagattttttagaaagactagcaatagagccaaaccttctgtctattatatctaaccaatccggaatagattcaacagatgagagaagttttaggacaatacattccaatcacagcttagatagacaccaggcaacaaaactgctagagttgtaataaaagccaggcacagtgaaaagtaatggtcaaaatatcaaagagccaacgggctccacagaatcttgaggtcagcccagaataactccgtgcagcagggtggtatacagaatatagaatttggagcaaagtcaccccattatcttcccttttgtctccttaagaaatattctataaaatctatgtgatttgcctaaaatctggaattgggttttttagatggtgaagtagaggagg

SEQ ID NO: 173299 - DNA, 481 bp, Homo sapiens
tggcccagtatagccgatggaagtcagaggtgctgttaagtgaactactggaatgaggacacagggaataacagaactagatggaagagattttttagaaagactagcaatagagccaaaccttctgtctattatatctaaccaatccggaatagattcaacagatgagagaagttttaggacaatacattccaatcacagcttagatagacaccaggcaacaaaactgctagagttgtaataaaagccaggcacagtgaaaagtaatggtcaaaatatcaaagagccaacgggctccacagaatcttgaggtcagcccagaataactccgtgcagcaggrtggtatacagaatatagaatttggagcaaagtcaccccattatcttcccttttgtctccttaagaaatattctataaaatctatgtgatttgcctaaaatctggaattgggttttttagatggtgaagtagaggagggaa

SEQ ID NO: 173300 - DNA, 597 bp, Homo sapiens
ggttccaaatctgtacaacagatataatggcatctctccgtccattttgtataaagtcataggaattaaaatgagaaacaggaaagtatctgtgcagtactagatagctgtgacagtttactagtactattataaattcagascaaggcttcacaaaattggctttgaaatatttgactatcacatttatttcagctatttcgttttgccttcatctcttatctcaaggtggaaaatgagactttagaaaaagattaaagcaaaacaaaaaataaaatctcaggctccaatggatcagttgataacattcccattaggaaggagtatacatgagaaaggactcacattgttctacttcaaggtcaatccaatttttttaaagaaaacctaggatgggggtggatatttaaatgtttacatgcagtgagacaccctcacaaccacagctaagttctttcagcaaatgcttattaaggcagccacatggggtctatgtaatggccagaatgacaggcattaaggactgactccccacccagcactccatggaagttgattgctttctggaacaggttgtgtttctgggaggaggcaacc

SEQ ID NO: 173301 - DNA, 587 bp, Homo sapiens
ttatttgttaggtttattagagtcgttttctcccttttctgtctttgacattgaccttatatgccctgcatgaagtggctcacagactatcagggctgattttgctacattcttccagtttgaaaaactctgaaagttaaaactctttcatattctaaggtaagtctgatctcaatttactgccagcttgaaaacatacatattttggaggtaagttgtttcagaatcatcattaagaaaagcaatagctaatgcaatgggcaggaaataaaattgttcaacacatttctctcaagagaaacaygtaagtctgagagaacttgaacaatttgcttgagaccatagtactaattaatggccagttctgaagacgttccaagtttccagtctcacaaatggactctcaacatttcagaatgagcaagcttactactgttgacacaactatcccttacatttacataacaaagtaaattgcttctaaatctagtcttcaaagacagaaacttagttaagattcgtgttgacctattaagaagaggagaacatatgaggcttatgcaacagtggaaatttgaggaccccag

SEQ ID NO: 173302 - DNA, 587 bp, Homo sapiens
ttatttgttaggtttattagagtcgttttctcccttttctgtctttgacattgaccttatatgccctgcatgaagtggctcacagactatcagggctgattttgctacattcttccagtttgaaaaactctgaaagttaaaactctttcatattctaaggtaagtctgatctcaatttactgccagcttgaaaacatacatattttggaggtaagttgtttcagaatcatcattaagaaaagcaatagctaatgcaatgggcaggaaataaaattgttcaacacatttctctcaagagaaacatgtaagtctgagagaacttgaacaatttgcttgagaccatagtactaattaatggccagttmtgaagacgttccaagtttccagtctcacaaatggactctcaacatttcagaatgagcaagcttactactgttgacacaactatcccttacatttacataacaaagtaaattgcttctaaatctagtcttcaaagacagaaacttagttaagattcgtgttgacctattaagaagaggagaacatatgaggcttatgcaacagtggaaatttgaggaccccag

SEQ ID NO: 173303 - DNA, 557 bp, Homo sapiens
taacatcccattcattattcagataatttctacatattcgcaatgtcttcaatttgattttcttattgatacttggatgaaatcaggcaattttgtagatttaccaaaaataataacaatttcagtcatcacaactaatactcattcagaaacttgcattgtttctactcacatttcctaaagtatttcatggctttactctaggatatttattttcaaataaaaataagatatgctcacacatagcacatcctgagtatattccactaaacactagttttaggtgttttgttaagtattrctctaagaagaaggctccatgataaaacagatttgttaatcaaaatcaaatcacttacttgatggcaggacttcacagaatttttaatatgctaaaattcattgagaatcttcaagagaattgggatacaagttgcagaatttagcaaacgtatttggtcacagagtctattcacgtgacacagaaaagagaacaatattttaaagcatacttttggaaataccaatctaatataatgctactatggtacagaggc

SEQ ID NO: 173304 - DNA, 480 bp, Homo sapiens
atatgccacataatcaaactgaaactttaaggaagcaaatcattccaaaacagaccagctttttctgagtcagatcaacttctaccttagtcagcatagttagaaagttcctcctgcattaacccttacaaaaagtcactggaagtatcctgatgttagacagcttttttcctattgttctgttttcttgtttcttacaaaatccaccattctgccattgttcaatggagctctcattctgttttgtagaatgaaagmtgccctgatttatgaattgcaaataaaagccagttaagtctataattaaatttgttgtaattttgacttttgacactgataaaagtgcaatagtcagcaaaaagggagaaaaatcaataattcaaaaaataggaccaaaaaacagtgtatcattaatgctgagagtaagataaaatatgctgaagcaagggggatgtaaaaaggagaaatttccccatttgc

SEQ ID NO: 173305 - DNA, 632 bp, Homo sapiens
tgggctttggtagaaacagaatgtttgactatgggtcatgaagtcaccacgtgacctgagctgactatcatgaactgggtgctttctggcccatctagccataaactggggtgtgcacagcagcattccatcatcaaatggaagtgatatattcatgattgttcgagcaggttctaacgcacaagtaagttacgaaaagaagtggctcaaatgcttatggtcttcactcctgacatcctgccttctctcacccagcctgcaccrattccctgtggtcaattgacagaggaagagaagactagggactggtttacagatggttctgcatgatatgcaggcaccttccaaaagtggacagtggacagctacagcactaaagcccctttctaggacatctctgaaggacaacggcgaagggaaatcctcccagtggacagaactttgagcagcacaattggttgtacactttgcttggaagatgagaaggccagatatgcaattatgtactgacttatgggctatagccaatgatttggctgtatggtcagggacttggaagaagcataactggaaaattattgacaaagaaatttggggaagaggtatgtggatgggcctctctgagttgtcaa

SEQ ID NO: 173306 - DNA, 587 bp, Homo sapiens
aataatgcaagtctcacagttgttgttttctcctttcccattgtatatataagttatgtctacaccatactctagtcaattcagtgtgcaataacattacattctsaactgaagtcttgaatccttcaaagtcatccatgagagttggaatcaatttcttccacacacctgttagtgttgctattttaacctccttccatgaaatacaaatatccttaatgacatctagattagtgattcctctccagaaggttttcaatttactttgcccagattcatcagaaaaattactagctatagcagctataatcttacaaaatgaatttcttaaacaataagacctcaatatttaaatcactccttgatccatgagctgcagaatacatgggttagtaggcaggaaaataagactaatctcttcagtgctctagagtgacaaggtgcattgttattgagcagtaatatgttgaaaggaatctttttatctgagcagtaggtctcaacagtgggcataaaatattcagtaaaccatactgtaaacaaatgtgctctagaccaggctttgttgtttcattaatagagcacag

SEQ ID NO: 173307 - DNA, 587 bp, Homo sapiens
aataatgcaagtctcacagttgttgttttctcctttcccattgtatatataagttatgtctacaccatactctagtcaattcagtgtgcaataacattacattctgmactgaagtcttgaatccttcaaagtcatccatgagagttggaatcaatttcttccacacacctgttagtgttgctattttaacctccttccatgaaatacaaatatccttaatgacatctagattagtgattcctctccagaaggttttcaatttactttgcccagattcatcagaaaaattactagctatagcagctataatcttacaaaatgaatttcttaaacaataagacctcaatatttaaatcactccttgatccatgagctgcagaatacatgggttagtaggcaggaaaataagactaatctcttcagtgctctagagtgacaaggtgcattgttattgagcagtaatatgttgaaaggaatctttttatctgagcagtaggtctcaacagtgggcataaaatattcagtaaaccatactgtaaacaaatgtgctctagaccaggctttgttgtttcattaatagagcacag

SEQ ID NO: 173308 - DNA, 437 bp, Homo sapiens
attaatagagcacagggagagtatatttagcataattcttcagggtcctaagaggtttgaaatgccaaatgataattggctttaacttaaagtcacctgcgttagcccctaacaagaaagttagcctgttgtttgaagctttgaagccaggcattgacttttcctctctagctttgaaagtcctagatggcatcttctttctaaagaaagctattttatctacactaaaagtctgttgttcagtatggccaccttcatctattatcttacctagatcttctggataactatgttaggacttgctgcttcacatagactttcatktaacggaaatggcttcttttttaaacctcgtgaatcaacttctgttagctttcaatttttcttctgcagttacttgacctctctcaggtttctaagaattgaagagagttaga

SEQ ID NO: 173309 - DNA, 437 bp, Homo sapiens
attaatagagcacagggagagtatatttagcataattcttcagggtcctaagaggtttgaaatgccaaatgataattggctttaacttaaagtcacctgcgttagcccctaacaagaaagttagcctgttgtttgaagctttgaagccaggcattgacttttcctctctagctttgaaagtcctagatggcatcttctttctaaagaaagctattttatctacactaaaagtctgttgttcagtatggccaccttcatctattatcttacctagatcttctggataactatgttaggacttgctgcttcacatagactttcatgtaacggaaatggcttcttttttaaacctcrtgaatcaacttctgttagctttcaatttttcttctgcagttacttgacctctctcaggtttctaagaattgaagagagttaga

SEQ ID NO: 173310 - DNA, 437 bp, Homo sapiens
attaatagagcacagggagagtatatttagcataattcttcagggtcctaagaggtttgaaatgccaaatgataattggctttaacttaaagtcacctgcgttagcccctaacaagaaagttagcctgttgtttgaagctttgaagccaggcattgacttttcctctctagctttgaaagtcctagatggcatcttctttctaaagaaagctattttatctacactaaaagtctgttgttcagtatggccaccttcatctattatcttacctagatcttctggataactatgttaggacttgctgcttcacatagactttcatgtaacggaaatggcttcttttttaaacctcgtgaatcaacytctgttagctttcaatttttcttctgcagttacttgacctctctcaggtttctaagaattgaagagagttaga

SEQ ID NO: 173311 - DNA, 397 bp, Homo sapiens
aaaaaaaaaaaaaaaaagaatggactttcccaggccagctgtggtggctcacgactgtaatcccagcactgtggcaggccaaggcgggcagatcacctgagatcaggagttcaagaccagcctgaccaacacggagaaaccccgtctctactaaaaataaaaaaaattagctgggcgtggtggtgcatgcctgtaatcccagctacttgggaggctgaggcaggagaattgcttgaacccaggaggcagaggttgttgtgagctgagattgcacyattgcactccagcctgggcaacaagagggaaactccatcaaaaaaaaaaaaaaaaaggactttctcaaagaaaatgtatttaaatgtctgcaccaataattccagcatgtgtatgaataaat

SEQ ID NO: 173312 - DNA, 580 bp, Homo sapiens
gcaaatcattctagtagaatgaatgcccatcaagtattatattctgttcttcagtcaaaaggtaaacaaaggctgggcatggkggtgcatgtctgtaaatccaacaatttgggaagcagcggcaggtggattgcttgaacccaggagtttgagactagcctgggcaacatagcaagaccccatctctaaaaaaaatacaaaaatgagtcaggcatgatggtgctcacctgtagtctcaggtaatcaggaggctgaagtgggaggatcacctgagcccggggaggttgaggctgcagtgagcaccactgcactccagtccaggtgacagagcgagactctgtctcaaaaagaaaaaaaaaaggcaaacaaaatatggtgctcagcagaaaggcccatggtggcagcatctttgtgtgtgcatgtaggtaggtgggtgcaatattttgaaaagataaatgctatccctagcagaataacaggggattttaccagaatcagaataaatagaatactgcacaatgctgaccagcaacaaaaactttcagatattacattcacctttggaaactttaagttttta

SEQ ID NO: 173313 - DNA, 537 bp, Homo sapiens
gggggaaataaaaaaaacagctataattacatactgccttttattctctcttacggtagtcactctgcaggcattgtttgctactctaattctcatctcatcttggttagtcgtcattattgactgagcacagtgctgtgctgtgtgatgtatctctgccgcaaaaatcattcttcttcgttaaatcctctrcacttgcagctgtctgctgagcttcactctccaccaagatgcagacgctgcattttctttgattgcgtttgtggcacattcatgaatgcttcttgggaaaaaaaaatcattccaaaccaataaatcaaatcaataaataagtcaataaatcccttttgctttacaaacatcatcaatctttagcagaatgagtcactagttcttgtccctactttttggactctttgaaactatttcatctactattagatgctctttgggtctggtgttaatacttgcattagctaatacacttgaccttacacaagacccaaagacatttgaccttagaagtcaatttcaatg

SEQ ID NO: 173314 - DNA, 602 bp, Homo sapiens
atctataatttacaaaaaatagttatctgaattttatttatgtttatggaaagtagacatcctttcttttctgttcttcaattagcacattgtgaaattattcatgtaggcaagattcagttaaatttgtcactaacttggttaagaatagtatgtaaatttttwaaaaaatttttaaaaatgtgtgtttaaatacaaagcttataattgtaatgtgggaggaacttctttgaatgacaaaagattgtaatatggaatattatcagtttaagaaacagattggaggaagatcaaaaatagatctaacttaaaactacagtagaaaacagaagaaataaggagagtagtgttaaaaaaattatttaatgttgctaacaagcatggtaaggaagactttacacaggatcatcataagggtaggaccactgcctggcgggttgtgggtgtcggggagagacagactgggctcaacactgaatacagcatgggcagttaggaacttataaccaaagagtacagtggggtggaggtcagtggatcagggtaagggggattctggctaaatgattcaaacaggattctttctaagactagccagggtg

SEQ ID NO: 173315 - DNA, 593 bp, Homo sapiens
tttaattgtcctttattttcatcatttaatttctaaacttattgtaaaaaggattgtattgttatctgttattgctttcaaagttcttttgtagcctgtcagcggcattgtttttatgtaaagttgcaaaatgggaatttaagcattaaattttcttctcccaatgccacattgaaaagttatagattgagtaataattaaaatatgaggatttttatctcatgtattayttttattccagatctttgctgagttacatgaatctaatttttggtgcttatttttagtggctgaacagaataagatttacttatcatggaaactaattcacttacctcaaagtgattttcagagatctagtaccttgtaatctttctccgcaatagtgcttagctatattcttgaaaaagaaataaaaaagaaaaaagaaaacaaggtctattgttcatttgaaggaaattttgttcgagtttatttatatggtaatttaatgccatgagatgtatttccaacttcttttataaaaatagtaaaaaaaaatcctttgaatatcataaaagcaatacagaaggatataatctgaaaagaccctt

SEQ ID NO: 173316 - DNA, 453 bp, Homo sapiens
atcggacctataagagacaccaaagatccaactccctttataaccacctacattgactttcacctacaaggtacactgagcattgaaagactttttcagtgtacagattttagccaatatctttgtgtcttaaatattatggtgaaatatacaaccattgcacttcatagaaaaaaaatgcggctgaggagtgaattgaccattgatctccataaaaacacttttaggctgtttgrgcattaagtgctcttagaagcttattgaacttttgagctataacttcagattttctactaactctttattgccatgatttctacgagggagatgagtgtttcaaattatgagtggaaaaataaaaaccattaaccttttcaggttaattgtgttacttttttcactactgtaaactatataactggaactaatgttgtataaacgtgccaaggatgg

SEQ ID NO: 173317 - DNA, 443 bp, Homo sapiens
aaaagtgtgagcttaaaatagaagactgccatattaaatattttgttgacattagtctcartgaagactatgaatatactggctgtagttgtcttttcccatttatctaaatatggactgctcaggaagctgggactctccattataagtatttttaattaattggggcagctttaaaatgaagatactgcatttgaaatagagtatattttcctatattatggtttgcccccttataaatcaaataggagaaaagaagacaaactttgcatctcagtattaattactcaatgtatttgaataattttttttacaaaacccaaacttattcattagtcatgtttatctactttgcagtttagaaaacaatttggcaattttgtgttttttgagattattgttttcttaaagtgtccgtattttaaaatagcgttcttgtaatt

SEQ ID NO: 173318 - DNA, 414 bp, Homo sapiens
gaattcctagggagttcccttgcaattaaaaaaaaaaaaatctagcttatttatattcgaccactccctagacccatctacagtctctcaagtccccacctagaacagcacgcagccgattcaggacccagtaagcarcacttccgcgcctaccctatcccttcctggagcacatccgggactcggcgaggcgtggtctcgggaggcggagtctgacgcaagccggcccagcccacctggctaaattcacagtcgcgctcgctccttccgcccgccagaggtcgcaggctgcgagagcaggttcctggtttggcaagcactcgccccctcaggcccgttcattctcgcgagagaaagcgcgaggcctgccgggagtgagcgcggccgtacttaggtttgctcaaaatggcagcg

SEQ ID NO: 173319 - DNA, 191 bp, Homo sapiens
gcatggaagggccttttcctgtgtcctgcttgaagcatgraggtcttgctggtggtattctggtggctgagtggtggaagaaagcttcatttattgtgcacacagcatttactacttgtattgtcacttaaatcctcagttttttgtacagtacctttgttcacaactgagcgtggtttctgccagtccag

SEQ ID NO: 173320 - DNA, 191 bp, Homo sapiens
gcatggaagggccttttcctgtgtcctgcttgaagcatgaaggtcttgctggtggtattctggtggctgagtggtggaagaaagcttcatttattgtgcacacagcatttactacttgtatygtcacttaaatcctcagttttttgtacagtacctttgttcacaactgagcgtggtttctgccagtccag

SEQ ID NO: 173321 - DNA, 191 bp, Homo sapiens
gcatggaagggccttttcctgtgtcctgcttgaagcatgaaggtcttgctggtggtattctggtggctgagtggtggaagaaagcttcatttattgtgcacacagcatttactacttgtattgtcacttaaatcctcagttttytgtacagtacctttgttcacaactgagcgtggtttctgccagtccag

SEQ ID NO: 173322 - DNA, 191 bp, Homo sapiens
gcatggaagggccttttcctgtgtcctgcttgaagcatgaaggtcttgctggtggtattctggtggctgagtggtggaagaaagcttcatttattgtgcacacagcatttactacttgtattgtcacttaaatcctcagttttttgtacagtacctttsttcacaactgagcgtggtttctgccagtccag

SEQ ID NO: 173323 - DNA, 514 bp, Homo sapiens
gaaaaagcatgatcagtgaagaaaattggacttgtctcaactctgtacaatcacaactaataacacttttacctcaaatgtttttactagggttgcrcacagtttctgccacagaattgccctgagctctgttttgtctgtttcaacattcttttccaaacctctgtaccctcacatagcctatgctgtctgcctagaatactattctcttccatgattactctaccccttttggcccagaaagtttctacacatattttaatcctcaaatatcactgtcctaagtttcctaggcagacttaggctcttggaatctcaagataatttacttattacatctgcagtatgttcacatcactattttttgtttgtttgtttgttttctggaatatttaaaagcaaatttcagatatcacattattttaactttagatacatcagtatgaatgttaaacagataaggactttaaaaagtagaacaacaataccattatcacacaaaattaacaataac

SEQ ID NO: 173324 - DNA, 687 bp, Homo sapiens
cgtggagaaaaggaaaggcttatatactgttcttgggaatgaaaattagtacagcctgtatggaaagtagtatggagagttctcaaagaactaaaaatagaactaccattcaacccagcaatctcactactgggcatctacccaaaagaaaacaagtcaatatatcaaaaagatagctgccctcatatatttattgaaacactatgcaaaatagcaaagatacggaatgaacctgtgtccatcaacagatgaatggataaagagaatgtggtatatatacacaatggaatactatgcagccataaaaatgaaatcatgtcatttgcagcaacattgatgaaattggatttcattagcataagtgaaacaagacagacatagaaagacaaatactgcatattctcactcataattgggtgctaaaaatttgttcacattgttgtaaagagtggaatgatagataatggagacttggaagagtctggaggtgagaagggggaggatgatgaagagttggttaatggmtataatgtatgttatttcggtgatggataccctaaaagtgctgacttgaccactacacaatctatgcacataacaaacttgcacatataccccatatatttgtacaaataaaaaggaaaagaaaaatgagtgttgtttcagcgtcactgatcattagagaaa

SEQ ID NO: 173325 - DNA, 558 bp, Homo sapiens
acattaggtttaggttgaatggaacacagtcagctcaaaaatctccaccacatcttgggttgtggtaaagcatgtcttggtggtctgattgtgttgggaagttgttatggagttgcaaataggaatcagggttattgtttgcagtgacagaaaggtcctagaatcagggggttgaatatgaagctgccataagttggtgggggttcacctgtccccatccatggcactttagttgggcatcagttttttcagcttyaactctgcgcctatttccccattccgtagccatggcccatccaactagagaccattcctgcttacttttcccccataagtaatgttccccattgggatcatcagtaaaaatcatccaagacatggaaatgggcaagagagattgatgcatgtcctatcggggaggcctgggttttgtcacaagtacactaggggaattgtctgattgtaaacaggtgtgctcctttggttgccttttcatcaactttctgtggaagtacaagttaacctgtaatgcatatgagcactgtccatagcaatgca

SEQ ID NO: 173326 - DNA, 558 bp, Homo sapiens
acattaggtttaggttgaatggaacacagtcagctcaaaaatctccaccacatcttgggttgtggtaaagcatgtcttggtggtctgattgtgttgggaagttgttatggagttgcaaataggaatcagggttattgtttgcagtgacagaaaggtcctagaatcagggggttgaatatgaagctgccataagttggtgggggttcacctgtccccatccatggcactttagttgggcatcagttttttcagcttcaactctgcgcctatttccccattccrtagccatggcccatccaactagagaccattcctgcttacttttcccccataagtaatgttccccattgggatcatcagtaaaaatcatccaagacatggaaatgggcaagagagattgatgcatgtcctatcggggaggcctgggttttgtcacaagtacactaggggaattgtctgattgtaaacaggtgtgctcctttggttgccttttcatcaactttctgtggaagtacaagttaacctgtaatgcatatgagcactgtccatagcaatgca

SEQ ID NO: 173327 - DNA, 594 bp, Homo sapiens
gccataggtgcaaaaagaattgaagggctaatttttccatattggctgtaatgattagtacactcacaaaattgcacatgcagggaatgcttctactcagccctgaatttgtgtttcaaatgaggtaattgtgcacctaatgatccgtttgcacaagcaattacctgattggcatatgccaggtgagcttgtgagagataataggacaaatgtacttttttttggctttgcatccatgatatcctagtttgaaaaacaaaataattatagtcatattacatttgtgacatttttattggaatcatgggtccatgtgtgaatgggatgctcatgctgatgaatgaaagatcattagcccaagatgaaaataaactctgaccaccctaccaaagatacttgttattttatatttattgttaaaactacaacatagataagtttatggggggtgtctcagaatttctaatcagaaaacttggcttaaaatcgcatgtagctactatgtcaattccagatagccaagcttaggcaagtcacctaaaaatgccaaaccatsgttcttcaaaatggagagaataattttgtttatatgga

SEQ ID NO: 173328 - DNA, 616 bp, Homo sapiens
aaaaaaatgagcaagaatatgtgtgtgtgtgtgtgtgtgtatgtgtttgtgtatgactggaatttaaatttgggaaacatcttggagagtaatttggcaatttatagtatattaaagatatgcatagtatcaaatactctataaaggttaaaattaactagatttacatattttaaggctaatagattttaaaataatgtgtaaaaaatcaatgcagaagcataacaatagaaattctacttagttgtttttamagcatgcaaaatagtactatatattatttatgaatgcatttttaaaaatagcctgaaatgatgcatacctggaatactacattctaatttcagaaaaatatttaattctcaaagggaaagagataatgtgactggtgatgataaaagaatttcaatgtcatttaaatatttattctttaaaggaaaaaagttgtcaatgaaatcaaacaaaatattactgtttgcaattgtttctgtaacaagcacatggatgtttgttaaattaatgcttgaattttcttttatgctttaaatatttttgataataaaaataccttggttaactgtacaaggtgcatctttttctatgcattcaccaccag

SEQ ID NO: 173329 - DNA, 531 bp, Homo sapiens
gtttgaaaacacgcagcatttcccacttcactctcactttactgctggccatgtgaagatgtgcctacttccccttcaccttccgccatgaatgtaagttttctgaggcctccccagaagcagaagcctatacagcccacagaactgtgagctgattaaacctcttttcttcataaattaaccagtctcagatatgtctttataacagtgtgagaatggactaatamaatcttcaagggccactatgacataactatgacaatcgcattatttactcaatggtatttttttaaaaaactaattgtgcctcagacaaagcaatatgttgagttcttgtcaatcacatgctgtaggctgcttttttctttgtaactcagaatgtgtgtcctttccagctcttttatgctttacatttttttcagaacagaaactgtagtaccatagctctgaggtcaacagtaagtacactggttcaggtctccctgagaattttcaataaagatagcacaaaagatttgaaggagataatag

SEQ ID NO: 173330 - DNA, 541 bp, Homo sapiens
atctggtgttttcatttaatgttccacagattcctacaggttctagagaacgtcctcatgagcatccaggggagaggtgagctgccttagacagagaacactttgggatcccacctctgcttcaactagagtatttaattttcatcttatgcctttgttcctttggaaaaataattttggagctaaagaaaacctagacctaaacttaaactgactcatttattgatggcaatattaagattcagaaagcattatgttaagagtctgtagcagaaaaatcaaaattcrtatcccagcgctactgctttcaggtgtcttagtttgggctgctataacaaaataccataaactgcatcgcttataaaacaacagacgtttatttctcacagttctggaggatataggaagttcgagatcaaggcaccagcaggttcagtgtctggaggagggcctgctctctgacttacagatggtgccttcttgctgtgtcctcacatggtagagggggcaaggaagctctctgtgacctctgttacagtga

SEQ ID NO: 173331 - DNA, 541 bp, Homo sapiens
atctggtgttttcatttaatgttccacagattcctacaggttctagagaacgtcctcatgagcatccaggggagaggtgagctgccttagacagagaacactttgggatcccacctctgcttcaactagagtatttaattttcatcttatgcctttgttcctttggaaaaataattttggagctaaagaaaacctagacctaaacttaaactgactcatttattgatggcaatattaagattcagaaagcattatgttaagagtctgtagcagaaaaatcaaaattcgtatcccagcgctactgctttcaggtgtcttagtttgggctgctataacaaaataccataaactgcatsgcttataaaacaacagacgtttatttctcacagttctggaggatataggaagttcgagatcaaggcaccagcaggttcagtgtctggaggagggcctgctctctgacttacagatggtgccttcttgctgtgtcctcacatggtagagggggcaaggaagctctctgtgacctctgttacagtga

SEQ ID NO: 173332 - DNA, 541 bp, Homo sapiens
atctggtgttttcatttaatgttccacagattcctacaggttctagagaacgtcctcatgagcatccaggggagaggtgagctgccttagacagagaacactttgggatcccacctctgcttcaactagagtatttaattttcatcttatgcctttgttcctttggaaaaataattttggagctaaagaaaacctagacctaaacttaaactgactcatttattgatggcaatattaagattcagaaagcattatgttaagagtctgtagcagaaaaatcaaaattcgtatcccagcgctactgctttcaggtgtcttagtttgggctgctataacaaaataccataaactgcatcgcttataaaacaacagacgtttatttctcacagttctggaggatataggaagttcgagatcaaggcaccagcaggttcagtgtctggaggagggcctgctctctgacttacagatggtgccttcttgctgtgtcctcrcatggtagagggggcaaggaagctctctgtgacctctgttacagtga

SEQ ID NO: 173333 - DNA, 618 bp, Homo sapiens
gtttggttcatgagtggtggaagtgggagttgttgaccaattactcatcttaaactttcagttataagatgagtaagttctggagattacagttaagtattgtacagttgaaatctgcgaagagggtaggtattaagtagtctctccaacccgcatcaaatggtaactacataaagtgatgtatatgttaattagctttattgcagtaataatttcacaatcatgcatatatatcaaacattatgttgtatgmcttaatatttataatttttatttctatattatacctcaataaagctggtaggacaacaaacaaacaaaacgaacaaacaaaacaccacaaatactgatccaaaatcaagtgcgtgactgagcactgtccctgaagcttcagcagctgacaaaatagacaaagcgcctttacctctagcatcaaacgttctggtagtgtaagagaaaatgaataatataatagtagacagccaagcagtctgaggaaaaagaaatcagcgtaaaatgataaaggagtggcaaacttgatttcatgaaataaaaattaattccagatggattagccaattaaattttacaaatgaaaagctgtaaaaaaatctgtaa

SEQ ID NO: 173334 - DNA, 618 bp, Homo sapiens
gtttggttcatgagtggtggaagtgggagttgttgaccaattactcatcttaaactttcagttataagatgagtaagttctggagattacagttaagtattgtacagttgaaatctgcgaagagggtaggtattaagtagtctctccaacccgcatcaaatggtaactacataaagtgatgtatatgttaattagctttattgcagtaataatttcacaatcatgcatatatatcaaacattatgttgtatgccttaatatttataatttttatttctatattatacctcaataaagctggtaggacaacaaacaaacaaaacgaacaaacaaaacaccacaaatactgatccaaaatcaagtgcgtgactgagcactgtccctgaagcttcagcagytgacaaaatagacaaagcgcctttacctctagcatcaaacgttctggtagtgtaagagaaaatgaataatataatagtagacagccaagcagtctgaggaaaaagaaatcagcgtaaaatgataaaggagtggcaaacttgatttcatgaaataaaaattaattccagatggattagccaattaaattttacaaatgaaaagctgtaaaaaaatctgtaa

SEQ ID NO: 173335 - DNA, 538 bp, Homo sapiens
gtcagagggaggctttctgctacaacctgacctctggctagaagtctcagagaaggccaaggttactgatttggatattatttgtttagaaacccttccattactattttaactattgaaattgtaattatgattgccttataatagggaaattaagatttcagttacggaatctttttcaatcagggaaaattaatggtgaggaataaactggtctaccaygagcaaacctttcaagctaaggactttgggttgaactttcctttcatcactgctattctatctcccatcatacattctttacatcattcatatttctgattcaattttcctaattttcacacggtttatagcagtaacttttaacattcttctgaagcatactgttcttaaagggcaagagtttttttctgttttgttcatttctttatgctcagtacctggaatagtgagtgcctggaacattgtaggagctgttaaattaatggataaagtttaacataaacattgaaataggagataaatcaactgttttatc

SEQ ID NO: 173336 - DNA, 602 bp, Homo sapiens
ttttcttaaacttcacttacgtgcagtgagttttgtatcaatattaaattatattgaaatactagtaaataactctgattttcaagtttaccatatttatttattgaacctagtttaagtactaccctcttaaatgtgtgatttcattctttgtacatatttttccaaactttatgttgaggtatagttgacaagtaaaaactgtatatatttaaggtgtacaatgtaatattttgatatatatgtatacattttgaaataattaccaagtgaattaacatatccatcacatcacatagctaccactattttttgtgtgcatgtgtgtgtgtgtgtggggtggggtggtgagaaaacctaagatctattctgttagcaaatttcacatatacaayaagttattaactgtagtctttgcattacattcccagaatttattcattctgcataactgaaactttgtaccctctctgcttttatgaattcagctattttagatttttacctataagtaagatcatgcatgagtcatctttctgagcctggcttattttacttcacacaatgtcttctggattcatctatgttgagtgaaatggcag

SEQ ID NO: 173337 - DNA, 565 bp, Homo sapiens
tcccactcccagacctaggcaaaaaacaaaaagaaaaaaaccagttttgtgataccatgttcatgttttgtctactttttcactgtgacaatttttcaaaaatcggaatgtcaaggtgatctactttatgtctctattgacttgccttttctggtccattcatctaaatggaatcatgcaatatgatgtcttctgtgtttggtttcttttacttagcacaatatttttttatgtttacccacattgtagcatatatcagaatttcaaatctttttatggctgcatagtattccatcacgtatatataccatattttatttatctgttcaccaattgataaacatttggattgtttccactttttggctattatgattaaagctgctataaacattcacatacatgtacttttgtaggcatatgttctcatttctccttggtaattttctatgagtgaaattattggctcatacagtaaatttattcgacctgaaattttaaaatgatctctccccactccagaattttgttgtgaaatcktaatgtaacccatatggaaaatgat

SEQ ID NO: 173338 - DNA, 580 bp, Homo sapiens
tgttgttaactcactaaaatgaagaaaaattaaactacattttctttctgcataagccttcattttgaaaatctttcttaaatactttttacctttccttttacatttgtacattttcatatagttttattcccatggaaatgtacttcagggaaattgatacttacattcttctttayttgcacacaataaataatcaatcattatagttaagtgaaatttctaaattcacatacattttcaggagaaaaacaaaagacagatttttattttaaggtcagatttgctagagcattcctgttattctctaaaaaatatatgttctccacatagaaaatatgtgcttttttgtgtgtgtatgtgtatgtgatctatgacctaaaaggaggattcaattattactttaagtctcacattttgtctgtaaaatacgagagattttgtagtgtaatacagaagtatttaataaaatgttttccctaccctgtatttgcttaaaattaaacagtggttaagtcctaatttaaaatggctaagaatctatacgtaggaacatttttaaacgcatacactaattgct

SEQ ID NO: 173339 - DNA, 572 bp, Homo sapiens
tgaaagtttttatatgtaatatcttccagtttcttcactgaattccttcaagctatcattctaatatgatagtgtgctttatttattgttttgagattgagtattaatgtgtagcattttttaaatttggaaggcaattgtgtgtttgagaatggagagaagatgataaagcaagacctcctttcatctcttaagcctataagcttgttttccaatccaytgataatctgaacatgcagttagccctttaaccagtttctatggttgtataatacaagaagtgctaattcaaggcttacacaaaaagttgctgtgttttagacatgtatttgcactccaggaaattattcagcagaatacacccaaatgaaaacatttattagataaagcactgaattccaaacctgctacaatctgacattcacatagcaactataaagtgaggatatgaatttttgttgttggaggtggtgtgttaaagtatttgaattaatgaccaacacttttgaattgagacaacgaacgtatttaaaaatgctcaacatcactaatgatcagggaaatgcaaatca

SEQ ID NO: 173340 - DNA, 572 bp, Homo sapiens
tgaaagtttttatatgtaatatcttccagtttcttcactgaattccttcaagctatcattctaatatgatagtgtgctttatttattgttttgagattgagtattaatgtgtagcattttttaaatttggaaggcaattgtgtgtttgagaatggagagaagatgataaagcaagacctcctttcatctcttaagcctataagcttgttttccaatccactgataatctgaacatgcagttagccctttaaccagtttctatggttgtataatacaagaagtgctaattcaaggcttacacaaaaagttgctgtgttttagamatgtatttgcactccaggaaattattcagcagaatacacccaaatgaaaacatttattagataaagcactgaattccaaacctgctacaatctgacattcacatagcaactataaagtgaggatatgaatttttgttgttggaggtggtgtgttaaagtatttgaattaatgaccaacacttttgaattgagacaacgaacgtatttaaaaatgctcaacatcactaatgatcagggaaatgcaaatca

SEQ ID NO: 173341 - DNA, 572 bp, Homo sapiens
tgaaagtttttatatgtaatatcttccagtttcttcactgaattccttcaagctatcattctaatatgatagtgtgctttatttattgttttgagattgagtattaatgtgtagcattttttaaatttggaaggcaattgtgtgtttgagaatggagagaagatgataaagcaagacctcctttcatctcttaagcctataagcttgttttccaatccactgataatctgaacatgcagttagccctttaaccagtttctatggttgtataatacaagaagtgctaattcaaggcttacacaaaaagttgctgtgttttagacatgtatttgcactccaggaaattattcagcagaatacacccaaatgaaaacatttattagataaagcactgaattccaaacctgctacaatctgacattcacatagcaactataaagtgaggatatgaatttttgttgttggaggtggtgtgttaaagtatttgaattaatgaccaacacttttgaattgagacaacraacgtatttaaaaatgctcaacatcactaatgatcagggaaatgcaaatca

SEQ ID NO: 173342 - DNA, 577 bp, Homo sapiens
tggacatgagttgaataatgttgaatgagatgttgtagggaatatagcaattgaagatcttgtggtgtggatacacatcacacacatagacatacacatgtgtacacatacacacacacaagagcatacatatattaattcaccattggtattgacaagttcttgatgtgtggcttctcttcttcctttttctgaatagaaatttttatttaacttactctgcccccattctatcagtggtttataagatgtgttgrgcagtgggcagagagcttttatcccataaagaagaacatctggaccttattgagaacactcagctgagactgcatatgctgggtgcgcacagcatctggatgggctttgggttatctcccatggggaagggtgaggatgtattgtttgtatgggaagaaacatgtagcacaagttcagactatggcagaaaatattagttatttcatggttgcacagaaagattacatatcctactttctatttaattagatatgtttactgattcttgctatggaatgtgaatgaagttaatatgcaccttttccagcctgagatataa

SEQ ID NO: 173343 - DNA, 411 bp, Homo sapiens
gccatgtacttattaaacggaactataaagagtagaatgtttagcacagtaattatctttataatcttcaaatatttggggtccaagtaattgtacaagagctactttattgtaaatatcatatttatttaatgttactagacgtatattcagtgaggagtaaatcagaataattgctttgggagatataaggcatttctgctaaacaatgatttaaagaagcaactaatgagagataaagcttcttctgcgtcctgatgttataatcgactgaatatccatatacaagctatatatatatatatatatatatayacacacacacacacacacacacacatgctgtttgtaaacacaaaaacacatacacatagatacacacttatgtgtatctatgtatacatatagata

SEQ ID NO: 173344 - DNA, 411 bp, Homo sapiens
gccatgtacttattaaacggaactataaagagtagaatgtttagcacagtaattatctttataatcttcaaatatttggggtccaagtaattgtacaagagctactttattgtaaatatcatatttatttaatgttactagacgtatattcagtgaggagtaaatcagaataattgctttgggagatataaggcatttctgctaaacaatgatttaaagaagcaactaatgagagataaagcttcttctgcgtcctgatgttataatcgactgaatatccatatacaagctatatatatatatatatatatatatacacacacacacacacacacacacatgctgtttgtaaacacaaaaacacatacayatagatacacacttatgtgtatctatgtatacatatagata

SEQ ID NO: 173345 - DNA, 426 bp, Homo sapiens
tgaaattcttttcttccttctttgtctttcaattcctgccatatatgctaaagccaaggattacttcatcattaagtaaacacttgttgtggcagtcaaccttctgggcaagggcataataagttaaaaagagttaaatgctatgcagattcctttaatttgatatgtattcaaaggcatataaggatgatgatgagaaaaatctgtcctcaaggaacttgtctcatagaaaacagtaagtgaaaacacaaagcctrtgtaagtcagtgttgttactatctctaaatacttcatcttctgtgacatcttcatatccacatgcagatctgaagcctgctgtattcatatcactttataccactgattctgtcagcagtagaactggttaactctttgacttatccttttctatcaggcaaactatat

SEQ ID NO: 173346 - DNA, 528 bp, Homo sapiens
gataatgtaggaaaaagtgattttaaaataatataccccagttaaatgttagttataattatagaactatgtttttctagtatttgagagggtactttctatttattgatatatttcttataaaaatttcaaaagttaaaacatgctcaacagcatattatgtaatgattggtacctactagacattcataaatatattctttcttaatttattggatcagacagcatcatgtgtatttcattctagaaagaaacttattaagatttgtctcgcgtttttcctcatctgcacttcaactctggctggggttttcaaatgctctatctatagatattctyttatttcatactcagctattttaggagagaaaagagaccttgtttatttctaataatacaagttttactgcataaaatatatcccagttactgtctttactgttttaaacattttcccagggaaaaaattttcatcgtgtattaaactagatgtctaactggattgattctcaccctgaagtcactgaa

SEQ ID NO: 173347 - DNA, 562 bp, Homo sapiens
tggatggaaaaaataatcatgtgctttttaaaaacaaaaccaaaccttgttttcttcacatgaaccccctgtatttgttgatttttagtgttgtgtatttatttcctgacaaatcacaaaagctatgtgataaggagagaaatgcaattgtattattggttgatttcctgtggtagcacytcaggggctccgggcattcactacaaagttcagtaattgtactatctagcttggtgggtaagttatacaaaagggaacaaactgtgaaaatggtgtgtgctatttttcagtgaggatgttatcaatctgtttaagtaaactttggtattacccagaagattgttctctgcttattacattgcttatgctgtgttcaaattgtgtgattgttctgtcttaaatgaactccactgcatgtagattttgcagggatctctaaacagtgggtagtttcattacacatgacagctatggatattttacatgcagccaaatgcgttaaagacaaaagttattttttagcattatttatttgttcagaggccattacagtttaacgaaa

SEQ ID NO: 173348 - DNA, 510 bp, Homo sapiens
tattgcagcactattcacagtagccaaggtatggaatcgatatgtgttcatcaacaaatgaatggataaagaaaatgaggtatgtatacacagtggaatattattcagctattaaaaagaatggaattccatcatttgcaacaacatggatggaacaagaggacattatgtaaagtgaaatgatccaggcacaaaaagacaaacattgcatgttcccattcatatgtgagagctaaaaaaattgatctcatggagatagagagtagcatggtggttaccaaaggcttggaaggatagtagaaggggtgataaagaggggttaatgggtacagagatgcagttagatagaaggaataagatctagtgtttagtggcataatwgggcaactatagttaacaatgaatattgtatatttcagaataaccagaggcatgaaatttgaatattcctaacacaaagaaatgataaatgtttgaggtcatataccaattaccctgatttgatcatta

SEQ ID NO: 173349 - DNA, 616 bp, Homo sapiens
ctaaaatctgtattgaattttgaaacaccaatataaaacaatctttaaaaaggagaacaaagttggaggactcacacttcccaattttgaaacagaatataaaacaaaagtaatcaagaaagtgtgatactrgcatcaagatagacatatacatctatggggcaggataaagagtccagaaataaacacatggcttctatggtttactgacttttggcaagggtattgaggctatccaatgggaaaagaatactttgtttaacaaatagtggtggaacaactggatagccataggcaatacaataaaattacacttttacttcatactttattcaaaaattaactcaaaattagtcaaacatctaactgctaaaaccataaaactcttagaagaaagcatagaggtaaatggccatgacttagatttagcaatgaatttttagatatgacaccaaaagcataagcaaaggcaaaaataattgataaattagacttcataaaaattcacattcaagaaagtgaaaagacaaagcccagaataggaaaaaatatttgtaaatcatatatttgttaagggactcatatccagaatatataaagaatcgttacaactcaa

SEQ ID NO: 173350 - DNA, 564 bp, Homo sapiens
aaaattctctttcatttgcaccattacccattattttcagtctggtatttttttaaaaagcaattagccgcccctaactaatataactcttatcattgaatgcctttcttgtgcccactgagtttaataaatkgttctcactgggtatttttatctttttttcctctgatttatgtacactctaggaggtggtttcaatgactacttaggctacttacattctctataaagtgattttttcccctcttgagttttgtatctttctccttgttggtagtttccttcctataattctagttttatgcatgatatatctgtaatatgatttgaaataaaatgggaaacataaggaattttaccccagaaaattaaaacagagtgaatatagactggataaacacatattatggcctttccgcttgtcttccccactctgtacaccggaaagataagattttaaaaaatattacattaggggtaaaatagttctggggtgtgaagaagataaatgtaggtccggaacaatcagtctagacttttagacctttttaacagctaatttgg

SEQ ID NO: 173351 - DNA, 564 bp, Homo sapiens
aaaattctctttcatttgcaccattacccattattttcagtctggtatttttttaaaaagcaattagccgcccctaactaatataactcttatcattgaatgcctttcttgtgcccactgagtttaataaattgttctcactgggtatttttatctttttttcctctgatttatgtacactctaggaggtggtttcaatgactacttaggctacttacattctctataaagtgattttttcccctcttgagttttgtatctttctccttgttggtagtttccttcctataattctagttttatgcatgatatatctgtaatatgatttgaaataaaatgggaaacataaggaattttaccccagaaaattaaaacagagtgaatatagactggataaacacatattatggcctttccgcttgtcttccccactctgtacaccggaaagataagattttaaaaaatattacattaggggtaaaatagttctggkgtgtgaagaagataaatgtaggtccggaacaatcagtctagacttttagacctttttaacagctaatttgg

SEQ ID NO: 173352 - DNA, 577 bp, Homo sapiens
tcatttttcacaaaatatggctgtattttaataaaatatggatgccttgctgttttaggtttatgtycggaaattatgaatatttcctatttcttttgaggctgttactagcacttagaaacataataaattatcaattatttggaagtaataatttaagaaaaaagtcttataaagctataattagctaagataaaaatatgttacttttgtttttgaataatataaaatggacttaaatttgataataaaagcttgattctgtaacatttgtatattgagagtatatttggttcaaactgataatgatgatcttccatatctttgaaaatacattgttacattttcataatatagcaattttgttactcttcaataagagaaaaaatatctccttcaataatttttcaagataatataggtttttgtccgtttggatcatataaagcaaaaaaaaaaaaaaaagaaaagaaaaaaagaatgggggtggaggatttctttgactttgaatttgaaaataaatagggcaatacttgattaaagacaaaattttggtgattcagaatgtcccaggaat

SEQ ID NO: 173353 - DNA, 621 bp, Homo sapiens
aggtgaaatgaacgattattccaaaaccaaaaacctctaaaaactcttttagggtgaaatagataaccttaatagtttagtaatgattaaacttcctaacccattattgaaatcttgtgaaaaagaaatttccgggactagatgaccttagtgctaaaatttaccatacatgtaaagaagaaataaactcaagtctacaccatctgytgaaaaggagagaacatttcatacatcattttatgagatgagcattactgtgacaagaagaaaataccccagaacttcagatcaatatcactcatgaacataaatgcagaatcatcaaaatactagcaaatcgaatctggcaatgtataaaagaatagtataatgtgaccaagtagtattcatctaatgagtgaaaggttggcttagtatttgacaatcaatcaataaaatataactgatagtctaaagaagaaaaattatataatatcaatacaaaaaagtatttaaaaatatttaatattcatacataatgaaaactctcagcaaattaggaattgaaggaaagttcttcagcctgataaaggacatctacaagctaatataatacttaatagtgaaagatagtaatataca

SEQ ID NO: 173354 - DNA, 579 bp, Homo sapiens
atgtgcagcagaggggcctgactgttagaaggaaaactaacaaacaggaatagcatcaacatcaacaaaaaggatgtccgcacaacaaccccatctgaggtcaccaacaacaaagaccaaaggtaggtaaatccacaaagatgaggaaaaaccagcacaaaaaggctgaaagttacaaaaaccagaatgcctcttctccaaaggatcacaactccttgccagcaagggaacaaaactggatggagaatgagtttgacgaattgayagaagtaggcttcagaaggtgggtaataacaaactcctctgggctagaggaacatgtcctaaccactgcaaggaagctaagaaccttgaaaaaagcttagaggaattgctaactagaataaccagtttagagaagaacataaatgacctgatggagccgaaaaacatagcacaagaacttcgtgaagcatacacaagtatcaatagccgaatcgatcaagtggaagaaaggatatcagaggttgaagatcaacttaatgaaataaagtgtgaagacaagattagagaaaaaagaatgagaaggaacaaacagag

SEQ ID NO: 173355 - DNA, 436 bp, Homo sapiens
aactgttatcttttcattgaggccttcacttgccatcccatctaaaatgttgtcattcctccctgacaatttatattcccctcccctactatcttttcatccttagcaactatcagtatctaacaaatcatatgttttctttatttgtcttagttattttctgttcttccgcactaaaatataagttccatcatgggagagagtttatatgtttttttgttgttgttgttttactgctatatccccagaacatagaaaayagttcctggtatgtaccaggccctcaataaatatttatgaatgaatgaatgtatgaatatgtcttcaggcattggcaaaatttgcaggatccatagtcctattatttatctttgatttttcttaatgtggtgtcacaatgatacactttgagagaaataatttttgaaacttgtct

SEQ ID NO: 173356 - DNA, 422 bp, Homo sapiens
aaaattaatactaaacatagttaatgaaactaaacgtggtattgcacttcatatggaaaaataagcatgcaggaataaagaacaaaacccaaaaacctaaatagaataatatrcaaaagaggactatccctgccagacattaaaatatattataaagcctctgtaattaaaactgtggcacagacacatgaatatataaatagactagtggaatagaatagaaagtctagaaatagactcagtacacgtggaatatatgataaaggtggcatctcaaatcactagagtgaagatgaatctttttaataaatgaagttgaaaccaccggacaaagtaaaaaataaattaagctatataatactagataaaagcataggtgacttccttattaatctgaatttgtatggaaaggtttcataact

SEQ ID NO: 173357 - DNA, 622 bp, Homo sapiens
aacggtacccatactccacaaaaaaagatgtctacattctaatctctagaacttgtgaacatatcttagatggcaaaagatgagatttaattttttttgtgcttgcttcggcagcacatatactaaaattggaacgatacagagatttaatttaatttttttttttttttagagtcaggatcttgccctgtcacccaggcaggagtgcagtggtgaaatctcttaagtgagttctcttatctctaagtttccacttattagctcactgtaaatttgaactccttagctcaagaaatcctcttgcctcagcctcctgagtatctgagaccacaggcacatgccactgcactgaaccaaaaaaaatgtggctgagttcaaggtcttgtgaggaagagcttatgtattatccatgtgagccctaaatgcaatctcacatgtccctatatgagtgaagctagggagcatttaacacacacaaaagaggagaaggcaatgtgaccatgaaggcagaaactggagtgatgcagccaaagaatgtccgcagccaagagcaggtaacaggcctcccctamgccctccagaaggtgtgtggccttactgatacccctatttcgacattttt

SEQ ID NO: 173358 - DNA, 620 bp, Homo sapiens
cattaattgataggggtaggagagagttgtatgttctactctatactattttgatttgaggcaagggaactggctctcaaatctctttatctagggagcaatggtcaaccaatrgaatctatacaatttgtgcttccttaagtatgttatcaataagtagtgttcaatttgttgtgactaattgattatgtttgacatgtagcttggaggcttttatttaaagcagtcttttggtaaattttttcttaatgttaagaaggctgcatcttgtgatagaaaatgcatacgatttcaagtctgggtgcttttcttggctgaccaaccatagacacttggcaatactcacttcctcatcctgtaaagtggatatcataactttccatgagggctgatcaagatcaattgatataattcttgtattagcgttggtaaactctaaattctagcccatacagttaaagtactatatgctattattttattcttacaattaattttttcctatgtataaacttggaattttcaacatcaaacctacatgaaaaaaaacaacagtgtaatccgttgtaaatagcaaatgaagcctgtgtggtcacctgttaattgctcttagcactgtt

SEQ ID NO: 173359 - DNA, 620 bp, Homo sapiens
cattaattgataggggtaggagagagttgtatgttctactctatactattttgatttgaggcaagggaactggctctcaaatctctttatctagggagcaatggtcaaccaatggaatctatacaatttgtgcttccttaagtatgttatcaataagtagtgttcaatttgttgtgactaattgattatgtttgacatgtagcttggaggcttttatttaaagcagtcttttggtaaattttttcttaatgttaagaaggctgcatcttgtgatagaaaatgcatacgatttcaagtctgggtgcttttcttggctgaccaaccatagacacttggcaatactcacttcctcatcctgtaaagtggatatcataactttccatgagggctgatcaagatcaattgatataattcttgtattagcgttggtaaactctaaattctagcccatacagttaaagtactatatgctattattttattcttacaattaattttttcctatgtataaacttggaattttcaacatcaaacctacatgaaaaaaaacaacagtgtaatcckttgtaaatagcaaatgaagcctgtgtggtcacctgttaattgctcttagcactgtt

SEQ ID NO: 173360 - DNA, 606 bp, Homo sapiens
gcaaacctcactgccttaatgaaccattagctgtatttggctgtataagcagaagcctttggcaaaatacaggaagtatatttgaatttgccatttgaatttctcagtgttttttttttttcttaaatctacactaagtgtgaggtacacattttctctttcatmtcagttgttagctaatagagactgtactttggtgatggcataattttgctagtttttaaattttttaagtttattttagagttggggtcttgctcggtcacccagactggagtgcagtggcatgatcatggctcactgcaaccttgaactcctgggatcaagcaatcctcctacctcaaccccaagtagttaggactacaggtgtgacccaccatgccgcccagctaatttttataccttaataaccttggtagatacctcctagttatctgcaacctgtctctctcaccagcgctgccattacccctggtatctgtctctcccatgctcactgccaggtattgtgattgtctctcctttcctagacaagctccagaatgatttccccaggacttatctgtctttatataagtagcgctgaacaccggaattattgcaaag

SEQ ID NO: 173361 - DNA, 606 bp, Homo sapiens
gcaaacctcactgccttaatgaaccattagctgtatttggctgtataagcagaagcctttggcaaaatacaggaagtatatttgaatttgccatttgaatttctcagtgttttttttttttcttaaatctacactaagtgtgaggtacacattttctctttcatctcagttgttagctaatagagactgtactttggtgatggcataattttgctagtttttaaattttttaagtttattttagagttggggtcttgctcggtcacccagactggagtgcagtggcatgatcatggctcactgcaaccttgaactcctgggatcaagcaatcctcctacctcaaccccaagtagttaggactacaggtgtgacccaccatgccgcccagctaatttttataccttaataaccttggtagatacctcctagttatctgcaacctgtctctctcaccagcgctgccattacccctggtatctgtctctcccatgctcactgccaggtattgtgattgtctctcctttcctagacaagctccagaatgatttccccaggmcttatctgtctttatataagtagcgctgaacaccggaattattgcaaag

SEQ ID NO: 173362 - DNA, 582 bp, Homo sapiens
cttttttgcagttcctattctgttcatccactttctcgccctttccctctactttggcatagtacacattctgctcattctttctcattctgttttgttatttgctcttgggcttagatcaggagttgaaaaagatataaccagagataactcataaatgtcaaataaaaatgttttctcttgagggattttataacattgagtattttctyacttttgttctcctttgccaagtattttggaagatcaaagatgttttcctcaaaattgctttacctaaacgtctttgttgcttcagttgctttaaagtaaaattgtctaaaatctgctattgatcttggtctcctaatgcattgacagtcatgtcaagctcagtgaataattatgaaataactttaattgctgacttttttcccctctcttttcatgctatggtaccttcctccattcacccatttggcatgcgttgagtgcccactgaaggtaggaggctgttataggtgccagggattcagagaggaatgagacattggccttgccctcaattattacaatcaagcaagtagctgctcctgatggttt

SEQ ID NO: 173363 - DNA, 438 bp, Homo sapiens
ggaaacactttactgaatagataaaaatgggggcttctatcaatgaaagacagaatggactcaggcaaagagaagaacaggaggagaatagcacaaaacatgattggaaagtctgaaaactgcattcttagtagctccttatgaaacccaatgtttccacttgcccactacaacctgcgccagccgaggcaaatctctcctctctaattttttttctcctctttcagktggacaatttcttttttaattttttgagacagagtcttgctctgtttcccaggctggaatgcagtggcatgatctcagttcagtgcaatctccacctcctggattcaagtgattctcctgtctcagcctccggaatagctgggattacaggctcccgccatcatgtccatctaatttttccatttttattagagacggggttttgccatg

SEQ ID NO: 173364 - DNA, 476 bp, Homo sapiens
ttcatgagctgggataaaaaggaaacactttactgaatagataaaaatgggggcttctatcaatgaaagacagaatggactcaggcaaagagaagaacaggaggagaatagcacaaaacatgattggaaagtctgaaaactgcattcttagtagctccttatgaaacccaatgtttccacttgcccactacaacctgcgccagccgaggcaaatctctcctctctaattttttttctcctctttcaggtggacaatttcttttttaattttttgagacagagtcttgctctgtttcccaggctggaatgcagtggcatgatctcagttcagtgcaatctccacctcctggattcaagtgrttctcctgtctcagcctccggaatagctgggattacaggctcccgccatcatgtccatctaatttttccatttttattagagacggggttttgccatgttggccaagctggcctcg

SEQ ID NO: 173365 - DNA, 385 bp, Homo sapiens
gaaaatgctagctgcctccgtttycccagactctcaactctgtctcctcaacatacagagttctaccagaccctgcctggggtccccctctctttgtcacaacctgggatctctctcagttcaggaggctgtgtaatcacagggctcatttgtttcccattttccaacattactgcccttcattgcttgatgtcttaaaaattggttttatatattttttgtctattatttggtttttttctatgttttttcagagaagactgtaaactccagtaattcttattccatcttggtagtaagatatttgcatcttaaatttgtgctgtggtataggtttttgagctctgagatataagcaccagaccaactccccctttttctcaaa

SEQ ID NO: 173366 - DNA, 438 bp, Homo sapiens
agatctccagaattctctctggggcagctccttcacttctggcactctgtcctgaaaatgctagctgcctccgtttccccagactctcaactctgtctcctcaacatacagagttctaccagaccctgcctggggtccccctctctttgtcacaacctgggatctctctcagttcaggwggctgtgtaatcacagggctcatttgtttcccattttccaacattactgcccttcattgcttgatgtcttaaaaattggttttatatattttttgtctattatttggtttttttctatgttttttcagagaagactgtaaactccagtaattcttattccatcttggtagtaagatatttgcatcttaaatttgtgctgtggtataggtttttgagctctgagatataagcaccagaccaactccccctttttctcaaa

SEQ ID NO: 173367 - DNA, 608 bp, Homo sapiens
atcctcgggacaaactcagtggggatgttcagtttgtaaatttttgctctttgtataagttaacaaatggtgacacataatgttacatgctggtagataacttaaaaattaactgttaaaatataagtatatagcttctccaaattacacataattctaaaaaaaagttaactccctgccactttcagtgtcatattaataaactaacaggcagaattttcatgtgatcatggatacctgcatgttattayattagtgcaaactcatgccaacaacagggaagtttggtgaaatgtaccttcccttttgaacaaacagaagatgccttctgtgggttctgaggaattgtagcacactctccagcatgcacacacacacacacacacacacacccctttctgaatgacttggaaagcaaaacgtatttttccttcctccttcaataaaccctactcatggctgaaaagctgtgaatctctagagcccccttttcacttgggacctcatgcagccagggccaatatgaaggtgcaccaccatttgatttaagccagctggaaccttaggttacactgcatgactttagacactactcagctacttattgg

SEQ ID NO: 173368 - DNA, 609 bp, Homo sapiens
cctccttgttgagaatgtccttttgaaatatgttctagggtattgctcctgtcctattaattatgtaacaaatttagcaaagctgaataattaatgatcatggggcacttggaactataaaatgtcatgtaaatgttaaggagtaaaaattactctggtgttagatagatgtgctgctttaaaaatgttccacgctgggaaggttaacttctagaagagctgaaaagcttcctgttgggctttcctcaraaacttaggctgtcttgccctaaccacattttaggaaattcagatttctgcattctggagtctttggaaggcaaatggctagccagcatttttagctctggaaatgaagttacctcccgctcctggattttggtaaaaatcgtgtctgttgattccctctacgcggaggcagtttgggcccaaaaccaaggaagaggtgaagatcattgagcaccaaacacagaccctgcggctgatgccccacctggccacagccttggccctgaccttcgtcagcaggtgagatggctctcagggtttgctctcttagggtaagtgtgataccctggcatgagtaagaattcagagcagcaggcacag

SEQ ID NO: 173369 - DNA, 504 bp, Homo sapiens
cctgatagtcacagccttgagtgtcttctccatgctgtaccagagttggtctgtgtgacatacagcagaaataatggcatgttgcttccagataaaatacattatgacttccatcttggtcactctgttgcactctctctctttatctctaatcactctgggcaaaaccatgtcataagaatgccctatgggaaggcccaggtgtcaaggaactgaagcttcctgcccacaaccacatgagtaaccttggaagtgtaccctgcagctccagtcacagcttcagagactgcaagcatgggacagtcaacactygctgcaacctcatgagagtccctgagccagaaccacaccatcaagcagcttctggattcccaggcttcagaaactgtgtgcataatgaacacttggtgtaatccactaggtttggggcaggttgttgcacagcagcagatacctaatccagatttgggcacccaaaagttgggtgctgacataacaaaagcc

SEQ ID NO: 173370 - DNA, 504 bp, Homo sapiens
cctgatagtcacagccttgagtgtcttctccatgctgtaccagagttggtctgtgtgacatacagcagaaataatggcatgttgcttccagataaaatacattatgacttccatcttggtcactctgttgcactctctctctttatctctaatcactctgggcaaaaccatgtcataagaatgccctatgggaaggcccaggtgtcaaggaactgaagcttcctgcccacaaccacatgagtaaccttggaagtgtaccctgcagctccagtcacagcttcagagactgcaagcatgggacagtcaacacttgctgcaacytcatgagagtccctgagccagaaccacaccatcaagcagcttctggattcccaggcttcagaaactgtgtgcataatgaacacttggtgtaatccactaggtttggggcaggttgttgcacagcagcagatacctaatccagatttgggcacccaaaagttgggtgctgacataacaaaagcc

SEQ ID NO: 173371 - DNA, 600 bp, Homo sapiens
tcctggttgcttttagttaatcattttttggctaagcgaaatattactaagtttctaatattcagtgctatacacaaaagtgtactcagagagctaccactctttcctcattccagctaccccctttccatcacttcccttttttcctacatacctcatgtaggtggcaagatatctttagtctctggcttatccttcctgtatttctttcacacatagagatctacctcattcatttttttacagccacagaataatctatgttatggatatactgtagcttactccacccctctcttgtgtatttaatccttcytcccaacctttggtcattacaaacaacgttacagtgaataaccttattatataaattttagtgttgtttgaattatatcttcagggtaggtttctagaaatgttgttgttaggctcaaaggtaagtgcatttgtagttttgttaggtattgccaaattctcctccagaggatttgtacagttttcattccactgagtgaagtctgtttcctcaaagtctcatcaatagaatgtgttctaatatttttcaatttttgccagtttgataggtgatcaatggtaact

SEQ ID NO: 173372 - DNA, 544 bp, Homo sapiens
acttataacaagttaggttcatttgtaactacttgcattttactttgggtttcctctatatcctggttgcttttagttaatcattttttggctaagcgaaatattactaagtttctaatattcagtgctatacacaaaagtgtactcagagagctaccactctttcctcattccagctaccccctttccatcacttcccttttttcctacatacctcatgtaggtggcaagatatctttagtctctggcttatccttcctgtatttctttcacacatagagatctacctcattcatttttttacagccacagaataatctatgttatggatatactgtagcttactccacccctctcttgtgtatttaatccttcctcccaacmtttggtcattacaaacaacgttacagtgaataaccttattatataaattttagtgttgtttgaattatatcttcagggtaggtttctagaaatgttgttgttaggctcaaaggtaagtgcatttgtagttttgttaggtattgccaaattctcctccaga

SEQ ID NO: 173373 - DNA, 557 bp, Homo sapiens
gaaaccaaatggaaattctagaactgaaaaatacaatagtattaataaaaaaataaatggatgggattaacaacacactgggcaaaaagagaaaagtgtcagtgaacctgattaatagaaatcatttgaactaaaacacataaagaaaaatattgataaaataatcagagccctcatgacctgtggggtagtaacacacactctaacatatatgtaattggagtctaagaaggagatgagagagagaatagcatagaaaaaggattagccaaatattttttaaatttttatcaataatgacagcacataaattcaagattctagcaggagaggatgaaaaayaaacaaatataaaaataagagcccatcatagtataattgctgaaaactaaaaataaagaataaatcttaaaagttagaagagaacaaagaacattagatgcaagaaataatggtagaatgatggttcacttttcattagaaattgtatagccaaaggacaatagaaagatatctttaccgtgctgctgaaagcaaaaaagaatctaccttgagct

SEQ ID NO: 173374 - DNA, 538 bp, Homo sapiens
ataaaactctttcaaaaaccagtgtaagactgatacccaaaattagtaagtacagtacaaagaaaacaattacaaacaaatattctccacgaatataggtgaaaatacataatagaatacatcataacaaagtagtgtttattataagaatgcgaggttggtttaatagtcaaaacatgtcaataaaatatacaatactaacaaaggagagagcatatgattatattatggggaaaatatatttgatgaaatccaacatgagctgatgatgaaaagtctcagcagagcagaaatagaaaggratttcctcaatttttggagagtatatctacaaaagaacctacagctaacctcatacctaatagtgaaatattacacacttttctcctaaagacggaacaaggcaagaatgtccagtttactacttttatttaacattgtattggagggcctagccagtgcaacgagacaggaaaaaagaaatagaagaatttaccaaactaatagctcaaaacagggctacaggacacaaactcaa

SEQ ID NO: 173375 - DNA, 511 bp, Homo sapiens
acaggaaaaaagaaatagaagaatttaccaaactaatagctcaaaacagggctacaggayacaaactcaatatctaaaacgaattttgttttatatgttatcaaacaattggaaaataaaatttaatttacaatatcatctaaaaacatgagtttcttaggaacacatttaatagtaaaaccaaaacatgcaatatctgtacactaaagactacgtaacacccaaggaataattgaagcaagcctaagtaactggagtagtatgctgtgcttgtgtatgggaaaactccacattgccataatgttcatcctcctgaaattagcctatagattcagcaccatttcaagcaaaatcttggcaggaatgtttgtagaaactcataagctgatttgacaatcacatggaaatgtgaatggcctaaaatagcccaaacaacttcaaaaaacattgaagaaatgtagagggattgtactacctgatttcaaagcttgtgctaatgcttcaataatac

SEQ ID NO: 173376 - DNA, 560 bp, Homo sapiens
gtccacgcgtggggcgtccacttcctcaccctgcccctcggtgcccctgccctggttgcacttctcctaaaaggaggcgctacgattccaggaggctctgtctccttacccttcccagcggcgctcaaaccaccagccccgggcgcccaaccccttccttgtcctctccctatcccgtgagaaagccgacgcttccacccgcctggtctttccgaaatacgcttcgggtggtcaatgcgatttctagggtctaaagactagactcccgcgttccccaccaagacaccgacgcgargccgcagaggtggaatcgcggacgccctggcaggcccgggacatattgatcctggtggcgcgatgcccctcttcgcacgcggacgcactcgcagccccactcccccaaactcgcactgcgggaaggaacccccgactcgcaccggctcccgccccgcagcaacggcgacaccctgaggtccggacgagcggcgcgcccctcccagcctcggccactttccagcacgaagcctcaggcgagcccgagacgaagaaagagagttcga

SEQ ID NO: 173377 - DNA, 498 bp, Homo sapiens
tggcaacagaaacccaatctctgtcttctttgccacttgcccttcttccctctatgactgcctgggtctttgaagctctccctccttataaggtcaccagtcgttggatttcaggcccgccttcatccagtttggcctcatcttcacttgattagccagatgtggtggtgcatgcaaagaccctgtttccaaataaggtgatattcacaggtatcatggttagaacttcaacatatattctggggggacacaattcaacccataacaatgtccaacgtggagtgaggaataggatctcctgtgaagccactttaatgcttctgtcccgaactgycaagtgcattagatgactggacattttaatctacagctgagttgactaaccagtgtgataatttattaatattatttttaggctgggcatggtggctcatgtctgtaatcccagcactttggagcctgaggcgggtggatcacctgaggtcaggagtttgatac

SEQ ID NO: 173378 - DNA, 371 bp, Homo sapiens
aactgccaggagagtggtggcaggtcccccatcctcagctgggtgggcctggatagaacagcaaggcgarggcacatttccctgggcattccctccaggcacagctgtgacctgttcattccaaattggtggaagtatttccacacacacagaactgcaaatagcagtggacatggtgagaggcgtttgcacatgggataggcaggattttggaggaagagcctccagggcttgccgatgggttagctgcagggcttgagagggaacggagaatccaggatgatgtgttcaaatcggtccattcacctcttccgttccacgcctgtgctgggcactgggagagacagatgcacacaggagccccggacgag

SEQ ID NO: 173379 - DNA, 371 bp, Homo sapiens
aactgccaggagagtggtggcaggtcccccatcctcagctgggtgggcctggatagaacagcaaggcgaaggcacatttccctggscattccctccaggcacagctgtgacctgttcattccaaattggtggaagtatttccacacacacagaactgcaaatagcagtggacatggtgagaggcgtttgcacatgggataggcaggattttggaggaagagcctccagggcttgccgatgggttagctgcagggcttgagagggaacggagaatccaggatgatgtgttcaaatcggtccattcacctcttccgttccacgcctgtgctgggcactgggagagacagatgcacacaggagccccggacgag

SEQ ID NO: 173380 - DNA, 371 bp, Homo sapiens
aactgccaggagagtggtggcaggtcccccatcctcagctgggtgggcctggatagaacagcaaggcgaaggcacatttccctgggcattccctccaggcacagctgtgacctgttcattccaaattkgtggaagtatttccacacacacagaactgcaaatagcagtggacatggtgagaggcgtttgcacatgggataggcaggattttggaggaagagcctccagggcttgccgatgggttagctgcagggcttgagagggaacggagaatccaggatgatgtgttcaaatcggtccattcacctcttccgttccacgcctgtgctgggcactgggagagacagatgcacacaggagccccggacgag

SEQ ID NO: 173381 - DNA, 371 bp, Homo sapiens
aactgccaggagagtggtggcaggtcccccatcctcagctgggtgggcctggatagaacagcaaggcgaaggcacatttccctgggcattccctccaggcacagctgtgacctgttcattccaaattggtggaagtatttccacacacacagaactgcaaatagcagtggacatggtgagaggcgtttgcacatgggataggcaggattttggaggmagagcctccagggcttgccgatgggttagctgcagggcttgagagggaacggagaatccaggatgatgtgttcaaatcggtccattcacctcttccgttccacgcctgtgctgggcactgggagagacagatgcacacaggagccccggacgag

SEQ ID NO: 173382 - DNA, 559 bp, Homo sapiens
aaccccacacggtgccaggcacacagtagggcctcggcagatgctgcccccttctgtctccaccaccctcctggggctccctcctgaaacagcctccctcagcgccttgagtcttgcaccctaacagcctcttgcacgcagtgagagggaggcccccaggccagctgtctctgttcagaaagacctgggggtctccttgaccatgggctcagggctcagaccccaacacaaacaagccccgtgtgctgaagagaagcaagtcctttagctgaggtccaaaggctgtgagtcctgcatgagcctgaagtggtgcaggtgcctggtcacactggaggtgtagagcttggggatctgaatgtgctgtttgcctcggacatsaaacatctcacagactgcctggaagaaggtggagcagactggggttaatggtcagcagcagcagcatccccaccactggggctatccctttttaggcccttaccatgggccaaacactgagccgtgtgcttcgtgtaacttctaagcacgcttacctgatagggtgacagcaaagactcga

SEQ ID NO: 173383 - DNA, 355 bp, Homo sapiens
cgtgccatttcttggaaccacttgcttgtttaattctagtctatcaagtgataactttgttgatatttagaggctcctcagttaatttctgtgggatttttggttatatttaataaggaaaataatatgaaatgtctaagaaaaaaagaaacaaagtcaactattcctgagaatgtttaaatttattgaagtacacttgttaattgttagtatagaacctacatttcatgatagaaaaccttggacttgccagttgtagctgctggaatgaggtstttgtccagtacatccagaacgtcgccacagattaactttagctcagtctcaacctgaaaaaataaaaataaattaaaaa

SEQ ID NO: 173384 - DNA, 637 bp, Homo sapiens
gtgctcgttttttcccttcgttgaatgctgggtgcagtgaatgctgggtgcatcttcatgttgggttctgagtccttttgacatgagcacattgtctggtgttgtacgaragagcaaaataaggaaactggtgttctatgcttatcttgtacattttccccacacttggaatcagccattcctccagggagtgcaggttcacagtctgggctctaagagaattataaggtcaatgtggtcatcatcttttagtattaagtcagatattctaaattattatttacttcttacatttggcccaagagtttaaccagatattttgggaaagagagaaggaattaaataaataaatctcatggttagaactgaagtgataactatactttcacaaggaaatataacttataacccatgcggaatagaaaattatttttgctcctttagatttctgaaggaatgaaatgagctgtgggaagaaactttaactggagcatcttaccagtattattcatgttttaactctgcttcagtagtttttcaggtttattacaaacctgcagtagccaactgaattaattatctctaaacagggatttagccagtggactaggcacactgaagctttgtgagaggggaa

SEQ ID NO: 173385 - DNA, 637 bp, Homo sapiens
gtgctcgttttttcccttcgttgaatgctgggtgcagtgaatgctgggtgcatcttcatgttgggttctgagtccttttgacatgagcacattgtctggtgttgtacgagagagcaaaataaggaaactggtgttctatgcttatcttgtacattttccccacacttggaatcagccattcctccagggagtgcaggttcacagtctgggctctragagaattataaggtcaatgtggtcatcatcttttagtattaagtcagatattctaaattattatttacttcttacatttggcccaagagtttaaccagatattttgggaaagagagaaggaattaaataaataaatctcatggttagaactgaagtgataactatactttcacaaggaaatataacttataacccatgcggaatagaaaattatttttgctcctttagatttctgaaggaatgaaatgagctgtgggaagaaactttaactggagcatcttaccagtattattcatgttttaactctgcttcagtagtttttcaggtttattacaaacctgcagtagccaactgaattaattatctctaaacagggatttagccagtggactaggcacactgaagctttgtgagaggggaa

SEQ ID NO: 173386 - DNA, 637 bp, Homo sapiens
gtgctcgttttttcccttcgttgaatgctgggtgcagtgaatgctgggtgcatcttcatgttgggttctgagtccttttgacatgagcacattgtctggtgttgtacgagagagcaaaataaggaaactggtgttctatgcttatcttgtacattttccccacacttggaatcagccattcctccagggagtgcaggttcacagtctgggctctaagagaattataaggtcaatgtggtcatcatcttttagtattaagtcagatattctaaattattatttacttcttacatttggcccaagagtttaaccagatattttgggaaagagagaaggaattaaataaataaatctcatggttagaactgaagtgataactatactttcacaaggaaatataacttataacccatgcrgaatagaaaattatttttgctcctttagatttctgaaggaatgaaatgagctgtgggaagaaactttaactggagcatcttaccagtattattcatgttttaactctgcttcagtagtttttcaggtttattacaaacctgcagtagccaactgaattaattatctctaaacagggatttagccagtggactaggcacactgaagctttgtgagaggggaa

SEQ ID NO: 173387 - DNA, 637 bp, Homo sapiens
gtgctcgttttttcccttcgttgaatgctgggtgcagtgaatgctgggtgcatcttcatgttgggttctgagtccttttgacatgagcacattgtctggtgttgtacgagagagcaaaataaggaaactggtgttctatgcttatcttgtacattttccccacacttggaatcagccattcctccagggagtgcaggttcacagtctgggctctaagagaattataaggtcaatgtggtcatcatcttttagtattaagtcagatattctaaattattatttacttcttacatttggcccaagagtttaaccagatattttgggaaagagagaaggaattaaataaataaatctcatggttagaactgaagtgataactatactttcacaaggaaatataacttataacccatgcggaatagaaaattatttttgctcctttagatttctgaaggaatgaaatgagctgtgggaagaaactttaactggagcatcttrccagtattattcatgttttaactctgcttcagtagtttttcaggtttattacaaacctgcagtagccaactgaattaattatctctaaacagggatttagccagtggactaggcacactgaagctttgtgagaggggaa

SEQ ID NO: 173388 - DNA, 465 bp, Homo sapiens
agggctcatggctggataatttccctaggcttaacaacccaagcaagcttcgcatcctcgttttatttttggttaaacttatgaaaatgtattaagaaagagtgcagctcgagagagattcagagatggaacacaccagaccccagatcacaaagccaaccatgcccrgcccctcccagcaccccaagccccacgaccatcgttctgaattctgacgacaccgtgagcctgcctttgtacttcaaactcatggaaggataaccaccttcatgttttgaaataaatgtttcctgttgaaatgattttagattttagacagaaatattgaaaaggcactatagtatcctcctataccttccatccagctgcccctaataatgatgttttgcagtcccatggcacataagaaatttaggccgggtgtggtggctcacacctgtaatcccagcaatttgagaggtcgag

SEQ ID NO: 173389 - DNA, 468 bp, Homo sapiens
gccagggctcatggctggataatttccctaggcttaacaacccaagcaagcttcgcatcctcgttttatttttggttaaacttatgaaaatgtattaagaaagagtgcagctcgagagagattcagagatggaacacaccagaccccagatcacaaagccaaccatgcccagcccctcccagcaccccmagccccacgaccatcgttctgaattctgacgacaccgtgagcctgcctttgtacttcaaactcatggaaggataaccaccttcatgttttgaaataaatgtttcctgttgaaatgattttagattttagacagaaatattgaaaaggcactatagtatcctcctataccttccatccagctgcccctaataatgatgttttgcagtcccatggcacataagaaatttaggccgggtgtggtggctcacacctgtaatcccagcaatttgagaggtcgag

SEQ ID NO: 173390 - DNA, 465 bp, Homo sapiens
agggctcatggctggataatttccctaggcttaacaacccaagcaagcttcgcatcctcgttttatttttggttaaacttatgaaaatgtattaagaaagagtgcagctcgagagagattcagagatggaacacaccagaccccagatcacaaagccaaccatgcccagcccctcccagcaccccaagccccacgaccatcgttctgaattctgacgacaccgtgagcctgcctttgtacttcaaactcatggaaggataaccaccttcatgttttgaaataaatgtttcctgttgaaatgattttagattttagacagaaatattgaaaaggcactatagtatcctcctataccttccatccagctgcccctaataatgatgttttgcagtcccatggcacataagaaatttargccgggtgtggtggctcacacctgtaatcccagcaatttgagaggtcgag

SEQ ID NO: 173391 - DNA, 551 bp, Homo sapiens
atttctagctcaaaaaatggttacaaatattattatagaaaacattgacaatatttgtagatgcatggcaaataagggaacagtttttgaaaatatggtaaaactaatgactttgcactcaactacagtcaactcttaattaactggcctaattagggtgaggtgaggaatagataaacagaaaaatcacagattacctagaagtggttaaaacaaaagtaatttaaaatatgacataagtaaattttttaataatctagtattttggaacacagttcacagatatgatctgaaactgtaaaagtamtacaagtacttttatttaagatcacatgaatcatctgcccaaaattactgggctgttaaacaacttttttttttttttttttttgagacggagtctcactctgtcacccaggctggagtgcagtggtgcaatcttggctcactgcaacctccgcttcccaggttcatgtgattctcctacctctggagtaggtgggattacaggagtgccccaccgcacccagccttaaacagcttcttggtaa

SEQ ID NO: 173392 - DNA, 551 bp, Homo sapiens
ttctttgtgcaaataaactctgttaaatttaatttatctaaactttaaaaaaaattaatgtactgaaagaaaatccaaaattatatcaattattactataaaataaagtagaaaaatactttratgtaaagtataaaaatactgatttcaaaacagaaaaatatttccccatccttatgccagtttttaattaagcaaattgttaattcaatgtttatagagtctatatggggctgccattataatagataaatttgactcacatatttatattttgtataattttatgtcatattttttccatcaaataatgagttaagatttttcaagagagtgttttgtttattttagtattgaagaatgagctaatgttttaagagtctgatcattttacattttagtcacaaattgaggtagctttatgaatcagtgaaattttccaatttttaggggaatgctctcctataacatgtcatatctagtatatataggttggtcacaatatttcccatattttctcttaaatcctttctcttaaagcctctacacta

SEQ ID NO: 173393 - DNA, 539 bp, Homo sapiens
aatcttgacataaagaaatctgtttttgaacaagataagtttcttaaaaatacaatgtctccaagtttcactaaaataaggacaaactcaatgcatacagtggaatttaattttgaatttgcctatttaaatatccatgcacttatatgaatacttatactttaatatactttgtatatatatttatactttaaatatccatatacttatatgtgaacacatamtactacttagtttttgatgacacattatactttcctttttataaattaaataatattaaaattacataagggaaagttgaacatttacatacatatatatttatcattactcaaatacctacattccacatatatctaataatttgaatagtgtgtatttattcatatgaaacaggcattgttttgattgcattccttgaaatgtggagtcctctatggaactacttttcctgactacctgacataatcatgtgtaactgtcacaatttatttaagctgcactttttataaagcttttatacactatataaaaat

SEQ ID NO: 173394 - DNA, 558 bp, Homo sapiens
atgcacacacattatactacctcccatctcccctcaccctacaattaactagtgacagctatacacacatcttaaatgttatcaactttcattgcataaatcaaatgataacataggctttttttttwaaatattataagtaagaaatacaaaagataatgagatgcttgagtgtcttgatatgaaagcaaaaatttaatttgcttatgctttatacttgtttgggtagattcttacccttttattacatattcaactttattgttaataacatttatatctttagtaagtgtatacaaggactttccctgttttattctaaacctagtcacctagatcacttgtggattcaagagaaaatgagtaaaactagagcttttaaaaataaccaccttcctttcattttgaaaattgaactggtaaatatgcatgccttgtgatactagggaaatgataaacagataaatgagtgatattgaaaatataggcaatacaagtgttctatatttcttgtaaagaaattttatatgttgttgtacaggtaaaacaaatttgtca

SEQ ID NO: 173395 - DNA, 539 bp, Homo sapiens
ttttaaaaagccttcaagacatgagtagcacttttagttaactgctagattttttttcttccacccccattttttgtgaattgcccaaattatgatatttaaataatatgtgtgccattacaagcaagttaaagtttagcaataagattctaatcacaagatatatcaaatgtggcaaattgtgacttattaataatatataatttttttaaatctagattttttggtgcctaayagaatattaggttacctgtgtgccccactcatcttttttatacagaaatgtatagaattataactcaagtattaacttttcaagatttttgaagttgcttggaaaattataaattttctttcaaatgtcattttgtatctatatatatctaaatatttctcaaaaaagagccattgacttaggatcagaaaaatgacatataactgcgacatttttacttcatcctcaataagttagtcgaagtaatttactataagctgactattttcatgcatatttgagagtattcagtcaaaatagaaac

SEQ ID NO: 173396 - DNA, 654 bp, Homo sapiens
tcaggtcaggagttcaacaccagcctgaaaagcatagtgagaccctgcctctacaaaaaataaaataaaaaaaaattagcctagcatggtggcaggtgtgtagtttagtccctctagaggctgaggttggaggaccacttgagttaaaggctgcagtaactakgatcatgccactgcattctagcctgggtaatagaatgtgaccctgtctctaaaataaataaatgaataaataaataaaggaatttatctgacattcttaaaaaaaacacaagaaacaaacttaattacttaatttaaactattgattgtagttaactactgctacatttagaaacaactgctgtgtgccccaaatgttgtggtaatgttagcttgccagaagaattcagaaaaagaaaaggtaatgataagctcagctgcatcagataatgaaggttacttaaacaaatgtgtattaatttaaatattagaaacagtgttaggtgccagggaaataaaaagtaaagacaaaatatctgtcaggtcctctgtcaagtgctttccaagttctgtgttattttatataaccctcagaagaattgtatatattcacaagaaggtaaatattgatgatctatgtatcatgtaaaaatgacaattgttaccattttg

SEQ ID NO: 173397 - DNA, 314 bp, Homo sapiens
aagtcctttctctcttggcttcaatgtttccttcgctcctcccaagcatgctatgttttacctatactggacctgctaacatgctttttgtgattttcgccatctaacaaacacacactgagagggcctcctatgcactaggyacttagctaaatgttttacatatattacattatttaatacttaatataatttaggtagttacatatttaatagctccatttttttcatagcagggaaaataagggttcagattaagtaaactgcccaaatcatagagctaaaaagaaacaaagcaaggattcaaacacagt

SEQ ID NO: 173398 - DNA, 423 bp, Homo sapiens
attctgagttggctcttgctagttttatttgaagtaaaaataaaattttctaagtgttcagggggaaaatagtgatagtttctcatggcctggaataatcagaaagcatataggtaggctgtcacgggtgaagatttattgaaggaaaaatgtcctagacaagaaacatcaagaaaagaaagaggggctttaaaaaagtgaggaacttaaagcaaactttacctactacattgattgaarggctattccattcatagtgtgatagcaattattctagctctatgcttccctactttcaaactaattttcagctgcaaaaagatcagttttttttttcaagtttcggctatgatcttgcctatccatccctttgcatcacaatttcaaatcttaactaaaaatctattaaccaaaatgtttatt

SEQ ID NO: 173399 - DNA, 530 bp, Homo sapiens
ggaaaaaagagggttggtattgacaaggaaatgtggttggtgtctagataatttgtagtaatgctattttattaattgtactccttctaaaaaaacaaccagtttgggtggggaatggataggcaaaagataaaaatgtatttctagttttaaagacaaaattccctcttggatgattctacatatttaggcattcatatcttaatttgaaacacatttaccttgtaactagctttgtgktgcatctgacactgcagcagaagattggcaataggcctggaaaaagggatacagatagactgatgtgggagaagggctctgatttacaagaccagaacacagcatgaatccactggaggcctgaatggtagtgaacacagaacagagataggtggatctgcagaggccactaactgttctgttgttctcagaagagtattactgatatatacctgagcatatggctgtggaataaaaactctactccccagtctttcttgcagctaagaagtccagatgacaaagaattc

SEQ ID NO: 173400 - DNA, 373 bp, Homo sapiens
ctaacctgcttcatagacctagagctccccaagtaacctagagagaggttccttgaaacccttgcaaagtggccatagttccaaaacactttccttccccagggagtyttcagcatttatcatgtgactgagcactgaagaaatggaattacccagaccctttcaagtgccaccacagtccaatactcaagaacttacctagatcaggtgctacctggagtcttagcccaaatccatctcacatctgttcagtgggcctatacacccatccttggcttaaaaaaaaaaaaaaaaaaaaaaaaaactatcgggatcacaagagataacaatgcatacgtcatctcagagatatatcacagaatcggcctctgaa

SEQ ID NO: 173401 - DNA, 373 bp, Homo sapiens
ctaacctgcttcatagacctagagctccccaagtaacctagagagaggttccttgaaacccttgcaaagtggccatagttccaaaacactttccttccccagggagtcttcagcatttatcatgtgactgagcactgaagaaatggaattacccagaccctttcaagtgccaccacagtccaatactcaagaacttacctagatcaggtgctacctggagtyttagcccaaatccatctcacatctgttcagtgggcctatacacccatccttggcttaaaaaaaaaaaaaaaaaaaaaaaaaactatcgggatcacaagagataacaatgcatacgtcatctcagagatatatcacagaatcggcctctgaa

SEQ ID NO: 173402 - DNA, 373 bp, Homo sapiens
ctaacctgcttcatagacctagagctccccaagtaacctagagagaggttccttgaaacccttgcaaagtggccatagttccaaaacactttccttccccagggagtcttcagcatttatcatgtgactgagcactgaagaaatggaattacccagaccctttcaagtgccaccacagtccaatactcaagaacttacctagatcaggtgctacctggagtcttagcccaaatccatytcacatctgttcagtgggcctatacacccatccttggcttaaaaaaaaaaaaaaaaaaaaaaaaaactatcgggatcacaagagataacaatgcatacgtcatctcagagatatatcacagaatcggcctctgaa

SEQ ID NO: 173403 - DNA, 373 bp, Homo sapiens
ctaacctgcttcatagacctagagctccccaagtaacctagagagaggttccttgaaacccttgcaaagtggccatagttccaaaacactttccttccccagggagtcttcagcatttatcatgtgactgagcactgaagaaatggaattacccagaccctttcaagtgccaccacagtccaatactcaagaacttacctagatcaggtgctacctggagtcttagcccaaatccatctcacatytgttcagtgggcctatacacccatccttggcttaaaaaaaaaaaaaaaaaaaaaaaaaactatcgggatcacaagagataacaatgcatacgtcatctcagagatatatcacagaatcggcctctgaa

SEQ ID NO: 173404 - DNA, 575 bp, Homo sapiens
taaaaataatcgctgctgcattgtgattccagagaatggaataaccataaatgtattacttctcagacattcacagtgatggtgtacaggatcatgctcactctagggcaagcaacattataacattgtttagaagcytgatttgctataaattgaggaacaaggtgtatcaggaaaatctaaaatatccctttgattatcccagtacagtgattacgaacttaaggctgggagctgaactctttacattcataccttagctcttccagctctgtaactctaggcaaattatttatgctccccacacctcagttttctcatgtgtaaaacaagggtagtggtagtacattctttaaagagattttataaggatgaattaagacaatgtgaagaacttagcagagtgtcttatatataccaagcttcaaatattgctttactatcttgagttaataggaaaatcaaagaggtattaaatggagagtggatataaaagctttgaggtgaaggagtggtcaggtgatgaggtgctggttaccttgccccttagtgtttagctgatttgtgttggtggt

SEQ ID NO: 173405 - DNA, 409 bp, Homo sapiens
ccacaggtggctgcccaggccctaggtgaataccaggtctcgcakggacattaggccccaggtgaacagcaagccccaagtgaatacctaggttcctggtgaacatcaggacccaggtggcactcaggccctacactcaggccaaaagtggaaatcagaacatatgtggacactcagggcccaggtggctatcaggccccaggtttatatcactttcctggtagacatcagtacccaggtagatactggacttcaggtatacatcaggttcctaggtggacacccaggccccaggtggacaccagcctacaagtggacatcagaccacaggaggacacccaggccccagatagatatcagactccagaggaacacccaggcctcaggtggacatcaggtcccaggttaa

SEQ ID NO: 173406 - DNA, 409 bp, Homo sapiens
ccacaggtggctgcccaggccctaggtgaataccaggtctcgcagggacattaggccccaggtgaacagcaagccccaagtgaatacctaggttcctggtgaacatcaggamccaggtggcactcaggccctacactcaggccaaaagtggaaatcagaacatatgtggacactcagggcccaggtggctatcaggccccaggtttatatcactttcctggtagacatcagtacccaggtagatactggacttcaggtatacatcaggttcctaggtggacacccaggccccaggtggacaccagcctacaagtggacatcagaccacaggaggacacccaggccccagatagatatcagactccagaggaacacccaggcctcaggtggacatcaggtcccaggttaa

SEQ ID NO: 173407 - DNA, 409 bp, Homo sapiens
ccacaggtggctgcccaggccctaggtgaataccaggtctcgcagggacattaggccccaggtgaacagcaagccccaagtgaatacctaggttcctggtgaacatcaggacscaggtggcactcaggccctacactcaggccaaaagtggaaatcagaacatatgtggacactcagggcccaggtggctatcaggccccaggtttatatcactttcctggtagacatcagtacccaggtagatactggacttcaggtatacatcaggttcctaggtggacacccaggccccaggtggacaccagcctacaagtggacatcagaccacaggaggacacccaggccccagatagatatcagactccagaggaacacccaggcctcaggtggacatcaggtcccaggttaa

SEQ ID NO: 173408 - DNA, 534 bp, Homo sapiens
gcagcttgttaaactgatcactggtggtagagctttttcattctgctcacttcttaaaaggtcagcttggtcagggattagtgctcccttgccagaaataagcagttaggaatcaagtaaaggagtcagctaaaagygtaattactaagtagcgaggtcacagctagatggttgttgatctcattttctctctgctgctgatttcaaggctttataccgtgttttgatgtaacatagaatgtatactatgaaggacaaatagtctgttagcttcttggagctatgctccattactggagcaggggacaacaatttgaaggacattactacttagacagtttaatctgcctttggctagaataaacttcaagttccaagggctgggttcagttgttatgcaaatttagattgttgcggtaaaatttccaaataaaaagataggactctttagatgaaataagaatttaactgtatttgaaccctgttgaaggccagacaagtttaggcaaaatcccatgactgaacactctgtga

SEQ ID NO: 173409 - DNA, 534 bp, Homo sapiens
gcagcttgttaaactgatcactggtggtagagctttttcattctgctcacttcttaaaaggtcagcttggtcagggattagtgctcccttgccagaaataagcagttaggaatcaagtaaaggagtcagctaaaagcgtaattactaagtagcgaggtcacagctagatggttgttgatctcattttctctctgctgctgatttcaaggctttataccgtgttttgatgtaacatagaatgtatactatgaaggacaaatagtctgttagcttcttggagctatrctccattactggagcaggggacaacaatttgaaggacattactacttagacagtttaatctgcctttggctagaataaacttcaagttccaagggctgggttcagttgttatgcaaatttagattgttgcggtaaaatttccaaataaaaagataggactctttagatgaaataagaatttaactgtatttgaaccctgttgaaggccagacaagtttaggcaaaatcccatgactgaacactctgtga

SEQ ID NO: 173410 - DNA, 534 bp, Homo sapiens
gcagcttgttaaactgatcactggtggtagagctttttcattctgctcacttcttaaaaggtcagcttggtcagggattagtgctcccttgccagaaataagcagttaggaatcaagtaaaggagtcagctaaaagcgtaattactaagtagcgaggtcacagctagatggttgttgatctcattttctctctgctgctgatttcaaggctttataccgtgttttgatgtaacatagaatgtatactatgaaggacaaatagtctgttagcttcttggagctatgctccattactggagcaggggacaacaatttgaaggacattactacttagacagtttaatctgcctttggctagaataaacttcaagttccaagggctgggttcagttgttatgcaaatttagattgttgyggtaaaatttccaaataaaaagataggactctttagatgaaataagaatttaactgtatttgaaccctgttgaaggccagacaagtttaggcaaaatcccatgactgaacactctgtga

SEQ ID NO: 173411 - DNA, 498 bp, Homo sapiens
gtagaatctataaagggatatttcagagcccattgaggcctactgtggaaaactgaatattctgcaataaaaactagaaacaagctatctgtgtaaatgctttgccatgtgtgggttcattttacagagttaaacctttgtttggattcagcaggytgaaaacagtcttttaatagaatctacaaagggacgtttcaaagtacactgaaggccatactgaaaaacctaataccagtgattaaaactagcagcaagctatctgtgaaaatgctttctgatatgtggatttgtctcacaaacttaaacctttgttttgattcagcaggttggcaacactctttttgtacaagctgtgaagggacattttggagctcactgaggcctatagtgaaaaaatgaatatttcaagataaaaactagaaacaagcaatatttgaaaatgcttggtggtgcgtggattcatctcacagaggtaaacctttatattgattcagcacg

SEQ ID NO: 173412 - DNA, 528 bp, Homo sapiens
ggtttccattttagagagttgaagatctgaggtctggagaagttagtgttagaaagttatatttaacaggtggcaagaccatgtggccaggtcaggtaagctgccttcagattttactcttgaacttctactggataatgtctttttgttatagaaaagaaaagagtgaacttagatttttttttcaaaatcatgggctgtaagagttctttcaagaaatgatgaaaagcaataattgtctcattttacattacctataattattgctcmccagaaattgattattgatgcagcaaccttttacattcctctctgctttactatgcatgaaggggcttcactgtaaataagaggtccaagattcagaaatatctttaacttgcaatgcttagtctcgtgtatccatctgaaaaatattttgctcattagccatatggactcatatggcaaactacagccagagacacaaaatgtggaaagaggaaagggctatcagaagtcccgtgtctccttacattttgtatttct

SEQ ID NO: 173413 - DNA, 456 bp, Homo sapiens
attcacctcacagagttaaaccattcctttcattcrccagttttgaaactctctttttgtggaatctgcaattggagatttttagtgctttgagcctatggtagaaaaggaaatatcttcaaaaaaaaagtagatagaagcattctgagaaactactttgtgatgtgtgcattcatctcccagagttgaaattttcttttgaaggtccagttttgaaatactattttcatagaatctgcaagtggacatttcaagcgcctagaggactatggtggaaaaggaaatatcttcacataaaaactaaacagaagaattaggagaaacttcttcgtgatatgtgcgctcatttcacagagttgaacctttcttttgattgaacagtttggaaacactctgttcgtagaatctgcaattggatatttggagagctttgcggcctatgtagaaaaggaaata

SEQ ID NO: 173414 - DNA, 434 bp, Homo sapiens
ctgactggtctggaggatacctaaaggactcatgaaaggcttttgttttttctgtgttgctagaatacagaacagataaggaatggacataattaagaaactctgcaaggagacctaacaaaccacagatgcttagggcaaaaattagagtttacacatatagtagatcaccttcagcacaggaagaaaagttggagaagagtatttggaaaactaagacattcaaaatcattcacgtacatggaagagtctagaaagtcacatgtatgcataggttaagccacatgctgacaaatgtcataagaagaccctacacttttaccttggcgatccctcccctcagtgcaagctctgtgcaagagtgaacttgaacttcactcagtgcaagagtgaacacacaytttgtgccggctttaaagaacccagcacaaagc

SEQ ID NO: 173415 - DNA, 404 bp, Homo sapiens
cgggtcccttcacatcagttcacagtacaaagtaactcctttcttgtagaaaacattattattatcattattatttttgagatggaatttgactcttgtagcccaggctggagtgygatggtgtgatctcagctcactgcaacctctgcctcccaggttcaaaggattctcctgcctcagcctcccaagcagctgggattaccggcatgcaccaagatggcctgctaattttttgtatttttgtagagatggggattcaccatgttggccaggctggtcttgaactcctgacctcaggtgatccacttgcctcaaccttccaaagtgttgagattacaggcaggagccaccacacccagactagaaaacattattcaatagcaaacagtagcagtatgcttggg

SEQ ID NO: 173416 - DNA, 432 bp, Homo sapiens
ctgtcatcaatccaaaagcttacacatggcgggtcccttcacatcagttcacagtacaaagtaactcctttcttgtagaaaacattattattatcattattatttttgagatggaatttgactcttgtagcccaggctggagtgtgatggtgtgatctcagctcactgcaacctcygcctcccaggttcaaaggattctcctgcctcagcctcccaagcagctgggattaccggcatgcaccaagatggcctgctaattttttgtatttttgtagagatggggattcaccatgttggccaggctggtcttgaactcctgacctcaggtgatccacttgcctcaaccttccaaagtgttgagattacaggcaggagccaccacacccagactagaaaacattattcaatagcaaacagtagcagtatgcttgg

SEQ ID NO: 173417 - DNA, 404 bp, Homo sapiens
cgggtcccttcacatcagttcacagtacaaagtaactcctttcttgtagaaaacattattattatcattattatttttgagatggaatttgactcttgtagcccaggctggagtgtgatggtgtgatctcagctcactgcaacctctgcctcccaggttcaaaggattctcctgcctcagcctcccaagcagctgggattacyggcatgcaccaagatggcctgctaattttttgtatttttgtagagatggggattcaccatgttggccaggctggtcttgaactcctgacctcaggtgatccacttgcctcaaccttccaaagtgttgagattacaggcaggagccaccacacccagactagaaaacattattcaatagcaaacagtagcagtatgcttggg

SEQ ID NO: 173418 - DNA, 429 bp, Homo sapiens
ttctccattcatcaaaattttaaagtcatgtttttcctcagattcttctccaagctcagtctgaaatgatgaaagcagccaagcattgtggctcacgcctgtaatctcagcattttgggaggctgatgtggacggatcacctgcggtcaggagctggtcaacatggtaaaaccccatctctactaaaaatacaaaaattagctrggcatgatggtgggcacctataatcccagctactctataatcccagctactcgggaggctacagtgagatgagatcacaccacttgactcaaaagagtgaaactctgtctcaaaacaaaacaacaacaacaatgacaaaggaaacaggaaaacatcctcaataatagaggatttactaaactagggtgcagccactcatactgtgtcttgatttgtagattaaga

SEQ ID NO: 173419 - DNA, 429 bp, Homo sapiens
ttctccattcatcaaaattttaaagtcatgtttttcctcagattcttctccaagctcagtctgaaatgatgaaagcagccaagcattgtggctcacgcctgtaatctcagcattttgggaggctgatgtggacggatcacctgcggtcaggagctggtcaacatggtaaaaccccatctctactaaaaatacaaaaattagctgggcatgrtggtgggcacctataatcccagctactctataatcccagctactcgggaggctacagtgagatgagatcacaccacttgactcaaaagagtgaaactctgtctcaaaacaaaacaacaacaacaatgacaaaggaaacaggaaaacatcctcaataatagaggatttactaaactagggtgcagccactcatactgtgtcttgatttgtagattaaga

SEQ ID NO: 173420 - DNA, 474 bp, Homo sapiens
cgtcattgctggttttgcgatgtggaggctcacataggaagtctggagacaggttactaggagctgacaccagcaaccaccagttgacacaggcaagaaaacaatgacgtacaactgtacaagatactgggaatggtgatacaactgcaaacaactaaattctgccaacaaccttaataaacctggaaatgtactcttaccagagcttcccaataagatccctgttgattgtcaccttcgtttggaccttgycggatgttgaacaggggagctggttgagcccactcagacttcagacctacagaagtgtgagataataatttatgttgctgaagccattaatttagttgaaattgtcatggtgccaatataaaacaaatactttattttagaatgagactagataacgaagggcttgtgttgattttcaagaagattgaaaaatatatctcataaatctagtgaaaacatgaa

SEQ ID NO: 173421 - DNA, 515 bp, Homo sapiens
ctctctccgttttgttttcctagaatagcccattgcttgtattaaaatcatttctaggtataaactttattctcagtaaaaccttgaaaatgtgaatatacttggcatttttacttcatcaataygtaggaaaattctgtacaaagccaaaattcttcttttgattgccctcataatataggaaaaaaagatggaaatataaatattttatatgaaaactaaaatcttctgatatggcctcaaggcatgttggtcagcctcatccctttcacaaactggcatcagtgactgttactctcagtttccttccttgtttcctcacatatactctccctattcctcccccaaaatcattactgctagttaaaatagatctttctttccatttttcattcttgtcaccattttcaggaaataactattgcccctttctttgatcaaaagcaactccccaagtacaatgtttttttcttgcctgaggaaggttattttttcctgctggaaagaaatgaaag

SEQ ID NO: 173422 - DNA, 515 bp, Homo sapiens
ctctctccgttttgttttcctagaatagcccattgcttgtattaaaatcatttctaggtataaactttattctcagtaaaaccttgaaaatgtgaatatacttggcatttttacttcatcaatacgtaggaaaattctgtacaaagccaaaattcttcttttgattgccctcataayataggaaaaaaagatggaaatataaatattttatatgaaaactaaaatcttctgatatggcctcaaggcatgttggtcagcctcatccctttcacaaactggcatcagtgactgttactctcagtttccttccttgtttcctcacatatactctccctattcctcccccaaaatcattactgctagttaaaatagatctttctttccatttttcattcttgtcaccattttcaggaaataactattgcccctttctttgatcaaaagcaactccccaagtacaatgtttttttcttgcctgaggaaggttattttttcctgctggaaagaaatgaaag

SEQ ID NO: 173423 - DNA, 515 bp, Homo sapiens
ctctctccgttttgttttcctagaatagcccattgcttgtattaaaatcatttctaggtataaactttattctcagtaaaaccttgaaaatgtgaatatacttggcatttttacttcatcaatacgtaggaaaattctgtacaaagccaaaattcttcttttgattgccctcataatataggaaaaaaagatggaaatataaatattttatatgaaaactaaaatyttctgatatggcctcaaggcatgttggtcagcctcatccctttcacaaactggcatcagtgactgttactctcagtttccttccttgtttcctcacatatactctccctattcctcccccaaaatcattactgctagttaaaatagatctttctttccatttttcattcttgtcaccattttcaggaaataactattgcccctttctttgatcaaaagcaactccccaagtacaatgtttttttcttgcctgaggaaggttattttttcctgctggaaagaaatgaaag

SEQ ID NO: 173424 - DNA, 515 bp, Homo sapiens
ctctctccgttttgttttcctagaatagcccattgcttgtattaaaatcatttctaggtataaactttattctcagtaaaaccttgaaaatgtgaatatacttggcatttttacttcatcaatacgtaggaaaattctgtacaaagccaaaattcttcttttgattgccctcataatataggaaaaaaagatggaaatataaatattttatatgaaaactaaaatcttctgatatggcctcaaggcatgttggtcagcctcatccctttcacaaactggcatcagtgactgttactctcagtttccttccttgtttcctcacatatactctccctattcctcccccaaaatcattactkctagttaaaatagatctttctttccatttttcattcttgtcaccattttcaggaaataactattgcccctttctttgatcaaaagcaactccccaagtacaatgtttttttcttgcctgaggaaggttattttttcctgctggaaagaaatgaaag

SEQ ID NO: 173425 - DNA, 472 bp, Homo sapiens
agcagtctaaaagtaaaatctgaaggtaaaatagaaaccacaggaacttctaccagtaactgcagatttgtaattgatatcaactctcccatggaacacaacaacaaaattttcttcgagacactaagtgttaacaaagcaatggaaaattgcaaagcccagatccaagagatgagcttggcattgagaatcacttttcagctcaagatttttactgatwctaggaagttaaaaaatagattgcaaaactaaggaatacttttggcagccaaatgcatgtaactgtgtgagtgtgcaagggaatgtggtggggagaattggagcacagtaccctccaggctttgagttgggggcaaagactacactcaataaagaccagcccactcagggacataaaactagtgtctgattatctgtccacttatggatgtattaaagtaacctgctagtgtccctagcttactgcaaagag

SEQ ID NO: 173426 - DNA, 517 bp, Homo sapiens
aatgaatctctttataattgcataattatagtacagatgttcctcaacttatgatagggttacatcctgataagcccaatatagttgaaaatatcataagtagaaaatgcatttaatatacccaacctgccaagcatcatcgcttagcctagcctaccttaaacatgctcagtgcactaacattagcctacagttgggcaaaattatctaacagaaagcctactttatcagaaagtgttgaatctgtcatgtaatgtattgaatatggtacgttatgttgaaattgtgattgttttgcartattgtaaagtcgaaaaattgtaagtcaaaccatcattaagtcaaggactatccgtatatttaaattcttttatacagacacacacacacacatacatacacacggagaaagaggggaagagagtgacagaaagataaacagtgagacagaaagagagaccagaaattaccagtgtgagaaattaataaaagagaggacatcactacagtttctata

SEQ ID NO: 173427 - DNA, 517 bp, Homo sapiens
aatgaatctctttataattgcataattatagtacagatgttcctcaacttatgatagggttacatcctgataagcccaatatagttgaaaatatcataagtagaaaatgcatttaatatacccaacctgccaagcatcatcgcttagcctagcctaccttaaacatgctcagtgcactaacattagcctacagttgggcaaaattatctaacagaaagcctactttatcagaaagtgttgaatctgtcatgtaatgtattgaatatggtacgttatgttgaaattgtgattgttttgcaatattgtaaagtcgaaaaattgtaagtcaaaccatcattaagtcaaggactatccgtatatttaaattcttttatacagacacacacacacacatacatacacacrgagaaagaggggaagagagtgacagaaagataaacagtgagacagaaagagagaccagaaattaccagtgtgagaaattaataaaagagaggacatcactacagtttctata

SEQ ID NO: 173428 - DNA, 567 bp, Homo sapiens
tgattgcctccagttatatttttaatctttatttacaatttattctaatttttaggctttagtttaccttttgggggaatttattttttaatcttgttagaacttgttttggtgactggtagatgggaacaatcatgaatggtgtcattatttgtcttagtctgctcgaactgccatcacaaaataccacagactgagtggtttaaacagaaatgtattttcttacacatctggaggctggaaagtccaagatcaggatctgtgaatgtttgctgtctggtgagcrttctcttgcagacagtcaagttctctcactctgtcctcacattgcagggaaagagagcaagctctctggtgtctatgttataagggaactaattccatcatgagaaccctgccctcatgacatcatctaaaccttgttacttcccaaaggccctgtacccaaacaccatcacataaattctgaattttgggttaaattacatctatctcattataatactattctgttaatattatttaattggtaatatatgttgaagtttctggagattattgtttttc

SEQ ID NO: 173429 - DNA, 372 bp, Homo sapiens
gtaagggactcaaaatagccaaaatagtcttgaaaaaagaaaacatattacacccccgtgctccaaaccttacggcaaagcatcagtaatcaagacaacacaatactgatgaaggaaaaatatatatattgattgaagagaattgagagtccatagataaaactgtgtatctatagtcaatggattcttacaatggtgccatgtgcaattcaatgaggaagagacagtctttgaacaaactgggtcaacaatgtacacgtggatcaccacttacaaaataataaattygaacccttaccccaaagcatacaacaatattaactcaaatgaattaaagacatacatgcagagctagaataaagcatatgggaa

SEQ ID NO: 173430 - DNA, 507 bp, Homo sapiens
gtgctgtcgacctcaaaacagctcgttgccatatctgatgaaggatgactcatttctttctggtacctcaaaacttgcataatttcaatcagctgttattgggtggtttgaagagataagcgttctttaaggccaggatatggtgtaatatttttggtaaaaattccccaatctcctctttagtaataaggcctgaaacatggttcactgtggctttgaagtgagggcaacctgggtttatatcttagccctactattcagcagttgcaaattgcttctaagcctcagttttctcatctataaagtggagggaataataataataatgataataatacttgcctcttaggatcattctgaggatatcagataatgagactaggcctatcrtatgttatcctgcaaacatatgtgcaatgatgattatttaaaaagggacaaagatagtcaaacaagagtattctattaaatagttgattcaaaaattcttttttatttaattaattt

SEQ ID NO: 173431 - DNA, 542 bp, Homo sapiens
tattcatttaaatgctagcagggaaataaatgactctaaattccctgcattactcacaaatactacaaaaaggaatgttccctggtttctgtggttagaaaatgtatagagcagagtatttcatctaaacctagagtcttctttttttatttggatttgccacttataacatgaatgattttgaaattcccatagcagaaagcttttcatcattgtctcactaagaaagacttgattctagtgccgaaaactgaagaactccttagggcataaagtcagagaacagcagcttattccagaccactcctctaaatrttaatgaaacttacataaatcatacataacatatactatccctttgtgctggaaaatgccatgtttttatggttgtggttgtacagctaggataataggaaccaaagacataaaacagtaattaatatatttcagaagtgaagtgttttattggatagatgctaattaagactgatagatggcagtgattgaaataagcataagccatttggtcaacacaagtgaaa

SEQ ID NO: 173432 - DNA, 569 bp, Homo sapiens
aaagtgtttctttgtagagttcattcaaaatgtaaggatgtttccagcagaaacatttaaaacactcagataagtgttttcaagctttttgaaacatcatctacataaaaaggaatgtgctgtgtatgtattacttctatttattactcttcgcttccaccatcaaaaaaatatttttttttcctgtcagacaaaaaaaaaaaaamcaacccaaaaactgtttcttcccctgatctcacacttttcacctgcaccagctgcttccaattacctgcttccacctgcaggaccttgtctagtattgagattggttcctgtttcaaaacaaccaccaaaagtgacctgggcctgaggcagaaggctgcttcagttaggagcaagaatcttgcatcaatttagtttcctgcttgttgttcctctaaaattcttagttctccactcttggcctggtttctgatcacttgtatttttccatccctgataggcacatcttcctgattacagtctaccatgcattctcgctctatccatggctattctagaatcctcgaatgttagagctaaagaat

SEQ ID NO: 173433 - DNA, 365 bp, Homo sapiens
cacatttgtaaaatgttcacaatcaacgcctgtcccattttaaaatctcacaagtttttcttcatgattaacacaaktcacaaaataagaaatggtatttggtcattctctgagttcaatctgtgctctagtaaatataacttgtgaggaaaaagtaaaaaggtcaagagtctaattcattttcagtttttaaaactatattttaaaaaagaatgatttgggttaaaaataaagatggcttagttttatctcccttacagtaagtagcagaaacttgagctgaaaacacatagaagctgtactcatttctattcacaaagaactgttctactgtctgtctgcaaataaatctcctcagtaaatag

SEQ ID NO: 173434 - DNA, 529 bp, Homo sapiens
ttccctgttattttctcatgtatgaattatatctttattttatggatttaatctcttatggaaaatagaacatctaaacatgattgaatctatgtaaagaatgacatattttattgtaccttgcacatctagtgcaatggaaattatgtcctgaaacccaaactacttaaggattttcttttttttttttttttttgccggggrggggggggggtggatgttgggagggttttttttttaaatttttttaaattattatactttaagttctagggtacatgtacacaacgtgcaggtttgttacatatgtgtacatgtgccatgttggtgtgctgtacccattaactcatcatttaattttgaagctgtaaatactctttcttcacatgaaatatcctgttgaattccaatatgtatctcaattgaaaaccagcataatgagcaaagaaaatatcattaccctcagtttgacactagagttcttcttattgagaactgtgttttcttgagaaaaaaaactatagcaagc

SEQ ID NO: 173435 - DNA, 529 bp, Homo sapiens
ttccctgttattttctcatgtatgaattatatctttattttatggatttaatctcttatggaaaatagaacatctaaacatgattgaatctatgtaaagaatgacatattttattgtaccttgcacatctagtgcaatggaaattatgtcctgaaacccaaactacttaaggattttcttttttttttttttttttgccggggaggsgggggggtggatgttgggagggttttttttttaaatttttttaaattattatactttaagttctagggtacatgtacacaacgtgcaggtttgttacatatgtgtacatgtgccatgttggtgtgctgtacccattaactcatcatttaattttgaagctgtaaatactctttcttcacatgaaatatcctgttgaattccaatatgtatctcaattgaaaaccagcataatgagcaaagaaaatatcattaccctcagtttgacactagagttcttcttattgagaactgtgttttcttgagaaaaaaaactatagcaagc

SEQ ID NO: 173436 - DNA, 406 bp, Homo sapiens
cactgcccctcagcagaagccacaggactgtaagggccatgagggggcgccagggatttacaattataaaggtcttgttgggccataataaagtccctctcagctaacaggtgaccayggggcatgtgatggtcttgctttgttcacccatgtgcgtcttgcatattattcatgctatggatgaacatgtgctcctagccatttcaaggttagacatgttttgagaggatgttgcatctgtgacaactgtcaggagtcacaggtcctgggtcgctgctctgccacccatgtgtgacacctctggctctctcaactcatgcgttttaagacccacactttctcttggagggcatggggagataaatacctcttgatcctaagaattcagttgggaagtgtcacaagg

SEQ ID NO: 173437 - DNA, 571 bp, Homo sapiens
agtaaacatgagtgctagatatttctactttgctttcagacacattcctgctgataacccaagtttcagctgaaacttgacctctgacagagcacttaggtgatcartatcagtagtttagaactaaacttaccctttagtaaatcatcactgcagtttctagaccatttattgtattcttctgtgattcttctgctgcaaacatagtatagaatattttaactgatatctatttggtcagaaataataaatagtatgaggcactctcttaaacagaataaaatttttagaataagtcaagatattgatttggtctccactctccacatgacttatagaaatctgagtctagcaattaaagtgtaaggattgtttattagacattggatctaactttagaatatagtttttgttttattttgccagagaggacatattttctgattttcatagaaatatgaaaaagagaaaaatagttatatatataattcataatttatatgcatacataagtatatataaacagtaaaacatatttatggaaatacatatacacacataaatcataaga

SEQ ID NO: 173438 - DNA, 585 bp, Homo sapiens
ttttggaacagtaaatgagaatgcactatgtttaattagtttatacgtcaacatacttttttttgggagaaaatgttttgtgagctcttgaaaatgttgacagagatgttgccagttacacataaaatgaaaaaaatgcaaacttcataaggcagttttctggtgactataataagttttacaccatctgtatgaaatttataatttgagacctgaagaatagcaggacttaagwtgaaacccctaagttttgcccagtatttgctcagaattattaattggtccaggtttggcatcccagtaaagtttgcatgaaacttaactagggctagctacaaacttggcatttgtccttggaaaaaaatcatcttgagtttacttaaaggtctgtgaacctcagcaaacctctcagtgaccctttctacagtgtggtggttctagtgatatctgaaaccaggaatgttttgtgaagggtttaggtttcatttggaaagccatatctaatcctaggtactgcctaatgaattaagaggctggtcgtccttgaatcctcataaaggcagggctgtgcataaaatccatgag

SEQ ID NO: 173439 - DNA, 563 bp, Homo sapiens
tctagtgttttttctgtgtgtaatctatttattctactatcactgttatctgaagcaggcatgcattgagtctaccatttgaaacgacagcacaatttgttaaatacaaataattattataataggtaactattttatacatattatacattctaaaaatgtttcatatattttgcaagcaaagacaatcctaagaataacaagctttgaccatgtagggctagggaaagtaactactttccaaataacaactaaytggttggtctttggggtattgagttgggcactggtgcattgagctttctctttctccctttctcccataccatgactcacactggcccggatatatatacaattgcatatggaatgatgcattttccctaaaatggggaaaatgagacagtgggcattagcattagaaaacaaaaacaattacaaaagaaatttaaaacataaaacctagagctgattttcaaggaaggcatgcattatttttaaaatgggtaatggatacaaattgcaataacactctttattttcctctttaaattctcttttga

SEQ ID NO: 173440 - DNA, 573 bp, Homo sapiens
aatgcttataatcactacccaataacccagtgtgtatgagtgattagcattctgtgatgaagaacattcagggaagattcacagggtcaccagtccatgggctggcactgaggataaacagaccattataaaggacagagttcatagaagtaatttgcctttttgtactataagagctatttgcattaggaagatcaaagttaaaatacattagcagcaatttgaaagacagaatgaacaygtaagaaaacagtatggagacatatatggctagagttggaatgtaccttgataagtgcttagagaaattaaggcggaagaagtaggtggctttctttgctaacttcttgtgcctcctgtcttctggttgctactgctgtttcctacagggggacatagagaaacactggtagaatggataagccatgacttaactatgtcatttgacaagtagtatacatgtccttaaaaattaacaagatttattttcttgtgcacttaagtccagatgcaatagggtgaaagtatgtgtaaagtttgccaaccactgaaagcaaaataaactaccaaaca

SEQ ID NO: 173441 - DNA, 560 bp, Homo sapiens
tgttcccttatctcttttctgtcctctctctaacttacaaaataaaagcatttatgaacaaggaaaaaacctgtagggaaaatgtccactcatacagccagatagccacagttgctgctaaccatgcacgtttcacagcttggtgcttggctctgcagctgccaagtattatctcaagagtaactataaacactgttggcccgagtggtgtaagggatccagaaggctgacagagtccatgaactgattgccagcaagggatggggacatgccaaattgtgattgaattacacccgtgtgacacttcctactgtaatcacaccctcctttcacagaggccaggctgagactagaaaagcaactactgtgagtcaatgtcattagagatggatggatttggtgycgaccccagctcagcagttgttgtgagagctgggtcagggatatgtgtgctccaagagggacttgcctgaaagggctaagtgaacagatggaagaaagacaaatgtttttacagaaatgtgccccgtgctaaataatgagttgattttaatgagcta

SEQ ID NO: 173442 - DNA, 624 bp, Homo sapiens
gttatgactgcaaccaccagcttttcactcacgacagccaagtcattatttccacctaagctccaaatctatgtatttgacagcctatttgacatcccaccaagtgagcaatttatattcaacattacaaaatgaagtatatatttttcctccaaacctccttcttgtgttatatacccagtttcaaagaaagacattttcatttaaccaaaatcatctgaagaaaatgackagaagtctccttttccttttgcctctcctttgcctctcatactgaattaattgcatacatatcattgaaaaagatatggatgtacctttaatcagttccttttctcaactttcaccactatttctcatgccccaccacttcttatctggcctgttctaactacatcctaagaggtattcacctatatgagaaaaataaatcgacacaagtgttaaggacaagaaagcaatacactttaaagtgcaattagagataataaagaagtgtgacctcaacatctaaaaccatttaaagtgcccagaaatctaatttgccactgttttgatcactggagctttttactgacatcagggaaaagaaataaattctgaattagaccatccattgttctg

SEQ ID NO: 173443 - DNA, 624 bp, Homo sapiens
gttatgactgcaaccaccagcttttcactcacgacagccaagtcattatttccacctaagctccaaatctatgtatttgacagcctatttgacatcccaccaagtgagcaatttatattcaacattacaaaatgaagtatatatttttcctccaaacctccttcttgtgttatatacccagtttcaaagaaagacattttcatttaaccaaaatcatctgaagaaaatgactagaagtstccttttccttttgcctctcctttgcctctcatactgaattaattgcatacatatcattgaaaaagatatggatgtacctttaatcagttccttttctcaactttcaccactatttctcatgccccaccacttcttatctggcctgttctaactacatcctaagaggtattcacctatatgagaaaaataaatcgacacaagtgttaaggacaagaaagcaatacactttaaagtgcaattagagataataaagaagtgtgacctcaacatctaaaaccatttaaagtgcccagaaatctaatttgccactgttttgatcactggagctttttactgacatcagggaaaagaaataaattctgaattagaccatccattgttctg

SEQ ID NO: 173444 - DNA, 624 bp, Homo sapiens
gttatgactgcaaccaccagcttttcactcacgacagccaagtcattatttccacctaagctccaaatctatgtatttgacagcctatttgacatcccaccaagtgagcaatttatattcaacattacaaaatgaagtatatatttttcctccaaacctccttcttgtgttatatacccagtttcaaagaaagacattttcatttaaccaaaatcatctgaagaaaatgactagaagtctccttttcyttttgcctctcctttgcctctcatactgaattaattgcatacatatcattgaaaaagatatggatgtacctttaatcagttccttttctcaactttcaccactatttctcatgccccaccacttcttatctggcctgttctaactacatcctaagaggtattcacctatatgagaaaaataaatcgacacaagtgttaaggacaagaaagcaatacactttaaagtgcaattagagataataaagaagtgtgacctcaacatctaaaaccatttaaagtgcccagaaatctaatttgccactgttttgatcactggagctttttactgacatcagggaaaagaaataaattctgaattagaccatccattgttctg

SEQ ID NO: 173445 - DNA, 588 bp, Homo sapiens
actacggccatgaaaaggaatgaatcaacagcatttgcagtaacctggatgagatgggagattattattctaagtgaagtaactcaggaatggaaaaccaacatcatatgttctcgctgatatgtgggatctaagctatggggacaaaaagcataagaatgacacaatggactttggagacctgggagaagagtgaagggaagagaggtataaaagactacaaatatggtgcagygtatactgctaaggtcatgggtacaccaaaatctcacaaatcaccactaaagaacttactcacgtaaccaaataccacctgtactccaataacttatgaaaaaataatcaaagaaccaaaaaaatacagaaaataataaaaaccaaaacctattttttgatgtcactgatagaatttataaatctttatctatattaatcagaagggaaaaggagaaaacacaaattacaaatatcaggaaagaaaaaggagatactactacatatcctacagatattaaaaaataaggagataatatgaacaactatatgtcataaatttgacaacttaaaagtcatagaaaaattccttga

SEQ ID NO: 173446 - DNA, 533 bp, Homo sapiens
cttgaaacaaaccctggaaacacaacagaacagaacttctttaaggcataagtcacacaggacctataaaacaaaaatacaagttaaaaagcaaaaaacaaacaacaacaaaaaaacaaagtataaaggcaacaaagaacatgatgaacacaatgatatctcacatttcaatactaacattgaatgtaaatggcctgaatgcttcacttaaaagatacagaactgcrgaatagataacccacccaccaactatctgctgccttcaagagattcatctaacacataaggactcacataaacttaaaataaaggggtggaaaaaggcatttcatgtaaatggacaccaaaagtgagcaggagtagctatttttatatcagacaaaacaaactttaaagcaatagcagttaagagagacaaaaaaggacattatataattcatctaacacataaggactcacataaacttaaaataaaggggtggaaaaaggcatttcatgtaaatggacaccaaaagtgagcaggagtagctatt

SEQ ID NO: 173447 - DNA, 533 bp, Homo sapiens
cttgaaacaaaccctggaaacacaacagaacagaacttctttaaggcataagtcacacaggacctataaaacaaaaatacaagttaaaaagcaaaaaacaaacaacaacaaaaaaacaaagtataaaggcaacaaagaacatgatgaacacaatgatatctcacatttcaatactaacattgaatgtaaatggcctgaatgcttcacttaaaagatacagaactgcggaatagataacccaccmaccaactatctgctgccttcaagagattcatctaacacataaggactcacataaacttaaaataaaggggtggaaaaaggcatttcatgtaaatggacaccaaaagtgagcaggagtagctatttttatatcagacaaaacaaactttaaagcaatagcagttaagagagacaaaaaaggacattatataattcatctaacacataaggactcacataaacttaaaataaaggggtggaaaaaggcatttcatgtaaatggacaccaaaagtgagcaggagtagctatt

SEQ ID NO: 173448 - DNA, 419 bp, Homo sapiens
acttagaaacctgacagtattattagagaaaaaaactataaaccaataactcataaacatagtttcaaaaattattccaaaatattagcaaattgaatccagtggcataccacaaagataacatattttaactaagtagaacttattacaggtataaaatgtcttaacattttaaaataaattaatgtattttaccaatttaacaaaaatatgaaaaaaatcataggattatcctattcaatacaaaagagacaaaattcaatacccatttatrgtttttaaaaatcactttaggaaactggaatagaagaaattttttcttaatgtgataacaatatctacgaaaaaaaccccaacagcaaacatcataatcaacagtaaaacgttgactgagtatgttagcagaaacgggtttcaat

SEQ ID NO: 173449 - DNA, 419 bp, Homo sapiens
acttagaaacctgacagtattattagagaaaaaaactataaaccaataactcataaacatagtttcaaaaattattccaaaatattagcaaattgaatccagtggcataccacaaagataacatattttaactaagtagaacttattacaggtataaaatgtcttaacattttaaaataaattaatgtattttaccaatttaacaaaaatatgaaaaaaatcataggattatcctattcaatacaaaagagacaaaattcaatacccatttatagtttttaaaaatcactttaggaaactggaatagaagaaattttttcttaatgtgataacaatatctacraaaaaaaccccaacagcaaacatcataatcaacagtaaaacgttgactgagtatgttagcagaaacgggtttcaat

SEQ ID NO: 173450 - DNA, 536 bp, Homo sapiens
acaattattatgtcccaatttttattttatttattattattattattattattattcttttgagacaggatctcactctgtcgcccaggctggagtgcagtggcrtgatcttggctcactgcaacctccacctcctgggttcaagcgattctcctgcctcagcctcctgagtcgctgggattataggcgcctgccaccaaacccggctaatttttgtatttttagtagagatggggttttgccttgttggccaggctggtcttgaactcctgacctcaagtgatccacctgcctcggcctcccaaagtgctgagattacaggcatgagccactgtgcccagcctatctgtcaatgattaaaaataaaaattagaaactaaaaaaaattgttaaagaataattttaactagggaaaatttgttaaaattaggaaagtgtaaatcatattagtagaagaaatttatgtggttaaattttaaaattacattaaatgaagagagtacattggagctctaagtaaagaagatactgggtaa

SEQ ID NO: 173451 - DNA, 536 bp, Homo sapiens
acaattattatgtcccaatttttattttatttattattattattattattattattcttttgagacaggatctcactctgtcgcccaggctggagtgcagtggcatgatcttggctcactgcaacctccacctcctgggttcaagcgattctcctgcctcagcctcctgagtcgctgggattataggcgcctgccaccaaacccggctaatttttgtatttttagtagagatggggttttgccttgttggccaggctggtcttgaactcctgacctcargtgatccacctgcctcggcctcccaaagtgctgagattacaggcatgagccactgtgcccagcctatctgtcaatgattaaaaataaaaattagaaactaaaaaaaattgttaaagaataattttaactagggaaaatttgttaaaattaggaaagtgtaaatcatattagtagaagaaatttatgtggttaaattttaaaattacattaaatgaagagagtacattggagctctaagtaaagaagatactgggtaa

SEQ ID NO: 173452 - DNA, 439 bp, Homo sapiens
gaaggaaagctctcagcagcaagacagggtttgaaattgtattcccatctgtgaggctgagtccagtgttttcatgggcttagaataggggaatgtgttctgattggtctatgggtgggcttggaaaaggtaccatttgattggttaaaaggcatgattcacaaggaaccaatagagagaaagttggtgagacggggttggaagttctcactccagtcgtggattctatccaaaacttgcagcttggttttcaggctttcgactgtccttggcctgaaggtcgagyttcaccagggacccatccctgtctgcctaggaatttgtctgtctcctgtcgctatcaacatgattttattttttatggctaaatagtattttattgtatatacatacaatattttctttattgatttatccattgatgaacctataggttgat

SEQ ID NO: 173453 - DNA, 399 bp, Homo sapiens
ctaacgagctatggctcttcgtgaaagaaatgctttagaaaaactagtctagctgtaacatgaagaatcatctgctgttctcaaggctagagtcatggatagcaaatagtagccactgcagcaattcacgtatgtgtcgatgaggtcagaaataaaggacagaggccrgtgtttgtaactgaatgatgtatttggcttgggacacatttaatttaaatgattatattaggtaggttaaggaatgagtgcttggggaaatagtggcttgctccattgaaacattttacagtaaaatttttcaacattaattttcaacatttaattaacaagtatcttttgctatagaatgaaatcaaagctctgtatacaaagacttccattacctctatttctgcagca

SEQ ID NO: 173454 - DNA, 399 bp, Homo sapiens
ctaacgagctatggctcttcgtgaaagaaatgctttagaaaaactagtctagctgtaacatgaagaatcatctgctgttctcaaggctagagtcatggatagcaaatagtagccactgcagcaattcacgtatgtgtcgatgaggtcagaaataaaggacagaggccagtgtttgtaactgaatgatgtatttggcttgggacacatttaatttaaatgattatattaggtaggttaaggaatgagtgcttggggaaatagtggcttgctccattgaaacattttacagtaaaatttttcaacattaattttcaacatttaattaacaagtatcttttgctakagaatgaaatcaaagctctgtatacaaagacttccattacctctatttctgcagca

SEQ ID NO: 173455 - DNA, 572 bp, Homo sapiens
tgaaggtaactattgttcccagaaacacaagctttgatagaaagaatcataaaataaaactacacaacatatatccttctaaaataactccgtaggagaacaggttcatttttactttgatctactgttattatgagaaagtggatygaggtgacagtgtgcagtgctgattcagacctaattcagcagtatggagtaaagtaatacactgcaaagacattgcttagtaatagtagaaaatagagtcaagaagaatcttgaaaagtgtacagatgtagtccttgacactatgttatgtagccttctaacaacacccacatagttttccttcctttctctgatcacttttagtgttagtagtcataaataggatttgattatatttcaaatcgcatttcttaaactatttcattgtttcaatcttgtcttcccaaataaggttgaaaccagcaagagtagcagtgtgcacacatgtgtatgtatgtgtagttttttcccaaccctaatctacagagtttttacacatattcacacactcacaccacatatgtatttctaaaaatcacagtcac

SEQ ID NO: 173456 - DNA, 572 bp, Homo sapiens
tgaaggtaactattgttcccagaaacacaagctttgatagaaagaatcataaaataaaactacacaacatatatccttctaaaataactccgtaggagaacaggttcatttttactttgatctactgttattatgagaaagtggattgaggtgasagtgtgcagtgctgattcagacctaattcagcagtatggagtaaagtaatacactgcaaagacattgcttagtaatagtagaaaatagagtcaagaagaatcttgaaaagtgtacagatgtagtccttgacactatgttatgtagccttctaacaacacccacatagttttccttcctttctctgatcacttttagtgttagtagtcataaataggatttgattatatttcaaatcgcatttcttaaactatttcattgtttcaatcttgtcttcccaaataaggttgaaaccagcaagagtagcagtgtgcacacatgtgtatgtatgtgtagttttttcccaaccctaatctacagagtttttacacatattcacacactcacaccacatatgtatttctaaaaatcacagtcac

SEQ ID NO: 173457 - DNA, 572 bp, Homo sapiens
tgaaggtaactattgttcccagaaacacaagctttgatagaaagaatcataaaataaaactacacaacatatatccttctaaaataactccgtaggagaacaggttcatttttactttgatctactgttattatgagaaagtggattgaggtgacartgtgcagtgctgattcagacctaattcagcagtatggagtaaagtaatacactgcaaagacattgcttagtaatagtagaaaatagagtcaagaagaatcttgaaaagtgtacagatgtagtccttgacactatgttatgtagccttctaacaacacccacatagttttccttcctttctctgatcacttttagtgttagtagtcataaataggatttgattatatttcaaatcgcatttcttaaactatttcattgtttcaatcttgtcttcccaaataaggttgaaaccagcaagagtagcagtgtgcacacatgtgtatgtatgtgtagttttttcccaaccctaatctacagagtttttacacatattcacacactcacaccacatatgtatttctaaaaatcacagtcac

SEQ ID NO: 173458 - DNA, 593 bp, Homo sapiens
aagcttgcccatagtgaaggaggcaagcccagagaaaagagtagagacacagagaaggggtaggggtttcttgccctccagaaaatcagagaaagggttggggcatggaaataaggaattggggcacagagataagaggttggggtgcagaaataagggattgggggttcttgccccctagaaaagcggaacttgctgctaagggtgaaggagaaggggttgaggggtacttgcccctcccccagaaaagcaggacttgccgctaagggtgaaggagaaggggttgaggggtacttcccctcctccagaaaagcagagaaggggtagagacaaggagagaaggggttggggtacttgccccttccccagaaaagcrggacttgctgctaaaggtgaaggaccaaggcaggcgtccctgcgtggtctgacacctttgaaacgtgagtgaataatcagagaggtgtccctgcaatgattaaacaccaagggaaggctgccttcccattccataaccggtgctggagttttgggtccacggataaaacttgtctcctttgtctctaccagaaaatgaaaggaattgaaattaagag

SEQ ID NO: 173459 - DNA, 352 bp, Homo sapiens
aatgcatgtgaaaattcatttcatatcattttgagtaaaccacgtacagtttcactcaatattttaaaactgggcatctgtgattgagggctgcaaaacaaagtatgtttaaaaatatgtttatgttattttgataattttgaaaatgtactctcacctgaggatgatctacaaagccagttcagctggctcttcagcactgtattaaaaatactcttagttctggggaaaaaaaaaaaaacactttcagaaaacagtttttgaagagtaactgtgrtaggttccgaagttggtatctttcctgagaggactctaagtgccctagattttatatgtaaaatcatgtagtttg

SEQ ID NO: 173460 - DNA, 571 bp, Homo sapiens
agttatcttgcatataccaataaaagatgaaggtggctttcatattatgattttgttcttaagaaaattgttaggcaatttatggatagagccacaagccatcacaagtaacaaatggatttaattattatgagagtaagtcgactgtttcattgcattcatggacttaaatcatatgttatttccaaaagagattcaacatggattaaaacaaaagtgcaatataataaaactaagctattaacccagaattaaaggtacagtaataattaaagtttaaaaagtaagtcatgaaactcttgctaaaaaaaaaaaaaaaaaaaattatgcctgagcatcctagaagcagaaacagggaaagtgttgggttttgcagcactcggggtcaaattaaagggaatgtatgtgccctcaatgaaaagggcggtgaagtwtcaatcacattttcagccttagtcaggttgaacagtgacagcatcacactgaactctgacagaaaaaaaaaattggcttgatctcttgatctcagtcatgttaaaggcaaaaaattccagggacattgatatgattc

SEQ ID NO: 173461 - DNA, 571 bp, Homo sapiens
agttatcttgcatataccaataaaagatgaaggtggctttcatattatgattttgttcttaagaaaattgttaggcaatttatggatagagccacaagccatcacaagtaacaaatggatttaattattatgagagtaagtcgactgtttcattgcattcatggacttaaatcatatgttatttccaaaagagattcaacatggattaaaacaaaagtgcaatataataaaactaagctattaacccagaattaaaggtacagtaataattaaagtttaaaaagtaagtcatgaaactcttgctaaaaaaaaaaaaaaaaaaaattatgcctgagcatcctagaagcagaaacagggaaagtgttgggttttgcagcactcggggtcaaattaaagggaatgtatgtgccctcaatgaaaagggcggtgaagtatcaatcacattttcagccttagtcaggttgaacagtgacagcatcacactgaactctgacagaaaaaaaaaattggcttgatctcttgatctcagtcatgytaaaggcaaaaaattccagggacattgatatgattc

SEQ ID NO: 173462 - DNA, 553 bp, Homo sapiens
tgctcactctctctctcctgccactttgtgaagaaggtgcttacttttccttcacctgccatgatggtaagttttctgagacctccacagccatgcagaactataagtcaattaaacctctttcatccataaactaccaagtatcaggtagtatctcctctataacagtatgaaaatggactaatacatggaagaaacacaagaacaaagcacytacaataattatgccttgacctattgtagatctaaaggatacatgctaaagcttctctggaataaaaattagcaagaggctaaaatatgagggctcacaaccaataacaaccagattcacagaatggtattgttcaagagtctccaggagcactttgcacattcttgcaaacatttacatgacaatgagacagcaaaaatatactgaaatcctttcacagagaagaaaaatttatagttatctgaccttatacatctccatgtcctataatttagataataactagtaacatattatttccatgatattctatgatttatgatgaccccgaggcattta

SEQ ID NO: 173463 - DNA, 530 bp, Homo sapiens
cttcaaaattagtcaatcttcttaaactctgcaaccattttatcaactaagtttatgtaatattctaaatactttattgtcatttcaacaatgttcatagcatcttcaccaagaatagagtccatctcaagaaaacactcatgagattggaacaattcagtcacatcttcaagctctacttctgattgtaattctccagctatttccatcacatctactcttactgcctctacttgagaagtcttgaactcctcaaagtcacccatgagttggcatcaacttcttccaaatgcctcttaatattgatatttttacctactcctgtcaatattaatcatgagtattcttaatagtatcaacaatggagaatcatttccagaaggttttcaattgaytttgcccaggtccatcagagtaatccccatctatggcagctgtccctgtattaaatatatttcttaaataatatgacatgaaactttgaaattcctttttcatccatgggctgcagaatggattttgtgttagca

SEQ ID NO: 173464 - DNA, 416 bp, Homo sapiens
gttttacattcaaaatccattttaaacatttaccatatcaaaaggctaaagaacgaaagcatatatgtaatattttgatgtatgtagaaaaatatttgagaaaattcaccatcaatttttgttttttacaaaaagcaaattaaaaactttagcgttctaggaatagatgtgctcctctatctgataaagaacatctttaaaaacctatatccgataccctaactaatgacaaaataaacctagattattccccactagtatcaagagaaagaaagggatgtctacccttaacacgttgttaaaaataaaaatggaagtcttagccactgcaaygggaaagtcaaaataattaaagaaatgtagattggaaaggaagaagcaaaaccttatttgcagataacacaatcgtgtatata

SEQ ID NO: 173465 - DNA, 582 bp, Homo sapiens
ataatgcattaatgaggcttggcagttrtctgttggctgtctcaggctgaggaattacaaatcaatagtttcttttggacaaacacctaagtttgtattagtgcttacttatttcattgtttgtattatcgaggctctactctaaaaataactagaaagcaattgatatctttgctttttattaactctaagctaataatggctatcaaacattagcaaagtctgtttaaatttgtctgaacaaaatattaaaaggaaataacaagaactttcttcccctgcttctacacctcttcctgttgttggaggacttgtgatgttacttcatgaatcacctactttgtgcttgtaaggccgtatcttggggtagtgacagcccagccatgtgggaataatctgtttatcttgcctatgaaagtgtgaactatctccctggaggcatggtctgagtcacagcctgtgttcagttttaggaccagtgtggcatctcaaaaaatgctatatttacttgaaagatctgagaaaaatagagtaaaaaacatataaaattatgactatactccaccaaaagaaaatggtata

SEQ ID NO: 173466 - DNA, 582 bp, Homo sapiens
ataatgcattaatgaggcttggcagttgtctgttggctgtctcaggctgaggaattacaaatcaatagtttcttttggacaaacacctaagtttgtattagtgcttacttatttcattgtttgtattatcgaggctctactctaaaaataactagaaagcaattgatatctttgctttttattamctctaagctaataatggctatcaaacattagcaaagtctgtttaaatttgtctgaacaaaatattaaaaggaaataacaagaactttcttcccctgcttctacacctcttcctgttgttggaggacttgtgatgttacttcatgaatcacctactttgtgcttgtaaggccgtatcttggggtagtgacagcccagccatgtgggaataatctgtttatcttgcctatgaaagtgtgaactatctccctggaggcatggtctgagtcacagcctgtgttcagttttaggaccagtgtggcatctcaaaaaatgctatatttacttgaaagatctgagaaaaatagagtaaaaaacatataaaattatgactatactccaccaaaagaaaatggtata

SEQ ID NO: 173467 - DNA, 579 bp, Homo sapiens
ataattaatattttgatatatttaacatatgcattggtatgtataatgcattcatggttttgctaatggaacaaaatgaattattttatggaatgtaagaaatccaaataaattttattttttgaaatttcattttcaataattgacacaaatacatataaagcacatccattttagccattcttctaaatgtgcatattgttcaaactataattaaaatttactcatgcttctgtgggtatgattgtataattaaaatgcaaatttcaacataggtcattgctcattgagtagttaaaaataactacaaatgttatcatagcattctactatacgtcaatttgtcacaacatactccaattaaatctaccattagatatccaatttcttttttttagataaagtaaaattagcaacccagaaattttccttagayggtaaaataaaatgatctcttgattccttgctactgtaaatggtataattctccttctgtaggaattgtaggccttcttatctagaaagaaactatttcaagcttaatattgaatgcttttctatgtttcagaaatatgttca

SEQ ID NO: 173468 - DNA, 583 bp, Homo sapiens
ttgattgacctcatcaaattaacagtgaatgactctgaatcgcaaaaccaaaggacttattcaagggggtgatcacatgttatataggcaaattcgagaaggataagtaaagagaagccccatgggtgagaacttttatatttttaaataatccattgataggacaactgttgtattctgcttcctttattacttctttaagtgtgatttaattgaccatattgtgtaattcatcctccttgatacataaagagaaatgtgatttgttctacagaaaagcacagtgtgaatctatggtttaagagacctattcatcccatttgcagtttaatggactgactctacgctctgtagtgcagacactgcagaaactttctatactgctggaatacccttcttacccatttttgatgattagacactaaatcaatgctcacgtctgctatattttactagtctagtttttagagttatttgaagcattaaagtaactcagagtatatgactatgttaagcgatttgtcattaggaaatacttcaaaaygaggtcacttgaaataactactgtgctgtttaggaaaca

SEQ ID NO: 173469 - DNA, 398 bp, Homo sapiens
attctggggtcattgtaataagatgaaattttagttattgtaaattatatccccataagcattatttctcaattaagtcagggtttctagttttaattcagtctgataaaacttacagtttctctattaatgactcctctgttttggcaagaaagaaaaaaaagaatgcggtggtgtacataatcacaaaaaagaatatgttcgagactsttaagactatgacatttgagtttgttgtctcttccaacctctatactttgctgcaggctgaaatattaagggtggtgtactattattcttccagaaatatcatcactgtatgcagttttatgattttgaactgagtttagctttggaaatgagctgagaatatacctaataaaaatgggattatcaga

SEQ ID NO: 173470 - DNA, 512 bp, Homo sapiens
aaaactctgctccctgaatgcttggagagactgatttgagtaataataaaactctggtctcccgcacagctggctctgcatgaattactctttctctattgcaattcccctgtcttgatgaagtggctctgtctaygcagcaggcaagatgaaccccttgggtggctataaatttggtttgcccttgtggctacctccccagcgttcagtctcccctcctccctcagcgatggatccggaagccagcccaagtggctgcctagttgtcttggactgggggctgactctggtactctctctctagcagggcactgctgacccaatgtgcatggatttaattgcaatggagaaatagtcctggggagacgtcttttaactatagccctatcacagggtgtctgtctgtagccccactgtggggtgtctggattggtgagtatcctaagcgctgccaacacctccttccttctcctaactggttatgtatccctatggtggggtgtctgtggccc

SEQ ID NO: 173471 - DNA, 512 bp, Homo sapiens
aaaactctgctccctgaatgcttggagagactgatttgagtaataataaaactctggtctcccgcacagctggctctgcatgaattactctttctctattgcaattcccctgtcttgatgaagtggctctgtctacgcagcaggcaagatgaaccccttgggtggctataaatttggtttgcccttgtggctacctccccagcgttcagtctcccctcctccctcagcgatggatcyggaagccagcccaagtggctgcctagttgtcttggactgggggctgactctggtactctctctctagcagggcactgctgacccaatgtgcatggatttaattgcaatggagaaatagtcctggggagacgtcttttaactatagccctatcacagggtgtctgtctgtagccccactgtggggtgtctggattggtgagtatcctaagcgctgccaacacctccttccttctcctaactggttatgtatccctatggtggggtgtctgtggccc

SEQ ID NO: 173472 - DNA, 522 bp, Homo sapiens
gcgcaggaccaggccagagccgccccaagtgatctgggcgtgccggagaaacgagcagggcctgcgggggtccctcatgcggcgaggccgagcaagggcaggggcctgatgggatcgrgatctctccggcctcagggacggggaaggccggtccagtcaggtttcccctgcaggagcgcccggctgggtctgagcttgtcgggaggctctcctgctgcagagctgggagggaatttatagtacctcgcaggtacgggcaggggtggaactgggtggaactgggtgggactgggtgggactgggtgggactgggtgggccctcccgacagagggtgcctgggtcgagggctgcaggggcgggggattcaggccggcgtctggagctctggggctgccgacccagcgggcctctcccggctcctttttcctccctcaactcatcttctgcggcttatccacaggtggcagccaagagcctcctggcacagcggcaccaggcaggtgacgcctattggaccccag

SEQ ID NO: 173473 - DNA, 475 bp, Homo sapiens
ataagaacagcaaggaaaagacctgcccccatgactcagttaccttccactgagtccctcccacaacatgacacgtgggaattatgggagctacaattcaagaggagatataggtggggacactgccaaccacatcagccyccaaaagtgctgggattacaggcatgattacaggattaaggcctggccttatcacctctttagtgataaaaggctataggaacaagatacattaatcttgaatgtttatggaccagacaccatagcatagatataaagcaaaaattgtgtacttaaaggaaatatgagaaggactatatgagaaacttcaacacatgtcttagaatttgatcaggaagacaaaatagagtataataaattattttaagtatggtgtcaaggtagattatagatttatctacacacttctgtctgtaatatattctgcccacagaaaatttaaagacccagattt

SEQ ID NO: 173474 - DNA, 491 bp, Homo sapiens
acagcaaggaaaagacctgcccccatgactcagttaccttccactgagtccctcccacaacatgacacgtgggaattatgggagctacaattcaagaggagatataggtggggacactgccaaccacatcagcccccaaaagtgctgggattacaggcatgattacaggattaaggcctggccttatcacctctttagtgataaaaggctataggaacaagatacattaatcttgaatgtttatggaccagacaccatagcatagatataaagcaaaaattgtgtacttaaaggaaatatgagaaggactatatgagaaacttcaacacatgtcttagaatttgatcaggaagacaaaatagagtataataaattattttaagtatggtgtcaaggtagrttatagatttatctacacacttctgtctgtaatatattctgcccacagaaaatttaaagacccagattttcttctgtgtacacaaggcccc

SEQ ID NO: 173475 - DNA, 423 bp, Homo sapiens
gaattctagaactgaggaggcagttctagaatataaagtcctattgagcatgggagacaatggaatgattgggttccacctgaagaagcaagttgacccatttagctgacttgaggcaaacgcaaagtagtaactgggagccactgctcaatccagatgttgattaaatgcttcctgggagccctgcatgtgttcccactctcccctgtaacattgctcargggttctctggctgtcaggctgagatctagcctctagctggcctctatgcgggggtccccaagatcctcaggtgtgaagattcactagaggaacatagaaaactgatatacttaacatttacggtttatagtcaaaggatacagattaaaatcacaaagataaaagatgcgtagggcagcaaccagaagagaggaggtacag

SEQ ID NO: 173476 - DNA, 384 bp, Homo sapiens
ctgttagcatctctaccacaccaccgtttgaccaccctgatctgagctacctgcctcaggtgccagtactctcaaagcaattgcatctttggtctccctgactccactctcatcttgacagtcttctcctgcagcggccagagaattcctatgaagagctaagtcacagcacagccctcctctgctcaaaggcctcccatagctcccacttctctcaaggtggaaatcaaagtctgtatgtgagccaagtgtggtggctcacgcctgtaatcccagcactttgacaggctgaggcaggaggattgcttgaggccaggagttcaaaagcagcctaggcaacayagtgagacattgtctctacaaaaaataaataaacaaagtcgt

SEQ ID NO: 173477 - DNA, 592 bp, Homo sapiens
caagggatccatcctcatgacctcatcacctcccaaagaccccacctcctaacaccatcagattggtgattagatttcaatgtgtgaattttgggtggacacaaccagtcagagcacaacaccaaaaaacccatgttttctagatttatgtattgtacttgtttggaaggctgtcctatggaaatgaaatacaataaaatatttgatgacctcctatttatatgaggccctccacctgacacagattggttgcagaaagcacacaatttggctggcttggaggagcactgaggttgagagttaagctgaatccttaggaatgcagagtctactttagacaaccaaagttcttcaggctaaaggcaagaagttatataaatccaagcatattcctgagcctcartgaaagtaaaatctggggaccaaatattagacattatgtgtaaatgaaattaaaaagccataaatagagtgccttagtccatctgagctgctataacaaaacaccatagatggtggcttaaaaacaacagaaatgtattttcacagttctggaagctgggaagtccaagatcaaggcatcagtaggtcg

SEQ ID NO: 173478 - DNA, 444 bp, Homo sapiens
ttaaaaacaacagaaatgtattttcacagttctggaagctgggaagtccaagatcaaggcatcagtaggtcgactatgtggtgaaggtcctctctctggatcatagattgtgtcccctcactgtgtcttcatatagtggaagggasaaatgagcttcccagggcctctattatgaggtcactaatcctatgtatgagggctccattctcatgacctcatcacctcccaaaggcccaacttcctaatactaccacattgtgtgtagagtttcaatgtatgaattataaaggggcacaaacattcagaacatagcatacggtataacaaaaatgagggattcaagccagggatttggccaatgttatgaatggacctgaaccctcagtggccaatggccagtggatcaggagtggattgtgctgatgtaaagacttgggaatagat

SEQ ID NO: 173479 - DNA, 594 bp, Homo sapiens
gaaattaaaaagccataaatagagtgccttagtccatctgagctgctataacaaaacaccatagatggtggcttaaaaacaacagaaatgtattttcacagttctggaagctgggaagtccaagatcaaggcatcagtaggtcgactatgtggtgaaggtcctctctctggatcatagattgtgtcccctcactgtgtcttcatatagtggaagggagaaatgagcttcccagggcctctattatgaggtcactaatcctatgtatgagggctccattctcatgacctcatcacctcccaaaggcccaacttcctaatactaccacattgkgtgtagagtttcaatgtatgaattataaaggggcacaaacattcagaacatagcatacggtataacaaaaatgagggattcaagccagggatttggccaatgttatgaatggacctgaaccctcagtggccaatggccagtggatcaggagtggattgtgctgatgtaaagacttgggaatagatgcatacaaaatgctatgggaactgaatggaaagcagcatttgcagtgggttttgacagttcttataatggctcatgat

SEQ ID NO: 173480 - DNA, 594 bp, Homo sapiens
gaaattaaaaagccataaatagagtgccttagtccatctgagctgctataacaaaacaccatagatggtggcttaaaaacaacagaaatgtattttcacagttctggaagctgggaagtccaagatcaaggcatcagtaggtcgactatgtggtgaaggtcctctctctggatcatagattgtgtcccctcactgtgtcttcatatagtggaagggagaaatgagcttcccagggcctctattatgaggtcactaatcctatgtatgagggctccattctcatgacctcatcacctcccaaaggcccaacttcctaatactaccacattgtgtgtagagtttcaatgtatgaattataaaggggcacaaacattcagaacatagcatayggtataacaaaaatgagggattcaagccagggatttggccaatgttatgaatggacctgaaccctcagtggccaatggccagtggatcaggagtggattgtgctgatgtaaagacttgggaatagatgcatacaaaatgctatgggaactgaatggaaagcagcatttgcagtgggttttgacagttcttataatggctcatgat

SEQ ID NO: 173481 - DNA, 519 bp, Homo sapiens
gtgttgcccaggctggtctcaaacttctaggctcaagtgatcctctggcctcagcctttgaaagtgctaaaattacaggtgtgagccaccatgctcagctggaattttctatatttgtgttatccagmtaggtagctgctagccacatgtggctactgagcacttgaaatgtgactagtgttactaagcacctctattattttcttttatttaattatacataattttaagtatctacatgtggctggtggctacatattaatggctgtccagattttgatattcatcctcttctaccactggacagacttttattgcgataattttcagaaaacaaaagcaaaacttaccccccaaaaatgttcccattttgctcttcttgacagattacagttatcctaggtgttagaatcatatatcccctaaacactgtgctttctctgccattcccacataaagagccttttctatgatatccctttttatttgctctgctggcaaacatttatcattgtgaaa

SEQ ID NO: 173482 - DNA, 592 bp, Homo sapiens
tttgttcacccactggtagtggcacagatctcagaaggttttgatagagcagagacagatttgagtgtcaccaccattccccattctgttttctcaaaaatgtccctgactgtgaaaagatgggccatgtcaaggatgaatgcatatgagaaagagcaagtcttcaggaagaagtgcatctgattctaaaacctcgttctgctgttaagttgagccagaagtagaatcaattgagcctcaatttccaccactgtgcaatgagcataccaatgcctactttataaggttgtggtaatttaatttaattatatttaaatgagagagagagaaccagctcaaacgatgatttctggcatactgttggtgttctatccaccttagctcctactgtgctgtctagctttctcggcagaaaaattcatcaatgktaatctaagtaactgaatagattcatttgctttcaagaatgcttctccatcctttcagcatgcaagttcttatactcactcatttacccacaattcggttttgtatttatttttttctagctttattgaggtataatttgtatacaaaaaactggcacttaaaa

SEQ ID NO: 173483 - DNA, 530 bp, Homo sapiens
ggcaggcagcagagttttattgagcaccggcttcgagccagatgctgcactgggcatcgggaattcagtgaaaaagatgcagtccctggcctaggagcctgggtccgatgcggagtgctgtgcagcrcatttgccttcagtcccgtgacaccagccaggctgtgaggagcaggcatccctggtcttctctgtgggatacactttcatggtttttcaatggtcttcatttatttaaggtaaaattttaattttatgggcagaaaaaggaaaccaactgttgatcacgttgatttagaaatgattacattgttttctattagacagagttcttaatgtctttctcaaaagatggaggaggaaatgagtgatagggctttgtcttttttacttgattttcaactcattccttaaaaatgcttgaaaaggctaactgtggctgaagaccactgtaagggaggagaaagcaaaacctgcattgacgaaggaaaggcagcatctctggcggaaattaatcacctaagccacctact

SEQ ID NO: 173484 - DNA, 530 bp, Homo sapiens
ggcaggcagcagagttttattgagcaccggcttcgagccagatgctgcactgggcatcgggaattcagtgaaaaagatgcagtccctggcctaggagcctgggtccgatgcggagtgctgtgcagcacatttgccttcagtcccgtgacaccagccaggctgtgaggagcaggcatccctggtcttctctgtgggatacactttcatggtttttcaatggtcttcatttatttaaggtaaaattttaattttatgggcagaaaaaggaaaccaactgttgatcacgttgatttagaaatgattacattgttttctattagacagagttcttaatgtctttctcaaaagatggaggaggaaatgagtgatagggctttgtcttttttacttgattttcaactcattcyttaaaaatgcttgaaaaggctaactgtggctgaagaccactgtaagggaggagaaagcaaaacctgcattgacgaaggaaaggcagcatctctggcggaaattaatcacctaagccacctact

SEQ ID NO: 173485 - DNA, 543 bp, Homo sapiens
ccaggaaacttgaggaaggggacatgggctatccccagacggggaggatggtcgaggcctgaggctggagtgtgtatggtcagaggggtgaggggacactttcagggagtagccagagggagtgtgctggtggggagaaagggagaggaagtagtttatatcagagaggaacaggatatcacatcattcagagcattgtaagatgtggtaggacttggcttttcttcwgagtaagatgtgatgtcattggagaggcctgggcagagggacttaatccagttcagtttaacaagatcaccgtggctggtgtttgaaaaccagaagtcagcgtggcagggcagggacgctggcaaggagagagctgcagtattgcaagggaggaatgacagtgctgggcaaggatggtggcagaggaacagtgccaagaggagggctgtctcttcaaattatatttagaacccaacaggacttgctgatcggccagatgcaggtgtcaaaaatgttaaagttgactcctgcatctttggtctgaacaaatggaag

SEQ ID NO: 173486 - DNA, 543 bp, Homo sapiens
ccaggaaacttgaggaaggggacatgggctatccccagacggggaggatggtcgaggcctgaggctggagtgtgtatggtcagaggggtgaggggacactttcagggagtagccagagggagtgtgctggtggggagaaagggagaggaagtagtttatatcagagaggaacaggatatcacatcattcagagcattgtaagatgtggtaggacttggcttttcttcagagtaagatgtgatgtcattggagaggcctgggcagagggacttaatccagttcagtttaacaagatcaccgtggctggtgtttgaaaaccagaagtcagcgtggcagggcagggacgctggcaaggagagagctgcagtattgcaagggaggaatgacagtgctgggcaaggatrgtggcagaggaacagtgccaagaggagggctgtctcttcaaattatatttagaacccaacaggacttgctgatcggccagatgcaggtgtcaaaaatgttaaagttgactcctgcatctttggtctgaacaaatggaag

SEQ ID NO: 173487 - DNA, 543 bp, Homo sapiens
ccaggaaacttgaggaaggggacatgggctatccccagacggggaggatggtcgaggcctgaggctggagtgtgtatggtcagaggggtgaggggacactttcagggagtagccagagggagtgtgctggtggggagaaagggagaggaagtagtttatatcagagaggaacaggatatcacatcattcagagcattgtaagatgtggtaggacttggcttttcttcagagtaagatgtgatgtcattggagaggcctgggcagagggacttaatccagttcagtttaacaagatcaccgtggctggtgtttgaaaaccagaagtcagcgtggcagggcagggacgctggcaaggagagagctgcagtattgcaagggaggaatgacagtgctgggcaaggatggtrgcagaggaacagtgccaagaggagggctgtctcttcaaattatatttagaacccaacaggacttgctgatcggccagatgcaggtgtcaaaaatgttaaagttgactcctgcatctttggtctgaacaaatggaag

SEQ ID NO: 173488 - DNA, 474 bp, Homo sapiens
  misc_feature (1)...(474): n = A,T,C or G
nnnnnnnnnnnnnnnnnnnnnnnnnnnnnnnnnnngtataggtgaatacatttatgaccttgyggtaataaagtgtgctggagaccctgcctgatgttgaccatggcccttgcctttgtgtttctaggtcacatttcttggcctcccaaggccaagcacaggtgtggccacgtgacttaagttccatcaaaatagaatatggcatggaaggaacctgagccatttccaggcctggccccagtctcccactgcatccccacttctcccttatctcttatttgccagctcagctcattagagaggattcagcagggagtcagtgaccccaggggatagtagagctgctggatgggagaaatgtgggtccctacatgatggtgtggtctctatcaggctggcacatggcaagaaataaagctgccttgtgttaaagtgctgagatttgtggggatgttcattttagcatttagccag

SEQ ID NO: 173489 - DNA, 474 bp, Homo sapiens
  misc_feature (1)...(474): n = A,T,C or G
nnnnnnnnnnnnnnnnnnnnnnnnnnnnnnnnnnngtataggtgaatacatttatgaccttgtggtaataaagtgtgctggagaccctgcctgatgttgaccatggcccttgcctttgtgtttctaggtcacatttcttggcctcccaaggccaagcacaggtgtggccacgtgacttaagttccatsaaaatagaatatggcatggaaggaacctgagccatttccaggcctggccccagtctcccactgcatccccacttctcccttatctcttatttgccagctcagctcattagagaggattcagcagggagtcagtgaccccaggggatagtagagctgctggatgggagaaatgtgggtccctacatgatggtgtggtctctatcaggctggcacatggcaagaaataaagctgccttgtgttaaagtgctgagatttgtggggatgttcattttagcatttagccag

SEQ ID NO: 173490 - DNA, 474 bp, Homo sapiens
  misc_feature (1)...(474): n = A,T,C or G
nnnnnnnnnnnnnnnnnnnnnnnnnnnnnnnnnnngtataggtgaatacatttatgaccttgtggtaataaagtgtgctggagaccctgcctgatgttgaccatggcccttgcctttgtgtttctaggtcacatttcttggcctcccaaggccaagcacaggtgtggccacgtgacttaagttccatcaaaatagaatatggcatggaaggaacstgagccatttccaggcctggccccagtctcccactgcatccccacttctcccttatctcttatttgccagctcagctcattagagaggattcagcagggagtcagtgaccccaggggatagtagagctgctggatgggagaaatgtgggtccctacatgatggtgtggtctctatcaggctggcacatggcaagaaataaagctgccttgtgttaaagtgctgagatttgtggggatgttcattttagcatttagccag

SEQ ID NO: 173491 - DNA, 474 bp, Homo sapiens
  misc_feature (1)...(474): n = A,T,C or G
nnnnnnnnnnnnnnnnnnnnnnnnnnnnnnnnnnngtataggtgaatacatttatgaccttgtggtaataaagtgtgctggagaccctgcctgatgttgaccatggcccttgcctttgtgtttctaggtcacatttcttggcctcccaaggccaagcacaggtgtggccacgtgacttaagttccatcaaaatagaatatggcatggaaggaacctgagccatttccaggcctggccccagtctcccactgcatccccacttctcccttatctcttatttgccagctcagctcattagagaggattcagcagrgagtcagtgaccccaggggatagtagagctgctggatgggagaaatgtgggtccctacatgatggtgtggtctctatcaggctggcacatggcaagaaataaagctgccttgtgttaaagtgctgagatttgtggggatgttcattttagcatttagccag

SEQ ID NO: 173492 - DNA, 299 bp, Homo sapiens
ctcccactgagtaagggtggtcactgtttgtagggtgtagagtttgatagatacgtctgttactttgacttcattagttttatttaggatgcttgaatgtrtgaatgtattgattaatatattcattattgccttctctctgtgcttggaagagaagaaaattgaagtttaccactaccatgggtttactttgcgtgctttgttatttggtgtataaagattcacaccttagatcttttgtaggtcatatggtgtttagtttaaagggaatctttttctgaagagtttagccttgaatt

SEQ ID NO: 173493 - DNA, 299 bp, Homo sapiens
ctcccactgagtaagggtggtcactgtttgtagggtgtagagtttgatagatacgtctgttactttgacttcattagttttatttaggatgcttgaatgtatgaatgtattgattaatatattcrttattgccttctctctgtgcttggaagagaagaaaattgaagtttaccactaccatgggtttactttgcgtgctttgttatttggtgtataaagattcacaccttagatcttttgtaggtcatatggtgtttagtttaaagggaatctttttctgaagagtttagccttgaatt

SEQ ID NO: 173494 - DNA, 299 bp, Homo sapiens
ctcccactgagtaagggtggtcactgtttgtagggtgtagagtttgatagatacgtctgttactttgacttcattagttttatttaggatgcttgaatgtatgaatgtattgattaatatattcattattgccttctctctgtgcttggaagagaagaaaattgaagtttaccactaccatgggtttactttgcgtgctttgttatttggtgtataaagattcacaccttagatcttttgtaggtcatatggtgtttmgtttaaagggaatctttttctgaagagtttagccttgaatt

SEQ ID NO: 173495 - DNA, 371 bp, Homo sapiens
agaaaaattgagttttttgtgtctagttctatgaactttaacacatgtatggatttgtgttattactaccacattcaggacacagaagcacttcatcccctccagattctctgtcctgatgtcttttataatcagaccctcccctaccccaaccactggcagtcagtgctctgttttctatcactagttttgtctctttgcaagaatgtcagataaatgtcctacagagcctaatcttctgaaactggctccttttcatgcagggagatcattttgagactcatcaagtcatgtgtcagtagccggttcctttttgttgctgagtagtattccattctgcaggtacwccagaatttctccactcatctgtc

SEQ ID NO: 173496 - DNA, 581 bp, Homo sapiens
  misc_feature (1)...(581): n = A,T,C or G
aatgcgcttctggcctgagcccttgtggcctcaacntaccagcggctgcccctctgtggagaggagttctctgtaatggtgctgcaggacagcccattctgcctgtccacccccagccccttgtgcccccctcaaccctgtgccctgtcactcacacccgcagctacaccaaatccttccccaacccctgctcagggactccttcgtgtgcaggccacccacccccaacccrtgtctgcactggagaaaatctgcggagaattctcctccgtggggcagtagaaggacaggcctgtgtgtgcctgagcccctcttcctcaggtgtgtgtgagagaatttacctgagagaagttagcaatgcctgcctagtgaaggcctggcacagaataggccctcagcaaacaccagagacctctgccctccttacccttctgggaactcttatttagagtttaaggcccaagccaagtatgtccttctctctgaagagttccctttccccggaggcagatgacaaggcaagccgtgacttcccttggacgggggctgctctgcatctcaggcgttcaccagggagcggg

SEQ ID NO: 173497 - DNA, 560 bp, Homo sapiens
ttttactgattgctcgtatggtgccatgtcacatgctcctctgtcctctctatttcatgtaaatcagcactgggatataagactcgatcagattcagattcaatttggggcacattttggtgctgtcttcttccatcagttggcactgagtatctgtctctgcctgtgatggtagcagccactgatgwtcattgcctagacccagcaattcaagaggggttgcatatactggcagcataattcattcattcattctttatttattagctggaattcttaaagggaaacttctactaatctactatttggtcacccagtggtagacatctaatagaaaaggcaagatagatgcttatttatgaccttttaattcatcattttacttggacgagttggttcactagcttccttccatgggatcaatttgttacttcttttttttgaagtattttgcattcatcaatttaaacatattttatgcatttcaatctatccaatatagagcagttgttgtctttattgatgcttaagtcctgaatcaagttcccttgacactagtg

SEQ ID NO: 173498 - DNA, 560 bp, Homo sapiens
ttttactgattgctcgtatggtgccatgtcacatgctcctctgtcctctctatttcatgtaaatcagcactgggatataagactcgatcagattcagattcaatttggggcacattttggtgctgtcttcttccatcagttggcactgagtatctgtctctgcctgtgatggtagcagccactgatgttcattgcctagacccagcaattcaagaggggttgcatatactggcagcataattcattcattcattctttatttattagctggaattcttaaagggaaacttctactaatctactatttggtcacccagtggtagacatctaatagaaaaggcaagatagatgcttatttatgaccttttaattcatcattttacttggacragttggttcactagcttccttccatgggatcaatttgttacttcttttttttgaagtattttgcattcatcaatttaaacatattttatgcatttcaatctatccaatatagagcagttgttgtctttattgatgcttaagtcctgaatcaagttcccttgacactagtg

SEQ ID NO: 173499 - DNA, 560 bp, Homo sapiens
ttttactgattgctcgtatggtgccatgtcacatgctcctctgtcctctctatttcatgtaaatcagcactgggatataagactcgatcagattcagattcaatttggggcacattttggtgctgtcttcttccatcagttggcactgagtatctgtctctgcctgtgatggtagcagccactgatgttcattgcctagacccagcaattcaagaggggttgcatatactggcagcataattcattcattcattctttatttattagctggaattcttaaagggaaacttctactaatctactatttggtcacccagtggtagacatctaatagaaaaggcaagatagatgcttatttatgaccttttaattcatcattttacttggacgagttggttcactagcttccttccaygggatcaatttgttacttcttttttttgaagtattttgcattcatcaatttaaacatattttatgcatttcaatctatccaatatagagcagttgttgtctttattgatgcttaagtcctgaatcaagttcccttgacactagtg

SEQ ID NO: 173500 - DNA, 536 bp, Homo sapiens
tgcaccatagagaattaaaagggagaacagccttaggagacaatgggcaggagccacttctgtaaaagagaggctggggacagctgacagcctgtgaaagcacacaccacctgccccgcacaagcagtcaagcaaatgtgagatgacacaagacacttttgctttttaatccaatgagactgtaaaacttaaaaagagtttctaacatccggtggtggtaaagatgtggggaaacagcacttcatacattaatggtgagagcatgratcgaaaaaagatgaatcagcagatttaaaaagttaaattgcacatgccctttgcatcacagtgttaggattttattccacagaaattaagagttttaataaagaagaagacatgtgtaagaggctttcccctcctcagcattatttgggatggcaaaagcgtgaccaccatccataggggagaggcgggaggaatttggacgcagccgcactatattgtaatgagcatacactttcgcactgtcatatctttcttccttaagtcatgtt

SEQ ID NO: 173501 - DNA, 488 bp, Homo sapiens
gagatccttaagggagtttgaaacatgaaaacaaaagaataatatctgctactacaaaaacacatttaagtatatagcccagagaccctatgaaacaactatacacctaacagctaacaacttcacaatttgccactctgttccttttaagtggggcctttagaccatttacattcaagattaatattcatatcacatattaaaaaaacaagacccaacctcctgctgtcttcaagagatttatctcacatgtaatgatagccataggctcaagtaaagcgttggagaaagacctatcatgcaaatggaaaacaaaaaaaaagaggggtaactattcttaaattagttaaaatagactttacaccaacaatggcataaaaggacaaataaaggaactacatactgatgaaggatgcaattcaatgagaagacttaactattctaaatatatacataccaaacrctggagcatttagagtcataaaaca

SEQ ID NO: 173502 - DNA, 363 bp, Homo sapiens
tagagttaagtgacttcttcatgactatgtaagtagtaagatgtacagccaggactataaattgtttttagccaccactttatagctacctctctaatccatgaatgtgtttaggtttaatattgcatcaaggagtttttaacttggatgtttatagacagcaaatgtatttacagatgctttttaaaacataaaatgtaaaaagaattttatatagtgtgatgcagttaactcatccatatccatctgccgaaaaaaaaaaccatagatgttttcctttacattctgtataaatttctyattctttttaatgtaggaacttatgagaattttctgtatggacaatggaatattgtgttaggc

SEQ ID NO: 173503 - DNA, 569 bp, Homo sapiens
acattaattataattaaacttaaacttaattcaatttaatttgttcataatcaaaataacataagttgaattaaatttatatttaaaactactttattaaggtatggttggcatacagtaggctatatatatatttaatgtatataaggatgagtttggaggtaagtataaaattacatttaaattttattattattgtaaactagaggtgacctggttggtggataaattcttgccaccataatgtccatggtcatggaccatggaactrtggaccatggaactatattaggtagagtgtgctgggatggagctaaagaagaaagcattaagacaggggtccctgaggatgcaggaactgatatatggatctaaagatagggttagagagcagggaaattagagcagcaattattgtgtccaggaaggaagatggcaactggtctggggaaattttagaaatggggaacacacccactgttaggcagtgactccccagcagatgtttgtagggactgagtgggcgattgtctgtaaagctctttacatggatctggtagtagtaggaa

SEQ ID NO: 173504 - DNA, 529 bp, Homo sapiens
tgaattcatttattaagttccaacaggttgttttatgctcactaacattttctgtatatgtaagatcatgtcttatatacggacctatctgcaagtaaagacagttttgattctcctttccaatatttatttattttattgtcttttgtkgaatagaaatgagagtggataatcttgtcttgctcctgatattaacattagtgtttataccagcatttcctgtttcttgcctgtctcatgatttttgttgaaaaatagacatttaaatagtgtagtttggcaagtctggaaatcaaaattcctccctatctccaggatttgttattgttgcttttttttaaagtgacttttgagtcaattctgtaaagcctgtattctttttcatgtgtggccactctagtctctactcagttaacttaggtgacagcaaattactggacagagattttgttaaaagtctcacttgactcaatctctcatcatttgcttagagcctttgtgtgcatattggggcaaactgcaacactgg

SEQ ID NO: 173505 - DNA, 556 bp, Homo sapiens
aacccaggaggcagagctgagatcgccccactgcactccagcatgcgcaacagagcgagactccgtctcaaaaaaaaaaagaagaaaatttagcaaaaaggcaatctcccctttaatttagaggaacaatcgggagtaaaaaggaaaraaaacatactgggaaaaaaagaattggtgaatcacatggagaaatgtggcctgggagatctacctgggaacacgaatccccagaaatagcagtgtcttgacagcctttgaactcatttattcattcaccaaatatttactgagccccttctatatctgagattctaagtacacaacagtaatcaaaaaagaacccatcttgttctatacccatggagattacactgaagcaagggaaataggctttagacaaatactaataagtacataataacaacctgtgaaaagtgctatgagagaaacaacagtgtaaaaaagtaactaggtgaggtgatggatgtgttagtttgcttgactgtagtcatcatttcactttgtgtatgtatataaaagcatcatgtatacctta

SEQ ID NO: 173506 - DNA, 578 bp, Homo sapiens
catggccctaattacccaggccatttttagagttgtgtttgcagtgaacaactttgagtgatgaagtaacatctcccccagtgcaaagaataagcatgcttccacttgctttgcttttgcttattttaaaagtggtgaatttccaaagctcggcttggatttcttttcttgtcaaatagcccactgaaygtacacacatccatcatgggtcctgtgtcattcacatggcatttgagagaagatggggaattaacactaaccagcaaggaattttaaatgctgcccttgatgtgagtaataaagtcctttgtctttggtccaagagtctcatgtcttctggaacccatgaaacagttacagactaacttgtatccattaaatagggtaaaagctcagattctgcacagttcttgacaataaacataatctcaataataaaatgattcagcatggtaatctttgaaatagagaggctatcaagttccctgaagattaattattacatagggctagaaagttgacatagcctagagaggcgagcaaggtacactgctatccttgtcagctgaaaacaaaat

SEQ ID NO: 173507 - DNA, 400 bp, Homo sapiens
tatcttctttctctctttttctatttgtcttttgcctctctcagtaggctaaaaggctgacaggtacatggacattttctatgatccctagtgccacaatatcacttgataaatatttgcttaatgactgaatattacaatttgactcaaagrtgatgtaacttatgataatttggtcacaactcacatcagattaaaaatttttatggcaagaggaggtggtttccaggctagaacacaattgttttattttatttaaattttataatttctctttgtcagggttatgcacaccaggagagggtattaaaaaaacaaattatcatataaggctcaaaaaccaagttccaagtcaagaaactatgtgaatatatgtaaaggttgtaagaagacagaattc

SEQ ID NO: 173508 - DNA, 493 bp, Homo sapiens
atccaaactctggatttataagtctttttcctttaatataaaactctcttgttcaaaaaagtacttttaattttaaaataaatatttgctaaatttccagactctttttgatactaaatgaagtaaatatcttaaaatatataaaactaaggtcaatataygactaaggtcaatgaaggaaacacattagtaaagtagatacaagtatattagtattaagactgatgtaatctatactcacacagcatatattatgcattatgaggttaattttatgcattaaaaggttaattttttaaaatgttgtctttactagtcatgagcacatgtatcactgatgccaatttatgtcaacctaaggaaggtcaatggaagaagcactggatccaaaggctaaactgaattatacttttgctagtaactttggacgaattatttctcaccccatcttccaaattaatgatcaaacagtgttaataatacatatccttgt

SEQ ID NO: 173509 - DNA, 616 bp, Homo sapiens
tctcttgcactatttttgcaacttttctataagttaaaaattatttcaaaataaactttgttatttacaatttaaatacctactttaacactctcaagacaccaaagctgcttctgttaacaagcttctccagatatatctcattttctatggttattacatggatgtggtcaatgtctttttgatgaatctcacaccacagtctttgcaagcataccttgtttcatcatatttcattttactgtgcttggcaaatattgtgtttttcataaattgaaggtctgtggcaactctgcatagatcaaacttattggcaccatctttccaacagcatatgcttactttgcatttctatgtcatagtttggtaattctcacactattttatctttttcactattatatttgttatgataacctgtgatcagtggtctttgatgttactattgtgattgttttgggatgccacaacctgtgcccacataagatggtaaacttaaccaataaatgtgtttgttctgactgctccacctactggctttttcccatctctctttctcttctggccttcmtattccctgagacacaacctaaaattaagccatttaataatccta

SEQ ID NO: 173510 - DNA, 607 bp, Homo sapiens
gtttttaacaagtttttatcatttttaacaggtttttatcatttaaaaggtgactagggcaatgggattacctctgatatcagagagttggcaatcatgtaaccctgaaagtcatggcacaatatggcagaacaagcaygtctggggcctgggagtcctgaggtactctagtaattgtggttttcctcatactctctggatctggggtgacccagaacacagtcataattcttgaactgtttgcaagtgcaaaccttgagatcttcccaagccagtcacccagtcgataatcagctcaagatcatccctataccccgagtagaattagttgtcaatatttagggcacaaaattcattttggtgagatgtcctaggccattgacactagtcatataataatctaatgtgtttgctgcaatgacacattgcagccctatgtcctctgagttctggctctaatgtggtatttctttacactagctttctcaataatatgaacagcctgcctatgaactgaaatgtgaagtatgatacccactattatatatctttccttactgcaagtccaactaatggttattaatatgaacaacttacctcctgcttg

SEQ ID NO: 173511 - DNA, 607 bp, Homo sapiens
gtttttaacaagtttttatcatttttaacaggtttttatcatttaaaaggtgactagggcaatgggattacctctgatatcagagagttggcaatcatgtaaccctgaaagtcatggcacaatatggcagaacaagcacgtctggggcctgggagtcctgaggtactctagtaattgtggttttcctcatactctctggatctggggtgacccagaacacagtcataattcttgaactgtttgcaagtgcaaaccttgagatcttcccaagccagtcacccagtcgataatcagctcaagatcatccctataccccgagtagaattagttgtcaatatttagggcacaaaattcattttggtgagatgycctaggccattgacactagtcatataataatctaatgtgtttgctgcaatgacacattgcagccctatgtcctctgagttctggctctaatgtggtatttctttacactagctttctcaataatatgaacagcctgcctatgaactgaaatgtgaagtatgatacccactattatatatctttccttactgcaagtccaactaatggttattaatatgaacaacttacctcctgcttg

SEQ ID NO: 173512 - DNA, 607 bp, Homo sapiens
gtttttaacaagtttttatcatttttaacaggtttttatcatttaaaaggtgactagggcaatgggattacctctgatatcagagagttggcaatcatgtaaccctgaaagtcatggcacaatatggcagaacaagcacgtctggggcctgggagtcctgaggtactctagtaattgtggttttcctcatactctctggatctggggtgacccagaacacagtcataattcttgaactgtttgcaagtgcaaaccttgagatcttcccaagccagtcacccagtcgataatcagctcaagatcatccctataccccgagtagaattagttgtcaatatttagggcacaaaattcattttggtgagatgtcctaggccattgacactagtcatataataatctaatgtgtttgctgcaatgacacattgcagccctatgtcctctgagttctggctctaatgtggtatttctttacactagctttctcaataatatgaacagcctgcctatgaactgaaatgtgaagtatgatacccactattawatatctttccttactgcaagtccaactaatggttattaatatgaacaacttacctcctgcttg

SEQ ID NO: 173513 - DNA, 507 bp, Homo sapiens
atatgccatggcaaggtcaggaagttaagccatatggtctaaaaagggaaggaacccacagttccaagaattgcttacccttttcctggaaaattcatgaataggccgggtgcagtgactcatgcctacaatcccagcactctgggaggccgaagagggtgcatcacctgaggtcaggagtttgagaccagcctagccaacatggtgaaaccctgtctctactaaaaatacaaaaattagctaggcgtggtggcrcatgcctgtaatcccagctactccagaggctgagtcaggagattcgcttgaacccgggcggcggaggttgtggtgagctgagatcatgccattgcactccagcctgggtgacagagcaagactctgtcacacatacacacacacacacacacacacacacacagaaaaaaaaaaagaaagaaagaaaagaaaagaaaatttatcatccaccttttgtttagcatataatcaggaaataataaataattataa

SEQ ID NO: 173514 - DNA, 595 bp, Homo sapiens
caaacacttaatgtgcctatgctttgatcttggacttcccagcctccagaactggagaaataaatttctattgtttgtaaattaccgagtttctggtaatttgttattaccatgaagggacccagtagttagtaagaattattcttgggagyggagatctttctcatgtttaatatcttttatttattgttttatttttattttttgaaacagagtctcactctgtcaccgaggctggagtacagtggtatgatctcagctcactgcaacctctgctgcccaggttcaagcaattctcatgcttcagcctcccactagctgggattacaggtgagcaccaccacacccggcttttttttttttttttttttttttttggtagagatgggatttcaccatgttggccaggctggtctcgaactcctggcctcaaatgatctgcccgccttggcctcccaaattgatagaattagaagtgtgaaccactgtgcccagtcatgtttttatcttaggcagacagcatccagttttttattattatgatattagatgtagggtttttgagaagtttcttaacaagttaaggatgtgcgcc

SEQ ID NO: 173515 - DNA, 516 bp, Homo sapiens
ctatgacaaggtaacaaaaaaggaaatagtatatattaragctgttttcagcaaagcaggtataatcttaataaataatcatatttgaggaagatgaaatgaaacacttcaattaaacaaatcagtaattcttttaatttttgttttaatatatcttactttgccacattaaacccatctgcttaagattacaaaacagacaattgatccaatttttatattgttcctcttgaaaattttcattaaattatgcatgcttacaacatagtttccctcattttaccctcaaaattagaaaaaaaagttactggacttttggactttacctgtttaatctttaatcacatattctgtactttcactttatataaggtatgctccttcaacatacataattaagtctttaattcaggatttttttcttgcattactgccatgattattattttctctggttttctgttgttgttttttcgtcatagttgacactgctcttctttgctctctatgctaact

SEQ ID NO: 173516 - DNA, 400 bp, Homo sapiens
taatggcctattaacagggacaactagtagagtgcatatgatcaagaggtcatgatgacagagaagcagcaggtttctttgtgtggcagcactgctcacagtaggttttccaaactgagctgaaactagctggaaatcaaacaatcaccatttcrctagaaatatttttactgttaatgaactgagattaatacgaagctatgccaaatatgtcttcagcaagagttgtctctgtatgatctggaagtctccccatagtaacaagtacaaagccgattaacaagacagtttaaacttgattatcaaacagcgtgaaaaatatcttcagaatttccaacttgttgtgactttttattcaatatatgccagcaagaacttctttcattgttataattaaaaa

SEQ ID NO: 173517 - DNA, 437 bp, Homo sapiens
tcctccctcccttttggagtttacatcaatgtagaaataataagatggacaaaacagactatttatggaaataaggtacctatttataaacaaatcctaaggccatgcatggcaagggttaagtcacaccctaaaaaccatacaatttcattaaaaaawtttttaaaattattctggtgtaatgtggcttgctttctaacctgactctggtatagcatcaatgacagcagaccttgagggaaataaaaatattttaccctagagtatatctttttgacatactttgaaaagtcctacaaggtcctcttctgggggagaaaattgggttagtagagaatctccattattgcagccaggtcttccctttctatgtttttcctggatctaggagagattaatagagagcttgatggctttatggcacttcatctgcataa

SEQ ID NO: 173518 - DNA, 566 bp, Homo sapiens
ccacaatgaactctggtctaaaaatattaagtaaaaaatttcagaaataaagaattcataagttttacattgtgcaccactgggagcacmatgatgaaatctcacacagtcctatgccatgttattctgttctgcctgggacacacatcttccccttgtccagacgtttatgctgcatatccacactgtatatgctacccaccactttagtcatcagtatcctctgctcctgttattcaaccatcaacattgtcataacttgataatccaggtcactcaaagcagataatctgccttttgacatattgtcacaaggtctataatagtctaacactgtcaccttacttcatctgaccataggcaactgtattagtaagttttcacattgctataaagaaatatctgagacagggtaatttataaacagaagaggtttaattgactcacagttccagatggctggcgaaacctcatgaaacttacaatcatggcataaggtgaaagggaagagaggcgtgtctttacaagacaggaggaaagagagagagctagagaaggggaagtgc

SEQ ID NO: 173519 - DNA, 554 bp, Homo sapiens
caacatggcaatgacagtcttatttgctgtttaccctgaccttctttttctcctcttattatatccctctcctttcataaacagatttaaagtaataagtatgttccaaactccaaaaataaaattcaatgtgtttctgtcttacaattsaaaagtaagataattcccattaacattcccacttacattttgctttcaaaatgtgcacttaaaaaaaaaaaagaaaagctctggattcttataaaaattactatccagttaggtaagactgggtttgaataacaattcaatcagaaatgtactttatttgtattaaatttttgtgtatacaaactggatctatgtctattatttgtgaaattcaactatatttacacaatgtaatctataaatagcaaataggctttgaagtatatttgtaaaaaatatgtgaaataaatatacaaaataacatcatgtgttttaattttctatttgcatcatttgaaattaattatcaggagtattaaaagtaacattgaaaatcttatatttacataataaaagtgaaacca

SEQ ID NO: 173520 - DNA, 633 bp, Homo sapiens
  misc_feature (1)...(633): n = A,T,C or G
caccatcctcctgaccccagaatggtaaatctaccaacagcttgcaccatagacctgaaaaagccacactcaacaccagcctgtgaaagcatctgggagggaggctgtaccccrcaaagccacaggggcagagctgcccgagaccatgggaacccacctcttgcattagtgtgacctggatgtgagtcaatggagataattttggaactttaagatttgaccaccccattggattttggactaggacaaagcctgtagccccttcattttggccaatttcttccatttggaatgggtacatttatccatttggaaggcaaagaagaagcagtcaaatcttacatggccagagtagggggaaggggattgtggaggtgctacacactttcaaacaatcagatcttgtgagaactctatcatgagacacctctaggggggtggtgctaagccattagaaactgcccctatgacccaattgcctctcagcagcctccatctccaacactggggattaaaatttgacatgagatttggtttgggaaacagattcaaagcaaatcagacctaattgatatttacggaaaatttcatctaatcgctgcagaatacaactttntgttctcagcacaggga

SEQ ID NO: 173521 - DNA, 633 bp, Homo sapiens
  misc_feature (1)...(633): n = A,T,C or G
caccatcctcctgaccccagaatggtaaatctaccaacagcttgcaccatagacctgaaaaagccacactcaacaccagcctgtgaaagcatctgggagggaggctgtaccccgcaaagccacaggggcagagctgcccragaccatgggaacccacctcttgcattagtgtgacctggatgtgagtcaatggagataattttggaactttaagatttgaccaccccattggattttggactaggacaaagcctgtagccccttcattttggccaatttcttccatttggaatgggtacatttatccatttggaaggcaaagaagaagcagtcaaatcttacatggccagagtagggggaaggggattgtggaggtgctacacactttcaaacaatcagatcttgtgagaactctatcatgagacacctctaggggggtggtgctaagccattagaaactgcccctatgacccaattgcctctcagcagcctccatctccaacactggggattaaaatttgacatgagatttggtttgggaaacagattcaaagcaaatcagacctaattgatatttacggaaaatttcatctaatcgctgcagaatacaactttntgttctcagcacaggga

SEQ ID NO: 173522 - DNA, 575 bp, Homo sapiens
aagatcatcagattcaggagcatggtaaaacccaacccaaggaaactaagaatataataaaatgatacaggagctgactgatgaaatagccagtataagaaaaaacctaactgtcctaatattgctgaaaaacacacaagtatttcacaatgcaatcacaagtattaatagcaaaatagaccaagctgaggaaagaatctcagagcttgaaaactagttctctgaaataacacaatcagacaaaaataaagagaaaagaataaaaaggaatgaataaaacctctgataagtatggaattatataagaagggcaaatatatgaatcagtggcatccctgaaaaagatggggagaaagtaagcaacttggaacatatattttaggatattgtccatgataacttccccaatctctctagaatggccatcaatcaaattcaagaaatacagaaaatccctgtaagattctacacaagatcacgcccaaracacataattatccaattttccaaagttgaaatgaaagaatgttaaaggtagctagagagaaaaggcagatcacctacaagtagaattc

SEQ ID NO: 173523 - DNA, 541 bp, Homo sapiens
  misc_feature (1)...(541): n = A,T,C or G
agtttcttgtctacctaatccaaagcatataccctggtacaacaggatgtattaataatttgcrcatactttgccttggcttataatgaanaaactatggcanacactatcatccatacatttttgatccataagctggagctgccctgaatgacctttaggctgagatgagcgtcattgttacctcagcaaaagtcagggacaaatttcatgtaatctttctaagggaataatattccctgtaggtaagcttcctgcagaacacatgtctgaggatttagtcttctaccaggtgttttccataagcactgggatgttcctgataacaaccccaaggtggaaatcatggggttttcatgagacaggacttgtttacacacacatacacacacacacacacacacacacacacacagtacaattccagaggacacatgcggaactgctggaaacagaattgttagagatcccttcatgagacacatcgcagtggttgccatacctcacacatacacacacaatgtggtctcccactggacct

SEQ ID NO: 173524 - DNA, 541 bp, Homo sapiens
  misc_feature (1)...(541): n = A,T,C or G
agtttcttgtctacctaatccaaagcatataccctggtacaacaggatgtattaataatttgcgcatactttgccttggcttataatgaanaaactatggcanacactatcatccatacatttttgatccataagctggagctgccctgaatgacctttaggctgagatgagcgtcattgttacctcagcaaaagtcagggacaaatttcatgtaatctttctaagggaataatattcyctgtaggtaagcttcctgcagaacacatgtctgaggatttagtcttctaccaggtgttttccataagcactgggatgttcctgataacaaccccaaggtggaaatcatggggttttcatgagacaggacttgtttacacacacatacacacacacacacacacacacacacacacagtacaattccagaggacacatgcggaactgctggaaacagaattgttagagatcccttcatgagacacatcgcagtggttgccatacctcacacatacacacacaatgtggtctcccactggacct

SEQ ID NO: 173525 - DNA, 541 bp, Homo sapiens
  misc_feature (1)...(541): n = A,T,C or G
agtttcttgtctacctaatccaaagcatataccctggtacaacaggatgtattaataatttgcgcatactttgccttggcttataatgaanaaactatggcanacactatcatccatacatttttgatccataagctggagctgccctgaatgacctttaggctgagatgagcgtcattgttacctcagcaaaagtcagggacaaatttcatgtaatctttctaagggaataatattccctgtaggtaagcttcctgcagaacacatgtctgaggatttagtcytctaccaggtgttttccataagcactgggatgttcctgataacaaccccaaggtggaaatcatggggttttcatgagacaggacttgtttacacacacatacacacacacacacacacacacacacacacagtacaattccagaggacacatgcggaactgctggaaacagaattgttagagatcccttcatgagacacatcgcagtggttgccatacctcacacatacacacacaatgtggtctcccactggacct

SEQ ID NO: 173526 - DNA, 601 bp, Homo sapiens
agatttttaaatggacagataatgttcagatcttctttttaataatgaaatgtattttactcacttaaaattccgtgtcagaatcatgtgcactgggtttaccaaataatgatggtgtccattgtcaaagttgtttagaacaagaaaggaaaaaaaattcaattgacacaattcttttcatggaaacaaattaggcagggacagaagtgaaaatcctgtctttctgccataaaatggaagctggatttctctatagtctcttccaaaatataaaggcaaagtaatactgcccactcattctaccaggccagcattattttaatacccaaaccaggcaaggacattacgagaaatgaaaacygtagagtaatatatctcataaacatagatgcaaaaaacttctacaaaatattagaaaattaagtccaacactgtataaaaagaatgataaactatgatcaagtggcatttatcctaagtacgcatgatagcttcaacatccacaaatcaattaatgtattgcatcatatcaacaagctaaaacagaaaaatcacacgaacttatccacatatgtgaaaaaagtatttgacagacccaaca

SEQ ID NO: 173527 - DNA, 493 bp, Homo sapiens
ggataaatcccacttagtcatggcatacaatctttttgatgtgtcattgaatttggtttgctaatgttttattgagatatttgcatcaatgtttataggagttagtggtttgtagtaatcttttcttgcagtgtcttttctggcattcatgtcagggtaattttggctctattaaatgagtttggaagtgtaacctcttcctctattttttgaaagagtttaaggattggtattagttcttccttaattatttgaaagaacttagccattaagtcatataatactgggtatattagtctgcttgtgtgctgctgatagagacatacccaagactgggmaacttacaaaagaaagaagtttaatgagacttacagttccacattggctagagaagcctcacaatcttggtggagggcaagaaggggcaagtcaggtcttacatagatagcagtaggcaaagagaaagaacttgtgcagggaaactcccactttt

SEQ ID NO: 173528 - DNA, 467 bp, Homo sapiens
gtttataccctgtaaatgctctgaacaagacatggaacattcccagcaaccagaaaattccctggtggcccttcccagtcagtccctccccccagccccagccctagccctggcaactacccatctgtgtcccgtcctgtggcctggccttttccaaacagcatgtacatgggatcctgcagcgtggagcctttccagcctggcttggagatgcatccttgtgtcggagtatcaagaggctgttccttttcgttccattgtatggaggcctccatgtgtttacctcttcaccagcccagggacacttggcttgtttccagattgcagmaattatcaatggagctgtgacaagcatctgtacaggtttttatggacctgtgttttaattttattccaatatctagacgtgggattgccaggatgcacgtgtctacatttgacttttttttttttttttttttttgaga

SEQ ID NO: 173529 - DNA, 515 bp, Homo sapiens
ttttattcttaccttcctaatgatgaacttgggttcctcaaacataccccagccaggctgttgggggaactcagccttcagtatgttggggcagagaaattggaattaatttctcattgatacttaaccaaggtagatagcctgagaatatcaagaatggacatttaataagttgttggaaatgcatacataataccaagaaaaatctggtgagaatgggttaataattttatcttccaaaaatattccctggacctgtgctatacttggtatggaaaaccgtgagcagaagagatagagaatgtaggaagggcaccaggggctgtgaattggggctatggcatggctgtccccgactcctgggtgcagaagctacagkgcaggtattgatctggtgggcagcctccagccctcagctccagcacacccactccagtgagcccctgaggaggtgagatggggtcagagccgagctgtggaggaggaaaacaagcttgagacgatgagcagagcag

SEQ ID NO: 173530 - DNA, 445 bp, Homo sapiens
caccttggcacactggttcatgcctataattccagagctttgggaggcctaggcaagaggattgcttgaggccaagaattcaagaccagcctgggcaacataaagagaccctgtctctacaaataaaaatcagaaaattagctaggcayggtggtgtatgcctacagtactagctgctcaggaggctgaggcaggagtattgcttgagcctaggagtttgaccttatggtgagctatgattgcaccattgcactctagcttgggtgacagagtgaaatccaatctcaaaaaacaaacaaacaaacaaaaacaacaacaacaaaaaacaaaaaaaaccccaaaaccagaaaagaaagcacgtaaggagataaggtctctgttctcctgtgggtgacattccagtatgaagataattcttaagcacatatttcattcattatgatag

SEQ ID NO: 173531 - DNA, 653 bp, Homo sapiens
aaaatctttacatcaagaagcaaaaggaattgttcatcagtttcactatgtgatttttgcttttctttacctgttccaagatggctagtttgattatattgtgaaacaataacttataaaaaaattctctaaaaccattctatgagtaatagatcagacttttaatcaaggtattattttatgttctgcaaattatagcaaagataaacattgtgaagtacatttgctagttttatgtagtgccagattggtaaattactgtacttttttgctgtcctattattgttggtggtggttgttttttaatttacatcatccttcatgttcctagactcctatttctcagagcccttttctgtattattattattaatgtggcatgtttaatgtttayagtatttccataaaaatagttcatctctgctaggtagttttcaatgttaaagcaaatgtgcttactcattgaatatgaaaaatatccctctggaacaaatgtagaaccatccatctcttgaacagaattcttacgggttttacttatctgcctaactgccttgaaaacagcttggaaatcattcccatacttttggggagcagtcaatcatttagacagtttccactgaacagcttaaaataatcaggttattacaagt

SEQ ID NO: 173532 - DNA, 297 bp, Homo sapiens
cttcagttcctaagctaattagcaatacataaaatctctataattgacataacatttcatagttgtatttccttatgcataagatgattatgtatgaggcagagccaaggcaggaaggaacrggggcaggcacaaagggaatgagtaggtgagtaggtgagtgtgcacacataggactgcgtgtatgcttctgacatcgtgccaagtccaactaaaaatgtggttgctgttgtttatcatcaccacatcaattctttcttctcctttgatctgttctcaaacacaattaaaacaact

SEQ ID NO: 173533 - DNA, 560 bp, Homo sapiens
tattagcccttacactcttttatttttaaaagggaattgataaatatgtcccaataaaaccttatgcaactatgttttattgatgcatatgctaaaatatataaaatattttttagagttctaaattggcctaaactcattagtccatttgttttccttcttttaaatggaattgccttttagattttacaacaatgacctatwagagtaaacaatttcaacgaaaaactggtttcaataaaaaggtagaaaacattatcttatctttcacagggggcatctgtggctgaatacaccatcactgtgggtgacatggaaaagatacatgagactcaaagaaggactagaaaagggaaatataaataatccaggttacattttaaaagaggcataactttataatgaagaaaagtttccactaaataaggacaaaagctgctttgatcaaattctataaaatcatgggattagcacttaagattatgaagcctaaaaccaaggccttcctggcatttaattccagatctgctacctattagaatttaaaatttgggacctgt

SEQ ID NO: 173534 - DNA, 560 bp, Homo sapiens
tattagcccttacactcttttatttttaaaagggaattgataaatatgtcccaataaaaccttatgcaactatgttttattgatgcatatgctaaaatatataaaatattttttagagttctaaattggcctaaactcattagtccatttgttttccttcttttaaatggaattgccttttagattttacaacaatgacctattagagyaaacaatttcaacgaaaaactggtttcaataaaaaggtagaaaacattatcttatctttcacagggggcatctgtggctgaatacaccatcactgtgggtgacatggaaaagatacatgagactcaaagaaggactagaaaagggaaatataaataatccaggttacattttaaaagaggcataactttataatgaagaaaagtttccactaaataaggacaaaagctgctttgatcaaattctataaaatcatgggattagcacttaagattatgaagcctaaaaccaaggccttcctggcatttaattccagatctgctacctattagaatttaaaatttgggacctgt

SEQ ID NO: 173535 - DNA, 580 bp, Homo sapiens
gttgcctttctttgctctgtgctgggtgatccaccaactgacctgcttagcgtgttaatcttactagtttactatactatttagcttcatgagagcaacttattctgaacagtgctcaasagtccagcctcctgaaacagactgtttgggtttgaattctgactgtaccattcactagatatattgccttagttaggtaagtcacatcactgtgcctcacttaattcatctgtaaaacagtgataatgatacaggtcttttgctgtgataattaaataaaataatttatgtaattagttacattacatatattatgtatctatgtatatatatgtattacatattcatatacagaacagtgtaattatacctagtttttgcaagatctccaaaacattgatttgcagagttacttagaataaagaaaaattgagtgctaacttaaacaaataacattaggccaaagtaatttagcaatttctttattagtcaaatattgattgaaaaataaaacaacctgggcatatttttcactgataatcacagagtcctccttcgttattcattaaataattttaat

SEQ ID NO: 173536 - DNA, 608 bp, Homo sapiens
taagttactaataaattgaagtggtagatatacagatattcactgcaaaatttcttcaactttgctgtatgtttgaaaatattcataacagttttggaaaaaataaatgctccaaaatgaaaataaggagatatataataatcatacaaaatcccaaaacccaaaaagaaggattattctaggatattaccatttgattcttgctctgtgattttttatttttatggaattgatacctgcattttaaaataataagcatatctcatcactttaaagaaatcattttaaattatttgcatcattttacattacttaaactatcaaatctttgatgaggtatttctttgactaagtrtaaacacaaatctcttagactagaatgcatcaatcctcaactgtccacccagtacctgtcagtgtggcagaaaggaggtgaacacactggagtctattagtgtaatcagttctcagcagaagattctacttttaaagttttttaagatttgtggttgacttaactgacataaaagaaagaacgattgtttctttgaaagtagctaagggtacccaagagtctcagtgtattcagtagtttagattctaacttg

SEQ ID NO: 173537 - DNA, 501 bp, Homo sapiens
tttaaaataataagcatatctcatcactttaaagaaatcattttaaattatttgcatcattttacattacttaaactatcaaatctttgatgaggtatttctttgactaagtgtaaacacaaatctcttagactagaatgcatcaatcctcaactgtccacccagtacctgtcagtgtggcagaaaggaggtgaacacactggagtctattagtgtaatcagttctcagcagaagattctacttttaaagttttttaagatttgtggttgacttaactgacataaaagaaagaacrattgtttctttgaaagtagctaagggtacccaagagtctcagtgtattcagtagtttagattctaacttgtttctgtgaaaatgtaagtagcatagtgtgaaggctgtggagcagattgctcttttccttgatgagttgctacccactatgagcattttgctgataaattagtgcatcacacaatgttagaagccttgtgcttga

SEQ ID NO: 173538 - DNA, 280 bp, Homo sapiens
agttccagaaatcagatgagacaatgtatttgaaaattatgaagcaatagtaaaattataactatcaattataaagcaatagtaaaatatgtygtgttccaaataaaatgatgattttatttctgcattgtgtttatttattttttactaaggcattcttgagtcatttactgatttgttctattctcaaacagaaaattccatttaaatatcaatatgtgtccaaactctataatgtcgctgtcactgacattgtttgggagcatcaaggacagccaga

SEQ ID NO: 173539 - DNA, 554 bp, Homo sapiens
cttgcttcctgttggactacatgaaattaaaacatggttcatacttaagaagataaataatgcgaatgaatagactgacaatgttaaatgcccaagcaaataataatattcttgaattgcacctgcgtggtagtcagatctaaatatcccgagatctggkgagcatttttaacttggataaattgaaagtgtttacattaatgtctaatgttaatccatgtgcatagtttgcccttatatttgttaaggatttgtaaatgtcatagattcaaagtatcttatactcataacttacatccaaagtgaatcctaacttcctaactcttatctaaaattaaattgagggtgattcagaacagtgatagtgtaggattcatgaacagaagaaatggtaattgtagccctttctcagagggtcttgatctgattatctttgcccctggcttggttaaaactcctgactttgctgctctgtaaataccatccttaaagataaaatactaaaggcaaagaaaggatggagtagattctaataacctgtgggatttcaatta

SEQ ID NO: 173540 - DNA, 554 bp, Homo sapiens
cttgcttcctgttggactacatgaaattaaaacatggttcatacttaagaagataaataatgcgaatgaatagactgacaatgttaaatgcccaagcaaataataatattcttgaattgcacctgcgtggtagtcagatctaaatatcccgagatctggggagcatttttaacttggataaattgaamgtgtttacattaatgtctaatgttaatccatgtgcatagtttgcccttatatttgttaaggatttgtaaatgtcatagattcaaagtatcttatactcataacttacatccaaagtgaatcctaacttcctaactcttatctaaaattaaattgagggtgattcagaacagtgatagtgtaggattcatgaacagaagaaatggtaattgtagccctttctcagagggtcttgatctgattatctttgcccctggcttggttaaaactcctgactttgctgctctgtaaataccatccttaaagataaaatactaaaggcaaagaaaggatggagtagattctaataacctgtgggatttcaatta

SEQ ID NO: 173541 - DNA, 615 bp, Homo sapiens
gaaactttgtcttgtggcatgggtgccagtttagccacagtagaatagagttccaggtagattcttaaggtttctgactccaggccttggctcctagatgttacctctggatccacacagggctgggggcaacttgcttctctggagggaagaacaaaggcctggctagttttgctgccagagccctagggccttgagagaacatagatgatagccaggcagtggctaccatgggccttgggtgagactcagtactgtgctggattcaggtctgacccagcattgtcccagtgttgggtagagacagggatgcttatgtcacccctcttcaagctctaggcagctcagtagacagagaaggagactctgcttgtttgtttgggagaaagtaagggaagagaccaaaattctctgcctagtaatccagagaagtcttccagatcttatccaagaccacaagacctctatgagtctgcaaaagtcatagtgttactgggcttgggatgccacctaatgcacacrtagctggagtgaccaaaaacttagattacaactcttcaatgcacagacaccaataaacatccacaagtatcaaggccatccaagaaaacatga

SEQ ID NO: 173542 - DNA, 421 bp, Homo sapiens
attctatcaggtgagtattacccttatacccaaaccagaaggacatacggaagaaatcaaactacaggtcagtatccctgatattgaacattggcacaaaaatcatcaacaaactagtagcaaactgaatttaacaacacattaaaaagataattcatcattgcccagtgggatttatcccaggcattcaaggatagttcaacatacacaaatcagtgtgatacatcctattgagagaatgaaaatmaacaacatatgacgatgaaaacccatttgataaaattcaacatcctttcatgatagaaagactaaaacaaactgagtatagaggaaatatacctcaccacactaaaagtaatatacaacaaacccacaactggtatcatactaaatgggacaaatctgaaagctttttctctaa

SEQ ID NO: 173543 - DNA, 421 bp, Homo sapiens
attctatcaggtgagtattacccttatacccaaaccagaaggacatacggaagaaatcaaactacaggtcagtatccctgatattgaacattggcacaaaaatcatcaacaaactagtagcaaactgaatttaacaacacattaaaaagataattcatcattgcccagtgggatttatcccaggcattcaaggatagttcaacatacacaaatcagtgtgatacatcctattgagagaatgaaaatcaacaacatatgacgatgaaaacccatttgataaaattcaacatcctttcatgatagaaakactaaaacaaactgagtatagaggaaatatacctcaccacactaaaagtaatatacaacaaacccacaactggtatcatactaaatgggacaaatctgaaagctttttctctaa

SEQ ID NO: 173544 - DNA, 421 bp, Homo sapiens
attctatcaggtgagtattacccttatacccaaaccagaaggacatacggaagaaatcaaactacaggtcagtatccctgatattgaacattggcacaaaaatcatcaacaaactagtagcaaactgaatttaacaacacattaaaaagataattcatcattgcccagtgggatttatcccaggcattcaaggatagttcaacatacacaaatcagtgtgatacatcctattgagagaatgaaaatcaacaacatatgacgatgaaaacccatttgataaaattcaacatcctttcatgatagaaagactaaaacaaactgagtatagaggaaatatacctcaccacactaaaagtaatatacaacaaacccacaactggtaycatactaaatgggacaaatctgaaagctttttctctaa

SEQ ID NO: 173545 - DNA, 631 bp, Homo sapiens
taaataaatgatgctgagaaaactgggtatccgtaggcagaagaaggaaactagacccctatctctcaccatatacagaaattgaataaaaaatggagtaaagaattgaatctaagacctyaaaccatggaaccactaaaaataaagattggggaaactctgcaggacattgggctgggcaaagatttcttgaataataccttacaagcacaggcaaccaaagcaaaaatggacaaatgggttcacatcaggttgaaaagcttctgcacagcaaaggaaacaatcagcaaagtgaagagacaacctacagaatgatagaaaacatttgcacactacccatctgacaagagattagtaactagaagagataggtagctcaaactgtacaggaaaaaatctaataatctaattaaataatcagcaaaagatttgaaaagacatttttcaaaagaagacacactaacggcaagcaggtatatgcaaaggtgctcaacatcattgatcattacaccaatgcaaatcaaaattacaatgaaatttaatgaccagtaaagccagttaaaatgacttttattcaaaagacaggcagtaacaaatgctggaaaggatgtggagataagagaacactcat

SEQ ID NO: 173546 - DNA, 631 bp, Homo sapiens
taaataaatgatgctgagaaaactgggtatccgtaggcagaagaaggaaactagacccctatctctcaccatatacagaaattgaataaaaaatggagtaaagaattgaatctaagacctcaaaccatggaaccactaaaaataaagattggggaaactctgcaggacattgggctgggcaaagatttcttgaataataccttacaagcacaggcaaccaaagcaaaaatggacaaatgggttcacatcaggttgaaaagcttctgcacagcaaaggaaacaatcagcaaagtgaagagacaacctacagaatgatagaaaacatttgcacactacccatctgacaagagattagtaactagaagagataggkagctcaaactgtacaggaaaaaatctaataatctaattaaataatcagcaaaagatttgaaaagacatttttcaaaagaagacacactaacggcaagcaggtatatgcaaaggtgctcaacatcattgatcattacaccaatgcaaatcaaaattacaatgaaatttaatgaccagtaaagccagttaaaatgacttttattcaaaagacaggcagtaacaaatgctggaaaggatgtggagataagagaacactcat

SEQ ID NO: 173547 - DNA, 548 bp, Homo sapiens
aacttacaatcatggcagaagggcaagcaaacacgtccttcttcacagggcagcaggaagaagaagtgccgagcaaagggggaaaacccgcttataaaaccatcagaactcatgagaactcactcactatcatgagaacagcagcatgggggtaactgcccccatgattcaatttcctcccacstggtccctcccacgacacatggggattatgggaattacaattcaaaatgagatttgggtggggacacagccataccatatcacaaggcaagtggattgcttaaattcaggagttcaagaccagcctgggcaacagggcaaaaccctgtctctacaaaaaaaatttaaaaattagccaagcatggagacacatgcttgtggtcccagctactcggggggctgaggcgggaggatggcttgagcctgggaggtggaggttgcagtgaactggggtcatgccactgcactccagcctgggcaacagggtgagaccccatctcaacaaataaataaataaataaaattttaaaattaaaattaaaaaa

SEQ ID NO: 173548 - DNA, 548 bp, Homo sapiens
aacttacaatcatggcagaagggcaagcaaacacgtccttcttcacagggcagcaggaagaagaagtgccgagcaaagggggaaaacccgcttataaaaccatcagaactcatgagaactcactcactatcatgagaacagcagcatgggggtaactgcccccatgattcaatttcctcccacgtggtccctcccacgacacatggggattatgggaattacaattcaaaatgagatttgggtggggacacagccataccatatcacaaggcaagtggattgcttaaattcaggagttcaagaccagcctgggcaacagggcaaaaccctgtctctacaaamaaaatttaaaaattagccaagcatggagacacatgcttgtggtcccagctactcggggggctgaggcgggaggatggcttgagcctgggaggtggaggttgcagtgaactggggtcatgccactgcactccagcctgggcaacagggtgagaccccatctcaacaaataaataaataaataaaattttaaaattaaaattaaaaaa

SEQ ID NO: 173549 - DNA, 548 bp, Homo sapiens
aacttacaatcatggcagaagggcaagcaaacacgtccttcttcacagggcagcaggaagaagaagtgccgagcaaagggggaaaacccgcttataaaaccatcagaactcatgagaactcactcactatcatgagaacagcagcatgggggtaactgcccccatgattcaatttcctcccacgtggtccctcccacgacacatggggattatgggaattacaattcaaaatgagatttgggtggggacacagccataccatatcacaaggcaagtggattgcttaaattcaggagttcaagaccagcctgggcaacagggcaaaaccctgtctctacaaaaaaaatttaaaaattagccaagcatggwgacacatgcttgtggtcccagctactcggggggctgaggcgggaggatggcttgagcctgggaggtggaggttgcagtgaactggggtcatgccactgcactccagcctgggcaacagggtgagaccccatctcaacaaataaataaataaataaaattttaaaattaaaattaaaaaa

SEQ ID NO: 173550 - DNA, 548 bp, Homo sapiens
aacttacaatcatggcagaagggcaagcaaacacgtccttcttcacagggcagcaggaagaagaagtgccgagcaaagggggaaaacccgcttataaaaccatcagaactcatgagaactcactcactatcatgagaacagcagcatgggggtaactgcccccatgattcaatttcctcccacgtggtccctcccacgacacatggggattatgggaattacaattcaaaatgagatttgggtggggacacagccataccatatcacaaggcaagtggattgcttaaattcaggagttcaagaccagcctgggcaacagggcaaaaccctgtctctacaaaaaaaatttaaaaattagccaagcatggagacacatgcttgtggtcccagctactcggggggctgaggcgggaggatggcttgagcctgggaggtggaggttgcagtgaactggggtcatgccactgcactccagcctgggcaacagggtgagaccccatctcaacaaataaataaawaaataaaattttaaaattaaaattaaaaaa

SEQ ID NO: 173551 - DNA, 327 bp, Homo sapiens
aggctcctggggactggctttggccatttgggaaatataaagaggagacagaaagggcaaaaagcgggctgctctgaaagccacgatgacactattggccccaaatggctccatgggacactcttccctctgtttcrggttcccttccttccttacaatcaccagtcttggcataccagcattgtttccagaacccctttcacatacatcatcacagagtcttcaaaacagccccgtgtgggagttactgttctcattttacagataacagaactgaagctcagaaaggttaagtgatcaacctgaggtcacacagccatggagtga

SEQ ID NO: 173552 - DNA, 327 bp, Homo sapiens
aggctcctggggactggctttggccatttgggaaatataaagaggagacagaaagggcaaaaagcgggctgctctgaaagccacgatgacactattggccccaaatggctccatgggacactcttccctctgtttcgggttcccttccttccttacaatcaccagtcttggcataccagcattgtttccagaacccctttcacatacatcatcacagagtcttcaaaacagccccgtgtgggagttactgttstcattttacagataacagaactgaagctcagaaaggttaagtgatcaacctgaggtcacacagccatggagtga

SEQ ID NO: 173553 - DNA, 511 bp, Homo sapiens
ggaccccccgtggtcattccccttcccagggaacctcctctgagccaaaggtttgtggctgctgtgacctcatcctcttgcgccagttcctgcttccctgtaatttatggccacgtccgcattaattgatgctgcagaggccgtgaactgggctaattgtttccaaatatcaaattgcagggtttcttggctgattacaggggcattagagtggaaagtggcaaggttctgctgttgtgataatgaatgatgggccccggggatgccatctgcccggatgagactgagagacctccacatggcacagtcacccagcaggctgggacacctccaacccctggccatgagaggggcacatttcctggaaggatctgggggagttcttctctgtggcgatgtcttcaayatcccccattatcccatggagataatgggacagacaggggcctagtgatgcatttccaggccacagaggaaggagatacttgctagatcatcaacatcatcatca

SEQ ID NO: 173554 - DNA, 511 bp, Homo sapiens
ggaccccccgtggtcattccccttcccagggaacctcctctgagccaaaggtttgtggctgctgtgacctcatcctcttgcgccagttcctgcttccctgtaatttatggccacgtccgcattaattgatgctgcagaggccgtgaactgggctaattgtttccaaatatcaaattgcagggtttcttggctgattacaggggcattagagtggaaagtggcaaggttctgctgttgtgataatgaatgatgggccccggggatgccatctgcccggatgagactgagagacctccacatggcacagtcacccagcaggctgggacacctccaacccctggccatgagaggggcacatttcctggaaggatctgggggagttcttctctgtggcgatgtcttcaatatcccccattatcccatggagataatgggacagacaggggcctagtgatgcatttccaggccacagaggaagsagatacttgctagatcatcaacatcatcatca

SEQ ID NO: 173555 - DNA, 581 bp, Homo sapiens
ataaacaaacaaacactgatcatttttgtgtagcaaaaataagctgacaatgaaattaaatttgacagtgaaataagtggctgagaaaaacaatcatcaaagtcagttatagtaaaaaccttttgttacccaaacttctacaatgaaattttggatatgccataaataatttcaatataagtaaaaggataatatctcaaattcataaaacctgaacaaagtccacttagaagtaactatgaaactgttatacaaaaccatgattatgaagaacttgacaataattgtaacaattagtaatcatgtcttatctaaggagcatatgtatatgctgagaaaagcaaaatatatatgaataacaatgctttaacaaattgtaaatytgggaaactttggtaatggtgaatttattctgctcattttctgcatcatttcatcttcccttccaccttttatttctttatctgtttcctctctgaattttttttctctggtgctaagttaaaggctactcagagagacatggtaaagtccccaaaatctttccaggacactattatctgctcccaccatcaagtgcc

SEQ ID NO: 173556 - DNA, 361 bp, Homo sapiens
taatgatgttatctctatgccagatagatccccaaatccaatcacccaatgcatgaacacagttagaaacagaaatcattggkcaattagttcaatcatatagtaagatattgattttttatgacttcatacatttaaaattaaattattttccccagtaggtctacagaaagtgaaattgctcctatagtttttaatataatgtaattagttcagactaaaatgttgttcaatttaatttgtcatatcattaaaactgtgtactaatattgcttaaatggcctgcaatttcgctgatcagtagcaaaatccaagatgaccaccataaagttatttggagcccaatgtaagataattaaaa

SEQ ID NO: 173557 - DNA, 612 bp, Homo sapiens
gaaagagttattcacacagagctggctgtgtaggagaacagagttttatcattactcaaattagcctcacaagcatttgtggatccgagtttttaaagataatttggtggatggaggtgcccagtgagtcaggagtgaygattggttctgttggagatgaaattatagggagttaaagctttcctcttgcactgagtcattcctgggtggggggtcacaagatcagaatgatgaaaatttttgctaggctcacagcagggagctcctgtctacccaggcaacctctggcttgtgctccagcctgcagccactgtgattgtatactcagcccctggcgggagggagcatgtgagcgagtgagtgcaggatccagccagtcactccgagtgctgacactcagagtgctgcatgagtaggctccatgcagggcccacagcaagatcaggagtatcaccctgagggcaacatggaagtgcccaacaggcaggggtgtctgcaaccccaaagcccaaaatagggaattacagtgtgctaattacttcttttagttctgtcatctgcagctcaacagatggtggcgtgttagcagctcagtcaaccccatatcccatt

SEQ ID NO: 173558 - DNA, 425 bp, Homo sapiens
atgtattatatgagcatattttcttcaattccataagttgccttttcactatattgattgtatcttttggtgcacaaaagtttttaagtttgatataattccatttgtctacttttgctttttgttgcctatgcatttagtgtcataccaagaaatcattggaaatatgttttttcatttgtttaagcctgtaggaggaaatacggtttgagtgaactttaacatcttggaaaagtaagccttggtcaagcttacagacaagagactaggctggttattcatcctgtgaaacagccctacaaatttacmtacaccatggaatccaagatcccactgataatgtgaacttactcctttttgtttgtcttctcccttctaatgttaatttttttaactgcaggaaaaataacaaaataacagaattc

SEQ ID NO: 173559 - DNA, 587 bp, Homo sapiens
ttcaggctagaagttcactacattgaatcctttaacctattaagaagtatgtattgtaagacaaagagtgtactgtaagttatgttaactagctaagtcatcctttaggaaggtgaaaccatttgctaagatccctaccccacgtgctgaccaaggatttccatttccatgacaaatggccaccctctcttatctccttggatgaagatccctggctacagcttctatcacccttggatctggttataaccctcagaacgaaagtctttaaaaaaaaggaaaagattctcagcctgacacgctggttttgtctgagagatttggcttacaaaaatagtgctatatactgactgcatgcccactttatagaagtgactattgttaattaagcaccaacttctcattgtaattatctaccttaaaaagaattctgcctgaaggcggaagggctcccgaacattttattttgtgacattgaagataaatcccaacctcccaaaagttytttccttcccacaacaaaaaataggatgtagaacattaaaatgacaacaataacaatcccccttccactccccaaaataacc

SEQ ID NO: 173560 - DNA, 610 bp, Homo sapiens
cctcctgtgcctggctcggcaggtcccatgcccacggagccttactcactgctagcccagcagtgtgagattgacctgtgatgctgcagctggatgggggatggagcatccaccaytgctgaggcatgagcagctcacagtataaacaaagaggcctggaagcatgaaatgggcggagcccaccacagctcagcaaggcctacggcctctatagattatacctcttggggcagggcatagtagaacaaaaggcagcagacagcttctgcagacttttaaacgtccctgtctgacagctctaaagaaagcagtggttctctcagcacagcattcaagctccaagaacagactgcctcctcaagtgggtccctgaccctcgtgtagtgggactgggaaacacctcccagtaggggccagcagacatgtcaaacgggtagatgcctctctgggaggaagcttccagaggaaggatcaggcagcaatatttgctgttctgcagcctctgctggtgatacccaggcaaacagggtctggactggacctctagcaaactccaacagaccagcagctgaggggtctgactgttagaaggaaaactaaccaacagaaa

SEQ ID NO: 173561 - DNA, 569 bp, Homo sapiens
ttgtttttaatatatattaacgactaatgttggggctgggtatgctggcttgtgcctgtaatcccagcacattgggaggccatggcaggaggatggcttgaggccaggagtttaagactatycttggaaatatagcaagaccccttatgtacaaaataaaaaaaaccagccaggtgtgattgtgcatacctgtggttctagctacttgggagactaaggtgagagggttgcttgagccaagaagatgcaggctgcagtgagctgtgattgtgccactgcactccagcctaggtgacagagtgaggccttgtctcaaaaataaaattaaaaagaaaaactaattttgggactccaatatcagggattgggattttcctgatgtacactctacctataagtaaattatcctttattaactgagatgctttatttggatcttatttgtaactcagcattttttttttttactgtgaagttaaaactttatgtagcaaattatacctattgatatttcctaatttgccatgtttggtataatgacagttcatttacaataaatcccaattcac

SEQ ID NO: 173562 - DNA, 522 bp, Homo sapiens
tcaatcctattttatcgatgcatacactggaatcacattgttatgaaagggagagtccctaaaagaaaagaatgcagggtatgcaaatataagatggccactgcagccttttggtatatagagtccttcacagacatgattgcagccatgaatttaaaaagaattttggtgatgttcattgcatgtattttatgtctacacatccatgatcgtaacagcttttattttagtgattaaatgtatttcaacaaacaacttttgagtacattggtgttgcttgtcaggcaatataaaaataaatatgtctatctcctgtggaatttccaaacttgttggaagtagtaagggcaggaaagttaaaggtgtaaacaattttcaaagaaaataaaccatgagagatatgcaaagtatcgtgattgttctaaaggaatggggctatcttaggtcgtaaaaggcttccccatacrgatggtagccagagcagacatgggaaaccatagaagcttggtgatttactgagtt

SEQ ID NO: 173563 - DNA, 537 bp, Homo sapiens
ctttgaatttaagattgtaattaatgttacaatttgctaaatatagagctcttgaagtataggacaattattggtggatttaattaaataatttttttaaagctacaaatatctatttttaaaaataaataaataagctatcattcaattccttgcactagaaataatcattgtcacatttatctccacaaaaaatcataagttttattaaaaatttctactcatgacaaccttctgatgaattttccttccttctttgaacattagtgtgtggtcttggtagaatttagctcaggctttgcaaataaattttatgtaaatatgccccaaactgattactctctatgactttgwtagtagtaggcatggcaaaaattattcttccacatctcaggaagcagaagattccatatatcatttttgttatagatatttaatatttttatttctttatttctcaatctacaaagcagattttaaatgctttatcttgacaaaaacgaaactgcagaaagacaaagcattgactaattatgt

SEQ ID NO: 173564 - DNA, 617 bp, Homo sapiens
ataagtgctttcttatctcatctttagatggtatctccktggcctaactcccagttcactgggaggatccaaaatatctgaagatgttttgtaaattgtaaatcttaacaatacacccctgcactgtagtttacatacaacaagaatttgttttccctcttctgctagactttggaattcctgaaatagttctttccattttatggttttggatagtggcatttggatatgaatccatttagtttattctgttcttcagagagcaccagttttgaaaatatttattttggtaagtaaaaattaaaatgaagattttcaaccctagtaagatttactggactgtataatgaagttctgtggggccactgctacatggatcttaagttttaatcacaaattaatatttgaggctcatttatgtggcaaaaaaatgcatttggagctgtggagagtacaaaaaagaacaggctggatgcagtggctcatgtttgtaatcctagcactttgggaggccgaggcaagaggattgctagaggccaggagttcaaggttgcagtgagctatgattatgccaccgtactttagcctgggtgacacagcaagaatctgtctaaaaa

SEQ ID NO: 173565 - DNA, 617 bp, Homo sapiens
ataagtgctttcttatctcatctttagatggtatctccgtggcctaactcccagttcactgggaggatccaaaatatctgaagatgttttgtaaattgtaaatcttaacaatacacccctgcactgtagtttacatacaacaagaatttgttttcccycttctgctagactttggaattcctgaaatagttctttccattttatggttttggatagtggcatttggatatgaatccatttagtttattctgttcttcagagagcaccagttttgaaaatatttattttggtaagtaaaaattaaaatgaagattttcaaccctagtaagatttactggactgtataatgaagttctgtggggccactgctacatggatcttaagttttaatcacaaattaatatttgaggctcatttatgtggcaaaaaaatgcatttggagctgtggagagtacaaaaaagaacaggctggatgcagtggctcatgtttgtaatcctagcactttgggaggccgaggcaagaggattgctagaggccaggagttcaaggttgcagtgagctatgattatgccaccgtactttagcctgggtgacacagcaagaatctgtctaaaaa

SEQ ID NO: 173566 - DNA, 389 bp, Homo sapiens
tttggaaactgaggcacagagaggttgagtaactttccccaagtcacacagctgataaatgatggggctgagatttgaatccaagtagcctggcctcatagtattcttgtgaatgtgaatagtgtccctgaaatagcagagttcttatttgctcrccttccctgtctgactcttaattgttgacttttccttttttttgcagtgtcttttattgtgacataatcgtaacttaaagaaaagttgcaagtacatagaacttttccccctaaattatttgagaatgttgttgatctgatgccctgttactcccaaatgctttagtgtatatttcccacagacaaggacattttcctgcataactacattacaaccatcaaaatcagaaaatt

SEQ ID NO: 173567 - DNA, 553 bp, Homo sapiens
gagggcatggtatctatcttcttggtagccataattctgactaacacagcagccttacattacttgattttaaagattataagaattataagaggagagtttattagcttttwacagaaaaatggaaacctaatcatgagacagcagaaaaggaaactgtggtaaatataaaatatatagaattttataaatatggatataggaagttgaatgaattaaagcttgaagtcctaaaatttcgttgggaaatagataaattatcttgttgagaaggagaggccataagtggtgtttgaatagaaagctgtactgttgaagattttaaatggctcttgtaggtaacaggagaaagagcaagcaactgtgggagcagctcaagttggagaccataaaattaatattggcataaatctgtggggcattgatttcttctagacatttttatccaaatacaggaaataaagatagatagttgaaatgttccaagggttgtaaggaacattttagcataatcaaggcaatgaaatgaaagaactttagagacactggagag

SEQ ID NO: 173568 - DNA, 596 bp, Homo sapiens
ggttatttgatggatgggtgtcaccatatatttggaggatatgtgtggtggaagtaaaggaagaaaggagttgaggaagaaaggagttgaaaagatagattttagttataaataaatatataggagttgaagatttaagaggtggggcagttccaagtgataagaggatctttgtatgtgtctatggaaatcagtttattaaygtccggtaggataaagattgttggtgtccaaaaatgttgatattaggtaattgggagggctgttcttatgaatttggaagttaacaatgattatggcagaaattggatggagagaaaaagcttcataagtcaaaatgatgtaaagaccacagtaaatgaagatggtagtatgggaggtcaattgatgaccaaataaggacaagttgaagatgatgtaattgaaaaaccactttattttctagctcttccatgctaagtgataccctacttcaaaatggacaccctgctctcctggcttgaacagtatcatcactttctcagagtacagacatgaatatcttagaaaaacccctgactagcttttatctgatacatagattctttcatttcaaa

SEQ ID NO: 173569 - DNA, 541 bp, Homo sapiens
gctctttttaatcaagttgatgtttctcaagcaattgcactgtcaactactcttcataaactttytgctataggtacaggaatattcacgatctccttgatctcccctagctttacctattttgaactttccaactttgcttatcctcttctccttgcctcacctctctactataatggtctcctctcacctctctgcttttccaatgtgaatcaacaattgtacttctcctactactattttttgtaacaattgaaatgtatgcttatgtttgccactggactgtgagttcttagaggatcaagaatatcttattcatctttgtatggcagggcaagggagaatttaagtgaagtaacactctggtttagttaaggcttctctttgaaggttttgattttggagtagcaaaaaatgctgcccccaaatatggcacattggcacactatgtattttaagctgaaggacactgagaaacttgcagaagcagaaaagattgctctcaacttccgcctcctgtcttttaaacactgtgacaagt

SEQ ID NO: 173570 - DNA, 528 bp, Homo sapiens
acttttgttttagcatcttgaagtctttcacaggctttttcaaaggcaatcatatccataacaaatttttcttcacaatgtcttttatatatttcttgagatctaagaggagaaagaaaggtaatagaatgagatacttttaaatactgaaaccatggcaatctattagactattaatgataataattagatgtcttcgaaataggcatatacaagtkagaaagacacaactccatttatataacttggttatatcattaaacaatactcagacaagtatttatgagatatctataagctataattaaaaattctcacaaactatggcttagatttccaaagaggcatctaaactaccctatgtcatcacctaaaatacatctccttaagcctcactaaacccaagctacttcttcgactctgttatggtctgaatgcattccaccatattcatatgtcaaagtcctaactcccagtgtctttgaatgtgactatttggagataaggcctttaagaagtagttaaggc

SEQ ID NO: 173571 - DNA, 558 bp, Homo sapiens
ataaaccatttgatgtctgaagatgaaggaatcctctttgtaaaataataataataataataatgcattccctccattaaagaagtgacggctctgaagaaaaactacatttgtttaaatcttagttctaccacttgctagctgtgtattatagggtaaataacctatctgtatcatgttttcatcatttgtaaaatggagataacgatggtacaactcactgggttgttgtgaggttttaagcatgcaaacaatgttatctttcaacagttttatagcaatacttaaaatgatatagtgttttagggtttataagggacttctacatacattattatatttgatacttacaaaattttatctaaaaagagacgtgtactaattaatttatccaaactaatataatgtaaaaktatgaaatcaacaaattaactataaaagataatcactacaaatgttttcaatccaatcaaaggaattatagtaaaggcttagcaaagaacaaaagatgcttaggcaaaaaactatcaacaatcaataaaatgattggtagaataa

SEQ ID NO: 173572 - DNA, 548 bp, Homo sapiens
cttataattacaaaataaattcaaacatatctgatttaaatttcaccttcttcctctctgttctcagtagtaaaagtatttaaaatattttaaaagcaatttgaaatattacatagatacaaaaacaaaatacatttttggtttgtttgcatgtttgcttttaatttaacatctggtggcaaagatttctagtcttatatgcatgagtatgccttaattgctcatctggagtaatttagttgatattattttatatcctagactaaaattcagtcattccagcaaacaatttaggagaatggtaaaaaaaaaaagcactgttaaaattgcataaagcacaagtggattgagatcagaaaggtgacaaattggatgaatttggaagaaaaatgttggaggcagaaaatgtaatgtgtttcagtggaaaccataaaatcacctttagagtattcgtttcagatataagtggatttggagcaagacraagtatataatgaaggtaaaataactaaagactgcataaatctgatcacaggcaggttgataca

SEQ ID NO: 173573 - DNA, 486 bp, Homo sapiens
tctgcacaactgacagattgcgttttctaagatgaactgtcatcacatcagtgcccaggttaagtccttgcacaatgccctgtagcgctgggggcaacatttcaaatcttcgcttctcatcccagtgcttctatgaccttgtctctaatagacctcagctgttgctgctccccaaccaacatgcaggactctagccctctgggacatttttgacatctttacctacgttgtggacattacaaactggaaacctttctgtacatacaaaactaaaatcattcattgaatgattagttttttgtttggtgtttgtkttttacttgagtaaaatagtcaaattatcgtgaattagtgcttgtaagctggacctctgctgtccaaactcattaatggtagaccctttcatttcttgaataagaaattggcacatataaacaatctctgaaaacatttgcttaatacgtccatgggcctcactgagctgtg

SEQ ID NO: 173574 - DNA, 643 bp, Homo sapiens
tgtgcgatcgattagatttccaccccctcggctactggaaaattcaaaatgaaatttgtattccatctctggtaagtaagtatttggaaagcatttggaggcataaccttgccattcaatttatcttttttccttcttcctctcaaatctcataactttaaaatttttccctcacaaaaatgcaagtgattccctggagactgtaaatccagcaagtgccatgactgatcagacgtcctgagtccatgtccagaactctccccatgacctcccccggccttcagggattccaaggcaaaactcaaagtgaaagatmcctcttctgttttaagctaataaggggggacccaaaagtccttcacatgttctggggcacttatactattgcctgacacagtaggcacatcatcgaggtgacttgttattggtttccttgcatttaataccaggttttgcaaaagatagacacaattttcagcaattactctaagaatgtctaaatttaattaagttctattcctcaagccaatatccaaaatgtttgcatggttcattgagtctcacagtgctctggttatttaaatattccctcattgaatatcacagttgcaattcttaatttaaagtctgcacatctctatgg

SEQ ID NO: 173575 - DNA, 643 bp, Homo sapiens
tgtgcgatcgattagatttccaccccctcggctactggaaaattcaaaatgaaatttgtattccatctctggtaagtaagtatttggaaagcatttggaggcataaccttgccattcaatttatcttttttccttcttcctctcaaatctcataactttaaaatttttccctcacaaaaatgcaagtgattccctggagactgtaaatccagcaagtgccatgactgatcagacgtcctgagtccatgtccagaactctccccatgacctcccccggccttcagggattccaaggcaaaactcaaagtgaaagatacctcttctgttttaagctaataaggggggacccaaaagtccttcacatgttctggggcacttatactattgcctgacacagtagrcacatcatcgaggtgacttgttattggtttccttgcatttaataccaggttttgcaaaagatagacacaattttcagcaattactctaagaatgtctaaatttaattaagttctattcctcaagccaatatccaaaatgtttgcatggttcattgagtctcacagtgctctggttatttaaatattccctcattgaatatcacagttgcaattcttaatttaaagtctgcacatctctatgg

SEQ ID NO: 173576 - DNA, 502 bp, Homo sapiens
caagcatttagtgactatatacttcagtaattagttgtgcacacattctcatgatttttgacattttgttcaagggtaggaaaaaggtggtgtcaaactctgatctaattgtgacatatcaagtgaggatgctctctgagaagaatatatgatacaacttactaaagaaaccaaaccaatctacatatatctacaactaaacagtggtttggtttcttttgtaatgtatctatattatttgcatacaaaaaacctaaamgattttttctaggcctcaagaaagattttttataaatccatgcacacctaggtatagattttttgtatttatttatttatttatttatttatttatttattgagatggagtcttgctctgttgcccaggctggagtgcagtggggagatctcagctcattgaaacctccgcctctggagttcaagcaattctcctgcctcagcctctggagtagctgggattacaggcaactgccacatgcct

SEQ ID NO: 173577 - DNA, 574 bp, Homo sapiens
atcataaatttatcataaggcataaatgatacatggtacttgctaggaaaaaaaagtatatttatatagtccacccatcaggggccagagtctgttaaacgacttagttatcttttgtgataatattttcaaacatttgaaacatcagttaaacatataagaaatctattaaaaaccttttaaatgaaaccaccaaaaatttcctaccagatttgtagtatacaacaagacattaatatttaaaagtattactggttttgacatgtagtatttactttgtttctaaacagcacataattttagtatgatttcttctttaagcaaaaatgattaagacaatatttttttctactgaaattttttaggacatacatttgtgcacttctaaagactctggcttgttcatctgcaatgctatagttaraaccacacctgtatataacaggttcttgactgaaaattattgaatgactgtctgtgagtctcacctttttcagtccactagtttttttgagggacctaatgcatgatccttttttaaaaaatgctctaagatgttttaaaggagattatt

SEQ ID NO: 173578 - DNA, 567 bp, Homo sapiens
cagtcctttttccttcctgagcttccatgtcctcatgttaaaaaggggaaggaggaagttacctgttgaacccrctggggtaccaatcctcgcagtcactgcctggtcacaggagtgcagaatcaaaggtgtctagtgcagcgtaaatgcacacagcgggagaggataatcaagcccaattctgcccctgattaactgtgggaccctgagcaagttatctgaaacttgtgcctcagtctttttatctgtaaaatgaggatggttaaattgctgttggcaaagtgcttacagcggtgagtggctcatgatggacactccacaaggatgaattacagtcgtccgctggtatccatgggggactgattccgggaaacaactcggatactaaaattcaaggatgctcaggtcccttccaggtggccctgcatatgtggcatctgtggatgtggagggccaaatgtgctagtagtcatggcagagagaaggacagtattttgaagtaacgcctgtatatttctttctcaccagtgtttccctttggcccttccaccactgcacctacacaaa

SEQ ID NO: 173579 - DNA, 537 bp, Homo sapiens
ggaaaaaccccaaggttgatttatgggttctgtcagtgggtgaagccaaaatttgatagtgactgccctattttagagggagatctgaaagacagtggagaggggagaatatgtgtaattctttgacagcggccratgatgtggctgcagccaggggcctggaaggaaagaccaaaagactggagacaaggaggtctgaggcagaggcctgtggatggatgtatggacatgagtgcaaagtgtgaagacttttcagtcacatagttaacactcagcagaaaacatgtaccttaaaagaggctctgaacaaccaagtaggtaattttttccaggtgattggcattggccatctttcatcatcagctccatcagaatcccacatagacatatggagggagcagccaggatagagcgatggagtgacatatgcacccaatagcatggacacctgctttcccaggcttgtctagctactaccacctctcaatgtctaacctatctggaacagaggccaacactgggtcctgatgtagcact

SEQ ID NO: 173580 - DNA, 566 bp, Homo sapiens
attgtgcacatgtaccctaaaacttaaattataataataaacaaaaagaaagtgcagcttttccgtggatgcaggatttctataagaaagttataaccgtagactttaatataatttgagaaaaagttattatatggcaacttaaagcaaaaggaaggtagaggattaaaatttggagaatttaattccagcaaagtatggtttgataattttagaaagaggtaggactttaaaaatttcaagataacaggagaagtagcttctgcgaccaagaggcaggagataaattaggaagactgaacaggtttttaatgcagacgaaagtgctctattctggggtgaaaaagccaaaaaacaaagcacttaataataagaaataaaagtgagcattaggatttaaggcaggaaggaataggctaaccctactgttttgtgcaaatgcagtcaggcttagaatcaggactgcccttatctatgaacctgctaactctcargccttgaagaaaaattataaatactagctgccagtcttttggttgtgcaacaggaaggcatgaacaatgaga

SEQ ID NO: 173581 - DNA, 503 bp, Homo sapiens
atatggaacctaatgtgtagcttttaaattataaatttggggtagtgatccacctcaatttgagagagttactgggaaaggtagatcatctgaagaagcccagacttccattatggtggaggaggagctgtagtaggcagaaaaatggctccctcaaatatcctaatactcccaatccctaatccccaggatctgtgaatatgttattttacaaggcaaaagggacttagcagatgtgattatgtttaaggattttaaagcagggaaattatcctggattatcttggtggacccaatctaatcatattgaggccttaaaacatgagagcttcttatagctgtggtcagtgagagatggcaacgtgagaagggtctaacaccctgattctgagacatacgaccatgagcaaygaccagaaagaagcttctaggagctaaaggtccccattgccagtcagcaagaaaacacagctctaatcctgcaactgtgaaaaaccgaattc

SEQ ID NO: 173582 - DNA, 640 bp, Homo sapiens
gcactagaaaatagctcgataatgccaagaaagcatgtaaaacaagggaacctctactacatttccaaatcaacctatttatattttctatttgaggtttatctgtaccttataacacagaattcrtttctttgggggctttccaacttgagtgaaattggtgggtctgagcaaagagcagaataaggaagaaaaaccacgtgcaaaatgctttgccttctgccattatcaatgataagagtgggttgaaaagcgatgctctgaattaaaagttttctgtgttcagttgagagggctaggggtgagaacccactgagaacactaagcagaatggacctttcatttcttctttagctgactcgcagatgaagtgagctttgtgagagggaatgtttgcattcagtataaatgaaaaagtgtctggtctatatccaaaagcaacatacaggtgttgaaattctagcagtaatactaaaagtaataagttaatgaactctgaaatgaaattattccatttgtcaaaatctgtttgccagattttaaaatctaacagggcatgcagcatatggaacattaaagtgtggatacccattgtaggcataaagagtgctactgagaagcatgagtttgcctgttaaag

SEQ ID NO: 173583 - DNA, 229 bp, Homo sapiens
taggcggcaaaagtgtctttataacaaggaagtgtttgtagtattcagggttatggtcacttttaggggcaaagaaatatgagatcggaaagamaatacagcagaaaatgtgaggtattcacattattttcttgtcaacaaaagtgtttataatattcattatgctctatttgcattcttctgtatagaagttatatttcacaagatttaattacatgctttctcatca

SEQ ID NO: 173584 - DNA, 485 bp, Homo sapiens
gttcagacagtttaaaatgaataaaagcttttaataagttttgtggggtggggggatggtgaaggaagagttgatggcagggaatgggtatagggaaatgccgaggtgaaagattcttgcatcttaccagagtctttattagagtttttgccttcactattgtctctctcacttgtgtctttttcatcgtcctcggccactgctgtaggcttaatagctccttctgcctcytcactttgttcttctgttaagaaaggcagaccaatcagtagaactgaaaaccgcccaaaagttcacactgaaataaactaggtggccacttgaaaactttgttatttatgaatcatctgcagatattcatactcaaatgagaacacaaatttatgcaaaagtctatgctgatcatgctgactgtaccaatgcaaattttgtatctaaaggatcttcttttgtatccattgagaggatgggtctatactaaatta

SEQ ID NO: 173585 - DNA, 606 bp, Homo sapiens
aactgaaaaccgcccaaaagttcacactgaaataaactaggtggccacttgaaaactttgttatttatgaatcatctgcagatattcatactcaaatgagaacacaaatttatgcaaaagtctatgctgatcatgctgactgtaccaatgcaaattttgtatctaaaggatcttcttttgtatccattgagaggatgggtctatactaaattaaaataaattctttttagtacagtttaagctgaaacatatttaaaaattgggtataaggcaattctgtgattcgaatagtagaaccttgtaacaacataaacctactgttccatagactgggatagatgtcaggaaaaagaaaacagattcttagaaaaaaaatcttaaataatataacaacggttatataagacaggtgttactccagctttcagaccccagaccccaaaggaattctttggcattttcttagagtaagatctcaaaacttcagttacattggggattttttttttcttctgtagggggagctatactgggtgyaggatataacaaggtatacttctatgacaaccacatcaccccacacctcattcacgggttcacaccagc

SEQ ID NO: 173586 - DNA, 632 bp, Homo sapiens
ttataggaattatggcaaattttcctgggcggagctttcattattagtttttgcagattgtctgtgtcctgggggaatgctcacatatttatggggctgttgtttttccatttttctaattaaattcagcacaaattttcctctgatagtctcatgtaaaaccttaacccaatgcttaagtttggccttggaggtagtaattcacctatccactgattcaaagattcaactagtatttatctaactcctagtgaggtaggaagcagaacttgaatctgaaagtagggcttggactccagaccagattgaaagctgccagaaacagggaagatgcaaaggcacctctccccaagacaccccaccagtgccatctcagtttgctgttgccatgcaacacctacaaattgctgcccctttccgtggcaacactgaaagttcccaccctttgtctagaaattgacgcataacccgccccttaattagcatataattaacagtttgaactttgtgaaaagtatttctgggtccattctctgctcaaaataaatagtctcagagtatatcaattgttttgaaaayatgaatcaagagcaaataaaacttttaatgtaaagcgtcagaaatcctaatgc

SEQ ID NO: 173587 - DNA, 569 bp, Homo sapiens
acggtggctcatgcctataatcccagcactttgaaaggctgagttggcggatcacttgaggccaggagtttgaaaccagcctggccaacatgaggagacctcgtctctactaaaaatataaaaattagctggatatggtggtgcatgcctgtggtcccagccacttgggaggctgaggtgggaggattgcttgaacccaggagacagaagttgcatgagccgagagtgccactgcattccagsctgagcaacagagtgggactctgtctgaaagagagagagagagagagagagagagagagagagagagagaaggacaatgggaaataagtacaattgggtggtacttagatcaaagggataccactgatgtacatttgcttagaaattgtataatgttgtaggataaactcatatcagttttccaattgtttcttattgttcaaatgaaaatactctaagctagtcattcaaaaacacttattttaaatatagccaatgtgtatatgtagagtaacttataagatcattttagacatgtcaaaaatgctgggggaagtttgttgtaa

SEQ ID NO: 173588 - DNA, 529 bp, Homo sapiens
agaatgatataaaatgataatctgtaaatcttgggttttgtatgaataaaatcaagaatatctttaattttttaatgcaggtataagtttttcttcatctccagcttgcttcattcttgaacacttctataaaatctctgattttttgagtgggaagagacagtagcacgccttcatttgcttaggggcagaataggatggaaggagtccattgtgcagatagagaaggcagagaaggggaaaatttttgaaaataattaaaattgacttagaaaatagacagaatggagagaaacaggcttaaaagtacctttaattctttatgttgttcaagcacattagacmctttaggtggttttagatgcattgcttcattcatctttctaagcaggtgacttagcagatagtagacctgggacaagagcctgtttgatttctaagctaatccattccctatcctatcactttgctaagcgagtttctgatttaggaaaataaaagcaatagaataggaaagataagaatgatt

SEQ ID NO: 173589 - DNA, 627 bp, Homo sapiens
caagcagaaaatcagaacatagctgaattcaatgactccatcaaccaactggatatatttgacatctgctgaatataattgacattaactgtatataattcacaaacgacttttttcaacaacaacaacaaaaacagaatcagtcttctaaagctcacataaaacttttaccaagataaacatttgggaccataaaacacatgttaacaaatttaaaagagtagaaattatacagtgtatgctaagaccacaatagaattatacaagaaataactaacagaaagatagctaaaataaatccccaaatastaagagattaaacacatatctaaacaacacatggatcagaaaagtaatctcaagagagttttgaaaagattttgagctaaatgaaaatgaaaatataacgtatcaaaggggatatagcaaaagtagtttgtacagaaaaatttgtagaatggaatgcatatattagaaaataagaaatagctaaaatcaataagcttccattttagaaaacttgaaaaagaagagcagcttaaatccaaagtaagcagaagaaaataaataataacaatcagagcagaaataaatgaaatggaacacaggaaatcagtagagaaatta

SEQ ID NO: 173590 - DNA, 538 bp, Homo sapiens
gtctctaccaaaaatacaaaaattagctaagtgtggtggtgcccacctgtagtcccagctacttgggaagctgaggtgggagtattgcttgaatctgggagacagaggtttcagtgagctgagattgtgatactgtactctagcctgtgtgacagagtgagaccctgtctcaaaagaaaataggaaaaaaaccctgtgggacatgatttgataagagggcaaaagaaatgaaggacatagggctgacttagatgtttggtttgagcaacaaggtagatggtgktgccctttcttgagatagggaagactggagtaggaagaatttgggataggcaaaaaatagatttgtttgtgttgtctaataaacatccagctggaggtgttaagtgggcagatgaatctagagttgaagggataaatgaatttgacatgtgaatttgggagtcaccaacatataattgacctttaaaattatgaggttagattagctcacctaggaagagaataagagatttaaaaaagagagatttgtgcacta

SEQ ID NO: 173591 - DNA, 538 bp, Homo sapiens
gtctctaccaaaaatacaaaaattagctaagtgtggtggtgcccacctgtagtcccagctacttgggaagctgaggtgggagtattgcttgaatctgggagacagaggtttcagtgagctgagattgtgatactgtactctagcctgtgtgacagagtgagaccctgtctcaaaagaaaataggaaaaaaaccctgtgggacatgatttgataagagggcaaaagaaatgaaggacatagggctgacttagatgtttggtttgagcaacaaggtagatggtggtgccctttcttgagatagggaagactggagtaggaagaatttgggataggcaaaaaatagatttgtttgtgttgtctaataaacatccagctggaggtgttaagtgggcagatgaatctagagttgaagggataaatgaatttgacatrtgaatttgggagtcaccaacatataattgacctttaaaattatgaggttagattagctcacctaggaagagaataagagatttaaaaaagagagatttgtgcacta

SEQ ID NO: 173592 - DNA, 543 bp, Homo sapiens
actaaagaataaaaaagtaaacagaaaatgtagtttatgttttaagaagatggatggtaaaggaaagaaatacattaggttagcacctagacagagaggaagaatcaggtaatgtttgtctgtctgcattaaataattgagcacrttatccatgagcttttaactgtgaatctctggatacatgactcttattgatggtaccttctcttcactcccacagctttatttgattaatgatgcttattcttcgggtcttagctaaatagttcattctttctaggacgccttacctgacttcttgaaatgggttagaactctagaatctctttggtattcacctgtagctccctccagcttgtcttccatggaattcattatactggcccatagtaagttttcagtaaatgatagctattacattgagtcataggtgtccttgagacttctaagcagagctgtcaaatacgtagttggatttataatcttggacctcaggaaaaaatggctagttggagataaaatttgtgggagacagacaaaaag

SEQ ID NO: 173593 - DNA, 543 bp, Homo sapiens
actaaagaataaaaaagtaaacagaaaatgtagtttatgttttaagaagatggatggtaaaggaaagaaatacattaggttagcacctagacagagaggaagaatcaggtaatgtttgtctgtctgcattaaataattgagcacgttatccatgagcttttaactgtgartctctggatacatgactcttattgatggtaccttctcttcactcccacagctttatttgattaatgatgcttattcttcgggtcttagctaaatagttcattctttctaggacgccttacctgacttcttgaaatgggttagaactctagaatctctttggtattcacctgtagctccctccagcttgtcttccatggaattcattatactggcccatagtaagttttcagtaaatgatagctattacattgagtcataggtgtccttgagacttctaagcagagctgtcaaatacgtagttggatttataatcttggacctcaggaaaaaatggctagttggagataaaatttgtgggagacagacaaaaag

SEQ ID NO: 173594 - DNA, 585 bp, Homo sapiens
cataggtgtccttgagacttctaagcagagctgtcaaatacgtagttggatttataatcttggacctcaggaaaaaatggctagttggagataaaatttgtgggagacagacaaaaagggacaattggagtcactggttttagtaagatccctaaggagacagtgggatataaggaagcctaggattgagccttggcctacagaattaagtagccctgtaattgaagatgactgtgcaaaggaagggagaagccagtgagttccaattcccacttgtttatttttgtttctgttgcctgtgcttttggtgtcatrtccaagaaatcatggccaagaccaatgttatgaagccccctccactgccaatcttctcttgtaggaattttatagtttcaggtcttatgttttaagtctttaatccattttgagttgatttttgtgtatggtgtaaattaagagttcaattttattattttgcatgtagaccgctgtttccctaccacaatatgttgaagagactatccttttcccattgtgtattcttaatatcttgtcaaagagcagtggactttatatgcatgcatt

SEQ ID NO: 173595 - DNA, 585 bp, Homo sapiens
cataggtgtccttgagacttctaagcagagctgtcaaatacgtagttggatttataatcttggacctcaggaaaaaatggctagttggagataaaatttgtgggagacagacaaaaagggacaattggagtcactggttttagtaagatccctaaggagacagtgggatataaggaagcctaggattgagccttggcctacagaattaagtagccctgtaattgaagatgactgtgcaaaggaagggagaagccagtgagttccaattcccacttgtttatttttgtttctgttgcctgtgcttttggtgtcatatccaagaaatcatggccaagaccaatgttatgaagccccctccmctgccaatcttctcttgtaggaattttatagtttcaggtcttatgttttaagtctttaatccattttgagttgatttttgtgtatggtgtaaattaagagttcaattttattattttgcatgtagaccgctgtttccctaccacaatatgttgaagagactatccttttcccattgtgtattcttaatatcttgtcaaagagcagtggactttatatgcatgcatt

SEQ ID NO: 173596 - DNA, 503 bp, Homo sapiens
ctgcaaacagagataattttacttcttcttaacagatttggacactttttctttttcttgtctaatcgctcctaattgaattaattaggagattgaatcagtaaccaaaaatctcccatcaaagaaaagccaaggatgagatggtttcactggcaaattctgctaagactttaaagaattaacaccaatgcttcttaaactcttccaaaacattgaagaggagaaaacacttccaaaccgattttctgatgctggcattaccctgataccaaaggcaaataaagatcctacaggaagaaaaaaaaaaaaaaaaaaaaaaagaaagaaagaaagaaaaaaaacccactggccaatatccctaagaaacatagctrcaaaaaccctcaacacaatgctaagcaaaccaaattcaacagtgcactaagaggaccattcgccatgaccaagtggaatttttccctgggatgcaaagatggttcaacctatgcaaattcattaatgcg

SEQ ID NO: 173597 - DNA, 625 bp, Homo sapiens
gagaaaagttttcaagtgttcctataataactttgatcagcttttatatttcagttcctctggcttatttcttctttattcctatggcaaaattaacttttataggattaaaaaataaactttataggagaggcaytttacttacattccccaaattagtaggcacttcctagagctataactcaagttagagatataaatcaatttaaggataaagatttttagcaactgggaaaacattttggatacaagcacatcagttcagagaaaaacaatgcttgagcgtaccatttggggaggaaagcagcaattttttattaaagtcataaaaccatgtaaagcatcaagtaaaaaaaaatactatagttgattttaattccttgggataattaatatatttcttaggaaacaaaaacatgttttctcagcattactctgttacatcgaaaaggataagaacgtgaatgatgtagagatgtactatattcatggattggtagtctcaatagtattaagatagcaattctctcagtttcacctacgacatgtaaagagtctggaactcaaccctcctatgttacaaacaaataaaacatgaaatggatgctgaagacaggtttcatgc

SEQ ID NO: 173598 - DNA, 625 bp, Homo sapiens
gagaaaagttttcaagtgttcctataataactttgatcagcttttatatttcagttcctctggcttatttcttctttattcctatggcaaaattaacttttataggattaaaaaataaactttataggagaggcactttacttacattccccaaattagtaggcacttcctagagctataactcaagttagagatataaatcaatttaaggataaagatttttagcaactgggaaaacattttggatacaagcacatcagttcagagaaaaacaatgcttgagcgtaccatttggggaggaaagcagcaattttttattaaagtcataaaaccatgtaaagcatcaagtaaaaaaaaatactatagttgattttaattccttgggataattaatatatttcttaggaaacaaaaacatgttttctcagcattactctgttacatcraaaaggataagaacgtgaatgatgtagagatgtactatattcatggattggtagtctcaatagtattaagatagcaattctctcagtttcacctacgacatgtaaagagtctggaactcaaccctcctatgttacaaacaaataaaacatgaaatggatgctgaagacaggtttcatgc

SEQ ID NO: 173599 - DNA, 599 bp, Homo sapiens
tttgacacattttgaaatggctgccagtgggggtcagaagacagaagggaccttgcaaaactctctcttgtggaaaaaatttgcatctgtggagaatctccattaatgcagccaggtctttcctttctcggcctttcccggctctagcagagattgagcctgacatctttcaaactttgaaaggaaatagttatcctctattctctctgagggctatggcctatgagacttcgtctatgtaacaaggccacctttgctagcatagcttctycctttatctctcccataacctgtcttgcccctcaaatctgacttaccaccataacatgtttttggccatgctctgagcccacattattttaacctcaagatggtctataagcttctgtacctcgttgggggcttaggtctttattctgaagcctcttgtgtatacatgttaaataaatttgcatgtcttttcttctattaatctgccttttcagagttgacttttcggtgaagtttcagaaggccaagaatttctcctgggagggagaaaggcaggaagaataagaagaaaaaatagactatccaagaagacataaataaatggagag

SEQ ID NO: 173600 - DNA, 572 bp, Homo sapiens
gtaatatattgtttttctatagtttaaactgatttcataaaatatagtctaaggcataacaaatgattstataaggaattaagtaaaaaagaatacccttaaataggttaatattaatagtaatgtaaatttttattttagcaattgtgtatttacaccattataaatttctacaactattagttctactctttgaagagaacctagtctgagctgacgtttgttctatgtctgcaaagattcaaagccttcccaggttttatctaagtaactttgttttatgttctatttatacttcataaatccattataagcccatctagaaaagcaattatttccaggcatcaactaatttactggacttcttctcaatggatatgtggtttctactttagacaaccaatctccatagcaaatcaggtggatttagtttctgcatccctgtttatacataagctaaattaagagtgttaccatcacagacatagctactggccaaatagaaggtgcaagacttggaagacacaatcacacgggcaattagtggaagccatatccagagcataggtccc

SEQ ID NO: 173601 - DNA, 543 bp, Homo sapiens
gtgcagtttattgaatgtcaattacaactcaataaattgtcatggaaaatagtattgagcaaaatatttaacaaccagtgtgctacagacaataatccttgagaataaatgcagaccatgccagtgtgttgcagctcaatgccaacaagccttggttgcaaagatgatcaacttcattggttatcagggaataaaatttaagaccacaatgcaatagcacgacacatctaccaaaatgtctaaaattaaaaaaacaaaaaacaaaaaacaaaaaacaagataccaagggttggtgaagatgtggagaaatctaaattttcatatactgccagtgggaatggaaatttgcacaactatcttggaaagtcatttgtcagtatctactgaaacctaatatagcttcaaactctcatagctgataattccatttctatgtatacacccaataaaaatgcatacatatgttcaygtaaaaggcatatacaaaaaacataatcataattgtactaatcataatagccccaaggagaaaactacccaaat

SEQ ID NO: 173602 - DNA, 593 bp, Homo sapiens
tgagtgtgaagcccacattttgtgtaaattygcagatgtgcattattctgggaaggaggtacataggattcaacagactttcatagggggctgtgagccagtgttgtttaaaaattgcttaccacctccattttttttggagtaaccccaattccctcatgagtccacttgcttacttattcacaaatattcattgagtacttgctctgtgccagatactgttccaggcacttgggatttagcagtggaccaaacaagcaaggatcctgcccttttggaattcagattctaacagaagaatctggataataaatcacaaaataaaacaaaaaaagaatagataaattatatagtatgctaaaagataagaagtgctatataagaaaaaagaaactgtaaggagaatcagaaatgctaggagagggcattgaaatttgaaagagaatggtcaggatagaacctactaagaagatgtttgagcaatgagtggaaggaagttaaggaaagatctatatggatatctgagagaacatttgagccagtgccagggacccgagatgggagtctactgtcatgtaagaggaacagcaaag

SEQ ID NO: 173603 - DNA, 570 bp, Homo sapiens
agccaagcaaaagaaaagttgccaaaaagcagaatggagttttcagaatctcatggtgccagaaagacaaaacttgaaatttaggaggagaggctgtggaaaacattcaggctcctcttggcatccctagaggacaacaccataagggtaggtggacccaaggtagacctgggctgagaaagacgaaactttctctccagtcagctgagcccttgattcaatcgagattatgcactccctactctagatacctagatttacctwcagaaagggtgaagcctctctgaagaatgatagcccttataatttttttcatctagagcctttataatttttcatatacaacgttcctcgctctaccaaaacttaccagacatactaagaaataagaccaggaaaaaacagataataaaacagaccataggtgatccagatattataatcatctttaaaagcaatgtgctgaatatatttaagaaataaatgatcagatggggaattttaccagaaaactggactttattaaagaatcaaatagaaatttcagaactgaaatgtatattaactaaa

SEQ ID NO: 173604 - DNA, 532 bp, Homo sapiens
aggagctctgaatcttgaaacaaaacctcaaaatacaccaaaatagaacctccttgaagcataaatcccacagggactgtaaaacaataacacaaggaaaaaaataatgaaagtattcaggcaacaactagcacaatgaacagaatagtacctcacgttttcatactaatgttgagtgtaaatggcctaaatgttccacttaaaagattcagaatggcagaatggataagaattcagcaaccaagtatctgctgccttctagagactcacctaacacataaagactcacataaacttaaggtaaaggggtggaaaaagatattccaggcaaatggacaccaaaacaagaaggactagcttttcttatatcagacaaaagagacttcaaagcaacaagagttaaaaaacacaaagagaggcattacataattataaaargattacttccataggaaaatatcacaatcctaaatatatatgcctctaacactggagctcccaagtttataaaacaattaagactagacccaag

SEQ ID NO: 173605 - DNA, 442 bp, Homo sapiens
ctcattctcccaaacaaagccagtgtcctcctgtccatccaggaaacagaatttttcttccctgatggctccaaaaggaattaagccactgttttctcctgctgggtttctgttgtgcatcttcaagccatttcttcatctgaaggtcttccggcaaactcactaaacctcttgagcacatgactcaagagtgacaattgctaacagatgcatttctacatttgtattctggcagaactggtcttaaattattgctcacaggagaaaggaagagcaactgtagcacctctgttcactgttgctggcagacaacaaacttgagatgaagccacatttgcaggggaaaaattgcctacgcccacagaatgaaattkcaggctttgacagttgctaggtaagtaaatgagaatcattttattctgggtgaacacagcacctagca

SEQ ID NO: 173606 - DNA, 509 bp, Homo sapiens
aaaacatttaactttttttttttttaatagatcagtagtaactatctcttccctagatttgctttggaatctatttttgtacaattaaaagatcccttaagaacttttctcaatcaagagtccctttctttccctagaagcatctgaactcctagaacaacctattaaaattgtaaccaaatgataaagaaacacaattatctcaactacattaagcacccattatgcttaagatgcagcagtgggtgcaagagagaaaaagaaaacaggacaagaggtatcctttgttctcaaggcatttatgatgcagtgggggaagtggccatgcacccaagaagctgtgtggtgagtagaaggaagttkgaaggcagaagatccaagtttcagtgttgattttacaataatatgtccctggacaagacaagtaaccttctgcattttgatgttgtgaatattccattacttgcaccgtttctggggcttctgagaggatagaaggcaacgatgtg

SEQ ID NO: 173607 - DNA, 555 bp, Homo sapiens
ctgtccattttctcccctctactcttcctttctattacctttgaaaattcagtattatctatacccaggcaatatataaattatgtctggggaccctcctagtgcataaagtggtttgctgctctagaaaacctagtatgtggacattaactatttctttgaatattttatagatccttcagggtaaytgggtgggcagacacaccatagagtctctatgtatttcaaaataaagttaagtaaagtagatggaatttcccagaatagtaaaattttcttgttgatgctggttatgtaaaactattcttttaagataggcaaaatacggatgtacaactcagccctcctttccttcaggttttgatagagaatagaataaaaaaacacatgtgtatcaaagtgtcagctttgttagcaattacaagtacctattttccacccaaatccagaactctttggtagtactagtagttgacaggactagaaagcagattaaaaattaggcaaatgggataattaaaccttctatcatctacctcccacatgtaatcaaga

SEQ ID NO: 173608 - DNA, 555 bp, Homo sapiens
ctgtccattttctcccctctactcttcctttctattacctttgaaaattcagtattatctatacccaggcaatatataaattatgtctggggaccctcctagtgcataaagtggtttgctgctctagaaaacctagtatgtggacattaactatttctttgaatattttatagatccttcagggtaattgggtgggcagacacaccatagagtctctatgtatttcaaaataaagttaagtaaagtagatggaatttcccagaatagtaaaattttcttgttgatgctggttatgtaaaactattcttttaagataggcaaaatacggatgtacaactcagccctcctttccttcaggttttgatagagaatagaataaaaaaacacatgtgtatcaaagtgtcagctttgttagcaattacaagtacctattttccacccaaatccagaactctttggtagtactagtagttgacaggactagaaagcagattaaaaattaggcaaatgggataattaarccttctatcatctacctcccacatgtaatcaaga

SEQ ID NO: 173609 - DNA, 590 bp, Homo sapiens
agccacttcacagcaaaaactccctattatggaaagggaatgctaatcattggtggaaacgagatgtctcttccacagtggatttgctctactttaccatatctatttactatattattaaatagtgtttcttgagaggtgtgttattgtcattttgaatgagacagttctttggttgctgtactgtttctcatactgaagtatgttcacattcctggttcctgcctactaatatcagaagcagtctcagacaccatatactatggtwtgtccccagcaaaactcaggctgaggtttggtccccagtgtggtggtgttgaaagttagtgcctttgagaggaatttgggtccttaagagaggtttatgcctttctcttgagaatacattcagggacctctattaagactgaattaattattgcaagagagagttgtgttaaagtgaggctgccgctcctgtttggtgtcttttgcaggtgcctgctgcttaaccttctgcttctcctgtgttatgaggtagcataaagccctctccagaagccaggagatgcagctgctcatcttagacttcccagcctccagaaccatga

SEQ ID NO: 173610 - DNA, 611 bp, Homo sapiens
atttgattgatgtctcatgcctctctaaaatataaaaaaccacgctgtacactgaccactttgggcacatgctctcaggacctcctgagggctgagtcatgggccatggtcactcatatttggctcagaataaatctcttcaaatattttacagagtttgactctttcagtcaatagaatttaagtataatgtcaaatataactttgtttcacaactagttgcatattttaacaaagacatggatgttaatttttaaagtatcatgtatttccctatcttttaaaaacaaatatgtggatagaattttcttaataaaaatgcctaaggtcaacagaatcatcaaatgtaaaaattaatctatgttcaaatatacttacatctgcwggaattaatgagatcgttcctacattattatgtggtgccttctttgttttctaggatggctgactaaaagaaatgagcatttagttgattctgaataaggcacagagagagtaaattcttcaaccatgtttaatatgaagcagcaaaagaaaagcctaaatatcgttatctgcgcaagaatgtgtggattcacaaattcttttcagacagctgttcagaagatagt

SEQ ID NO: 173611 - DNA, 569 bp, Homo sapiens
tcaaggtttctttgtttggaaaaatcaagagagctaccaaagccaagccccatgcacccaaatcttagcaggtatagtaactatagctagctaccagctatctgagcacattggcagccttgggatttttgagcagtccttaaccccttgtttcrttttgatatatgtcttctaataacccgaattgttcctttttgcttggaggccattaaacttcaaatggtgatgcaaatgaaaccatgcatggacatgccattcttcccaggacccttaaactgacctcaggaggagtcctaactgccgcttttccaaaacagcgcctcctgtcagcaggaagcagttaagagaggtcttcgtccactttttcgcaacagcagttgctgaaggagggaatgaaaggggttagccagcttgcttttgacagacagtaccagaaggatccctggagaacctccaacccatgttttgtgcagataagggaacttgcacaggggccttgcctaaatatgtccaccgccaactaagagcccacatacgcacgggggaatggggtggagctaccaggaatt

SEQ ID NO: 173612 - DNA, 569 bp, Homo sapiens
tcaaggtttctttgtttggaaaaatcaagagagctaccaaagccaagccccatgcacccaaatcttagcaggtatagtaactatagctagctaccagctatctgagcacattggcagccttgggatttttgagcagtccttaaccccttgtttcgttttgatatatgtcttctaataacccgaattgttcctttttgcttggaggccattaaacttcaaatggtgatgcaaatgaaaccatgcatggacatgccattcttcccaggacccttaaactgacctcaggaggagtcctaactgccgcktttccaaaacagcgcctcctgtcagcaggaagcagttaagagaggtcttcgtccactttttcgcaacagcagttgctgaaggagggaatgaaaggggttagccagcttgcttttgacagacagtaccagaaggatccctggagaacctccaacccatgttttgtgcagataagggaacttgcacaggggccttgcctaaatatgtccaccgccaactaagagcccacatacgcacgggggaatggggtggagctaccaggaatt

SEQ ID NO: 173613 - DNA, 463 bp, Homo sapiens
agctctctaggaattcttagagggtactcttccccttcatgattgcttcaccctcatgccctaatcacctcccaaaggtcccacctcttaataccatcacactggaggtaagaattgcaacatatgaatttgtggggaacacaaatattcagactatagcttagggaactctgtagtatctttacaagttttytttaattcttgaactgttcaaaaaaacaaaatctatattaaaaattttgtctctttttttaaaaaataaatatcaaaaaagttaaaatatgctagagacttttcatcagttactatcaaacctctttataagagtttcgttaagtctttaagattcttcatattgaaatcagttgtcccaatcactcattaatttctagtctcctgaaataccaaagtgaaatgtgaaagaagaaaggaaaacaaaaaaaagtagccaacaaaaggagag

SEQ ID NO: 173614 - DNA, 412 bp, Homo sapiens
caaacatcctctaatagggcagttctaaatgccctataacagggcagttctaagcaaggaagaattggcctacccaaagtgctagtcataagcccattgagaaaaactcaaaagatgaactcagtctctttggcaagaagaagcaggagtggggcagataggaagagaattggtatttactgaataccttaatacttaccccttttagcctttgcaacaaacattgaggtatkattatctcttttatacaaatagaaacctgagactcatggggttaagtaacttgtccaaggtcataaaagtgaggtgtaggtgctttgtgacacttggctagacggaagctcagggatgaaaaacaaagtagtaattcacctgggacctgacttagaatccaaatgaccatcccttcctt

SEQ ID NO: 173615 - DNA, 589 bp, Homo sapiens
gatttttaaattccatcatttattgtacatttctttattgactttctactataaggaagagttttccccttattatatcagcctcctgcatttttactttattgaatagattataatccctttctgtaatcattttttgtatgttcaaattgtgtaagatttggctagttgagacttcttcatgttgtctcttgtgtccttttgaaataccccatcattctttgaggccttctaccctcttaatagtcaacaaatggtaactaagtggcagacactctaactttgcattcaaatagtgtttcagawaccagtgcagaaacataaaaaccctgatttcattgcctatttatttctggtgccataaaatttctctcttattaacatcttgtagtttggtccctactgagaatttcttccaaagattgattaaaatcatatatgttgctaaaaatttcttcattagaacttatagataaaaaagaagtaaaactcattttctttggttggttaactatgaaaagaattgttctgaactcaattgggaaaagagggtgccagcattcattattttttccttagatccttttta

SEQ ID NO: 173616 - DNA, 611 bp, Homo sapiens
atttgattgatgtctcatgcctctctaaaatataaaaaaccacgctgtacactgaccactttgggcacatgctctcaggacctcctgagggctgagtcatgggccatggtcactcatatttggctcagaataaatctcttcaaatattttacagagtttgactctttcagtcaatagartttaagtataatgtcaaatataactttgtttcacaactagttgcatattttaacaaagacatggatgttaatttttaaagtatcatgtatttccctatcttttaaaaacaaatatgtggatagaattttcttaataaaaatgcctaaggtcaacagaatcatcaaatgtaaaaattaatctatgttcaaatatacttacatctgcaggaattaatgagatcgttcctacattattatgtggtgccttctttgttttctaggatggctgactaaaagaaatgagcatttagttgattctgaataaggcacagagagagtaaattcttcaaccatgtttaatatgaagcagcaaaagaaaagcctaaatatcgttatctgcgcaagaatgtgtggattcacaaattcttttcagacagctgttcagaagatagt

SEQ ID NO: 173617 - DNA, 598 bp, Homo sapiens
ttcaacatcattgttcggatatagtgatctgttgagtttcagttctttgatactctttttgagaagtctgaaggtcatttcctaagaaagaarctcagataaaacaaatatgtttcaagttttaagaccataattgtccatttctatgtttatccaataaaactatctataggactattgacttggtttcaacatcaccaaagccatctaaaccatttgaattaaaaaattattcaaaagcaattggttcaaaacaacaatgagataccacttttctaacagtatttatttcattttaaacaatggcttagttttgaaaatttggaaatttttttattgtaaaaaaataaattactggtaatcacatcctctataacgactataatcaaaatgagagtaataagaagtgttgacaaggccatggataaatttggcccgttatatactggaaatgtaaaatggtatgaccactgttgcaatcagttcctttaagtggaaggcataaaattagcagaagaataaacaatttcatttattgtaactgtgcaaaaacaaaacaaaacactgaattgtacatttagaatgggtgaattctatg

SEQ ID NO: 173618 - DNA, 598 bp, Homo sapiens
ttcaacatcattgttcggatatagtgatctgttgagtttcagttctttgatactctttttgagaagtctgaaggtcatttcctaagaaagaaactcagataaaacaaatatgtttcaagttttaagaccataattgtccatttctatgtttatccaataaaactatctataggactaytgacttggtttcaacatcaccaaagccatctaaaccatttgaattaaaaaattattcaaaagcaattggttcaaaacaacaatgagataccacttttctaacagtatttatttcattttaaacaatggcttagttttgaaaatttggaaatttttttattgtaaaaaaataaattactggtaatcacatcctctataacgactataatcaaaatgagagtaataagaagtgttgacaaggccatggataaatttggcccgttatatactggaaatgtaaaatggtatgaccactgttgcaatcagttcctttaagtggaaggcataaaattagcagaagaataaacaatttcatttattgtaactgtgcaaaaacaaaacaaaacactgaattgtacatttagaatgggtgaattctatg

SEQ ID NO: 173619 - DNA, 598 bp, Homo sapiens
ttcaacatcattgttcggatatagtgatctgttgagtttcagttctttgatactctttttgagaagtctgaaggtcatttcctaagaaagaaactcagataaaacaaatatgtttcaagttttaagaccataattgtccatttctatgtttatccaataaaactatctataggactattgacttggtttcaacatcaccaaagccatctaaaccatttgaattaaaaaattattcaaaagcaattggttcaaaacaacaatgagataccacttttctaacagtatttatttcattttaaacaatggcttagttttgaaaatttggaaatttttttattgtaaaaaaataaattactggtaatcacatcctctataacgactataatcaaaatgagagtaataagaagtgttgacaaggccatggataaatttggcccrttatatactggaaatgtaaaatggtatgaccactgttgcaatcagttcctttaagtggaaggcataaaattagcagaagaataaacaatttcatttattgtaactgtgcaaaaacaaaacaaaacactgaattgtacatttagaatgggtgaattctatg

SEQ ID NO: 173620 - DNA, 551 bp, Homo sapiens
ttggcattgtaattgtggcttcaaaaygccattccacttttctacaatccagctgcttcaggataatgaggaacatggtaagaccagtgaatttcatgagcatgagcccactgccgcacttttttagccataaagtgagtgccttggtcagatgcaatgctgtgtggaataccatgatggtggatgaaacattctgagtccacagatggtagtcatggcagaagcatcgtgtgcaggataggcaaacccatatccggagtaactgtctattccagtgaggacaaagctctgccctttccacgatggcagaggtcccatataattaccctgccaccagatagctggctgattaccccaaggaatggtgccataacgagggctcagtgttcgtctctgctgctgacaaattgggtgctcagcagtggctgtagccaggttagccttgatgagtggaagtccatgttgctgagctcatgtgtaacctccattcctgccaccatggccactttgttcatgggccatttgagtgatgacggggtggctgaggaaag

SEQ ID NO: 173621 - DNA, 551 bp, Homo sapiens
ttggcattgtaattgtggcttcaaaatgccattccacttttctacaatccagctgcttcaggataatgaggaacatggtaagaccagtgaatttcatgagcatgagcccactgccgcacttttttagccataaagtgagtgccttggtcagatgcaatgctgtgtggaataccatgatggtggatgaaacattctgagtccacagatggtagtcatggcagaagcatcgtgtgcaggataggcaaacccatatccggagtaactgtctattccagtgaggacaaagctctgccctttccacgatggcagaggtcccatataattaccctgccaccagatagctggctgattaccccaaggaatggtgccataacgagggctcagtgttcgtctctgctgctgacaaattgggtgctcagcagtggctgtagccaggttagccttgatgagtggaagtccatgttgctgagctcatgtgtaacctccattcctgccaccatggccactttgttcatgggccatttgagygatgacggggtggctgaggaaag

SEQ ID NO: 173622 - DNA, 557 bp, Homo sapiens
atcagatctcgtgagaattaactcattgtcacaagaacagcatggtggaaatcatcctcatgatccaatcacctccatcccttgacacaggggattatagggattaccattcgagatgcaatytgggttggacacagagtcaaaccatataattccacccctggcccttccacatctcacaccctttttacatataagcaattcacactaccctagcagaggttctccatgagggcttagcccctgcagcagactgtctggaggtccaggcattttcatacctcctctgaaatctaggcagaggttccccaacctcagttcttgacttctgtgaacctgtatgcccaatatcacatggaagacaccaaggcttgtggcttgcaccctctgaagcaacagttcaagctataccttggccccttctagccacaagggaagctggggtgcctaggatgcagaacaccaagtccccaggctgcacagaacagtgggaccctaggcccagcccacaaaaccatttttccctcttaggcctctgggcctgtgatgagggaggc

SEQ ID NO: 173623 - DNA, 717 bp, Homo sapiens
tgtaactaattttctgaagccttgcaggtttaaaatattttgtatttttagccaggaagctcttttagtaaaaaataataatagcaattatttcartgttttcaggatcagttagtattgaaatgaagatgaatggttcatttggttctttatattattcatacctacagaagagtttctcctttgtgattatctagaataatatattttaagttttctagactcaccattataatgaagcattggtactgttgtcatatgctgtgtgtcaacatgcaaatggcttggtttttgttcaatgccagtgaataaaataaaacaattagtacaaaaaactttctctggaaatctctttcatcctacttacaccatgaacccaattaaagtattcaattaggaggaaactaaattgcactgatgtgtttcctacaacactgttacaaaagtatggttctatgtagattcttagttaacttgccagacagaagcatacaacccaatgtgaacttgaattagcattagaactcactttttgcttttctttttgaggttttggtttgtgtttgtttttcacaaccttggtggtacatttatcttatgtaagagcaaatgtcactctccttcaaataacagaaagtattccataatatgcatctttctatatgcaacattatgaagaaaaaatatttttactaagatattgggttccttgtgtac

SEQ ID NO: 173624 - DNA, 717 bp, Homo sapiens
tgtaactaattttctgaagccttgcaggtttaaaatattttgtatttttagccaggaagctcttttagtaaaaaataataatagcaattatttcaatgttttcaggatcagttagtattgaaatgaagatgaatggttcatttggttctttatattattcatacctacagaagagtttctcctttgtgattatctagaataatatattttaagttttctagactcaccatyataatgaagcattggtactgttgtcatatgctgtgtgtcaacatgcaaatggcttggtttttgttcaatgccagtgaataaaataaaacaattagtacaaaaaactttctctggaaatctctttcatcctacttacaccatgaacccaattaaagtattcaattaggaggaaactaaattgcactgatgtgtttcctacaacactgttacaaaagtatggttctatgtagattcttagttaacttgccagacagaagcatacaacccaatgtgaacttgaattagcattagaactcactttttgcttttctttttgaggttttggtttgtgtttgtttttcacaaccttggtggtacatttatcttatgtaagagcaaatgtcactctccttcaaataacagaaagtattccataatatgcatctttctatatgcaacattatgaagaaaaaatatttttactaagatattgggttccttgtgtac

SEQ ID NO: 173625 - DNA, 575 bp, Homo sapiens
atgtgttgaacacattgttattcctgagtttgccaatgtttttctctattatgaggtcatctgtgtttgttaatgggtacccattgaagttaggctcctatcttccccatagaaactgagagatagaagtgttatcttcctccaaagggatgattccctggtctttgagaaagacattcctggttgtaaaactaacaagatgcagggagaatatttatatgcatttcaaagaagcttaaaaagaatttgcaattagaagttttctgaagtaaatgttctaagaaaacggaggtactagagttagagctagagttagaaaggagcctatttaaagttcagtcaagtgaggagaacattaagattgtcttgaccmgagtcaatcaactaaatttaaacttccataaccttgggagagttatttaaaagctttactatatatgtaacagcccatgtgtgagatttttatatttgtttcttgtttatgtaaacaaataaatagtgaagcaaataaatttctgtttatttttcacaacagttcattggttggtactatcatctccattttttaaagaaag

SEQ ID NO: 173626 - DNA, 503 bp, Homo sapiens
gggttattgtgagtattcaactataccaagttataagtgcataggtattcaatcagtgttcattcccttctgtatcaaagatttataatggacttttcatggaattgtctccacctataattatgtgactgtgccttcagattatcaaaattatatgaattgtccatgtgcccttggttctgaatattcaactctgtattgcaggaatgcctactcagttgcttgaatgggtctttggagttaacaaaatggctgtagaattgaaaaaaaaatacttaaatgcttaatcacttcaaaattttagctaaccctttgaaaaagaaatgaattttctgggatcttttataattcaagtaatacaccttttcttaagatcttttgttacttaagtgaacaygaacattttcctaagacatattaaacaaataaatacgcacataaaattgaaatatataattatattttatgacagtattgatataaagatgaaaatgtacgtatat

SEQ ID NO: 173627 - DNA, 512 bp, Homo sapiens
caagaattctgagcagttgggtcaagagtgcaggtaaggttctgagtttcagagaaaactcagtttccttttttgtgatttttgtattccttaagttttcacaaataatcacatatcacaaatataataaaaagaaaaacaaattatctctatgttcagctcatgttaaacctggattcaagtagagacgatgcatgcagggagccccatgcactgccyggcacctgttcacatagttctctttccttcttctactgagttaagagtgaatagtagataatcaatgcatgatgatttagatagtcttagaaatgggcacaaggaaatttaatgaaattcaacagctatggtttttctatatcttaaatgatgctaggcttagaatatctttaggcaaaaagcaataacaaattaatacattctctgatccctttcaagaagggattcatctatttctgtatggtagctattaaagtaatgcttatgatttagatcttatgaaagtacaattc

SEQ ID NO: 173628 - DNA, 510 bp, Homo sapiens
agaattctgagcagttgggtcaagagtgcaggtaaggttctgagtttcagagaaaactcagtttccttttttgtgatttttgtattccttaagttttcacaaataatcacatatcacaaatataataaaaagaaaaacaaattatctctatgttcagctcatgttaaacctggattcaagtagagacgatgcatgcagggagccccatgcactgcccggcacctgttcacatagttctctttccttcttctactgagttaagagtgaatagtagataatcaatgcatratgatttagatagtcttagaaatgggcacaaggaaatttaatgaaattcaacagctatggtttttctatatcttaaatgatgctaggcttagaatatctttaggcaaaaagcaataacaaattaatacattctctgatccctttcaagaagggattcatctatttctgtatggtagctattaaagtaatgcttatgatttagatcttatgaaagtacaattc

SEQ ID NO: 173629 - DNA, 510 bp, Homo sapiens
agaattctgagcagttgggtcaagagtgcaggtaaggttctgagtttcagagaaaactcagtttccttttttgtgatttttgtattccttaagttttcacaaataatcacatatcacaaatataataaaaagaaaaacaaattatctctatgttcagctcatgttaaacctggattcaagtagagacgatgcatgcagggagccccatgcactgcccggcacctgttcacatagttctctttccttcttctactgagttaagagtgaatagtagataatcaatgcatgatgatttagatagtcttagaaatgggcacaaggaaatttaatgaaattcaacagctwtggtttttctatatcttaaatgatgctaggcttagaatatctttaggcaaaaagcaataacaaattaatacattctctgatccctttcaagaagggattcatctatttctgtatggtagctattaaagtaatgcttatgatttagatcttatgaaagtacaattc

SEQ ID NO: 173630 - DNA, 507 bp, Homo sapiens
acattatttctttctttttgcctgctactgggagaagagaagtaggtaccttttaaatgatacaattaaacccttttgcaggtacaattttgccctttggggatgtaagcattaatggaataaaaatttcaaagatattagaaaaagattattagataaaaatgtacacatagtttttagaatgtatcagccatttatggcagcccccaacttttgaaatcccttccccattctggcggttcaccagtatcacgcatctagccttccctaagtagaattcctaaattattattctcaggctccaytgacttgaggtgtaaacatttgaccaacctcctcaacattaggtgtaaacatatgaccagcttcctttctctctttctagcagacaggaaagacaaacgtgaatattgtgtgactgaggagttctggcaagcatagcctcattgagttgttgggtttgctgcatcagccatagaaaaagtgctagctgttgattcctgactt

SEQ ID NO: 173631 - DNA, 546 bp, Homo sapiens
gcaaagctcactaggtggacttcatgaactttattcactggaaagctgtaagtacccttgacatcaaaggcaatcaataccccccaaaaagaccatctgaatacaggtcaagaagcaggagctatatctatgactccagaagcagagatattatatatccctaactaagagtcacaggggatttcttgaactaaaatgaaagacaacaggataagatgaaaagcagtgggccagggcccagcttagccactaatcatgtacatgmcctggagcagtcacaaggtctccgagcttcagtggtcttagctgtagcatgagaagattgggctaaataaacattttcaaagtgtgttccaaagaacaccaacccaaaaaggattaatcataaaaaaaagcaggttctttggtttagttagtttgggaaatgctccatatcaagcaatttttgagaaagctattttgggaaagctacagtgtctcttagggcaaaatcctttaaactgtttaaccttgtataaaccagcatttttctagcctgtttgaaca

SEQ ID NO: 173632 - DNA, 570 bp, Homo sapiens
cataggagtccttaggactgaagtgaaaaacaaaaaaaagtgtgatgcagagagccagacagattgacaaagcctacctgtcagaggcagcaggggttccaagtactttattagtctgggctacattwatcttgcccttggcatgtggcctctgggaggaagaaccttgtgcaatgaaggaacgaactataatagtaagatttaacagctatgctgtcagactactcttagaaaaaactggccaagtgatgatccctcctaggaaactaaagaaagattcagttcaggagcctaggaagggcaggtagtgatgggcagagacaacaggcttaggcttaaggtagtagaaccccacagagagtgctaacaacccatcccctactgagagaacccgtggagatacagttttacagctattaatatatatgtcatctctcagtattctctagcacagatatcgacattactggagaatagtggccttcctgatataaggagatgaaaattggagcactgacataaagatgttgtgcctctctacatattgacagataaatctcaaggtatatt

SEQ ID NO: 173633 - DNA, 570 bp, Homo sapiens
cataggagtccttaggactgaagtgaaaaacaaaaaaaagtgtgatgcagagagccagacagattgacaaagcctacctgtcagaggcagcaggggttccaagtactttattagtctgggctacattaatcttgcccttggcatgtggcctctgggaggaagaaccttgtgcaatgaaggaaygaactataatagtaagatttaacagctatgctgtcagactactcttagaaaaaactggccaagtgatgatccctcctaggaaactaaagaaagattcagttcaggagcctaggaagggcaggtagtgatgggcagagacaacaggcttaggcttaaggtagtagaaccccacagagagtgctaacaacccatcccctactgagagaacccgtggagatacagttttacagctattaatatatatgtcatctctcagtattctctagcacagatatcgacattactggagaatagtggccttcctgatataaggagatgaaaattggagcactgacataaagatgttgtgcctctctacatattgacagataaatctcaaggtatatt

SEQ ID NO: 173634 - DNA, 570 bp, Homo sapiens
cataggagtccttaggactgaagtgaaaaacaaaaaaaagtgtgatgcagagagccagacagattgacaaagcctacctgtcagaggcagcaggggttccaagtactttattagtctgggctacattaatcttgcccttggcatgtggcctctgggaggaagaaccttgtgcaatgaaggaacgaactataatagtaagatttaacagctatgctgtcagactactcttagaaaaaactggccaagtgatgatccctcctaggaaactaaagaaagattcagttcaggagcctaggaagggcaggtagtgatgggcagrgacaacaggcttaggcttaaggtagtagaaccccacagagagtgctaacaacccatcccctactgagagaacccgtggagatacagttttacagctattaatatatatgtcatctctcagtattctctagcacagatatcgacattactggagaatagtggccttcctgatataaggagatgaaaattggagcactgacataaagatgttgtgcctctctacatattgacagataaatctcaaggtatatt

SEQ ID NO: 173635 - DNA, 582 bp, Homo sapiens
aaagatgttgtgcctctctacatattgacagataaatctcaaggtatatttggtggtacatactctatacctagctcagtcacaataatataacctattttttgagattttataaggtttccagtacttttctaagtggtttacatgaattatctactgtaatactcaagactaaatgttcacacttctgtgtagttgggattattctcattttctaggtaagaaacttgagatacaaagaagtgaagtaatttgcctaagatcacaaaattgataaaggtggagatctggatgcaaacctggaaattctaaatccatgggtcatattttcattcataataccacactatttttataattaatccattatgatttaactgaaagaggaaayaaaacctgttttcctgcaaccaccactttttgtctctgcaggttgtacagagcaagtaaacatggtccattttttccaagttccttttctcgctgctgtcgactattatgtctgcttctccaatgtaccatgaatgtcacatcccattgcataattcaaatggcccaggtagccagttcattagtggaaaa

SEQ ID NO: 173636 - DNA, 557 bp, Homo sapiens
cagttggacaaaaccataggagtcccagggtataccatgctgtttgttgctttgggatgtttagttggatcttgtgtacaatccagaaaagttaggtgtgaccatttttagaaagtttgggaatctgccttctgacsttcaggaggcatattgggcagagatgagccttacaacgtctctagccttcctatgatagaatattggatgaagaggtcaaagaaccagcaggcaatggttggcgcatgatagtgagattgattggaacgtcagctcttttcatctctccctagtagcgtactgagggacaccatttatattcctgaagaaaggtttttctggcactgggttaccatggggaaggataattttcaaggttggggaaacatctttcaaacttacatctcagtaaaggcttgtgaaggtatttttatgttttttaaaagttagtattgtaaaagattatggcctttttgagaacatgttctagggaattgtgtccaaattgtgtccaggaaaatctgagataagaggctaaagaggctcacaaagaggaaaac

SEQ ID NO: 173637 - DNA, 344 bp, Homo sapiens
aagaaccagcaggcaatggttggcgcatgatagtgagattgattgsaacgtcagctcttttcatctctccctagtagcgtactgagggacaccatttatattcctgaagaaaggtttttctggcactgggttaccatggggaaggataattttcaaggttggggaaacatctttcaaacttacatctcagtaaaggcttgtgaaggtatttttatgttttttaaaagttagtattgtaaaagattatggcctttttgagaacatgttctagggaattgtgtccaaattgtgtccaggaaaatctgagataagaggctaaagaggctcacaaagaggaaaactgg

SEQ ID NO: 173638 - DNA, 557 bp, Homo sapiens
cagttggacaaaaccataggagtcccagggtataccatgctgtttgttgctttgggatgtttagttggatcttgtgtacaatccagaaaagttaggtgtgaccatttttagaaagtttgggaatctgccttctgaccttcaggaggcatattgggcagagatgagccttacaacgtctctagccttcctatgatagaatattggatgaagaggtcaaagaaccagcaggcaatggttggcgcatgatagtgagattgattggaacgtcagctcttttcatctctccctagtagcgtactgagggacaccatttatattcctgaagaaaggtttttctggcactgggttaccatggggaaggataattttcaaggttggggaaacatcwttcaaacttacatctcagtaaaggcttgtgaaggtatttttatgttttttaaaagttagtattgtaaaagattatggcctttttgagaacatgttctagggaattgtgtccaaattgtgtccaggaaaatctgagataagaggctaaagaggctcacaaagaggaaaac

SEQ ID NO: 173639 - DNA, 579 bp, Homo sapiens
tgtatggagagttcaaaactggataccagtcagagatatttttctatactctaccaaacctgtggaaattgcaaacatgtgtctaattgactgacattttaaaattttcagaccttgttttttatacagtgtaaattagtactttctatatgttcacttatcccactattattattatttactaggagttattattttttwaaatatacaacttttgtaatttttatcgccctttggtggtgttttgacatttctgttactttcacagatgcagaggggtgctgaggagaattaagatctgtccctccaccctgagcagaaacctcaagagtgaaacagaaaagtggatttaggtcactaaaatatatttccacagtatcccttctgctcctctccctctttttacctgttctagctctttcttctagttcaggctagtagtgggaacaaaactccatctcttcctggtgcctagatgtaattggagggtgagttaatggagtctggggaaaagaaaaaatggtgagcctagaggagtggataaaaattggcttgactttttaaattgaggggataaaa

SEQ ID NO: 173640 - DNA, 506 bp, Homo sapiens
tatatataacattttccctatccagtctatcattgatgggcatttaggttgattccatgtctttgctattgtgaatagkgctgcaataaacatgtgttcatgtgtctttataatacaatagtttatattcctttgagtatatgcccagtaatgggactgctgggttgaatagtatttctgtcttcaggtctttgaggaatcactacactgtctttcacaatagctgaactaatttacatttccaccaacagtgtttaaataagtgtacccttttctccacaatcttgccaccatctgttatttttttactttttaataaaagccattctgattggtgttagatggtatttcattgtggttttgatttgcatttctctaatgatcagtgattctgagctttcattcatatgattgctggctgcatgtatgtctttttttttaaactgttcatgtctttgcccactttttttatggggttgtttgcttttttcttgtaaatttgtgta

SEQ ID NO: 173641 - DNA, 528 bp, Homo sapiens
catcaaaataactatttactgcataatgtaatttcactaatgccatatccagctgcattataagacaagcacaaatcaacaaaattccatctaatttgtgcaaattaaaataattcttgagaaaatattgaaatacttaaagctacaaaaacaccattaagtttgttttagaaacttactgtttcagcagaaaaaaaatgtctagagatcaattcactcatctgttttcctctaggtagagttctagaaaacacartgtccaccatcaaaatttaagaaacatgcctggaaacttaaggacaagacacaggaaaggaagtctgctatcttacccagtagcccactagaatagcaaagcctctgatttttaactacacagcctctcattaaggccatgactgctgattatttttaaaagcttcccatttctaacactacatcaaacttgaaacaagaaataggtagagagttctaaaactctgactgctgattatttttcaaagcttcccatttctaacatttcatcaa

SEQ ID NO: 173642 - DNA, 528 bp, Homo sapiens
catcaaaataactatttactgcataatgtaatttcactaatgccatatccagctgcattataagacaagcacaaatcaacaaaattccatctaatttgtgcaaattaaaataattcttgagaaaatattgaaatacttaaagctacaaaaacaccattaagtttgttttagaaacttactgtttcagcagaaaaaaaatgtctagagatcaattcactcatctgttttcctctaggtagagttctagaaaacacaatgtccaccatcaaaatttaagaaacatgcctggaaacttaaggacaagacacaggaaaggaagtctgctatcttacccagtagcccactagaatagcaaagcctctgatttttaactacacagcctctcattaaggccatgactgctgattatttttaaaagcttcccatttctaacactacatcaaacttgaaacaagaaataggtagagagttctaaaactctractgctgattatttttcaaagcttcccatttctaacatttcatcaa

SEQ ID NO: 173643 - DNA, 628 bp, Homo sapiens
gtagagagttcgaaaacttcacgttagaataaaataagggagagactgagtcacatgtgctgttgagaaataaaactaccaactgatttctgaaagagagatagatttcacatagtaaagtgagaaattaaygaatctaaagagaaaaagcaaataaagtacagatgagttctatgcacttggctggtaccagcccaacagctggtgttctaacccacagtttgatattctataaaactgtctccacatgaataaatatactcagtgacagtctttcatatagagcaggttttggagaggaatgagcaattaagagtaccagttagtcattgtcaaaaaatagctgatagccttttacatatacacatattaaatgcacaaagtggcaaataattttactttttgttgttttgattttaatttgtggaacatgttacattaatgatagatacaaaatgtaaaaaagggaactattcatggcttccaatctgtttctagaactttagaaaggaaacaagtcagggtagactattatattattgagaccgctcagaaaaccaagcaccaaataattaaaccaaaccctgttgataactgctgcataagtacagattttatagattaagat

SEQ ID NO: 173644 - DNA, 598 bp, Homo sapiens
gctattcttctttggccatatttaagtgtcttgatactaggagtatttgccttcaaaaccatgtttcaacaatagagtgctaagtaggcataaatgaaagtaaaacgagagctctgcgaaaccatggcttttttacaagaaacaaattttatgaatcattgccattttgaatttttaccccagtattttgtcctaagggctcttgttcactaatgacttggaaaaaaaaaaactgcaaagagaaagttatcagatctatcaattatgcttaccactaacgctattgtcatttttctcctcacaaacgttaaataaaggccaagtcagattataatgcagctaacattttttctttcaggataagcaaaatagatgccaactagagcagaaagtattgctttttcccattctttaatggtttgatgactgcctgggagggcctaactagctttctggaatcagacaactttctcactgcccaggacacgtcaggcttgatgccatccctgccatttgaggataatgaascatcatccactgtcagaaataagaacttacttaatgaataagaaagctggcaatcataaacaagaaaagt

SEQ ID NO: 173645 - DNA, 401 bp, Homo sapiens
actaacgctattgtcatttttctcctcacaaacgttaaataaaggccaagtcagattataatgcagctaacattttttctttcaggataagcaaaatagatgccaactagagcagaaagtattgctttttcccattctttaatggtttgatgactgcctgggagggcctaactagctttctggaatcagacaactttctcactgcccaggacacgtcaggcttgatgccatccctgccatttgaggataatgaaccatcatccactgtcagaaataagaacttacttaatgaataagaaagctggcaatcataaacaagaaaagtgcytcagcagcatttcacatcattaaaacatctccaacttgattcctttttgtccttttgttacattcttgctatt

SEQ ID NO: 173646 - DNA, 513 bp, Homo sapiens
attactggtgtcactctagagattgagagccagagactcatattctaccacttactaaagcaaaatctccatggggatggtgaagagggagaaaacgcttgtcttattatttgtacttccatcctccctctcaaggaatctagcacttcttggtgcccattaaattgtaggtgtataaagtaagacattaataattgatttcaaaaaaataaattttcttccgggtattaaacataagcttaactagaacagtaaatatcagacaaggtaggaaggctaatttttaatcttctgtttccttttttgagaagggatcaaagaaaagatccaaaacaattagaagtactgtactagaagttttatgattatctttactctgagattctataaggtatgtttttcaaggtaattgctacccataattctgagaaataaattcacaccttgctcacagattktggagtccaattgccaaataagcccaatgtttgcccccacttgggcttgatcaac

SEQ ID NO: 173647 - DNA, 508 bp, Homo sapiens
attaatagctagagagacaatgtatcaaaggaatttaaagttcattctggactcaaaagataaaaccctccaaaatatgtattttgaggtaaagcttgacaaatttattagtttggggggaaaatttaacatagatggtygagacaacatcaaaattaaatgagatatcacgcaaaattaaaaaaaaaattaaccctggagttgagtttcacaaagatacctggcaggggtttccttttactgctgaatgccaaaataatagagccatgaggaaaggggtgaagaaagttcacatttcagttggaagcaggaaattaaaaagagcacaaagagttttgtgtttcctgttagggaagagggcaggtggattcaggacaaggtgaaactggagaatcattctccatagattgctgcaatagggtaatgctctctgatttacctatcaagaataatgtgttgaattatttttggaagctggtggcaaaataactgttgttataaatgatgg

SEQ ID NO: 173648 - DNA, 508 bp, Homo sapiens
attaatagctagagagacaatgtatcaaaggaatttaaagttcattctggactcaaaagataaaaccctccaaaatatgtattttgaggtaaagcttgacaaatttattagtttggggggaaaatttaacatagatggttgagacaacatcaaaattaaatgagatatcacgcaaaattaaaaaaaaaattaaccctggagtygagtttcacaaagatacctggcaggggtttccttttactgctgaatgccaaaataatagagccatgaggaaaggggtgaagaaagttcacatttcagttggaagcaggaaattaaaaagagcacaaagagttttgtgtttcctgttagggaagagggcaggtggattcaggacaaggtgaaactggagaatcattctccatagattgctgcaatagggtaatgctctctgatttacctatcaagaataatgtgttgaattatttttggaagctggtggcaaaataactgttgttataaatgatgg

SEQ ID NO: 173649 - DNA, 515 bp, Homo sapiens
attaatagctagagagacaatgtatcaaaggaatttaaagttcattctggactcaaaagataaaaccctccaaaatatgtattttgaggtaaagcttgacaaatttattagtttggggggaaaatttaacatagatggttgagacaacatcaaaattaaatgagatatcacgcaaaattaaaaaaaaaattaaccctggagttgagtttcacaaagatacctggcaggggtttccttttactgctgaatgccaaaataatagagccatgargaaaggggtgaagaaagttcacatttcagttggaagcaggaaattaaaaagagcacaaagagttttgtgtttcctgttagggaagagggcaggtggattcaggacaaggtgaaactggagaatcattctccatagattgctgcaatagggtaatgctctctgatttacctatcaagaataatgtgttgaattatttttggaagctggtggcaaaataactgttgttataaatgatggactatgc

SEQ ID NO: 173650 - DNA, 550 bp, Homo sapiens
tatgtgactactgacattatatgattctagtaacaggatccttgaaagctaaaggagcacattgaagaagcatttaaattttaactgctctgcatggcattatttaaaataactcactagggtattagggtgattagacargtaaatagtggtgtaatcaggtttggctatatacataagtggaatgaattttcacttagaacatatgttgtaaggggtaattgaggcatctataaatatcttctaaaagagacttcctatatgccctggtgatagagtcatttatttgatttatcacatagagccattgaaaaaaggtcctataaagaaatggctatctgggaagtatgacagaccaaacttcactacctaccattaaaacttttccaatattagtttaccatatcaattactagccacctgtcaaggctcttaaaaagtgtggtatcaaaaagctcctgatgggtttctgataaagcaaagatgtcagaatcatagagtgggaggaagaatatttgccaaacagatatttaacaaaggattgatatac

SEQ ID NO: 173651 - DNA, 550 bp, Homo sapiens
tatgtgactactgacattatatgattctagtaacaggatccttgaaagctaaaggagcacattgaagaagcatttaaattttaactgctctgcatggcattatttaaaataactcactagggtattagggtgattagacaggtaaatagtggtgtaatcaggtttggctatatacataagtggaatgaattttcacttagaacatatgttgtaaggggtaattgaggcatctataaatatcttctaaaagagacttcctatatgccctggtgatagagtcatttatttgatttatcacatagagccattgaaaaaaggtcctataaagaaatggctatctggraagtatgacagaccaaacttcactacctaccattaaaacttttccaatattagtttaccatatcaattactagccacctgtcaaggctcttaaaaagtgtggtatcaaaaagctcctgatgggtttctgataaagcaaagatgtcagaatcatagagtgggaggaagaatatttgccaaacagatatttaacaaaggattgatatac

SEQ ID NO: 173652 - DNA, 550 bp, Homo sapiens
tatgtgactactgacattatatgattctagtaacaggatccttgaaagctaaaggagcacattgaagaagcatttaaattttaactgctctgcatggcattatttaaaataactcactagggtattagggtgattagacaggtaaatagtggtgtaatcaggtttggctatatacataagtggaatgaattttcacttagaacatatgttgtaaggggtaattgaggcatctataaatatcttctaaaagagacttcctatatgccctggtgatagagtcatttatttgatttatcacatagagccattgaaaaaaggtcctataaagaaatggctatctgggaagtwtgacagaccaaacttcactacctaccattaaaacttttccaatattagtttaccatatcaattactagccacctgtcaaggctcttaaaaagtgtggtatcaaaaagctcctgatgggtttctgataaagcaaagatgtcagaatcatagagtgggaggaagaatatttgccaaacagatatttaacaaaggattgatatac

SEQ ID NO: 173653 - DNA, 541 bp, Homo sapiens
aactactctatatagtagtataatgatggacatgtttcactgtatatttgtccaagcttatagaacatacaacaccaagaataaaccttaatgtaagctagggactttgggtkataatgatgtgtgaacattggttcatcaattgtcacaagtgttccactctggtggagtatgttgataattcgggagtctgtgtatgtatggggcagaggatgtacaggaaatccctgtacaatcccctcaattttgctgtgaatctaaaactgctctaaaaaataaagcctattttttaaaagttaagaaataccctagggaaaaggagcagaattgggaagatggtagtcaaaggatacaaaatttcacttagacaggagcggtaagttcaagagatctatcacacaacacgctatgactatagttaataacaatgcattgcatacttgaaaattgctaagactagatttaagtgttctcactataaaaaaagttttttaaaaaagaaaaataaaaagaaacacattgatatttaatagcttgtgtt

SEQ ID NO: 173654 - DNA, 541 bp, Homo sapiens
aactactctatatagtagtataatgatggacatgtttcactgtatatttgtccaagcttatagaacatacaacaccaagaataaaccttaatgtaagctagggactttgggttataatgatgtgtgaacattggttcatcaattgtcacaagtgttccactctggtggagtatgttgataattcgggagtctgtgtatgtatggggcagaggatgtacaggaaatccctgtacaatcccctcaattttgctgtgaatctaaaactgctctaaaaaataaagcctattttttaaaagttaagaaataccctagggaaaagragcagaattgggaagatggtagtcaaaggatacaaaatttcacttagacaggagcggtaagttcaagagatctatcacacaacacgctatgactatagttaataacaatgcattgcatacttgaaaattgctaagactagatttaagtgttctcactataaaaaaagttttttaaaaaagaaaaataaaaagaaacacattgatatttaatagcttgtgtt

SEQ ID NO: 173655 - DNA, 541 bp, Homo sapiens
aactactctatatagtagtataatgatggacatgtttcactgtatatttgtccaagcttatagaacatacaacaccaagaataaaccttaatgtaagctagggactttgggttataatgatgtgtgaacattggttcatcaattgtcacaagtgttccactctggtggagtatgttgataattcgggagtctgtgtatgtatggggcagaggatgtacaggaaatccctgtacaatcccctcaattttgctgtgaatctaaaactgctctaaaaaataaagcctattttttaaaagttaagaaataccctagggaaaaggagcagaattgggaagatggtagtcaaaggatacaaaatttcacttagacaggagcggtaagttcaagagatctatcacacaacaygctatgactatagttaataacaatgcattgcatacttgaaaattgctaagactagatttaagtgttctcactataaaaaaagttttttaaaaaagaaaaataaaaagaaacacattgatatttaatagcttgtgtt

SEQ ID NO: 173656 - DNA, 572 bp, Homo sapiens
ggtgaagtttgggattctaatgtaagcaccacccgaatagtgtacattttatcctttaagtaatttctcattcctcacccacctcccacttcccacatttctaggcctccattttatattattccattctttgtgttcatgtttacacattatttattattataagtgagaacatgcagtgtctgactgtctctgagttattttacttaggataatggcctctagttccatctatgttgattcaaaagacataatttaattctttttttccatggctgggtatattgtataatatatgcaatacatatagtatatattgtataatatatactacatgtatattgtatgatatatatactacatacatatgtagtgtgtatatatatatacacacatcacatttctaaaaacatacatgtatacatacatcacatttctaaacgtcatccattgatagacacctrggttgattccatatatttactattgtgaatagtgctatgataaacaattgcaggtatccttttgataaatgatttattttgggtagatatgcagcagtgagaatgctg

SEQ ID NO: 173657 - DNA, 646 bp, Homo sapiens
aaagccaaacactgaatatggccaaggaagaaggctttaatcaggtgctgcagcacagcccaggagatgggagctagcatcaactctatttccctgactgactaaaactagggctttagtggcagggaagaaatttaacaatgtgtaagaaaacragaactagggaggggcaaaaggcatctggtgctgtgatctattttcagtttttgatactttttttgagaggcctgaggtcctttctaggtgaaagaactcagataaagcaaatacagttttcaagctttaacagcaaaagggtcaatttctatgtttatccaaaagcaactgtctatgggactcttgggcccgtttcaaaagttgatgtttgtctatgaaatttgaacattttgacaccgtcaattgatcctcttctgtagatcacagaatttttaaattgataataaattcttcatattagcactgaaatttttggttatcttagcaaattctgttatttgaaggattgtctcaatcctcatatttttattatattgaattatataaatatgttgaggtgtgttctttctctccccagttagcacttcatattagcactgaaatttttggttgtcttagcaaattctgttatttgaaggattgtctcaat

SEQ ID NO: 173658 - DNA, 516 bp, Homo sapiens
gggattctgagatttaaacacctttttgatttataccccttgactactcataaatagatacttcaccagtccaccctcatgaggtaggtcttatttaaacacattgatttgaacttcagctaaacattttttgcaattataatgtcgttgaatatccatgctaatgtctcttgaatatccatgctaatggaggagagcttgggcagataagagaaaactatagttcattcaaaccacaaatcaaattttgttttaatcaggatgctgaaaacttatttaccagtctagggaagataccttagtacagtctatttatcttgcaccagggagtgaatttctgttatagtcatcttcatatgactatcaactgaatatactgactaaatacctttaacttgaaagtactttttataggtaagacatgcacatagttgattttatttattgttcaaggagagaactattaaataaatcrtcctatgtatgaagcatgtcttagtctgtcagtttgacagt

SEQ ID NO: 173659 - DNA, 558 bp, Homo sapiens
aattccattaattaaaaaaaaatacagcctgggcaacatgatgaaagcccatctctatcaaaaatacaaaaattagccgggcaggtgtcatttgcctataggcccagctaattgggaagctgaagtgagaggatcacttgagcccaggagactgaggctgcagtgagctgtaatcrcaccactgcactccagcctgggcgatggagtgagaccctctctccagaaaacaataaaaatagcaacagaaatcacacacaaaaaactaaaacaccatttaattttggcatggatttgttaatttattttttactgctttaccaaatgcacattatattttttgaaaggtttgtttttgattatggattctgattattaactggttttatacaggtgagcttgtcacatagctgtttttctatggcaattgagtagcgtttataagattagtaaacattaaggtgtattaaaaaatttaggacatctatttttgaaattttattgtttctttaaattaattttaaagcttatgaataatttataaattataaagtgaaaagt

SEQ ID NO: 173660 - DNA, 428 bp, Homo sapiens
aggtatttgggaacaggatgtcatgccagccgttgtctgtgattagctgtctttccaaagaaacaattgttccccccacacctgggatcccttgctcttgttgcttagcgaacttatcaggactccacaccaaatttctaatgagttacagaaacttatatatcattctgaggttacaaaaagaaagggggcttggattctggtaaaataggttataggaggaggcagaaaaggaattctattgagaggcaataaattattgttagggagaataattggactcaggaacagagattaacttgtaaatagttttcaatgggatataaatgatctttggagatagtaraagtttctgctaaggtgtgaatcttgtcttttttttctgcaatagataatgtgataacagagagggaaggaaaaaacaattg

SEQ ID NO: 173661 - DNA, 562 bp, Homo sapiens
atacagaaatataaaaggtaatatagggaaaaatctatgctcccagcactgtttaaggcatcttacaaataatctgccatgtttgttttggttacttttttgtaatataataaaattatattgaatcagttgaaacctcctttgtacctcttcccactccctagaaaatcctgccctgaagttttttattcccaggcatgtttttataattatgtcacatctgtttgtatctataaacaatatatataattctttgtgtgtctgtaaaayttatatatgtatgcatcattctgctgcttttatttttctttcagtaagtttttgggatttatctctaaattcattttcaatccctatatcccattgcatgaatatatcaatctcttgttgatagacataagttatttccaaataacagtacagtgaaaatttttgtacttgtctctttgtgcatatgagcaagactttctgtatggtgtatactgaaaaggagagttcctagattttacacactttattagatgttgtgcctttatcctcttcagtatgatattatgaaccc

SEQ ID NO: 173662 - DNA, 562 bp, Homo sapiens
atacagaaatataaaaggtaatatagggaaaaatctatgctcccagcactgtttaaggcatcttacaaataatctgccatgtttgttttggttacttttttgtaatataataaaattatattgaatcagttgaaacctcctttgtacctcttcccactccctagaaaatcctgccctgaagttttttattcccaggcatgtttttataattatgtcacatctgtttgtatctataaacaatatatataattctttgtgtgtctgtaaaatttatatatgtatgcatcattctgctgcttttatttttctttcagtaagtttttgggatttatctcyaaattcattttcaatccctatatcccattgcatgaatatatcaatctcttgttgatagacataagttatttccaaataacagtacagtgaaaatttttgtacttgtctctttgtgcatatgagcaagactttctgtatggtgtatactgaaaaggagagttcctagattttacacactttattagatgttgtgcctttatcctcttcagtatgatattatgaaccc

SEQ ID NO: 173663 - DNA, 562 bp, Homo sapiens
atacagaaatataaaaggtaatatagggaaaaatctatgctcccagcactgtttaaggcatcttacaaataatctgccatgtttgttttggttacttttttgtaatataataaaattatattgaatcagttgaaacctcctttgtacctcttcccactccctagaaaatcctgccctgaagttttttattcccaggcatgtttttataattatgtcacatctgtttgtatctataaacaatatatataattctttgtgtgtctgtaaaatttatatatgtatgcatcattctgctgcttttatttttctttcagtaagtttttgggatttatctctaaattcattttyaatccctatatcccattgcatgaatatatcaatctcttgttgatagacataagttatttccaaataacagtacagtgaaaatttttgtacttgtctctttgtgcatatgagcaagactttctgtatggtgtatactgaaaaggagagttcctagattttacacactttattagatgttgtgcctttatcctcttcagtatgatattatgaaccc

SEQ ID NO: 173664 - DNA, 562 bp, Homo sapiens
atacagaaatataaaaggtaatatagggaaaaatctatgctcccagcactgtttaaggcatcttacaaataatctgccatgtttgttttggttacttttttgtaatataataaaattatattgaatcagttgaaacctcctttgtacctcttcccactccctagaaaatcctgccctgaagttttttattcccaggcatgtttttataattatgtcacatctgtttgtatctataaacaatatatataattctttgtgtgtctgtaaaatttatatatgtatgcatcattctgctgcttttatttttctttcagtaagtttttgggatttatctctaaattcattttcaatccctatatcccattgcatgaatatatcaatctcttgttgatagacataagttatttccaaataacagtacagtgaaaatttttgtacttgtctctttgtgcatatgagcaagactttctgtatggtgtatactgaaaaggagagttsctagattttacacactttattagatgttgtgcctttatcctcttcagtatgatattatgaaccc

SEQ ID NO: 173665 - DNA, 565 bp, Homo sapiens
gggaaaaagccatgtatgttgaaatacatttgtatgtgtgggtttattctttttcattattgaaaatagcccacgccagtgtaagctgattgagaatacattcgtttggcttctctaacgaccatttcatcagaaaagcattgctttagatagcagagtagsttatttcctctaaccctggtgccagtgggctccctcaaggacaccagcttgtgtgtactgccagctgcaagtacccacccgtgcccagcccagggcggggaccttggcagcttctgcagttcttgtcagccctgagtgtcaagcgatcgctatttcctgcacccggccctgtggttgggctctggaaggtgccctgtttttcctgacagacatttcagaccgtttgctctcttttttttggcatttctatgtacgttttttaatcattctgaccctgtctcaggtctttcccatccactggagttaaaggatgaacggcccttctgattggattttcctggattcttaggagcaaaagaaaaaaaaaaaaacaggaaccaaagcaaaagcaaaatttatttct

SEQ ID NO: 173666 - DNA, 610 bp, Homo sapiens
gtctctctccaactcttctgtctggcatgaggtttcctggtagccccagattttcatccaagcaactttgtaactccagaacaaacaaaaacaaagatacttcttctctgatccctatgactaatgggtatggggtgtattagtaagggttctctaaagggacagagttaataggatattatatatatatgtatatatattatatatatgtatatatacgtgtgtgtatatatgtatgtgtgtgtgtatatatatatctatatataaaggggagtttattaagtattaactcacatgataacaaggtcccacaataggccgtctgcaggctgaggagcaaggagagccagtccgagtccccaaactgaagaacttggagtctgatattccaggtcaggaagcatccagcacgagagaaagatgtaggctgggaggctaggccagtcttgtcttttcacatttttctgcctgctttatattctggccacascggcagctgatcagatggtgcccacccacatcacgggtgggtctgcctttcccagcccactgacttaaatgttaatctcctttggcaataccctcagaggcacacccaggatcaatactt

SEQ ID NO: 173667 - DNA, 550 bp, Homo sapiens
ttttcagttttttaaaataaatcaaatttatttgtatgtttcctgcttttgaaaatgcttggttggggctgggcacggtggctcacacctgtaatcccagcactttgagaggccgaggcgggcrgatcacgaggtcaagagatcgagaccatcctggccaacatggtgaaagcctgtctctactaaaaatacaaaaattagccgggcatgatggcgggcgcctgtagtcccagctactcgggaggctgaggcaggagaatcacctgaacctgggagatggaggttgcagtgagccgagattctgccactgcactatagcctggagagagagcgagactccgtctcaaaaaaaaaaaaaaagaaaaaaagaaaaaaagaaaatgcttggttgatctccttaaagacacaaatcttgtatttcaaaagaaatatggcaaagaaacttacaaaaccaaacttatccataccaactatttctgtccatctttctacctatttacctgtacatctgtcatctatctgtcatctatttttctcacacacagtagaa

SEQ ID NO: 173668 - DNA, 550 bp, Homo sapiens
ttttcagttttttaaaataaatcaaatttatttgtatgtttcctgcttttgaaaatgcttggttggggctgggcacggtggctcacacctgtaatcccagcactttgagaggccgaggcgggcggatcacgaggtcaagagatcgagaccatcctggccaacatggtgaaagcctgtctctactaaaaatacaaaaattagccgggcatgatggcgggcgcctgtagtcccagctactcgggaggctgaggcaggagaatcacctgaacctgggagatggaggttgcagtgagccgagattctgccactgcactatagcctggagagagagcgagactccgtctcaaaaaaaaaraaaaagaaaaaaagaaaaaaagaaaatgcttggttgatctccttaaagacacaaatcttgtatttcaaaagaaatatggcaaagaaacttacaaaaccaaacttatccataccaactatttctgtccatctttctacctatttacctgtacatctgtcatctatctgtcatctatttttctcacacacagtagaa

SEQ ID NO: 173669 - DNA, 590 bp, Homo sapiens
gcttaaaggatgtgtgcgtttgtctgtctgtgtgtgtgtgtctcaggacaatgaagaggcaacatcaaaagtaaagaaatcgtattgtggggctgggtgccactcacgagcagtgactcatgcttgtaatctcagcactttgggaggccragatgggtggatcacaaggtcaggagttcgagaacagcctggccaacatgacaaaaccccatctctactaaaagtacaaaaattagccaggtgtggtggtgcacacctgtagtcccagctacgcgggaggctgaggcaggagaatcacttgaatctgggaggcagaggttgtagtgagccaagatcacgccattgcactgcagcctgggcaacagagcaagaccctgtctccaaaagaaaaaaagaaagaaagaaaccatattgtgaagggggaaagaagctagagaacacggaaattagaagctcagttttcagtgcaaggtttcactgcagcagcactattgacactgaggaccaggccattctttgtagtagggagctaagctgtgctgtaggatctttagcagcatccctggtctccacttactgacgtcaatgat

SEQ ID NO: 173670 - DNA, 590 bp, Homo sapiens
gcttaaaggatgtgtgcgtttgtctgtctgtgtgtgtgtgtctcaggacaatgaagaggcaacatcaaaagtaaagaaatcgtattgtggggctgggtgccactcacgagcagtgactcatgcttgtaatctcagcactttgggaggccaagatgggtggatcacaaggtcaggagttcgagaacagcctggccaacatgacaaaaccccatctctactaaaagtacaaaaattagccaggtgtggtggtgcacacctgtagtcccagctacgcgggaggctgaggcaggagaatcacttgaatctgggaggcagaggttgtagtgagccaagatcacgccattgcactgcagcctgggcaacagagcaagaccctgtctccaaaagaaaaaaagaaagaaagaaaccatattgtgaagggggaaagaagctagagaacacggaaattagaagctcrgttttcagtgcaaggtttcactgcagcagcactattgacactgaggaccaggccattctttgtagtagggagctaagctgtgctgtaggatctttagcagcatccctggtctccacttactgacgtcaatgat

SEQ ID NO: 173671 - DNA, 590 bp, Homo sapiens
tgcccagatgttacttccccacttttctccgctgcctcccctccccactccctctcaaagcatctgtccctgctttcctgtggaggactagagcaggctgttttaaagcagaggagaggcaagcacttggaattcacatgcccctgacacttcaggttgcctaggggagaagactctctccccttcctggcaggtcacagcaaggccctgactcttttgggcctccagctcttctagataactcagaaagagtcatgctgtgggaaaggagcaagagggcaggtttctacaggcttaccaggaggccctctctggttctagccatgtctggaaattcagaaatgaggaagagcattcctggcagagaagcacattgtagaagcaaacagtgcttcccctgggaattctccaagactgttcccctcccacagatgaaagggaacatattggactcccataagcactgcataatakcttgcagaaagtgatgtgtttggagaaagtgaaatacacttaaattacacttcagccttcagcattataaagtgagatatgactaccttgcagggtcattacaagcaataaacaga

SEQ ID NO: 173672 - DNA, 652 bp, Homo sapiens
tataaagagcctgagggaaaagcattagaacccaaaagaagaccagtatggctctctgtaatgaggcaaaacataaaacaggaacacagacaaaagttatgcagagtgacagagcaatccttacagtcagatctcataatgtgacttgtttactaatttaaccatcattttctctgaacaagttgagacttcaccgcagatagaatgaatatagagatgttgggatacaaattgagacagtggcctaggattgcctgtcgaagcagttcttgttcggaaggacataagagtgaatgaaatggaagggctgggtttcacctggggacacccattctcagatttctcagcggattaaaaccctaaagctttctgcagtagaaactggaccacaaacaagcttccacactcttctaagctgtggggagggccatgaacgaagtaccaaataggaatccccttggcaatggatacaaccaatttcatttgctgtataaacaattcatgtggattgaggacagctcgggtggaaaaaattcaacaattattgcatttgggcttcttcccttaagatttatttgttccaagtawttttttttctttctttaaatccaattttaccatggtgccttgaatgacttctgtagaaatacta

SEQ ID NO: 173673 - DNA, 529 bp, Homo sapiens
gatctatttgggggctcatactatcagtgcccacggccatttcagtgcagcccaaagatggagaagagatggcttcactgataaayagactcacctgtccatccacctatccattcatccacctaccatccatccattgacccatcaatccacccacacatccatccatccacccacacatccatccatccacccactcaccacccctccacccactccacccacacatccatccatccactcatccatccatctgcccatccatccatccatccatccatccatccaccattcacccataacccatccaccattcatccacccaccatctgcccaaacatccatccaaccatccatccatccatccacccatccaccacccaatcatccatccatgcatctactatccacccaccacccatccatctacccatccattcacccaaacatccatccattcacccaaacatccatccacccacccatccatcttcccactcagccatccactcacctattcagtaaatat

SEQ ID NO: 173674 - DNA, 682 bp, Homo sapiens
cgaatggcaggcatctcatgagtcaatgacagttataagtgtcccacactagaaccaattgtccagggcagacacatcccaagagccagggcgaccatggaaaagcccctgcctaggatgaggtcccatggtcctgctgctttcttctgcccaagggcaggtggtctggatccaacaggcttggggacaagagccaccatgtccttagccacccctttctggctgttgctgcacagccctgcttacaagagacccaaggcagccacacctcaccccatggccatgggcctcatgaaggtggtgcccagggagatcgggtgggagatctgggactccttggattgcacctgtgctgtagaagagccttgaaggaaatgtttaaatggaggtgtatccattagctattgctgtgtaacaaagtacccacaaacctagcagcttcaagcaacacatttattatctcacagttcccatggattgggaatctgagcatggcttagctggggcccctgcattagggtttcttacaaggttacagttttggtgtcarccaggactatggtctcatcagaggctcgactggggaaggatccatttctaagccttctcgggttgctagcaggattcatttccttgtggctgcaggattgaggtgcctggcttcttgccattggctgaattc

SEQ ID NO: 173675 - DNA, 597 bp, Homo sapiens
agtgcaaaccagcagacaaacgaaaaattactaatttaggaaatgagccataacctgcaatctggcatttctattatttttaatcaatgaataacttacgtaacaactacccaggacacaccagtgtttagcaacactatagytgataatttttggattagacattgtttctcaagtggatgactataacctcctcagtccatttttgtactttcatcattaacttttttaaaaagcaaaggtgattgtgttattggactggttaaaatctacctttctttgtctacaaattggagttcagactcgttatcttggcatataaagctctttataatcttgccctgaccttcagctctatgttctgctacttgatctgatacaaaaatacgctgcagcccaccaattgaatttgtatcttcagttccccaggtgtaatgaacatgtcttacacattttacatctccagaatacatcacagtatctactgtcacatacctgataataaaaatgtactgaatatctaaaattgttaagtgcttcttactagaaatcactcataatggctgtttttctaaattaatgggttttacttcaatt

SEQ ID NO: 173676 - DNA, 592 bp, Homo sapiens
gatgtttgctaattaaatattctataattttccttagttatttttcaacatgtaaaaatatattgcaagaatattgaaattgagttatttatagtaagactatattctggcaattactggctttatttgatctcacgtaacctatacctattggctttcattataaatactaaaatttttggtaagcagtttaayagtagacgtggcaaacagggaatgtgcagttttgtgctttttgttttgctttatctgtttgtaactttgaatagcttactacctttaaattcatcaaattcatttgtttagtattttagaactaacacagccctgggaaaccttggtttcctctcctgtcttgctttttatctaatttcatgacatctgcaccatctaaaatctctggggtcaattttttaatccatgaaataagggagatggactaggtgatctatagagctttgtccaattccaaaattctgccatgttaatttatttatgcttagtctgtccagtttctccctgcattaatcaaatttgtctgataatgatcaaatcttagcatccttttgaacttaaagtgaatgcattttta

SEQ ID NO: 173677 - DNA, 592 bp, Homo sapiens
gatgtttgctaattaaatattctataattttccttagttatttttcaacatgtaaaaatatattgcaagaatattgaaattgagttatttatagtaagactatattctggcaattactggctttatttgatctcacgtaacctatacctattggctttcattataaatactaaaatttttggtaagcagtttaacagtagacgtggcaaayagggaatgtgcagttttgtgctttttgttttgctttatctgtttgtaactttgaatagcttactacctttaaattcatcaaattcatttgtttagtattttagaactaacacagccctgggaaaccttggtttcctctcctgtcttgctttttatctaatttcatgacatctgcaccatctaaaatctctggggtcaattttttaatccatgaaataagggagatggactaggtgatctatagagctttgtccaattccaaaattctgccatgttaatttatttatgcttagtctgtccagtttctccctgcattaatcaaatttgtctgataatgatcaaatcttagcatccttttgaacttaaagtgaatgcattttta

SEQ ID NO: 173678 - DNA, 592 bp, Homo sapiens
gatgtttgctaattaaatattctataattttccttagttatttttcaacatgtaaaaatatattgcaagaatattgaaattgagttatttatagtaagactatattctggcaattactggctttatttgatctcacgtaacctatacctattggctttcattataaatactaaaatttttggtaagcagtttaacagtagacgtggcaaacagggaatgtgcagttttgtgctttttgttttgctttatctgtttgtaactttgaatagcttactacctttaaaktcatcaaattcatttgtttagtattttagaactaacacagccctgggaaaccttggtttcctctcctgtcttgctttttatctaatttcatgacatctgcaccatctaaaatctctggggtcaattttttaatccatgaaataagggagatggactaggtgatctatagagctttgtccaattccaaaattctgccatgttaatttatttatgcttagtctgtccagtttctccctgcattaatcaaatttgtctgataatgatcaaatcttagcatccttttgaacttaaagtgaatgcattttta

SEQ ID NO: 173679 - DNA, 403 bp, Homo sapiens
gtacaaacattactcacttgaaatacattytaaataaatttgaaacattattaaatttatcttaacattccatttcttactgatattttagagtttttggcattgaccaacaccttcaataacttattaagaggcagaggagatgatatcacaagtttcgagttggaccaatgtggtcttgaatctcattctaaaaatacttgatttagatccaattgtcattttgtccaaagtaatttttggatcttgatatggttgggatctgtgtctccactcaaatctcaggctgaaatataatccccagtgttggaggtggggcctggtgggaggtggttggatcatagggacagagttgtcataaatggtttagcatcatccctccttggtactgtatagtgaattc

SEQ ID NO: 173680 - DNA, 403 bp, Homo sapiens
gtacaaacattactcacttgaaatacattctaaataaatttgaaacattattaaatttatcttaacattccatttcttactgatattttagagtttttggcattgaccaacaccttcaataacttattaagaggcagaggagrtgatatcacaagtttcgagttggaccaatgtggtcttgaatctcattctaaaaatacttgatttagatccaattgtcattttgtccaaagtaatttttggatcttgatatggttgggatctgtgtctccactcaaatctcaggctgaaatataatccccagtgttggaggtggggcctggtgggaggtggttggatcatagggacagagttgtcataaatggtttagcatcatccctccttggtactgtatagtgaattc

SEQ ID NO: 173681 - DNA, 408 bp, Homo sapiens
gaattcttaatcaacattattacttgtattagtacaaacattactcacttgaaatacattctaaataaatttgaaacattattaaatttatcttaacattccatttcttactgatattttagagtttttggcattgaccaacaccttcaataacttattaagaggcagaggagatgatatcacaagtttcgagttggaccaatgtggtcttgaatctcaytctaaaaatacttgatttagatccaattgtcattttgtccaaagtaatttttggatcttgatatggttgggatctgtgtctccactcaaatctcaggctgaaatataatccccagtgttggaggtggggcctggtgggaggtggttggatcatagggacagagttgtcataaatggtttagcatcatc

SEQ ID NO: 173682 - DNA, 548 bp, Homo sapiens
gtgccactgcactacagactggcaacagagcaagactccatcaaaaaaaaaaaaaagtagatgttttcagtttaagatttagtagaatttaaccacttaatttatgtttttgattactttccttttttaatataaaaagtaagagactagaaaaatggtcaataattacagacacttttggggaagtttaattatgaatgaatatagacaaataatatraagctagggggatgtactgttcaaatttatttttcctttgttttcatttaaaaatagaagatgttacaacatgagtttgttaagaaaattactgcacagtgtattattcggctagagctgctgcccacagcagtaagaacaaaataaggtgataaagagggaaaaaggaacattggaaggggcgaaaatttgagtatgtggaggagaaaagtttcagtgtacaaggtggattggcctccacggtgggaataattcattttcattagaggagaaaaggaaaaatttatgaggccaagtcatacagagtttgtgtcagaaaaacactaagt

SEQ ID NO: 173683 - DNA, 604 bp, Homo sapiens
aaatcctttgccccaaatatcctactgcttttaattttctttgtacatatttatgcaaactgcatatttttgtaacaaaaaaatcctttgttaatttgatgtgttctttctgattcatcacagttattttccttttaatgttttatgtacttctaagagacaagatgccaaggtatgaaatccctctaagctttattctgcagaacctattttgtatgctactagtgccaaaacatgctgtttaaaatgatagttgaattattggaatcagaaaaaatgaactcatttttaagacctctcagaatwaaagtaggtcaccatgttttatttcacttttttgtatatatatatttttagttctgatccactgaagtagtgaaaaatgagggttcttgtagataggtggtaatccacatcctcgaaattcaatttgccacttaaaatatgtgactaacacaaaataaagttatgcttaaggctgttcaagtagaattataaggttgtataaattaatctatttcttagaagcctaaaaactattttacaagttctagttccacatttccaagtccttgctaaaatatattcttggatagtttgctgt

SEQ ID NO: 173684 - DNA, 424 bp, Homo sapiens
ttctgtaattttatctaatggatatatccttaattgtatctccctatgaatctggtaggatcttttacttataaaatttcaaccacccgagacaaggagagaaaaaaaaacaaaaaacaaaaaaacagaaaacatagccatcgtgagaggttgagtggaaggactgcttgaagccaggagatagaggccagcttaggcaacatagtgagatcttgtctctacaggaaaataaaaaaataaagatagccagacgtggtggcatgtaactgtagttctagctactctggaggctaaggcaagagaatcatttgggcctaggaagttgcagtgagctatggcatgccactgcactccagcctgagcaatagcgccataytctgtctctaaataataataataataaattaaaaatatatatagttct

SEQ ID NO: 173685 - DNA, 559 bp, Homo sapiens
ggttctttttatgatttaaatatatttgctgagcttttgattttgtccatgcatgatttgtttgatttgattttttttctatttgtgttttcgtgcagttacactgagcttctgtaagatgattattttgaattcttttttaggaagtgcatagatctccattctttcagtatatttattggagctttacttcattccttcartggcgtcatgttttctggattcttcatgatccttgtagttttatcttaatatctgcacatttgaacatgaaattacttcttctagtatttacagattggcttctgcagagaaagcccttcaccagtaagcccagcaagagaagtaaccaaaaagaaatgcaagaaataataatgataataataataataataataataataataataataataaacagtaacagaaataaagaatgctctcaaaaggctgatcagtaaactgcaaatggctaaggaaaaagtctctgggtttgagaatataccaatagaaacctctaaaaccaaaaaatcagagataacatttgaaaaaaaaaaga

SEQ ID NO: 173686 - DNA, 360 bp, Homo sapiens
ttagtcaaaatctttctacttttttgatgtaggtatttattgttataaactttcctctcattactgtttgtgctatatttcataggtgttgcaattctatatatattttttcaagaatttttaattttttaaaatttcttccttgacccaatggtcgttcattagcacattgtttaatttccatgtatttatacagyttccaaaattcctgttgtttatttctagttttattttattgtggtctgaggatatattgatatggttttgatttttaaaatttgctgagagttgttttgtgtcttaacatatggtctctcctggagaatgttccatgtgcttatgaaaagaatgtgtattctg

SEQ ID NO: 173687 - DNA, 360 bp, Homo sapiens
ttagtcaaaatctttctacttttttgatgtaggtatttattgttataaactttcctctcattactgtttgtgctatatttcataggtgttgcaattctatatatattttttcaagaatttttaattttttaaaatttcttccttgacccaatggtcgttcattagcacattgtttaatttccatgtatttatacagcttccaaaattcctgttgtttatttctagttttattttattgtggtctgaggatatattgatatggttttgatttttaaaatttgctgagagttgttttgtgtcttaacatatggtctctcctggagaatgttccatgtgctkatgaaaagaatgtgtattctg

SEQ ID NO: 173688 - DNA, 441 bp, Homo sapiens
agagaaaaaaactataaaccaataactcataaacatagtttcaaaaattattccaaaatattagcaaattgaatccagtggcataccacaaagataacatattttaactaagtagaacttattacaggtataaaatgtcttaacattttaaaataaattaatgtattttaccaatttaacaaaaatatgaaaaaaatmataggattatcctattcaatacaaaagagacaaaattcaatacccatttatggtttttaaaaatcactttaggaaactggaatagaagaaattttttcttaatgtgataacaatatctacaaaaaaaaccccaacagcaaacatcataatcaacagtaaaacgttgactgagtatgttagcagaaaggggtttcaatccagaccccaacagagggttcttggacctcacacaagaaagaattc

SEQ ID NO: 173689 - DNA, 423 bp, Homo sapiens
attattagagaaaaaaactataaaccaataactcataaacatagtttcaaaaattattccaaaatattagcaaattgaatccagtggcataccacaaagataacatattttaactaagtagaacttattacaggtataaaatgtcttaacattttaaaataaattaatgtattttaccaatttaacaaaaatatgaaaaaaataataggattatcctattcaatacaaaagagacaaaattcaatacccatttatggtttttaaaaatcactttaggaaactggaatagaagaaattttttcttaatgtgataacaatatctacraaaaaaaccccaacagcaaacatcataatcaacagtaaaacgttgactgagtatgttagcagaaaggggtttcaatccagaccccaacagagggttct

SEQ ID NO: 173690 - DNA, 414 bp, Homo sapiens
gaaaaaaactataaaccaataactcataaacatagtttcaaaaattattccaaaatattagcaaattgaatccagtggcataccacaaagataacatattttaactaagtagaacttattacaggtataaaatgtcttaacattttaaaataaattaatgtattttaccaatttaacaaaaatatgaaaaaaataataggattatcctattcaatacaaaagagacaaaattcaatacccatttatggtttttaaaaatcactttaggaaactggaatagaagaaattttttcttaatgtgataacaatatctacaaaaaaaaccccaacagcaaacatcataatcaacagtaaaacgttgactgagtatgttagcagaaasgggtttcaatccagaccccaacagagggttct

SEQ ID NO: 173691 - DNA, 392 bp, Homo sapiens
aatgtgatttacacattcaatacaatccctatcaaaataccaatgatattcttcacataaacatttttcaaaaattgaaaatgtgtatgaaattacaaaagactctgaatagccaaagcaatctagagcagaaagaacaaagctggaagtattatatamcagacttcaaaatatacaacaaagttgtagtaaccaaaacatcatggcactggcataaaaagaggcacatagaacaatggcatagaatagaggacccagaaattaatccgcatatctacagccaactgacttgagaaagcttccaagaacactcactgggaaaaagacagtctatttgataaatgattctgggaaaactggatgtttgtgtacagaagaatactagatcccca

SEQ ID NO: 173692 - DNA, 308 bp, Homo sapiens
ttgtcaacaatttaccacaaaataaaaagcagtgtacaaacaacacaaacttagtgttcatcaaattatcttgtatagtcatgaatgttttcaaaatcaaaatgtttatttcccccaaaagtcttaatgtttattttgaaagaaagtcacacaacttttgaatttgacatttagggcaggcaagtcaaatttttaaaatttaaatgagaagcattagatatttgagataaatgatratcaaaaggaagcaaccaaaatgaagtttattttgtacaatctgcaaactgagttatatgatagcaagaaaa

SEQ ID NO: 173693 - DNA, 460 bp, Homo sapiens
gtacaattcaaagttttttaaaacatttacagagttggacaaccatcaccatcatctaatttcagaatattttcatcacactagaaagaagcactggaattcatgtatttgatcacaaaatggttaaatagtcttaacctcaaagcaatgaattctgccagactagttggctagaataaagttccccctgtgcaaatctgaattgcctattaagttatggaacaaagcagaaaatttagaacaggtgttccaagctggaatcatttgtaaaggagcaactaggcggcttggtactacctgtggctcctctcctcactaacccacacrtatccttcaccttggatttcagtctgtcttgtccaggcttctccaggtttctgcccaagagctgcataagccttctgctgctctaagacccttagaaggaaacagctgtcatgtttacttgccaatcctgtag

SEQ ID NO: 173694 - DNA, 451 bp, Homo sapiens
cttgtatgatgtttgctaatagtagyggcctacaaatctgtgggcaaactggagacatctggaccggcagcccttgccacagggatcatttgagatactggccaggaaatactatgtccctaatttttcaaaactccatttttcaggtggacccttctcacttggcatttcaaattccaaatcttatcataaatgactatccttatcccaaggatgcccttgttatatgtaaagaggggagacttctaagatatgagaaaaatctgctggtgtctctcacaagccacagcttagaaccatcctttcaaggaacagggttatattttctttgtggctcctggctacatttaatctttccaaggcattggaagggaacctgtactgtagtagcagtagttcctgacttattatttttaaattgtactaagatggcagcatcatctgaggacat

SEQ ID NO: 173695 - DNA, 311 bp, Homo sapiens
cctggaaacgtaaccccgccaatggcccagcttgaatccggaagaaaccaaggtcctgaacagaccaataacaagcaatragattaaatcagtaataaaaacctgccaaaaacaacaacaacaaaaagcccaggaccagacagattcacagacaaaacctactagacattaaaagaagaactggtatcaattccactgaaacaatcccaaaagattgagaaggacagaatcctccatagctcattctacaaagccaatatcaccctgataccaaattcaggaaagtatataacaacaacaacaacaaaaac

SEQ ID NO: 173696 - DNA, 622 bp, Homo sapiens
aacagcacataaaaaaatttcaccatgatcaagtaggtttcagtccagggatgcaaggatggctcaatatacacaacaaacatgatttatcacataaacaaaattaaaaacaaaaaccatatgattatctcaatagatggaggaaaaccatttgataaaatctagsattcctttattaaagaaaaccctcaacaaaccaagcctagaaggaacatacctcgaaatggtaagagccatctaagacaaatcaacagccaacatcgtacagaacagggaagttgaaagcattccccctaagaactggaacaagacaaggatgcccacttccatcatttctattcaatatattactagaagtcttagccagagcaatcaggcatgagaaagaaataaatgacatccaaattggaagagtcaaattatctctgctgatatgatcttatacctagaaaaccctaaagactccttcaaaagatttctagatctgacaaatgaattcagtaaagtctcaggttacaaaatgaaatgtacacaagtcaggagcactgctatacaccaacaatgaccaagctgagaatcaaatcaagaacataatcccttttacaataactataaaaataaa

SEQ ID NO: 173697 - DNA, 622 bp, Homo sapiens
aacagcacataaaaaaatttcaccatgatcaagtaggtttcagtccagggatgcaaggatggctcaatatacacaacaaacatgatttatcacataaacaaaattaaaaacaaaaaccatatgattatctcaatagatggaggaaaaccatttgataaaatctaggattcctttattaaagaaaaccctcaacaaaccaagcctagaaggaacatacctcgaaatggtaagagccatctaagacaaatcaacagccaacatcgtacagaacagggaagttgaaagcattccycctaagaactggaacaagacaaggatgcccacttccatcatttctattcaatatattactagaagtcttagccagagcaatcaggcatgagaaagaaataaatgacatccaaattggaagagtcaaattatctctgctgatatgatcttatacctagaaaaccctaaagactccttcaaaagatttctagatctgacaaatgaattcagtaaagtctcaggttacaaaatgaaatgtacacaagtcaggagcactgctatacaccaacaatgaccaagctgagaatcaaatcaagaacataatcccttttacaataactataaaaataaa

SEQ ID NO: 173698 - DNA, 556 bp, Homo sapiens
tttgtgacttttattaggcaaagatttcttaggtataacaccgaaggcatgatcaataaaagtaaagttttataagttggacttaattagaattaagaactttttacttcaaaagagacttttaagcaaataaaaagagaagctgtagcctcggggaaaataatggcraatcacatatttgaagaagggtttgtatctataatatataaagaattctcaaaacacagaaataatgggaacagaaaccccaatcagaatgggtaagccttttacactacaaacacttcaccaaagaacatacacagatggcagataagcatatgaatacatggtatatatagtcatcattagtcattagtgaattacaaataaaaaacacaatgaaatgccactacgcacctattagaatgttttaaaagtatgattatgccaagtgttttcaaggacgtgaaacaactagaacactcatgtactgctagtgggactataaaatggtacaaccagtgtggaaaacattttggcaatttttaaaaacttttagacatagacctcagtg

SEQ ID NO: 173699 - DNA, 556 bp, Homo sapiens
tttgtgacttttattaggcaaagatttcttaggtataacaccgaaggcatgatcaataaaagtaaagttttataagttggacttaattagaattaagaactttttacttcaaaagagacttttaagcaaataaaaagagaagctgtagcctcggggaaaataatggcaaatcacatatttgaagaagggtttgtatctataatatataaagaattctcaaaacacagaaataatgggaacagaaaccccaatcagaatgggtaagccttttayactacaaacacttcaccaaagaacatacacagatggcagataagcatatgaatacatggtatatatagtcatcattagtcattagtgaattacaaataaaaaacacaatgaaatgccactacgcacctattagaatgttttaaaagtatgattatgccaagtgttttcaaggacgtgaaacaactagaacactcatgtactgctagtgggactataaaatggtacaaccagtgtggaaaacattttggcaatttttaaaaacttttagacatagacctcagtg

SEQ ID NO: 173700 - DNA, 556 bp, Homo sapiens
tttgtgacttttattaggcaaagatttcttaggtataacaccgaaggcatgatcaataaaagtaaagttttataagttggacttaattagaattaagaactttttacttcaaaagagacttttaagcaaataaaaagagaagctgtagcctcggggaaaataatggcaaatcacatatttgaagaagggtttgtatctataatatataaagaattctcaaaacacagaaataatgggaacagaaaccccaatcagaatgggtaagccttttacactacaaacacttcaccaaagaacatacacagatggcagataagcatatgaatacatggtatatatagtcatcattagtcattagtgaattacaaataaaaaacacaatgaaatgccactacgcacctattagaatgttttaaaagtatgattatgccaagtgttttcaaggacgtgaaacaactagaacactcatgtactgctagtgggastataaaatggtacaaccagtgtggaaaacattttggcaatttttaaaaacttttagacatagacctcagtg

SEQ ID NO: 173701 - DNA, 451 bp, Homo sapiens
cttgtatgatgtttgctaatagtagcggcctacaaatctgtgggcaaactggagacatctggaccggcagcccttgccacagggatcatttgagatactggccaggaaatactatgtccctaatttttcaaaactccatttttcaggtggacccttctcacttggcatttcaaattccaaatcttatcataaatgactatccttatcccaaggatgcccttgttatatgtaaagaggggagacttctaagatatgagaaaaatctgctggtgtctctcacaagccacagcttagaaccatcctttcaaggaacagggttatattttctttgtggctcctggctacatttaatctttccaaggcattggaagggaacctgtactgtagtagcagtagttcctgacttattatttttaaaytgtactaagatggcagcatcatctgaggacat

SEQ ID NO: 173702 - DNA, 579 bp, Homo sapiens
tgtcaaaataatacatgcatatcaatttgaaagaaatagaatttcaaagctttagaaaacattcagtggttaagctctatcattctcatcacagaagcaactacttttgatgattctccattcccaccccaagagctagttaatcacaaacctattttctgtctctacagatttttcttttctgaaaatttcatataagtgggatctaataatatgtgatcatttgatctggcttcttttgctcagtrtaatgcttttataattttatccatattatgacatatgttcatttttttattgttgactaatatttcactcaatggatataccaatttttgtttattcatttataagttaatgaacatttgaatggtttctatatttaggctcctgtgaatgcttctatgaactttgagatgtaagtctttctgtggaaataactttcacttctcttgggtaggtatttaggagagaaactattaggtcacatagtaagttcatgtttaagtttttaagaagctgccaaactattttctgactgcctgtatcattttacatttccatcagcaatatatgaag

SEQ ID NO: 173703 - DNA, 567 bp, Homo sapiens
  misc_feature (1)...(567): n = A,T,C or G
nnnnnnnnnnnnnnnnnnnnnnnnnnnnnnncttatagttaggcaggctgtattggaagtgtagtgtccacatctgcttgtgggaggtcttagggagcttttactggtggcaaaaggtgaagtgggagcttgatgagggaacgtgccacacatttaaacaaccagatctcaagagaactcactcactatggccaggacagcaccaagccatgagggatccctccagcatggcccagtgttttaacctgctgccatttgaagcatccaggttgtttcagaattttgctaatgcttaatgacamtatttttgcctattggaaaaatagttcctatgttagatagcttcttaggtcttgaaccctgatcttttatctttttaacaaagtctctgctaatgcttttgatattagtagacatttccaagttttttgtaattatttgtcattaggagaactttagagagctaaaaccaatgataaaggactatgaaacacaaagtgtacaaagggactgtttgtaaaagtagtgaacaatgaaaacacatgaacacaggaaggggaacaacag

SEQ ID NO: 173704 - DNA, 358 bp, Homo sapiens
cccctgtgcaagcattaaagtaagtttaacttcaaggggaaacatatatctcmggagactgatttcaaatacagtgtttggataacattaaatgagccaagcaaaaataagatgctaatgaaattagtgtagtcagattttaaacccaatgagtgtaaacaaatcccctgataaagtattactgaaacacctaatatggttttcattatagcatgtgggaaaaatacaattgtgtcttgaaataatcctactttttaagaacatttttaaaaattctctttttgctgcagtcttctaaaacaaaaagctcattgagagcacattttattgtcccatataacttaattactaagattaa

SEQ ID NO: 173705 - DNA, 559 bp, Homo sapiens
gcctcttacacctcatgattcccaatgtgattcatcagacaatgttggtgctgagtgaatgttggcatttcctctatatgttaaatatctgggtgttgggagttaagatggccactaagttcccagggtcatgtagtactgaaggaaaattmaagataagccctctggcaaagaagagaatagatcatcaaaaatagaataagttttgagatctatacgtaagaaaagctaaatgcctcggggtcatcataaatcatagaatatcatggaaataatatgttactagttattatctaaattataggacatggagatgtataaggtcagataactataaatttttcttctctgtgaaaggatttcagtatatttttgctgtctcattgtcatgtaaatgtttgcaagaatgtgcaaagtgctcctggagactcttgaacaataccattctgtgaatctggttgttattggttgtgagccctcatattttagcctcttgctaatttttattccagagaagctttagcatgtatcctttagatctacaataggtcaaggcata

SEQ ID NO: 173706 - DNA, 403 bp, Homo sapiens
gaaaattcatttcatatcattttgagtaaaccacgtacagtttcactcaatattttaaaactgggcatctgtgattgagggctgcaaaacaaagtatgtttaaaaatatgtttatgttattttgataattttgaaaatgtactctcacctgaggatgatctacaaagccagttcagctggctcttcagcactgtattaaaaatactcttagttctggggaaaaaaaaaaaaacactttcaraaaacagtttttgaagagtaactgtggtaggttccgaagttggtatctttcctgaaaggactctaagtgccctaaattttatatgtaaaatcatgtagtttgcaagacattggaaaggtggcacttcaattaaacccttcactcccacccccaaaagttaaa

SEQ ID NO: 173707 - DNA, 400 bp, Homo sapiens
aatgcatgtgaaaattcatttcatatcattttgagtaaaccacgtacagtttcactcaatattttaaaactgggcatctgtgattgagggctgcaaaacaaagtatgtttaaaaatatgtttatgttattttgataattttgaaaatgtactctcacctgaggatgatctacaaagccagttcagctggctcttcagcactgtattaaaaatactcttagttctggggaaaaaaaaaaaaacactttcaaaaaacagtttttgaagagtaactgtgrtaggttccgaagttggtatctttcctgaaaggactctaagtgccctaaattttatatgtaaaatcatgtagtttgcaagacattggaaaggtggcacttcaattaaacccttcactcccaccc

SEQ ID NO: 173708 - DNA, 356 bp, Homo sapiens
tcagaatgcatgtgaaaattcatttcatatcattttgagtaaaccacgtacagtttcactcaatattttaaaactgggcatctgtgattgagggctgcaaaacaaagtatgtttaaaaatatgtttatgttattttgataattttgaaaatgtactctcacctgaggatgatctacaaagccagttcagctggctcttcagcactgtattaaaaatactcttagttctggggaaaaaaaaaaaaacactttcaaaaaacagtttttgaagagtaactgtggtaggttccgaagttggtatctttcctgaraggactctaagtgccctaaattttatatgtaaaatcatgtagtttg

SEQ ID NO: 173709 - DNA, 405 bp, Homo sapiens
gaaaattcatttcatatcattttgagtaaaccacgtacagtttcactcaatattttaaaactgggcatctgtgattgagggctgcaaaacaaagtatgtttaaaaatatgtttatgttattttgataattttgaaaatgtactctcacctgaggatgatctacaaagccagttcagctggctcttcagcactgtattaaaaatactcttagttctggggaaaaaaaaaaaaacactttcaaaaaacagtttttgaagagtaactgtggtaggttccgaagttggtatctttcctgaaaggactctaagtgccctaaattttatatgtaaaatcatgtagtttgcaagacattggaaaggtggcacttcaattaaacccttcactyccacccccaaaagttaaaaa

SEQ ID NO: 173710 - DNA, 572 bp, Homo sapiens
agaagcaactgcaacaacataaaaagcactggagggagaaggttgatgggaagaaaactgtgaaaatgaaaaggtgtttagataagaaagcaggagaaagttgaaatagttattctaagattcacaggctgggcaagctctaatgttcatatatggataaaggcatttagtggttttgtaagatcaatgtaaaaatacaacatgattacagagaagcagagcaktgttttttgtttcatttgtttgtgttcattacaagcagggctttaaagtgggtagataaattaatggttttcaagttaacaggtatcacaaacacctggagggcttgttaaagcggagattgtgttgggctcaactcccagagtttctaattcagaaggtctgtgttgtgctctgagactctgcctttctcacaagtccccagttgatgcttatgctgctgaccgcggagcaatctttgggaattactgatctcaacaatgtaagaataactagtttaagaaggtatttgtagaataagtactgatcgcagtgtgttttccttgggcaagcttttccagagaaaataa

SEQ ID NO: 173711 - DNA, 572 bp, Homo sapiens
agaagcaactgcaacaacataaaaagcactggagggagaaggttgatgggaagaaaactgtgaaaatgaaaaggtgtttagataagaaagcaggagaaagttgaaatagttattctaagattcacaggctgggcaagctctaatgttcatatatggataaaggcatttagtggttttgtaagatcaatgtaaaaatacaacatgattacagagaagcagagcagtgttttttgtttcatttgtttgtgttcattacaagcagggctttaaagtgggtagataaattaatggttttcaagttaacaggtatcacaaacacctggagggcttgttaaagcggagattgtgttgggctcaactcccagagtttctaattcagaaggtctgtgttgtgctctgagactctgcctttctcacaagtccccagttgatgcttatgctgctgaccgcggascaatctttgggaattactgatctcaacaatgtaagaataactagtttaagaaggtatttgtagaataagtactgatcgcagtgtgttttccttgggcaagcttttccagagaaaataa

SEQ ID NO: 173712 - DNA, 541 bp, Homo sapiens
aacttttatataattaatgtgttttaattcattttgagtattatttttcttatgccatattctcttgatgccagccaatgtgagtcccatcatactggctcctatatctgtttggttttactccagttgtctttgatagatttcttggtttctgataaaacataatgcyccttgtctgatcatgaacattttctgcccaagctgaaatcagtcatttcttgtaggtagcctggtaccttttagtgacaagttgtatttggaaggtacaatggagactttaggggtgcatgttgctactggattggtattatttccaggcttttttctgtggtaagacttgtaacatattttctaacctggagaatttactatgtgcaattgaaaagaatatttatttatctatgtgttggttaatgttctataaatgtcagcaagatcaaggtggtggatagtattgttcatcttctatatgcctgctaattttctgcctagtttgtgtatcaatttttgagagtagggttggaaaatctcaaactattat

SEQ ID NO: 173713 - DNA, 502 bp, Homo sapiens
actttatgaaattaaaaaaagttaacaaaattagcaaatatattttgcttacataaatattagtcctatctagaaaacccaaaacaaacataattaaaaacttcctttctttctctctctctattttggtgaaatatacaagggattacatatctttctaaatcctgcatagattacttttaaggtaaaaataatcataaggatattctccaagatgtcctgcaaaggctaccctgtggcaatgagccagtgcctactgtacagtgctagtttaaaggggatagctccttagagtctcactttaactgttcactgagcaaaaattctccacaaggctctcacacrcttgctcttacgtactgattccccaagcaggtggaatgattgttctttcctgaatgcatgttgtttggatccataacacacaattccaattaagactaatcccaaaacacattgcaactacaagaaccacattgctgacagattgttgtttctcaat

SEQ ID NO: 173714 - DNA, 548 bp, Homo sapiens
atttcctgttatttgagtagagaaaagatgtattgaataatttaagactttgtcaatgttaatattaaacattgaagagtaaacactaaaaaatgttttttagagaatatgtgtggcaaagttacatgtatgtgaaacacagaaatctaaggaagacttaaccatccaacagagagtaggatatgaaaagagaaatagaataaaaagaatggtaaacaaaaatataaaaagattggacaaataagggttcacaattatctgtaatcataagatatgttaatgtactaaacgattacatataaactactagttattgtataaataatatatctatttaagaattacataagtaaaattcagacaagcatagcttataaaaatgcttargctgggcacagtgtctcacacctgaaatcccagcattttgggaggccgaggcaggcagatcaccagaagtcagaagttccagaccagcctggccaacatggtgaaaccccgtcactactaaaaatacaaaaattagctgggcatgctggtgtgtaactgta

SEQ ID NO: 173715 - DNA, 615 bp, Homo sapiens
aattcaatttttgatatatctatatctctttacatatacattcatatctatctacacacacacacacacacacacacacasagagagagagagagagagagagagagagagagagagagagagcgagcctggacaggagtatactaaaatattaacaatgattttttctggataatcagattacatgtgattttttgtttccttctgaacaatttgctctattttcagaagatttatcatgataatacattatcgctataattagagaacaccataaaattatttttgttttggaaataaggtgggtgccttcttctcacatgcctgacatttgaggtgggatcgatcactgtatttcattcaacaaataggttctgtaccagggatggaaatatatcagtgaatgacagaccccaagaccctgctctcaaaatgtcttttatatttacccacattttactgttcgtgatgtttaccattcctttgtgcagatctaagtttccatctggtgtaattttccttctgcttgaatggctacctgtaacatttcttatagtgaagttctgtcggtgacagattgtctcagctttttctttcatctgaaaatgcccttat

SEQ ID NO: 173716 - DNA, 609 bp, Homo sapiens
ggaggtgggtatagggaggcggtgaagagcgaggctccaagagagcgcagcagctcccgcagctcccctctcctggctgcaatcggtttctcgtccacagcccctttctgaccatctcttggggatctttctacacatagagtcacagtttgactttccctttcccagtctcagctatgtggactgttcaatgggagcaatagcactcacttcacagggtgattgggcggtcattattgcccttgagcctgagcaagccccgtgtttcaggggccccatgctttccagtgccttctaagcaggaagctccccaccagctcctggaacctctggaccgaccagaaggtaaccccaagcccagactacggacctgcatgaaacctggtactggtttcccttctctggkctcccttcagtcctctattttccacctgaccccctgcagtcagatatcctgagaagctccaggactcccacctatgggaatcatcccagggcgccatgcttggcctctgctgagggtgtttttgggaaaaaagattgctcccactggccagcaaggtatttctttcataggagcgagacagattaggtcatcaggctggtacc

SEQ ID NO: 173717 - DNA, 600 bp, Homo sapiens
ccagcctggcatagctgtccctggcacctgtagggtgtggccttcaaatagctgtcagttgctgagggaagtaatccaggcccctgatgtgtcactcgtgcatgcttttctctttttccccaaaaatgtattaggcatgtggaccaccaattacatgccaggcccccttgacacaacttaatcctctggtcaagtgtttggaattatgatgacaaagggcgctgtcttcttggattctccaacattcttatcaggtccttgaaagtgccaatgcagttcccagacaccaaatgggcccttaggaagacarcattcttcattccttccaattaacagatggggacatagaagctcagtgagattaagtgactgattcaaggccacacagttaagtagaggaggagaaagtccttaggttttctgactgcaaagttagtgctcttggccctacaccaagctaacctccaatgaggggatttgcatctctctgagggatatcaagccatagtgattcatgctgaggggagagcatgagcctgcaagttgggaggcctggtgtatgagtttgctagggctgccataaaaaaataccataggcta

SEQ ID NO: 173718 - DNA, 600 bp, Homo sapiens
ccagcctggcatagctgtccctggcacctgtagggtgtggccttcaaatagctgtcagttgctgagggaagtaatccaggcccctgatgtgtcactcgtgcatgcttttctctttttccccaaaaatgtattaggcatgtggaccaccaattacatgccaggcccccttgacacaacttaatcctctggtcaagtgtttggaattatgatgacaaagggcgctgtcttcttggattctccaacattcttatcaggtccttgaaagtgccaatgcagttcccagacaccaaatgggcccttaggaagacagcattcttcattccttccaattaacagatggggacatagaagctcagtgagattaagtgactgattcaaggccacacagttaagtagaggaggagaaagtccttaggttttctgactgcaaagttagtgctcttggccctacaccaagctaacctccaatgaggggatttgcatctctctgagggatatcaarccatagtgattcatgctgaggggagagcatgagcctgcaagttgggaggcctggtgtatgagtttgctagggctgccataaaaaaataccataggcta

SEQ ID NO: 173719 - DNA, 522 bp, Homo sapiens
ttcctggtcttccctttcacagcacttgtcccatgggtaattcttcatcaatcacctcttttccctgctggaattttacaatctgtcccagtgaggataacatcagttctgatcaacactggatctctggtgccaagcacagtgctcagcacagagcagatgcgcaatacgcgtgtgtcaaatgaacagatgaatgaacatactcattggttaggtattcactctgtgccaggaactttgctaattactctacatgcatttatrtcctcattttatccctgattaaggtgaaaaccaatgaagttatataactgtcccaggtcacacagcagctaagtggcagagccaggactcaacacaggtccatctaactgcatagcccctcctcttaactagttaacaagcataccgcatcatatagggcaaagaaattcctatccctctgtaatcctgttcaattgggagatgctcttaagatgtggatttagacttagcagagaagaacaaggtcctaagtttgca

SEQ ID NO: 173720 - DNA, 334 bp, Homo sapiens
attattcattgatagcttgatgctttctacctttacatgtatataaagagatggttggtgtcttagtctgttttgtgctgctacagcagaatatctgagactgagtaatttataaaaaccataaatttatttaccacagttctggaagctgggaagcccaacatcaaggtgctggcatttggtgwctggtgagggccttcttgctatggcctcatgtggtagagggcagatgggcaaaaagggatgaactccctttgtctaagttctttcatagaggcacttaaccccattcatgacagccctcattgactcaatcacctcccaaaggccccac

SEQ ID NO: 173721 - DNA, 567 bp, Homo sapiens
ctacacacttttaaacaagcagatctcatgagaactcactatcacaggaacagcaagggggaaattcacctccatgatccaataatctcccaccaggctcctcctccaacactggggattacaattcaacatgagatttgagcaaagacacaaatccaaactatatcggcaccccaaatggtgttatggctaaaggacttagagagatggagactcagaaaaccaagcaagctcacagtgacactctgggtctctcgaggctccggtgactctcctgccagctcttcatccctttgcctgcttgtgcccctctccttctcacttgttgctagcaagttgcacttgctggggccaattccatgccccagcacattgtyctgccaccccaagcacaatgctgacagtgctcagctctgccaggaagcctaccatatccctttatgcccatagaatctgaaccagatccctgggtgagaggtttcaggagctctatgccctcagccccaaacctagtaggctgagtggaagccccagccccagaggagttgcccaggaggaggttccaga

SEQ ID NO: 173722 - DNA, 567 bp, Homo sapiens
ctacacacttttaaacaagcagatctcatgagaactcactatcacaggaacagcaagggggaaattcacctccatgatccaataatctcccaccaggctcctcctccaacactggggattacaattcaacatgagatttgagcaaagacacaaatccaaactatatcggcaccccaaatggtgttatggctaaaggacttagagagatggagactcagaaaaccaagcaagctcacagtgacactctgggtctctcgaggctccggtgactctcctgccagctcttcatccctttgcctgcttgtgcccctctccttctcacttgttgctagcaagttgcacttgctggggccaattccatgccccagcacattgtcctgccaccccaagcacaatgctgacagtgctcagctctgccaggaagcctaccatatccctttatgcccatagaatctgaaccagatccctgggtgagaggtttcaggagctctatgccctcagccccaaacctagtaggctgagtggaagccccasccccagaggagttgcccaggaggaggttccaga

SEQ ID NO: 173723 - DNA, 544 bp, Homo sapiens
gatgttgttcatattctacttagaggactgggcctgttggggctaaaagctgcaagtccttgtcccaaaaggtcacccctgcttctagaatgtcattggtgcaagaaggtctagggaaaccacctgtttcagtcccagtggtgtagtggtgttgagaaagcactctgggctaggagacggaagcctgggttctgccctcaatttctccgcaaactcactccatcactatgggcgtcttcctttcttttctttctttctctctttctttctttctctctttctttctttctttctttctttctttttctttctttctttttctttctttctttcttccttcctttctttcttttctctctatttctttctttcttttgttttctttctcttttctttcttttttttttttttttttaacaaagtctcgctctgttgcccatgttagagtgcagtggcrtgatctcagctcactgcaacctctacctcccgggtttaagcgattctcggcacatatttttctaagcctcagtttccacatttataa

SEQ ID NO: 173724 - DNA, 595 bp, Homo sapiens
gaattctctcaacttggtgtgstaacaatggctctctcatattacattagaagttctcatttgcagttctgtatttctaatttaaaaagagagaactgcattagctagtaagcataattcatctcagaggtaactcttttaaaacattggagctcagtgtatgtaggggggtgaataatccccacctctctcccaaatgctccaattttttccaaattgataattggctcctcattacctttaccttctgaatgaagctggcggagatctgctatgtgcccttggtggtcagactccttcaaaccctgatattccaaatgattctgatcaactcaacaaaagatgtaattttggggtttactttgtaaatctgatcaaggctacaataaactaacagaaagatacacaaatgcgtgcatacacacgcattgtttgtatattattttagagtgcctagggactctgtgaagcccatgtatggactagttcccaatgctgtctcataaaactttctgcaagagtagcaatgttctatttctgtgctctctgatggagtagctactagtcatatgtaggtattgaacatgtaaaatgt

SEQ ID NO: 173725 - DNA, 540 bp, Homo sapiens
tgtccagagctgtgctgtccaacaccacagccactagwcacaggtgactatttaaacttagtcaaagttaaattaaaaattcagttcttgagtgtgttagccacatttcaaatgttcaataaccacatgtggctagtggttaccataatgggcggtgcagaccctgaatgtttccccactgcaaaaagctctgttggacagtgctggtccaggatcaccctccctagccaaagtcaggtctcctgacctgcattctcctccatttctcctggaccatattaagtatggccaactatgcagaaacatttgagatagccggccttcatcctttcctatcaatctctgccaaatttttcccatttaaaaaagaaaagaatccagtctgatggctctgatgaaaatttaaaataaataaaaatttcttaaaaagaaaagtttaatatttttaatgaaaaccctctaacatgacatatatataaagccatcatctgagagtcctaaacataacaggaaggaatataaaggtttagagtccaaatg

SEQ ID NO: 173726 - DNA, 255 bp, Homo sapiens
gacttattgaatgcatttgtttctgagacctgctagtcacaccaatatactacactagggcttttctgaactacttaaaacagcaagaaaaggcctacttctctattcrgtttatgattctataatcattgaaacatttttaactgatctgtcaataggaaattgctaacactagtgttgatttcaattagtttaaatcagaatattaatatagtttaaaattcttgtccagagtagtggataagagtgcaagct

SEQ ID NO: 173727 - DNA, 541 bp, Homo sapiens
tgaaatatttgttgagattcaaaaaccccatgagatttaacttaagctttccctgtcagagagattctaagagctaaaagatgggaagctggtatttgggaactagattaaaaagaaaatccaaattaatcccaaggagcaaggctcaatagatagttatttagacataacatgtccaccctgcaagcctagttgctcagttgactgggctgcccctatcttagtcttgcctggaagagaaataagttgtttgccccatacctgtcttgagaaatgtcakcctccagacctgaaagcttcttgtgatttggtttatttctgtagagtttattattatacacagtgttcttgaagtaatagagaagtgcattagaagctcctgcaaatggaaatgaaatgtaaatttagattgtaaatacatgactgcggtaaatagatagcaagaaaaaggatgaagagattagaaatttgccacatttctctaaccctaaagggatgtttctataaatagtttaaaactgttgaagacgaagggggagga

SEQ ID NO: 173728 - DNA, 501 bp, Homo sapiens
ggtggattccagggcagacaactgcataggactgtctcgagttctgtggattgaaaaggttgggcatcccttcagatgttcctgagctgacctcagtcagaggtgcgtggctccagcacccagaaggtgtgaccagcacaccaacccctcctcccaggtgggccgtgacagcttccctcaatccctcccactctgacaacagtctctctgattgcttttgctttggtgctctggacataaactgttcctactttgtccaagtgaggtatataattttcagaacgctggagaattattatctaaaacaccagtggataygctacaattttggcattcagtattctgggcttgtgcaggaaaactctttctttagaacatgtagaaagactatcctttagttatccagtgtggaaacagtcctgaaatccaaactgatactgcgatcctgtgccaggttattactgtgacaattacttaatattctctgtgctcacgatatca

SEQ ID NO: 173729 - DNA, 573 bp, Homo sapiens
gacagaacttggacctacctataaaatcaatgtaagcaaataaaatactttgtttagtccttcttcataagcttcctcccacttttttcctactctctcctctaagatccttgttctagaaagtgttttctcccacaggagaaatctattttttatatttgttaaaaacttttaaattaaccgtagttattaagtcatttcacacacaaacttttattacagacgcccagagctgagctgcaacccaacaagataggagagcagcagagtctcccgctaagtttgcaaacaagctccctggcctctataacctccaacaccagggagcacgcctctgtgacctccccaagtattttctagccatcmcaacaaaagtgttttgaagcccaagatgaaatgatgtgatcacaagaggccgaaggtataggctgctaagagaagaaaacaagagagatggtttccatgtgataggggccaggaaatgtgtgggcaggaggtgctcagggctgggcttcccaccactgcaaagaatggcagggaatagactttccacagtgtttgtggtgaatggct

SEQ ID NO: 173730 - DNA, 584 bp, Homo sapiens
aaactagaaagaagcaagtatttttcaaagaacattttatgggagtagtatccagaaaaattaatgtcaaaactgaatttcaagcacatcaaagcaaaacsaactaggaactgtgagacatgtgtcctaactccagctctaccattaattagccgcaagacttcacataagtcactgacttccctggcccacaaattctttgaggtgagagggttgtagtttaacctaaagagctttctggaatctaaaatgcttatgaagcacagatttccattggtggggaggcagggtagggaagtaaggattcaagaaagaaagaaaaattcccaatctcagctataacaaaggaccaaaatataagaaataatttagttttcatttaaagataagtttatttttggcaagaaaaaggtgaagaaagagtaaccgcaacagaagtggccacattgctgctagagccaaatggaactgagatctgtaacttgtgaggtggaaccctcaccacaagatacaggcttcctttagtccctcaaagcacagcctcccacctactggactccagcacagctctggttggaaagtga

SEQ ID NO: 173731 - DNA, 590 bp, Homo sapiens
ctttaataagctggtcttagaaaaaaagaatagactattatttaattcacaaacataatttaaactttactattttagttttacaatttccaatttctcttttgcttattaatcaaaaactgttctctttcttggcttggagaagatgatactaacaaaatgtaatgtaattgtttagaagtaattttctccagcgatctaggaagcttaagtagttgagcttcctattactttttgccccctgggttttacattagttctgcrctgacttgtctgtgtatttgtaagagtaaacgattaggtaggagaggctccaggggactgttcttggcagtagcaggttgcgtttaactaccttctgcttgcatgcacctgatgatgttggttattaacagagtttttaggaatcaatgactacaatatctctttgcttaataggtgtacgcaaaggaaaaaaaaagtaataacacttacccgcaggtgcattctatggtcttaatccaagaaacagaattttgtagtgttgttgacagctgttttacttgttccatgttttcattgcacacgttgagccatgaatattcaaaata

SEQ ID NO: 173732 - DNA, 612 bp, Homo sapiens
cctaacagggacattgttatgggctgaatcatgtctcctgcccccaaatttatggttgaagtcctcactcacgtgtaccttaaaatgtgacttttttttttttttcraaatggagtctccctctgtcacccaggctggagtgcggtggcctgatctcggctcactgtagcctcctcctcctgggttcaaacaattcaactgcctcagcctcctgagtagctgggattacaggtgtgtaccaccacgcccagctaatttttgtattttttaagtaaagatggggttttactatgttggccaggctggtctcaaactcctgacctcaagtgatccacccacattggcctccaaaaactctgggattacaagtgtgagcccccacgcccagccagaatgtgactttatttggaggtagaacctttgaaaaaataagtaaggctaaatgaggtcattggggtgggtcctaattcgatatgactggtgtccttataagaagtagagattaggatacagacccacgcagagggaagatcatgtgaagacagagataaagtcgccatttacaagccaaaaaggaaggctacagcatgaaaccagtcatgccaacatttt

SEQ ID NO: 173733 - DNA, 459 bp, Homo sapiens
tgtgcctaacagggacattgttatgggctgaatcatgtctcctgcccccaaatttatggttgaagtcctcactcacgtgtaccttaaaatgtgacttttttttttttttcaaratggagtctccctctgtcacccaggctggagtgcggtggcctgatctcggctcactgtagcctcctcctcctgggttcaaacaattcaactgcctcagcctcctgagtagctgggattacaggtgtgtaccaccacgcccagctaatttttgtattttttaagtaaagatggggttttactatgttggccaggctggtctcaaactcctgacctcaagtgatccacccacattggcctccaaaaactctgggattacaagtgtgagcccccacgcccagccagaatgtgactttatttggaggtagaacctttgaaaaaataagtaaggctaaatgaggtcattgg

SEQ ID NO: 173734 - DNA, 612 bp, Homo sapiens
cctaacagggacattgttatgggctgaatcatgtctcctgcccccaaatttatggttgaagtcctcactcacgtgtaccttaaaatgtgacttttttttttttttcaaaatggagtctccctctgtcacccaggctggagtgcggtggcctgatctcggctcactgtagcctcctcctcctgggttcaaacaattcaactgcctcagcctcctgagtagctgggattacaggtgtgtaccaccacgcccagctaatttttgtattttttaagtaragatggggttttactatgttggccaggctggtctcaaactcctgacctcaagtgatccacccacattggcctccaaaaactctgggattacaagtgtgagcccccacgcccagccagaatgtgactttatttggaggtagaacctttgaaaaaataagtaaggctaaatgaggtcattggggtgggtcctaattcgatatgactggtgtccttataagaagtagagattaggatacagacccacgcagagggaagatcatgtgaagacagagataaagtcgccatttacaagccaaaaaggaaggctacagcatgaaaccagtcatgccaacatttt

SEQ ID NO: 173735 - DNA, 612 bp, Homo sapiens
cctaacagggacattgttatgggctgaatcatgtctcctgcccccaaatttatggttgaagtcctcactcacgtgtaccttaaaatgtgacttttttttttttttcaaaatggagtctccctctgtcacccaggctggagtgcggtggcctgatctcggctcactgtagcctcctcctcctgggttcaaacaattcaactgcctcagcctcctgagtagctgggattacaggtgtgtaccaccacgcccagctaatttttgtattttttaagtaaagatggggttttactatgttggccaggctggtctcaaactcctgacctcaagtgatccacccacattggcctccaaaaactctgggattacaagtgtgagcccccacgcccagccagaatgtgactttatttggaggtagaacctttgaaaaaataagtaaggctaaatgaggtcattggggtgggtcctaattcgatatgactggtgtccttataagaagtagagattaggatacagacmcacgcagagggaagatcatgtgaagacagagataaagtcgccatttacaagccaaaaaggaaggctacagcatgaaaccagtcatgccaacatttt

SEQ ID NO: 173736 - DNA, 405 bp, Homo sapiens
gctactacagctagcttacaggaaagaaakacctcagaagatactttcctcaaaatgctctaaagtcagaagtctcaaaataacatgtcaatgtccacgcttccacatgtgagccataagcgccctgtgctgttggaggaaatctgatgtggaaatgttttatggcctgagattcttgctcaagtggcctagcagggcctaagagaagatgctgggggagaaatgaaagcaggagggaaagactgcctcacagattcaactccctggagaaaaccctcaaaaagagtgggagtggatgaggtatccactgggcagtgatgtccctgggccaacagacaacagaattaagtctatatcaagcagaatcccatggaaaaaataaaagaattttttttaaaaaaagaa

SEQ ID NO: 173737 - DNA, 407 bp, Homo sapiens
gctactacagctagcttacaggaaagaaagacctcagaagatactttcctcaaaatgctctaaagtcagaagtctcaaaataacatgtcaatgtccacgcttccacatgtgagccataagcgccctgtgctgttggaggaaatctgatgtggaaatgttttatggcctgagattcttgctcaagtggcctagcagggcctaagagaagatgctgggggagaaatgaaagcaggagggaaagactgcctcacagattcaactccctggagaaaaccctcaaaaagagtgggagtggatgaggtatccamtgggcagtgatgtccctgggccaacagacaacagaattaagtctatatcaagcagaatcccatggaaaaaataaaagaattttttttaaaaaaagaatt

SEQ ID NO: 173738 - DNA, 407 bp, Homo sapiens
gctactacagctagcttacaggaaagaaagacctcagaagatactttcctcaaaatgctctaaagtcagaagtctcaaaataacatgtcaatgtccacgcttccacatgtgagccataagcgccctgtgctgttggaggaaatctgatgtggaaatgttttatggcctgagattcttgctcaagtggcctagcagggcctaagagaagatgctgggggagaaatgaaagcaggagggaaagactgcctcacagattcaactccctggagaaaaccctcaaaaagagtgggagtggatgaggtatccactgggcagtgatgtccmtgggccaacagacaacagaattaagtctatatcaagcagaatcccatggaaaaaataaaagaattttttttaaaaaaagaatt

SEQ ID NO: 173739 - DNA, 459 bp, Homo sapiens
tgctcaggtgtcctctagtttcagccggagcacttccagggaggggaagacatgctcttgagagatgcttgctctacctagggcagaaaggatgtagcaggagtggctggggctgcgctacttgtagctgtcacatttggcagaaaaagaaacttctattctttcagatggctgagtctattttcaagtcttcacccactggaaatgttttaggcctattattgaaaattcagtaggtggttgcagtggagttaaacaataaccaggactctgtagagaattctaaaagctgaaaatgcatctttaagtaatagtaatcatattggcataggtgtgcacttttgaaagtggctttatgcatgtcctatgtagtgtaagaataatgtgtcccyagatggaattgggtagttttgtggaatgtctttctttttttttttttgggatggagttttacccttg

SEQ ID NO: 173740 - DNA, 459 bp, Homo sapiens
tgctcaggtgtcctctagtttcagccggagcacttccagggaggggaagacatgctcttgagagatgcttgctctacctagggcagaaaggatgtagcaggagtggctggggctgcgctacttgtagctgtcacatttggcagaaaaagaaacttctattctttcagatggctgagtctattttcaagtcttcacccactggaaatgttttaggcctattattgaaaattcagtaggtggttgcagtggagttaaacaataaccaggactctgtagagaattctaaaagctgaaaatgcatctttaagtaatagtaatcatattggcataggtgtgcacttttgaaagtggctttatgcatgtcctatgtagtgtaagaataatgtgtccccagatggaattgggtagttttgtggaatgtctttytttttttttttttgggatggagttttacccttg

SEQ ID NO: 173741 - DNA, 597 bp, Homo sapiens
agcagtggctgagtgtcttcctggctctcggttcgggacgggtccactgtggttctagcttctgccaggtgattattgtccatgcatttctttaacattgtttcctttgtcttgctagcctaggggtcatcaaacttttcttgtaaargagcagagagtaaaatattttagtctttataggtcatacagtctctgttgcactcaactctgtgagtgggtgtgtctgtgttccaataaaactttatttccaaaaactagcagtgagctggatttgggttgcaggctattgttggctgcctcctgcctagcataagggttgtagtagctgcctgctgttgctaatgtttccattgcttcattaacctgtttggtttctcaggtgtttcatcacatcacagtttccttcattcattaacctatgtcacaaatacttaggtgtttgcagattttctggtaggactctggctgattcaaggttatactaaggattagaattgctgggttgtaagttatgtacattttcagccctaacaagatgtcagattattttctaaaattcattgtaccaatttccagttcttccaggtatatgaaaga

SEQ ID NO: 173742 - DNA, 597 bp, Homo sapiens
agcagtggctgagtgtcttcctggctctcggttcgggacgggtccactgtggttctagcttctgccaggtgattattgtccatgcatttctttaacattgtttcctttgtcttgctagcctaggggtcatcaaacttttcttgtaaaggagcagagagtaaaatattttagtctttataggtcatacagtctctgttgcactcaactctgtgagtgggtgtgtctgtgttccaataaaactttatttccaaaaactagcagtgagctggatttgggttgcaggctattgttggctgcctcctgcctagcmtaagggttgtagtagctgcctgctgttgctaatgtttccattgcttcattaacctgtttggtttctcaggtgtttcatcacatcacagtttccttcattcattaacctatgtcacaaatacttaggtgtttgcagattttctggtaggactctggctgattcaaggttatactaaggattagaattgctgggttgtaagttatgtacattttcagccctaacaagatgtcagattattttctaaaattcattgtaccaatttccagttcttccaggtatatgaaaga

SEQ ID NO: 173743 - DNA, 596 bp, Homo sapiens
atgctacttcttcagattgtctttattctcttccactggtcactttgtctatctgtgtgtcagtaaacattaccttaattactacaactttctaagtcttggtatctggtgagcaagtctactcaacttattattctctttcaggagtatcttggctatcctttggcctttgctcttccatatatattttattttattttattttattaatttatttttcrcgacagaatcttgctcagtcgcccaggctggagtgcagtggtgccatcttggctcacttcaacctccacctcccgagttccagtgattcttctgcctcagcctcccgagtagctgggattacaggcgcatgccaccacacctggctaatttttgtatttttagtagagatggggtttcacatgttgcccaggctggcctcgaactcctgacctcaagtgatctgcccgcctcggccccctaaagcgctgggattacagatgtgagccactgtgcctggccccttccatgtatattttagaatcagcttgtcaagttcctatttattgggaacctatcatgtatccagcgaaagaagagaagttttagaatataac

SEQ ID NO: 173744 - DNA, 596 bp, Homo sapiens
tttgttgttgttggtttgttgttgttgttggtttttgggataaggtcttgctccctcacccaggttggagtgctgtggctcaattatggctcayggcagccttgacctcccacttcagcctcccaaatagctgggactacaggagtgcaccacgttgtctggctaatttttgtattttttgtagagacagagttttgctatgttgcccaagctggtctggaacttctgggcttcagtgatctgcccgcctcaacctctcaaagtgttaggattacaggtgtgaaccaccatgcctggcgaactttagggttttctagtgtaattttcccactggggctttcaagaaaatcctcatgtcttttctcaacattgataccgctaataccctgggggctgctgtgatgtatggactaagcggaagggtcacttccattgtgacctggactcactgcagggtcctttcctgctctgaatcccactcaaagcaggcagcttttcatgtaactcagtacatgggttagagcagtgtttcctggtgtgaaatatgctgcctttagaatctgaagaggcctatcaggcactgtgtttccttcttt

SEQ ID NO: 173745 - DNA, 408 bp, Homo sapiens
ctgtttgtgcactaaaaagcatgttctgtttccctctttgaaggaggagggacttgataatggactggttccctccacttgttaaaattctcatcttttagtatagaaaaaaaccaaattgcatggtaaagctgtctttattttctccatgactaaacactgcatttctcagcacttaacaagtcattgttctgaaaaattggtttcagatcagaccctgcttcctaatgaggcagtgacttagttcrtaatactttttttttttttctggactctaaacagtagcaggcaggaaaaagggaacaaaagatggatgggaaataaaattgcaccattgcccctttccagtggggtctgtctgtgagtaataaagcgttgatcgaagagccgggtctttgattggaattc

SEQ ID NO: 173746 - DNA, 385 bp, Homo sapiens
gaggcatctcaggatcatggtaaatgcagattctgattctcaaggtcttgggtagggcccgagattatgcattcctaacaagcttccaagatttgccaaggctgctggtccatggaccacaccacaggcagcaagttgtaacgaaagaacatcagagttggaagcgtaagacttagacccaagtttcagttgtgcattgatgagtcctgtgaacttggtcagatttcactctgagtctgtttccttacctgtaaaataggtttataatcatatctctatatgcaccaagagccttgagactgttgtccaccattcctttcctagtactccatcctaaacatrtgtacagatgtatgtgtgggagcattttttagcaaacatgttc

SEQ ID NO: 173747 - DNA, 504 bp, Homo sapiens
aagggggccagaggcagaaggaaatagtttgtatatttgtccctgcccaaatttcacattgaaatgtaatccccaatgttggtggtagggcctagtgggaagtgtttgtctgatggtggcagatccatgatgaatgacttggtaccattaatttggtgatgagttgtctttctcacttcacatatccagttgtttaaaagtgtggggtccctccccccaacccctgccttgctcctgcaaaacaacaatgtgaagtgcctgctcccacttcactttccgccatragtaaaagctccttgaggccttcccagaagctaagcagatgccagagcaccatgcttcctgtacaacctgcagaatcatgagccaattaaaactcttttctttataaattacccagtctcagatatttctttatagcaagaatggcctactacacaaaattggtattgtatgaactgtactccagttggagtaaatttgttttttgacacaagcgtaggt

SEQ ID NO: 173748 - DNA, 502 bp, Homo sapiens
attgacaaggacataaaaaacagaagagactgagaaagtgtcacaaatggaaagagacaaggaaaacataatgaccccatgcaatgtggtattctgcactggatcctgggacacaaaaaggacattggtgagaagctggaaaaatctgaataaattctagcttygttaaaaagtattgcaccaatgttactttcttagttttgatcagtataccaaatgttattactaccaggggattctggttaaaggacataagggaacttactgtactatctttgcaactctttgaataattttagatttataatagacatgcttttcttaagactgatcataccaagttgttgaggacacagaccaacaagaactgtcatatactgttgcttgaaaaatgtaaaacagtatgtagtacaacaactttagaaaacaatttggccacactgggcacagtggctcacgcctataataccaacactttaggaggaagagacagaagacttga

SEQ ID NO: 173749 - DNA, 524 bp, Homo sapiens
agcctctggaagtggaaacagcaaggaaatggactctcccctagggactggagaaagaaatacagctctgctgatttttcagtccagccttggattttcagctacagaatataataaaaggccaagcttaaattatatttcgtcaattagttggctttgacatatttagcaagagtaaataagtctggtctkgattttagcccagtgtgagccatttgggtttctgaactatagaacagtatgtatttgggttattttaagccaataaatttgtggtaatttgttacagcagtcatagaaaatgaatacatgggatattggggaaacactgcaaaatttgtagtgagaacacctgagtttcagtctcagcattttcatgtatgaaatctccactgcggctgcaccactgcctgagagagtagattgtaaaaaaaaatggactggctctgtcttcttccaagattccattctcccactggtacctccacttttagcagaacttaccaggaatacagataacaaga

SEQ ID NO: 173750 - DNA, 521 bp, Homo sapiens
gaacatttccaggacttttattttcgggggcttgagctttctgytttccaaagcagaagtcctagagtggttgtggctgggcccagggttagaggagtccaggctgtggttagagcccagtctctggataacgttgggtcctgacggttggcatgagaccatcggggatggggctgggcaggatccaggcttctgatctcagcattctcttactggttccttcacacttgtccctgttgagggctttaagatgatctccgcttgattcacgaggacactggggcttggagagctgaagggacttcacatcaaacaccgagtgatgaatcctgttccttttggggaaagggagatcattgattgctttgttctgattgtaaatggaaaacatgaagaaattatagaagaggataagattggatagataggaggataagataggatttctcattggagaaatcatagaagaggatgagagtgaaacaacattccccctaatcccagcctccagggttaatttc

SEQ ID NO: 173751 - DNA, 535 bp, Homo sapiens
attgttgcactttcagcctgtgtagggcaaacacaaatccttaaacaaaaatcatgttatcaaaaactgtcagttattttggtggccacatgcaaccatgtgattactttggtcatactatttacaaattgttggcaaacttgatgtaaccttatatggtggttttagtcccttcttatggttggcagaagggcactgaactgttgggtgaaagttagttagcaagtaagattataaggaagacacaaaagacagtggcaaagagggttgattaaatctataagtttttatgtgaggactttgtaagtcagcataaaaatgaaaagttgtttctcagttgtttttgcttttaactttgcccccaacgtttaaagggagtgatctgctttacatgatactatgcaatgcttgttttccaactatgttgaataaatagtaatatttatcagtaaatactcctttccaacttccttttytttttttttttttttgagactgagtctcactccatcacccaggctggagtgcagtggtg

SEQ ID NO: 173752 - DNA, 535 bp, Homo sapiens
attgttgcactttcagcctgtgtagggcaaacacaaatccttaaacaaaaatcatgttatcaaaaactgtcagttattttggtggccacatgcaaccatgtgattactttggtcatactatttacaaattgttggcaaacttgatgtaaccttatatggtggttttagtcccttcttatggttggcagaagggcactgaactgttgggtgaaagttagttagcaagtaagattataaggaagacacaaaagacagtggcaaagagggttgattaaatctataagtttttatgtgaggactttgtaagtcagcataaaaatgaaaagttgtttctcagttgtttttgcttttaactttgcccccaacgtttaaagggagtgatctgctttacatgatactatgcaatgcttgttttccaactatgttgaataaatagtaatatttatcagtaaatactcctttccaacttccttttctttttttttttttttgagactgagtctcactccatcasccaggctggagtgcagtggtg

SEQ ID NO: 173753 - DNA, 410 bp, Homo sapiens
atatcaaagttccatgaataacctatcatggctggcctcattatccaggatttggagatgagaaaccaaggattggagaaatgtccagaaagtggcacaggcatagaatagagaagccaggatgtaaaaccaggctttgygatggtggacaaaccagagagaacctagatcaagagctttctccagaataaaaaggttttggctgtcttcaccttttgctagttgcccagacattattcctaaccccattccctcctctcaccacaggaaacttgatggtattacgttatattatgtagaattttaactgtattttttatgttgtagattatctttttacttccttctttttggatattactttaaacacacacagacatgtgtgtgcatgggtaaaacttagtgcaata

SEQ ID NO: 173754 - DNA, 410 bp, Homo sapiens
atatcaaagttccatgaataacctatcatggctggcctcattatccaggatttggagatgagaaaccaaggattggagaaatgtccagaaagtggcacaggcatagaatagagaagccaggatgtaaaaccaggctttgtratggtggacaaaccagagagaacctagatcaagagctttctccagaataaaaaggttttggctgtcttcaccttttgctagttgcccagacattattcctaaccccattccctcctctcaccacaggaaacttgatggtattacgttatattatgtagaattttaactgtattttttatgttgtagattatctttttacttccttctttttggatattactttaaacacacacagacatgtgtgtgcatgggtaaaacttagtgcaata

SEQ ID NO: 173755 - DNA, 410 bp, Homo sapiens
atatcaaagttccatgaataacctatcatggctggcctcattatccaggatttggagatgagaaaccaaggattggagaaatgtccagaaagtggcacaggcatagaatagagaagccaggatgtaaaaccaggctttgtgatggtggacaaaccagagagaacctagatcaagakctttctccagaataaaaaggttttggctgtcttcaccttttgctagttgcccagacattattcctaaccccattccctcctctcaccacaggaaacttgatggtattacgttatattatgtagaattttaactgtattttttatgttgtagattatctttttacttccttctttttggatattactttaaacacacacagacatgtgtgtgcatgggtaaaacttagtgcaata

SEQ ID NO: 173756 - DNA, 410 bp, Homo sapiens
atatcaaagttccatgaataacctatcatggctggcctcattatccaggatttggagatgagaaaccaaggattggagaaatgtccagaaagtggcacaggcatagaatagagaagccaggatgtaaaaccaggctttgtgatggtggacaaaccagagagaacctagatcaagagctttctccagaataaaaaggttttggctgtcttcaccttytgctagttgcccagacattattcctaaccccattccctcctctcaccacaggaaacttgatggtattacgttatattatgtagaattttaactgtattttttatgttgtagattatctttttacttccttctttttggatattactttaaacacacacagacatgtgtgtgcatgggtaaaacttagtgcaata

SEQ ID NO: 173757 - DNA, 548 bp, Homo sapiens
gcaagggcataaacattcagatcatagcaggttataccacgtgttttacatttagggagtctttttactggcccagaatttatttcagtattcatccacgttttccacaagtcctactatttatttattttaactttaatttaaatatcacctaccttaggtagaagttttcctttgtgtaatataatataaaaccgacatttcttgggggcataatagtaaagatgttaacattttttggttctttttggatgctgtatttgtgcttcttctgaaagtgatgtgtgccaagatggctcatgtaacccagttttgactaggctattgatmttctgtctggttaatttattgaactggcttaaagctatacatattttcttttagttaactatgtaagatattctagatatattgtctactgattcataatatcactggtaatggatgattaatgagtactcttcttctttgtataacttgaatttattttttcctgtcttataaaatatctggaatgtacaaaacaatgccaaggatgaatggttggg

SEQ ID NO: 173758 - DNA, 589 bp, Homo sapiens
ctattgatcaattatcatgtataattgattataattacaaaatgccaggaccctgttggaattgtctgcttcatgctttactttgtctgagtagcttttgaacatctctgcaaaatcacaaccacagctctttacattgtattgatctatacmtagactctttatccatatcctttgttttgctgccaacaattcttgagtggactggaaagaattcactgtctctggctctttggttgcaagagtaactttcaggcttctggttttaacaacatggcagactgaaccaataagcatcaccttcttcatacaaatacacaaaaatactggagaagtataaattttaaaatgaacacataaactcaaagaaagggaatgcttaggtactcgaaatgaaagttcagtttgctgataccatactgtccttcagagctattgattataggcctttgggtctgaaatttcttgcctacagaaagacaggagatgcggctttgaatctgtatatggtgggaaccagaactgaatccccagcatgagacatgcacatttaaaagacctgatagactaagagaagcagcgagaaagc

SEQ ID NO: 173759 - DNA, 589 bp, Homo sapiens
ctattgatcaattatcatgtataattgattataattacaaaatgccaggaccctgttggaattgtctgcttcatgctttactttgtctgagtagcttttgaacatctctgcaaaatcacaaccacagctctttacattgtattgatctatacctagactctytatccatatcctttgttttgctgccaacaattcttgagtggactggaaagaattcactgtctctggctctttggttgcaagagtaactttcaggcttctggttttaacaacatggcagactgaaccaataagcatcaccttcttcatacaaatacacaaaaatactggagaagtataaattttaaaatgaacacataaactcaaagaaagggaatgcttaggtactcgaaatgaaagttcagtttgctgataccatactgtccttcagagctattgattataggcctttgggtctgaaatttcttgcctacagaaagacaggagatgcggctttgaatctgtatatggtgggaaccagaactgaatccccagcatgagacatgcacatttaaaagacctgatagactaagagaagcagcgagaaagc

SEQ ID NO: 173760 - DNA, 459 bp, Homo sapiens
gagttctcaatatcctgcaagtcacagattctatccccatttatgcacacgattgtagttgtctcatggttttcagtgttcttaatgagctgttaacaagctgtcaattacctatgcaaattagggaggccaacattgaggggtggctgtatctgcagttaaagagtgctaccttggaatgttatgaaatcaatcattcttgctttaatagctatctttactcatgtgtctcttgtcatgtctgggtcttttttcattataatacctaccrcataagaaaagccctctgggaattttgaaggtgcttagaaaggagcttacccaaatctttcataacttttaacttggcttaaagattgcctaaaatgcaggcttactttttcacctgtctttccaggcacactaagacattctgtggaggaaggaaagccattgctattcttgtgctgatgaaaagtg

SEQ ID NO: 173761 - DNA, 498 bp, Homo sapiens
aacaagttacagccaatgtcaaggttgtttatccatacaaagcataaacaatatattttactttaaacaaaaaagtgctaatgttctttaaaataatccatattttgatccactctgccaagtaaaaataattttgcattgaatctgtcagctgtcaagacacattatgtcccataaaaaggacagcagctttgggaagaaaagcaccatagtagtagacctcctcgtttattgaatgaagcatgagattagtttactcaaggtattcatgtaaacatggacacttaaaaaataaatagaaaagaaagaaagagctaaatttaccagatgaggaagamacttagctgcagagatatttctaacttatagtcctcacacacagtgtgagaagtctgaaaaatgaaattttagtcattagaacctgacagcttccagtcataatatgctgacatgtgtaacgggaattaagagattctaccagcggaatgaacgttcata

SEQ ID NO: 173762 - DNA, 564 bp, Homo sapiens
catgcagaaatctcacaactcattcacaagatctctagccctaacagtgtgaaaccatgaagtgtcaaccctggtccccctcccacctcttccagggtcccctctggacctccgggagagcatccttctgtcctggtcctgggtccraatcagccactaagaaggcaggagagcaaaagaccattgctccccaggagaagttgcagaaacagaggtggcttggaggtcaaggtaggtccaggttgatttcttgagaagtcacttatttcagtgcagccaactgaggacattagtaggagttttgctgagactcttgaggattttaacagcctctggacaagccctgcataagcctcatcttcagcagttctgtgagacatccaagatggccctgctgcccatctgagagcttctcatttctcacataaaaacacctcatatagatttttttagacatagacaaactaattctcaatttatgtagaaaggcacaggcccaagaatagctaaaacaaccttgaaaaagaagaacaaagtgggaggaatcactccactcaatattaa

SEQ ID NO: 173763 - DNA, 564 bp, Homo sapiens
catgcagaaatctcacaactcattcacaagatctctagccctaacagtgtgaaaccatgaagtgtcaaccctggtccccctcccacctcttccagggtcccctctggacctccgggagagcatccttctgtcctggtcctgggtccgaatcagccactaagaaggcaggagagcaaaagaccattgctccccaggagaagttgcagaaacagaggtggcttggaggtcaaggtaggtccaggttgatttcttgagaagtcacttatttcagtgcagccaactgaggacattagtaggagttttgctgagactcttgaggattttaacagcctctggacaagccctgcataagcctcatcttcagcagttctgtgagacatccaagatggccctgctgcccatctgagagcttctcatttctcacataaaaacacctcatatrgatttttttagacatagacaaactaattctcaatttatgtagaaaggcacaggcccaagaatagctaaaacaaccttgaaaaagaagaacaaagtgggaggaatcactccactcaatattaa

SEQ ID NO: 173764 - DNA, 602 bp, Homo sapiens
tggagttttttttttttttttcgatctgggggagaattataacctcttcgattaaatcttatgggccctttcccctcacaggtatgtgtgtgcatatgtgtgtgagcccatgcatgtgtgcacacacactcacacatgctcatactttcagaggtgggtcatcagtagagtccactcaagcacccccatagaagagagaagaacagtgcaggggagaccttggcactcccaataatcttagtgccctgtctccaagtggaataacttggcttttattagtttcatatttcaratatttgtttaaggtttcatttggaaaaggggtttctctgctttaaaagcaatttaaaatccactgatgcattagaaataaaagagcaggggatgagatctgggggacaggacctgcctttaagaccccggtttgagatttactagctacgtaattttcctcattaagcgtcagtttcctcctctccaaatcagttttgggaggtgagtgggaaggaactctgcttcacaggtgtgctgtgtggatttagtgcctgttctgcctccaacacaaagtctagtctgttgtttcattggcactggacaaagct

SEQ ID NO: 173765 - DNA, 603 bp, Homo sapiens
gtccatgttctgatcagagtccacaaccaccaaattcagagacttgaagcaaattctctgggccccagtttgcttgtctattaaaagaaaatttcttttattttctcttaattgaagagtctttccctccmaggccagttgtgggaatcaaagtggatgatgatctttcttgcctggcttacattttccaagttttagtctcagcttcctctgagaaatcttccatgacctcccctcccagccctagtatcaggttggatcccttcccttcctctggactccaaagtcatctttgagttctgctgcccagaatgtggctatcctgttgtcattgctcgtttattggcatgaatattcctttagattacaatccccttgaggccagggatgtatctctcagcactataccttcagcggatagcagagtgcgcttttgaaaaatattttccaaggacactttctctcttttctgccagacccagctccatgatcttaagtggtggcaaagatgtgaatgaagtaggtttaatattcccagaaacactatttattttgcaattgagtttctaaaaggtattatctaggaggaaagaatttggagat

SEQ ID NO: 173766 - DNA, 452 bp, Homo sapiens
ccccatgattcaattaccttccaccaggtccctccctcgcacaacacatggggattatgggaactacaattcaagaagagatttgggtggggacacagagccaaactatatccatttgttacaactgaggaacctatctctacatatcattatcacccaaagtccaaagttggcattagggttcacacttggtgttacacattttatgggtttgaacaaatgtacaatgacaatgtacccactgttaccatatcatacagagtagattccctgccctaaaaagcctctgtgctctgcccatctctccccaacccamttcctggaaaccactgacatttctactgtctccgaggttttgtcttttgcaaaatgttctacagttgaaatcttacagcatgtagtcttttctaatggccttctttcccttggtacattttttcttttgtaagttt

SEQ ID NO: 173767 - DNA, 610 bp, Homo sapiens
gcaggggagtacatcaaccacacaggtgcgatgtttgtgaacaagagtcccactcaggtccaatgctgtaagcagtccccgcaattatgaatctaaaaagtaattaacaccaaaggtggccacattgctttcccacttagaggggcaaatgagagtgcacattagattaagtacagactaacacagcatatgcaaagtcgggagtttcaaatgaaaaaaacaaacctggattgaagtatccgagaggatacatttccaaccatcargataataaggaaaaaggtcaactggaaatggacttcaacaggacctggcagtttctaattctttgagaaaaatattaactttgagacacattaaaaatcaggggcgggcatggttgctcacacctgtaatctcagcacattgggaggctgaggcgggcggatcacttgaggtcaggagtttgagagcagcctggccaacatggcaaaaccccgtctctactaaaaatacaaaaaatagctgggcatggtggtgggtgcctgtaatcccagctactcgggaggctgaggcaggagaatcagtggaacctaggaggcagaggttgcagtgagctgagattgagcca

SEQ ID NO: 173768 - DNA, 610 bp, Homo sapiens
gcaggggagtacatcaaccacacaggtgcgatgtttgtgaacaagagtcccactcaggtccaatgctgtaagcagtccccgcaattatgaatctaaaaagtaattaacaccaaaggtggccacattgctttcccacttagaggggcaaatgagagtgcacattagattaagtacagactaacacagcatatgcaaagtcgggagtttcaaatgaaaaaaacaaacctggattgaagtatccgagaggatacatttccaaccatcaagataakaaggaaaaaggtcaactggaaatggacttcaacaggacctggcagtttctaattctttgagaaaaatattaactttgagacacattaaaaatcaggggcgggcatggttgctcacacctgtaatctcagcacattgggaggctgaggcgggcggatcacttgaggtcaggagtttgagagcagcctggccaacatggcaaaaccccgtctctactaaaaatacaaaaaatagctgggcatggtggtgggtgcctgtaatcccagctactcgggaggctgaggcaggagaatcagtggaacctaggaggcagaggttgcagtgagctgagattgagcca

SEQ ID NO: 173769 - DNA, 388 bp, Homo sapiens
ataccattcctgaggggtcttgaggcttctttttcattgaaaggagcagcagtgcggttctatttgttgatgcgagagatggagtcacaggtgccatcgatgaaccaggagataaagtcaaggtgctgtcaacggtgcctcacaccagaggacctgcttcctggttcatcaatgtcatcttctcactgcatcctctcctggtggaagggggcrgcatctctctgatgcctcttttcataagggcactaatcccattcatgaggttccaccctcataatctaatcacctcccaggggccccgccacctaatacatgggggttaatatgaatactagggggatgcatatattcaagacacagcagatgggaatgtggctttggaagcaga

SEQ ID NO: 173770 - DNA, 463 bp, Homo sapiens
ccaaaagcaatttacaaattgaatgcaattcccttcaaaataccaccatcattcttcacacaactggaaaatacaatcctaaaatgtatatggaaccaaaaaagtgcccacatagccaaagcaagactaagcaaaaataacaaatctggaggcatcacattaccctatttcaaactatactataaggcgatagtcaccaaaacagcatggtactggtataaaaataggcacacagaccaattgaacagaatagagaacccagaaataaacccaaatacttacagccaactgatctttgacaaaccaaagaaaaacataaagtggggaaaggataccatatttaacaaatrgtgctgggataactggcaagccacatgtaggagaatgaaactggatcttcatctctcatttttatacaaaaatcaagagaagatgtatgaatgactaaatctaagacctggaa

SEQ ID NO: 173771 - DNA, 474 bp, Homo sapiens
tggtttcttctagtggatgcatctggcctagttctttattgctgccctcagatgatgacacatagaagagttgggccaagttttgggtgatggtctttcactctgaaagagcatatagtggctaatayatgaggtgcattgagacaaccaagagaagtcctggtagccccatgggcaaggtcatggagctggagcagagagagataagtgccttataggggtgagagttcaacagcttagttatggcactatccctacagaagaagtaatattcacttgtaggagccagtctgtgaatctcacatcggcaagggggcaaattaagaaggtcagcaatcctttattatgaagcacaggtaatcacatattttttcttttttttttttgccattccttaggctttagtcagtcacatgcttatgtttcatcttgtatctatgaaaggatacctggttctcattttacaaaattttt

SEQ ID NO: 173772 - DNA, 536 bp, Homo sapiens
agcttcttgactccaaggcctggctcatggataacatctttggacccacctggggccaggaggaaccctccacccagaaaataaggacaaaagcctggctgcatttgccayctgttgattgtaaaggcctaaggccttaagtaaacataggtggtagccaggcagtggtcactgagggctttgggtgaaacccagtgctatgctggctttacatctgacccagcacagtcccagtagtgatgaccacaggggtacttgtgtcatccgtctcccatctccaggaaattcaacacacacacacacacacacacacacacacagagagagagagagagagaagccagagactctgtttgagaggaactaagggaagagaacaagagaatctccctggtaatccagggaattctggatcttacccaaggccaccaaggcgttacttctactagtctgcaagagccacagtattgctgagcttgggatgtcccctaaagtagatatggctgtggtgaccaaagatctagatcacaacaccc

SEQ ID NO: 173773 - DNA, 535 bp, Homo sapiens
ccactactctcaccctactttctcccatttgtgcccctatgatagcagactgacttgtcatctcctcagcttttgtaaggagataataatttttttaaatgtattagatctgaaattctagcactgtgcaagtcaaggccctgtcatgagagatgatttatgtattgttttagttttgccaaatcgattctgaatgagctgctgaaacacctgcctgaaagtgtggaacttacaagatagtttttctgaagctgatcaacctaactgtgtagcaccataaaaaatttaaaatgtattctcttcattgatcccataaacataacacattgctttgaaaacatgtcctcttttttagctgttgactattattagtaatgaacagctgcatttctatttcctgtgtcttatggatgtcatctaatggagaccttgyatgattatgtaagttatcagtaatatgaaagtcactatttatgatatgaatatgatctcctcttaaatcactcattagttcttttactgttaatgctaaaaa

SEQ ID NO: 173774 - DNA, 593 bp, Homo sapiens
ctgcgcctggccttacctaggtcttttaagtgcgaatattaacttgaagtcccactgtatttttaaaaattatatgggaaggaagactttttttatagatgggcattttatcttaaaacgtcccttaaaatatgaatgtcccttcaaaagaagacaaacttattcctatcacctgttcatcaggtttyacaaaatcagaactcaaaatcttgaatactttaataattacatgattaaaaaaaaaacttggtaccaatatgttagatgcattgcatttgtgagttaattttcatatcttcctgtgaagaactgcagactaccagatattcatagtgcactagactgaggcatataggaaaaagcaagataaagaaactcgcacaggccactccttctacacacattctacaaatggaaatttagaattatattttatttggtgaattacattttaaaatgttctcagcaaggaatttgttattatgtagaaaacttcagattatcatttttttctaaatgacatcaaataaaacactcatctattaaaatcatcattaagtggaatagtgattgccagggtttgggagtagggg

SEQ ID NO: 173775 - DNA, 409 bp, Homo sapiens
attccctcaaagtggaagagggacccctcaaaaaaccatataagagtgtaaaccccttccacattgcatatggctgactctatgactcattttgagaatagaatgtggcagaagcatatagtaacttccaatgctaggctttaagagatcttcaaattctgttttgttttttgttttttctttctttttttggcttgaaacatttcttataaacctagctcccattatatgagaaagcaagtaccackgtggactgttctctgtctgggttgatttctcaagccaggctctaagaatttcacaacagaatgttaactaccttttgaccctgtggaatctaaaatacacaaacccatctttaatcaccaacgtggaagagccatctcttcaaatgtccattagagaattc

SEQ ID NO: 173776 - DNA, 494 bp, Homo sapiens
aatgtttttgtccttcattctgttgatatgatgtatcacattaattattttggacatgttaaatgattcttgcatcccagggataaatcccagttcgtcatgatgaataattttttaatatagtgttgaatttgaatttttagtgttaaggatttttgcatcaatgttcttcagagatattgcctgtagttttctttttttgatgtgtctttgtctggatttggtaccagagtaatactggccttatagaatgcatttggaagtattcccatctcctctattttttggaatactttgagtaggattggtattagttcttccttaaatgtttggtataataaggcactgaggccattgggtcctgggcttttctttactgggagacatttcattatgacttcagccttgttacttgttattggtctgttcaggttttggacttcttcatggttcaattagccagttctgtrtgtctaggcatttgtccattcttc

SEQ ID NO: 173777 - DNA, 337 bp, Homo sapiens
ttggatgtattttttgactaccaaaatttaatgacaataagaaactaaaagttaaagttaaatttaagaattatcttaaataattttaataactgttggaccaaaagggaaataaaagttgttacaacaggatgcaaagaagttaatgaaaatgaccagctttcttataagatgctggcaaagagatattcatggcttttaaaacttagctacttaaaagaaagaagaaaataaaaaattttgatrtttaacttacataagaagattttaagaagaacataatggaagaatgcagaaagataaaaacagaactgaataaattagaaaataattgata

SEQ ID NO: 173778 - DNA, 538 bp, Homo sapiens
aaaactggctgacatcaccagctgctaattgtggagccctaaggctttgagtcaacataagcagtagcctggtagtggttacagtagaccttargtgagacccagtgctgtgctggcttcaggcctaacccagcacagtcccagtggtggtggccccaagggtgcgtgccatcaccacacccccagttccaggtaactcagcacagacagagacaaacttcactttgggggagaaagtaagggaaaagaacaagtctttgctggtaatccagataattcttccagatcttatccaagaccaccaagagagtacctctatgagtctgcaaaaaccacagtgacattgagtttagggcccaattcccttcaaatacctcaaaagccttctcaagaaggatgagcacaaacaagcccagactatgaagactacaataaaaacctaactctttaatgaccagacaccaaagaatacttgcatcagcaccatccaggaatacgtgatctcaccatatgaactaaataaggcaccagggatcaa

SEQ ID NO: 173779 - DNA, 629 bp, Homo sapiens
tgttctggccataggagttctgcagcaaaataagaagaaaccccttataagcagatatcattgtgtccttttttgttgttttgttttgaaacaggaatactgacagtggtttcaattataattagaaagtcagaatatcctacacactgctgaagagctrtataacctgcatatccaattctgtgatccttttggataaatagaattgggattaaacaacttctgaaggtcctttttaagtcttgtgattttatattctcacttaaattaatttacaattgctttaactttaaagatcaggctaaaaaaatatctgggcaaaaaagtatgtctaaagaattgaaaccaaaagtcaaatattaataattagagaaggcattaaattttcaaaacactaatctgttttttataaagaaaaaaattagtaagatgtatcacttgagttaacatgtaaaaaaaagtccaaaattgacctattgaatttatctaatatttggtccaatagcaaaaagaaagaaaaaggaaatgaattcatttatgagattgatcttacccagtgactactatgttaggaatgcacttgaatttggggaaaagtgattcaatattttttcagcataaaatgtttt

SEQ ID NO: 173780 - DNA, 400 bp, Homo sapiens
agagagagaaaggttctttggacacaagcacttatgccaagtgtgctaagaagaggttaattgtgacacactcctcccaccttgcccacccaacagccatctagtgcctcactagctacccatgtcaaaggctgagctgaattgggagcaggtggacacgagcaaacaggttaaagcacacagggaaacctaagtgtctccaagctcctgtggagggatgagacagccagytgagcagccactctttcatcttcactgtcttggccttggttagggttggaatatataatttggaccaacttcaagactgttttaacattctcatggaatctatttgtgtacatgattagccaaacataaaagctattagagaaagattttaccactccttccttctact

SEQ ID NO: 173781 - DNA, 439 bp, Homo sapiens
  misc_feature (1)...(439): n = A,T,C or G
tttttcattttcaattggaaattaaaagtataagcaattcctccatgtttgtattactccttctttgaaggttttcntgctgttccccatctctgagcactatgacccccaactcagggccctgctgggcagagctgaacacttctctatgtcaccaacaccgtccctatcacatcctcctagcacgacacatgatcacataaattggcatgtcttcatgtgcctgattcctcctgaactattctccttccgccckccttattcctccctccctctgttaagcaccagaaacaaatgtgacctaaaaggaaggccatgagcctggaagtcgggtagagatggttctaacctcagccatactgtgactcactctggactaaatggttttacatcactatgactttcttcatcagtaagatagaggaataaatacttcatc

SEQ ID NO: 173782 - DNA, 583 bp, Homo sapiens
ctgagtggctaaataacaacacacatttatttcttccatttggggaggtagaagttcgaggttaggaggccagcatgggcagactcttggtgaggactcttttgctggtttgcagacagccactaccttcttgctctgtctgcttacagcagagcaggagcaactgagctctctagtctcttcttataaaggcaccactcccatccggggaactccacccrcatggctgcatctaaacctaattaactcccaagggctccatttccaaataccatcactgtggggattagggcttcagcatatgaattggggcaggaggtaggagcacgattcagcccacaacactcctgaatggactgatgaaactcaagttcaggggagaaaccagagtctttctggtttgcgtgaccatcacactggcaagcattgcagtatgtactatggagccacctctcagtacggaaacagccacctcatttcatagaagcctgcaggagaaccgctcctttggaacacaactagaagaggcagccctgtcctctgtgtgtgaagatacaagttgagtgaccggggaatggaggca

SEQ ID NO: 173783 - DNA, 583 bp, Homo sapiens
ctgagtggctaaataacaacacacatttatttcttccatttggggaggtagaagttcgaggttaggaggccagcatgggcagactcttggtgaggactcttttgctggtttgcagacagccactaccttcttgctctgtctgcttacagcagagcaggagcaactgagctctctagtctcttcttataaaggcaccactcccatccggggaactccacccacatggctgcatctaaacctaattaactcccaagggctccatttccaaataccatcactgtggggattagggcttcagcatatgaattggggcaggaggtaggagcacgattcagcccacaacactcctgaatggactgatgaaactcaagttcaggggagaaaccagagtctttctggtttgcgtgaccatcacactggcaagcattgcagtatgtactatggagccacctctcagtacggaaacagccacctcatttcatagaagcctgcaggagaaccrctcctttggaacacaactagaagaggcagccctgtcctctgtgtgtgaagatacaagttgagtgaccggggaatggaggca

SEQ ID NO: 173784 - DNA, 524 bp, Homo sapiens
aatgtgcagtttcaggcaagtcaaggaagatgccctaaggatgtgaagtgccaaccgagacctaaagaatgaatgggagttctacagctcaaacacctgggaaagaagctctgagctgtagatctgagcacaggggtgcagtggacggcatcctcaggaacatctcctgggtgagggaaactgcatcaagcaaagggaaaagtggcaacagaggcctcagccaagcccacaagaactctggagctgagcaaacttggcagaaatgtccccgacaaggcaagaagcctgggactttgtacccttacatcaaccagtcataaactgatatgcagtagctcccttcagtttaggacaatccatggggaaaagactcagctgtcagccaatgacagtcatggcagttttacaaatgaatgctttacaaagtgagcacttccctcytcccctccagcatccctaaaaaggcagctaaaaaggaagggcagctctgccaaacaggggggaaaagcacgtgcaaaggcctt

SEQ ID NO: 173785 - DNA, 455 bp, Homo sapiens
ccagtgtcaattcatctcattgacattgcttggcttctgccactaagctgtgattgctggtgtgaatggactctagtgaggagagctggagttagcaaasacatgaggagtttaaataatagttcttgtcaagcagtctcccttcacatagtagggcttctcacaggaagaagcctgactaggagcatcaggtttgggggccagaggcagctaaaggctggtatacaggatctgggaactagaggcaggaaagggaatgctctcaaaatagagaaatggaaagaaagtgaatatgtcattgatgaataatgttttccttgaaaatttgccccaggttatccacatattcaaaaggggatgcaaactcaaaagaataaatgtcaacctcttagaactattgggtgttttttgaattgaactaagatggtggacacatttgcaatttgcatgaattc

SEQ ID NO: 173786 - DNA, 465 bp, Homo sapiens
gaattctggttgaatcagtgatgtggtctatgactccagtgtcaattcatctcattgacattgcttggcttctgccactaagctgtgattgctggtgtgaatggactctagtgaggagagctggagttagcaaagacatgaggastttaaataatagttcttgtcaagcagtctcccttcacatagtagggcttctcacaggaagaagcctgactaggagcatcaggtttgggggccagaggcagctaaaggctggtatacaggatctgggaactagaggcaggaaagggaatgctctcaaaatagagaaatggaaagaaagtgaatatgtcattgatgaataatgttttccttgaaaatttgccccaggttatccacatattcaaaaggggatgcaaactcaaaagaataaatgtcaacctcttagaactattgggtgttttttgaattgaactaagatggtgg

SEQ ID NO: 173787 - DNA, 600 bp, Homo sapiens
aattgagtaatagagtaacaagaagtagaaaggggaagctttagcagctgggccttcacctggtcttccaacaagccccaactcgacaagagccaaagcaagagacaccatttggaggggaagataagaagtcttcacaaggtcttttccggtgttctgctttttcctgggaggcggccttggcgtgtccctgagacctcctgtgatgctcacggctctggcgctgccatttttcttgggtgtcgtctggtgatgtctgcaaggccagctgtaatgtcagggctgtgctcgatagcacagaaaagacagcgtcctggaggagagcttgttggagcagatttacaagggagggtgygggtgtcactcatcgttcacgctacaggacaatccctttcactctgggagctgagtcccaggtgagagctaagttccaggcgagaccagggagtcgaggggactggatttctgcttctctcccaggagctgcgggctgggaaggggaaggaacagagctgaggtgtgacatcgcccccggtttcccctgttgcccaggttatagcttgggtggggctgacttcagaggcaacattagaacctttt

SEQ ID NO: 173788 - DNA, 537 bp, Homo sapiens
aagcttcctctgtaatttccagttcagatcagttgttcatcctgtgcactccagcctcatcctgtgcttaattctaccacaacaaacaacgcagtattaaaattgtctgtgcagctttctctgcagtctggaaagacctcraagagaacagacctgccttatttactgtgcgagtatccagctagagcctggagctcagtaaatatctgtgatttcactctttctctttctccttccatcccttcccctgtcctcctctccctttcttctttctttccttctttctttcagcacacatcagtacaattccacacaatggaaagagaagagtaaacaaagcaggacatttagaagggaaagtggaggagcaaagtgaggaaatcttatcagaaaaggggtgatcagcaatgtttaatattgtcacaggcaagaaatatgcaggcaaaaaaatcctttacattctgtaactaggacattgcatggagctttatataaagagtgttgggctgggcgcagtggctcatgcctgtaatccca

SEQ ID NO: 173789 - DNA, 537 bp, Homo sapiens
aagcttcctctgtaatttccagttcagatcagttgttcatcctgtgcactccagcctcatcctgtgcttaattctaccacaacaaacaacgcagtattaaaattgtctgtgcagctttctctgcagtctggaaagacctcgaagagaacagacctgccttatttactgtgcgagtatccagctagagcctrgagctcagtaaatatctgtgatttcactctttctctttctccttccatcccttcccctgtcctcctctccctttcttctttctttccttctttctttcagcacacatcagtacaattccacacaatggaaagagaagagtaaacaaagcaggacatttagaagggaaagtggaggagcaaagtgaggaaatcttatcagaaaaggggtgatcagcaatgtttaatattgtcacaggcaagaaatatgcaggcaaaaaaatcctttacattctgtaactaggacattgcatggagctttatataaagagtgttgggctgggcgcagtggctcatgcctgtaatccca

SEQ ID NO: 173790 - DNA, 537 bp, Homo sapiens
aagcttcctctgtaatttccagttcagatcagttgttcatcctgtgcactccagcctcatcctgtgcttaattctaccacaacaaacaacgcagtattaaaattgtctgtgcagctttctctgcagtctggaaagacctcgaagagaacagacctgccttatttactgtgcgagtatccagctagagcctggagctcagtaaatatctgtgatttcactctttctctttctccttccatcccttcccctgtcctcctctccctttcttctttctttccttctttctttcagcacacatcagtacaattccacacaatggaaagagaagagtaaacaargcaggacatttagaagggaaagtggaggagcaaagtgaggaaatcttatcagaaaaggggtgatcagcaatgtttaatattgtcacaggcaagaaatatgcaggcaaaaaaatcctttacattctgtaactaggacattgcatggagctttatataaagagtgttgggctgggcgcagtggctcatgcctgtaatccca

SEQ ID NO: 173791 - DNA, 537 bp, Homo sapiens
aagcttcctctgtaatttccagttcagatcagttgttcatcctgtgcactccagcctcatcctgtgcttaattctaccacaacaaacaacgcagtattaaaattgtctgtgcagctttctctgcagtctggaaagacctcgaagagaacagacctgccttatttactgtgcgagtatccagctagagcctggagctcagtaaatatctgtgatttcactctttctctttctccttccatcccttcccctgtcctcctctccctttcttctttctttccttctttctttcagcacacatcagtacaattccacacaatggaaagagaagagtaaacaaagcaggacatttagaagggaaagtggaggagcaaagtgaggaaatcttatcagaaaaggggtgatcagcaatgtttaatrttgtcacaggcaagaaatatgcaggcaaaaaaatcctttacattctgtaactaggacattgcatggagctttatataaagagtgttgggctgggcgcagtggctcatgcctgtaatccca

SEQ ID NO: 173792 - DNA, 495 bp, Homo sapiens
cctcctgtttctctatttcatgtcagacaaccctagctcccttagctttgcttccagctcctttttcctgatgctttaatcattgctgttcctctcttaatgtgcatcatgcacastatagttctctaaaatcaggccactttaagccatccacaggattttatggaatactaatcagtgtcatgttccactcaacatgcgatcggattttgagagcagtgaacagggtgtcctctgagggcctggggtaatatccccattctgaatcacagaggccagccccgtggggtcagagggttggcctggttagccttgtggagcctgtgttctccaaacagacatttaattactgtccccaatgagtaccctgatcacaatacttattgctccaatggggtctgtgggtggggattgcaaaggggaaggttgccctgcttagctcaaggggagcatctcctgagaaagctgattccgacagaagtgcagtcaactcag

SEQ ID NO: 173793 - DNA, 495 bp, Homo sapiens
cctcctgtttctctatttcatgtcagacaaccctagctcccttagctttgcttccagctcctttttcctgatgctttaatcattgctgttcctctcttaatgtgcatcatgcacagtatagttctctaaaatcaggccactttaagccatccacaggattttatggaatactaatcagtgtcatgttccactcaacatgygatcggattttgagagcagtgaacagggtgtcctctgagggcctggggtaatatccccattctgaatcacagaggccagccccgtggggtcagagggttggcctggttagccttgtggagcctgtgttctccaaacagacatttaattactgtccccaatgagtaccctgatcacaatacttattgctccaatggggtctgtgggtggggattgcaaaggggaaggttgccctgcttagctcaaggggagcatctcctgagaaagctgattccgacagaagtgcagtcaactcag

SEQ ID NO: 173794 - DNA, 495 bp, Homo sapiens
cctcctgtttctctatttcatgtcagacaaccctagctcccttagctttgcttccagctcctttttcctgatgctttaatcattgctgttcctctcttaatgtgcatcatgcacagtatagttctctaaaatcaggccactttaagccatccacaggattttatggaatactaatcagtgtcatgttccactcaacatgcgatcggattttgagagcagtgaacagggtgtcctctgagggcctggggtaatayccccattctgaatcacagaggccagccccgtggggtcagagggttggcctggttagccttgtggagcctgtgttctccaaacagacatttaattactgtccccaatgagtaccctgatcacaatacttattgctccaatggggtctgtgggtggggattgcaaaggggaaggttgccctgcttagctcaaggggagcatctcctgagaaagctgattccgacagaagtgcagtcaactcag

SEQ ID NO: 173795 - DNA, 495 bp, Homo sapiens
cctcctgtttctctatttcatgtcagacaaccctagctcccttagctttgcttccagctcctttttcctgatgctttaatcattgctgttcctctcttaatgtgcatcatgcacagtatagttctctaaaatcaggccactttaagccatccacaggattttatggaatactaatcagtgtcatgttccactcaacatgcgatcggattttgagagcagtgaacagggtgtcctctgagggcctggggtaatatccccattctgaatcacaraggccagccccgtggggtcagagggttggcctggttagccttgtggagcctgtgttctccaaacagacatttaattactgtccccaatgagtaccctgatcacaatacttattgctccaatggggtctgtgggtggggattgcaaaggggaaggttgccctgcttagctcaaggggagcatctcctgagaaagctgattccgacagaagtgcagtcaactcag

SEQ ID NO: 173796 - DNA, 590 bp, Homo sapiens
ccagggtctggggatcagtgtctggatagaagagaaaatacaagagaaagcaagaggttaatgtgggctgaaggcttagaatgagcagttttaggataaaggatagttaggaaaggatgggggatggagaggagggtgcatgtgaggcaggacaaaccaaagagaaagacctgaatgtatctgctatgtctgtgggacatagggaggttctgttcattctgaatggggacttcgagctcaagcctaaaaatgcatcctttcaaatgggtacagaaagaagggctttgacaagtaccatgggctgtgcttgattgaaaggacagacacattcagttgttgttatttgtgattattgtcagctccatcattgatggcactgtgcattttttgaagtaggtctctcccatcaaactgccaggattccagtgatcagagagcasgtgttcagtagcacaagctggattgggtggtgcccactcccggctcgaccacttagctctgtggtgccttggtatcctcatctgtaatgtggggataataatggtgtctgtctcataagaatgttttgagaaacaaatgagaaaacccaa

SEQ ID NO: 173797 - DNA, 576 bp, Homo sapiens
atcagtgtctggatagaagagaaaatacaagagaaagcaagaggttaatgtgggctgaaggcttagaatgagcagttttaggataaaggatagttaggaaaggatgggggatggagaggagggtgcatgtgaggcaggacaaaccaaagagaaagacctgaatgtatctgctatgtctgtgggacatagggaggttctgttcattctgaatggggacttcgagctcaagcctaaaaatgcatcctttcaaatgggtacagaaagaagggctttgacaagtaccatgggctgtgcttgattgaaaggacagacacattcagttgttgttatttgtgattattgtcagctccatcattgatggcactgtgcattttttgaagtaggtctctcccatcaaactgccaggattccagtgatcagagagcacgtgttcagtagcacaagctggattgggtggtgcccactcccggctcgaccacttagctctgtggtgccttggtatsctcatctgtaatgtggggataataatggtgtctgtctcataagaatgttttgagaaacaaatgagaaaaccca

SEQ ID NO: 173798 - DNA, 556 bp, Homo sapiens
ggaaaaataatttgctgtataaggaagcatcattgcactagcaaatctggcgatcttattgatacatctgcctcagtaatcaggacactgatgatttacatttgaactacagtgcgtatacatcttgcaaattagttttgaaaaaatttgagggctaaaaatatttttcagaacagatatgtctctctaacacataattgtggactatctggttaagccagcgaatgaaattgaagatactaaagataattaaaggatgatttttaaataaaaaagaaacaaaaaacaattacaacaaaaagccatgagcaagtaaaataaytgaagtacaaaccccaaacatgagcaacacacagattctaggtgtccagctcgactcaacactagcaacacacagagtctgggtgttgagttctactcaacactagcaacgcataaattctggatgtcaagttccattcaacactagcaagttccactcaacgctagtcagactccaggtgtagagttccactcaacactagcaacgcataaattctgggtgtcaagttccata

SEQ ID NO: 173799 - DNA, 556 bp, Homo sapiens
ggaaaaataatttgctgtataaggaagcatcattgcactagcaaatctggcgatcttattgatacatctgcctcagtaatcaggacactgatgatttacatttgaactacagtgcgtatacatcttgcaaattagttttgaaaaaatttgagggctaaaaatatttttcagaacagatatgtctctctaacacataattgtggactatctggttaagccagcgaatgaaattgaagatactaaagataattaaaggatgatttttaaataaaaaagaaacaaaaaacaattacaacaaaaagccatgagcaagtaaaataattgaagtacaaaccccaaacatgagcaacrcacagattctaggtgtccagctcgactcaacactagcaacacacagagtctgggtgttgagttctactcaacactagcaacgcataaattctggatgtcaagttccattcaacactagcaagttccactcaacgctagtcagactccaggtgtagagttccactcaacactagcaacgcataaattctgggtgtcaagttccata

SEQ ID NO: 173800 - DNA, 556 bp, Homo sapiens
ggaaaaataatttgctgtataaggaagcatcattgcactagcaaatctggcgatcttattgatacatctgcctcagtaatcaggacactgatgatttacatttgaactacagtgcgtatacatcttgcaaattagttttgaaaaaatttgagggctaaaaatatttttcagaacagatatgtctctctaacacataattgtggactatctggttaagccagcgaatgaaattgaagatactaaagataattaaaggatgatttttaaataaaaaagaaacaaaaaacaattacaacaaaaagccatgagcaagtaaaataattgaagtacaaaccccaaacatgagcaacacacagattcyaggtgtccagctcgactcaacactagcaacacacagagtctgggtgttgagttctactcaacactagcaacgcataaattctggatgtcaagttccattcaacactagcaagttccactcaacgctagtcagactccaggtgtagagttccactcaacactagcaacgcataaattctgggtgtcaagttccata

SEQ ID NO: 173801 - DNA, 347 bp, Homo sapiens
aggtgtgtgcctgagttccctcagtcaggacccttggctccggcttctgaaycggccactgacgaactgcctggtttatgttcatgttgactctcactacacctgcaaaaacttatttctctatgagcaatgtgtttcagaaggacctggacatgtctggctgaggcattttccatggtgatctgctccgtagttgttttggcgtcttgcaggggctactcttgctttatttttttgtattgtggagctgcaggctgaagtctgactctcaggttggtatatcctgcaggctcttgggacaggagctcattctgtggaccgcactggagaaacagaggctggaaggc

SEQ ID NO: 173802 - DNA, 347 bp, Homo sapiens
aggtgtgtgcctgagttccctcagtcaggacccttggctccggcttctgaaccggccactgacgaactgcctggtttatgttcatgttgactctcactacacctgcaaaaacttatttctctatgagcaatgtgtttcwgaaggacctggacatgtctggctgaggcattttccatggtgatctgctccgtagttgttttggcgtcttgcaggggctactcttgctttatttttttgtattgtggagctgcaggctgaagtctgactctcaggttggtatatcctgcaggctcttgggacaggagctcattctgtggaccgcactggagaaacagaggctggaaggc

SEQ ID NO: 173803 - DNA, 347 bp, Homo sapiens
aggtgtgtgcctgagttccctcagtcaggacccttggctccggcttctgaaccggccactgacgaactgcctggtttatgttcatgttgactctcactacacctgcaaaaacttatttctctatgagcaatgtgtttcagaaggacctggacatgtctggctgaggcattttccatggtgatctgctccgtagttgttttggcgtcttgcaggggctactcttgctttatttttttktattgtggagctgcaggctgaagtctgactctcaggttggtatatcctgcaggctcttgggacaggagctcattctgtggaccgcactggagaaacagaggctggaaggc

SEQ ID NO: 173804 - DNA, 380 bp, Homo sapiens
cccaccctctccccaacttaaagctaagacccagagagtaaaggtgtgtgcctgagttccctcagtcaggacccttggctccggcttctgaaccggccactgacgaactgcctggtttatgttcatgttgactctcactacacctgcaaaaacttatttctctatgagcaatgtgtttcagaaggacctggacatgtctggctgaggcattttccatggtgatctgctccgtagttgttttggcgtcttgcaggggctactcttgctttatttttttgtattgtggagctgcaggctgaagtctgactctcaggttggtatatcctgcaggctcttgggacaggagctcattctgtkgaccgcactggagaaacagaggc

SEQ ID NO: 173805 - DNA, 347 bp, Homo sapiens
aggtgtgtgcctgagttccctcagtcaggacccttggctccggcttctgaaccggccactgacgaactgcctggtttatgttcatgttgactctcactacacctgcaaaaacttatttctctatgagcaatgtgtttcagaaggacctggacatgtctggctgaggcattttccatggtgatctgctccgtagttgttttggcgtcttgcaggggctactcttgctttatttttttgtattgtggagctgcaggctgaagtctgactctcaggttggtatatcctgcaggctcttgggacaggagctcattctgtggacygcactggagaaacagaggctggaaggc

SEQ ID NO: 173806 - DNA, 288 bp, Homo sapiens
aggaccctaataatcaggtaccacaaagctggcaaacacttgtgtcaaagtggaaatggactgtgtcaggaggcaaccgatggctctgctagggaggccagaagatgatctgtttgtggcccattaactctaggttcttctgaacacaatagagtctctgctttaatctgtgcaatgtgaacccattatcttcaccctcgcctctagccacaggggtcatccgtaarcccaaggagccatcacaccgaatgtgcaccagcagaagaaagccagtaacagtgtgaattc

SEQ ID NO: 173807 - DNA, 277 bp, Homo sapiens
atggatgtagaaacatcttaagggatttagcttcagctgttttacatamagagagcagaaggtaatacacatctcatgttttctcagcatccaggcacacccaaggcatcatcttcccattagagccctaatgaggggatggccaatcccaggttccatgcagacctcctagcctgttcctcgaactggctttgacctaccagccagttagcttcatccatcaagacgggtatggatatttccactgcatgtttcaatcataggtattgagaagaca

SEQ ID NO: 173808 - DNA, 277 bp, Homo sapiens
atggatgtagaaacatcttaagggatttagcttcagctgttttacataaagagagcagaaggtaatacacatctcatgttttctcagcatccaggcacacccaaggcatcatcttcccattagagccctmatgaggggatggccaatcccaggttccatgcagacctcctagcctgttcctcgaactggctttgacctaccagccagttagcttcatccatcaagacgggtatggatatttccactgcatgtttcaatcataggtattgagaagaca

SEQ ID NO: 173809 - DNA, 277 bp, Homo sapiens
atggatgtagaaacatcttaagggatttagcttcagctgttttacataaagagagcagaaggtaatacacatctcatgttttctcagcatccaggcacacccaaggcatcatcttcccattagagccctaatgaggggatggccaatcccaggttccatgcagacctcctagcctgttcctcgaactggcttygacctaccagccagttagcttcatccatcaagacgggtatggatatttccactgcatgtttcaatcataggtattgagaagaca

SEQ ID NO: 173810 - DNA, 277 bp, Homo sapiens
atggatgtagaaacatcttaagggatttagcttcagctgttttacataaagagagcagaaggtaatacacatctcatgttttctcagcatccaggcacacccaaggcatcatcttcccattagagccctaatgaggggatggccaatcccaggttccatgcagacctcctagcctgttcctcgaactggctttgacctaccagccagttagcttcatccatcaagacgggyatggatatttccactgcatgtttcaatcataggtattgagaagaca

SEQ ID NO: 173811 - DNA, 358 bp, Homo sapiens
agtcatccaaaatgaacaggccagcactgttctgggacccagtctcacagcatcctgccaaagaaataccatgccggcctrcaaaagagatgagctcacctccccactctcctaggattggtgcctatctggccacagggcctcgggatgaccctgtaggtgcaagtcccagagctcctcagggcatctggttgactcatgcatggggcgggtgggtagagggttggagaacatccaagaggggaagacaagctgggctcaggggtcctgctcagatggctctgtgagccaggccacacacaggcattggagcttagaactctgaaggaaggcactgccaggcctggggccccttaag

SEQ ID NO: 173812 - DNA, 358 bp, Homo sapiens
agtcatccaaaatgaacaggccagcactgttctgggacccagtctcacagcatcctgccaaagaaataccatgccggcctgcaaaagagatgagctcacctccccactctcctrggattggtgcctatctggccacagggcctcgggatgaccctgtaggtgcaagtcccagagctcctcagggcatctggttgactcatgcatggggcgggtgggtagagggttggagaacatccaagaggggaagacaagctgggctcaggggtcctgctcagatggctctgtgagccaggccacacacaggcattggagcttagaactctgaaggaaggcactgccaggcctggggccccttaag

SEQ ID NO: 173813 - DNA, 358 bp, Homo sapiens
agtcatccaaaatgaacaggccagcactgttctgggacccagtctcacagcatcctgccaaagaaataccatgccggcctgcaaaagagatgagctcacctccccactctcctaggattggtgcctatctggccacagggcctcgggatgaccctgtaggtgcaagtcccagagctcctcagggcatctggttgactcatgcatggggcgggtgggtagagggttggagaacatccaagaggggaagacargctgggctcaggggtcctgctcagatggctctgtgagccaggccacacacaggcattggagcttagaactctgaaggaaggcactgccaggcctggggccccttaag

SEQ ID NO: 173814 - DNA, 381 bp, Homo sapiens
gaggaatgctgggatcaggcaggtaactctgtaatagamttggatagagactaattctgctcaagaacagctcaaatggaaagctcagatccacagggaaggagcaaacccagtctctttaacttggctatggtggatcaagatcgtcactggaactctttggttgtgagactcaatatttattctgtgtaggcaggagcatattggacccatcatgaaactggtactgtcataggctagacctgtgacctcctaggtgaaataacaaaggctggaaagaggtgtccccatgggctttggggaagacttctcttgcccaacagtgagcttgagcaattacttttctaaattgattggtttattaaagaaatattaattgga

SEQ ID NO: 173815 - DNA, 381 bp, Homo sapiens
gaggaatgctgggatcaggcaggtaactctgtaatagacttggayagagactaattctgctcaagaacagctcaaatggaaagctcagatccacagggaaggagcaaacccagtctctttaacttggctatggtggatcaagatcgtcactggaactctttggttgtgagactcaatatttattctgtgtaggcaggagcatattggacccatcatgaaactggtactgtcataggctagacctgtgacctcctaggtgaaataacaaaggctggaaagaggtgtccccatgggctttggggaagacttctcttgcccaacagtgagcttgagcaattacttttctaaattgattggtttattaaagaaatattaattgga

SEQ ID NO: 173816 - DNA, 381 bp, Homo sapiens
gaggaatgctgggatcaggcaggtaactctgtaatagacttggatagagactaattctgctcaagaacagctcaaatggaaagctcagatccacagggaaggagcmaacccagtctctttaacttggctatggtggatcaagatcgtcactggaactctttggttgtgagactcaatatttattctgtgtaggcaggagcatattggacccatcatgaaactggtactgtcataggctagacctgtgacctcctaggtgaaataacaaaggctggaaagaggtgtccccatgggctttggggaagacttctcttgcccaacagtgagcttgagcaattacttttctaaattgattggtttattaaagaaatattaattgga

SEQ ID NO: 173817 - DNA, 381 bp, Homo sapiens
gaggaatgctgggatcaggcaggtaactctgtaatagacttggatagagactaattctgctcaagaacagctcaaatggaaagctcagatccacagggaaggagcaaacccagtcyctttaacttggctatggtggatcaagatcgtcactggaactctttggttgtgagactcaatatttattctgtgtaggcaggagcatattggacccatcatgaaactggtactgtcataggctagacctgtgacctcctaggtgaaataacaaaggctggaaagaggtgtccccatgggctttggggaagacttctcttgcccaacagtgagcttgagcaattacttttctaaattgattggtttattaaagaaatattaattgga

SEQ ID NO: 173818 - DNA, 596 bp, Homo sapiens
taaattcagttattcatctgcatattcaagctaaaatagagcagtggcttagaaaccatctttcctaaaactatgacaatgccatttacagtaagagtcaatgaaatggggggagagtcattcaatgttcagaatagaaagatttagaagaatggcaaagttgagcatcatacctttatgaagtgaattgtgtccttctcaaaatccttgttttagccctcacctccagtctgactgtatttgaagataaggcgttttttttagggttamatgatgtcataaggatggggccctaatccaacaaaactgacatccttataagaagaggaagagacagcggagcttgctctctctgccctgtgaagacatggtgaggagaaggctgtctgcaaaccgggaagagagccctcaccagaaaacaacccctccagcaccttgaccttggatttccaggccccagaactgtgagaagttaaatttctgttaagactcccagttatggcagccaagcagactaatccacttaggctgatgcagtcaccagttctgctgggcacaattctaagatgcctcccaaaatgctcacttggccctgg

SEQ ID NO: 173819 - DNA, 186 bp, Homo sapiens
tttcctcttttccttctggaactcccataatgcaaacatttgtttggttaacgatgtcccattagtcccttagtctgtcttcactctttttcattcttactatttcttttttcctctgactgarcaatttcaaaagatctgtcttcaagatcagagatgcttctacttgatctagtctgctgttga

SEQ ID NO: 173820 - DNA, 536 bp, Homo sapiens
ggttttggtgtgccagttgtgaaggctgtggtggctctggttctcagtacatgcagaggtatagactttgtgcagcttcttcagctgcaatcaatgtcagtgaagactgtgggtgcctcagtggcctaggctgtaggaatttgtggcagtgatgggggcagcacagattgttagggtctttggtggcaagaccttttggggtcctcctattctagttttccccacaatgggcagacttagccaagagagttcctcttggtgttaggtctgacatggcctacaagcagtttcagcaacagtgggttccagggttcaggtgctcagagtagctgtgtagttgggkccctagcctcaaggatcttgcaagcctattgtggcacctgggtcttgggtgtaggctccccctctgagttagggttgaatgcagattgccagagtctgtgattccgagaaccccagcccccagcagtttgagccagggtgtcaggctgtagttgtgattaggaccttgggaggtagggcacaacactggcctg

SEQ ID NO: 173821 - DNA, 613 bp, Homo sapiens
ctatagatgggcagggcctaggggctgggagctgcctgctgccatagcagcacctttagctaggttggcccgagtgaggcctctgtgctgtcctgccctggtgcatggccttagctttctaggccactgggagttgtggctgggcttcccatcttccacagagacatctccctgtgggatgggcagatgggcctggccttgagaaaggcattggccattggttgccatggtgaccagggaccacgttgctgcctgtgaatgctgagtgagcgagtaagggaggaggggcgattgagggttcacctctgccttggggaggctgatttctcacacactggctggccctctcattctcactcctccttgggccctgaggctgctggatccrgtctgcctgcctccctgtgcagtccagccctgccttgctgcagccccagcccagatggcactcagcgctctcccctgagggagtccctgggcctagccatcccctcactattcccgacccaaagggtgacttttcatctgaacttaaggtgggagatatttttaacttttttccactttggaaaatgtcactgtgacaaaagccagcatactttccctgcaccca

SEQ ID NO: 173822 - DNA, 391 bp, Homo sapiens
gtgctaacgtatttatagcatttagaggagggaataaatccagaaccttccccatgggggcttcctaggcctttccctcctgacacatggcatttgcccagtggaaggtctgcatacactacccctgcatcccctccagccagcagcggacagtgacggtggagaggctgggcacgggacatgcctctgtgcatgcttgtgtgcatatgtatgcccagcgtaaaaaaatgccctgctcttgtggtctgtctctgcccaatggcttgccacgacccctggtatcagccctgaccctccaaggcttatggagaggccaagtgcasggacccatctccccactctctaaacactgaacggctctttccatatatgggatggaggtggggaattc

SEQ ID NO: 173823 - DNA, 446 bp, Homo sapiens
gtagaaatagcatttctctgtggcttatctctgagctgtaatcaaagaacccctctcctgtggagaaggtgcaacctgctaaaaagtccagctcctgatgctccttccaaagctcacaggggccacagcctggtcattttcataagcattcatgaatctctgatatatgccasgccttgggcctatgtgctataaaagagctttgaatcaaaggggagtattatcaaaggggtcaaagaaagttccattgccccaaagccacgaactctgggcagcttcctggaaaaggtggcactggggctgagtcttgacacatgagaaaaaattcttcactgctggagaaagaaagatgtcacctaaagtataaaagggaggtgggctggactgcacagactctgaatgccacagttagaggctcagaacatacacagccaagtcccagcatc

SEQ ID NO: 173824 - DNA, 446 bp, Homo sapiens
gtagaaatagcatttctctgtggcttatctctgagctgtaatcaaagaacccctctcctgtggagaaggtgcaacctgctaaaaagtccagctcctgatgctccttccaaagctcacaggggccacagcctggtcattttcataagcattcatgaatctctgatatatgccacgccttgggcctatgtgctataaaagagctttgaatcaaaggggagtattatcaaaggggtcaaagaaagttccattgccccaaagccacgaactctgggcagcttcctggaaaaggtggcactggggctgagtcttgacacatgagaaraaattcttcactgctggagaaagaaagatgtcacctaaagtataaaagggaggtgggctggactgcacagactctgaatgccacagttagaggctcagaacatacacagccaagtcccagcatc

SEQ ID NO: 173825 - DNA, 446 bp, Homo sapiens
gtagaaatagcatttctctgtggcttatctctgagctgtaatcaaagaacccctctcctgtggagaaggtgcaacctgctaaaaagtccagctcctgatgctccttccaaagctcacaggggccacagcctggtcattttcataagcattcatgaatctctgatatatgccacgccttgggcctatgtgctataaaagagctttgaatcaaaggggagtattatcaaaggggtcaaagaaagttccattgccccaaagccacgaactctgggcagcttcctggaaaaggtggcactggggctgagtcttgacacatgagaaaaaattcttcactgctggagaaagaaagatgtcacctaaagtakaaaagggaggtgggctggactgcacagactctgaatgccacagttagaggctcagaacatacacagccaagtcccagcatc

SEQ ID NO: 173826 - DNA, 526 bp, Homo sapiens
gtttcacttgtgaagttattttgataaagtttaaaagccagaaatattagccacttgatgttgctaaagtcagataataacagatttaaaaagatattttagagagtgctatgrttaaaagtcagcttaattaaaagcagatattcaagctctaatagccagaaactccttgagaaaaacagaggaggcaccaaagaccccattttgagaaaaaattcttgttttccttttgaaacttcaggaataagaggtggatagatccatttcaaaatctaaaactaaatataccttcagggatggaaaatggcagttatggggcagtactcagctctttgcacagttggatcagagaagcatgctcttagccatctggaaggtatggcaaaatccccaccatccccactgagaaataagactaatttgggggataggtacacaataggctaattggtttggggttgccatgcaataaaagggcatggtaaaatcattgcgctgtcttctcccatagcattaacctattttt

SEQ ID NO: 173827 - DNA, 487 bp, Homo sapiens
tgaccttgctctccacactgcaataaaactttgtgatcttgaaccttaggttcataatctcacaaatgagaaggctccctccacactcttggaactgtacacccactgaaacccttaaggtaaagctaaccagggaaatttctccccagaagaaaatggcattcttgatgtaaacagcttttctcaagatcacagatcaagacttctctactatyattaaactcttatctttgagtattttccctcgtttatgcctctatgaacaatagaaatgaaaaagtggtctgttgtgtgcactaatggagtatacattttatcataaataattttgcagccagccttaaatatggagaactttaaactttgatagatacagatgaaagcctaatgtaggtaagaaaattaatggtacatatgttgcctcataatcagtcagaaacacaacattagttcactcctcttaacccacatcatgcgttaaagagaa

SEQ ID NO: 173828 - DNA, 521 bp, Homo sapiens
ctgagaacaccagagaaagactgaccttgctctccacactgcaataaaactttgtgatcttgaaccttaggttcataatctcacaaatgagaaggctccctccacactcttggaactgtacacccactgaaacccttaaggtaaagctaaccagggaaatttctccccagaagaaaatggcattcttgatgtaaacagcttttctcaagatcacagatcaagacttctctactatcatkaaactcttatctttgagtattttccctcgtttatgcctctatgaacaatagaaatgaaaaagtggtctgttgtgtgcactaatggagtatacattttatcataaataattttgcagccagccttaaatatggagaactttaaactttgatagatacagatgaaagcctaatgtaggtaagaaaattaatggtacatatgttgcctcataatcagtcagaaacacaacattagttcactcctcttaacccacatcatgcgttaaagagaacattgatacacag

SEQ ID NO: 173829 - DNA, 515 bp, Homo sapiens
gtagaaggtggtcactattctcattttacagatacaacaagaggcataagaagttaagagatgtgatacagagaaccagtagaaaacccagaaataaaaatgaggtcactgcatatattttaagtgtgaatatggatttttctctttgttttcttcatatcatgaatagacaaactcctaagatatcttttaatgtatttcataaaataratgtgactgtgcatatagtagacttgtgccatatactaattttaaggatttatttcttttacaattttatcagtcttaaattttttaaaaaatattgtcatagcagttgatgattttaatcatgatatttctagggaatctgcaaacaccttagcacaattttggacatttttctttgaatacaaaggaaaatcattgattgatattaaaagaatggcaaatgcttgatctgtgctatttgaactggactagaatatattaataaattggaaatatcattatgtaattgaacacatgtgaaaaaa

SEQ ID NO: 173830 - DNA, 333 bp, Homo sapiens
ttggaccgctttgagacctttgctggaaatgggaatatctkcacatataaactagacagaagcattctcagaaacttcttcgtgatgtgtgcattctactcccgaatttgaatcttccttttcatgaagcagttttgaaacactctgtttgtgcaatccacaattggataattggaacgctttgatgcccatggtagaaaaggaaatatcctcatataaaaactagacagaaggattcacagaaaatgctttgtgatgtgtgcattcaaatcacggagttgaatctttcttttgttagagcagttttgaaacactgtttctgtggaatctgcc

SEQ ID NO: 173831 - DNA, 333 bp, Homo sapiens
ttggaccgctttgagacctttgctggaaatgggaatatctgcacatataaactagacagaagcattctcagaaacttcttcgtgatgtgtgcattctactcccgaatttgaatcttccttttcatgaagcagttttgaaacactctgtttgtgcaatccacaattggatrattggaacgctttgatgcccatggtagaaaaggaaatatcctcatataaaaactagacagaaggattcacagaaaatgctttgtgatgtgtgcattcaaatcacggagttgaatctttcttttgttagagcagttttgaaacactgtttctgtggaatctgcc

SEQ ID NO: 173832 - DNA, 449 bp, Homo sapiens
aatgaattcctcaaagcagtcaaaatatccacttgcagattctacaaaaagagtgtttcaaaactgctctatccaaagaaagtttaaaatctgtgcattgaatgcacacatcagaaactagattcggagaatgcttctttctagtttttataaaaagcaattgccttttctaccagaggacttaaagggatccaaatatcctcatgcatattctacaaaaagagtgttgcaaatctgctctatcaaaagaagatttcaactctgagagttgaatgcactcatcacaaagtagtatctcagaatctttctgtctacattttatgtgatgatattcccgtttccaatgaaggcttatctcmactagaaatatccacttgcagattctacaaaaagagtgtttccaaactgctctatcaaaaggaaggttcaactctgtgagttgaatgcac

SEQ ID NO: 173833 - DNA, 580 bp, Homo sapiens
acaggtcatggcaagaaggtggcagggcagggactaggggacagctaaaggagggtcatgatcctttacctgagggatcaatatagtcccatagaaaccctagagcaggatctttaaggatgagtttcccaggcagtcagggaatgcagagggaattccctatggttttgtgtgttggctgcagtgaggagcaagagggtccccttggggaacttggtgagtatagattttagaaaggtttgggagaagggcaacatggcagatgtcactagatgtggtagaaatgccaagtttgggaaggaggtgtatgggttggatctagacagaagcggatataagtcggggaacaggtgtggtgataggactccaaatcttggtgaagtcaaagagcaggcaaaggtgggagagtgtgttcaactgagttgtgggttgggcaggtgtcctcagggaggckgacgaagtgagaggccttggggtgtgaccttgagcatatattcctaaaagggccctattttttatctcctccctcctactgtactgtctttcctgggccatattcaccacactgtctttcacctgc

SEQ ID NO: 173834 - DNA, 500 bp, Homo sapiens
aaaaatctatacacttagaaattaagcagctaaaatctgtaagcccatgcatgcacacacaaaaacacagacacacgtttaaataacacactgtagagtcaatgaaaacggaaataactatttataatgaatgatgcatgcacaacatatcgaaaccagtaggaagcaggtaaaagaatacctgaagaaaacctgaagactcaaattaatttactggaaagaaaatgatgaactcaggggaaaataaaaatgytaatattttcagataatgtgcttatcactttgaaaaagtaatataactaaaaggcaaaatttacttttaagtaagttcagcaatttatttatttattaaaaaaatttttttttgagatggagtctcactctgttgcccaggctggggagcagtggtacaatctcggctcactgcagcctctgtctcccaggtttaagagattctcctgcgtcagcctccttgagtagctgggattacaggtgtgtgc

SEQ ID NO: 173835 - DNA, 508 bp, Homo sapiens
actacaaatgtgatgaaatgaataacaacataggtgggaagataatctgcataagaaaataaagcatgataaaatagaaattgcagcaccaaaaccaaagtcctcatttttggcaatgtgatgcaacattggaactttattgatcagtgatgcgaaggatgagcttgaaaaacttttccaaaatggagattgccttgctctgacttctatcttgaaagctgatttwaaaacacacacccactggatggtgtggataaatatatttgttaattatttctgaaaacaaaagagccatttgtcaaattctctttcatactgacaagatcatttggatatattatttaggacagtgattctaaaatatgatcactgggctagcagcagaagcagcatctgagatcttgttagaaatataagttctcaagcaacacctcaacctattgagtcaggaactctgggagtggggccaagtagttggtgctttaaccagccctatgggtgattctga

SEQ ID NO: 173836 - DNA, 487 bp, Homo sapiens
ttatagtattatcaaaaacagcttgattctcttgggtcttattaagagaatttctaggcaagaccacagcagcatttattcaaagactagttctccctcactactgaagaaaactcctctgagcacttcaccaaaaccccatacattttgagtttccagtctggctggtgggaacaggcaccagttgggcactacgtggccctggtgccctcccttctcatcttttccaggtattctgtctctggcctcaagtagtttcctcacttgcacttgctgatcaatacagtgctgaattcttgagggtcaccctctgcagatctcaggtttctctttagggtcagctatcctctcaatctgccctgcaaactctagccaycaacacttcctcatagtcccaaccccatctcaacttagggggctcactgggctctgggttcttcctccctgctctatggcctgaaattctctcaaggcaataatcttagga

SEQ ID NO: 173837 - DNA, 514 bp, Homo sapiens
tgtcattgtttgagtagttctcagtaataatatggaaataatacctagcattaattaaacacctattgttactgtgtgtaactcgctatgctaaatgcattgtagcattactttatagaatccccctgacagccctctgaagtaggtatatccattattcccatgyttaacatgaataacctcaggcttagaggggttgctaagaatttcaagcttatacaactagtaattgatggtgccgtggttaaaggaagctctggctgactccaagctttctactcttattccccatctctttatatgaacacaaaggagacaacaatacagcatatacacagaatggctgttcttccatctcaactgtttttaacccagatgaaatcttgaaagttaagaagaaagacatgtgaaccaccaaaacagatatcaaaatttccacttactggtgaacttacttttgactcataagagaatcactcagtgactactgaatattctttaacaaataattatt

SEQ ID NO: 173838 - DNA, 642 bp, Homo sapiens
ttctcacttctccattcttgcctcttttccttttccttcaccccttttttcttccacataagagtgttcaagtcacccctcttctgggaatttcttactgagcccctcagcccatgaacttttgtagacagcacttactgtggcaagcacagtttagcacttaacacctgcctggcactgggattgaatgatcagctgtacccatatctctttcaataggattgtaagctctgttagggcagaaaccatatctttgcatttccttaasctgctagcacagaagtaagcacaggaaaactaattaataaattcccatgaaaaggaatgtttagggaccgaagctatggccagaaaattctctagggacataaatagttttagaaaactccaagttcaaatacattctccttcacaaatgcagttacaaaggacctccagtgcagaccccagagagccttcgaagatatctgtcatgtgagcttgaaatgcagcattgtcattattcagagagaaaatagaatcacttatgagatcatggctcattgtcaattctctatatatttgcatttattgtgacagatgctgtcaaatctcatcctagctctattattctacagaaatagattggccctcttatgctat

SEQ ID NO: 173839 - DNA, 599 bp, Homo sapiens
atttacacttaggaattatttatatcctcatatgtcayatcaatttaaataatatcccactcactggggcataaagaataatgctaatattaaagtttctatttaatatctgctaattgcacatgaaggggttatatcagctgcatttagggtgttttttatttaattttactgtattagaaaatctatgaggttaagtatcctgaaattattgcttttaaatattgagcaataagaatattgtccccatgatgcaccctatatcatctggccttgaataagctttctccccactgcaagggggtggggtggtagaggtagcagagagcttagtctaaacttggtataaatatgggtgatcatactccccttttaaaatatcaaatctgcatttaaaaagctcttttcttcatgaaatctaatatcattaatggggctataggctttataaaaccagaatcccatgaaatgaaataaatcttattactataaagttgggttctatcctaaagggatgcatataaaccatagttagtgccctatctcaaacccttagcatgatcttcatttgttggatttttcaataaactgtaattgaa

SEQ ID NO: 173840 - DNA, 573 bp, Homo sapiens
atggctggcagcttgaccttctctaatatgatgtagataagtgttgaagcaacagaaaacaggactcagacaggtggaccagctgtgacttctgatttacagtgagtgccatyataagtttttatagtatgtcactagcttagtcttagacaatggtgttaatcttgagtgacaagtcatgaaggataagcagctgtaactctgaagtttccatcacacatttgacagggcttgaaatcttgacctgagataaaacaccagctgctcgttcactgactatttaataccaaatagtgcaacatagagcactgaagaaatgtcaaaagttcttcaatacatatctcattaatactagccaattggtactattaattttagaaaataaaaagtatctagttgtctccgtgaaaggaaaaaaggaattagtgtaaattagtttttcgtccatagtttttcatagggatagtttcttgttcactctattgtgaactctactccacaacagctctccaccaaccttgttaattaactttatatgtatggataacaaacttaaacatggtaataagattt

SEQ ID NO: 173841 - DNA, 615 bp, Homo sapiens
atctcaactttgccttctattttaccatctaggaagtttatgtcccatccagactcttgctctcaatgtgtcttttacacaaaactagtccttagtcactcattaaaccgggttccctggcatctctatcagcaataatactttgttygagttactacatgtagatttaagggtaataaaaatattagttcttgacaatcttataatttaaaagcttttctatacagactgagttccttcaaatcattctgaattggtgagatttcacaatattacgttgagtgcctgttctgccacaatactcaccaaaatttaaatcccatttagggaagcaattcagaatcttttgagtgtgagaagtataatgaaaataaataaattctattctgtccatttaccttatggcctgtattttaatcactttgaaatgtccacaaacatataagaaaataagtacttacttaaaatcaaagctacttgaattccagatggctcaaagtatatcttaatctgtcttgagcaagtcccctaattctgcaggaacaaatggtggaatgttattaaaatgttaattagttaaatttagtccccaaagcataaagaaaacaaaattgc

SEQ ID NO: 173842 - DNA, 437 bp, Homo sapiens
ggaaagctgttttggggagctctgtggtaaagtcacacggtggctcggggaccctgagcagcccgcccaccctcctctacctcccttccctccgcggaggmtgggcagattgctcggtgcatggacgcagtgtgtacaaaggactcagcatcgggcgctggggcgtgccaggcagtgacagtgcatgccggggtggctggacgtaggaagcaaggcagcagggagggttggggtatggggctgcttgtgggggctgggtcccagcttaggtgtgagggcacctctttcatcaggaggaggtcggtgggtggaagtagcaggtccctcaggtggtgaccctggggctgggtgtggctcctggagccccagctgttgagggcagggcttggtttgtgcccctcaccccatgagaccaggctcaggtgggcagttcctgt

SEQ ID NO: 173843 - DNA, 439 bp, Homo sapiens
atgggggtgtgaaggaaagctgttttggggagctctgtggtaaagtcacacggtggctcggggaccctgagcagcccgcccaccctcctctacctcccttccctccgcggaggctgggcagattgctcgstgcatggacgcagtgtgtacaaaggactcagcatcgggcgctggggcgtgccaggcagtgacagtgcatgccggggtggctggacgtaggaagcaaggcagcagggagggttggggtatggggctgcttgtgggggctgggtcccagcttaggtgtgagggcacctctttcatcaggaggaggtcggtgggtggaagtagcaggtccctcaggtggtgaccctggggctgggtgtggctcctggagccccagctgttgagggcagggcttggtttgtgcccctcaccccatgagaccaggctcaggtgg

SEQ ID NO: 173844 - DNA, 442 bp, Homo sapiens
ttggcacggctgatgggggtgtgaaggaaagctgttttggggagctctgtggtaaagtcacacggtggctcggggaccctgagcagcccgcccaccctcctctacctcccttccctccgcggaggctgggcagattgctcggtgcatggacgcagtgtgtacaaaggactcagcatcgggcgmtggggcgtgccaggcagtgacagtgcatgccggggtggctggacgtaggaagcaaggcagcagggagggttggggtatggggctgcttgtgggggctgggtcccagcttaggtgtgagggcacctctttcatcaggaggaggtcggtgggtggaagtagcaggtccctcaggtggtgaccctggggctgggtgtggctcctggagccccagctgttgagggcagggcttggtttgtgcccctcaccccatgagaccagg

SEQ ID NO: 173845 - DNA, 446 bp, Homo sapiens
tgatgggggtgtgaaggaaagctgttttggggagctctgtggtaaagtcacacggtggctcggggaccctgagcagcccgcccaccctcctctacctcccttccctccgcggaggctgggcagattgctcggtgcatggacgcagtgtgtacaaaggactcagcatcgggcgctggggcgtgccaggcagtgacagtgcatgccggggtggctggacstaggaagcaaggcagcagggagggttggggtatggggctgcttgtgggggctgggtcccagcttaggtgtgagggcacctctttcatcaggaggaggtcggtgggtggaagtagcaggtccctcaggtggtgaccctggggctgggtgtggctcctggagccccagctgttgagggcagggcttggtttgtgcccctcaccccatgagaccaggctcaggtgggcagt

SEQ ID NO: 173846 - DNA, 558 bp, Homo sapiens
cagcagcccctcacgggctgggactgtaggatagagtgagttggggtgcgaggccctcaggacacccagctcaggctgtgcgagctgccggcaccctgcctgtcactgccactcttgtcattactaatccccttgcctgggagcttctggatcccagtgtcacctcccaggccccaggtgccttttcgggccacccagagcccatgccttggccctgccaagtcacctcacctcccccaggtgaggggcaatgcaggagtctcagatgagcaggaccgcagccatgagggaggttcccgcctcatcttcaccaggcccagggcgcccattaaggtrggacccagtccagcccccatatctgggaagcagcgggtgtcacaaagagccacagctgggcagcaccagtgctggtggggtgcagggcagccggatgccaagaccctgagacccccaagcctgcctggggccatgcagggcttaagcggtgggtttgctggtgttcaagcaggtataggggaagctggggtggagactggagtttggacacctctgactctg

SEQ ID NO: 173847 - DNA, 454 bp, Homo sapiens
actttattttttgatatttttgatagaaaattgaatattctaaggagaaacagcagcttgggtggtgtttgttcattcattaactacctttagagagaatgcagaactaaaaatattagattcttaaaaaaatagagttggaaaatttgtcacagtgcatttttcttttcctyctagttttaaatcacagcttacgaatttagataggatatacacttaatgatgcatcatttatgcatctcattgttttcccattgttctgttaactggtaaaagacttcctttttttcagtttggcttccttctactttaagtttggctttggaattaagtgatttttttacttggattgtaaaatgatattttttattttatatcctgcaatcttgtggggttgaagtataatttatatttccatgtctaggcagtcctgacttgtaaataaactgtgata

SEQ ID NO: 173848 - DNA, 454 bp, Homo sapiens
actttattttttgatatttttgatagaaaattgaatattctaaggagaaacagcagcttgggtggtgtttgttcattcattaactacctttagagagaatgcagaactaaaaatattagattcttaaaaaaatagagttggaaaatttgtcacagtgcatttttcttttccttctagttttaaatcacagcttacgaatttagataggatatacacttaatgatgcatcatttatgcatctcattgttttcccattgttctgttaactggtaaaagacttcctttttttcagtttggcttccttctaytttaagtttggctttggaattaagtgatttttttacttggattgtaaaatgatattttttattttatatcctgcaatcttgtggggttgaagtataatttatatttccatgtctaggcagtcctgacttgtaaataaactgtgata

SEQ ID NO: 173849 - DNA, 415 bp, Homo sapiens
aaaattggaaataggctggaaattcagacttggaatttatttgcttgaaggtattggtcaaaaccataattgtggcttttaaaagtacctataattctcaagggaaaatggtcaccaggtccacactgcttccagagcttttttcacactagactccattttcccaattacatggaattttatttcctgaractctaatcatcaagttctcctatatcattaggactatgactctatcatattctggattaagtaactgtcagtccctgctttaaatccttcattggcttctcatttcatttttggaggaaaaaaaaaaaaaattcctggctaggatctaccagccaggaagatgatctagaccagtgctatctctggccacattttccttcactttctccaaataatggggaac

SEQ ID NO: 173850 - DNA, 607 bp, Homo sapiens
gtgggggtggggtgtgcgggacaggtttttcaggtctcmgtgctggtttattacattgtctctctttgttcccaggaattggaaacagactcgtagtcttgtagctgagaagttcctaaaaacctcagccgctccccacctctcccaacacagcgaagtcaggacttttaagacgaagacctgggatttcgcgccccgggcaaaacgtctcatctgcggacacgcgtgccttgttctggcagcaccctgggaatccttcccgccaaacgggacaggacgatctttttgaaaagtggcttgaaatcctgcaataaaaatcaaatcctaccactttgggtgcaaagggggtgggtggggtgggaggacatcacagtcgtctttgctggtgtacctacgccaaccgtggcgttgctcatttacgcatttccaactaagtgcacagtccactccctctcgtacatccgtaaaaaggcagctcaaggaaaaacaaacctcagataaatttttgaatgtggcctcacttttagagtagcatcaaacaaggggtccagcactgaaaaacacatttgctcgaattaccaaaagcccccctccgcctccaataaga

SEQ ID NO: 173851 - DNA, 576 bp, Homo sapiens
tcttgccttctctgacttactgctttattcatccgcccgcattcccgtccctcggtccccctcgctggtcgcccccagacgccgcaccaggctgcaggccagcccttcaagttcactatcccggagtccctggaccggattaaagaggaattycagttcctgcaggcgcagtatcacaggtgcgtgtccggccgcgccatgcgagtggtcgcgggcgtcccggtgccccttgcacccagccgggtggcggcggcgcctgtacttagttcttgcgtccaggcggtggcgtgtggagtctcagttaagacctgtcattcaagttaccccctttcctggttcttcccgggccgcctcttctcttgtctcctcctcctcccattgtttcccttttgccggtttgcactgttccagggagtcctttttcatgtctttaggagttgcatgagaatcgtcaatatttgcacttcatgtatttatttttcagcagactgagctgaaacattggttcaatcgatgtctcagtcctggagtgtgggttcagggaagcaaagccatgttgaaatcgctgtttgccat

SEQ ID NO: 173852 - DNA, 619 bp, Homo sapiens
caataacaaatcattcttgtctctccatttatgtaggttrcaatgacatgcctgtgtagcaaaactttgttggaattgtaatcactatgacaacataactgtatttcttttttgacacaagatctcacttggttattcagactgaagtggcgtgaatatggctcactgcagcttcaaccacatgggcttaagtgatcctcccacctcagccttccaagtagctgggactacagatgcaccatcacacctggctaattttttgcttgtttgtaaagaggaagtctcactttttgcccaggctagtcttgaactcctgggctcaaataatcctcctgcctcagtctcccaaagtgctgggattacaactatatttcttttttaaaaaaacatctaaaaattcatctagtctttactcccttgcacttctgatgtaaatcaacaaaatttggtgtggttttactaaatatattctatccttacaacctgtacaataatggtattgtggaagctacacttgtgagccagagcccaactctgtcacttaacagttttgtgactttcaatagttatttctttctgcacctcagttttcatacctagaaaaaaaaggacatatgat

SEQ ID NO: 173853 - DNA, 418 bp, Homo sapiens
cctcagtttcctctattactaatatcttacattagtatgatayatttattacagctgatgaaccagtatttatacattattaactaaggtccatgtgcacattagggttcactatttgtgttgtatagtttcatgggttttgactaatttatgttgtcatatataaatttgacataatcatcattataggatcatatagaatagttttcctacactaaaaatggcctgtgctccacctattcattccttacacacccacacacacacaccccatacccctgcccgccccaacctctgtcaaccactgattttttttttttttaatcataagcataccaaatgttacaggtttcattgtcaccactgcaatatgtgtactgtgatggaagcatagcctgtgtctcaatttagccacata

SEQ ID NO: 173854 - DNA, 395 bp, Homo sapiens
cagagtcagcaagaagcagcataagaaagaattgactggcattgctggcctcgaaggtggaggaacaggacatgagccaacgaatgtaggcagcctgtggaaactgtggaggaaacagtttctccaccagaaactcagatggaatasagccctgctgacacctctttaatccagtgagacccttttggatttctgacctctagaattataagataataaatctcttgtgtgttaagtcaccatatatgggataacatgttataacggcaatgggacactaatatattctctttcttaatgtaccaaatatcaaacactccaggtttcttcctatatccatgactggattttaaaatttcctttattggattctcattcttttcttgatcatttga

SEQ ID NO: 173855 - DNA, 395 bp, Homo sapiens
cagagtcagcaagaagcagcataagaaagaattgactggcattgctggcctcgaaggtggaggaacaggacatgagccaacgaatgtaggcagcctgtggaaactgtggaggaaacagtttctccaccagaaactcagatggaatacagccctgctgacacctctttaatccagtgagacccttttggatttctgacctctagaattataagataataaatctcttstgtgttaagtcaccatatatgggataacatgttataacggcaatgggacactaatatattctctttcttaatgtaccaaatatcaaacactccaggtttcttcctatatccatgactggattttaaaatttcctttattggattctcattcttttcttgatcatttga

SEQ ID NO: 173856 - DNA, 623 bp, Homo sapiens
ctagtatgtcttagtgattaggttttccagtttagacagcaaagtccatcacaatgtctcttatttgtcatctcccctagaggaacaacctgggcatctaggtcacagggacttgtttttggttcctaaaatcccatctcatcttttgtgagccagcctagttagtttcaacatccccttcttcagcagcttaatatggctagacaamccaccctcttaatgcctaaaatttttcagcataaatggaaaaaatatgaggtatattgacagtaatccaatatatacttcatttggccggttttgttcttcttgtatgatagtcagggatacaaaaaaaatcagctcataatctagtaataaaattctttttttctccatttaaattacaactgttctgaagcccttacttaaaatactatctatgttcaggttgtcttaaacattttaaaagtgaaatgttaactcttaaaccatttttaaaaattattctttaacatacaatgatctaggccttagctaaattataagcaatgggtaagaaaaatatgttaaaataaataaatttatttacaaaatttagaggttttttcccaagttctgagttctcacttaaaagcatgaga

SEQ ID NO: 173857 - DNA, 623 bp, Homo sapiens
ctagtatgtcttagtgattaggttttccagtttagacagcaaagtccatcacaatgtctcttatttgtcatctcccctagaggaacaacctgggcatctaggtcacagggacttgtttttggttcctaaaatcccatctcatcttttgtgagccagcctagttagtttcaacatccccttcttcagcagcttaatatggctagacaacccamcctcttaatgcctaaaatttttcagcataaatggaaaaaatatgaggtatattgacagtaatccaatatatacttcatttggccggttttgttcttcttgtatgatagtcagggatacaaaaaaaatcagctcataatctagtaataaaattctttttttctccatttaaattacaactgttctgaagcccttacttaaaatactatctatgttcaggttgtcttaaacattttaaaagtgaaatgttaactcttaaaccatttttaaaaattattctttaacatacaatgatctaggccttagctaaattataagcaatgggtaagaaaaatatgttaaaataaataaatttatttacaaaatttagaggttttttcccaagttctgagttctcacttaaaagcatgaga

SEQ ID NO: 173858 - DNA, 623 bp, Homo sapiens
ctagtatgtcttagtgattaggttttccagtttagacagcaaagtccatcacaatgtctcttatttgtcatctcccctagaggaacaacctgggcatctaggtcacagggacttgtttttggttcctaaaatcccatctcatcttttgtgagccagcctagttagtttcaacatccccttcttcagcagcttaatatggctagacaacccaccctcttaatgcctaaaatttttcagcataaatggaaaaaatatgaggtatattgacagtaatccaatatatacttcatttggccggttttgwtcttcttgtatgatagtcagggatacaaaaaaaatcagctcataatctagtaataaaattctttttttctccatttaaattacaactgttctgaagcccttacttaaaatactatctatgttcaggttgtcttaaacattttaaaagtgaaatgttaactcttaaaccatttttaaaaattattctttaacatacaatgatctaggccttagctaaattataagcaatgggtaagaaaaatatgttaaaataaataaatttatttacaaaatttagaggttttttcccaagttctgagttctcacttaaaagcatgaga

SEQ ID NO: 173859 - DNA, 623 bp, Homo sapiens
ctagtatgtcttagtgattaggttttccagtttagacagcaaagtccatcacaatgtctcttatttgtcatctcccctagaggaacaacctgggcatctaggtcacagggacttgtttttggttcctaaaatcccatctcatcttttgtgagccagcctagttagtttcaacatccccttcttcagcagcttaatatggctagacaacccaccctcttaatgcctaaaatttttcagcataaatggaaaaaatatgaggtatattgacagtaatccaatatatacttcatttggccggttttgttcttcttgtatgatagtcagggatacaaaaaaaatcagctcataatctagtaataaaattctttttttctccatttaaattacaactgttctgaagcccttacttaaaatactatctaygttcaggttgtcttaaacattttaaaagtgaaatgttaactcttaaaccatttttaaaaattattctttaacatacaatgatctaggccttagctaaattataagcaatgggtaagaaaaatatgttaaaataaataaatttatttacaaaatttagaggttttttcccaagttctgagttctcacttaaaagcatgaga

SEQ ID NO: 173860 - DNA, 595 bp, Homo sapiens
ggatgtacagtatcatgagagacttacagaaaattttctctataaaaaacctgaacatggagaaagtatttcatatctaaaaggaaaggaagtcatccagaaaattttgtacatttcattaggtaatttgagacatctgcataacaaacaataggcaaatggcaagtcaaataacaggtaaatattaaattgaaaaacatttatcatatatgatgaaatgcaaatagtacacattaacatgtagaaaacataaaagacaatatgcaacaaaccaatgaacaaattggaaaaaaaagttagaagcatacctgaataatttttgcaaatgattagtaagtacttgaaaagaaatgtcaacgttattacttattaaacaaataagtcaataatgctatgtatcagttcttagccactggaactgatacatagcattatttcacatactgctaaaagtcatgtaaattgayataatattttcatagggaattctttaaatgtttattaataactttaagttatttatatcttcaaccttataattctactttcaggaattttgtacagctcttttacataaaattcatgtatacgtgtt

SEQ ID NO: 173861 - DNA, 591 bp, Homo sapiens
ataaatttctattgtttaagtcacacattttgtgatagtttgctatrgcagccctaggagtaggccctgtcttcttgggcatactgaaactgaagcacaaagaacttaagattacacagcaagtaactggtggagccagacttccaaaccaaacatcagactccggggcctatgctcttctttcatgaaagaaacatcctgtactcaccagctccattttcttaactcatcattttagccttctatggaagctccacaactccagtaaaactgtcctgttgagctccatattgtttaccctttattttcaggaactctataaatgcacagagttgacaacttctcctgcttaaaactaacaacgttttagatttccaaacactactcattcctgtttttctccctatcttcctggactcccttttccagagtccataatgaacttccctttttctgtcttattttaaatgactgtgttctctaagttctatcctgtctccttccttttctcagtctgcactctctccttggatgatctcatttattccgatggcttcagttgtcatctatgtaagtttcaagtggacagaa

SEQ ID NO: 173862 - DNA, 599 bp, Homo sapiens
aagttactgctttgaaaaaaaaaggtgggttctacaataaaatttgtatactttgtcttttcaatgcctgaggcactgtttccagcttttctaccctagcattatgtgcacatacagaatatcaaaataaaacttcaagtgaaaattttagtaaggttattttttaaaaaagaaactagttttagtgtgagttgcatgctaatagtcctctcatgctaagatttattctagcaacagtaaaaatattcatatttactatacagtttgggacaagttaataatttgttctgaattctactatacttctgtatatgtcaaatctaacaaaattcagtcaagatttaaacaaaattcatcaagtgttctaagacatcctgaaattctatctccttcacaaaaacttttctgcgtaaggtggtaatttcctgccctctcaccrtatcctcattttttcaatatgacattcataaatctgacccttgtcagcaattttatggaaataatggagctgtgccagaaggccaaagataggcaaagccgtgattttcaaaggggtggagaacaggagaaacaaaagtagatctttcaaagactacatc

SEQ ID NO: 173863 - DNA, 480 bp, Homo sapiens
ttattttctctatagcacctaattacagtctgaaatgtttatttctttaccacatgttatttattactctcattggaatgtaagctttatgagagcatatattttattctataactcctgaatataatttggtgcctgacacagagtaggttttaataaacatttgttgactgaatataaggaagagtgaaaagaagaaagagaagcatgagtatgagaagaaacacagcatgaaatattgctctaaataaaatgatgtgagacattaaaagtagctrttcaaatagcaaacgaatgctatagacataatggttcattttataattctatagaactgtacagggtcagaggagaagaatgctttatataaggttaagaagaaaaggtcaccagttttgcagcccaaacaatatatgcacacatatccatgtgcctaaaactatttcaacagtatttatattagaattagcattcaagagt

SEQ ID NO: 173864 - DNA, 395 bp, Homo sapiens
caccgaatgaatacattttaagtattaccatgtggctccttctgaatattaatggcttcggaaagactttattctcaaaggcatcacagtcaggagatgctcttccaggaagcagcaaactggaccatgtaacaaacatgcagtgatcragggcccaggaatgagcactaagtgggaggaaaggacatggaaaaatgctaaggcatggtggggcaggacaatagtctcaggtactagagaggctgaggccaagggggaaggatccctttggtctaggacttcaagtccagcctgagcaacatagtgagatcctggcaaaacaaaacaaaacaaaacaaaacaaaacaaaacaaaacactctaaattaaaaaaaaatgcattgattaatttcccgg

SEQ ID NO: 173865 - DNA, 557 bp, Homo sapiens
gagtaatgctggtggcctgcttctctcagggtatactgtagacgaggatctaggttgagagggggccctgcgttagtggctgcacccatccttastggaacatcatcacactcaactggagagggtggggaaatatattgtggttcaagcatcacaattgtttgcagttcttactgaaatataagagattgtcttgaataaatattttcttcatgctgtatgtccttaggacaatttccaggaactttaaatggttatttatctataattttcaccagttattgttgtttttagggagtggatttgaaaagctcttcacatcaccattctggaagtgagtcccatttggatcattttttatgaatattttgtttcttttatacttggtggtaagatagtggcaaaactctctttataattagcatagtagagatagaattgctgtacaattataaagggcagtttttataaaagtatttgcaaatttacagtgaattaagaaaaccaatgagagttgaggactggttgattttcaacttcaaatcgactttcaactt

SEQ ID NO: 173866 - DNA, 557 bp, Homo sapiens
gagtaatgctggtggcctgcttctctcagggtatactgtagacgaggatctaggttgagagggggccctgcgttagtggctgcacccatccttagtggaacatcatcacactcaactggagagggtggggaaatatattgtggttcaagcatcacaattgtttgcagttcttactgaaatataagagattgtcttgaataaatattttcttcrtgctgtatgtccttaggacaatttccaggaactttaaatggttatttatctataattttcaccagttattgttgtttttagggagtggatttgaaaagctcttcacatcaccattctggaagtgagtcccatttggatcattttttatgaatattttgtttcttttatacttggtggtaagatagtggcaaaactctctttataattagcatagtagagatagaattgctgtacaattataaagggcagtttttataaaagtatttgcaaatttacagtgaattaagaaaaccaatgagagttgaggactggttgattttcaacttcaaatcgactttcaactt

SEQ ID NO: 173867 - DNA, 557 bp, Homo sapiens
gagtaatgctggtggcctgcttctctcagggtatactgtagacgaggatctaggttgagagggggccctgcgttagtggctgcacccatccttagtggaacatcatcacactcaactggagagggtggggaaatatattgtggttcaagcatcacaattgtttgcagttcttactgaaatataagagattgtcttgaataaatattttcttcatgctgtatgtccttaggacaattwccaggaactttaaatggttatttatctataattttcaccagttattgttgtttttagggagtggatttgaaaagctcttcacatcaccattctggaagtgagtcccatttggatcattttttatgaatattttgtttcttttatacttggtggtaagatagtggcaaaactctctttataattagcatagtagagatagaattgctgtacaattataaagggcagtttttataaaagtatttgcaaatttacagtgaattaagaaaaccaatgagagttgaggactggttgattttcaacttcaaatcgactttcaactt

SEQ ID NO: 173868 - DNA, 551 bp, Homo sapiens
tgcaaaggagccttttcaattgctttgcacataacaggtgctcagtggttattagttttcttctttaacagtgaagttgttaatgaaagattttaagtagtaaarttacaatccaagattaaatgagttagctaaaattccaatttgctttctgagtaaatttcatgtttgcatatagagagagctttgttagggttcaactaaaagtaaaaattcaaagaatttcacaacaccaacaagtaatgtatcatatttgcatctatggcttaacatacttttagtttctcctgctattttgaagtgttcccttgatatcactgtcaagtatgttaggtaaaacacacagttgcttatgatctgaagccaaaacttgtgtctttgcagcctcatgggatgctcagcaatagaaaatattatttagagtaattctgaaaagttacaaaaatggtattatagctacaaattgagtctcactcattgactaatttatccaggcgcatttattcagcacttatgtccagccgtgcttgctatggcatacagtggtggca

SEQ ID NO: 173869 - DNA, 551 bp, Homo sapiens
tgcaaaggagccttttcaattgctttgcacataacaggtgctcagtggttattagttttcttctttaacagtgaagttgttaatgaaagattttaagtagtaaagttacaatccaagattaaatgagttagctaaaattccaatttgctttctgagtaaatttcatgtttgcatatagagagagctttgttagggttcaactaaaagtaaaaattcaaagaatttcacaacaccaacaagtaatgtatcatatttgcawctatggcttaacatacttttagtttctcctgctattttgaagtgttcccttgatatcactgtcaagtatgttaggtaaaacacacagttgcttatgatctgaagccaaaacttgtgtctttgcagcctcatgggatgctcagcaatagaaaatattatttagagtaattctgaaaagttacaaaaatggtattatagctacaaattgagtctcactcattgactaatttatccaggcgcatttattcagcacttatgtccagccgtgcttgctatggcatacagtggtggca

SEQ ID NO: 173870 - DNA, 551 bp, Homo sapiens
tgcaaaggagccttttcaattgctttgcacataacaggtgctcagtggttattagttttcttctttaacagtgaagttgttaatgaaagattttaagtagtaaagttacaatccaagattaaatgagttagctaaaattccaatttgctttctgagtaaatttcatgtttgcatatagagagagctttgttagggttcaactaaaagtaaaaattcaaagaatttcacaacaccaacaagtaatgtatcatatttgcatctatggcttaacatacttttagtttctcctgctattttgaagtgttcccttgatatcactgtcaagtatgttaggtaaaacacacagttgcttatgatctgaagccaaaacttgtgtctttgcagcctcatgggatgctcagcaatagaaaatattakttagagtaattctgaaaagttacaaaaatggtattatagctacaaattgagtctcactcattgactaatttatccaggcgcatttattcagcacttatgtccagccgtgcttgctatggcatacagtggtggca

SEQ ID NO: 173871 - DNA, 587 bp, Homo sapiens
ttactgaatatgcacatagttaactatgccacttgtattcccattgcaatgcctattcctgaataaatataattttcttttacagagccgctctctgtcagttgtttaggttgacaatctttaaaattttgatatatctgctaggtttcttgcattgccaagtggatggtaatgtgatggattatttcagaattttcttaaagtatccaggtaattatgcattacagttgatccaaagtaatgatcactgttatgtatgggagaggagcctgggcaggyttcagagagacatagcaattgatttggttcttccttatcttttcagatttgactaaaatgtcaccttttatgtgaagccttgtctgactcccttcccccctggaaaaatgaattgcttcctgatttgtgtaccacttcaatgtgtatctatgtcatatgtgtatttcatgctgtagtcttaatttctttgctctctgtttcttgaagacatgagcctgtcttatgaaaatagttgtttctctagggactagcccattccatgctgcacattaggtcttgcgtgactgcttatagaatacatttgtaaa

SEQ ID NO: 173872 - DNA, 419 bp, Homo sapiens
gaagtctaaagaaaaacttgaaaatactatataacatgtttcatcagaacctctaagcatattattgcctactagatttttttttattttacatttatttatttgtttgtttcttttttgagacggagtttcacttttgctgcccaggagtgcattggggtgatcttggctcaccgcaacctctgtcttccaggttcaagcgattctcctgcctcagccacccgagtagctgggattacaggcatgcaccaccacgcccagctgattttgtatttytagtagagacagggtttctctatgttggtcaggctggtctcgaacacctaacctcaggtgagccaccaggcccggcccaattcttttttatttttaattttgagacagggtctcactcttttgctcacgctggagtagacagg

SEQ ID NO: 173873 - DNA, 655 bp, Homo sapiens
ttttctgtttctgctaatacagwctgggggaaaaaacaccccattctgtaatgaggtgtcagtggggaaagaaggaaaacagcaaacaattctgatttgctgacctatcgaaagctactaagagaagaaagagaatcttctgcaccagttccctctgctgagagtgtctccttctgtaagcctgctacttagcaagtgaggggccttctcatagtggagcctggctttcttgtgtttaaaataacagatgtgagattatgagaagcaagtcactcaagtcacacctcattgttttgagcctgacatataaaataaaatccaaaatccaaagttcaactcaatgtcaaccaaagatggaatacagagtgcaattaaaatatataacaatttaccaaattataatctgcaaagagaaaaaaatgtgggaaaatgctagtctgttaagatcctatttagttgtcacttcagctatccaacagttaaaatataaatcagtttgacaatctgaaagcagcagttttaatcctgaattccaggggtgctctctctctctctctctctccctctttctctcactcacacacagacacacacacatgccagtcattcagcctgaacagaaaaattcaggtgtgatatttcttgattcaagagc

SEQ ID NO: 173874 - DNA, 564 bp, Homo sapiens
atttacaattggtttttataacaccatagatgtaatattttgaaaagactttacaaaagtaatataaatgtgaaaatgatttgctggttttaaaggagctttataaaacaatgcatcttttgttctttcccccaatgtttctagccaagtaaagacagtgtttttagaaatggagaaataaactaagtttcttcatttggaggactataaatgactccctcaaagtcaaagaaagagtaggttcatcatcacgatttcagctctgattttctagatgaagttgagtttccctttctttcttgttaaagtttatttccaggccaagcctgtgttcaggttagtttcaatcagtgttcagcagagatggaaatcagctggctacaatcctgcacatgctttcctagcytagaggatggagagtcaaaagcgggactctatgtacactgtacctaaaatccaaatccatcctacccttccctacagagagccccaaaatggcctagtcagatgccaatcaaatgcttcttgttggggtttggataatctggaaactgatttaaaaca

SEQ ID NO: 173875 - DNA, 564 bp, Homo sapiens
atttacaattggtttttataacaccatagatgtaatattttgaaaagactttacaaaagtaatataaatgtgaaaatgatttgctggttttaaaggagctttataaaacaatgcatcttttgttctttcccccaatgtttctagccaagtaaagacagtgtttttagaaatggagaaataaactaagtttcttcatttggaggactataaatgactccctcaaagtcaaagaaagagtaggttcatcatcacgatttcagctctgattttctagatgaagttgagtttccctttctttcttgttaaagtttatttccaggccaagcctgtgttcaggttagtttcaatcagtgttcagcagagatggaaatcagctggctacaatcctgcacatgctttcctagcctagaggatggagagtcaaaagcgggactctatgtacactgtacytaaaatccaaatccatcctacccttccctacagagagccccaaaatggcctagtcagatgccaatcaaatgcttcttgttggggtttggataatctggaaactgatttaaaaca

SEQ ID NO: 173876 - DNA, 564 bp, Homo sapiens
atttacaattggtttttataacaccatagatgtaatattttgaaaagactttacaaaagtaatataaatgtgaaaatgatttgctggttttaaaggagctttataaaacaatgcatcttttgttctttcccccaatgtttctagccaagtaaagacagtgtttttagaaatggagaaataaactaagtttcttcatttggaggactataaatgactccctcaaagtcaaagaaagagtaggttcatcatcacgatttcagctctgattttctagatgaagttgagtttccctttctttcttgttaaagtttatttccaggccaagcctgtgttcaggttagtttcaatcagtgttcagcagagatggaaatcagctggctacaatcctgcacatgctttcctagcctagaggatggagagtcaaaagcgggactctatgtacactgtacctaaaatccaaatccatcctacccttccctacagagagccccaaaatggcytagtcagatgccaatcaaatgcttcttgttggggtttggataatctggaaactgatttaaaaca

SEQ ID NO: 173877 - DNA, 615 bp, Homo sapiens
tgtaaccttacccccaaccccgtgctctctgcaactgtgctgtgtcaactcagggttaaatggattaagggcagtgcaagatgtgctttgttaaacagatgcttgaaggcagcatgctggttaagagtcatcaccactccctaatctcaagtacccagggacacaaacactgcggaaggctgcagggtcctctgcctaggaaaaccagagaactttgttcacatgtttatctgctgaccttctctccactattgtcctatgaccctgccaaatcccyctctccgagaaacacccaagaataatcaataaatactaaaaaaaaaaaaaaaaaaaaaagaaaaaataagaatttgagcagttttaaaacttagaaatactccaaatattaatttaaagaatcctttaaaatgcaattaagtatttaagctaaatggatatgtaaaaagaaaaatttagtggtatcttcaggaaaaagaaaggatcaactttgtgaaaagtaactagcaattaaaattttaaaacagacttatttaacacacttcgaaaatgcgattaaatccatcagttgaacctgattacttctgttcctaaggcagtttataataatatactaat

SEQ ID NO: 173878 - DNA, 615 bp, Homo sapiens
tgtaaccttacccccaaccccgtgctctctgcaactgtgctgtgtcaactcagggttaaatggattaagggcagtgcaagatgtgctttgttaaacagatgcttgaaggcagcatgctggttaagagtcatcaccactccctaatctcaagtacccagggacacaaacactgcggaaggctgcagggtcctctgcctaggaaaaccagagaactttgttcacatgtttatctgctgaccttctctccactattgtcctatgaccctgccaaatccctctctccgagaaacacccaagaataatcaataaatacwaaaaaaaaaaaaaaaaaaaaaagaaaaaataagaatttgagcagttttaaaacttagaaatactccaaatattaatttaaagaatcctttaaaatgcaattaagtatttaagctaaatggatatgtaaaaagaaaaatttagtggtatcttcaggaaaaagaaaggatcaactttgtgaaaagtaactagcaattaaaattttaaaacagacttatttaacacacttcgaaaatgcgattaaatccatcagttgaacctgattacttctgttcctaaggcagtttataataatatactaat

SEQ ID NO: 173879 - DNA, 517 bp, Homo sapiens
tgagacacaataacagtttttatagagacaatacttaatgattcagaaccacaactaagaataagaagagaccttaggcttggaggcaacatagccaactaaatacagccaggaggaacatctgccaccaagtgaccagaacatcagtaagactggcrcactccaagcagatcttcagagggaaggcattgagagcagacagagggaggacagagatactgggttgaagggggagaaagctgggaaccctgcccaggactaccatgcactgagactcattcctggccccaagcaagtcctggggaaggggtgagttaagcaggtgtggagcaacctcctctcaccactggtctcaggaatcttggcggcagaagaccccatgacccccacagacacttgaactggtggagagagcagcttagagaggtggtaggggcagaactccagctggcacagatcccagaggatttggtgcgggagtgtctgtagtggagcacagccagggatgcccatctcc

SEQ ID NO: 173880 - DNA, 371 bp, Homo sapiens
gaattcagaatatggataggaatgaagattattgacattcatgagaaagttgaaacctaatccaaggaatctaaggattaggataaaacaatacgtgagctgatgaacaaatgaccattacaagaaagaaccaaactcatctgatagatttaaaactcactttgagaatttcagaatacaattgctagcattaacagcagaattgaccagctaaggaaagaatctcagggctcaaacaccggctctctgaaataacacagtcagacaaatataaagaaaaagcagtaaagaagaataaacaaaamctctaagaaataagggattatgtaaaaatgccaaaagagaggcctattggtgtccctgaaagaaag

SEQ ID NO: 173881 - DNA, 492 bp, Homo sapiens
ttagcttcctatttctggatgtctaaatatgttgctaaacttggaatgtyccagctattattttttcaaatggtttttctataccttttttttccttttgccttcagggacacaaaataatttgaatacctggttgctttacggtgttacataagtcatgtggatttattccttctctttttttatctacttttgtctgactgggttatttcaaaagacctttcttcaaattctaaagttctttcttttgcttcatatagttcctttttgaaggttttaagtgtattttttatttcattcagtgatctcttcatttccagaatttccatatgaatttttttattataactatctctggtgaatttctcattcatatctggtgtggtttggctgtgtccccacgcaaatctcatcttgtattgtagttcccataatccccatgtgtcatgggataggccaggtgggaggtaattgaatcatgggtgtgggttt

SEQ ID NO: 173882 - DNA, 492 bp, Homo sapiens
ttagcttcctatttctggatgtctaaatatgttgctaaacttggaatgttccagctattattttttcaaatggtttttctataccttttttttccttttgccttcagggacacaaaataatttgaatacctggttgctttacggtgttacataagtcatgtggatttattccttctctttttttatctacttttgtctgactgggttatttcaaaagacctttcttcaaattctaaagttctttcttttgcttcatatagttcctttttgaaggttttaagtgtattttttatttcattcagtgatctcttcatttccagaatttccatatgaatttttttattataactatctctggtgaatttctcattcatatctggtgtggtttggctgtgtccccaygcaaatctcatcttgtattgtagttcccataatccccatgtgtcatgggataggccaggtgggaggtaattgaatcatgggtgtgggttt

SEQ ID NO: 173883 - DNA, 366 bp, Homo sapiens
attctaaaaggagaaaaacttgcaggataaccacacccaacagaggactactacaaacagaataaaatggcagcrtagtgtgagtaggccaagaaaggttctgtaatggcaggtctcaaagttccttggctgttgtgcagtggctcttgtgtccaggtattccttcatgatcccagcaggatatgtgaaaggtggttgtttatagagttaagagtgagaagccattctggtcactgtgagatgatccccacagcagatgctgcagagcagacagactaagccagggttcacagagtagatgtggttgagacatgaggacctgaaatgctgttgaaaaatgagaagaaaacaaatgagaaagggaga

SEQ ID NO: 173884 - DNA, 455 bp, Homo sapiens
agtttagagctgtgtctgcaaatagtaaatactcaataagtgttagacatacatcacaaagtagttataaaaaagacacagtcatctgacaagtaatcgtttatactttcaaagaaattacaaaccatatagttacatttgcttgtaatatatacacatataatatttataatacacatacatacattcacatatatacaaacatacagagaaaaaagagctataaaaggagacaccatgatacaaaggagattataaagcaacaaaagattaaaagttatcaggcagagcttaagatagaaatggaagacaaaaataarcattactagaaacatgaaagctatattagaatgacaaactaaaataaatacaaataaaaaagtcaaagacacaaaataataataggcttgaggaaatcactcaaagtacttgataacagaaataaaataccatcc

SEQ ID NO: 173885 - DNA, 403 bp, Homo sapiens
ttttactgctctagcctcactttcctcagcctcctrcagcatcttccctgtaagctacatcccttcctctctggatgaagtcctcttcattgaccaactttctcacttagttctctaagatagtgaggatctgtctgctttcttcttgaccattagtggataggaaaaaaatgctctgattttctgtaaccatttgtcaccaaggccataaagacattgaactaatttccttattggagttcattattggaagtcttgaggagtttacacatttatctacaaagtaagtaggccagctcatttgtcttggctcatgtgtaatctttaaagcatattgaaaaattactattctcaagtaaggataatgtatatctcaggtcacttacagtctcaaagttttgtc

SEQ ID NO: 173886 - DNA, 403 bp, Homo sapiens
ttttactgctctagcctcactttcctcagcctcctacagcatcttccctgtaagctacatcccttcctctctggatgaagtcctcttcattgaccaactttctcacttagttctctaagatagtgaggatctgtctgctttyttcttgaccattagtggataggaaaaaaatgctctgattttctgtaaccatttgtcaccaaggccataaagacattgaactaatttccttattggagttcattattggaagtcttgaggagtttacacatttatctacaaagtaagtaggccagctcatttgtcttggctcatgtgtaatctttaaagcatattgaaaaattactattctcaagtaaggataatgtatatctcaggtcacttacagtctcaaagttttgtc

SEQ ID NO: 173887 - DNA, 403 bp, Homo sapiens
ttttactgctctagcctcactttcctcagcctcctacagcatcttccctgtaagctacatcccttcctctctggatgaagtcctcttcattgaccaactttctcacttagttctctaagatagtgaggatctgtctgctttcttcttgaccattagtggataggaaaaaaatgctctgattttctgtaaccatttgtcaccaaggccataaagacattgaactaatttccttattggagttcattattggaagtcttgaggagtttacacatttatmtacaaagtaagtaggccagctcatttgtcttggctcatgtgtaatctttaaagcatattgaaaaattactattctcaagtaaggataatgtatatctcaggtcacttacagtctcaaagttttgtc

SEQ ID NO: 173888 - DNA, 618 bp, Homo sapiens
ttgacgttactgtcactataatactacttatattacaaagcttggagagaagttgagagtatgatattcaaacaacttactggctaccatctgactcttttataagccccagaattccacagtgatatctctcaatgtaatgtgcttattcaatttacaagataaaagagtactgaaagattatcttggaattgtatttcttcctttcaaatgtgggtttcttttttttatgtaatactggctcaagatctccatcctaaaaagcatacagtcctatggctatgacctatcaaactaagggaagagttaaaataatctgtattctcaggatcctctctactgagaggcaaaggcatgtgggaaaaagaatttggattcagactttgtttaaattctgattgaycacttgctaactgtgtgccctaggatggtgattttctgggcctcagttttcccatctttaaaatgagggaagggaatgggtagaaataatacctaccttgcagggctgttatgagtatttaggcaaagtgtaaaatgtgcctagcagagcgcgtggccagcaggcatgtgctccttaaacagtgacaattattcctagtatcacccagtagcagt

SEQ ID NO: 173889 - DNA, 618 bp, Homo sapiens
ttgacgttactgtcactataatactacttatattacaaagcttggagagaagttgagagtatgatattcaaacaacttactggctaccatctgactcttttataagccccagaattccacagtgatatctctcaatgtaatgtgcttattcaatttacaagataaaagagtactgaaagattatcttggaattgtatttcttcctttcaaatgtgggtttcttttttttatgtaatactggctcaagatctccatcctaaaaagcatacagtcctatggctatgacctatcaaactaagggaagagttaaaataatctgtattctcaggatcctctctactgagaggcaaaggcatgtgggaaaaagaatttggattcagactttgtttaaattctgattgatcacttgctaactgtgtgccctaggatggtgattttctgggcctcagttttcccawctttaaaatgagggaagggaatgggtagaaataatacctaccttgcagggctgttatgagtatttaggcaaagtgtaaaatgtgcctagcagagcgcgtggccagcaggcatgtgctccttaaacagtgacaattattcctagtatcacccagtagcagt

SEQ ID NO: 173890 - DNA, 482 bp, Homo sapiens
tacacagtcccatagcgggtaggagtgcaacagaacagcattctggggtggtggcaggggctgcaacagggtaaaaaacacataggcaggctggraagtcagatgataaaggctgaggagtgagtgggtcactagaaggtaaaaacagccatccaatcatctccaagaagtcctgaggtcaaattccagagagttggaggttggccaaaaagataagcaggattgagtgaggactcttgggaagcaggcagacttgagtaggctgttggtttagaaatagatggtggtagtgagggagaaattaaataaacaagcatgatttgtggtacaagttacagaagagaaaggaagacagggatcaagtgctggtgtggagttatttatggaatgaaggaataatgattctttgatcacattagtagttaatgtttgagtatagataggtggaggaaggttgcaggagggaggaagtgttcctctcc

SEQ ID NO: 173891 - DNA, 347 bp, Homo sapiens
ctttttaaaatctacagttcaatggttttgctgtattcacaaagtgattgtattagggtcatccagagaaacagaaccaatagaaggtgtgtacrtgtgtttagataaagagatttattattatgaggagttggctcacctcattacagaggttggcaagtgccaagattggcagagtaaatcagcaggctggagacacgggagagcccatgttgcggctctggtgtccccctgaaggcccaagacccaggagagccaatggcatcgttccagtcccgagacccaggaaaagcgcatgtgtcagtttgagtctgaagcaggaaaaatctgatgttccaggttgaagg

SEQ ID NO: 173892 - DNA, 347 bp, Homo sapiens
ctttttaaaatctacagttcaatggttttgctgtattcacaaagtgattgtattagggtcatccagagaaacagaaccaatagaaggtgtgtacatgtgtttagataaagagatttattattatgaggagttggctcacctcattacagaggttggcaagtgccaagattggcagagtaaatcagcaggctggagacacgggagagcccatgttgcggctctggtgtccccctgaaggcccaagacccaggagagccaatggcrtcgttccagtcccgagacccaggaaaagcgcatgtgtcagtttgagtctgaagcaggaaaaatctgatgttccaggttgaagg

SEQ ID NO: 173893 - DNA, 488 bp, Homo sapiens
gactgtactaatgaggaaggttgagcctgtaggttttacacactcatggcaacttcaaggcagagaggccactgccaactgagggccacgggcaggagctttgtgagcccatcagcaagtctggaagatcaaggctcctggtcacagagagtagctgctatctggtcaattctgcagaaaacattatagctctggacaaaatatttgaaagaacaaaataacaacagcctggagtcagtatagaatatctcaagtaggtaraagctggagtagagtctacacctgacagaggggaataaaactagataagtttctggtttctggaggcttttttgcccagaggtaggtactgagcaatcaaacttggataaaaagtcttaaaagcatccagggaaaaacaacatgtggtctacaggggaatagctagatgaatgctgtttccttgacagaaacaacggaggccaaagacactggaaccctatatttta

SEQ ID NO: 173894 - DNA, 490 bp, Homo sapiens
taccacccatctctgcactgttgcaatatcctgtttaacaacactcacctttatacaccatgtttacatcctcaaagccctstgacctttctaatacaggcacatattacgtttttcatactgtcctcttctctctcaaacacttacttaagggaaagacctgatcctactttcaaaacatttgaagtgagtggttaagtgactttaactgaagcttcactaaagcccagatccaagtcaactgcatattagattgactcagtccctcacactaatggcccaatagaagaagggtacattctttttccaggagacatatgcttactataggcactactttttaaaaaatatactacatttcagactaaaaaaattgcaagacatgcaaagaagcagggcaatgagactaataatcaggggaaaaattaccaatagaagtagacccacagatgactgagtgttggaattattagacaaggaccttaaataa

SEQ ID NO: 173895 - DNA, 491 bp, Homo sapiens
ttaccacccatctctgcactgttgcaatatcctgtttaacaacactcacctttatacaccatgtttacatcctcaaagccctgtgacctttctaatacaggcacayattacgtttttcatactgtcctcttctctctcaaacacttacttaagggaaagacctgatcctactttcaaaacatttgaagtgagtggttaagtgactttaactgaagcttcactaaagcccagatccaagtcaactgcatattagattgactcagtccctcacactaatggcccaatagaagaagggtacattctttttccaggagacatatgcttactataggcactactttttaaaaaatatactacatttcagactaaaaaaattgcaagacatgcaaagaagcagggcaatgagactaataatcaggggaaaaattaccaatagaagtagacccacagatgactgagtgttggaattattagacaaggaccttaaataa

SEQ ID NO: 173896 - DNA, 614 bp, Homo sapiens
tgtaaatccttatacttcctcctgcctacaacagacatattgtatgggtattttgttctcatcctttcataaattttatcttttttcttcatcttggtgatgcaagctgcatgtctatttagcataataagcatattctgtgaaagaatgaaaacaaacaataacgtattatttttcaccattgcagactttatgcatttcttaaagacagaaaggcagaaaaatccagactgtaatatgcaacagggtttattattattttgtctgacaattttctatgaacattttcaaatagaaaagttgaaagaattttactgcaaatgcccacacattcaccacttagatcctacaaattaatattctgctatatttgctttattatgtatctgtttatctatccattcttckaatcacccatcagtctctcttatttttaaaatgcatttcaaagaaagcagcaggtgttaatatagctcaatcctaaaaccttcaacaaacatatcattcattcgattttgatatttgttcatagtattatttttggaaagataaaatttatatacaaagaatttgaaatatcttaagtgtatattctctgagtctgggcaaatctg

SEQ ID NO: 173897 - DNA, 648 bp, Homo sapiens
tatccattcttctaatcacccatcagtctctcttatttttaaaatgcatttcaaagaaagcagcaggtrttaatatagctcaatcctaaaaccttcaacaaacatatcattcattcgattttgatatttgttcatagtattatttttggaaagataaaatttatatacaaagaatttgaaatatcttaagtgtatattctctgagtctgggcaaatctgtactcctgtgaaacccaaaattctatccagatataagacgttacccttgtattgtgtcctggggctgcctttttactacagcctgggtggcttacaacagaaatgtattatctcacggttctggaggctacaaacctgaaatcaagatgtgggtggggccatgcttcctctgaaggctccagggaggaatccttccttacctcttcctagcttctgtttccctggtttgcagctgcatcactccatctctgcctctgtctttacatggccttcttctctgtgtgtctcttttcttataaaggacacaagttagtggatctagtatccacccaaatccagtatgcctcatcttaacttgattacatctgcaaagatcctatttccagataaggtcacacttacaggtaccagggtttagacttcaagatg

SEQ ID NO: 173898 - DNA, 570 bp, Homo sapiens
ctattgattttggtgtgatttagaacttatcagtacaacccaggagaggcaaaatgaaatttggagtcaaaaataagtgggctatcatctggattctacctcaattttgacatgagaacatagctttatattaacctatgtctgtcagttcccatatttatgaaatggtattaattataccaaattatatctccttcatgggagtatggagggttaatttaaccattgtgtaaattctctagaacagtctatggcatgtggtagaggctcagtaaatgatgagtgttttcttcccgctttctcattcttaaagttccaatttgaacgttaaaatccttcaatacttcattaagytttgactctcttcaaaaagatgttgggcttaaaaagccttactgtgtaagaggcccatgctaaatgctttacacattctttaagcaagaaactcagcatcatatcccaagcattgcactcttcacttcccaatcctgcaccccccacccccatcattaggccaaagtcccctcccttatgacggagtcagcaatattgggaacaagagcttgccaa

SEQ ID NO: 173899 - DNA, 570 bp, Homo sapiens
ctattgattttggtgtgatttagaacttatcagtacaacccaggagaggcaaaatgaaatttggagtcaaaaataagtgggctatcatctggattctacctcaattttgacatgagaacatagctttatattaacctatgtctgtcagttcccatatttatgaaatggtattaattataccaaattatatctccttcatgggagtatggagggttaatttaaccattgtgtaaattctctagaacagtctatggcatgtggtagaggctcagtaaatgatgagtgttttcttcccgctttctcattcttaaagttccaatttgaacgttaaaatccttcaatacttcattaagctttgactctcttcaaaaagawgttgggcttaaaaagccttactgtgtaagaggcccatgctaaatgctttacacattctttaagcaagaaactcagcatcatatcccaagcattgcactcttcacttcccaatcctgcaccccccacccccatcattaggccaaagtcccctcccttatgacggagtcagcaatattgggaacaagagcttgccaa

SEQ ID NO: 173900 - DNA, 395 bp, Homo sapiens
tccaaatttgcttttcatggaaaaaactcttaacaggtcctcttgaacacaggtttctgataactttcagatcaataaactaccccagcctttaccrctatgcaatataggcatgtaagaaacttgtacttataccctttaaatatattaaaacaaatgttttaaaaaaataaacacaaattcctagaactctaataaacttaagggttcaaaaaactgctaagcaagatcaagcaaaacaaaaaatctatgaaattaagataatagttttataacttttatttaaaacactgttggttgtattctagatttaagaaaggtttctcacagatgttatctataatttacatcagtttggtaaagcacacttgtaaacaaaggtggaagcatttggt

SEQ ID NO: 173901 - DNA, 467 bp, Homo sapiens
tccaagtccgcaggatcaaggtggcagtaacacccccaggctcccagtgcccacagggctctggccaccctttggagaaggccctygactctcgggatccagttgaggaagatcttatgaacacctgggtgtctccttatggctgaaccacaggtaacaggttcttcaaggcaccaaaccaggacacacaagttgggtcctaaacctcagtatctgatgcagttttcagcagctacagtttccgattagccctcagcgcagctagtgtggtgccgctattatggtgcattccccatcagcaccctgaccccaaaaaatgaggacaagttgatccttgaggtcccttctggcccgcacatgctatgactttatcaggcaaaactctcctggaatgtggcaggatgtggaaaccagtaccgagatcctgacctcctaaccttcctttctggctctcccatcatttgttt

SEQ ID NO: 173902 - DNA, 467 bp, Homo sapiens
tccaagtccgcaggatcaaggtggcagtaacacccccaggctcccagtgcccacagggctctggccaccctttggagaaggcccttgactctcgggatccagttgaggaagatcttatgaacacctggstgtctccttatggctgaaccacaggtaacaggttcttcaaggcaccaaaccaggacacacaagttgggtcctaaacctcagtatctgatgcagttttcagcagctacagtttccgattagccctcagcgcagctagtgtggtgccgctattatggtgcattccccatcagcaccctgaccccaaaaaatgaggacaagttgatccttgaggtcccttctggcccgcacatgctatgactttatcaggcaaaactctcctggaatgtggcaggatgtggaaaccagtaccgagatcctgacctcctaaccttcctttctggctctcccatcatttgttt

SEQ ID NO: 173903 - DNA, 508 bp, Homo sapiens
gcatccagaaagctgcacagtggtggctctaacaacacatgcatctctcctaatgagagagctctcaattattataaattactcaacatgataaagttaaattggcttttaaactacrctgacattatcacaagaaatttcaacattatatctgtaaacaaaatgaaaagctgttagattattttttagatatagtttctactattataaagttctagtatttttcttaaaccaccacaaaagaaatttgaacactgccttagtctgcttgggttactatagcaaaatgctatcaactgagtaactcatatataacagaaatttatttctcacaactctggaggctgggaagtccaagatcaaggcagacgcaatgtcagtgagggcccactttctgattcagaaatagctccttctagctgtgtcctcatatgatggaaagaatgagggatctcttgggagcctattttattaaggcactaatcccattcatgagacctccactcat

SEQ ID NO: 173904 - DNA, 470 bp, Homo sapiens
tcctaacaaactgtcccaatgtcatataaggaaacatgatctattacattcctttataacaaygtggagagactataaacctatgtaagtagtaaaactatatcagagactcaggagactgactaaaaggcctggatctgcagtgtattatctgtataaaaattggcagggggaagctaaaaggaaaggagattggagatctcaattctatcatggtgtatttcatacgcaaatcagagcatgcattgttttttgtttttggaaagagaagggaagtgtgttctgccccatgtttccttccgtgtttatagttcaaactctatatatacttcaggtattttttgtttagcccttcattataaatgggcaggaaattgtttatcaacctagccagtttattactagtgaccttgacttcagtatcttgagcattcttttatatttttcttttattatcctgagtctgtaac

SEQ ID NO: 173905 - DNA, 508 bp, Homo sapiens
  misc_feature (1)...(508): n = A,T,C or G
tgaatccatctgtcagtaatagccaccatttaatgaacacatactgtatgctatatacttggcatggataataatatttaatccttaaaagcaccctgtgaggtacaggtggtattatcaccaatttatagatgagaaaatgaggatttagagagcggttaggtaagtggcccagtgtcacatagctaaatgggaacactaggtcagagcccccttttataaggcttattttatactatcaaacagatacgaaagaacatcgttctaaaaggcaaatgttagcttttcttcatcctgattctaggcatgtgttgagagactgtcaagtaatgtgttgggattgggacacaaaatgtctatttcctaatctactatttggggagctttataaaggatgtgaggttactttgaatggcstgtctttctttttaaaaaaaagctatctctaagaaaccatgtgggttcctattgtgttagcannnnnnnnnnnnnnnnnnnnnnnnnnnnn

SEQ ID NO: 173906 - DNA, 567 bp, Homo sapiens
agtatcctcctcctacctasgcaaacatgaaacctaacagaggattcagtgttaatttgtctcttaaagacaattctgcattaagaaatggattactttgctataacctcagcatataaaaagtctaaagaatctgtgcattctgagtttgtgtatttttggtctcaggctgtgatttatctgaaaggccttggagagaaagatataggcctttacctagatcaaaatcaggttgaaacaataaaggtattttatgctttgtgtaagctggtaaataccatgacttttggaataacagtcttgctgaaaaattgacacacttttccttctggtatgtctttgcataaattgttcctctttctgcaagattaactgataccatctgtgagtattctatccccactctcagcttgcatttaaatctgcatgtttcctttctctgcctcttttcaaaggtgctagaatacaagagctacccttagctaatggccaaacactccgtctgagttccctttcttttaaccccttgcttccaactctgcatctaaaggcaaaaacaatcctctg

SEQ ID NO: 173907 - DNA, 567 bp, Homo sapiens
agtatcctcctcctacctaggcaaacatgaaacctaacagaggattcagtgttaatttgtctcttaaagacaattctgcattaagaaatggattactttgctataacctcagcatataaaaagtctaaagaatctgtgcattctgagtttgtgtatttttggtctcaggctgtgatttatctgaaaggccttggagagaaagatataggcctttacctagaycaaaatcaggttgaaacaataaaggtattttatgctttgtgtaagctggtaaataccatgacttttggaataacagtcttgctgaaaaattgacacacttttccttctggtatgtctttgcataaattgttcctctttctgcaagattaactgataccatctgtgagtattctatccccactctcagcttgcatttaaatctgcatgtttcctttctctgcctcttttcaaaggtgctagaatacaagagctacccttagctaatggccaaacactccgtctgagttccctttcttttaaccccttgcttccaactctgcatctaaaggcaaaaacaatcctctg

SEQ ID NO: 173908 - DNA, 406 bp, Homo sapiens
gtggccccttccttccgcctctgctctatccagatccttcctctttttgaagttaaatgaaagctttatctcctctttgaatccactccattttttagaggtctttatttgtatgaactactagtgtgtttctagagtaattcagttctgggmtaccaaacgtataaatttaaaatcagaaaacctctgttctaatcccagctcttctacttactggtggtgtgacctttacgtgatttttcttctctgagctatttctaatctatgtaatgggcatagtaatatctgtcctatctcctagagtacaggtgcacatcagatgatctaatgtatatgagagtgctttagatgctgtaaagtatgagagtatgatataatgtaagttacaatgtgagaacacatctta

SEQ ID NO: 173909 - DNA, 589 bp, Homo sapiens
tggtaattattttccattagtaaatgaataaatgaatgaaggaaatgaattacttattcaaataatatatttcttgaaaaactgccatcttaagaggaattatagtaagcagctctatgaagttatagtttctgcatgaatgttgttgaggataattttcaatccattccacattgtactcttaaaaatgatccagagaaagtatttttcagtttaggtgtaattctgagtattttactttttaactcctgaaattcaagccatataacggagtcaggtgaggaactcaccatcagactttaaatgatccccatgcagtaaccactgcttctgaattgtataggaatatataattaacatctggaagacatgctttttggatgttgcttgtatataacactggtgaagatagatrcacaacagcaatgtcattatcgtgtgcagggtaatggtagttttcttgaattataacattcttgatatttcactgtgtttgtgggttacttaaaataacattccattctttgggatcatggaccctaaaaaatagatttattaattaaaagtcctgtgtattgtacttgtagga

SEQ ID NO: 173910 - DNA, 398 bp, Homo sapiens
gtcacttcatacacagaactaggaaataactcttttccagctgtcacctctctgggatttctccatactctcgagccgccaagggtcctttttcctggtgttctagctagaatgatggagcttattaatgacacctgtgctgtaattgcagttctgtgagactgcagttgcccaatctctccaagaaagttagagataagaaagagaaaaatgtaattccaattctcccctctgcccacctttcctgatttctctggctggaaggctaaattttctcttggggttttaggtgcccatgctgtcactgccaaagtactgcaccytgactaggggccccaccctcagggcagggccagggaagaaaaaatagacaatacaaaaaaaaaaaaaaagcacct

SEQ ID NO: 173911 - DNA, 564 bp, Homo sapiens
catgagatccacttttttagctctcacttatgagtgagaatatgtgctatttgtctttctatgcctggcatttcacttaacataatgacctccagttccatctatggtgcttcaaactacatgatttcatgtttttgtgtagatgacacatttttaaaatccattcatctgttgatggacacttagattgattccatatcttggctattgtgaatagtactgtaataaacatgggcgtgcagataccttttaaatttattgaattccgtttttggatgtatactcaggaatgggattgttggatcatgtggtagatctatttttagatttttgagaaacttccatactgtttttcatagtttctgtactaatttacgttcccaccagcaatgcactagtgttctccttttgccacatcctcaccagcatctgttattttctgcctttttggtaatagtaatcttaactraggtgagatgatgtcttattgtggttttgatttgcatttccctggtgactggtgatgttgagcattttttcatatgtctgttggccatttatatg

SEQ ID NO: 173912 - DNA, 525 bp, Homo sapiens
cgtggtggcacacactggtaatcccagctactcatgaggctgaggcaggagaattgcttgaacctgggaggtggaggttgcagtgagatgagatcatgccactgcactccagcctgggtgacagagcaagactccatctcaaaaaagaagcagtatgttggttttgagagtagagtgtagtagctgtggagccagaatgcctaggttcaracactcttaataaccagctacgtgaccttgggcaagatattcagactgtctgtgattcagttttctcatgataagaaaataatagtgtccccccagtaaggttatgtggaggataaaataacataatgtgtgcaaatgttaacacaatgatgatgatgttagctttcctaatcctcattcttgttgggtatatctgccatctctttcccaacttccccacaaacaattaaatgcactctatttttcatgagaaaaagtgagaacaagaaagaacatttaaaacaaatgtgatttaattttatagatgatatattt

SEQ ID NO: 173913 - DNA, 563 bp, Homo sapiens
tactactgtttgctccagaattctatttcccttttctcagtcgtgttattactgttttatttgtttcagccagcttgtcatccttctccaggaacttactgttagcaaagacttgcttactgacaaattcctgcctccttgaagaaatgctgaattaaattgttgagataaatcctttatgttcttgtaaatttttttctattattaaggttattttcttaattttatatttatttttgtatttttacattttattttgggcsttggatgatgggaaatagactgaaggataacaaacaatagctacactatctttttaaacatctatttttaatgttttgctctctatttcattaaaaattattgaatattaggcttaattttacagacttctctgcaagtttaaaaataaaatgaacctcagtacatgcatctatgtaatttatttggaagaagatatttctgaacattaatggaaatatgttcattttggttgtttaaaccatacaaagattatgaataaaataaagagtagattatagaataatagaactctacagacc

SEQ ID NO: 173914 - DNA, 563 bp, Homo sapiens
tactactgtttgctccagaattctatttcccttttctcagtcgtgttattactgttttatttgtttcagccagcttgtcatccttctccaggaacttactgttagcaaagacttgcttactgacaaattcctgcctccttgaagaaatgctgaattaaattgttgagataaatcctttatgttcttgtaaatttttttctattattaaggttattttcttaattttatatttatttttgtatttttacattttattttgggcgttggatgatgggaaatagactgaaggataacraacaatagctacactatctttttaaacatctatttttaatgttttgctctctatttcattaaaaattattgaatattaggcttaattttacagacttctctgcaagtttaaaaataaaatgaacctcagtacatgcatctatgtaatttatttggaagaagatatttctgaacattaatggaaatatgttcattttggttgtttaaaccatacaaagattatgaataaaataaagagtagattatagaataatagaactctacagacc

SEQ ID NO: 173915 - DNA, 532 bp, Homo sapiens
ctacttctggtttcctcctttcttggctaaacaaccttagcccctttagacatttaaatgccatgagcagatgctcaataatattacttggtggttagccataatttataktgcttatttatggaagtagatgaaaacagaagtcttatgtatttttaaacttttctttcacatatggcgtactttacagagagtgaggatttggatgaatggatagatgaatgcagctaatattatcattttggtctcatctaaaagcggggaaacataggaaacattagaaagaaagctaaaatgcacaagatgctattttactattaactcagacttttcttatgccagatggtgttggaggaaagcttttgttttcttgatgataggcatcttcttttaattttgccaaccagacacagttcctctcttttcagcatgcagagacacagcagccatcttttatacacctcttagatacagtaactggtttggcatttcctggtgactgtgagtctgacaattgctcagaatttcatca

SEQ ID NO: 173916 - DNA, 567 bp, Homo sapiens
attacctaaagcccccatggccaacaggactgtgagaaataaatttggaggtgagattacatggctgacttggatccgctagggaacatacaactctcgcaaaattatgcagtgagactttgagtggtagctttggaataactagtacttccattttcgacatttggctattttaaacctagctttctctgataccaaatgcctgaagggttctacaaaaacatttaacatattttaaatgcagtagctttacaaatacttgataattttttacaaatacttgataatttaaattataaacttcagatacacttcataactccttcacagctytgaattccatactgtatctggttttgttttatatatcatctgaaatttaaagacactttcatcatgtttgaagtaaaataattaatgaaatgtacacaaacagtattctctaaggcatttctaaccaatcatcaaggatggcatacaacatgtttcttaaaagtgttatgatagcatattattctaaatttggttactcccagagagtctaaaggaacattaccaaaggatata

SEQ ID NO: 173917 - DNA, 454 bp, Homo sapiens
gcattgcaacttcgctaatataacttaaaagcaaatgtatgaatgacccaagtgatttcaagtagttgtgtgccagaatacagacaaatactacttaaaggaatacatcaaaatctatcacccaacaatgcaaaattcaaaatatatgctattcaataaaaaattacaaggcagaccaaaaaagcagaataaaagaaccaaaagcaggaaaaaatatcaatcaatagaaaaatgtctccaaacggtagaagtgatggagttagtagaaaagaatattgaaayggagactctaaatatgactcacaagtttaataatatagaagacaacattaaattaaaaaagaaagaaattgaagatataaaaataatttctggaggtaaaaattaatatttttatttcttgaaaaaataattgattccttaaagcaaaaatagtaactatctattagggagt

SEQ ID NO: 173918 - DNA, 598 bp, Homo sapiens
acttaactaacatcatttttaaggcttttttagtttaatattttattgttttaaatgtattttagatacttaatatactgattatcagtatatttgcatagtttgaacttactctgcatacaaatagacctcaattattaaaaggtggttatgcaaattgacttgtttccaagatagtctgtctaggatccctttggtatttcccagacaaaaagaagtatatctccatgtgtaaaaagccccctaaatccagatatgatcagacaagctagaaaaactgactatatcaaatgagaatttcagctttaggagttgaagctcctcgtgtgtgtgtgtgcacgcgtacctctctctacaacccttaacataacagccgttcccttcmcagctcctccttctcctcaaatactcaatgagagcctcaagctttctcaatccaagaagacctcagtacttcagacttcatgtcatttattctttacgataactgtgagataggttatatgatcctcattttagagatgtgaaaacaaggctcagaaagttaaaccacttgcttaggtgaaataattatcatgtagcaaagattttaactgag

SEQ ID NO: 173919 - DNA, 598 bp, Homo sapiens
acttaactaacatcatttttaaggcttttttagtttaatattttattgttttaaatgtattttagatacttaatatactgattatcagtatatttgcatagtttgaacttactctgcatacaaatagacctcaattattaaaaggtggttatgcaaattgacttgtttccaagatagtctgtctaggatccctttggtatttcccagacaaaaagaagtatatctccatgtgtaaaaagccccctaaatccagatatgatcagacaagctagaaaaactgactatatcaaatgagaatttcagctttaggagttgaagctcctcgtgtgtgtgtgtgcacgcgtacctctctctacaacccttaacataacagccgttcccttcccagctcctccttctcctcaaatactcaatgagagcctcaagctttctcaatccaagaagacctcagtacttcagacttcatgtcatttattctttacgataactgtgagataggttatatgatcctcattttagagatgtgaaaacaaggctcagaaagttaaamcacttgcttaggtgaaataattatcatgtagcaaagattttaactgag

SEQ ID NO: 173920 - DNA, 435 bp, Homo sapiens
aaaaactaaattttgatcaagaagcacttagaaagtttgggcaaatactgtaaggagatagcaccgttctagctcaaagtgacttatattaaaaatacatattatcttcctggaaatatggggtaaaggtaagcaaaaatgaagttgacaggtgaatctatacaattagcttgatatattttaagctgaagtttcatcattggaaagaaaaagatgttcagtggaaaacttagagggctattattgagtgagatatttggaaggacatagagtccaatactctcagttaggctaagggtttccctccagctgatcacctcatgcctgtactttctttygccattaaagataaaataaagtgtgaataaaattgaaaccacacatgtaaagcaaacacaatttagataaaaggcaataatgtagtataaaataaaa

SEQ ID NO: 173921 - DNA, 303 bp, Homo sapiens
tttaccatttacctgactgtctttctctgtaccacagtacctgacctttctctgtcattcatcctccagatttccttgtacagcctcctctttggaattcaacatctctattgaggcaggggtgttacaggtgagcctgatrttctaagtccagcctatttatgagacttgagaatttccttagaggttgctttgtgattgaaattgagaggaatacttcccttcagcgaagctattgaccagtctgtcagatacacaccagacacaaaggacttgaattacacaattgtttggggaatgctc

SEQ ID NO: 173922 - DNA, 405 bp, Homo sapiens
aagcatggtgccagcatctgcttcaggttgggacctcaggaagcttttcctcatgttccgcaggtgtgccacataagagagagaataagagaaagaagtgaagaaatgccaggctcttcaatcagctmtcttgtgaactaatagagcaaaactcactcattactgtggggaaggaaccaagctattcatgaggggtccacccacagacccaaacacttccacagggtcccacctccaacactgggatgggagattttaacatgagatttggaagggacaaacatccaaactatatcatgtacacatatatatacaaacacataaacacacatacaataattaattcaatgtattgccttttgctttatagcaccttgaagatattgtgtgtttttttttaatata

SEQ ID NO: 173923 - DNA, 555 bp, Homo sapiens
ttattattattatatctgctatggtgatctgtgatcagtgatttctgatgttaccattgcaattgttttggggtgctgtaacaatgaacttacttgataaatgtcatgtgtgtctgactgctcyactttccttctctctctctctctctctctacttcagactgcctatttcctgagaacagcattattgaaattaggccaactaataaacctacaatgacctgtaagtgttcaagtgaaaggtagagttgctcatttctgatttgaagtaaaaagctagaaacgatgaagcttagtgaagaaggcatgtcaaaagctgagataggccaaaactaggcctcttgtgtcaaacatttagtcacgttgtgaatgtaaaggtaaaattcttgaagaaaattgaaagtgctactccagtgaacacacaactaataagaaaatgaacagtcttattactgatagggaaaaagttttattggtctggaaagaaaatcaaatcagctacaacattatcttcctaaagtcaaagcctaatccagagcaagccataattctcct

SEQ ID NO: 173924 - DNA, 555 bp, Homo sapiens
ttattattattatatctgctatggtgatctgtgatcagtgatttctgatgttaccattgcaattgttttggggtgctgtaacaatgaacttacttgataaatgtcatgtgtgtctgactgctccactttccttctctctctctctctctctctacttcagactgcctatttcctgagaacagcattattgaaattaggccaactaataaacctacaatgacctgtaagtgttcaagtgaaaggtagagttgctcatttctgatttgaagtaaaaagctagaaacgatgaagcttagtgaagaaggcatgtcaaaagctgagataggccaaaactaggcctcttgtgtcaaacatttagtcacgttgtgaatgtaaaggtaaaattcttgaagaaaaytgaaagtgctactccagtgaacacacaactaataagaaaatgaacagtcttattactgatagggaaaaagttttattggtctggaaagaaaatcaaatcagctacaacattatcttcctaaagtcaaagcctaatccagagcaagccataattctcct

SEQ ID NO: 173925 - DNA, 516 bp, Homo sapiens
taagaacatttgtgattcatggcagaaggtcagaagatctayataaacaggagtttggaaggagttccaactctcattgataactttgaggggttcaagatgttgtcactagaggaagtaactacagatgtggtagaaatattaatagaaagcaaactagaattagaaatggagcctgaagatgtgactgaattgctgcaatctcatgataaaccttgaaaagatgaggagttgcttcttatggatgagcaaagaatgtgatttcttaagatgaagtctactcctggtgcagatgctgtgaacattgttgaaatgacaacaaaggattttaaattgtgcataaacgtagctgataaagcagcaacggggtttgagaaggttgaccccaatttcaaagaagttctactgtgggtaaaatgctaccaaacagcatcacatgctacagagaaattttttatgtgtgtgaaaggaagagtcaattgctgcagcatactttattgttgtcctattttaaga

SEQ ID NO: 173926 - DNA, 617 bp, Homo sapiens
gtaactacagatgtggtagaaatattaatagaaagcaaactagaattagaaatggagcctgaagatgtgactgaattgctgcaatctcatgataaaccttgaaaagatgaggagttgcttcttatggatgagcaaagaatgtgatttcttaagatgaagtctactcctggtgcagatgctgtgaacattgttgaaatgacaacaaaggattttaaattgtgcataaacgtagctgataaagcagcaacggggtttgagaaggttgaccccaatttcaaagaagttctactgtgggtaaaatgctaccaaacagcatcacatgctacagagaaattttttatgtgtgtgaaaggaagagtcaattgctgcagcatactttattgttgtcctattttaagaaattgccacagccatcccaaacttcagcagtctccactgtgatcgtcagctgccatcaacaatgaagcaagactctttaccagcaraaagattatcacgttctgaaggctcagataatccttagcttattttagccataaactattttaaaattaaggtatgtacattatttttagacacatgctattgcacacttagtagactacaggatagcacaa

SEQ ID NO: 173927 - DNA, 617 bp, Homo sapiens
gtaactacagatgtggtagaaatattaatagaaagcaaactagaattagaaatggagcctgaagatgtgactgaattgctgcaatctcatgataaaccttgaaaagatgaggagttgcttcttatggatgagcaaagaatgtgatttcttaagatgaagtctactcctggtgcagatgctgtgaacattgttgaaatgacaacaaaggattttaaattgtgcataaacgtagctgataaagcagcaacggggtttgagaaggttgaccccaatttcaaagaagttctactgtgggtaaaatgctaccaaacagcatcacatgctacagagaaattttttatgtgtgtgaaaggaagagtcaattgctgcagcatactttattgttgtcctattttaagaaattgccacagccatcccaaacttcagcagtctccactgtgatcgtcagctgccatcaacaatgaagcaagactctttaccagcagaaagattatcaygttctgaaggctcagataatccttagcttattttagccataaactattttaaaattaaggtatgtacattatttttagacacatgctattgcacacttagtagactacaggatagcacaa

SEQ ID NO: 173928 - DNA, 657 bp, Homo sapiens
ggctggaggcagacaaattagttaggagactattgcaatattcccagggagagataacgagggattaaactaagaagagccattgggaatagcaaggagatgatgaggttatctaataaaaacccacagaaagtaacaaacataatggggaaagattagatgcattctgtttaaagttggaacaaggcaygggtgcctgctatgaggtatacttttcgatatagcacaggaattctgtccaattcagaaaattttgaagaataaataaggtgtatacagattggaagcaataataaatatgtgattgtttgcagatatgatgagatacaggaacacacacgcaaacacacacacacgtaaaaatctatagacaaactattaaaattcaaaccaaatctatcaatatgctggatacaagattatattacaaatcaacacacaaaagatccacaaattgaaccaaaaagaaattgtgccaaagaccaaatttccactcagggaatgtcctcacacaactgtctccctttttctccttcacatctaagggtggcaaacctccctgcccacttcaagggtgcccttacaaccagaaaactctactatctcttgtggttttcctatacttaaactgtacttatgtaaaacatcatttattaa

SEQ ID NO: 173929 - DNA, 657 bp, Homo sapiens
ggctggaggcagacaaattagttaggagactattgcaatattcccagggagagataacgagggattaaactaagaagagccattgggaatagcaaggagatgatgaggttatctaataaaaacccacagaaagtaacaaacataatggggaaagattagatgcattctgtttaaagttggaacaaggcatgggtgcctgctatsaggtatacttttcgatatagcacaggaattctgtccaattcagaaaattttgaagaataaataaggtgtatacagattggaagcaataataaatatgtgattgtttgcagatatgatgagatacaggaacacacacgcaaacacacacacacgtaaaaatctatagacaaactattaaaattcaaaccaaatctatcaatatgctggatacaagattatattacaaatcaacacacaaaagatccacaaattgaaccaaaaagaaattgtgccaaagaccaaatttccactcagggaatgtcctcacacaactgtctccctttttctccttcacatctaagggtggcaaacctccctgcccacttcaagggtgcccttacaaccagaaaactctactatctcttgtggttttcctatacttaaactgtacttatgtaaaacatcatttattaa

SEQ ID NO: 173930 - DNA, 657 bp, Homo sapiens
ggctggaggcagacaaattagttaggagactattgcaatattcccagggagagataacgagggattaaactaagaagagccattgggaatagcaaggagatgatgaggttatctaataaaaacccacagaaagtaacaaacataatggggaaagattagatgcattctgtttaaagttggaacaaggcatgggtgcctgctatgaggtatacttttcgatatagcacaggaattctgtccaattcagaaaattttgaagaataaataaggtgtatacagattggaagcaataataaatatgtgattgtttgcagatatgatgagatacaggaacacacacgcaaacacacacacacgtaaaaatctatagacaaactattaaaattcaaaccaaatctatcaatatgctggatacmagattatattacaaatcaacacacaaaagatccacaaattgaaccaaaaagaaattgtgccaaagaccaaatttccactcagggaatgtcctcacacaactgtctccctttttctccttcacatctaagggtggcaaacctccctgcccacttcaagggtgcccttacaaccagaaaactctactatctcttgtggttttcctatacttaaactgtacttatgtaaaacatcatttattaa

SEQ ID NO: 173931 - DNA, 483 bp, Homo sapiens
cacttcttctattgatatagcaattgagggaatgaagccaaagtcctatcatccctttccatagaggtttgtaaggttacagttaaccctgtgtaatttctgtccgtaagtccaaaggctttttcttttctctgaaaagaacaaactgatgctattaccctttgcttaatctgactacacagccttatacaaaataaaaggcattgtagccagtgaatccttgcagatattaatatttttaaataaatgacaagttataaacctaaagartatatagcctcatgagtaaacttagctgggttggatagtacagttaatacagtttatctggcatcatcctaactctatgagatacataaaatggtgcttcagtttagttaaacatatcagaaatgtctaattgcctgggtaatttttggtctcttcatcctctagaaaattaccagaggcttaagtaggaatgaagttggttttagtttgatc

SEQ ID NO: 173932 - DNA, 559 bp, Homo sapiens
tcagccctgtagtgtgctaygatgctggtgcctgtgaatagccactgccctccagcctgggcaacatacagagaaagcccctccctaaaaacaacaacaaaccgggacgtggagtcaaagcaaaaaccatgctgagtgtgagctcccaggcacaatgacgtaaattctctggcactcaaagcaactgtcaaattatgccagagaaagccaggtgtttgtggactaggtttaaatcaggcttatgggctgggtgtggtagctcacgcctgtaatcccaacagtttgggaggctgaggcaggcagatttcttgagctcacgagttcaagaccagcctgggcaacatggtgaaaccccatctctacgaagacatagaaaacattaggcgggcctagtggcaagcacctgtggcctcagctactcaggaggctgagacaggaggatcgtttgactccgggaggcagaagttgcaatgagctgagatcatgccactgcacttcagcctgggtaagagagtgagactctgtctcaaaataaataaataaaataaatcaggctcac

SEQ ID NO: 173933 - DNA, 559 bp, Homo sapiens
tcagccctgtagtgtgctacgatgctggtgcctgtgaatagccactgccctccagcctgggcaacatacagagaaagcccctccctaaaaacaacaacaaaccgggacgtggagtcaaagcaaaaaccatgctgagtgtgagctcccaggcacaatgacgtaaattctctggcactcaaagcaactgtcaaattatgccagagaaagccaggtgtttgtggactaggtttaaatcaggcttatgggctgggtgtggtagctcaygcctgtaatcccaacagtttgggaggctgaggcaggcagatttcttgagctcacgagttcaagaccagcctgggcaacatggtgaaaccccatctctacgaagacatagaaaacattaggcgggcctagtggcaagcacctgtggcctcagctactcaggaggctgagacaggaggatcgtttgactccgggaggcagaagttgcaatgagctgagatcatgccactgcacttcagcctgggtaagagagtgagactctgtctcaaaataaataaataaaataaatcaggctcac

SEQ ID NO: 173934 - DNA, 559 bp, Homo sapiens
tcagccctgtagtgtgctacgatgctggtgcctgtgaatagccactgccctccagcctgggcaacatacagagaaagcccctccctaaaaacaacaacaaaccgggacgtggagtcaaagcaaaaaccatgctgagtgtgagctcccaggcacaatgacgtaaattctctggcactcaaagcaactgtcaaattatgccagagaaagccaggtgtttgtggactaggtttaaatcaggcttatgggctgggtgtggtagctcacgcctgtaatcccaacagtttgggaggctgaggcagkcagatttcttgagctcacgagttcaagaccagcctgggcaacatggtgaaaccccatctctacgaagacatagaaaacattaggcgggcctagtggcaagcacctgtggcctcagctactcaggaggctgagacaggaggatcgtttgactccgggaggcagaagttgcaatgagctgagatcatgccactgcacttcagcctgggtaagagagtgagactctgtctcaaaataaataaataaaataaatcaggctcac

SEQ ID NO: 173935 - DNA, 514 bp, Homo sapiens
tgcatttcttaccaagaacaccacccttgggagggaggaagacaagcccaaccttagatacctgccaccaggtacaaggacctaacacccaccaattgatcacacacttcactcaggtgaaaagctgaactccctgactcagcttttaaggatctacagccctgccccacctttatgatctcatttccagccacaggaaacttctagttcttctctaaatatctttttttttttttaatcctctgcattcagttcaagatattccttccttcttaaccctccattctctggcctgggagaaattgtacttttctttaaggcccaatcaaatatcacttcctccatgttaccttgtctctttccccagcaaagtagtttaccatcactttgtagtgcttccatattgctttgtttatgcctctgttacagcatggattgtaggtagttgaatgtatgtctgtctcctcaactraactgtgagcttttccattgcagggaaatgcaacggagtcat

SEQ ID NO: 173936 - DNA, 386 bp, Homo sapiens
ttattactaggacaaaggaacagtaagtcttttcctttctaggaactacttctaaaaactatttctagagcaattcattctcagtaggatgccttacttatttaaatatagcatgaatcagatcaaatcactggaaaggcttgttrtcacagctcactgcagccttgacctcccatggccaagcaatcctcctacctcagcctccccagtagctgggaccacaggcatgcaccaccatgcccaactaatttttttattttttgtagagacagggtctcactaggttccttaaaatcccaggctcaagagatcctcccacctcaggagtgtcagagcattcaaaccacagcgactccatcttgaacaggggctgggtaaaataaggc

SEQ ID NO: 173937 - DNA, 386 bp, Homo sapiens
ttattactaggacaaaggaacagtaagtcttttcctttctaggaactacttctaaaaactatttctagagcaattcattctcagtaggatgccttacttatttaaatatagcatgaatcagatcaaatcactggaaaggcttgttgtcacagctcactgcagccttgacctcccatggccaagcaatcctcctacctcagcctccccagtagctgggaccacaggcatgcaccaccatgcccaactaatttttttattttttgtagagacagggtctcactaggttccttaaaatcccaggctcaagagatcctcccacctcaggagtgtcagagcattcaamccacagcgactccatcttgaacaggggctgggtaaaataaggc

SEQ ID NO: 173938 - DNA, 616 bp, Homo sapiens
gcccatgcccaccctcaagaacgttctctccctctcatatccctctctcttttacaatccaaatgatctggttatgtaaactttctcaatattggtacctgctgtgacagttaatatcatatgtcagcttgactgagctaggggatgcccaggtagttggtaaaacattatttttggctgtatctgggagggtgtttctggaagagactagcattggaatcagtagactaagtgcagaagattcaccctcattaatgtgggagggcatcatccartcccttgggggcacagatagaacaaaaaggtagagaaagagtgattctctcccatcaacagtccctccaccccacctactgttgtccagttcctaggcctttggcctgagactgagagtgacaccatcagctcccctagttcaggcccttggactaaattacaccacgggctttcctggttctgccatcttgcagacagcagatcatggtacttcacagtctccatgattgtgtgacccagttcccataataaacctcctctctctcaccctgtctctcctattgattcagtttctctgaagaactctgactaatacacttgcttagcccaaggatgtgct

SEQ ID NO: 173939 - DNA, 444 bp, Homo sapiens
agaattccttatttaaataaacaattaggattcctaacagtgtgtttacaaagagaaaatatttttaaattgttccmtcaccactggagatattagcatgaattaagattttagtcagaatcagtttgttatctcactgagggttcaaaaggcagaagtgatggtccttgctctcacagtgctagaggcaagatgaagagagaggacagacacacacattaaaaacacaacaatccaggttagtgtctgcatggtgatgactgatggtctacaacgtggttattaatgtcctatatgctgtgaggcactatggcctaggagctaaatacatgggctttggaaatgagggacttgagacttgaatcctgagtttttcatcttccttctgtagactgaaactctatgagtcagaggccacatttatattgtttactgtgcctggtg

SEQ ID NO: 173940 - DNA, 530 bp, Homo sapiens
agatcccctgcctgtaacaaaaggaagggacatacacaaagatgcmcagcacacaagcaaagcagaagttcagcatagacacaagtatgatgctgcttagggagacttggggcttcaggggaaagagacttttaggctaggttaggaagagatgtggctggctggataaggagatggaaggaaagggcaaagaggatggcacggtcagcacagggaccacagcaagtgagaaagcatttctggccatactattttttttttttttttttttttttgagacggagttttgctctgtcgcccaggccggagggcagtggcgtgatcttggctcactgcaacctccatctcctgggttcaagcgattctcctgtctcagcctgagtagctgggactgcaggtgtgcgccaccatgcatggctaatttttgtatttgtctggccaaactttttaagtccctgaatctctcctttctgggacctcccaaattctctagcagcagcatttttttttcatctgatataccctaatta

SEQ ID NO: 173941 - DNA, 483 bp, Homo sapiens
gagatcccctgcctgtaacaaaaggaagggacatacacaaagatgcccagcacacaagcaaagcagaagttcagcatagacacaagtatgatgctgcttagggagacttggggcttcaggggaaagagacttytaggctaggttaggaagagatgtggctggctggataaggagatggaaggaaagggcaaagaggatggcacggtcagcacagggaccacagcaagtgagaaagcatttctggccatactattttttttttttttttttttttttgagacggagttttgctctgtcgcccaggccggagggcagtggcgtgatcttggctcactgcaacctccatctcctgggttcaagcgattctcctgtctcagcctgagtagctgggactgcaggtgtgcgccaccatgcatggctaatttttgtatttgtctggccaaactttttaagtccctgaatctctcctttctgggacctccc

SEQ ID NO: 173942 - DNA, 530 bp, Homo sapiens
agatcccctgcctgtaacaaaaggaagggacatacacaaagatgcccagcacacaagcaaagcagaagttcagcatagacacaagtatgatgctgcttagggagacttggggcttcaggggaaagagacttttaggctaggttaggaagagatgtggctggctggataaggagatggaaggaaagggcaaagaggatggcacggtcagcacagggaccacagcaagtgagaaagcatttctggccatactattttttttttttttttttttttttgagacggagttttgctctgtcgcccaggccggagkgcagtggcgtgatcttggctcactgcaacctccatctcctgggttcaagcgattctcctgtctcagcctgagtagctgggactgcaggtgtgcgccaccatgcatggctaatttttgtatttgtctggccaaactttttaagtccctgaatctctcctttctgggacctcccaaattctctagcagcagcatttttttttcatctgatataccctaatta

SEQ ID NO: 173943 - DNA, 521 bp, Homo sapiens
aacaaaaggaagggacatacacaaagatgcacagcacacaagcaaagcagaagttcagcatagacacaagtatgatgctgcttagggagacttggggcttcaggggaaagagacttctaggctaggttaggaagagatgtggctggctggataaggagatggaaggaaagggcaaagaggatggcacggtcagcacagggaccacagcaagtgagaaagcatttctggccatactattttttttttttttttttttttttgagacggagttttgctctgtcgcccaggccggagggcagtggcgtgatcttggctcactgcaacctccatctcctgggttcaagcgattctcctgtctcarcctgagtagctgggactgcaggtgtgcgccaccatgcatggctaatttttgtatttggctggccaaactttttaagtccctgaatctctcctttctgggacctcccaaattctctagcagcagcatttttttttcatctgatataccctaattaggaccc

SEQ ID NO: 173944 - DNA, 478 bp, Homo sapiens
gcacagcacacaagcaaagcagaagttcagcatagacacaagtatgatgctgcttagggagacttggggcttcaggggaaagagacttctaggctaggttaggaagagatgtggctggctggataaggagatggaaggaaagggcaaagaggatggcacggtcagcacagggaccacagcaagtgagaaagcatttctggccatactattttttttttttttttttttttttgagacggagttttgctctgtcgcccaggccggagggcagtggcgtgatcttggctcactgcaacctccatctcctgggttcaagcgattctcctgtctcaacctgagtagctgggactgcaggtgtgcgccaccatgcatggctaatttttgtatttgkctggccaaactttttaagtccctgaatctctcctttctgggacctcccaaattctctagcagcagcatttttttttcatctgatata

SEQ ID NO: 173945 - DNA, 510 bp, Homo sapiens
atgtgtgttcaatcttcttgctatgaaaaatagtttttttaatctctgttaaatctaactttctctcttaccactctcttccttttcccttccatcctgatgtatctgttacctayagtgtcctgcgcctctgaaatggttacagaacagcagtacattcagtactatacaaaaagcacagagatactatttagcagcctttcagatttgatgctttggaataacttagcaaataaattgattagtttttattataatacagcaatatatttctcctgaatatcattttaaagttcatgtgtatgtatgtatgtgtgtatatatatatttttttcttaaattaataggctatatttcttagagcagttttaggtttacagaaaaattgagcagtgtgtttagagagttaccatgtattccctcaactcccccaccacttttccctgttattaacattttataatattgtggcatatgtgttacaatttatgtgccaatattgacacatta

SEQ ID NO: 173946 - DNA, 510 bp, Homo sapiens
atgtgtgttcaatcttcttgctatgaaaaatagtttttttaatctctgttaaatctaactttctctcttaccactctcttccttttcccttccatcctgatgtatctgttacctatagtgtcctgcgcctctgaaatggttacagaacagcagtacattcagtactatacaaaaagcacagagatactatttagcagcctttcagatttgatgctttggaataacttagcaaataaattgattagtttttattataatacagcaatatatttctcctgaatatcattttaaagttcatgtgtatgtatgtatgtgtgtatatatatwtttttttcttaaattaataggctatatttcttagagcagttttaggtttacagaaaaattgagcagtgtgtttagagagttaccatgtattccctcaactcccccaccacttttccctgttattaacattttataatattgtggcatatgtgttacaatttatgtgccaatattgacacatta

SEQ ID NO: 173947 - DNA, 571 bp, Homo sapiens
cattgaggtttctagggaaaagaaggaagtagatattcaaattcgtgagatttgtgaacaagtgtgacatttaaaactgaaatgactttgaaataatccacttgggaaggtgtataattagaaaaaagaagggagctcagatgatagccaggaaagcctctaatgtttaaaagtcaagcagataaggagagctagcaacaaacctgagatgacacagcccatgtgatagaaamaaaggcataaatcatggaagtcaagaaaagaaagtgcttccagaaggaagaaattaagttgaatactgcagaggtcaaataaaagtggagaaagctcactacctgtgttcacatccagacaactctgacaaaagccatctctgcatgctaggagctacagtctgattggtatggcaggacaaaatacaaggggagaagactgaaacagcaaatacaacataactcaccctagaggacttgctttaaataggagcacagatagggctttagctagaatgaaagtgggttcaaaggaaagcctacccccaacatctaggatgaaagatgctagaacaagt

SEQ ID NO: 173948 - DNA, 571 bp, Homo sapiens
cattgaggtttctagggaaaagaaggaagtagatattcaaattcgtgagatttgtgaacaagtgtgacatttaaaactgaaatgactttgaaataatccacttgggaaggtgtataattagaaaaaagaagggagctcagatgatagccaggaaagcctctaatgtttaaaagtcaagcagataaggagagctagcaacaaacctgagatgacacagcccatgtgatagaaaaaaaggcataaatcatggaagtcaagaaaagaaagtgcttccagaaggaagaaattaagttgaatactgcagaggtcaaataaaagtggagaaagctcactacctgtgttcacatccagacaactctgacaaaagccatctctgcatgctaggagctacagtctgattggtatggcaggacaaaatacaaggggagaagaytgaaacagcaaatacaacataactcaccctagaggacttgctttaaataggagcacagatagggctttagctagaatgaaagtgggttcaaaggaaagcctacccccaacatctaggatgaaagatgctagaacaagt

SEQ ID NO: 173949 - DNA, 470 bp, Homo sapiens
agaattctatttatttcagggtgttcttctggcttttgtgatattcctgacacatgagaaatcaagctgttgggccacagccaggccactctggctggaagatgtgctttgtgggccatataattgtttaaaacactttagggaggcatcattgaagtacaataagctgcacatatttaaagtgcacaatttgataggtttcaacatatgtatacacctgtgagaccatcattacaattaagataataagtattttcatcatgagttttctcatgcccatttagaatccgtctctctctgtccaccctatccctaagcaactacttacctgcttctgtcacttgtagatttatttgcattttatagaaytatacgtaagtgtaatcttacaatacatactgtgtttttgtgtgacttcttttacttagcatcataattttgagattacataattttgttgtatgtatcag

SEQ ID NO: 173950 - DNA, 508 bp, Homo sapiens
gagctctaacttctaagattagcaggctgccttcctttatgccatcaatgtattcttgaaaaggtgtatggaaatgcagtgcatgctaatcagagcatactccccggagactttagctttcatctcagagttgctttatcttcatctctgactgatgctcagtggacagtgattccaacaatgcaaccttaagtttttctgccctttgccctcaggctctcagccaaggggttaaycatgtgtaaacaagcctttacatgcacctgattaaaaacagctctgggatggaaccctttgtaaagaatcatctgttcaaagagaaaactaccccaacttacatctggtgagctaggaagttcatatatcatgttttcttaaagtgtggattccctattacaaacaaccattctgattggtcagtttactttgagagaaactctggcctcttcctaagcacaggggactgctctgtgtctggggggaagatgcatgagcctaggaattacaa

SEQ ID NO: 173951 - DNA, 368 bp, Homo sapiens
aagcctttacatgcacctgattaaaaacagctctgggatggaaccctttgtaaagaatcatctgttcaaagagaaaactaccccaacttacatctggtgagctaggaagttcatatatcatgttttcttaaagtgtggattccctattacaaacaaccattctgattggtcagtttactttgagagaaactctggcctcttcctaagcacaggggactgctctgtgtctggggggargatgcatgagcctaggaattacaaatgtctggagctctttgcatgttaggttcttagatgggtattgaggaaccctgcatattttctggggcgagtgctcacagctttcatctgatgctcaagtgagtcca

SEQ ID NO: 173952 - DNA, 584 bp, Homo sapiens
caggctaagaagtcctaccctcaggctccctggtgttgtgtgcaggtactggctgtggtagacagtggtagggtgatctccaaaccccaggtgggatgcttargttggggagtgggagtggttatgctgctgccctgctactggagagggcaggggtgcttttagtggtgggcagggttgcttttagtggcagccatagtcaggtgggtgggaaatacatattttgcttgtatcttagcctaggtggcagaagcttatatttcacttgcacttcagccacctcattggcaactggttcttcactcatatcttagccttgactgtagcagcccaaacttcactaacctcccagcccacggcagcagcccacagtaatggcagctatgggtggggagaggggttctgtctgggtgcaataaatgcacagtggctctgatgctggtggcaagtgtgatcattgccagtggcctgtgccttagtccacatagcagcagctaggtgcagtggtgactgtctgtgggggatgtcaacagggctccaggaataaggagatgtagtcgctgttgggccccagagcaaggcaa

SEQ ID NO: 173953 - DNA, 593 bp, Homo sapiens
tttcaggtacagtgtttttgatccctagcatttctttttttttcttagaattttcaactttctgtttacattgctcatctgttttggcatgctgtctaccttatccrtgaaatcttttagcacattaattaaatttgtttgaaatttctgcactggtcattgcaacatccctgttgtatcagactctgatactttctctgtgtcttctatgttttttccctttagtatgccttgtaatttttttcttcacagctggacatgatatactggtttgaaaggaatggctgtaaataagtctttagtaatgtgatggtaagctatggaaggaggggaagctttttatcaacctgtgattagttctcaggtatttacaggtgtttctgtttgttctccctctcctgatccctcaggttgattagattagctagagtgggctgtaggtaggtatctatgttctcccacatggaaggataaagtgggctggtgttgtgtattttacttcccgtagcttagttggactataaaacccctgaagtttagtctctgatttataagtttcttctgagagcagaccttgttaaaaagaatgtagt

SEQ ID NO: 173954 - DNA, 530 bp, Homo sapiens
tcatccaaaaacatcctcatggaaaaacctagaataatgtttgatgaaatatctgggcacctcatggcctagccaagttgacacataaaattaatatggggatgctggaaaaccagctaagacaaggaatggaaataggstagaaaggagttagttcaaataaattcagggaaaacaagaaccagtactaagcgtgcagcttttacttgttttcagtttagagtacagaaatagtatttaaatgtataatctttgggatcagatggatgcgattttacatggtgccagacctataatagcattatgacattgagcatttagtaaaccactctgaaccacgatttccttatgtgtaaaatgagaagtataatattggcctaattaggttgttagaataaatataatatatgtaaaacatttagcacattgacatttaaatatgaaaaataaactttcagatattgttaacatttgtatcaatatccttatgtgtatgagcagattgaatctcttagagaagcctagaatga

SEQ ID NO: 173955 - DNA, 369 bp, Homo sapiens
ctccagtcactattaatgaataataagataggagacaaaatatttgaagcaacagtgtactaaattatgtcacatattattttttattttcacctacttgtacatcaataaatgtcgcaatgttgcttttttaacaatcaattctaagcgatattgtaaaattttttctctcataaaaaatacaagcgaagtgaaagaaaacatcagttatcatagcagttagggaaaatatattgatatattcccttcaagtaatgctayccaagtgctagccaagatatatctagtatgtgtgtgtgtgtgtgcgtgtgtgtgtgcgtgtgtgtgtatgtgtgcatgcatgtatgtgtgtatgcatgttggattatt

SEQ ID NO: 173956 - DNA, 468 bp, Homo sapiens
gaaggcaacatcaagacctgtactccatgtgctgcatatggtattgatattttgtcagaactgtacacgaaacagaagaatctccttaacatagtttcatatctatattcaataatagtcaaagtagatatggctaagtaaaatatttcttttatttctttttctgaaatactgatttcattttcacatattgggtaattttgttcayaccacacccctccctatatgaagatcatttcgcaaatggagaaacataatgtggagggataaaatcatttgatttcggaatttaagtcacaaaggaaattcaggtgctgttttgggatttttagtcaaatcagagtctactgttctggctcttataaatgtgtatataagtgcaaaatattttagaactatctctattttctttaagataaaacattttcctaaaacaaaaaacaaaacaaataacccattcacctctgt

SEQ ID NO: 173957 - DNA, 468 bp, Homo sapiens
gaaggcaacatcaagacctgtactccatgtgctgcatatggtattgatattttgtcagaactgtacacgaaacagaagaatctccttaacatagtttcatatctatattcaataatagtcaaagtagatatggctaagtaaaatatttcttttatttctttttctgaaatactgatttcattttcacatattgggtaattttgttcataccacacccctccctatatgaagatcatttcgcaaatggagaaacataatgtggagggataaaatcatttgatttsggaatttaagtcacaaaggaaattcaggtgctgttttgggatttttagtcaaatcagagtctactgttctggctcttataaatgtgtatataagtgcaaaatattttagaactatctctattttctttaagataaaacattttcctaaaacaaaaaacaaaacaaataacccattcacctctgt

SEQ ID NO: 173958 - DNA, 620 bp, Homo sapiens
gttgacttgaacagaaccattaattatttgatctaatgtatacgtgtagaatatttcatccagcacaaacagaatatatattctcaagctcacatacaaccttcacaaggatagaccacattcgagggcataaaaatgactgcaaatatttaaaagaatagaaattgtataaattacgttttcagactacagtaaaattagcctagaaattaataaccgaaagatagttgaaaataccaaaagtatttggaggttaatcagtacatttctcaatattcaatgaaggaaaaaattcaagagtaatttcaaaatattttaactaaatggaaatgtaaatgaaagtaaaatttatcaagatgtgtggaatgtagcaaaaacagtgcttaaggagacatttataactttaatgtataaatacaaaaaagatgtttataattaatagtctaaactttgctttaggaaactagataaagaacaatttaagcccaaaacaaagagaacaaaataaataataaaagtttaaagtataaatcaataaaattaaaaatagaaaaraagtggagaaaaattaataaacttaaattggatacctgaaaagataaataaaagatgaactaagc

SEQ ID NO: 173959 - DNA, 373 bp, Homo sapiens
aaataagtcagggaatgaaaccccagatatcactcaggtctttcaaaaaaagataactgattactccactgattaacaaaacaaaaagccaatagtttcagcaaggtaacctttctattaaaagcatcaagaagtcaatttcttaayggggccagaaggaccatggagaaagatggtgttactagacccctgaaatcagggtgatatggtctggatctgtgtccctccccaaaactcatgttgaaatgtaatccttagtgctggtaatggtgcctggcaggaggtgattggatcatgtgggctatttctaatggtttagcgccatccactttggaattgtcttggcaatagtgagtgacctttcatgagatct

SEQ ID NO: 173960 - DNA, 373 bp, Homo sapiens
aaataagtcagggaatgaaaccccagatatcactcaggtctttcaaaaaaagataactgattactccactgattaacaaaacaaaaagccaatagtttcagcaaggtaacctttctattaaaagcatcaagaagtcaatttcttaatggggccagaaggaccatggagaaagatggtgttactagacccctgaaatcagggtgatatggtctggatctgtgtccctccccaaaactcatgttgaaatgtaatccttagtgctggtaatggtgcctggcaggaggtgattggatcatgtgggctatttctaatggtttagygccatccactttggaattgtcttggcaatagtgagtgacctttcatgagatct

SEQ ID NO: 173961 - DNA, 378 bp, Homo sapiens
acaccacaaaaaaagataagtatgtgaggtgatggatatgttaaatcagcgtgatttaatcattccaccatgtatacatatatccaagcatcttgtaatacactaaaaatatacaatttttattggtcagttataccttactaaagctgggtaaaggaacaaacattgcaacagactacagataaagttcccttcaccacttcttccccaacattcatcatagttattgccccaaaagactgctattattagtttgatgtatagcttttcacaaacagaaaatttctgtgtttgtacagataagaggtttatgtgcacagacaaaccattttgagttcagkttactgtatataagtgggattataccatacatgtgat

SEQ ID NO: 173962 - DNA, 544 bp, Homo sapiens
ggggggggacacaccaaaaccatatcacgtggacacactcacgacctttggccacccacgatattgcaagcactggaatagctgttgtcttctctttcttgggatcacgattgttctgtcatgagttgctgtgatggcttgtgttgggtggcctccaaacaagaggtggggttttcaagagagcaccatctgtggtaatagtagggggatccaagtatgtcctgagttggacaagataagtattttagtttctcaggtgttgggtggggccataaagctcccaagagtttctttttagtcagctaccacagaacatakagaaataccatcaggtgggtggcagagttaagtgggtctgggttcatactctccttgggcagagcttgccatatccactgtgaaggatggtggggtgattctcaggccaatggtattatgttccagaggggattttgactgcttctgctgtgtcttatagttcatcagggaagtgggggatagctggtagcgagaggcctcatccagctctcatgcacttggcaag

SEQ ID NO: 173963 - DNA, 544 bp, Homo sapiens
ggggggggacacaccaaaaccatatcacgtggacacactcacgacctttggccacccacgatattgcaagcactggaatagctgttgtcttctctttcttgggatcacgattgttctgtcatgagttgctgtgatggcttgtgttgggtggcctccaaacaagaggtggggttttcaagagagcaccatctgtggtaatagtagggggatccaagtatgtcctgagttggacaagataagtattttagtttctcaggtgttgggtggggccataaagctcccaagagtttctttttagtcagctaccacagaacatatagaaataccatcaggtgggtggcagagttaagtgggtctgggttcatactctccttgggcagagcttgccatakccactgtgaaggatggtggggtgattctcaggccaatggtattatgttccagaggggattttgactgcttctgctgtgtcttatagttcatcagggaagtgggggatagctggtagcgagaggcctcatccagctctcatgcacttggcaag

SEQ ID NO: 173964 - DNA, 483 bp, Homo sapiens
actgtcctctccatgctggcgggaggacaggggcaggagggctgggacacacgtgtgcaaggtgttccatatggacttccctctggggacaccctcccatcatcgtgasaacatggcgatcttctgatcacatcagatagtgcatgtttctctccctaagagacagtgggccctgaaggtagcttcccacaagcccaggccccaagagatcagtcctcagaggcaggcctccctggtttccccttccctgaatctgaggctcccaagctgcctggtgacccttctaatcttcccccaccgaggcctccaacctacctgtgcttgttgggagccagggaagagtccacataggagacgtggttggggctaaagagaaaagacagcagacaatgactctccaggggcccagaagagagtagggtctaccccatacataagaggaggtaggggcccagagccagaccctcaggatgtcttaagcca

SEQ ID NO: 173965 - DNA, 483 bp, Homo sapiens
actgtcctctccatgctggcgggaggacaggggcaggagggctgggacacacgtgtgcaaggtgttccatatggacttccctctggggacaccctcccatcatcgtgagaacatggcgatcttctgatcacatcagatagtgcatgtttctctccctaagagacagtgggccctgaaggtagcttcccacmagcccaggccccaagagatcagtcctcagaggcaggcctccctggtttccccttccctgaatctgaggctcccaagctgcctggtgacccttctaatcttcccccaccgaggcctccaacctacctgtgcttgttgggagccagggaagagtccacataggagacgtggttggggctaaagagaaaagacagcagacaatgactctccaggggcccagaagagagtagggtctaccccatacataagaggaggtaggggcccagagccagaccctcaggatgtcttaagcca

SEQ ID NO: 173966 - DNA, 672 bp, Homo sapiens
taaaataaaaatattttcaaaaatgtaaatatttggtctaaattatgcaggtcagatattaagtttcctaaatgctttaaggtcataaactgcttctttgacttttaaaagttgttcaatttattttggagcattgattctagataaggcctggggacatgtgaaattagccatgccccctagctatgctaagaaagttcttcataaaatgccactgtgattcttaactattcaacttgtctgctttactgctaggtgaggcctcagacacgtggagtgctcttgtttgactgtgtgagtgagctggttattcagtcatcgyctctctgattaacacttctttaccttggtttgagtggagattctgaaactcgctttgtctttgctggctggttccctgctggactctcgataggggcattagagggagattgggaggctggaggaggaagacaggacatgctcactgattcctatttcattctctttcattgtgagtagcctcagtgatgcttttcacgggcaacagtgactggttccagtttgcagttttccccactctcagaagtagtctcattgggcctcctcagagatatcagcaccagggtcacactatcctcagagatctgtgttccagttccatgtgggcccctcctctgagccagaaaagaa

SEQ ID NO: 173967 - DNA, 559 bp, Homo sapiens
ttgctatctaatttcagacaaaacagaacttaagccaacacagatcaaaaaagacacagaacattacatattggggaaaagttcaattcaacacgaagacctaactatcctaaatatatatgcatccagcacaggagcactcagattcaaaaagcaaattcttagagacttacaaagaaactgaactccgacacttgcccaaatgaacctaatagacattgacagaactctccaccccaaaacaacagtgtgtacattctttctacctgtgcatggcacatatttgaagtcacccacacaatcgaccaaaaaactatcctcaacaaattcaaagaaaccaaaatcacaccaaccacactcttggaccacagcacaaaaaaaatagaaatcaatactaagaaaattgctcaaamccatacatttgcatggaaattaaataacctgtccccagataacttttggataagcaacaaaattaaggtagaaatcaagaagttctttgaatcaatgagaacaatgataccacatcccagaatctgtgagacatagctaaagcaat

SEQ ID NO: 173968 - DNA, 548 bp, Homo sapiens
gagattttccaaaattaaaattttaaaactaatctgtgtccaaagtaagtcatcaagaaaacgaacaagaaaagaacaaactcaaaagagttttttggaattaaactagaaatcagtagcagaataacaaaaggatatttggaaacaaaaaactacaataaccaaaattaaaacctcactagatggacaccataggatagtagaaatgagaggatataattagtgaactagaagacagaacaataaatttacccagactgaacagasagaaaacagactgaaaataaatgaacaaaacctcagctatctgtgggacattactagaagagctaacttttgcatcaccagtgtcccagaagcaaaggagaaaaagtgtgggactaaaaaattattcaaagaaatgtctaagctcctcaaatttggtcaaagacataaagttactgatccaagaaagattttggggatgatggcacccttctctcttgattatggcattggatacaagtctccggaactctcagaactgtttattaaaaagggtgaatagt

SEQ ID NO: 173969 - DNA, 549 bp, Homo sapiens
acttttaaaccatcgtatttcatgagaactcactcaccaacatgagaacagcaaaggggaaatcctctgccatgatccaaccacctcccaccaggtctctcccacaacattgggtattacaattcaacatgagatttgagtggggacacagagccaaaccatatcaccatccttttgtcaggaacacactcctgcaataactaatccagttccccaataccagcattaatccattcataagggaagatccccatgacctaataacctcaacttaatagtcctgtgcatactttggcagcacatatactaaaattggaatgatacagagaggattagcattgcccctttgcaaagatgacatgcaaattcrtgaagcattttatatatgtatttttaaactgtaaggatttaattttattaccatatttcttttttaaaaagtaacttttatttaggttcagaaatacatgttcaggtttgttacataggtaaattgcatgccacaggaatttggtgtacagattatttcatcacccaggtaataagcac

SEQ ID NO: 173970 - DNA, 378 bp, Homo sapiens
gaattcttcatatagatgaaacatgctcaacaaaactttaaatttggcatgccacagtagctgtttatgatstgtttccatattaccacataataaagagaatgatttcaaatttaatatattcaccttataaaattcacaattctgtccatgttggtcagcacaacgttcagttaagctgcttttttttcatagtaaaactctctcaatgaaggaagcagtgcattaatttaaaatctagcccaagcacttcttaacctggatgacattttcctgtcgttgcaagctgcagccatcagaacatactcttacataaaacttaaccccaaaccacattttgataatataaccttcatagttttatacattcagagctag

SEQ ID NO: 173971 - DNA, 378 bp, Homo sapiens
gaattcttcatatagatgaaacatgctcaacaaaactttaaatttggcatgccacagtagctgtttatgatgtgtttccatattaccacataataaagagaatgatttcaaatttaatatattcaccttataaaattcacaattctgtccatgttggtcagcacaacgttcagttaagctgcttttttttcatagtaaaactctctcaatgaaggaagcagtgcattaatttaaaatctagcccaagcacttcttaacctggatgacattttcctgtcrttgcaagctgcagccatcagaacatactcttacataaaacttaaccccaaaccacattttgataatataaccttcatagttttatacattcagagctag

SEQ ID NO: 173972 - DNA, 186 bp, Homo sapiens
agtaccagttcctggcctgttaggaatctggctgcacagcgggaggggagtggctggtgagcaagggargcttcttagtatttacagccactccccatcgcacccatcactgcctgagcttcgcttcctgttagatcagtggtggctttagattctcgtagtagcatgaaccctattatgaatggg

SEQ ID NO: 173973 - DNA, 421 bp, Homo sapiens
gaatgtattttctcttgttcttcattttgctcttagctgccattcctataaatcaaaaaagataaaaacaaactttcccaagatgctgggcacacttactccctcacttctagcagcgtctccagggtttacttttcatcctagctgagtccttcctccaggagtgttttcartggggatgtttgcatgtggcaaaccttctgaggccttgagaatccagaggttttatgatttcacattggagtgacaatttggctgaatacaaaacactggatacaaagtttttctttagtactttagaaatattactgaattgtcttcttttctctagtgttcttcttaagaagtctaattcttatcactttgtaggtgatctgaaagcgtgcagacatttccctctgctttttaagttcttcccttt

SEQ ID NO: 173974 - DNA, 404 bp, Homo sapiens
gaatgtattttctcttgttcttcattttgctcttagctgccattcctataaatcaaaaaagataaaaacaaactttcccaagatgctgggcacacttactccctcacttctagcagcgtctccagggtttacttttcatcctagctgagtccttcctccaggagtgttttcagtggggatgtttgcatgtggcaaaccttctgaggccttgagaatcmagaggttttatgatttcacattggagtgacaatttggctgaatacaaaacactggatacaaagtttttctttagtactttagaaatattactgaattgtcttcttttctctagtgttcttcttaagaagtctaattcttatcactttgtaggtgatctgaaagcgtgcagacatttccctctgctt

SEQ ID NO: 173975 - DNA, 416 bp, Homo sapiens
gaatgtattttctcttgttcttcattttgctcttagctgccattcctataaatcaaaaaagataaaaacaaactttcccaagatgctgggcacacttactccctcacttctagcagcgtctccagggtttacttttcatcctagctgagtccttcctccaggagtgttttcagtggggatgtttgcatgtggcaaaccttctgaggccttgagaatccagaggttttatgatttcacattggagtgacaatttggctgaayacaaaacactggatacaaagtttttctttagtactttagaaatattactgaattgtcttcttttctctagtgttcttcttaagaagtctaattcttatcactttgtaggtgatctgaaagcgtgcagacatttccctctgctttttaagttcttc

SEQ ID NO: 173976 - DNA, 404 bp, Homo sapiens
gaatgtattttctcttgttcttcattttgctcttagctgccattcctataaatcaaaaaagataaaaacaaactttcccaagatgctgggcacacttactccctcacttctagcagcgtctccagggtttacttttcatcctagctgagtccttcctccaggagtgttttcagtggggatgtttgcatgtggcaaaccttctgaggccttgagaatccagaggttttatgatttcacattggagtgacaatttggctgaatacaaaacactggatacaaagtttttctttagtactttagaaatattactgaattgtcttcttttctctagtgtycttcttaagaagtctaattcttatcactttgtaggtgatctgaaagcgtgcagacatttccctctgctt

SEQ ID NO: 173977 - DNA, 524 bp, Homo sapiens
caaccgtataatgtatgttttctgaccacagtggaattaaattaaaamccaataacagaaatgtgaccataaaatcttcaaatacttggaaactaaataatacactttaaataagccatgggtgaaaaagaaagttccaagggaaatttaaaaatactttgaagcaaatgaaaattaaaacataacatgtcaaaatgtgtgggaagcagttaaagccgtactgagagggaaatttatagcaccaaaatgctttcattttctaaaaataaaactttcaagtcaataatataggcttgtaccccagtctaagtcaaacatagaggaaagaaaagcaaaataaacccagagcaagcagaaagaagaaaataataaagataaaagcagaaatcaatgaaactgaaaataggaaaaacaatatagaaaataaatgaaatgaaaagctggttcttttaaaagacgataaaattgacaagcctctgacgtagaaaaaaagagaaaatacacaacttcctaatatcaggaac

SEQ ID NO: 173978 - DNA, 460 bp, Homo sapiens
gcatcctgagggtctggctctgggcccctacctcctctcatatatagggtagaccctgctcacttctgggcccctggagagtcagtgtttgctgtctttttcctttagccccaaccacgtctcctaygtggaccctcacctggctcccaacaaacacaggtaggttggaggcctcggtggggggagattagaggagtcaccaggcagcttgggagcctcagattcagggaaggggaaaccagggaggcctgcctctgaggactgatctcttggggcctgggcttgtgggaagctaccttcagggtccgctgtctcctagggagagaaacatgcactatctgatgtgatcagaagattgccatgttctcacgacaatgggcagctgtccccagaggggagtccatatggaacaccttgcacatgtgtgtcccagccctcctgtccctggcctcccgccagc

SEQ ID NO: 173979 - DNA, 611 bp, Homo sapiens
ttaaatataaagtcacagataggttaaaagtgtaaaagatataatattctaacactaaacaaatgaaaactggattggttatgttaatatcagacacatagcctttagaacaaagaataatatcagggagaaagatgataatttttataattataaaggggtcaattcatcaagaggacataacaattctaaatgtttatacaccaaataacagagcttcagaatacataaaacaaaaattgttagaactgcaaagagcagcagacaactacacaattatattaagaaatttaaatacttttctcayaatatttggtagaacaagtagacagaaatcagtaagaatacagaggttttgaacaacactctcaaccgtcttgacttgattggtatttatagaatgctccacccaagcaaaatacacgttctgtccccatccagctcacacagaacgtttaccaagtcagaccttattctaggatactagtaaatgcaaaagaatttgaatcatacaaagtatgttctttaaccacattagaattaaattagaaacccaaaccagaaagatctctggaaaattctcaaatatttagaaataatataacatactg

SEQ ID NO: 173980 - DNA, 577 bp, Homo sapiens
atattctcagtcgagaagtatgtttagcttaattcagggatcctttcactctagggtgagtttagtccttcaaaataggaagaattttaggctgtaggccacagcaaagggggcctttgttgccacctttggatgcattgatgggactgaggcatgaagactgagctatacaaagaaggcactgcagccaaggtctgggacagagcacctagggcaaaacctcttgcaaggactgcagcttggtcttctttttggttacctcatgctgggcacacttccttatatrtgatagatggctagaaaggtgtgcaatgggtgagtaaatacatgagctgtaatgtagaccatgaaaggctgagaatacagagacagagagagttgctgttttttttcctatgcaaatgtattttctggatttagaaaaaataccaccagaattccaagcaaagtacctttgtttaaaaaaaaagagagtgatatcacaatatacacggcatttgtaaagtgtcataggctagggaccaagcagcctcttgggttccctttgagttggttgaatggggcaggtggcagagga

SEQ ID NO: 173981 - DNA, 577 bp, Homo sapiens
atattctcagtcgagaagtatgtttagcttaattcagggatcctttcactctagggtgagtttagtccttcaaaataggaagaattttaggctgtaggccacagcaaagggggcctttgttgccacctttggatgcattgatgggactgaggcatgaagactgagctatacaaagaaggcactgcagccaaggtctgggacagagcacctagggcaaaacctcttgcaaggactgcagcttggtcttctttttggttacctcatgctgggcacacttccttatatgtgayagatggctagaaaggtgtgcaatgggtgagtaaatacatgagctgtaatgtagaccatgaaaggctgagaatacagagacagagagagttgctgttttttttcctatgcaaatgtattttctggatttagaaaaaataccaccagaattccaagcaaagtacctttgtttaaaaaaaaagagagtgatatcacaatatacacggcatttgtaaagtgtcataggctagggaccaagcagcctcttgggttccctttgagttggttgaatggggcaggtggcagagga

SEQ ID NO: 173982 - DNA, 613 bp, Homo sapiens
aaataatttgggagtggataaggggacaaagtttcaaaagaaaatcagggtaaaataatcaaataaggaatggctgtaggaaggcaaaaacataaactatacttggccttattcccaaagatatggaaggtgawtttttaaagactaggttttgatgtcattctctatgttctctattaatgcatgaaatgaaattggctggaaacccgaacaccttatcacatatttccacagatccatcttttctctttcagttgtgaatcttttagtatcttgaattaacttagaaaaacaaaagagtttggccacttgaatcttaggaatttgcttctcaacagtgtgattctcatattagcagcatttggttcacccaggaaccttcagaactgcagaatctcaggtcccaccccagacctgttgagtcagaacttgcattgtaacaaatacctaaggaacttgtatttacattaaagctttttcatggctgattaagagttttttctttatcactggttttaagcaatttgattatgatgtaccttggtatccttttcttcatgtcttatgcttggggttaattgaacttcttgggtcaacacatttgtaaacattt

SEQ ID NO: 173983 - DNA, 537 bp, Homo sapiens
gttcattggagtatagggcctggacattctgaagattgctcttatttgaatgtctgcgtttgtaatattgatattcctttccctgcttttatttagttaaggtaatgaaggctacctgctgaaacagataaacctcagcagcttagtataatagaaataaatttctcattttgatttccaaatggggttccagatcatttggcaattctgtccaaagctgtgatttaggaattcaggtttcttccattttgcaagtctgcagtattcaacttgtaatgttgctgttcaaggagaaaaaggggaagatctcatgggtcgagcctggatgttcccacgatcctttgatcagagctcagtcacatgatcacacctacctgcaacggacatgtagtaacacagtcaatgagcatatgaagtrcactcatgttcactagagtgcaaccagaagagataattcctgtttatcaagctaaagggatcttaataaacttttttcttttaaaagatcagaactgttttaaagttaaagatttttac

SEQ ID NO: 173984 - DNA, 457 bp, Homo sapiens
atgctattcagccaaaaaaaaaagagtaaaatcatgtttttcctagcaacacagatggaagtgaaggccattatcttagatgaataacttagaaacagaaagtcaaataccatatgttctcacttatamgtgggaactaaataatgtgtatacatagatataaagtgtggaataatacacattggagacgcagaagagtgggagggtgagataggggtgaggaatgagaaattacttaacgggtacaatacacattatttgggtgatggttaagcaaatgctcagacttcaccactaagcaatatatccatgtaagaaagctgcacttgtaccccttaaatttatagaaataaaaaagcaggagaaccactgaagaagaaaccaggaaaaaaatatatatcaaagccaaacactggttctttgagatcaataaattgatatacaactagccagaggt

SEQ ID NO: 173985 - DNA, 585 bp, Homo sapiens
atgccctggtctcctgcagtaccctcaggcttactaggattgggaaattccagcctggtaaattttggtcagaccatttctctgctctcgaaccctgttttctgttaagatgtatatcaagagaatacatgcacagctaaatgtagaccctcatcagtaattctaattttcccctttgccttgtgatctttgctttgtcatttgccttatgatctttattggcctcagaagcatgtgatatttgttacctactccctgttcgtacaccccctacccttttgaaatccttataaaaacttcctggttttgcagctcaggtggggcattacagacctaccgatatgtgatgtcacccccggtggcccagctgtaaaattcttgtctttgtactctttctctttatttctcagactggccgacacttagggaaaatagaacctatgttgaaatattgggggtgggttcccccgataatcatcaaaygttatatctgaaagttttggtagacattccaaaaaaaccttaaaatcctgttccattctcaatatttgtgtagatatatatatatataagatcctcagtaaa

SEQ ID NO: 173986 - DNA, 492 bp, Homo sapiens
tttttttttttttttttttcatgagtcagagtctccctctgtcacccaggctggagtgtggtagcgtgatcttggctcactgcaacctccacttcccaggttcaaaatattagtgatctcatcctcctgagtagctgggattacaggtgcccgccaccacaccaagctaatttttgtatttttttgtagagacagcgtttcaccatgttaccaggctggtcttgaactcctgacctcaagtgatctgcccgyctcggcctcacaaagtgctagaattacaggcgtgaaccacaatgcctggcctgttaggtccattggtctgtagtgcttattcaagttttttatttctgtaatatttctttttaattttgtggatacatagtaagtttaagtgtttatagtgcacataatgttttgatacagagatacaaaatgaagtaaacacatcatggagaatggggtatgcatcccttcaagcatttatcctttgat

SEQ ID NO: 173987 - DNA, 492 bp, Homo sapiens
tttttttttttttttttttcatgagtcagagtctccctctgtcacccaggctggagtgtggtagcgtgatcttggctcactgcaacctccacttcccaggttcaaaatattagtgatctcatcctcctgagtagctgggattacaggtgcccgccaccacaccaagctaatttttgtatttttttgtagagacagcgtttcaccatgttaccaggctggtcttgaactcctgacctcaagtgatctgcccgtctcggcctcacaaagtgctagaattacaggcgtgaaccacaatgcctggcctgttaggtccattggtctgtagtgcttattcaagttttttatttctgtaatatttctttttaattttgtggatacatagtaagtttaagtgtttatagtgcacataatgttttgatacagagatacaaaatgaagtaaacacatcatggagaatggggtatgcatcmcttcaagcatttatcctttgat

SEQ ID NO: 173988 - DNA, 384 bp, Homo sapiens
tgactatagtcaataataatgtattgtatatttcaacataactgagaagatatttcaaatatctcaccataaraatgataggtaaacaaagtgacggataagttaatttacttgacttagtcacttcacattatatacatatatcaaaacatcatggctgggcatggtggctcactcttgtaatcccagcactttgggaggccaaagcacgcagattgcctgagctcaggagtttgagaccagcctggaaaacctggtgaaactctgtctctacaaaaaatacgatgattagccaggtgtgatggtgcacgactattgtcccagctacttggtgtctgaagcaccaggatcgctcaggcccaggaggtcgaagctgcagtgagc

SEQ ID NO: 173989 - DNA, 217 bp, Homo sapiens
gaattcaatcaccagttctggaagctttttgaatgtgtcttcatggttttccaggtatatgattatgccataacaaacagcgaccaacagtttgacttccttattaccaatttggatgccctttatttctttctcttgtctgattgctctggctatgacttccagtactatgttaaatgkaagtggtaaaagtgggcacccttgttttgttccagtt

SEQ ID NO: 173990 - DNA, 577 bp, Homo sapiens
tattttacatgagaaacacattttcctgagctgactcagttagagaagaaacaagctaagagaaaaaaagggattgtttaatttcattaaaataaccacattaataatcatcggcagtacctatttcacatatgaaaagaaaatgattggtaagtttgaatgagatttgaacatataggagtgcctctgtataaaatttattttaattaataacagtcaacatgatattttcagtttagtattcattgaatattacataaggttattaaaaaayttcaaaaaaatgctttaggcttttataaatgcaatatagaatctctattatttagatatgatttagtttatttgaaggatctaaaactaatatttagattgaaaaaatagtgctttttaaaatgtatttccacttctctacatgactattaagatatctttgtttataacactgttagattttcactgtctcctctttgtagagtacagcatgaacatgtctgtaataaaatattttgttccagactatggttttattgccatatccatgaaaaggtacttaacatctgttttgcttggccac

SEQ ID NO: 173991 - DNA, 384 bp, Homo sapiens
aaaatagggcagagtgggacagatgtgaggcggtacagcatgtggttkcagctggaccatgctctgagccatttggactgtgaaggtttctctcccagaaggtagcagggtaggtcatggggtattgtaggccttgacaagagtgcaaatggaggcctaaaaaccagatgtctaaatgttttaagttataagtaaagctcacaaatcattcaatacaatatgttctgtcctcctaccttgacaaaaataccttcagaacaacctggaagtccaggttggaattttaaattcttggatgtcagaatctcttgctggaacatggtggcatgggaagagccagcccccagctttggtcctcatcctccatccttttttcttcccact

SEQ ID NO: 173992 - DNA, 542 bp, Homo sapiens
atgccaccataccccgctaattttgcatttttagtagaggtagggtttcaccatgttggccagcctggtctcaaactcctgacctcaagtgatccacccgcctctgcctcccaaagtgctataaaaagaaaataaatgttttaaatgatgcaattataatgtagccaataaatccaactatatctgttaatccttgaaaacagaggttcagaggtttaactacagatattggtaaaattcccttatagtaaataagaaacagcagagtactggtcagaatggtccaaatgccttggaataatgctgttaattatttaacagtattgtttgttaaatacctgataagttgaacccgaccccccacgacttaccagtgatgggataggcagccgctgcaaaagttattactgcaaaggttccygtgcttttagctaatagtcaaaaaaccagtttaagtaatcataataagccactgatgtgaaaactattcttccccaagctttttgggtaaaaatctaagatgtatattacatcagaagcaa

SEQ ID NO: 173993 - DNA, 393 bp, Homo sapiens
ccttaagtaaaccttatcctcctctgtgcctcccacactcacctctggcttcctccctgggatgagtgaggcaagaaggagaatatgagctgtggactacgagaaaaaaaccagagtgactgaaggagaaggaactcctggtccttcctggtgacccagagccaacagagaaatgggtaactcattaaccagagaamagtcccacatcctgtgtgtgaaagaaagaaacattttaaaagttagaaaatgcatttgaacaatgttgtatttaaaccaagctcaagcaacagatgtttctttacttttctttgagacagtgtcttgctctgttggctccttcacccaggctattgtgcagtggctgatctcggcttactgatcttggctgaattc

SEQ ID NO: 173994 - DNA, 487 bp, Homo sapiens
tcatttttttctactttcatattacctgttaacttcctactatagaatatgaggctttagctttatgctctcaacctccaataaagaaaaaaaattctttcttctctgcttccattatacttgtatcacagtttttttaattaaggaagcattaattattcatatatttatgatgttttcctttccttggaattaaaaataaccttttagatttttttattaccttgattttcactgaacttataagtagtccataactacactctctttaagccatgtaaatctcatttcaatacattccaccatagcaagtagtctgggtttttkttttcctttttttttctttttaaatctgcaagaaactcctcctgaaactctctgttctctgttacaatgtggaccacaacatagcttttatggagtttcttttgctgtcatcctgaaaattcacttcattactgttttgaatccacgtccttgaatttct

SEQ ID NO: 173995 - DNA, 512 bp, Homo sapiens
aactccaactcaaggataggtgaatcagtggtattccctcacagataagatggtcaataacattagtccaacattacttggactcatatctttacatttttggaacatttttattcgaaaacaacctttaaaaagatcagcactattcacaatagcaaagtcatggactcaatcttacagtccatcaatggtggattgaatgaagcaaatgtggtacatatacaccatggaataatatgcagtcataaagataagggaatcatgtgctttgcagcaatatggatgaaacttcaggtcattatcctaagtacattaacacagaaacagaaaaccaaataccacatgttctcacataggagagctaaataatgkgaacacatggacacaaagatgcaaaaaaaaaaaaaatagacactagggacttaaaagaggggcaggggcaggtcgtggtgtctccaattctgtaaatccagaactttgggaggccaaagtgggcagatcacttgaggcca

SEQ ID NO: 173996 - DNA, 554 bp, Homo sapiens
gcatagtttgcaaatattttctcccattctttgggttgtctgtttacatttactctgttgatagtttcctatgctgtgtggaagctctttagtttcattagctcccatttgtcaatttttgtttttgttgcaattgcttttggcatccttctcaaaaatctttgccagggcctatgtctagtgtggtattttctaggygatttggtttggctgtgttccccctcaaatctcaccttgaattgtaataatctccacctgtcaagggtggcaccaggtggagataattgaataatgggggaagtttcctccatactgttctcttggtagtgaataagtctcacaagatctgataattttacaaatgggagtttttgtgcacaagttcttgcctgctgccatgtaagacatgaatttgctcctcattcaccttccgccatgattgtgaggcctccccagccatatggaactatgagtaaagtaacagtcttttttttttcttaataaattacccagtcttaggtaagtctttattagcagtgtaagaacagactaat

SEQ ID NO: 173997 - DNA, 554 bp, Homo sapiens
gcatagtttgcaaatattttctcccattctttgggttgtctgtttacatttactctgttgatagtttcctatgctgtgtggaagctctttagtttcattagctcccatttgtcaatttttgtttttgttgcaattgcttttggcatccttctcaaaaatctttgccagggcctatgtctagtgtggtattttctaggcgatttggtttggctgtgttccccctcaaatctcaccttgaattgtaataatctccacctgtcaagggtggcaccaggtggagataattgaataatgggggmagtttcctccatactgttctcttggtagtgaataagtctcacaagatctgataattttacaaatgggagtttttgtgcacaagttcttgcctgctgccatgtaagacatgaatttgctcctcattcaccttccgccatgattgtgaggcctccccagccatatggaactatgagtaaagtaacagtcttttttttttcttaataaattacccagtcttaggtaagtctttattagcagtgtaagaacagactaat

SEQ ID NO: 173998 - DNA, 554 bp, Homo sapiens
gcatagtttgcaaatattttctcccattctttgggttgtctgtttacatttactctgttgatagtttcctatgctgtgtggaagctctttagtttcattagctcccatttgtcaatttttgtttttgttgcaattgcttttggcatccttctcaaaaatctttgccagggcctatgtctagtgtggtattttctaggcgatttggtttggctgtgttccccctcaaatctcaccttgaattgtaataatctccacctgtcaagggtggcaccaggtggagataattgaataatgggggaagtttcctccatactgttctcttggtagtgaataagtcwcacaagatctgataattttacaaatgggagtttttgtgcacaagttcttgcctgctgccatgtaagacatgaatttgctcctcattcaccttccgccatgattgtgaggcctccccagccatatggaactatgagtaaagtaacagtcttttttttttcttaataaattacccagtcttaggtaagtctttattagcagtgtaagaacagactaat

SEQ ID NO: 173999 - DNA, 554 bp, Homo sapiens
gcatagtttgcaaatattttctcccattctttgggttgtctgtttacatttactctgttgatagtttcctatgctgtgtggaagctctttagtttcattagctcccatttgtcaatttttgtttttgttgcaattgcttttggcatccttctcaaaaatctttgccagggcctatgtctagtgtggtattttctaggcgatttggtttggctgtgttccccctcaaatctcaccttgaattgtaataatctccacctgtcaagggtggcaccaggtggagataattgaataatgggggaagtttcctccatactgttctcttggtagtgaataagtctcacaagatctgataattttacaaatgggagttyttgtgcacaagttcttgcctgctgccatgtaagacatgaatttgctcctcattcaccttccgccatgattgtgaggcctccccagccatatggaactatgagtaaagtaacagtcttttttttttcttaataaattacccagtcttaggtaagtctttattagcagtgtaagaacagactaat

SEQ ID NO: 174000 - DNA, 595 bp, Homo sapiens
atatactagattttcttcaagagtttttataggtttcacatttaagtctttaatccatcttgagttgatttttgtatatggtgtaatgaaggggtccagtttaaatcttctgcatatggctagccagttatcccagcaccattaattgaataatgagtccttttcccattgtttgcttttgttaattttgttgaagaccagatagttgtgggtgtgtggctttattccagggctctttttctttttccatttgtctatgtgtctattttttgtactactcctgtactgtttgggttactgtagccttgctgtatagtttgaagtcaggtaatgtactgtccccagctttattctttttccytaggatagcttaggctgtttgggctcttttttggctacatatgaattttagaatagtttttttctagttctgtgaagaatgttattgatagtttaatagaaatagcattgaatctataaattgctttggacagtatggccattttaacaatatcgattcaacctattgatgagaatggaatgtttgtgtcatctctgctttcttttcacagtgtcatgtaattctcattgtaga

SEQ ID NO: 174001 - DNA, 473 bp, Homo sapiens
ttataacagataaaatagactttaagtaaaaaactggaaaaagagccgaagactatcattacattatgataaaggtgtcaattcatcaaaaggatataacacttgtaaatatatttgcaccaaacaccagagtctctgaatatatatagcaagtataaatagatctgaaaacagagagagactgcaataaaataacagtaggggaatttaaaaccccactttcaacaatggaaagatcattcagacagaaaatcaataaggaaacattggacttgaacaatactktagaccaaattaacctaacagacacacagaacattccacccaacaggggaagaatacgcattattttcagacatacacagactattcttcaggataggtcatatcttagttcagaaaacaagtctcacaaatgtttgtcaacttaaaaatattggctgggaacagtggctcatgcctgtaatcccagc

SEQ ID NO: 174002 - DNA, 629 bp, Homo sapiens
aaatcccctgtgattctcaagtcctttatataaaatggtatacttgcatataagccrtgcacatccttctgtatactttaaatcatctctagattatttataatactaggtaaatagttgttacactgtgtttttattagcgttatttttaaatattgtattattattttttatttttccaaatattttccatctgtggttggttgaatacacagatgcagaactggaatatgaagggtagactgcagttttatgtaagaacaagattgtgaaaagaaaaagaaattggaaatataccttagacagaaatgtacttatttcattctgtagatgacaaagtggtcagaaggctactctttgaagttgtataaacaacttcaaagattgttgaaactttgaagattcaaagattgggttagagacccagggctaccagtttttagctcaatgatgttgagcaagttactagcgtgtaataatagtatctacctccttaggtcactgtgaagataatgtcaaatattgcatataaagtgattaacccagaacctgacagagactaaggttacaggaattatttattgttatcatcatcataattattgttgttgctaatagatgccatacat

SEQ ID NO: 174003 - DNA, 629 bp, Homo sapiens
aaatcccctgtgattctcaagtcctttatataaaatggtatacttgcatataagccatgcacatccttctgtatactttaaatcatctctagattatttataatactaggtaaatagttgttacactgtgtttttattwgcgttatttttaaatattgtattattattttttatttttccaaatattttccatctgtggttggttgaatacacagatgcagaactggaatatgaagggtagactgcagttttatgtaagaacaagattgtgaaaagaaaaagaaattggaaatataccttagacagaaatgtacttatttcattctgtagatgacaaagtggtcagaaggctactctttgaagttgtataaacaacttcaaagattgttgaaactttgaagattcaaagattgggttagagacccagggctaccagtttttagctcaatgatgttgagcaagttactagcgtgtaataatagtatctacctccttaggtcactgtgaagataatgtcaaatattgcatataaagtgattaacccagaacctgacagagactaaggttacaggaattatttattgttatcatcatcataattattgttgttgctaatagatgccatacat

SEQ ID NO: 174004 - DNA, 526 bp, Homo sapiens
acaaatttagcaactcaaaaaagttccacgtattagctaagagttttgtagatcagcagtctagtgtggcataactaagttctctgttcagagtatcccagactgaaatcaatttttctaccagactgaattctaggaaaaatttctcctccaagctcattcttgtcattagcagaattaatttccttctagttataggacagaagcccctgtttccttgctggctgtcagctgggagctactgtcagctcctagaggccactcataatctttgccacatgatttcctctttatctccaaactagcaatagcaagttgaatccttatcatgattcaaattgcttatcctctttgtctcccacttctaaagccagatttaaaggactcatgtgattaggcaaggcccacatggataatctctgatatcttcaggtcaastgatttgggaactcaactacacctgcaaaattctttttggccataagatgtaacataatcgtgagagtaataaacatcatatttgtaa

SEQ ID NO: 174005 - DNA, 570 bp, Homo sapiens
ttttaaagttcacttgaatcagctctagtggacaaggattaagatcttggtctccctatccacctttcttcttaaataactggggaagtgaagaggcagcagggatagtgctaacatttggatactaagaggatgcctgccttcccagctaatggcctgactgagcattcaaggaactaaggagagaacatgaaagactcttctccctcttactctccactgttgtctcctcactagttcagtagcccatggtactgaactttactctttatttaccagcctctctgttatctccaaccagtattcttcactcatgaaaccaatctccttctcttattgtgtaggcttaagaggaaagcttgaaatctgattttttattccagcctcaccactgatcttattctgtgaatttaggcaagttcttccttctctgaggctcatatttctgatctgcataatacctayttcacaaatttgttataaacattaagtaagataatgtatgtgaataattagcaccatgccaacacatagactgaaactcatccatcaagtattttttaagagcct

SEQ ID NO: 174006 - DNA, 581 bp, Homo sapiens
gtttcctttctcaggacctttgcacatgctcttccctcttcttacttttcttatctttctttctccacatcttttaataaatgcaattacagctagcatttttctgagcttcattttgtgccactcactgtcctaagcactttaaatatgttagcctatttaaatcttaccataaacctacataaaaagttttattatttttattttgccagttaaaaaactgaggcacggatagtttattaaaattaagtgacttattcgagattccaaagctggaagtggagcttggatttgaaattgtttgaggacagggtagctctaaagcttagattataattaagagcaaaagctttgattctctaaattaggtcatggcagtcagtatgcatgctgttaagtctcatcagagttgtaatgaataattgtgtaataaattgcttagtgcctatcttctggatcagaatgtagtctccatgggatcagaggcaatgtctatcttgttgccattatgtctctaagtaccttgtttatgctgccrtgatgacatgatgacatgatgagggcattcacaaatatttgtt

SEQ ID NO: 174007 - DNA, 543 bp, Homo sapiens
ctttatcatttattttttctatatggccccttcctttttatatatacattctggactcttccctgattagtatttttttttgttttgagacagggtcttgctctgtcttccaggctggagtgcagtggcacaatcatggctcactgcagccttgacctccaggcccaggcaattttcccaactcagcctacagactagctgggaccacaggtgtgcatctctagtccaggctaatatttwatttatttatttatttatttatttatttatttatttatttattcattcattcattcatttttgtagagactgggtttcccaggctggtataaaactcctgggtttatgcagtctcctatctcagcctcctaaagggctgggattacaggtgtgagccaccgtgtccagcatttcactgatttcttggtctccagtctcaacaccttcaaattatgtcactcctgtactcaaaaatcttaaaaaaaaggagatcattaactactgaataaagttcagatttagcaagcaatgttctccatgacc

SEQ ID NO: 174008 - DNA, 538 bp, Homo sapiens
tttatttattyattcattcattcattcatttttgtagagactgggtttcccaggctggtataaaactcctgggtttatgcagtctcctatctcagcctcctaaagggctgggattacaggtgtgagccaccgtgtccagcatttcactgatttcttggtctccagtctcaacaccttcaaattatgtcactcctgtactcaaaaatcttaaaaaaaaggagatcattaactactgaataaagttcagatttagcaagcaatgttctccatgacctagtctgttaaccactctagcctcactgcttgtacttttctggtagacattatgatgtttcatgcccttagaactttgttttgccttgcctcaagattttctattttagctcactaattcctatccatacccttaagatacagctcaggcagcatatctcccagcatatccactctggtgtcccagacttggtcatgtatccctcttctgggcacccttgaaatcctgtctatggccttaccgttgtgttacattaatatttca

SEQ ID NO: 174009 - DNA, 538 bp, Homo sapiens
tttatttatttattcattcattcattcatttttgtagagactgggtttcccaggctggtataaaactcctgggtttatgcagtctcctatctcagcctcctaaagggctgggattacaggtgtgagccaccgtgtccagcatttcactgatttcttggtctccagtctcaacaccttcaaattatgtcactcctgtactcaaaaatcttaaaaaaaaggagatyattaactactgaataaagttcagatttagcaagcaatgttctccatgacctagtctgttaaccactctagcctcactgcttgtacttttctggtagacattatgatgtttcatgcccttagaactttgttttgccttgcctcaagattttctattttagctcactaattcctatccatacccttaagatacagctcaggcagcatatctcccagcatatccactctggtgtcccagacttggtcatgtatccctcttctgggcacccttgaaatcctgtctatggccttaccgttgtgttacattaatatttca

SEQ ID NO: 174010 - DNA, 510 bp, Homo sapiens
cgagggattataggttatggctttgggcattttacttaatctctgtatgcctcaactgttttttcataggtgactaactcacagagtttttatgaggaccacataaattaggatatgtaaagtacatcaaatgttcaaaagtctggtttatagtagattttcaactgatgttagatattattaccctttcctaagacttacatcagagctcagactaaactgtaaaacttttgtctcctatttttcaatttatttagagcaccagatcttgggctgcaaaggcagattaaagcaataaatcctaggaggatgtttgaattgggagagtgttttctttaatttttgtcaggtttattgaaacatcttttcrctcctcccactgaaagctctacatttaatcctgagaaatgggtaggtggtacacttcaaggtgaaatctttatatgtcctttcctctatttttattttatgtatcagggatgcaagtccatatgagggaaggatagctgt

SEQ ID NO: 174011 - DNA, 510 bp, Homo sapiens
cgagggattataggttatggctttgggcattttacttaatctctgtatgcctcaactgttttttcataggtgactaactcacagagtttttatgaggaccacataaattaggatatgtaaagtacatcaaatgttcaaaagtctggtttatagtagattttcaactgatgttagatattattaccctttcctaagacttacatcagagctcagactaaactgtaaaacttttgtctcctatttttcaatttatttagagcaccagatcttgggctgcaaaggcagattaaagcaataaatcctaggaggatgtttgaattgggagagtgttttctttaatttttgtcaggtttattgaaacatcttttcgctcctcccactgaaagctctacatttaatcctgagaaatgggtaggtggtacayttcaaggtgaaatctttatatgtcctttcctctatttttattttatgtatcagggatgcaagtccatatgagggaaggatagctgt

SEQ ID NO: 174012 - DNA, 578 bp, Homo sapiens
ggtgacctccacagcatggcaggatactgtgctatgctgaatgataagtagaagactgaaaaataagctatttcccaataaaaagtatctgaagtrtaaaattatctatgaagtataaattatccctcagaatttattccaacttgaggcaagggagctatattctcacatcatttagttattggcttcgggtcataccaggatgacggaaatataaactcccaggtatttccagacctctgtgcagtcaaagtagttgtaatagctcaagggcagcctctaaagagaaccacaatgaaataatttgtagtacaaataaaagccaagggaaggatgcacagaactggtaaagcaatggaatctgagcagaccacaggcagtagtatctgctatagcaggagtcagcaaacttttcctgcaaaaccaagccatattatatattatctctgttgcaatcattgaactctgttattgcagtgcaaaagcttccagaaacaataaatgagcaaatgagcaggtacgtatcctaacaaaactttactataaatactgaaattttaattgtatgtaatttttac

SEQ ID NO: 174013 - DNA, 578 bp, Homo sapiens
ggtgacctccacagcatggcaggatactgtgctatgctgaatgataagtagaagactgaaaaataagctatttcccaataaaaagtatctgaagtataaaattatctatgaagtataaattatccctcagaatttattccaacttgaggcaagggagstatattctcacatcatttagttattggcttcgggtcataccaggatgacggaaatataaactcccaggtatttccagacctctgtgcagtcaaagtagttgtaatagctcaagggcagcctctaaagagaaccacaatgaaataatttgtagtacaaataaaagccaagggaaggatgcacagaactggtaaagcaatggaatctgagcagaccacaggcagtagtatctgctatagcaggagtcagcaaacttttcctgcaaaaccaagccatattatatattatctctgttgcaatcattgaactctgttattgcagtgcaaaagcttccagaaacaataaatgagcaaatgagcaggtacgtatcctaacaaaactttactataaatactgaaattttaattgtatgtaatttttac

SEQ ID NO: 174014 - DNA, 578 bp, Homo sapiens
ggtgacctccacagcatggcaggatactgtgctatgctgaatgataagtagaagactgaaaaataagctatttcccaataaaaagtatctgaagtataaaattatctatgaagtataaattatccctcagaatttattccaacttgaggcaagggagctatattctcacatcatttagttattggcttcgggtcataccaggatgayggaaatataaactcccaggtatttccagacctctgtgcagtcaaagtagttgtaatagctcaagggcagcctctaaagagaaccacaatgaaataatttgtagtacaaataaaagccaagggaaggatgcacagaactggtaaagcaatggaatctgagcagaccacaggcagtagtatctgctatagcaggagtcagcaaacttttcctgcaaaaccaagccatattatatattatctctgttgcaatcattgaactctgttattgcagtgcaaaagcttccagaaacaataaatgagcaaatgagcaggtacgtatcctaacaaaactttactataaatactgaaattttaattgtatgtaatttttac

SEQ ID NO: 174015 - DNA, 499 bp, Homo sapiens
tggaatgtaaataaatatatatagyatatgacatgcaaaaatatcactgaatttggacaataggcgttaaatcaaaaaatttttggtgagtgaaaaaatacaattttgtacagtggaatgagtgggtctgaagggctggttcttagacaaggagtaaattctcttctcactttctgagatttcccttggaaaaatagtttaaacttatgtttttagccactatctacgtaccaagccaaatatagaccctcggcccagacttcctgctgagcttcagaaccataaagccactacccactgaacattagcacttgacattccggtatttctaggataaggtctatgtcatatttagtttatctcctattactagcatcatttctggcatattgcccaaactcatgtatcctaacttgattttcctttatccgcaattcctatttcagttaatcactactattcacccagtttccaaagccaccctaaattgttccctcta

SEQ ID NO: 174016 - DNA, 499 bp, Homo sapiens
tggaatgtaaataaatatatatagtatatgacatgcaaaaatatcactgaatttggacaataggcgttaaatcaaaaaatttttggtgagtgaaaaaatacaattttgtacagtggaatgagtgggtctgaagggctggttcttagacaaggagtaaattctcttctcactttctgagatttcccttggaaaaatagtttaaacttatgtttttagccactatctacrtaccaagccaaatatagaccctcggcccagacttcctgctgagcttcagaaccataaagccactacccactgaacattagcacttgacattccggtatttctaggataaggtctatgtcatatttagtttatctcctattactagcatcatttctggcatattgcccaaactcatgtatcctaacttgattttcctttatccgcaattcctatttcagttaatcactactattcacccagtttccaaagccaccctaaattgttccctcta

SEQ ID NO: 174017 - DNA, 463 bp, Homo sapiens
ttttttcttcagacagagtctcgctctgtcacccaggctggagtacaatggcgcgatctctgcacactgtaacctctgcctcctgggctcaagcaattttcctgcctcagcctctcaagtagctggaattacaggtgcccatcaccacatctggctaatttttgtatttttagtagagatgagttttcaccatgttgaccaggytagtttcaaactcctgacctcaaatgattcgcccgccttagcttcccacagtgctgggattacaggcatgagccactgcacctggcccagaaacaaatttcagtgaagatgtagaagttttagttatgctgtttagattaagagttgaaatacagagctcaacaattaaaacataaaaatgaagaggattacctgcattccaaaatcttagattctaacagaacaggaaaaacacatgagcataatccaagttcgcatt

SEQ ID NO: 174018 - DNA, 477 bp, Homo sapiens
tcatatgcccaagggacactatactattgggaattactgataatatataggygtaaaagacctatatgactcaggagcataaaagctagagaaagatacatatccaaaataatacatgagttggaactatatttgtgttgccactatataaattgtataaaatgctactgagagaggagagggagaaacatttgatgaactcagcttaatgaagaaagtgatactcgggcctcatagaaaactagaattttaaataatagggacaaagatttaagtgaaactgatagaaagctgtggaagaataagcatcacctacaaataaacaatctaagatggaaaatgagacccacattgtgggtggaagtggtagaagattagagtgggaaacaagactggggtcaggttctaggtttcaagtgccaagccatggagtttagactttattcagggaaagaaaagcagcatgatcaaaactga

SEQ ID NO: 174019 - DNA, 430 bp, Homo sapiens
  misc_feature (1)...(430): n = A,T,C or G
nnnnnnnnnttagacaagcagacagcctagtacctgtcccagagtaagaacttcacccctgcagacaagcagggctgtaaaacgaacagagttggaaaacaccctgaaagttcctcaaactattattaaacacacggttaccagatgactcagcaattccactcccagataygtacccaagagaaatgacggcaaaacacagccacacaaaaacacagatacaaatgttcacagcagcatcattcacaacagccaaaaagtggaggcaatccacgtgttcatgaatggataaacaaaatgtggtctatctatgcaatggaatattacttgccaatgaaaaggaatgaagtgctgatacccatatcatggatgaaccttgaaaactttctgctaaatgaaagaagccagtcactgaaggccacacatcgtg

SEQ ID NO: 174020 - DNA, 407 bp, Homo sapiens
ctagtacctgtcccagagtaagaacttcacccctgcagacaagcagggctgtaaaacgaacagagttggaaaacaccctgaaagttcctcaaactattattaaacacacggttaccagatgactcagcaattccactcccagatatgtacccaagagaaatgacggcaaaacacagccacacaaaaacacrgatacaaatgttcacagcagcatcattcacaacagccaaaaagtggaggcaatccacgtgttcatgaatggataaacaaaatgtggtctatctatgcaatggaatattacttgccaatgaaaaggaatgaagtgctgatacccatatcatggatgaaccttgaaaactttctgctaaatgaaagaagccagtcactgaaggccacacatcgtgtaa

SEQ ID NO: 174021 - DNA, 483 bp, Homo sapiens
cttgaaccaggaggcggaggttgcagtgagctgagatcgggtcactgcactccagcctggtgacagagcaagactctgctcacaaaaaaaatatatgtgtgtgtgtgtgtgtgtgtgtgtgtrtgtatgtatgtgtgtgtgtgtgtgtgttaaaagtatatttatataatgtgtgtatgtggcttaagaataaaacacccaactatagaacgtgaccagtaactgggaagctttgtgtactcctttcctggtcatgtacctcacccttcccaccagcagtaccctctttgctgtattttatgctaatcattcttgctgttctacgttaatttactgtctgtgtacctctaaatattttgtagtgtaacaatatattgttttgaatgtttctgaccttttatatatgttaccgtgactggctgtcttcactcagcctttttttaaccattcaagtttatttatttttattatggtaaaatatac

SEQ ID NO: 174022 - DNA, 599 bp, Homo sapiens
gagaggctgaggtattcccagactgctggccacacaacattccagtggagagtgccagccaaagtacttcacaggggcagtggcagcaggatctgtgctcacttgcacatgctagcagctgcagaggcacagtggggtgcacgcacattagctgggatggggcactggcaggagtggagcagcagggtctgtcattaccagctttcaagaaaataaggaaaattcctagaggtaaaaaacaaacagraagctgaaaaccaagtgataagtgggtgctgacactttggatgttctgagcatgtttactggtcttgtaagtcagggctgtgagtctaatgacaagacaatgacaagaaaatggggacttggatttatgcagggtgaagatttgtaactgagatctctggacaaagatgataccctcaattacctacaccttagtgaaaaagtgatctaggagaaaaagaaaaccaaaacactttgcttgcttttgtgggcttgtgttgaatggtattgatctggtttatatattgaaataattagaagaagatgtttgcagtaaggcatttaaaattctgtaattattcaggtaaagggaa

SEQ ID NO: 174023 - DNA, 562 bp, Homo sapiens
agagtctctgacatgatcagggccagaaaactggctggagaggcagacagtacagtgcgttcatataaatgactctaattcaggtggtggcgtgagactgtgggcatgtgtgatgtgcaacagagcaggctggtgtccataagccaacgatggcacagtactcaccttctggggggcattgatgactccagtgttgtagccaaactgcagggagccaagcactgctcctcccacrgccagcatgaggcgacccgtcagcttctgcggagaaacaaaccacactgttataggcgtgtctgggagcaggttactacagggcagggcctggactggcaagtttctgtgttcagatatcttgcctgactcttggcaccacaccagtctttctcccaggaaacttggccaattcctgaccttaggtgcccaaaccagcctagctgacttcaagatactgggctggccgggccatttcctggggagagaggggaagtatgatcttctctctctgtagccaggtctcagagagggagaggctttggattcttgggggtctcatttccct

SEQ ID NO: 174024 - DNA, 518 bp, Homo sapiens
ggtaaagagatgtcagacactcaactaagaatgcatctgctgccaccaataacaccagctgcatgggtttctatctctcaaaaccaggcattgaccaaagtgacagaaagaaccaatgatgtcagaattatatggggcataaaggtgctgtccagaaagaaagaggttgctaaaacaatagaaggtctcatttaggcattagaacggactcaattacatgttaatttgctccataagcacctatgggatagtcactgaacagcaggagggggcaatataaaggtggtaggtgtagaacttgtcatcaaggagcttatgttctagaggggtctaaccttgaatgygcatgcaaataatccaggggggttgttaaaaaatatggattaggctcagcatcagatttatcaaatcagagtctcaggggttgggttggggcacaggaaaacatgttgctgctgtacttgttattgtgaatattatagttgttgctgttgctgttgtttttaatggcccaggca

SEQ ID NO: 174025 - DNA, 466 bp, Homo sapiens
tgtactcgctaatgcaccacccatggccccaaaatgtcttgtttcatctcaacgcttgtagtagagattgtgatttctagaaaatccatgttggtaaaacagattcctgcccctggaatctgttaaaaacaggtctttctctgtacactgttggtgatcctaactgttgatcatctggatgtgttccctgtacaygaagcagatctccctttcatgtccagtgcccactcatccacatgagaacccttcagaggaccttcatagccaccccagaagttaagccacaagagtctgcctcaaaaatgctgattgttttggcaacatacaaactaacagtctcaaacctttctgtgaactttgggagttacaaattacaagcagccttttgctaatattaggaacaattcatgatatcctgagacccaaattaatcctcatttcagtccttcagtaaactacaaaggaa

SEQ ID NO: 174026 - DNA, 466 bp, Homo sapiens
tgtactcgctaatgcaccacccatggccccaaaatgtcttgtttcatctcaacgcttgtagtagagattgtgatttctagaaaatccatgttggtaaaacagattcctgcccctggaatctgttaaaaacaggtctttctctgtacactgttggtgatcctaactgttgatcatctggatgtgttccctgtacacgaagcagatctccctttcatgtccagtgcccactcatccacatgagaacccttcagaggaccttcatagccaccccagaagttaagccacaagagtctgcctcaaaaatgctgattgttttggcaacatacaaactaacagtctcaaacctttctgtgaactttgggagttacaaattacaagcagccttttgctaatattaggaacaattcatgatatcctgagasccaaattaatcctcatttcagtccttcagtaaactacaaaggaa

SEQ ID NO: 174027 - DNA, 516 bp, Homo sapiens
gaattctgtccaatgatagtaatacaggttcaatttctcttatctgaaattcttaggaccagaagtgtttcagatttctatttttgaatatttgcatatacataatgagatatcttggattcaggacccaagtctaaacatgaaactcatttatgttttayatacactttacacacatagcctgaaggtaattttatataatgtttaaaaataaattttgtgcatgaaacaagttttggctgtaacctttcacgtgaggtcagggtagaattttccacttgtggcatcatgtcagtgctttcaacgttatggattttggagcatttcagatttcagatttttggattagggatgctcaacttgtaatagctaacagtggaagacatacggcaggcaccccactataccctatgtggtgattcaaacccagctccattgtttccagctgagtgagcttccttaagctccataagccttcattcctcattcgtaaaaagaaaataatagtatatgctt

SEQ ID NO: 174028 - DNA, 388 bp, Homo sapiens
ggcataccacccttcataacaggctatgctggttttttctaagtacttgactttgagatttctacagatacrggctggtaggttataaattgttaaacccacaccagccggtctttatcttgaatagtattaatctgaaatggaaataagtcagcattatcagcatctgacgtcttaattaacattccgataccaatcagtgagttggttcactgttgttttagaacatatttctgtgaacatttctgaagtcattttgaaacaaacttggagaatagtaacaattttataaaacgcgtaagctccagttttgtgtattaaaaggcctgttggtcaacaccagtggcatcaccaactcttgcatcaggctaagcacatgacgtgttta

SEQ ID NO: 174029 - DNA, 388 bp, Homo sapiens
ggcataccacccttcataacaggctatgctggttttttctaagtacttgactttgagatttctacagatacaggctggtaggttataaattgttaaacccacaccagccggtctttatcttgaatagtattaatctgaaatggaaataagtcagcattatcagcatctgaygtcttaattaacattccgataccaatcagtgagttggttcactgttgttttagaacatatttctgtgaacatttctgaagtcattttgaaacaaacttggagaatagtaacaattttataaaacgcgtaagctccagttttgtgtattaaaaggcctgttggtcaacaccagtggcatcaccaactcttgcatcaggctaagcacatgacgtgttta

SEQ ID NO: 174030 - DNA, 571 bp, Homo sapiens
ctctctaagaataaaatgcagcccttttccagggaaacattaaaagcacttcgtgtaagcaccttattttccacaaagccttcccagacccagagcagtggacacmgacacccatttcctcttttctgtggctgtttggagtaagtttccagagaattagcacaattgatctgtagttcctctgagattcatcagtgaggctgcagttcatattttcaaactgccaagatgtttttactcacaactgcacagaaaaagccctaacttcaggcacaagcaggtgtgatatatgcaaatcaaattccttcattctgttattatccagtttgtggcaactgccagctttcattctcatctcacaaatgactaggtagtactcgccaagttttgaagtattatcaggagacagtgggtaaattttcaataagaagctcttgttgaatgaaaaattttttctgtcttgaactcaacttcactgttccttggtttcctaatttgtaaagtggaaataataatatttgttgtacctagttcacgaggacatggagagatggcaagtttggaaaagcag

SEQ ID NO: 174031 - DNA, 571 bp, Homo sapiens
ctctctaagaataaaatgcagcccttttccagggaaacattaaaagcacttcgtgtaagcaccttattttccacaaagccttcccagacccagagcagtggacaccgacacccatttcctcttttctgtggctgtttggagtaagtttccagagaattagcacaattgatctgtagttcctctgagattcatcagtgaggctgcagttcatattttcaaactgccaagatgtttttactcacaactgcacagaaaaagccctaacttcaggcacaagcaggtgtgatataygcaaatcaaattccttcattctgttattatccagtttgtggcaactgccagctttcattctcatctcacaaatgactaggtagtactcgccaagttttgaagtattatcaggagacagtgggtaaattttcaataagaagctcttgttgaatgaaaaattttttctgtcttgaactcaacttcactgttccttggtttcctaatttgtaaagtggaaataataatatttgttgtacctagttcacgaggacatggagagatggcaagtttggaaaagcag

SEQ ID NO: 174032 - DNA, 602 bp, Homo sapiens
aagctttagtgcctaacatcaaaaacaaaacaaaaaacttccacccataatagaatctccattagaaaaattaaggtcccatagcctctactctaaccttcttccccaagacattgtaaagatcagtaaaagagatataaggaaaaaatattttgaattcctaagaggaaaaatagtacacatttgtataatgttgccagtattgcagtcagatgtattattagtacatcctgatgaatgctgaggctctggtcatgggtttcattattccaatccatgggcaggtaatcacagcaatacaggagagagggatgaaaaggggcccagagcacaacttaaattcacttttcaggtatcacagacagacatagaaaatacctacatgactcacaagtcacaaggatyccaaaactctgtgtcttgtgctttatttatgaattaaatttccatttttcttggttttgttctggtagtcaaagcagctaaaaccctagaaatgtccttccatcttgggccattccacacaaaatggttgtgcaacacactgaactgagctccaaacgtggagatggaagccacaataggaaaggcagctgctaggg

SEQ ID NO: 174033 - DNA, 449 bp, Homo sapiens
taagggcaactagaaaaggtgcatggagaacatgaaacaatgtaatttgggaataacaagggcaaatcatttcaaaatggagaccaagtcctcagtgatctcacttccctattactatttgtaaatgctcatgatgtttattatgggatgcaatttatttmcagtgatggagttggggaggattattggatttattcaggatgctagaggtacacatatttcagtggctaaccctggagacacaggcaaaaaattattaagcaaatttgacaccttcagatatcttcctgtcacttaagagctaatgtctagaaactctgttttattccaattggagccaccctcaatatgtatcttgttttttaataaaagaagattgtgaaaggttctaagtatcaaaatgtatccttttgaactaaggtgagattaagcatagcctactcctccat

SEQ ID NO: 174034 - DNA, 538 bp, Homo sapiens
aattttacttatgagtttaattcatttattgattgattctcattaatcaaatatttattgaaaatatagtctggcaattaatgtttggcaatcaatggatacttaaagattctcttccacctggatactgtgtggatttaattaagttcttattttcttataatctcaggcattccttaaattggaatgttacaaactattgataagagagaaattttgaatgtgaaaggagagctaaatttatttgcgggtagattaaatgatattctatgtggtatgattcaagcagcataaaaaatcctcctgaaatattctaccactaccctttttctaattcctaaaaattcataattaataagtcatgaacttattaattatgggacttctaaaaaaaggaaaagcatctgtagaaatggaaattctaaaaacaggaaaaayaaagtcattaatattcagcaataaacattcaacgtgtattaaatgtagacctattttgggttaggcttagtttattttttaatacaacaacagagaattc

SEQ ID NO: 174035 - DNA, 540 bp, Homo sapiens
taattatataaatatattagaaatacatggatgccttaaaaatcaaatccatttatcatttgctttattaaagtttctaagacttttttcctgttttcatttttttgtttttaaatatcaaattttatcttagatgcaagggtacatgccaaggtttcttacctgggaatgttgtgtgatgctgaagtttggggtatggatcccatcacccaggtagtgagcacagtactcaataggtagtttttcaactcaccatccccttaaccctctagtagtcctgaatgtctattgttcccatatttatgtccatgtgtgctcagtgtttagctcycacttataagtgagaacatgtagggtttgattttctgttcctgagttaattcgcttaggtttatggcctccagctccatccattttgctgcattttatcttaggctgtcagtactttatgccatcttacatttctctgccattacttttttaattgaagttatattaaaaatatttgcaaatcttgagaaaggtaattttgctaaaata

SEQ ID NO: 174036 - DNA, 455 bp, Homo sapiens
tggtctgttctctgagaagtttttactcagtctccatcaggtaaagtcttttcaaatcccattccttatatttgcagtctacaatttccaatcctgagagaccccgcatttacggattctctgttcattttcatctatgtttgcaaagtgactcattctttcctgacctttcccacttctgaaaaggcttcccaaacataaacaatcacaactaaaccaaaacaatctagttcatgcatggaaattaagatgctgttctgctagcttcatggaaaggggctaaagtagaactttctatactcaatcttcttattytttttttttttttgacaaagtctcgctctgttgcccaggctggagtgcagtggcgtgatctcggctcactgcaacctccacctcccgggttcaagtgatgatcctgcctcagcctcctgaatagctgggattacaggtgc

SEQ ID NO: 174037 - DNA, 443 bp, Homo sapiens
ctcaaactcttccaaaaaattaaagagaagggaatacttctaaactcattttatgatggctgcattactctgacactaaagccagacaaagagactaccaaaaaagaaaattataggccaatatccctgaagaacatagatacaaaaattatcagcaaaatactagcaaaccatggtcaacagtacattaaaatgatcattcaccacgaccaagtgggatttatccctgagatgcaaggatggttcaatatacaaatcaatacaggtgatttccatattcacagaacgaagaagaaaaaccatatgatcatctcagtagatgtataaaaagcatctgacaaaattcaacaccttttcatgataaaaactcacaataaattaagtatagagggaatgttcctcaaccaaacaaatgacatrtattacaagcccacagctaacat

SEQ ID NO: 174038 - DNA, 575 bp, Homo sapiens
attttctgtgtcctttgctgtttggtgatgtctttctacagctttcatgccagtgtgataacttgtctgaggccataaactttcctttcataattgcatagatgtttctccactgttacaagagacagtgtcttgggacagcctggtatttgttttgttttgggtgatctttcattttgcataaatatttttatgttttttctcctcacctgaaattttaaaacattacaagaatgtgcttgcatattagtttcttttcattaactgcctgattttgatcccgggcaggcatcagcaaacattttytgtaaagagccagataatgagtattttaggctttcaggttcatatggcctgttacaactattcaattcttcaattccagagcctttcgcaccaccaccactgtcttctggctaggattgctagaggaatcaacaaattggagaagagcatgtggaaataaggcttggggaagaaatatttgttatcgcaacctttagatgacactaaaatctaggagctgatggctgagcaggcacttaagtcacagaatgagggaagggcatccaaac

SEQ ID NO: 174039 - DNA, 603 bp, Homo sapiens
ttatgtgttaattgttgctcacatctcaggagatagtcctgggttgataagctcattgtctacgatccatgactctatgacttgagcaaggaaagggaagaggaagctatttttatttcaggcgttcccatttcccatggtttttgagacctgtctaactcgtggttttctactgagaaacctcaatcatagtcagcagctgcctccatctattctcagcaacatgtttgaaaatgcagtgagccaatgtactgtattgaacacctcttatgcagcgcttcaaattctmtagggctttcttctttttctagcaactactttatcaatcagtttccatgaaggtttcaaccagcttccccatggtagaacctgacatcattttgcccctctcacttgctgccctggattctcatacacagtgttttgggactcatgggaacccacgtgttgctcatgtatgtacaaaccagactgtgggacaattagttaatacccctttgggccattcttaactaatgggaatgggaatgggaatgatgaataaatgttcctccctttattcccctgagtagatggttctccaacagatttaataataataag

SEQ ID NO: 174040 - DNA, 368 bp, Homo sapiens
atgaaattaataaagtttcattagctattggaataatacagagaaatcaaactatgtgttattcaagttccagtaggagagtaggacataaaaatactggaaggaataatgtacaaatatattccaaatttgattaaagcagtgcacctactcatccaaaygtgcaatgagaatcaggaaaaaagaaatacatacatatacagattcacccgcaggcacgtcataattgaattgtaaaaacaaaataaagagggaaacaaaccttaaaagcaactagaaaaaaagcataccttatgtaaaaaggaataaagataattaacacatatttttcattagaaaccgtggaaagcaaaacacaatggaacatc

SEQ ID NO: 174041 - DNA, 420 bp, Homo sapiens
aggaaaaagaatgaaattaataaagtttcattagctattggaataatacagagaaatcaaactatgtgttattcaagttccagtaggagagtaggacataaaaatactggaaggaataatgtacaaatatattccaaatttgattaaagcagtgcacctactcatccaaatgtgcaatgagaatcaggaaaaaagaaatacatacatatacagattcacccgcaggcacgtcataattgaattgtaaaaacaaaataaagagggaaacaaaccttaaaagcaactagaaaaaaagcataccttatgtaaaaaggaataaagataattaacacatatttttcatyagaaaccgtggaaagcaaaacacaatggaacatctttaaagccctaaaaagaaaaataattgtcaatctagaattc

SEQ ID NO: 174042 - DNA, 509 bp, Homo sapiens
aaagaatatgtggagttctgaggtgagcagtgcccttgattctgtgcaacaatgatgaatggaatataatttcacaatacaattctaatatgagtagaggaaggaaaaaactaatcaaatgggaaaaaaaaggtggcaaataccctgtaacagattattcctttagggtgcaaaataccacctgcagaacttctctgatagttttgaagagtccaagtattcaatagttcaataaggtggtatgaaatcaacattagtcacactggacaatttactcttccataacttgttgttaggtcaggtgtatttttcccctcagtgagttcttcactacctgcttaccttttaatttttatagaattgctattatgtatcttgctcctataggatcctgagccattgctcctaaatgccccaactccaggcaaagatcatctttgaactcctgttggtgtgtcctgttgatatttgttggtgtgttagrtgaatttctgtacagctttgaattc

SEQ ID NO: 174043 - DNA, 522 bp, Homo sapiens
aacctacatggtttatatgtaaacaaacatatatatcatctaggtttatgtaagtacactatggtcacacaattatgaaattgactaatgatggatatctcaaaaaatttctgtcrtcaagtgatacatgactgtatatacacaacactttgcatcagcttagaagctgaagctgggtttgcattaggtctcgatgaaggtaggcatattagagtttaaatagaagataaataatggaccaagactggagctattgggtggtcagtatgagagagggggcaagagttgtgagggagagagctgtgagacacggcccattaaccaaacatgtagtatcagagagcaaaggagaagaggggaatgctgagtggtcaagatatgtccaggcattatgacacctaaataaaggctttgaggaggggaaaacactaactataaccagagacaacagctttttcaagatggcctcattaaatgtttaattgggtgagaatattttgtggattcccacacaccgccaga

SEQ ID NO: 174044 - DNA, 535 bp, Homo sapiens
aaaaaattaagataccattttactttaataaattagaaaagaaaatcatataaagaaaaaatatcaaatacatagattatttttctacagcactatagaaaaacaaaattgttgccttcctttattagatgtagctcttaggaagggattgaatggaggtgtgaatgactgaataaggttaaataaatgggcaaaaaaatggttttcatattttttctttcccaggagtagtttccaactctttcacaacaaaattctacttttgttattaattatcttaggatggtcagacctggactcaaatcccaagtttgcctccatcatttcctctggagactctttcagcaataagggcctcccagcagagaaccattaatttagtgcagatctgtaattttacacaatcctgtgagatgcgtcctactataatcccattttatagatgataaaatggaggcatcaacaggctaaaatcagctagtacmtcagatcaggcagtatgattcagagaccacatttatagtccttatactgc

SEQ ID NO: 174045 - DNA, 307 bp, Homo sapiens
gtcagccctgcattaggacccctgtgatggaatgtgcccttaagcagagagagggactttcttctctgcttttcctcagaatgtctctgaagccccaggccctgtttgctttcaggaattgtttgcctgttgttagtggcactcaacaaataccctgctgagacagaatagtaataatggtgccaggaaggagacamcccgaagatggccataaacccttgaaaattcattacatggagatgaggtcatgtgtacacgaaaggcccaaagctatagaaccaccattgctattgctgatgtaacctca

SEQ ID NO: 174046 - DNA, 307 bp, Homo sapiens
gtcagccctgcattaggacccctgtgatggaatgtgcccttaagcagagagagggactttcttctctgcttttcctcagaatgtctctgaagccccaggccctgtttgctttcaggaattgtttgcctgttgttagtggcactcaacaaataccctgctgagacagaatagtaataatggtgccaggaaggagacaacccgaagatggccataaamccttgaaaattcattacatggagatgaggtcatgtgtacacgaaaggcccaaagctatagaaccaccattgctattgctgatgtaacctca

SEQ ID NO: 174047 - DNA, 556 bp, Homo sapiens
aacttctttccttaacaaataacccagtctcaggtatgtctttattagcagtgtgagactgctaattacagttcattggtaccatagagagtggggtgctgctacaaggataccccaaaatatggaagcaactttggatctgggtaaaaggtataggttggaacagtttggagggctcrgaagaagacatgaaaatgtggaaaagtttggaacttcctagagactttaaggaagacaggaagatgtgggaaagtttggaacttcctagagacctgttgaatggctttgaccaaaatgctgatagtgatatggacaatgaagccacacatgcacaaaataccttcaaaatagttaagaaatccaggtgagaaattttagcacttaagtggagcagagaaataagaaaagacacaataaagggtaggaaggatagttccacaataccaacattagccgccccactcccgccaagctcacacagcatgacacagagaaatataccctccacatgaaggaaagagactgaagtgagtccgtgaattctctgcagatgcca

SEQ ID NO: 174048 - DNA, 518 bp, Homo sapiens
gtatttaaaattaagctctctaaaattgcaaaggcacatatttagtgttttctattttttggtaagtaaagattctgacaaataattaccctctttttcctggtagaaacttctgtttacacggaaaattttctctaagatggatttcttccagtgagaatttgagcaatttattttctttaacataycttgaatgatattttctcttctgtttgaaaaatatgacaacatgccagatctcggagcttctccagagtagaggacacacccatcaatagacaagcaagttttcatgggtatgtcattctaagcatagaaaaaggcagactttgaagcgcgctaggattccccctagtggatgtaaaaggtacttgatttaagaaaaaaaaaaatccacacctgaggggagttggtgggtactgtggtttacaaggattcattcctccctagcatctgtttctgaaagttggaagtatgtcaccaattaataaaggtttgattagcactcctctttctat

SEQ ID NO: 174049 - DNA, 534 bp, Homo sapiens
ggccaagcccaggtggatttggtgcaaatagtggctcacttgaagcccttggactgctcatcaaattcagcagcagctttgtaaaagtcaatctcactaaccaaacatatgaaatatgacttcttaaaagctctttttaaaacagaagcagttaggtcctaagggaggtgggaaaggtgtgtgtctcaagtcattttaaaacgactttatagctgcactatcaaatatgacakccgctagccacataatggctatttaaatttaattaaaaatttacatttaattaaaaacactagcaacatttcaagtgttcactagctacctaaggtgactggctaccatactggagagtacagatgtagaacatttctatcactacagaaagttctcttggccaacactgctctacagaatcctgtaagtggagccaagggacaggcactgaccaaggtatgggcttgccaggatttgccgtctctaattcattagctgtattaatcagctcagattcagttgatctggttctggaaagca

SEQ ID NO: 174050 - DNA, 534 bp, Homo sapiens
ggccaagcccaggtggatttggtgcaaatagtggctcacttgaagcccttggactgctcatcaaattcagcagcagctttgtaaaagtcaatctcactaaccaaacatatgaaatatgacttcttaaaagctctttttaaaacagaagcagttaggtcctaagggaggtgggaaaggtgtgtgtctcaagtcattttaaaacgactttatagctgcactatcaaatatgacagccrctagccacataatggctatttaaatttaattaaaaatttacatttaattaaaaacactagcaacatttcaagtgttcactagctacctaaggtgactggctaccatactggagagtacagatgtagaacatttctatcactacagaaagttctcttggccaacactgctctacagaatcctgtaagtggagccaagggacaggcactgaccaaggtatgggcttgccaggatttgccgtctctaattcattagctgtattaatcagctcagattcagttgatctggttctggaaagca

SEQ ID NO: 174051 - DNA, 588 bp, Homo sapiens
aactaagtgctgtctcatctttgtgcccccaggaactaggccttgtatacagtaagtacccattcatttattacaaaatagtgaagtgtgtctccttcatgccaggctctgttctagcagtgtaactaaacttacctgttgaatttgtttaacggggccaattcctccctttggttatgaattccctgctctgaacttgaagagcactttatctgtaggttgatagcattaaaatctggtgagtcacatcatacactatgcattggttgtgtktatagctctttcacttaatataatttctttgagatcagagatggtgtcttaaattcagtttatctccatattccctttattcctcaaactttctgttcattaacttactccatcttttaacagatacttcctgagaatctaccatgtgctaggcatgtgttgcaggctggggttatggcaatgagcaagatcagtggtgttatttttgtgcagattactgggccttacacggagtcagtgttcaataaatgtcagttgaagtgtaatgtaaaggctctatactccttaggggcaagggtcattctttgaggtacc

SEQ ID NO: 174052 - DNA, 395 bp, Homo sapiens
ggtcttggagaacaaaaacacaagagcagaaataacaaattcagtaggaggtttgagagccaaagttgaggaaatctctcaagaatatacagtgcaataaatcactgaaaccaggagacaaatgacaggaaaattggaggactagtgcaagagctctaataatctactactcaaatcataggcattctagaaacagagggaacatggtagggaggaaatgtcaataaaataagagaagaaaacttcctaaaagtaaaagacatgaatctygagattgaaaagaccccacaagtgcttacctagcacagcagataagccacacgtccagatttccatcagggcaggtcaagggaaatttcaggacattggtaggatagagaaagtctacaaacttt

SEQ ID NO: 174053 - DNA, 310 bp, Homo sapiens
actaactgtgtgccctgcgtgtctgcttggtgtataacctctgtcctagattctagctttgtgcggagtggacatcccatgatggatgcagggaaataatgggtgtatcttagcctgggtctccagaaagcagagccaacaacagaggcttagctgtgagagcgtgttgcagggactaggagcgtgtgccaggagtcgcaggctggcgatggtgatgagctctgaacagagtcagtccatcccatgggwctgccagaaggactcatccaaagaagaaagagggagcgtttatcacaggttccatctcccc

SEQ ID NO: 174054 - DNA, 542 bp, Homo sapiens
ttttcttcacttctctggcaggaatccactggctactttccaggtgccagcctgcatggccattgcccaggcagcccagtgtagtgagaggaggctgctacctgcctggactactctctagctgtgtggccaggggcaagtcactcgttctttctggtcctctgcccttcttcttcatagtgagggtgtttaactcggtgatctcacaggctgtgcagttctgatggcctctgtgagtctcctgtaagtcagaggcacccttactgctttgtaaagacaaaagagcagtttaatatgtccaagacatattaagacaccatttgtgaagatagggaggtacaccagaaaggctyctgtccccaacgcctgatattccagaatcaatgcttcatttcttttcaggagtatttctttgtcatgtacatactcttttcaaaggtaattcctgttctcttcttccagctcatcaagggcagaacatttgatccctaaccctgaagcataatgagtctactacttagataagagattttaggccatgg

SEQ ID NO: 174055 - DNA, 537 bp, Homo sapiens
ctcagatctgtatctcatcacttttcagcttttcttcacttctctggcaggaatccactggctactttccaggtgccagcctgcatggccattgcccaggcagcccagtgtagtgagaggaggctgctacctgcctggactactctctagctgtgtggccaggggcaagtcactcgttctttctggtcctctgcccttcttcttcatagtgagggtgtttaactcggtgatctcacaggctgtgcagttctgatggcctctgtgagtctcctgtaagtcagaggcacccttactgctttgtaaagacaaaagagcagtttaatatgtccaagacatattaagacaccatttgtgaagatagggaggtacaccagaaaggcttctgtccccarcgcctgatattccagaatcaatgcttcatttcttttcaggagtatttctttgtcatgtacatactcttttcaaaggtaattcctgttctcttcttccagctcatcaagggcagaacatttgatccctaaccctgaagcataatga

SEQ ID NO: 174056 - DNA, 542 bp, Homo sapiens
ttttcttcacttctctggcaggaatccactggctactttccaggtgccagcctgcatggccattgcccaggcagcccagtgtagtgagaggaggctgctacctgcctggactactctctagctgtgtggccaggggcaagtcactcgttctttctggtcctctgcccttcttcttcatagtgagggtgtttaactcggtgatctcacaggctgtgcagttctgatggcctctgtgagtctcctgtaagtcagaggcacccttactgctttgtaaagacaaaagagcagtttaatatgtccaagacatattaagacaccatttgtgaagatagggaggtacaccagaaaggcttctgtccccaacgcctgatattccagaatcaatgcttcatttyttttcaggagtatttctttgtcatgtacatactcttttcaaaggtaattcctgttctcttcttccagctcatcaagggcagaacatttgatccctaaccctgaagcataatgagtctactacttagataagagattttaggccatgg

SEQ ID NO: 174057 - DNA, 548 bp, Homo sapiens
acaggcaactcaggcaaccttatccccctccaagaagagtgttttccccattcccagaaggacaccagtgccaggctgctcctgagtctcagcaaagccatctgtcktctttggagtgtccacattcagaacaagccgctgaccccagaacccgatggatccctgcacacacaccaccatgcacggtggggtctgatttggacggcaccatcgctcgcaaatcacatgccacacaaggaaaacacgaaagctttatgaaaaatccaaagtttattgcaaattgtattttgcttcccttcgttcttcatttttacaggatttattgatatccatgattttttcacagatgtacttgttgactttggagagtctctgtgcaatttcagtttcatccacagtttcttgtgctattctgtcatacaaacactctagacggggagaagaaacaaggccaaggattaatggtgaattcaagtaaaaatcttttaaggagggtaaaagaaaatgtacctcccaacatacttcccaaataccagcttatgtatctg

SEQ ID NO: 174058 - DNA, 514 bp, Homo sapiens
gaaatagcattacgggtttctagcaacttccttggtatccctgaaatcacactatgtaaccattcacctactccattaattctggcccttgagacatacccagaataaagatacagaaagaatggtgacagaaacctctctagatctggagcctgaaatcacttaaagaagtttgggcaaatgtcctgacacctgggttgatgcaagaggctaacttcctggtggtttatggaaaaggtggctgaatatttgagaaaaaaacgttatatgcagcttctgagcctcagccacccagcctgactctggtcacaactggatccctcagccggattccagaccaaaccccaaggccagttaccaaatgactactgtcacggaatgactcctaaggctgggccatggctgsactgagcctggaatagcccaggctctggactgtgttctccctccactgtacccaggccatggtgaccctccactctgggaaatctgcctccatacacacagctaagcc

SEQ ID NO: 174059 - DNA, 625 bp, Homo sapiens
aggaaattagcctcaacattcagaggagggaaatgtaaaatgatgtccccttctgagaaaggcagtgtgtggacctgacaggtaggagggcatgtgtggtctcaactggctgccacactatctgcatgtccctctgctgtgttccaagattatttcagcatcccaagtgcagggccatctcttatctacccacaaaagagccaagaaggaaaggaagggagctaagaagttttgatcacccaccatgtgccacagacctcatatacactacctcatctaatccccagaaaagtcagcaagtctgtaattattatcccatttatacaaggcaggaaactgagtctcagggaggtgatgaatactgtccatggcaggtcttgcagtaaatggaggagtcaggcttcaaagccaggtttgtctgactccactatctttgttctttcccttctcctcccaccccaacgagaacacagtgccagtgaaagggcttgtagcatcagagataagctgagatcaaaactcttggctgaagtgcagcgtgaacattctgggggatttttctgtttgcactmatgcccaagcccaggagtggtgggaaagagcctttggtccatctccccatgac

SEQ ID NO: 174060 - DNA, 544 bp, Homo sapiens
aggacaccaaatgcccctacccaaggcttgctcataatggaagtacgactcatgtgtatttattctgaatttaaatcttgagtacatctcattacyataacatgatctttagagaaagaaggtcgaaagctggatgtgttggcatgagtcgtcagtggagatggacagaccctgagaggccctcacttcataggccatcacctgtcttactttgagagacaatcctgccaactgtatttctagggctcaatgggggccccaaaacatgagaactacatttggatgttgctttcaaagtaactcatgtttggccaaggattcctatcagaacaaatatttctccatggcccctccacagtgccaccccagggaggacaaatcttcagtcccctcccagccaatgatatcactgtccacccactcagccaagccacaaaccgtggagtcatcactgggtcttccttttctcaccttctacttctaatcagcaaaccatgctggttttaacccaaatatagaattctgctttcatctgtcccatcca

SEQ ID NO: 174061 - DNA, 544 bp, Homo sapiens
aggacaccaaatgcccctacccaaggcttgctcataatggaagtacgactcatgtgtatttattctgaatttaaatcttgagtacatctcattactataacatgatctttagagaaagaaggtcgaaagctggatgtgttggcatgagtcrtcagtggagatggacagaccctgagaggccctcacttcataggccatcacctgtcttactttgagagacaatcctgccaactgtatttctagggctcaatgggggccccaaaacatgagaactacatttggatgttgctttcaaagtaactcatgtttggccaaggattcctatcagaacaaatatttctccatggcccctccacagtgccaccccagggaggacaaatcttcagtcccctcccagccaatgatatcactgtccacccactcagccaagccacaaaccgtggagtcatcactgggtcttccttttctcaccttctacttctaatcagcaaaccatgctggttttaacccaaatatagaattctgctttcatctgtcccatcca

SEQ ID NO: 174062 - DNA, 544 bp, Homo sapiens
aggacaccaaatgcccctacccaaggcttgctcataatggaagtacgactcatgtgtatttattctgaatttaaatcttgagtacatctcattactataacatgatctttagagaaagaaggtcgaaagctggatgtgttggcatgagtcgtcagtggagatggacagaccctgagaggccctcacttcataggccatcacctgtcttactttgagagacaatcctgccaactgyatttctagggctcaatgggggccccaaaacatgagaactacatttggatgttgctttcaaagtaactcatgtttggccaaggattcctatcagaacaaatatttctccatggcccctccacagtgccaccccagggaggacaaatcttcagtcccctcccagccaatgatatcactgtccacccactcagccaagccacaaaccgtggagtcatcactgggtcttccttttctcaccttctacttctaatcagcaaaccatgctggttttaacccaaatatagaattctgctttcatctgtcccatcca

SEQ ID NO: 174063 - DNA, 334 bp, Homo sapiens
aaaaggaaagacagaaaaggaagaaagggtggaaggaaggaagggaagaaagagaaagaaagagagagaaagaaagagaaagagagaaaaagaaaggaaggaaggaaagaaaagaaaggagaaagaaagaaaaaaagaaagagggagggagggaaggaggaaggaaggamggaagaaaaagaacaagaaagaaagagagaaagaaagggagaaaaaccagacattcaaagaagtcagccaaagaatcctgggcaaaacaaaggccctaaagcaaggatgagtgtattgttttcaaaaaccaaagggaaggccagtagccagattgtgacaaaca

SEQ ID NO: 174064 - DNA, 446 bp, Homo sapiens
aacatcaccttcctatcactcagatataactcctgttagcctttgatgtagttcctgccatcttttctttctgagcttatagtggtaagtgcagcagtagctaacatttaagaagtgcttactagtacctttacaygaattatcacatttcattttcgcttttatgccacacaagccctgtattaacattttacagaggagaaaacaaaggcttagaaaatgtaaataactttctctaaggtcactgagctactatgtaatggagttagaatttgagctcaggtcaacctgattctcagagtccaaaatcttaccaattgctctccttactctgctctcctctgactacattaaattgtctttcagaaaggaaacattcaatgctgtgactagtgccttgatctacagacatattcatgcagttcttaaatattcttatctgacgt

SEQ ID NO: 174065 - DNA, 446 bp, Homo sapiens
aacatcaccttcctatcactcagatataactcctgttagcctttgatgtagttcctgccatcttttctttctgagcttatagtggtaagtgcagcagtagctaacatttaagaagtgcttactagtacctttacacgaattatcrcatttcattttcgcttttatgccacacaagccctgtattaacattttacagaggagaaaacaaaggcttagaaaatgtaaataactttctctaaggtcactgagctactatgtaatggagttagaatttgagctcaggtcaacctgattctcagagtccaaaatcttaccaattgctctccttactctgctctcctctgactacattaaattgtctttcagaaaggaaacattcaatgctgtgactagtgccttgatctacagacatattcatgcagttcttaaatattcttatctgacgt

SEQ ID NO: 174066 - DNA, 597 bp, Homo sapiens
atatctcaaaatatagactcattatactcatatgtctccttgcaaatttctcaagagaaaacagagtctcgccaggcgcggcggctcacacctataatcccagcacttcggaggccgaggygggtggatcacctgatgtcaggagttttagaccagcctgatcaacatggtgaaaccccttctctaccaaaaatgcaaaaaatttagccaggtgtggtggtgggcatctgtaatcccagctacttgggaggctgaggcaggagaatcgcttgaacctgagagatagcggttgcagtgagccgagaccacaccactgcactccagcctgggcaacaggaacaaaactccgcgaaaaaaaaaaaaaagaaagaaagagagaaagaaagaaaggaagaaagagagagaaagaaagaaaacaatgtcttatatatcacttgaattcccagttgcacattgctcatgaatttatattaggccaagtctgcatggccatgctctacaattaaataaaatgataaatgtgaatagtgctgcaatgaacatacatgtgcatgtatctttgtaatagaatgatttatattcctttgggtatatacc

SEQ ID NO: 174067 - DNA, 352 bp, Homo sapiens
ttaaatgataagacttgtgtgcacacacacactggtattgggtgaaccaaaacaatgtagcatgtctttgggttggatcctgcttgtgtgctcccagtttatgacctttggagaacatagtgtttttggggtaaggacaaggggccagagagtggtaagagatacctctaaggagrtaagttggagctattttgtgaggatcttgctaagaaatcggtgctttatcaagtagggctcattgaatccctcaaggatcttaagcctggatgtggtatcaaatttgtgttatcaaatgatcaatctagaaccagcaaaaaaaagtttggatttgagaaagataagactaggatag

SEQ ID NO: 174068 - DNA, 519 bp, Homo sapiens
aagtagaatctttaaaaactctcaaattccaatttcagtaaaataggacacagataatctgcagactctaacaacgaccactaaaactataatctgcagattctaacaatgaccactaaaactaactgagacctggttagatttcatctagaaggaagtcaaaaggaatacttagaagtcctggaagtgatggattttgcaaaaacacattttctaagaggaagaggtccaccctctagtgaaaaagctacatggcttgtttgctacagtgagtgaagaaatctggtggcaagactcgaataaaaattctcctggacttcaactttgaaaagcagtggatttgaagatgcagaggcagtaaaatcacacartgcatgacatggatgtgccatctttgcagaaaagctgtctgtgtggttgcattggaaggttattcagagtttgacacctggaagctactctggtccttcttccttccccataggaacttatttaaatggctagtccagaaaaatttaa

SEQ ID NO: 174069 - DNA, 416 bp, Homo sapiens
cgccattctcctgcctcagcctcctgagtagctgggactacaggtgcccaccactacgcccggctaattttttrtatttttagtagagatagggtttcactgtgttagccaggatggtctcgatctcctgacctcgtgatccacccgccttggcctcccaaagtgctgggattacaggcgtgagccaccatgcctggtcacatatctctatatttcttattggttctgtttttctggagaaccctgactagtacagggaacacatcagaaactgagatattcagaaactgttagaagaagaaaacctggcaaaagactgaacattagaaggataaaaggttccaactattgtgatttgtgtgttaaaggaaagtgggacctcacggattatgaagtctgggctatttatgtaatgt

SEQ ID NO: 174070 - DNA, 479 bp, Homo sapiens
caatactccatctcaaaacaaaaaacaaacaaacaaaaaacctctaatatagactgtcagaagaggatttatgggtgacagactagtttatgattttaaatattaaaattctaaaatattactttatttttaaatttattattattttttgagaaagggtcttgctgtgttgcccaggctggaatgcaatggcacactcacagctcactgcatcctcgaactcctgggctcaagaggtcctcctgcctcatcctcctcagtagatgggactacaggtatgtgccacctcatccagctaattttttttttttaragatagagtcttgctgtgttgcccacgctggtctcaatcttctaggctcaagtaatcctcctgcctcagcctcccaaagcactgggattacagccacctcacctggcataaaataataaatagtgagtagggtaaattatatattatagcttctatcataccattc

SEQ ID NO: 174071 - DNA, 444 bp, Homo sapiens
aggaattctctggaggccagaaaaaccaaccggctacctgagaacttagccaccactgacatggacagcattctcaccataacaactagttaaaggtagtaaaccctctcttatttaactggcaagtgattaagactgttcagttttgctttccacagaatataaaatgaaacaagtttccagaaaagagaagtaaccccaagtcactccctgagtgaagcaagaattagatgagacatcctatgtttaaatggagcctaacaataagttgccacatgagtcctttcactttcattattcccacacatctaaatccctttcttcccttcttatgtgaaaactcttgataagcaagtttctttccrggggggagggaagataatataattattattgccgtgatatcccaatgtttacatcaatgggctcaaactagccatgcca

SEQ ID NO: 174072 - DNA, 532 bp, Homo sapiens
tttttttttttttttttttgcaccatcttttgtattccagatggcttgggagtgatgcacactccttttttttttttttagacggmgtctcactctgttgcctaggctggagtgcagtggtgcaatctcggctgcaacctcgcctcctgggttcaaacaattctcctgcctcagcctcccgagtagctgggactacaggcgctcgccaccacccccagctaattttttgtatttttagtagagacggggtttcaccctgttagccaggatggtctccatttcctgatcttgtgatccgcccgcctcagcctcccaaagtgctgggattacaggtgtaagccaccacacccggccccaatgcatactctttctggtaatgaattgaaatctcataccattcactggtcacagcctcacataatttccatgacagccttcaaagccacatccccacaatttagcactactcagagcacaagaggcctttgctcaatggcctattgatatctgcctgctttctgcagaccaagat

SEQ ID NO: 174073 - DNA, 532 bp, Homo sapiens
tttttttttttttttttttgcaccatcttttgtattccagatggcttgggagtgatgcacactccttttttttttttttagacggagtctcactctgttgcctaggctggagtgcagtggtgcaatctcggctgcaacctcgcctcctgggttcaaacrattctcctgcctcagcctcccgagtagctgggactacaggcgctcgccaccacccccagctaattttttgtatttttagtagagacggggtttcaccctgttagccaggatggtctccatttcctgatcttgtgatccgcccgcctcagcctcccaaagtgctgggattacaggtgtaagccaccacacccggccccaatgcatactctttctggtaatgaattgaaatctcataccattcactggtcacagcctcacataatttccatgacagccttcaaagccacatccccacaatttagcactactcagagcacaagaggcctttgctcaatggcctattgatatctgcctgctttctgcagaccaagat

SEQ ID NO: 174074 - DNA, 401 bp, Homo sapiens
ttgggccagatgtgaggggcaggtacagggatagggaaaaagttatattcagatatcaaaggagagaactgaagagtagttacttaccctaagtctccttgggatgatggtgcttccaccactgagatctctaacagagaggaacggaaagaggcattgtctacggaaacytggtcaagacgttggtaaatttcctcaagcttcttttcactctatgataggccagagttcaggtctttaaagaatgttgagtttgcactatttgccaagcaccatgctaggctctggggcatcaaaagtgaaaaactacatgcctattctcaagggtctgcaggcccagatatactgcacaggatccctgagatctaagtgcttcctcaccagaattatcaatggaattc

SEQ ID NO: 174075 - DNA, 401 bp, Homo sapiens
ttgggccagatgtgaggggcaggtacagggatagggaaaaagttatattcagatatcaaaggagagaactgaagagtagttacttaccctaagtctccttgggatgatggtgcttccaccactgagatctctaacagagaggaacggaaagaggcattgtctacggaaacctggtcaagasgttggtaaatttcctcaagcttcttttcactctatgataggccagagttcaggtctttaaagaatgttgagtttgcactatttgccaagcaccatgctaggctctggggcatcaaaagtgaaaaactacatgcctattctcaagggtctgcaggcccagatatactgcacaggatccctgagatctaagtgcttcctcaccagaattatcaatggaattc

SEQ ID NO: 174076 - DNA, 559 bp, Homo sapiens
gtctgcaggcccagatatactgcacaggatccctgagatctaagtgcttcctcaccagaattatcaatggaattctgaaccaaaagtggcagagagggaatcagtttttctggctccttcattcttttgtccacattctttgttgttcactgatctggtcatgtttttatttgagaactgaaactatttgcagtgcattctcagtctttcatcggcaattgctsagttttactgacttcatcagctgtgcttacaatactcaattgtatttacattgctttagcctcttctgtcctcgtttgccactgaaccagcacataaaaatgcaactctagtacaatggaaacagactatgattctcttcaatgatgtctctcattaataactgtggcccaaaggaagaatcaattaaatgaaataatatatacaacatattaagactgtgtcaggcatgtaggaggcagccaatatgtgttagccattgtcattagaaatatatacatatctttcaaatcgacggttacctggaagaagtcccattattcaaagtccttcttgg

SEQ ID NO: 174077 - DNA, 571 bp, Homo sapiens
agcaatgtctgcatattggaggagttctgcatgagtaaggcttgggcccagcacttggagaagctggcattatagactgggcagtagttctgtctctaccaatatttgacccgctgctctgccgctgtgggccttactttggccaaaccagtgggcttcattcttgaccaacgttggttagttctgaggtccaactgttgaayagaaagagctctggcctttgaatcctatctgcaccattgattgaataatgtactttgtagtttaaattagaccataccgaatagaccctctagatttagcagaaacacattctgttgttttggcataatgaacaatgcaataaatgtgaaaaccagaaagttgttcgggatccaagatggctctagagactgtccttcagagaccagagttgattgcttctaccctcttgctgctgccatctaatcaccctatttgcactctatgcaaatttcatctttgtcttgctcatttctgtttactcatagcttctcacgtctcatggtgaccaagttggccttctccttttgtcttttatcttttgctatta

SEQ ID NO: 174078 - DNA, 571 bp, Homo sapiens
agcaatgtctgcatattggaggagttctgcatgagtaaggcttgggcccagcacttggagaagctggcattatagactgggcagtagttctgtctctaccaatatttgacccgctgctctgccgctgtgggccttactttggccaaaccagtgggcttcattcttgaccaacgttggttagttctgaggtccaactgttgaacagaaagagctctggcctttgaatcctatctgcaccattgattgaataatgtactttgtagtttaaattagaccatmccgaatagaccctctagatttagcagaaacacattctgttgttttggcataatgaacaatgcaataaatgtgaaaaccagaaagttgttcgggatccaagatggctctagagactgtccttcagagaccagagttgattgcttctaccctcttgctgctgccatctaatcaccctatttgcactctatgcaaatttcatctttgtcttgctcatttctgtttactcatagcttctcacgtctcatggtgaccaagttggccttctccttttgtcttttatcttttgctatta

SEQ ID NO: 174079 - DNA, 469 bp, Homo sapiens
accagtgggagaagtgaagacagttgacataaccagagttgaaagatgaaaatagccctgatccctgagtcactgttggaaaaatgccttcaggaacactgtctgattcatatggactctgttaagtcactgagattttgggattgtttgttcttgcgatctagtgcagcccagcctgacaactgagcatcttctatgtgcycagcactgtattaggttctttccaataaattgtctcaaaacaatcttatgaatgtctactctaggagagttttggcccagtaaagtttgagggtgtgaagggtcactacatcccccaagacttagcttcttcctatgcatctccagaagttatgccagaacccctagcctttgggactctcagattctgcccattctcaagaactcttctgagaatctagccttctctctggacttggcattcatcacatttccccctggactggac

SEQ ID NO: 174080 - DNA, 469 bp, Homo sapiens
accagtgggagaagtgaagacagttgacataaccagagttgaaagatgaaaatagccctgatccctgagtcactgttggaaaaatgccttcaggaacactgtctgattcatatggactctgttaagtcactgagattttgggattgtttgttcttgcgatctagtgcagcccagcctgacaactgagcatcttctatgtgctcagcactgtattaggttctttccaataaattgtctcaaaacaatcttatgaatgtctactctaggagagttttggcccagtaaagtttgagggtgtgaagggtcactacatcccccaagacttagcttcttcctatgcatctccagaagttatgccagaacccctrgcctttgggactctcagattctgcccattctcaagaactcttctgagaatctagccttctctctggacttggcattcatcacatttccccctggactggac

SEQ ID NO: 174081 - DNA, 481 bp, Homo sapiens
gtgaagacagttgacataaccagagttgaaagatgaaaatagccctgatccctgagtcactgttggaaaaatgccttcaggaacactgtctgattcatatggactctgttaagtcactgagattttgggattgtttgttcttgcgatctagtgcagcccagcctgacaactgagcatcttctatgtgctcagcactgtattaggttctttccaataaattgtctcaaaacaatcttatgaatgtctactctaggagagttttggcccagtaaagtttgagggtgtgaagggtcactacatcccccaagacttagcttcttcctatgcatctccagaagttatgccagaacccctagcctttgggactctcagattctgcccattctcaagaactcttctgagaatctagccttctctctggacttggcattcatcacatttccccctggactgsacagtctctggatactggaaaagccac

SEQ ID NO: 174082 - DNA, 569 bp, Homo sapiens
ctggtcctattgagttcagaggaaaataagatagaagccaatagtgttggatagagagaggaagaaccaccttagagtagaatttccatgaatatgtttccataagtcctactccaaaagatattaatagggcatttggtgtgagggtggggtggggaggctctcattgccaaataagatgaatacatgcagaattaagttgaattaaagcaaaaaaaagtctctgtctgcaagacttctcagagcctttggcatgtcagaatgcctggtgaatccctaaaatggrcatgagtgtatagcattttgcaaatgcatttgaccataggcctgtttcttttccgggtgtttcagcatcctagtagactataaaaactaacttgaagaaatgctgtctgcacaggagaggacagaacctcctcagttaatgttttacatgggcatggaaggacagatcacagaaagctgatcattagcatggctgaagtcttcttgagaatagagagatccagacggcatctctgtaggaacagcctctcaggcacatggaagaatgtactgcagacataaca

SEQ ID NO: 174083 - DNA, 541 bp, Homo sapiens
ggctttaatattcttgtaactgctctagtagggacaaatttttccaaattttgatactaggaattggtcagaggaacataggtagaaagggtgcttagtaatattgaaaacaaagccaatatggtgtaccrattaaggacctagactcaaaccagagggttgagttcaagtctagttgttaccacttactagttgtatgagcctgagcaaaggcatttaaccatgtgaagattctattcccttatctacaaaatgagggtctcgcagtaccagcctcatcttgtttattttgtgactttaatcagataatgcccataattcacttaatacaatgctggacacatagtaagcactcaataagtgtaattattaaaggaggagaaagaatttcttcaggggagggtgaaattataacgttaaagcatagctttatgcaagcttttcttagggtagatgtgttaatattcagtaattctattttcttttaatctagttaagtacaacgaaaaagctaggaactcctgagcaatgtgagagatat

SEQ ID NO: 174084 - DNA, 429 bp, Homo sapiens
tgcctcatctgtccttacaagaaatacaaaaattagccagtcatggtggtgggtgctggtagtcctagctactcaggagcctgaggtggagggatcatctgagcccaggagcctgaggctgcagtgagctgtgatcatgccactgcattccagcctgggtgacagagtgagacccwgtctcaaaaaaaaaaaaaaaaaaagactcaagagagtgcgagtaaattgtatatgcataagccttctgattgggatatttcctcaattgatatttccactgaacaacattttttatcaaagtctggggcttagttaagctaacaagccattacccttcaacggagactttgaacatttatcctagtcaacgaatctacatagctctctttggagatttaggccacagttggactctgcaactcatttcaggca

SEQ ID NO: 174085 - DNA, 595 bp, Homo sapiens
gaaggtgagcaaacagcccccgcaatgatgtctggctgataaaagtgagtgaaaccccagtacacaagaggggaaaatagtctccctctgtgactcacctttccactggggatctgtgcaaccraggccaagggagagcactttgtttctcccaagccctggagctaacttgggagggtcttagagatgctgagaacgaaagaccccagaaaaagctgcaggtattttcctagacctgggaccaaaagcaggacatcatttttaatctaggtgcatacaaagtcagtcattgttaggtgacctggcagcatggccatgctggctttttagtctcaggccaaagagcagagcacttgcactgaggagatgtagatgcctccacaagcagaactgtgaaaagcacaccagcaataggcactgaaattgtgctctaccccttcacaggtctgggacaggaggggaattgctgcagctacattgtctcctgggcaatgagactgcagccaggaacagctcggtgacttggaaccagtctgcatatgtcactgctaggtgatccagccagctccccagagattaaggtgcataatctccc

SEQ ID NO: 174086 - DNA, 538 bp, Homo sapiens
ccacacaataatggtggaggaacccaatacctcactgacagcactagacagatcaccaaggcagaaaactaacaaagaaattctggacttaaattcaatacttgatcaacttgattaattgaaccaaagagatatctatagaacattccacccatcaaccacagcwtatacattcttcctatctgcttctggaaaatactctgagatcaatcacattctcagccatgaagaaaatctcaataaaataaaaaaaaataaaaatcatatcaatcatactcctggaacacaatggaaccaaaatagaagtcaattccaataagatctctcaaaccacacaattaagttgaaattaagaaagttgccccggatgacttttgagtaaacaaagaaattaagacaaaaataagaaaaattatttgaagtaaattaaaaaagaggtagaacacttcaaaatctctgagatgcagcaaaagtgtgttaagaggagagttagtagcactcaatatcgatttcaataaaatagaaacataccaaatta

SEQ ID NO: 174087 - DNA, 622 bp, Homo sapiens
taactcccaccccttaggtgtgttgtgggttgcacacttcttactaaaagggcagaggggagaggaactttattgtggagacacatgacaatcaatacctcagcgctgggatcaagttgaacatgttcccttgatacaacatcatgagaatgacgttttatctctgtggtcttcccccacccctcaaatataaccccattataaccctaaggaaaaacaccaaacaaacccaaattgtacagagctaattaccagtactgctcaacattctcaagatcatcaaaaacaaggtacrtttgagaaactgtcacagggagacataacaactcaacgtaatgtggtttcctagaagggaccttgaagaaattaaagacattaaaaaatccaaatgaagtttagttaacagcaatgtatcaacagacatacgtagaatgtttccatatgcatatgtttcattagttgggaccaatctatcatgttaatgtaagatgtaaacaatagggaaacaggtgtagggatatacaggaaccttctgtactttctctgaaacttttttttgtaaatctaaaactgctctaaaatttaaagtaaaaacagtgtgcattttctatatattcttaaa

SEQ ID NO: 174088 - DNA, 644 bp, Homo sapiens
ggctgtaagcaaaccactgcctttacttgtggcttgttccttgttttgatttgactgcttgatttccatttacacacaactattttttgtatatttgtttatgtgtgtaaaatatttaaactatcagtaattaattggtggttccttcttccctggagtctgtgtcaccagtggaactctgcattagtttttcgtgcccatacaatcagttaaatgttcagtgaaggtgtccaaagtgaaatatttctctagggttatggccaaactcagaattgtttttctgtcttctcttccccttatatcatgatatccaggcttatcattctattaytttcttttgaagttagctatgaattaactgtgtggccaatgattttgtacatttatctaagtgttagagttttaaaaagcattttaaaatctaacttgatctcaaaacaaacctttgaagtataatatgtgtgcatatatgtaccttcacaatttataggagaaatggaggctgaacatttaagaaatttttctcctggggattagtctaataattggcagagataagaataaaggccaggaatgtgtatgtttaaccaaggagtgtttgcaatctattgcaaagggagagagaagaactagctgagcaattt

SEQ ID NO: 174089 - DNA, 615 bp, Homo sapiens
tgtgcctcagaaatccaggaccatattcgggacaccatttttactagcagagggaaaaatgaagccatgagttttttttcatctgtcctcacctcttagttgtccacaagtacgtggaagtggttagaattccatatgttaattgcacatttaatgaactctgcaaggcccagtaaaaggagcactgaatttggaatgggaagatttgcagctctgcccacgctggttggtcaagatgtggtcatcaaatcctggtcactctaaatcacagatttcttatgagtaaaacagagataataatattgatcctggcttctggggatcacatgagggaatctatattgattattttttaactccattcaatagatccctaggatgccaggaaagtcccaggagggcagctttaggagaacaagggaaggatgaggatgtaaggcttgggcatcaccctgtcatctcccagaatccaacagctccactggattcagcaatagggtagaaatttctatagtgtaaactgaggcacgtttgctctgtggactcttcatargtaagccaggcttctttactaaaactggtgagaaaatagaggctaaaatttttttttaatct

SEQ ID NO: 174090 - DNA, 560 bp, Homo sapiens
ccttgtgtataaggaggcagagactggagttatgctgccacaagccaaggaacaactggggctacctgagctggaagaggcgaggaaggattctcccctagagggttctgagggagcgtggacctgccaacaacttggtttcagatttctagtctccagaactatgcagtaataaatttctgttgttttaagccacccagtttgtggcactttgttacgtcagccctgtgaaacaaacaaacaaacaaacaaaaaacaagttaaatattttatttaactcataatatggaaataggtgaggtgttacaaccaattcaraaaagaagtgaaaaataagcccgaatgtatatagagtaaaggaatgttgaaatgaatgtgcaaatggaagcaaaactagattctcctacaatgggacagaaaagtcaattgaacctctactggacagaacataatttgcatgtgtatagaaaaaaattgtgcattgttctcagttcacctacaatttacagagtcgcaaaatagctcctgttgcatcagaatcagataaccttgacaggtgt

SEQ ID NO: 174091 - DNA, 560 bp, Homo sapiens
ccttgtgtataaggaggcagagactggagttatgctgccacaagccaaggaacaactggggctacctgagctggaagaggcgaggaaggattctcccctagagggttctgagggagcgtggacctgccaacaacttggtttcagatttctagtctccagaactatgcagtaataaatttctgttgttttaagccacccagtttgtggcactttgttacgtcagccctgtgaaacaaacaaacaaacaaacaaaaaacaagttaaatattttatttaactcataatatggaaataggtgaggtgttacaaccaattcaaaaaagaagtgaaaaataagcccraatgtatatagagtaaaggaatgttgaaatgaatgtgcaaatggaagcaaaactagattctcctacaatgggacagaaaagtcaattgaacctctactggacagaacataatttgcatgtgtatagaaaaaaattgtgcattgttctcagttcacctacaatttacagagtcgcaaaatagctcctgttgcatcagaatcagataaccttgacaggtgt

SEQ ID NO: 174092 - DNA, 591 bp, Homo sapiens
ctactctactggtaggactctactatgtactgtggactctcactatctgaggtgtgactcgggtgtgataaagccaggatgtccaaggcagcaagaaaaagccaaacagttatggccaagcctccaacttcaactagagcaactctttattttctgtcatatttctatatacgtagattctgcctgagattyggcttgaaaaagaataacatagccacaaaattttacaactatagcattttaccaagctctgcctctgagttgaaaatataaataatcttttctcaatattagccatgatgtgaaggcttttataatgcattacattttggaaggactctaggttttttaaataataataagcatggactatttgctcttgaggggtgtaaaaatgagtctgtaagaggtgtgtttcttctgtttggagtggggaggtgtcccttgtgacaggcagtgaattccatgtttttcatctggcaatctaattcatagcaaggattatagtggtgatattccacttaagcctttacctcaatgatgccattgattccacacttgaaaatctatatatggagaccctcaatttta

SEQ ID NO: 174093 - DNA, 591 bp, Homo sapiens
ctactctactggtaggactctactatgtactgtggactctcactatctgaggtgtgactcgggtgtgataaagccaggatgtccaaggcagcaagaaaaagccaaacagttatggccaagcctccaacttcaactagagcaactctttattttctgtcatatttctatatacgtagattctgcctgagattcggcttgaaaaagaataacatagccacaaaattttacaactatagcattttaccaagctctgcytctgagttgaaaatataaataatcttttctcaatattagccatgatgtgaaggcttttataatgcattacattttggaaggactctaggttttttaaataataataagcatggactatttgctcttgaggggtgtaaaaatgagtctgtaagaggtgtgtttcttctgtttggagtggggaggtgtcccttgtgacaggcagtgaattccatgtttttcatctggcaatctaattcatagcaaggattatagtggtgatattccacttaagcctttacctcaatgatgccattgattccacacttgaaaatctatatatggagaccctcaatttta

SEQ ID NO: 174094 - DNA, 561 bp, Homo sapiens
ctcccaaatcctccttaagagcacagtggggtgactgcgggagcgataaggaaacataaataacaactgtgctttctaaactgcctagtctgcttcacacttcttccaaagaggtaactgcaaaagtacataagctttgtttccagaccacacagtatgtcaaaataagaagtcagaaggactcagattttccatctgttcctgggacagcaagaagaggagcagggactttacataaggctgtagatctgggtcatagagccccatgatcataaccattccttagagttctagagaattttacagttcataaagcattttcaagtggctgctctcagccctcttttgaacattacaagttaatgaagtgggtctgaggctctcatagagtacgaaactgaggagaggttgaggaattgtgcaagaatctcccagcacgtgtgtaacttgaacccatggcctgacctgcagagtagtggtcctctcactgtcctcacctcctccaatgttgggrgaaagggttgttgcactggaccttctaggactccattagtgaataca

SEQ ID NO: 174095 - DNA, 562 bp, Homo sapiens
tactatccattttataaattaccaataataaatatcctctggacagattttaaattgagtcagaaatcctgttactttgtgaaaargcctatgaggatatatctaatgcatgaacatttgaagtatttttaccaccaagggaatagctctaacaatttgctacatgtttcctctcaccccttttcattcaaacatgggtgtgtatacatgcacaacatgagtgtgcatacatgcacaaacacacacacactcacatacaccattctaattagtatataaaattcttcccagcacttaataaaagtgctttgactttgacagacgcataataaaataaagcctcacttctctggatacattgcgaagacttgtttgaccttctcttccaccagtgttagcacatgaggtgggaaaaaggcatgggcttatatctgagttgtatgattaacagactgtatgacatcatattcaattctctaggcttccatttctctatcaataagatggggagtccatctgaaccttctaagggtattgtgaagaaatatgagaaatcaactcc

SEQ ID NO: 174096 - DNA, 415 bp, Homo sapiens
aacaaatgcattctttgttataaaccagccagaaagcatgtcattactgtccatccattacactactgcttctaaaaattaaatagactcccccatataacggaatcactgattgaaataactttttggtccagtttggctgaggatggtggaatattctaagaaaacctagagataattttgaccaccccacatcatggcatctccagattcctcttctaagtattatactccttccccrtcttgaggtgattaaaggaaagagattctgagcataaaaagaatgtacacattggctgaataatttaatgattcatatagggtaattccaaagtcattatctcattcagtgcatctattttcagaaaagcacattctgatgtcagataaagtctgcaaatttctttgtttcatg

SEQ ID NO: 174097 - DNA, 596 bp, Homo sapiens
aactgagatatttctgaaaacatgactccatatactttcttactatttccttcaccttaactgaatggatccagaggtcccaaatggaaaggacctgactgtgcttcaaactgagaaaatgtatgtaagctgataaatatccctgcccattaaaacgtatatcagggcyggaaaatgggcttcatttcatatgtcaaccccagttccttgtggtaagggttctgttagggggggattctgaggttgggtccaagctcaataagaaaatgtgttgtgatcaaatatagtgtgttccatgggctcaggggtggggagcagctttggcatttgttacacctcctctagatccttccatcagtctgtgtaaaatcttgagaacatgttactatgtatatgctctgatttgaagaatatgactcttcagataaaatgttttcttaattattttgatctctcactcattacttttagaattgaaaagcttcaaaaagatcccagttacctttaaaatgtgtttctttggaggaataacctaagggttttttgggggtttttttgttgttgtttttttagacagtttcgctcttgttgcccag

SEQ ID NO: 174098 - DNA, 567 bp, Homo sapiens
cttgctgcatttaaactgagatatttctgaaaacatgactccatatactttcttactatttccttcaccttaactgaatggatccagaggtcccaaatggaaaggacctgactgtgcttcaaactgagaaaatgtatgtaagctgataaatatccctgcccattaaaacgtatatcagggctggaaaatgggcttcatttcatatgtcaaccccagttccttgtggtaagggttctgttagggggggattctgaggttgggtccaagctcaataagaaaatgtgttgtgatcaaatatagtgtgttccatgggctcaggggtggggagcagctttggcatttgttacacctcctctagatccttccatcagtctgtgtaaaatcttgagaacatgttactatgtatatgctctgatttgaagaatatgactcttcagataaaatgttttcttaattattttgatctctcactcattacttttagaattgaaaagcttcaaaaagatcccarttacctttaaaatgtgtttctttggaggaataacctaagggttttttgggggtttt

SEQ ID NO: 174099 - DNA, 649 bp, Homo sapiens
gaaaatggacttgataccacaagaatttcaatttggggtttcaaaaactctaaacctgtgaggttacaaacttggcagaacctgctctgcctttgctgtgaacagaacacatgctattttgaaatataaatctacacaagcagactgtgattttgatccacaagcagaatttataactccttaggttaactgttasagaagttataacaaactggaaaatatgtgcagcaagtaattgtctgatttacaggggaatattgtaatgggccccactaacctagtgttttagaaagcttatttttaattttttaaatgtttttggtctacacgccctgttgctactgtcctggtcaggtgagaagagcccatagaactgtacacctgggatcaatataatgactcacctgatgttaattttcagcctgtgcctgctaaaattcaaaccaaaccacaactgcagaagttccaagacacctctgcctgccactcagcccttcatcacttatactgatgtactgtgttacaaattctatctaatcaactgacaatttaaggagtggagaattcaacaagaataacaacgtggtgacaatttagttttctgccccttccttcataaaaacagcgtcttctatttgttccccaccca

SEQ ID NO: 174100 - DNA, 476 bp, Homo sapiens
gaaattattaccatgcaaacttgccttggtattgcagggtcttttcttctargtatccagcttttccttcagtcaatggttctgaatttaaaaactagctcaggttcagaaactagacaaaggatcatgccttcttattacagtgtctgtccttagcctccttatcatctatccatgatttctttggtttagactgagcaatgggcttattggctgtccacctattttgcccctaccgtgccttattgtgttaaccatctacctagctcttcatgaatcagatactcctggctgccacttgggctttgcaatgtatcacagtcactgtgcctgcaatggactgaatatttgtgtcccctcataattcatatgttgaaccccaatccctaatatgatgtattaggaggtgtggcatttaggaggttattagaaaatgagggtggggacctcatgaatgggattagtgcccttatcaa

SEQ ID NO: 174101 - DNA, 586 bp, Homo sapiens
tctctgcctaaaaaaaagtgcttttccaatcagaagtgcagatattctgtcttggtgragcatttatactgcatcatacccctgaccccaacatatgcctgcctctccaagggctagaggcagcggcccaagcaatcatcgcttacaaatgagaaaagagagactcagagagggcaagagagcagtgagggacaccagaacgaggacttgaaccttagtcttctgagggcaatccttcctctctttctgctatgtaaactgcctctgatgagggagaaatgaaccactggtgtaacctcccggaccttaacctacaaagaaaccagataggcttacaggcaaacaccagttgaagttcacaaatagtttattaggttaaccttgaccctccagtttacaagtttgtgaagcttggaacaggaagggtaggtgagagctcaggatgtttagatcaaagcattgcaattccttggctctgccacagaatgtcacctttacatcatgtacttctcggcatgtcagcatttcctaggagcagaaaaagaagagttttcttaaaggagctagtttcaaaacagaattatct

SEQ ID NO: 174102 - DNA, 462 bp, Homo sapiens
acttgggtaactctcatctctaagatttagagaactttgcacatttaatatttagacaagaaaatctactgaggaatgacagcagttscaggttgcaggactgggttatattgctggttgaaggtaaaatattgtgaaactaagaacagtcatctgagcatgataagggagtatactggtgacttgaggatgtctgactacagaatatgcatgtctgatttgagaaggtggtgagtttatgcttgggccatattactgcgtaggagcagaaggctagatagcactgaagctgctcactgtggatgaatacaatcctacacatcagcgtaattctaaggtgactataattgcagcagaagttaggagatccaaattctaactcagagagtgccctgctactaatctgtttaggacaagtcacttaacctcttaatgcctctgtttccttatctgtgagatgga

SEQ ID NO: 174103 - DNA, 511 bp, Homo sapiens
tcctcagaaagaaaatcataaatgtgtatgttaattatcttacatttcatttagtaaacatattgcaaaatactcaagattctcctatcaagtgctggctttacatctgcgtaagcagttattctctttgaaccctctcacaacagaaatggaattttctggtgacctggagctaagaagtgaggctgaacatcttagaaaaaaagcaccataaacagtgttaccaaaaaggtttttattaaacatctactrtatgccctgcaagggatactaaaacaataagtagaaagtattgacatatagagcatggactgtggagtcagacctgggttccaatttcaactcaccacaggctagctgtatgactttgggcaagtgactaaactgctacttgtgtgtcctcatctgtaaatggagcttatactcttcctagcttagggagctgtttaaggtttaaatgagctaatgtttgtaaagttcttagaacagggctcaacacacaataagtact

SEQ ID NO: 174104 - DNA, 458 bp, Homo sapiens
gattgctcccattgcctttaaaactctaaatattagtaattgatacctccacatatttttcatgttaaagaatttttgttttaaaagtacaatcatgtagttttctctctgaaatagtcatccctcagaatccctaggggattggtcccaggaccctcttggataccaaaatccatgggtgctcaagtgcccgatataaaattatatagaatwtgcatataacctatgcacatccttccatatactttaaatcatctctaaaatatttatgatgcctagtattatatgcctgtgtccccacccaaatctcatattgaactgtagctcccacaatccccacatgtcacgagagggacccagtgggaggtaattgaatcacgggggtgagcttttcctgtgctgttctcatgatagtgaataagtctctcgagatctgatggttttataaaagagcattt

SEQ ID NO: 174105 - DNA, 543 bp, Homo sapiens
ctctgtcagcaatcccactcaagtagatgactgactgtccaccagaacacttgggacagtcacagttcactgggcttcagtgcttcttaaatctctggttccagaccatcaggccaattcggccacttgcaactctttccagcatctaaggccatttctgagtgaaaggtttatccatctccctctagactcacctctaatactccttttccctggcaatgtggctacyggccccatgaggagctcctaagactttatggggtctccgagctctgtgaagtgactgtggcacagcttgcctctcatgcacaaggacactgagctgggttttaagaggcttctaattagtataattactttattttgattgctgaggttaacaacatgggcaatgcccaagtatattatcatcatcaattgatgagttgaaattttaaaaatctgattatatgacatgtgttcagccatatcaccctctgcgctgctgttggggaattactaatgcccttaaaatgcttaaataattttgcccatgatgctatg

SEQ ID NO: 174106 - DNA, 552 bp, Homo sapiens
tctaccaggccaggactctctatgcatagtcaagcacagccaagtctccacacagcctctgccttgttcctctaggtccttggaaggaattgtatccggaaagactaagggagtggttgccacaaaatgggcttatttaccccattctagataagactctatctcttagaaaatgagacccaatgaatgccttcaagcctgaccatccatgcatagttaaattcttcctctttggaggtggaatcaaagtgtggctgggggagctaggagcctcccttgcagacaattaattaaaataattgacagggtttcaatggaagaatggaggagcgaggagtcaagccattctcgatgtgaggcctttaaggggaaataggtcaaatggacacatagtgtaaccaggaggcaacctgaatgctcagggcatgaggaaaacgggatcaaggartcataaaggagcacagaaagtggctgtgagagagcgaaagacttattttcaaacttgcttagaccagcctaatgtctgaaggtctcttaacatcaacagctctg

SEQ ID NO: 174107 - DNA, 489 bp, Homo sapiens
aaagataattgtggaaaaggtacttataaaattaatacaaataatgattattgaaaagtaaccaaaatttacttttaatacaaataataaatgattttttwaaaaaattaaccttagagattatagagtcaagagatattcaagcttatattgaagtggaatgcattttgcaaacgaatctgatgtggcatcctaatagacaaaagacataaacttgataagatgcacaactctgccagattcccaacccactctccactgccatttatattgaagtggaatgcattttgcaaacgaatctgatgtggcatcctaatagacaaaagacataaacttgataagatgcacaactctgccagattcccaacccactctccactgccattaaggaatgggatccctgtccaaaaacacaagcctcctctcctctttcttgctaggctcctggtgcttaaaatcagaaccattttcactccttcatgaagcaaa

SEQ ID NO: 174108 - DNA, 586 bp, Homo sapiens
ctggcatcatttttcttccacctaaaggaatttcttttacatgtcctatagtgaaagtctgctgacaacatatttcctcacttttkgctattctgaaaaaaaaaaaaaaaaaaaaaaaaacctcatttttgactccagttttgaaagattttttttgccatgcaaagaattctaggttaacaggtttgctctctttttttgttagaaatttaggccgagcgtggtggtttacacctataatcccagcactttgggaggctgaggcgggcagctcacttgaggccaggagctcgagaccagcatggccaacatgatgaaaccctgtctctgctgaaaataccaaattagccagtcacagtggcgggcacctgttatcccaggtactccgagaggctgaggcaggagaatcgcttgaacctgggaggcggaggttgcagtaagcaaagatcgtgccactgcactccagcctgggtgacagggcaagacatcatctcaaaaaaaaagagaaagaaaaaaagaaatttaaacatgttgttacatttttgggaataggataacttcacacttacttactggtcaaaaatat

SEQ ID NO: 174109 - DNA, 424 bp, Homo sapiens
agacgtgttatctaaaacctggttcatctgtccttccacgcagggcctaggggatgccaaattccagggtccagaaagagcttgggataaaatgaacatccaaggggagggctttgacctgggctgagtctgcctgtgccgagtctgcctgtgccatccaactggagtctcaagtcctgaggcagkacgtccagatgccccagtgcagggtcctcctgatcaacacctgctcccctgtactcattagcaacctcacccaccctactctcaaagcacacttggctctcatatccaggagctctgcatctgtagattcagcaacagcagatggaaaatattcagaaaataaattggacggttatatttctattgaacatgtgcagactttgttcttgtcattattccctaaagaatacagtatcat

SEQ ID NO: 174110 - DNA, 434 bp, Homo sapiens
gttatctaaaacctggttcatctgtccttccacgcagggcctaggggatgccaaattccagggtccagaaagagcttgggataaaatgaacatccaaggggagggctttgacctgggctgagtctgcctgtgccgagtctgcctgtgccatccaactggagtctcaagtcctgaggcaggacgtccagatgccccagtgcagggtcctcctgatcaacacctgytcccctgtactcattagcaacctcacccaccctactctcaaagcacacttggctctcatatccaggagctctgcatctgtagattcagcaacagcagatggaaaatattcagaaaataaattggacggttatatttctattgaacatgtgcagactttgttcttgtcattattccctaaagaatacagtatcatgaccatttatgtagca

SEQ ID NO: 174111 - DNA, 434 bp, Homo sapiens
gttatctaaaacctggttcatctgtccttccacgcagggcctaggggatgccaaattccagggtccagaaagagcttgggataaaatgaacatccaaggggagggctttgacctgggctgagtctgcctgtgccgagtctgcctgtgccatccaactggagtctcaagtcctgaggcaggacgtccagatgccccagtgcagggtcctcctgatcaacacctgcycccctgtactcattagcaacctcacccaccctactctcaaagcacacttggctctcatatccaggagctctgcatctgtagattcagcaacagcagatggaaaatattcagaaaataaattggacggttatatttctattgaacatgtgcagactttgttcttgtcattattccctaaagaatacagtatcatgaccatttatgtagca

SEQ ID NO: 174112 - DNA, 434 bp, Homo sapiens
gttatctaaaacctggttcatctgtccttccacgcagggcctaggggatgccaaattccagggtccagaaagagcttgggataaaatgaacatccaaggggagggctttgacctgggctgagtctgcctgtgccgagtctgcctgtgccatccaactggagtctcaagtcctgaggcaggacgtccagatgccccagtgcagggtcctcctgatcaacacctgctcccctgtactcattagcaacctcacccaccctactctcaaagcacacttggctytcatatccaggagctctgcatctgtagattcagcaacagcagatggaaaatattcagaaaataaattggacggttatatttctattgaacatgtgcagactttgttcttgtcattattccctaaagaatacagtatcatgaccatttatgtagca

SEQ ID NO: 174113 - DNA, 434 bp, Homo sapiens
gttatctaaaacctggttcatctgtccttccacgcagggcctaggggatgccaaattccagggtccagaaagagcttgggataaaatgaacatccaaggggagggctttgacctgggctgagtctgcctgtgccgagtctgcctgtgccatccaactggagtctcaagtcctgaggcaggacgtccagatgccccagtgcagggtcctcctgatcaacacctgctcccctgtactcattagcaacctcacccaccctactctcaaagcacacttggctctcatatccaggagctctgcatctgtagattcagcaacagcagatggaaaatattcagaaaataaattggayggttatatttctattgaacatgtgcagactttgttcttgtcattattccctaaagaatacagtatcatgaccatttatgtagca

SEQ ID NO: 174114 - DNA, 424 bp, Homo sapiens
agacgtgttatctaaaacctggttcatctgtccttccacgcagggcctaggggatgccaaattccagggtccagaaagagcttgggataaaatgaacatccaaggggagggctttgacctgggctgagtctgcctgtgccgagtctgcctgtgccatccaactggagtctcaagtcctgaggcaggacgtccagatgccccagtgcagggtcctcctgatcaacacctgctcccctgtactcattagcaacctcacccaccctactctcaaagcacacttggctctcatatccaggagctctgcatctgtagattcagcaacagcagatggaaaatattcagaaaataaattggacggttatrtttctattgaacatgtgcagactttgttcttgtcattattccctaaagaatacagtatcat

SEQ ID NO: 174115 - DNA, 559 bp, Homo sapiens
tggaattcataccaacacaaaatacatgacatttaaattaggtttcttttttctttttytttttttttttttttaattaaaacaagttttggccagggatggtggctcatgtctgtaatccctgcactttgggagccaaggtggctggatcacttgagctcaggagagttggagaccagcccgagcaacgtggatagatcccgtctttacaaaaaaatatttaaaaaaaatagtggggcatggtggtgtgcacctttagtccccagtaacttgagaggctgaggtgggaggatggcctcaacccagggggtggaggttgaagtgagttgagatcatgccactgcactccagccagagcaacagagcgagactctttgttttttttgtttttgtttttttttttggtagaaatggagtcttactgtattgcccaggctggtctcaaactctagcctcaggtaatcctcctgcctcagtcacccaaagtggtgggattacaggtgtgagccacctcacctggttaaattaggtttcaaaagaaaattttccataaacataa

SEQ ID NO: 174116 - DNA, 285 bp, Homo sapiens
tgtagattttagactccaaggataccacaagccactatcaggtgagaggtgcmattgttacaacccagcatagaggtcccctctttatttctcaaagttttgggagaacccaagacccatagcctttattttagggactgtttaatcatcttggcagagaaagagactacgtaattgactcaggtcatttgagatcttagcattaaccaagatcctgtaacacaggcagatttagcccttttgtttctatttctatatttaatataaatttatattaaattcttg

SEQ ID NO: 174117 - DNA, 562 bp, Homo sapiens
taatctcttttgtctcatcaggtttgtgaattttgcagtgcttgccaatctacagttagcttaattaaaatcaatggagttgaaagttggtgtgttctctttctctttctctaaaggattccattttccaaaacaccataagcaaataaattggcatgtggaactttctgcagccatataatagtcaaacacacttaaccrtgtatatttagctcccagcaaaattgtctaattttgcatttgctagctagccagtaaactccaggtttcttgcatcagagggggatgctaacccacagattttacagttcagaagtattattagtaaataccctcaaaaaaaggctcagaaagtgaaatcagttccaatgctatcatctttcctcaagctgagctacagtgttcaattctccaaatgtgaggtagctggcaaagacattgctgttgttttctggatttaagctgggaagatagtaactggagcctaggagaagaattttcaactaatgaagtgttgttaatataagactttcaaaaatactaatcacaacatttctataat

SEQ ID NO: 174118 - DNA, 562 bp, Homo sapiens
taatctcttttgtctcatcaggtttgtgaattttgcagtgcttgccaatctacagttagcttaattaaaatcaatggagttgaaagttggtgtgttctctttctctttctctaaaggattccattttccaaaacaccataagcaaataaattggcatgtggaactttctgcagccatataatagtcaaacacacttaaccgtgtatatttagctcccagcaaaattgtctaattttgcatttgctagctagccagtaaaytccaggtttcttgcatcagagggggatgctaacccacagattttacagttcagaagtattattagtaaataccctcaaaaaaaggctcagaaagtgaaatcagttccaatgctatcatctttcctcaagctgagctacagtgttcaattctccaaatgtgaggtagctggcaaagacattgctgttgttttctggatttaagctgggaagatagtaactggagcctaggagaagaattttcaactaatgaagtgttgttaatataagactttcaaaaatactaatcacaacatttctataat

SEQ ID NO: 174119 - DNA, 562 bp, Homo sapiens
taatctcttttgtctcatcaggtttgtgaattttgcagtgcttgccaatctacagttagcttaattaaaatcaatggagttgaaagttggtgtgttctctttctctttctctaaaggattccattttccaaaacaccataagcaaataaattggcatgtggaactttctgcagccatataatagtcaaacacacttaaccgtgtatatttagctcccagcaaaattgtctaattttgcatttgctagctagccagtaaactccaggtttcttgcatcagagggggatgctaacccacagattttacagttcagaagtattattagtaaataccctcaamaaaaggctcagaaagtgaaatcagttccaatgctatcatctttcctcaagctgagctacagtgttcaattctccaaatgtgaggtagctggcaaagacattgctgttgttttctggatttaagctgggaagatagtaactggagcctaggagaagaattttcaactaatgaagtgttgttaatataagactttcaaaaatactaatcacaacatttctataat

SEQ ID NO: 174120 - DNA, 562 bp, Homo sapiens
taatctcttttgtctcatcaggtttgtgaattttgcagtgcttgccaatctacagttagcttaattaaaatcaatggagttgaaagttggtgtgttctctttctctttctctaaaggattccattttccaaaacaccataagcaaataaattggcatgtggaactttctgcagccatataatagtcaaacacacttaaccgtgtatatttagctcccagcaaaattgtctaattttgcatttgctagctagccagtaaactccaggtttcttgcatcagagggggatgctaacccacagattttacagttcagaagtattattagtaaataccctcaaaaaaaggctcagaaagtgaaatcagttccaatgctatcatctttcctcaagctgagctacagtgttcaattctccaaatgtgaggtagctggcaaagacrttgctgttgttttctggatttaagctgggaagatagtaactggagcctaggagaagaattttcaactaatgaagtgttgttaatataagactttcaaaaatactaatcacaacatttctataat

SEQ ID NO: 174121 - DNA, 536 bp, Homo sapiens
ctgtaaaaataatcaatattggtttttctgcatgttgaccaatctatgaacctatgttttatcttcattctcattctttcagaataaaaagcaacatctatttagtacatgcaaataacttgtgggagttttcaagaatatacaaatcaaattaatttagaagcatatcagacaccctacctatgcaaatggtattattttgttaatctagttstaaactatatgtttaacatcattatacttcaggattattttgaatccttttatttatcaataataaaactttctaagattttaaatataaaatacaaagctaccatcttgaagttgtatttcctttattacatgataattagttgcataattaaaacatgtggggtcaaaggtcagatattacaatccaagggatatcacaaaggatattgtattttttgccccaaatacgtatattaacagcaatggctgttacacagaacattaagctaaaagagtcaaagggaaactggaataacatttgttgcaaataataggtatag

SEQ ID NO: 174122 - DNA, 536 bp, Homo sapiens
ctgtaaaaataatcaatattggtttttctgcatgttgaccaatctatgaacctatgttttatcttcattctcattctttcagaataaaaagcaacatctatttagtacatgcaaataacttgtgggagttttcaagaatatacaaatcaaattaatttagaagcatatcagacaccctacctatgcaaatggtattattttgttaatctagttctaaactatatgtttaacatcattatacttcaggattattttgaatccttttatttatcaataataaaactttctaagattttaaatataaaatacaaagctaccatcttgaagttgtatttcctttattacatgataattagttgcataattaaaacatgtggggtcaaaggtcagatattacaatccaagggatatcacaaaggatattgtattttttgccccaaatacgtatattaacagcaatggctgttacacagaacattaagctaaaagagtcaaakggaaactggaataacatttgttgcaaataataggtatag

SEQ ID NO: 174123 - DNA, 568 bp, Homo sapiens
tggcatggatctgatgaaaagggaacacttttacactgttagtggggatgtaaactagtacaaccactatgggaaactgtgtggagattccttaaagaattgaaagtagatctatcatttgattcagcaatcctactcctgggtawctacccataggtaaataagtcattattcaaaaaagatacttgtacacacatgtttatagcagcacaattcacaattgcaaacatatggaaccagcccaaatgccatcaatcaacagtggataaagaaaatgtgatatcgatatatgtgtgtatatatataaaatatatatatatatataatgaaatactactcagccatacaaaggaacaaaataatgacatttgagcaaccttggaattggataccgttattctaagtgaagcaactcaggaatggaaaaccaaacatcatatgttctcactcataagtgggagctaagctatgatgatgcaaaggcataagaatgatataacagactttggggattttgggggaaagggtgcgaggaggttgagggataaaatactacatagatattggg

SEQ ID NO: 174124 - DNA, 568 bp, Homo sapiens
tggcatggatctgatgaaaagggaacacttttacactgttagtggggatgtaaactagtacaaccactatgggaaactgtgtggagattccttaaagaattgaaagtagatctatcatttgattcagcaatcctactcctgggtatctacccataggtaaataagtcattattcaaaaaagatacttgtacacacatgtttatagcagcacaattcacaattgcaaacatatggaaccagcccaaatgccatcaatcaacagtggataaagaaaatgtgatatmgatatatgtgtgtatatatataaaatatatatatatatataatgaaatactactcagccatacaaaggaacaaaataatgacatttgagcaaccttggaattggataccgttattctaagtgaagcaactcaggaatggaaaaccaaacatcatatgttctcactcataagtgggagctaagctatgatgatgcaaaggcataagaatgatataacagactttggggattttgggggaaagggtgcgaggaggttgagggataaaatactacatagatattggg

SEQ ID NO: 174125 - DNA, 568 bp, Homo sapiens
tggcatggatctgatgaaaagggaacacttttacactgttagtggggatgtaaactagtacaaccactatgggaaactgtgtggagattccttaaagaattgaaagtagatctatcatttgattcagcaatcctactcctgggtatctacccataggtaaataagtcattattcaaaaaagatacttgtacacacatgtttatagcagcacaattcacaattgcaaacatatggaaccagcccaaatgccatcaatcaacagtggataaagaaaatgtgatatcgatatatgtgtgtatatatataaaatatatatatatatataatgaaatactactcagccatacaaaggaacaaaataatgacatttgagcaaccttggaattggataccgttattctaagtgaagcaactcaggaatggaaaaccaaacatcatatgttctcactcataagtgggagctaagctatgatgatgcaaaggcataagaatgatataayagactttggggattttgggggaaagggtgcgaggaggttgagggataaaatactacatagatattggg

SEQ ID NO: 174126 - DNA, 393 bp, Homo sapiens
taatcactgagttgtcaatatgaacataaagattggtgygaattcagtgtcctgcacaaaagtcttcagttaaaacagaagagatattatggtggtggattccccaggatgttcaacaaacagagaagaggccaaagcatgttgtctcaatcttccttcttgttttagtccattctcacactgctaaacgatactacccaagactggataatttacaaagaaaagaggtttaattgactcacagttccacatggctggggaggcctcaggaaacttacaatcatggcagaaggagaagcaagcacatcttacatggtggcaggtgagggaacatgagcaaaagcagggaaaactgccttataaagccatcagatctcatgacaattcactcac

SEQ ID NO: 174127 - DNA, 403 bp, Homo sapiens
tcatttggtttctaagacagttctttttaaacaaagaaaaaaaatcatattttgcacactcagtctcttcaatgcatggtaaatyagtagcaaagtaatgatgaatgtggaaattaatcaaaagcaaaactatagtttttacacgtttcttagtgaattaatgatttccctttattacagtaaatgtgtcaagaccataaaatgtgaacaaaaatttaaagtgtaagattaaatgctgttgaaactttgcctgacccttattaatgcaacactgtgcttaagcagaaacctggaatagaaatagaaattataagaaagtgttacagccagaaattttccagtaaaggcctaaaaaaaaaatgaagtaaatgataatagctttaaaagacaagtcaggggaaga

SEQ ID NO: 174128 - DNA, 403 bp, Homo sapiens
tcatttggtttctaagacagttctttttaaacaaagaaaaaaaatcatattttgcacactcagtctcttcaatgcatggtaaattagtagcaaagtaatgatgaatgtggaaattaatcaaaagcaaaactatagtttttacacgtttcttagtgaattaatgatttccctttattacagtaaatgtgtcaagaccataaaatgtgaacaaaaatttaaagtgtaagattaaatgctgttgaaactttgcctgacccttattaatgcaacactgtgcttaagcagaaacctggaatagaaatagaaattataagaaagtgttacrgccagaaattttccagtaaaggcctaaaaaaaaaatgaagtaaatgataatagctttaaaagacaagtcaggggaaga

SEQ ID NO: 174129 - DNA, 403 bp, Homo sapiens
tcatttggtttctaagacagttctttttaaacaaagaaaaaaaatcatattttgcacactcagtctcttcaatgcatggtaaattagtagcaaagtaatgatgaatgtggaaattaatcaaaagcaaaactatagtttttacacgtttcttagtgaattaatgatttccctttattacagtaaatgtgtcaagaccataaaatgtgaacaaaaatttaaagtgtaagattaaatgctgttgaaactttgcctgacccttattaatgcaacactgtgcttaagcagaaacctggaatagaaatagaaattataagaaagtgttacagccagaaattttccagtaaargcctaaaaaaaaaatgaagtaaatgataatagctttaaaagacaagtcaggggaaga

SEQ ID NO: 174130 - DNA, 537 bp, Homo sapiens
gtaacttatttcttattatttataactttatatatttgtactttttccttttttatcaratgaactgagttttaacatcgcatttaattttaattatctaatctaaatctaaaagctgatatttgattcaattgtcagaaatctcttaagtatattgggatcaacttggaaaagtaaattgactttaaacagtacactttatgaactttaaattacagatcagatatttttagtaaaattttatccaaactaagatgcaatatgagtataatcactgattcaaaaagcttcctttagtgagcatcaaatatctcactattttaattttaatattgattgtgtgttaaaataataataattgcattatattattgataatgtgtattcttgtcatgtttccattcttactggaaatgcctccagtgtttctccatcaaatagtatactggctctaagactaatttaaaggacaagatggccaactagacacagccaggaagcactgttcctacccccaaaagaccaaagtttcaagta

SEQ ID NO: 174131 - DNA, 537 bp, Homo sapiens
gtaacttatttcttattatttataactttatatatttgtactttttccttttttatcagatgaactgagttttaacatcgcatttaattttaattatctaatctaaatctaaaagctgatatttgattcaattgtcagaaatctcttaagtatattgggatcaacttggaaaagtaaattgactttaaacagtacactttatgaactttaaattacagatcagatatttttagtaaaattttayccaaactaagatgcaatatgagtataatcactgattcaaaaagcttcctttagtgagcatcaaatatctcactattttaattttaatattgattgtgtgttaaaataataataattgcattatattattgataatgtgtattcttgtcatgtttccattcttactggaaatgcctccagtgtttctccatcaaatagtatactggctctaagactaatttaaaggacaagatggccaactagacacagccaggaagcactgttcctacccccaaaagaccaaagtttcaagta

SEQ ID NO: 174132 - DNA, 458 bp, Homo sapiens
ctaataggaaaacagaccaagctgaggaaagaaaatcggakcttgaagaccagttattcaaatcaactcagtcagaaaaaaataaagaaaaaagaagttttaaatgaacaaattctccaataattatggtattacataaagagatcaaatctacaactcactggcattcctgagaggggagagagaataaaaaacttggaaaatatatttgagaatatagtccatgaaaatttccctattctctctagggaggttgacatgcaaattcaataaatacagacaagcccagctagatactatagaagatgaccatatccaacgcatatatcaaattcaccaaggtcaacgcactcacacaaaaaaaggcagctagagataagggacaagctacatacagagggaacctcattaggctagcagcaaacctctcagcagaaactttataagccagaagagac

SEQ ID NO: 174133 - DNA, 458 bp, Homo sapiens
ctaataggaaaacagaccaagctgaggaaagaaaatcggatcttgaagaccagttattcaaatcaactcagtcagaaaaaaataaagaaaaaagaagttttaaatgaacaaattctccaakaattatggtattacataaagagatcaaatctacaactcactggcattcctgagaggggagagagaataaaaaacttggaaaatatatttgagaatatagtccatgaaaatttccctattctctctagggaggttgacatgcaaattcaataaatacagacaagcccagctagatactatagaagatgaccatatccaacgcatatatcaaattcaccaaggtcaacgcactcacacaaaaaaaggcagctagagataagggacaagctacatacagagggaacctcattaggctagcagcaaacctctcagcagaaactttataagccagaagagac

SEQ ID NO: 174134 - DNA, 574 bp, Homo sapiens
tgcatgatataacaggagaaggaaatgtaaaaacataattatatatatatgattatacatataaatttatgtatatatctgcccagaaaagtgcacatgcttgctagttaacatgaattgagtacatactctgagccagacaatggcctagaagttttgcacatattttttttccatttaatcctttatcaacatctcctgtcaaatctccaagtcctctttcttttactccagccagttggtggcagctatcagatataacatgacaacatcttgtctctaacagtaacttctatcctgggcttctgtatcagagctgggagagtctcctatggaaatattctggtacacatgtgcaaacctacgtatgtaagagagggaacactttaatgggtcaatcttgcccaacacagaatgggaggttttatgtaaatactcctcccctccttgatcccttggagacaattctataatgcagtctgcacagtcctcaaaggacctgcaacarggtcaagacccagtgtccgctgccatgaacagcttggatacaaaaccttggattaggtttccctcc

SEQ ID NO: 174135 - DNA, 574 bp, Homo sapiens
tgcatgatataacaggagaaggaaatgtaaaaacataattatatatatatgattatacatataaatttatgtatatatctgcccagaaaagtgcacatgcttgctagttaacatgaattgagtacatactctgagccagacaatggcctagaagttttgcacatattttttttccatttaatcctttatcaacatctcctgtcaaatctccaagtcctctttcttttactccagccagttggtggcagctatcagatataacatgacaacatcttgtctctaacagtaacttctatcctgggcttctgtatcagagctgggagagtctcctatggaaatattctggtacacatgtgcaaacctacgtatgtaagagagggaacactttaatgggtcaatcttgcccaacacagaatgggaggttttatgtaaatactcctcccctccttgatcccttggagacaattctataatgcagtctgcacagtcctcaaaggacctgcaacaaggtcaagacccagtgtccgctgccatgaacagcttggayacaaaaccttggattaggtttccctcc

SEQ ID NO: 174136 - DNA, 608 bp, Homo sapiens
taactagactacagatcatactgtgatttcatctacttttcagtcatcttttcttcccttagtatatagttctatarattccatgacatatatagattagtgtatcactacaatcaagatagagtactgttctatcaacataaagaaatttatcttttaatagtcacaaccctccacttcctcataccataacccctaataaccactggtctgttctccatcactacatttcatcatatttaggcttttaaataaatagaatcacacagtaagtaaccttttgagataggcttttttcccacttagcctcaatatatattcaagttattgtgtctattaatagcttattctttttcatttctgagtagtattctgttgtaatgatgtaccacagtttgtttattcattcattcattgaacgacaattgagtttttccagattagggctattacaaataaagttcctatgcattttagtgttctggtttttcgtgaatgtaagtttccatttctctgagataaacactaaagattgtgatttctatgtcatgtgataaagatatggttaactttataaaagactgccaaactgcttttcagaataaatg

SEQ ID NO: 174137 - DNA, 608 bp, Homo sapiens
taactagactacagatcatactgtgatttcatctacttttcagtcatcttttcttcccttagtatatagttctataaattccatgacatatatagattagtgtatcactacaatcaagatagagtactgttctatcaacataaagaaatttatcttttaatagtcacaaccctccacttcctcataccataacccctaataaccactgrtctgttctccatcactacatttcatcatatttaggcttttaaataaatagaatcacacagtaagtaaccttttgagataggcttttttcccacttagcctcaatatatattcaagttattgtgtctattaatagcttattctttttcatttctgagtagtattctgttgtaatgatgtaccacagtttgtttattcattcattcattgaacgacaattgagtttttccagattagggctattacaaataaagttcctatgcattttagtgttctggtttttcgtgaatgtaagtttccatttctctgagataaacactaaagattgtgatttctatgtcatgtgataaagatatggttaactttataaaagactgccaaactgcttttcagaataaatg

SEQ ID NO: 174138 - DNA, 608 bp, Homo sapiens
taactagactacagatcatactgtgatttcatctacttttcagtcatcttttcttcccttagtatatagttctataaattccatgacatatatagattagtgtatcactacaatcaagatagagtactgttctatcaacataaagaaatttatcttttaatagtcacaaccctccacttcctcataccataacccctaataaccactggtctgttctccatcmctacatttcatcatatttaggcttttaaataaatagaatcacacagtaagtaaccttttgagataggcttttttcccacttagcctcaatatatattcaagttattgtgtctattaatagcttattctttttcatttctgagtagtattctgttgtaatgatgtaccacagtttgtttattcattcattcattgaacgacaattgagtttttccagattagggctattacaaataaagttcctatgcattttagtgttctggtttttcgtgaatgtaagtttccatttctctgagataaacactaaagattgtgatttctatgtcatgtgataaagatatggttaactttataaaagactgccaaactgcttttcagaataaatg

SEQ ID NO: 174139 - DNA, 608 bp, Homo sapiens
taactagactacagatcatactgtgatttcatctacttttcagtcatcttttcttcccttagtatatagttctataaattccatgacatatatagattagtgtatcactacaatcaagatagagtactgttctatcaacataaagaaatttatcttttaatagtcacaaccctccacttcctcataccataacccctaataaccactggtctgttctccatcactacatttcatcatatttaggcttttaaataaatagaatcacacagtaagtaaccttttgagataggcttttttcccacttagcctcaatatatattcaagttattgtgtctattaatagcttattctttttcatttctgagtagtattctgttgtaatgatgtaccacagtttgtttattcattcattcattgaacgacaattgagtttttccagattagggctattacaaataaagttcctatgcattttagtgttctggtttttcgtgaatgtaagtttccatttctctgagataaacactaaagattgtgatttmtatgtcatgtgataaagatatggttaactttataaaagactgccaaactgcttttcagaataaatg

SEQ ID NO: 174140 - DNA, 455 bp, Homo sapiens
cacgtttgtatcttaaattgttatctgaaacactggactttctcaaattctctctgacctacagtacaatcatgcaagagacatctcagagataattcttttgtgaaccttagcatactaacaatggagaacagcaaactgaatataaacttactatgaagctacgaagagaagcttcatgttcaaaatgttccctgaataattcctatcacactagtccatgatcttatagaagtattgtcttctgagttaataattacaaagcaactcttcccaattgtatgatgaagaatttactgaggatygtaatgagtactgagctactgcttgatcatactacgttctaatacattaatagttcaatgcatttaatgtgatcctgaatcttctcttgtacaacttcagttacattatccaaaataataaatgaatttgtaggtgagattaacgtggtt

SEQ ID NO: 174141 - DNA, 575 bp, Homo sapiens
gggatcagactttttctcctttcactctggaaacacgttttttttcagctgtctttcaaagtttgcagcagcaagctacttctttcaaagggtctgtgacttttttgggttttcctgatatgttcctgcagtggttttggagcaaaagttcacaatgcgagtcctccacatgctgttctgtccatccaagtgggagctgcaccttagtcttatctcttatccaccattttctggaagcttggaatacaaattcattaacaagctattcaaaggccaagacaatgtgactctaatcttgttttyagtaactccttgcaacactattctttagctatatggagatatttattgagcctcacacaagctcctactttatgccttccacatgctgtttgcactgccttgaattctctgttgcttctaatttgaattgtatgcattttaggatttctgttagatgccacattttatgcagccttttctaactctaccatgtaaaattaattcctgtgcattattttatttgaatctttcttgtgatactcatcattttttatttttcggtttccctaaaa

SEQ ID NO: 174142 - DNA, 575 bp, Homo sapiens
gggatcagactttttctcctttcactctggaaacacgttttttttcagctgtctttcaaagtttgcagcagcaagctacttctttcaaagggtctgtgacttttttgggttttcctgatatgttcctgcagtggttttggagcaaaagttcacaatgcgagtcctccacatgctgttctgtccatccaagtgggagctgcaccttagtcttatctcttatccaccattttctggaagcttggaatacaaattcattaacaagctattcaaaggccaagacaatgtgactctaatcttgttttcagtaactccttgcaacactattctttagctatrtggagatatttattgagcctcacacaagctcctactttatgccttccacatgctgtttgcactgccttgaattctctgttgcttctaatttgaattgtatgcattttaggatttctgttagatgccacattttatgcagccttttctaactctaccatgtaaaattaattcctgtgcattattttatttgaatctttcttgtgatactcatcattttttatttttcggtttccctaaaa

SEQ ID NO: 174143 - DNA, 575 bp, Homo sapiens
gggatcagactttttctcctttcactctggaaacacgttttttttcagctgtctttcaaagtttgcagcagcaagctacttctttcaaagggtctgtgacttttttgggttttcctgatatgttcctgcagtggttttggagcaaaagttcacaatgcgagtcctccacatgctgttctgtccatccaagtgggagctgcaccttagtcttatctcttatccaccattttctggaagcttggaatacaaattcattaacaagctattcaaaggccaagacaatgtgactctaatcttgttttcagtaactccttgcaacactattctttagctatatggagatatttattgagcctcacacaagctcctactttatgccttccacatgctgtttgcactgccttgaattctctgttgcttctaatttgaattgtatgcattttaggatttctsttagatgccacattttatgcagccttttctaactctaccatgtaaaattaattcctgtgcattattttatttgaatctttcttgtgatactcatcattttttatttttcggtttccctaaaa

SEQ ID NO: 174144 - DNA, 575 bp, Homo sapiens
gggatcagactttttctcctttcactctggaaacacgttttttttcagctgtctttcaaagtttgcagcagcaagctacttctttcaaagggtctgtgacttttttgggttttcctgatatgttcctgcagtggttttggagcaaaagttcacaatgcgagtcctccacatgctgttctgtccatccaagtgggagctgcaccttagtcttatctcttatccaccattttctggaagcttggaatacaaattcattaacaagctattcaaaggccaagacaatgtgactctaatcttgttttcagtaactccttgcaacactattctttagctatatggagatatttattgagcctcacacaagctcctactttatgccttccacatgctgtttgcactgccttgaattctctgttgcttctaatttgaattgtatgcattttaggatttctgttagatgccacattttatgcagccttttctaactctaccatgtaaaattaattcctgtgcattattttatttgaawctttcttgtgatactcatcattttttatttttcggtttccctaaaa

SEQ ID NO: 174145 - DNA, 604 bp, Homo sapiens
aaagagttaaaaggtgatttaaaaaaaaaaaaaaaaaacttcctttggcatggattatgtcagctttcatctacatgctatgcaaaatcatgtcttggttagtatttttcttatcttttgatggttgacatgcaagagagaattaaacatcaagataattagtgaatcctggtgatatggttcagctgtgtccccatccaaatctcatcttgaattgtagtttccataatccctacatgttatgggagggacccaggaatcatgagggcagtttcccccatactggcctcatgttagtgagtaaatctcatgagatctgatggttttataaatgggagttcccctgtacaagctctcttgcctgccaccatgttaagatgtgcctttgctcctccttygccttccaccatgattttgaggcctctccagccatgtgaaactgtgagtccattaaccctcttttgctttataaattacccagtctcagatatgtctgttagcagcatgagaacaaactaatgcacctgaatactttagtgttttttagtagaatatgacatattatgagtacacaatgtgaagaaatccggatattcgaaagaca

SEQ ID NO: 174146 - DNA, 604 bp, Homo sapiens
aaagagttaaaaggtgatttaaaaaaaaaaaaaaaaaacttcctttggcatggattatgtcagctttcatctacatgctatgcaaaatcatgtcttggttagtatttttcttatcttttgatggttgacatgcaagagagaattaaacatcaagataattagtgaatcctggtgatatggttcagctgtgtccccatccaaatctcatcttgaattgtagtttccataatccctacatgttatgggagggacccaggaatcatgagggcagtttcccccatactggcctcatgttagtgagtaaatctcatgagatctgatggttttataaatgggagttcccctgtacaagctctcttgcctgccaccatgttaagatgtgcctttgctcctccttcgccttccaccatgattttgaggcctctccagccatgtgaaactgtgagtccattaaccctcttttgctttataaattacycagtctcagatatgtctgttagcagcatgagaacaaactaatgcacctgaatactttagtgttttttagtagaatatgacatattatgagtacacaatgtgaagaaatccggatattcgaaagaca

SEQ ID NO: 174147 - DNA, 445 bp, Homo sapiens
gagaattctcaaagttgtagttatccataatcctaccccttcttatcaagaggaggagaaaggcattgaactctctctcatccctgccttttacagatggtyctggaatatggacaaaaggaaaggagaaaaatggctaaggtgccagaggaaattcccaaagcagcctgcattccctcataaatcaaatgtataacatggaactcacctgacacttatatcatcttttcagtgctccaatggtcatacccacaaagaaaagggatccaggcaacaagaggatggagggtagattggtcttggacccggagtttaggtcaaggtgatgttgaggactttgagacaagagtgtacattttagttattgaattacatcacagaaataatcacaccagcctatatttttcaccaaaaatgaatgaaaggaaaattatatctgttctag

SEQ ID NO: 174148 - DNA, 445 bp, Homo sapiens
gagaattctcaaagttgtagttatccataatcctaccccttcttatcaagaggaggagaaaggcattgaactctctctcatccctgccttttacagatggttctggaatatggasaaaaggaaaggagaaaaatggctaaggtgccagaggaaattcccaaagcagcctgcattccctcataaatcaaatgtataacatggaactcacctgacacttatatcatcttttcagtgctccaatggtcatacccacaaagaaaagggatccaggcaacaagaggatggagggtagattggtcttggacccggagtttaggtcaaggtgatgttgaggactttgagacaagagtgtacattttagttattgaattacatcacagaaataatcacaccagcctatatttttcaccaaaaatgaatgaaaggaaaattatatctgttctag

SEQ ID NO: 174149 - DNA, 445 bp, Homo sapiens
gagaattctcaaagttgtagttatccataatcctaccccttcttatcaagaggaggagaaaggcattgaactctctctcatccctgccttttacagatggttctggaatatggacaaaaggaaaggagaaaaakggctaaggtgccagaggaaattcccaaagcagcctgcattccctcataaatcaaatgtataacatggaactcacctgacacttatatcatcttttcagtgctccaatggtcatacccacaaagaaaagggatccaggcaacaagaggatggagggtagattggtcttggacccggagtttaggtcaaggtgatgttgaggactttgagacaagagtgtacattttagttattgaattacatcacagaaataatcacaccagcctatatttttcaccaaaaatgaatgaaaggaaaattatatctgttctag

SEQ ID NO: 174150 - DNA, 450 bp, Homo sapiens
caacttgatttttttctgtaaaactgggttctaaataaagttctcagtacataaatgaacacagagtgctgtgcaggtgggcttgcccttggtaacagacacagctgtgcctatcaaacacaaaatatggtatttaattttggaaaattgctaacggcaggcagaactgtacaaaggaaagttaccttcaactgtcatttaggaagaarcaaggatatcaggaacagtaccatttttcctaatgtttccaggcttcagttgcattcggtgcctttccagaacaactgaacaatgaaatggatagtaatctgccaaatgcatacagctgtatgcctgtttgcctggggtttatattagggcctggggaaacaaagttaaggaagtaaggctgcagggtagcatcagtccatccactatagtccgattcagattcagatggtcagattggag

SEQ ID NO: 174151 - DNA, 450 bp, Homo sapiens
caacttgatttttttctgtaaaactgggttctaaataaagttctcagtacataaatgaacacagagtgctgtgcaggtgggcttgcccttggtaacagacacagctgtgcctatcaaacacaaaatatggtatttaattttggaaaattgctaacggcaggcagaactgtacaaaggaaagttaccttcaactgtcatttaggaagaaacaargatatcaggaacagtaccatttttcctaatgtttccaggcttcagttgcattcggtgcctttccagaacaactgaacaatgaaatggatagtaatctgccaaatgcatacagctgtatgcctgtttgcctggggtttatattagggcctggggaaacaaagttaaggaagtaaggctgcagggtagcatcagtccatccactatagtccgattcagattcagatggtcagattggag

SEQ ID NO: 174152 - DNA, 454 bp, Homo sapiens
caacttgatttttttctgtaaaactgggttctaaataaagttctcagtacataaatgaacacagagtgctgtgcaggtgggcttgcccttggtaacagacacagctgtgcctatcaaacacaaaatatggtatttaattttggaaaattgctaacggcaggcagaactgtacaaaggaaagttaccttcaactgtcatttaggaagaaacaaggatatcaggaacagtaccatttttccwaatgtttccaggcttcagttgcattcggtgcctttccagaacaactgaacaatgaaatggatagtaatctgccaaatgcatacagctgtatgcctgtttgcctggggtttatattagggcctggggaaacaaagttaaggaagtaaggctgcagggtagcatcagtccatccactatagtccgattcagattcagatggtcagattggagtcta

SEQ ID NO: 174153 - DNA, 454 bp, Homo sapiens
caacttgatttttttctgtaaaactgggttctaaataaagttctcagtacataaatgaacacagagtgctgtgcaggtgggcttgcccttggtaacagacacagctgtgcctatcaaacacaaaatatggtatttaattttggaaaattgctaacggcaggcagaactgtacaaaggaaagttaccttcaactgtcatttaggaagaaacaaggatatcaggaacagtaccatttttcctaatgtttccaggcttcagttgcattcggtgcctttccagaacaactgaacaatgaaatggatagtaatctgccaaatgcatacagctgtatgcctgtttkcctggggtttatattagggcctggggaaacaaagttaaggaagtaaggctgcagggtagcatcagtccatccactatagtccgattcagattcagatggtcagattggagtcta

SEQ ID NO: 174154 - DNA, 438 bp, Homo sapiens
agaattctcaaagttgtagttatccataatcctaccccttcttatcaagaggaggagaaaggcattgaactctctctcatccctgccttttacagatggttctggaatatggacaaaaggaaaggagaaaaatggctaaggtgccagaggaaattcccaaagcagcctgcattccctcataaatcaaatgtataacatggaactcacctgacacttatatcatcttttcagtgctccaatggtcatacccacaaagaaaagggatccaggcaacaagaggatggagggtagattggtcttggaccmggagtttaggtcaaggtgatgttgaggactttgagacaagagtgtacattttagttattgaattacatcacagaaataatcacaccagcctatatttttcaccaaaaatgaatgaaaggaaaattatatctg

SEQ ID NO: 174155 - DNA, 438 bp, Homo sapiens
agaattctcaaagttgtagttatccataatcctaccccttcttatcaagaggaggagaaaggcattgaactctctctcatccctgccttttacagatggttctggaatatggacaaaaggaaaggagaaaaatggctaaggtgccagaggaaattcccaaagcagcctgcattccctcataaatcaaatgtataacatggaactcacctgacacttatatcatcttttcagtgctccaatggtcatacccacaaagaaaagggatccaggcaacaagaggatggagggtagattggtcttggacccggagtttaggwcaaggtgatgttgaggactttgagacaagagtgtacattttagttattgaattacatcacagaaataatcacaccagcctatatttttcaccaaaaatgaatgaaaggaaaattatatctg

SEQ ID NO: 174156 - DNA, 459 bp, Homo sapiens
ggagaattctcaaagttgtagttatccataatcctaccccttcttatcaagaggaggagaaaggcattgaactctctctcatccctgccttttacagatggttctggaatatggacaaaaggaaaggagaaaaatggctaaggtgccagaggaaattcccaaagcagcctgcattccctcataaatcaaatgtataacatggaactcacctgacacttatatcatcttttcagtgctccaatggtcatacccacaaagaaaagggatccaggcaacaagaggatggagggtagattggtcttggacccggagtttaggtcaaggtgatgttgaggactttgagacaagagtgtacattttagttattgaattacrtcacagaaataatcacaccagcctatatttttcaccaaaaatgaatgaaaggaaaattatatctgttctaggcagatggaggtc

SEQ ID NO: 174157 - DNA, 459 bp, Homo sapiens
ggagaattctcaaagttgtagttatccataatcctaccccttcttatcaagaggaggagaaaggcattgaactctctctcatccctgccttttacagatggttctggaatatggacaaaaggaaaggagaaaaatggctaaggtgccagaggaaattcccaaagcagcctgcattccctcataaatcaaatgtataacatggaactcacctgacacttatatcatcttttcagtgctccaatggtcatacccacaaagaaaagggatccaggcaacaagaggatggagggtagattggtcttggacccggagtttaggtcaaggtgatgttgaggactttgagacaagagtgtacattttagttattgaattacatcacagaaataatcacaccagcctatatttttcaccaaaaatgaatgaaargaaaattatatctgttctaggcagatggaggtc

SEQ ID NO: 174158 - DNA, 583 bp, Homo sapiens
tctagattaaatcagaaaaaaatagaaactgaacaggccaataacaggtagttacattgaaagagtagtacaaaaattgccaacataaaagtccaggaccaaatggattcactgctgaattctatcagacatttaaagaagaatttgtaccaaacttacaactattccaaatgatacagaaagatggtatcctccctaaatcattctatgaagccagtatcaccctaatgccaaaaccaggaaaggatataacaaaaaaagaaaactacggatcaatattcctgatgaacatagatgcaaaaattctcaataaaatactagctcaccaaatccaacagcatatcaaaaagataatacgccatgatcaagtgggygtcataccagcaatgcagagatggtttaacatatgcaagtcaataaatgtgatacaccacataaacagaattaaaaaccaaaatcatggtgatcccactagacacagaaaaagcatttgaggaaattcagcatcgctttacgtttgaaaccctcagcaaaattggcacagaagggacataccttaaagtaatcaaaaccgtctatgaca

SEQ ID NO: 174159 - DNA, 583 bp, Homo sapiens
tctagattaaatcagaaaaaaatagaaactgaacaggccaataacaggtagttacattgaaagagtagtacaaaaattgccaacataaaagtccaggaccaaatggattcactgctgaattctatcagacatttaaagaagaatttgtaccaaacttacaactattccaaatgatacagaaagatggtatcctccctaaatcattctatgaagccagtatcaccctaatgccaaaaccaggaaaggatataacaaaaaaagaaaactacggatcaatattcctgatgaacatagatgcaaaaattctcaataaaatactagctcaccaaatccaacagcatatcaaaaagataatacgccatgatcaagtgggcgtcataccagcaatgcagagatggtttaacatatgcaagtcaataaatgtgatacaccacataaacagaattaaaaaccaaaatcatggtgatcccactagacayagaaaaagcatttgaggaaattcagcatcgctttacgtttgaaaccctcagcaaaattggcacagaagggacataccttaaagtaatcaaaaccgtctatgaca

SEQ ID NO: 174160 - DNA, 583 bp, Homo sapiens
aatataaactagtacaaccactgtggaaaacagtatagagattccttaaagaactaaaagtagaactaccatttgatcgagcaatctctctactgagtatccacccaaaacaaaagaaggcattacatgaaaaaacactttcacacacatcatgtttayagaagtacaattggcaattgcaaaaaatatggaaccagcctaaatgcccatcaacgatgagtggataaagaaaatgtgttgtatatataccatgaaatactactcagccacaaaaagagcaaaataatggcatttgcgggaacctggatggagttggagaccatcattcaagttgaagtaactcaggaatggaaaaccaaatatcgttatgttctcacctataagtggtagctaagctatgaggatgtaaatgcataataataatataacagactttgggggctcaggggaaaggatgagaggggtgagggataaaagattacaccttgggtacagtgtacacagctactgttacgggggaacgaacatctcagaaatcaccatgaaacaagtcatccatgtaaccacaaaccacctgttcccc

SEQ ID NO: 174161 - DNA, 596 bp, Homo sapiens
ccaatttgcactgggctctgtaaattacacagctggacctgccatgagccctggtgtgtggtgctgaatgtrctcagatgtcatacctttttctcttttgtaaaaccatgccgtgtgaactaacaataatctggttctgtatgtaggaacaaaaataaagagcacctagtagaaataaaaaggatatggtcaaaagaaagaaactatttttagaaagaagatactggcagatgtttattgttcagactagccgttaacagatgtcctgggctccaccaaagttactaaaataaatgttaactcgtgtccttaaatggtgtatgctaaatatgcatacccttttccaccactccgattgcctaccaccacatcactaaattactgcacaaaatatccaatttattttgccttaggggtcctaggcctaagcaaaaaaataaataggtccttacttgttataatttgtaacttggctgtgggaggaaagtgaatgcaagtcttttaactgcagtattatactctaccatcaaatttcccattcaaaactgacacagatgaaatctcaagatactcagactttatttatttttaacatg

SEQ ID NO: 174162 - DNA, 375 bp, Homo sapiens
ttaagtgatgcatgactacacacgtacctgaaactataaataactttgaagcataaatagttggttgctttctggtatttaaaatcaagcctactttttaggctaagygatagaagaataagaaaatgctgattcctttcaatgtttcttttgctttcattatgaactgaatgcttgtatgcccccaacatttacatgttaaagcctgattcccaatgtgatggcatttggaggtagatcctttacaggtaattaggtcatgagagtggagcactcattagtggtattagtgcccttataagaagacacaggatagagtgtgcttcctctttatctttttccaccatgtgaggaagccgtggaagaaggtgatca

SEQ ID NO: 174163 - DNA, 375 bp, Homo sapiens
ttaagtgatgcatgactacacacgtacctgaaactataaataactttgaagcataaatagttggttgctttctggtatttaaaatcaagcctactttttaggctaagtgatagaagaataagaaaatgctgattyctttcaatgtttcttttgctttcattatgaactgaatgcttgtatgcccccaacatttacatgttaaagcctgattcccaatgtgatggcatttggaggtagatcctttacaggtaattaggtcatgagagtggagcactcattagtggtattagtgcccttataagaagacacaggatagagtgtgcttcctctttatctttttccaccatgtgaggaagccgtggaagaaggtgatca

SEQ ID NO: 174164 - DNA, 375 bp, Homo sapiens
ttaagtgatgcatgactacacacgtacctgaaactataaataactttgaagcataaatagttggttgctttctggtatttaaaatcaagcctactttttaggctaagtgatagaagaataagaaaatgctgattcctttcaatgtttcttttgctttcattatgaactgaatgcttgtatgcccccaacatttayatgttaaagcctgattcccaatgtgatggcatttggaggtagatcctttacaggtaattaggtcatgagagtggagcactcattagtggtattagtgcccttataagaagacacaggatagagtgtgcttcctctttatctttttccaccatgtgaggaagccgtggaagaaggtgatca

SEQ ID NO: 174165 - DNA, 375 bp, Homo sapiens
ttaagtgatgcatgactacacacgtacctgaaactataaataactttgaagcataaatagttggttgctttctggtatttaaaatcaagcctactttttaggctaagtgatagaagaataagaaaatgctgattcctttcaatgtttcttttgctttcattatgaactgaatgcttgtatgcccccaacatttacatgttaaagcctgattcccaatgtgatgkcatttggaggtagatcctttacaggtaattaggtcatgagagtggagcactcattagtggtattagtgcccttataagaagacacaggatagagtgtgcttcctctttatctttttccaccatgtgaggaagccgtggaagaaggtgatca

SEQ ID NO: 174166 - DNA, 355 bp, Homo sapiens
ataacaactagtaacaaatgtctctgagtcaaatctctcttctgaccagccacactgaatgagataatttgtcatttcaatttaagtgtttgtgtgatgatgagaatactgaaaatgtgacttttaaagcacttgatgatactttgaattctttagtttttgtagttttggtccaaatttgcttgctttatttcctcataggtaatgaaaatataaatccttagcctaacacttttgcaaattatttcaaaatgagaataaatgaagtytaaattcattgtgtcttactcaaattgtttttactcatatggttgagtttcaaattcaccagctgcacaacctcatgccagtcatt

SEQ ID NO: 174167 - DNA, 355 bp, Homo sapiens
ataacaactagtaacaaatgtctctgagtcaaatctctcttctgaccagccacactgaatgagataatttgtcatttcaatttaagtgtttgtgtgatgatgagaatactgaaaatgtgacttttaaagcacttgatgatactttgaattctttagtttttgtagttttggtccaaatttgcttgctttatttcctcataggtaatgaaaatataaatccttagcctaacacttttgcaaattatttcaaaatgagaataaatgaagtttaaattcattktgtcttactcaaattgtttttactcatatggttgagtttcaaattcaccagctgcacaacctcatgccagtcatt

SEQ ID NO: 174168 - DNA, 569 bp, Homo sapiens
tattgaaaatagatgtgggagaatattctgtttatcattactgggaagatatgtaccaggtactgttctaaatttagtacatttttcaaaatatctaactttatttaattttcctaaaattgcatgagatggatattaccgtcttcattttctcaacgagaaagaacttgaggatctgaaacattgaggaatttttctaagaacaaatagctgtgaaattacagagttgaggtgaggacttaattttaccctgactccaaatcatatactcttaaataataaataatagaaatttgaaatacaaaaatcagtttctctctccttctggtttcmtcattttattctgagacatcaagggaaagaagaaaatatcttctatgttaaaacccctcacctcaacgtgaatttgtacactattccagttttattcccaaagtgattgatgagttcaaacagacagaggtgagggattggaatattaatatcaaagatctcaaacgattttctctctcctatgacagtattgaatgagcttaaactaatgttagcatcaagatcttcaaaacatc

SEQ ID NO: 174169 - DNA, 569 bp, Homo sapiens
tattgaaaatagatgtgggagaatattctgtttatcattactgggaagatatgtaccaggtactgttctaaatttagtacatttttcaaaatatctaactttatttaattttcctaaaattgcatgagatggatattaccgtcttcattttctcaacgagaaagaacttgaggatctgaaacattgaggaatttttctaagaacaaatagctgtgaaattacagagttgaggtgaggacttaattttaccctgactccaaatcatatactcttaaataataaataatagaaatttgaaatacaaaaatcagtttctctctccttctggtttcctcattttattctgagacatcaagggaaagaagaaaatatcttctatrttaaaacccctcacctcaacgtgaatttgtacactattccagttttattcccaaagtgattgatgagttcaaacagacagaggtgagggattggaatattaatatcaaagatctcaaacgattttctctctcctatgacagtattgaatgagcttaaactaatgttagcatcaagatcttcaaaacatc

SEQ ID NO: 174170 - DNA, 569 bp, Homo sapiens
tattgaaaatagatgtgggagaatattctgtttatcattactgggaagatatgtaccaggtactgttctaaatttagtacatttttcaaaatatctaactttatttaattttcctaaaattgcatgagatggatattaccgtcttcattttctcaacgagaaagaacttgaggatctgaaacattgaggaatttttctaagaacaaatagctgtgaaattacagagttgaggtgaggacttaattttaccctgactccaaatcatatactcttaaataataaataatagaaatttgaaatacaaaaatcagtttctctctccttctggtttcctcattttattctgagacatcaagggaaagaagaaaatatcttctatgttaaaacccctcacctcaacrtgaatttgtacactattccagttttattcccaaagtgattgatgagttcaaacagacagaggtgagggattggaatattaatatcaaagatctcaaacgattttctctctcctatgacagtattgaatgagcttaaactaatgttagcatcaagatcttcaaaacatc

SEQ ID NO: 174171 - DNA, 569 bp, Homo sapiens
tattgaaaatagatgtgggagaatattctgtttatcattactgggaagatatgtaccaggtactgttctaaatttagtacatttttcaaaatatctaactttatttaattttcctaaaattgcatgagatggatattaccgtcttcattttctcaacgagaaagaacttgaggatctgaaacattgaggaatttttctaagaacaaatagctgtgaaattacagagttgaggtgaggacttaattttaccctgactccaaatcatatactcttaaataataaataatagaaatttgaaatacaaaaatcagtttctctctccttctggtttcctcattttattctgagacatcaagggaaagaagaaaatatcttctatgttaaaacccctcacctcaacgtgaatttgtacactattccagttttattcccaaagtgattgatgagttcaaacagacagaggtgagggattggaatattaatatcaaagatctcaaaygattttctctctcctatgacagtattgaatgagcttaaactaatgttagcatcaagatcttcaaaacatc

SEQ ID NO: 174172 - DNA, 587 bp, Homo sapiens
gatatctgaaggaaaagcatgctaggcagagggaacagcaaggtggcacatatgctaaactatacrgtgaggaacagagtactagagagatgaattcacagagcaaataggggagcagggtgtgtgtgttcaaaactgcagaccaggggttagtaaacttgccttctaaggggccagattataaacaggttcagctttgcaggccacattatctctgtcacaactactcaactttggcattataatacaaaagccatcattgtatgtaaaccaatacatgtgactgttctaatccaacttgattttaaaaagcaagcagtggtcaaatttgctacaatttcccattgcagaccattgagaaaattttggcttttgctttaattgagatgaagtgtagggtagttttaaaaaaactgtggcatattctttagatttcttcccattgagaggtgtctctacatcttgccttcattttggctggacttatgacttcttctacacatgtactatggtagaaatgatgctatgcgacctctaagcctagttaataaaaaagcatacaacttccactgttttctttgtatcct

SEQ ID NO: 174173 - DNA, 587 bp, Homo sapiens
gatatctgaaggaaaagcatgctaggcagagggaacagcaaggtggcacatatgctaaactatacggtgaggaacagagtactagagagatgaattcasagagcaaataggggagcagggtgtgtgtgttcaaaactgcagaccaggggttagtaaacttgccttctaaggggccagattataaacaggttcagctttgcaggccacattatctctgtcacaactactcaactttggcattataatacaaaagccatcattgtatgtaaaccaatacatgtgactgttctaatccaacttgattttaaaaagcaagcagtggtcaaatttgctacaatttcccattgcagaccattgagaaaattttggcttttgctttaattgagatgaagtgtagggtagttttaaaaaaactgtggcatattctttagatttcttcccattgagaggtgtctctacatcttgccttcattttggctggacttatgacttcttctacacatgtactatggtagaaatgatgctatgcgacctctaagcctagttaataaaaaagcatacaacttccactgttttctttgtatcct

SEQ ID NO: 174174 - DNA, 587 bp, Homo sapiens
gatatctgaaggaaaagcatgctaggcagagggaacagcaaggtggcacatatgctaaactatacggtgaggaacagagtactagagagatgaattcacagagcaaataggggagcagggtgtgtgtgttcaaaactgcagaccaggggttagtaaacttgccttctaaggggccagattataaacaggttcagctttgcaggccacattatctctgtcacaactactcaactttggcattataatacaaaagccatcattgtatgtaaaccaatacatgtgactgttctaatccaacttgattttaaaaagcaagcagtggtcaaatttgctacaatttcccaytgcagaccattgagaaaattttggcttttgctttaattgagatgaagtgtagggtagttttaaaaaaactgtggcatattctttagatttcttcccattgagaggtgtctctacatcttgccttcattttggctggacttatgacttcttctacacatgtactatggtagaaatgatgctatgcgacctctaagcctagttaataaaaaagcatacaacttccactgttttctttgtatcct

SEQ ID NO: 174175 - DNA, 561 bp, Homo sapiens
gtccatgtcctaggacttcatgaaggtagaatttaagagctatgagctagcakgtctggcagaagtaatatttaagcatcaaagtactcaagatgctgcatggcttctattagctgcttacagtaaaataagagaaggagacaataatgtaatgatggaatttatcattaaaagggaaacagaatagaaagatttagaaaaatctcagcctggccatgtaaagaattaaaaagtgtgttcagcagagaatattaagtgtgtggccaagtgactctttgctaatgagattaatatgggtagaagcaagccaggttctattgattaagacaatagaagaacgaccttaaaggcatttcacagaccttcaaggcaagataggacttgccttgttttcagagcaaagttttcagagaggtggctacaggacctcaggattcactgccctttgctttaggactctgctctctgaatgcagtgcctcttggccatcctagtcttggctcaagtggacccaagtgaggcttgagccaccaaaggtacaagctgtaaatcctggcagca

SEQ ID NO: 174176 - DNA, 561 bp, Homo sapiens
gtccatgtcctaggacttcatgaaggtagaatttaagagctatgagctagcagrtctggcagaagtaatatttaagcatcaaagtactcaagatgctgcatggcttctattagctgcttacagtaaaataagagaaggagacaataatgtaatgatggaatttatcattaaaagggaaacagaatagaaagatttagaaaaatctcagcctggccatgtaaagaattaaaaagtgtgttcagcagagaatattaagtgtgtggccaagtgactctttgctaatgagattaatatgggtagaagcaagccaggttctattgattaagacaatagaagaacgaccttaaaggcatttcacagaccttcaaggcaagataggacttgccttgttttcagagcaaagttttcagagaggtggctacaggacctcaggattcactgccctttgctttaggactctgctctctgaatgcagtgcctcttggccatcctagtcttggctcaagtggacccaagtgaggcttgagccaccaaaggtacaagctgtaaatcctggcagca

SEQ ID NO: 174177 - DNA, 561 bp, Homo sapiens
gtccatgtcctaggacttcatgaaggtagaatttaagagctatgagctagcaggtctggcagaagtaatatttaagcatcaaagtactcaagatgctgcatggcttctattagctgcttacagtaaaataagagaaggagacaataatgtaatgatggaatttatcattaaaagggaaacagaatagaaagatttagaaaaatctcagcctggccatgtaaagaattaaaaagtgtgttcagcagagaatattaagtgtgtggccaagtgactctttgctaatgagattaatatgggtrgaagcaagccaggttctattgattaagacaatagaagaacgaccttaaaggcatttcacagaccttcaaggcaagataggacttgccttgttttcagagcaaagttttcagagaggtggctacaggacctcaggattcactgccctttgctttaggactctgctctctgaatgcagtgcctcttggccatcctagtcttggctcaagtggacccaagtgaggcttgagccaccaaaggtacaagctgtaaatcctggcagca

SEQ ID NO: 174178 - DNA, 645 bp, Homo sapiens
ataggaaagagcactgaggaaggggtacaaatgacagattttagtcttatacctgttatttatgagggttaaaactctcccttcaccgtctcctttggttgaaccctcatattttattttgtgtgtactgctcattcaatggtgggtgagggtcctcttctctagcgcaaagggttagaccttggctaaaacgtgctccatgagttcacagacacagggattggtttgtgtaatccaggcaccaatcaatcaccacctagaattccatggcccttgagattgggtcaggaatgtttccaagagcaggaagcccagtgctccgattcagagatgcatgcacacagtttcagttctgcacartattttgtgaatgtggtcaaagtatggaaaaagaaagacctacgacaatcactgaaaagtcaagctcttattaaaccaagggttatcccaacctaactgtggccttcagttcacatgcaacaataaattatttttattgtttaaaaccacatcaatcagattttttgttatttgctgtcaaatgcatccttactattacatatattaagatcaagcctttatttcattgacttgagcttttatttcctcacttgtgaaatgaacaaatctctgctatattaatga

SEQ ID NO: 174179 - DNA, 616 bp, Homo sapiens
agaccaagtttagctgaaaaagtacatctgtgagcaaacggcattgaattttattattaagcatctgatgaagtggttcaccttttgtttttaggtccacatttgctgaaatgtaactcttatctcatgcactgggagtgatgaacttcactaggaaatcatcgttctttctggtaagtcaccacagcacaaaactgcaaccattgtttagtaacaactagactctgatagatgctgtggagaatttgactagaagtaggaggatcatttactacatggcaaaaaaacaaatcagtctatcttagaaaggttaaaatttacatggataataaagaaaggaaggtagaagaagagtgataaattastgagaaaagaacagtaggtgtaattatagcaatatgcttaaatgaaagagaaaaatatggcagaagcatttattgatttgagattgtaatttttttaaataaaaaagcttagtctggattccaacttgtatataaaattaggagcaaaggtatgattaatatgttcatggaatataattatcaagaaaccacagacatttgtgtatggaggacacagaaaggtgagaacttgctaacaggaatcccattaa

SEQ ID NO: 174180 - DNA, 574 bp, Homo sapiens
attaactttcattgttattgtgatattgttattgtcaatatcattatttttggtatgctatagttgccatttttattccagaaatatattaccttcaataaaaacctaaagcatgccttcttagaaaaaygaggtccagacactggattttgaactttttaagtgtgcagcagtttgatcatgatgtaacagtgagatatgtgcttccacccactaatcacaagacagcaggctctgggctccatccttctggtggcctgcagctattgaagtacttgctttaagtgctgttacattaccagaaaggagcaagacgtagaactcattggcattttgatgtgggtgggtagagggaaaatgtgtggccacagctgtcatttcctgcaactgcagcatggtaaatcattatttgatttgaaattaatttcaaataatcattatttgaaattaagagagctgtactctttgctgggccccaagcacccgctgtggccttccaactatccagctaactcttaacactctccgcaggcctcttcctctctcttgcttttttactattcagcttaaagat

SEQ ID NO: 174181 - DNA, 668 bp, Homo sapiens
aaacacgccacttacctcttttctcaattttgcttgtcttaccttgcaaaaggctttcaggtttacagtggcatcttttatcaagtacattatgttgtgctggtggctgaagaaataagaattttttaaaaagattgattctgtttttaaattttgaaacactaaaaaaattaattaggttgaatcatataaaatttgcatttttatagatcaaaatcgtttgatactggcagttycatatggctcactatataaaattaaatgagacctttaatttatattctacttttcctaattaatgactgttaacattttgggccagatgcagtgagtccctgcctaaaaaaagaaaaaaaattggttatagaagcttctactcactttatttttatttatttatttatttatttatttgagacagagtctccctctgtcacttaagctggagtacaatggcgcaatcatagctcactgcagccttgagctcccaggctcaagcaatcctcccacctcagccttcccagtgtccgggactacaggcatgtgccaccacacccagctaatttttgtattttttgtagagacagggttttgccatgttgcacaggctggtctccaactcctgggctcaagcgatttgccctcctcgacctcccaaagtccattat

SEQ ID NO: 174182 - DNA, 559 bp, Homo sapiens
ccagtgggtttccctgctctcccttctggtgtcagataattaacgactctctatccttaagattcaaagcagattgtaatttgtagggcctctgcctatttctaaaagatatcttaaaaaaaaaaaaaaaaagactggggacataacatttgaagcaatcttgacaagtaaattgagtttcaaaaaatartcactccaactgggtaccatataatcgatttataaagcacttgaaaatacagtaactactattcaaagtacttttggcatttacatgacagtatggctcaagagtcactcttagttattactgtgaaaactgtttgggatgtggatgacaaaattgattagaaacctgccctcaactgagagaacctacaggtctaagctttttcttccaccgtcataacttcaggttgaggttataaacatcttgaaaagagagaagggcaggcatgctctctatatccctatttccatatctcgatctctatctatctatctctatctctatctctcagtagcaatgtggccttataaactatgacatactacagaa

SEQ ID NO: 174183 - DNA, 349 bp, Homo sapiens
ggcaaatgctgccaaggtaaatatataaggaaaggaatggaagataagagcttgtcagcaaagcttgttgtgtagatgcctgtggtgcctttgtcaggctgataagcatccaaaattgtctctggtaatcagagacatcactytctggtagagaggggagggaggacaaatttatgtcccgtttttaggtaaataggaagggatcgagagcttttcttgtatctactttttttcggttgtctcagctccaaataatccttatgccagagtgatatattctgatacccttttgtagactcctggctatgtgtttcttgaagctgaaagcagtcacggcttcgttgaattc

SEQ ID NO: 174184 - DNA, 561 bp, Homo sapiens
ttaacttggatttaggcggaaatgaaagatgggaggagtaaagaaaactgctctgaagaatttaaagttttcctgaagacagtaataatgcagacacaaactgctttcatatcatgagagcagccacagcagcagcttgacctggtattctacctgagtagatgaagcagaagatcggcaagtttggcagagttttggtttaagaaaaacaaaccactaccacctagcacaagttaaattgatgtttttacaagtctgctcctcaaaaatgaaaagatggacgaaagagaccataaaaccacttttagcatatgaattgcagttggtacacatgtgtgtgttaataggaaagtctcgaatttgtgttgtttttgagatttgacatttaaggtaccagtgcacacttgataatatttcrttactatctctaacacagacctaacatctcgaatttaaagaccagttgaagattaagggatttttatcctttgtcgaaagtgagtcatgttgggttatttgaaattcaaattttaattgtgctgcccatatatgaaaatgaga

SEQ ID NO: 174185 - DNA, 490 bp, Homo sapiens
ctggctgctttcatgagctggtgttgagtgtctgtggcttttccaggcacacagtgaaagctgttggtggatctaacattctgggatctggaggatctactaggcagtgccccagtggagacttgatgtggaggctctgacccacatttcccttccacactgccctagcagaggttctccatgatggctctgcccctgcagcaaacttttgcctggacaaccaggcatttccatacaccctctgaaatctaggtggaggttcccaacctcaattcttgacttctgtgtactgcaggcccaacaccatgtgtaagctgacaaggcttgagggttgaacyctccgaagcaacagcatgagctgtaccttggccctttttagccattactgggggggctgggacacagggtgccaagtccttaggctgcacacatcaggggagcactgggccagacccagaaaaccattttttccctcttaggcctcagggtc

SEQ ID NO: 174186 - DNA, 502 bp, Homo sapiens
gccccccacccgccccagctccttacatagtgaccaagaaaaaaaaagtttaggtgcataacctttttgtgctggcataactgagacttgaatcttgcacaaaccagtgagatcctaaactatgaagttggagtgcagtcagggacagctagcaaagcaagaaagataagtctgtcctttgggataccatcccagcagtggcatcatcccagctcggtatgccacagccactggccagggaaccatgaagcagccttagcaggcagagttctctcccagtgctgtctggaacaaactaggagcagtagcacagctgtctctgcaatttccatgttgctgtagagagctagttctggcttttctgaatgtgagtggagcccatcttgtctgtttggaaggtgagagtcggtgctgcaaagagatagggmgtaagcattctcttcactgtgaataggtcttaaagaaagctgcccttgccaacaataaaaatgcaaatgttaga

SEQ ID NO: 174187 - DNA, 595 bp, Homo sapiens
agacatatacagatttaataatctgtataagtacatttcccctaatgactatcttattttgttacacaattaaattctatagactcttgctggcattgtttgaaaacttctgggagtactggtcacattacattacaaactcataattttttttgttaataaactatctgaaccaaggaagaagctattatgatttgtttatgttctttagatgatatgtctcaaatatggygggtattattgctggtgtggacatcttcacaaaaattgaaggccaattgctggcatattttcttcataccctagaaaaatgcaaatacaaacctcagatgtcaaggaggtactacccagtatataggtctgcctttataagacatatataaaaaagcaagagatatgaattctgatatctgtacatcatgttccaattcattttgagagccttagagaatgactttgctggaacagtgttcatgttcttattgcaattagaaacgtccaaactaaacaggttccaatacctgtggtagcacctttggcttttaaatcttattaaaccactagagacctgagagagacttgacatttatttaat

SEQ ID NO: 174188 - DNA, 587 bp, Homo sapiens
atgactttgctggaacagtgttcatgttcttattgcaattagaaacgtccaaactaaacaggttycaatacctgtggtagcacctttggcttttaaatcttattaaaccactagagacctgagagagacttgacatttatttaatttggccgataatactcaacaaataagaaccccaatggataaaatgcattaatattcgaaaagtcacttttctgcccaccacccatggcaacaagtttatttgtttggaggaagactgaaacttgaattcctaccaatagtatgaactgtagcaaatcttaagttgaatttgtgtgagaactttggggaagacacataggcaggatgtttgtttcatcttttccatttttcctgctgaatttatcttgtaaagaatgagactggtcccaatttctgtatgccccagtatcgacatctggaaaacatgggttatttatcccctaaggttactgaggctgattacataggatttaaaaaaagagggaatcactcatttatgaacagcatggggaatcttcactacaaggcaatctgctgtatacttcatttatttagcatggttt

SEQ ID NO: 174189 - DNA, 428 bp, Homo sapiens
gaattctattaacaagctgaatgaagcagattcatccccagttgatcctccagatgagaactgccacctggccaacacattgactacagctttgtgacaccctgagcagaggatcctgctaagatatgcctggattcctgaccgattgaaactgtaagrtaatatatatgttgttttaagggaaaaataacaaatagaaataaacgtgttattatcattcacaaatctgggtaatgttccttgtgtgggaaaatagaaacataaagtaaaacaccttaaaagaaatgactttcaactctctctctaccttctctagattttctctgttcctaggtttggttggactctggggtttttaggagagacccactaagactggaagcagtatttgtacaaaaccatagctcttaataatccacaccagcata

SEQ ID NO: 174190 - DNA, 428 bp, Homo sapiens
gaattctattaacaagctgaatgaagcagattcatccccagttgatcctccagatgagaactgccacctggccaacacattgactacagctttgtgacaccctgagcagaggatcctgctaagatatgcctggattcctgaccgattgaaactgtaagataatatatatgttgttttaagggaaaaataacaaatagaaataaacgtgttattatcattcacaaatctgggtaatgttccttgtgtgggaaaatagaaacataaagtaaaacaccttaaaagaaatgactttcaactctctctctaccttctctagattttctctgttcctaggtttggttgractctggggtttttaggagagacccactaagactggaagcagtatttgtacaaaaccatagctcttaataatccacaccagcata

SEQ ID NO: 174191 - DNA, 428 bp, Homo sapiens
gaattctattaacaagctgaatgaagcagattcatccccagttgatcctccagatgagaactgccacctggccaacacattgactacagctttgtgacaccctgagcagaggatcctgctaagatatgcctggattcctgaccgattgaaactgtaagataatatatatgttgttttaagggaaaaataacaaatagaaataaacgtgttattatcattcacaaatctgggtaatgttccttgtgtgggaaaatagaaacataaagtaaaacaccttaaaagaaatgactttcaactctctctctaccttctctagattttctctgttcctaggtttggttggactctggggtttttaggagagacccactaagactggaagcagtatttgtacaaaaccayagctcttaataatccacaccagcata

SEQ ID NO: 174192 - DNA, 642 bp, Homo sapiens
ttattttcttttttcttttttttcccatcactcagcacttcttattccatgtcaattccagaacttagtcatatgaccacatgtatctgcaaggaaagctaggcacattgctaacctgaataaattatgggattctgatacaaagcaaaaaagggagaacagatcattgggtcaggcaattagcatgctctcctatacatacataagggggaaacaataagctttttattaaaagctgagactaaaaaaatgtcayataaattagctgggcatggtggcacgtgcctataatcccagctacttgggaggccgaggcatgataatcgcttgaacctgggaggcagaggttgcggtgagccaagatcatgccaccgcactccagcctgggcaacaagagtgacagactatcaaaaaataaaaaaattaaaaagtcatgtagacattgggatatagatgattgcttataatcatctgcttatgattttaaaatgctttttatcaaggtaagtcattttccaatgaaatacaaaacttttgaaagaaaaaaattctttgggccaggcatgatggctcacacctgtaattatagcaccttgtcgaggcaggaggaccacttgagctcatgagtccgacaccagcctg

SEQ ID NO: 174193 - DNA, 642 bp, Homo sapiens
ttattttcttttttcttttttttcccatcactcagcacttcttattccatgtcaattccagaacttagtcatatgaccacatgtatctgcaaggaaagctaggcacattgctaacctgaataaattatgggattctgatacaaagcaaaaaagggagaacagatcattgggtcaggcaattagcatgctctcctatacatacataagggggaaacaataagctttttattaaaagctgagactaaaaaaatgtcatataaattagctgggcatggtggcacrtgcctataatcccagctacttgggaggccgaggcatgataatcgcttgaacctgggaggcagaggttgcggtgagccaagatcatgccaccgcactccagcctgggcaacaagagtgacagactatcaaaaaataaaaaaattaaaaagtcatgtagacattgggatatagatgattgcttataatcatctgcttatgattttaaaatgctttttatcaaggtaagtcattttccaatgaaatacaaaacttttgaaagaaaaaaattctttgggccaggcatgatggctcacacctgtaattatagcaccttgtcgaggcaggaggaccacttgagctcatgagtccgacaccagcctg

SEQ ID NO: 174194 - DNA, 427 bp, Homo sapiens
gtgtgaagtggggtaaagttagaatgacaaagtatatgtccttctaaacttcacgagtctttatccctatataaattgccagtgtgattttcaaaaacaccatttctgtgttagagtaatttttcttatggcaacacacacctctgctagtacaaagtgtcttctggcccttctccctttaaaagagttctgccacaacaaacaaagtggaaaaagtktttgacttctggtgagaacacagcacaacatataaatatatacatatgagttttggctaaatataatggataccatttttgtcactgttctggaagtttggtatattggggttttaggataacatgactgtcctccctgtcactggagctactgatttcacttgtttccttgttctatattttcaggagagccacctcttagttggtgg

SEQ ID NO: 174195 - DNA, 426 bp, Homo sapiens
atatgctatttataagcactcttttttttcctctaatggacattgctatgttttctgcttttgtactctatgtttcccccacttcactatcttactctgtcacctttctctaatcttttcacaatcatgttatgttataatagcaccttacaacaaccttgggcccagatttgtgcaccttggttcctcttagctacttttcaagcacacagtgaactgctgcaatcaagaggttttgatttattttttctacctcctttgccatatgtttaatgctagtttgtttgtatcattaatcttgtaattaaartcttccttggctgggcacagtgactcacacctataatcccagcactttcgtaggccgaggtggggagattgcttgagcccaggagtttgagatcagcctgggcaacaaaatgagac

SEQ ID NO: 174196 - DNA, 398 bp, Homo sapiens
gctaacagtcctggaaactggggagcccaaaatcaaagcaatagtagatttggtttctggtgaggagcttttgcccatagataaatgatgccttcttgctgtgtcctcatatggcaaaagagggcaaggcagttctcttcaaattctttcatatgaacacagatttcattcataagggcagagccttcatgactcaatagctttccctaatgccccacctcttactattaccacattgggtattaagttccaacatatgaattttgggagacaccaatattcagagaatagcaacatcccgatctaraactgtaccttgacccccaaagccagactttgaaaaaaatttaaaacatgtaaaatgtttaatgccctactgcttcattgccattgtatga

SEQ ID NO: 174197 - DNA, 553 bp, Homo sapiens
atgccccaattaaaaggcacagagtgccaagtggataaagaagcaagacaactgtatgctgtcttcaagagactcatcacatatgtaattacacatagaagctcaaagtaaggtgatgaagaaaaatctaccaagcaaacaaaaacagaaaagaaaagcaattgttgttactctactctgagggaaaaaaattaaaaaacacaaatgaactttaaaccaacraaagttaaaaaacataggcattgcgtaatggttaaggactcaattcaacaagaagacctagctattctaaatataaatactgccagatgcatactgcaagtccttagagacctatgaagggacttagaaaaccccaaaacagtgggcaatttcaacactccacttatagtattaaaaaaaattattgaggcagaaaactaacaaagatattcagaaccagatcttgacgcctgacaaaatgggcctaatgtaaatctacagaactttccaccaaaaacaacagaatatacattcttctcaccttcatattgtacatgctttaaaatcaacc

SEQ ID NO: 174198 - DNA, 553 bp, Homo sapiens
atgccccaattaaaaggcacagagtgccaagtggataaagaagcaagacaactgtatgctgtcttcaagagactcatcacatatgtaattacacatagaagctcaaagtaaggtgatgaagaaaaatctaccaagcaaacaaaaacagaaaagaaaagcaattgttgttactctactctgagggaaaaaaattaaaaaacacaaatgaactttaaaccaacgaaagttaaaaaacataggcattgcgtaatggttaaggactcaattcaacaagaagacctagctattctaaatataaatactgccagatgcatactgcaagtccttagagacctatgaagggacttagaaaaccccaaaacagtgggcaatttcaacactccacttatagtattaaaaaaaattattgaggcagaaaactaacaaagatattcagaaccagatcttgacrcctgacaaaatgggcctaatgtaaatctacagaactttccaccaaaaacaacagaatatacattcttctcaccttcatattgtacatgctttaaaatcaacc

SEQ ID NO: 174199 - DNA, 433 bp, Homo sapiens
ttttcagtttgttcagcgttttacttattgttagggtgagtgggaacttctaaagcccttacatgctagactgaaaaccatatgattatcagttaaattttaatttcaactaaccagaaaattcttccctccagatttgaatccacaggcacgagtaacaattctctcaaatgattaacacttaataattaccactaactcaggccgggcacggtcgctcacacctgtaatcccagcactttgggaggccaaggagagcggatcacctgaggttgggagtttgagaccagcctggctaacatgrtgaaaccccgtctctactgaaaatacaaaaattagctggatgtggtggcacacacctgtaatcccagctactgagagagctgaggcaggggaatctcctgaacccaggaggtggaggtggtagtgaacc

SEQ ID NO: 174200 - DNA, 424 bp, Homo sapiens
acaattccttgcggtagtaagtttkaagtctccgtttttcttgctagctgttggctagcaacctcacagagcacccttatgcccttgccatgcagtccccttcataactgctttcataatatagcaacttaattcttcaagactggcaggaaaagttctgtgtaggctgctagtctgctctaacataattataggaataactatttcaacattggtgtcttacaacttgaacaaatcaagaaagtgtctatcccatcagaatacaggtttggcccaactcaaaagaggcaattattgaacatgtgtataccagtagcagaaattctgagtgctaagaattccgctcactacataattctttcaatattagaaataatttttaagagagagtttacaactgatactaactggaattttttctcct

SEQ ID NO: 174201 - DNA, 535 bp, Homo sapiens
tttctaataagcaaatgaatgtgaatatacatttatctttgcttttattagttttttgcaaatgataaaatatatttttaaagtgatcatataagatgctatttatacayataagatttatagaaatgttcctaaattatatataaaactttgagagttttcatgaattttttaaattaaaaaaataaagtaatatttacatgccataaggtgccagcaagaaaattatggtagctaatctttgtaattttttacagtggtgggtgatatgatttggatttgtatcctttcccaaatctcatgttgaattgtaattcccagtgttggaggaggggcttggtgggaggtgattggatcataggggtggatttcctccttgctattctcatgatagtgagtgagttcttatgatagctatttgtttgaaagtgtgtagcacctccactttcactctcttcctctcactctggccatgacatgcctccttcctctctaccttctaccatgattgtaagtttcttgagttctccccagc

SEQ ID NO: 174202 - DNA, 524 bp, Homo sapiens
atactgttttaaaatcaagcaagacaatacatttcaagaggttatcagaaaaacattctcactgtatcaggtgagaatgtagacacaaaagttttactattttttgctttgttcaggcacctggcaagtagaaaaattgctacatacatattaaattatattaagttaatgtgtttataattaatatattcaatatatatttcttttgctaacttcttccattgtcctcttcactttttatacatggaaacttctttaaagcatcacaaatgatcagaaaattacaatataatttgcatgtgctattctttttgagattgctacatctcttttagacagaaagtgtccttgagttatcaacattggaaactagcctcaagtttttccttaatattattaaaaatmataaatttatagcgctaccgtgaaaacaccttagctcttcagagtagaagaacagacaagctgcacatcaagggatacctgtcagctattaaactccatggaagtcatcatgaggctca

SEQ ID NO: 174203 - DNA, 524 bp, Homo sapiens
atactgttttaaaatcaagcaagacaatacatttcaagaggttatcagaaaaacattctcactgtatcaggtgagaatgtagacacaaaagttttactattttttgctttgttcaggcacctggcaagtagaaaaattgctacatacatattaaattatattaagttaatgtgtttataattaatatattcaatatatatttcttttgctaacttcttccattgtcctcttcactttttatacatggaaacttctttaaagcatcacaaatgatcagaaaattacaatataatttgcatgtgctattctttttgagattgctacatctcttttagacagaaagtgtccttgagttatcaacattggaaactagcctcaagtttttccttaatattattaaaaatcataaatttatagcgctaccgtgaaaacaccttakctcttcagagtagaagaacagacaagctgcacatcaagggatacctgtcagctattaaactccatggaagtcatcatgaggctca

SEQ ID NO: 174204 - DNA, 579 bp, Homo sapiens
gaaaattacaaagctaatttgaggtaaagaaaaagatttaacttagaatttgatttgggaagcttgtcaaaaatatcaaaggtttaaaacattttatcaaaataggatcacaggtcactgtgaacaatagttactyatttaaccaaattcataattaaaagacttcaaaggcaaatacagaaagttacatagttgtagaaaaccttaactgtttcatagacagcactcaggtttttaaaatagattaaaacccaacgaagacaacacgaagcctagaaaattaacttaataaaacagagcatctttgtttcctagaccaattacccaaaagttaaataaagacctttcacattttcctactaaaagcagaccaatactttataaaagccttattgtttgaatggagagaaccaaattctactttcacatcagtgtacttttattaataaggcttactttttagaaaaaaacaattgttttctaatgttagatgttagccatcttacacacataaaatttctttcatgaaatttctcttccacaagcctacaactttctaatcaattcagttttgcctta

SEQ ID NO: 174205 - DNA, 481 bp, Homo sapiens
tctaatattatttaacttatagaatacaatattaatatctatctcttgtagatataagccagtaaaatgttgctgctattagttataatcaacattgtttgagaataattgaactgcataatgtattatcaattggtaaacgaaaactattggtatttttttaataggcatcttggtttatatgcaatgctacgactaatggacagtaaattggaaaaggtttatatcaaattgtggaagcaactttgagctcatcatataaattgtggtcataacttttcaagaaataaayaatagtggagtcaattaatgtgaattttcttgtgtctcactgacaactccttggttataacatacacttccctggcctttgattgctttactttctcctagcttgtgtgcaatacctgtgtagttctgagtatttatctgatctctttagtagtagattaaaaagtgattcctgttcaaagacatgagt

SEQ ID NO: 174206 - DNA, 368 bp, Homo sapiens
ccaggaagaacaaaaatggcctgagtagctggcataaatacttgggtgaagacagcaagggctaggaagtcatcagcattccaaatgagtcaagacaccagaaactgtcaaataaaaatagatccaggaagtaggtttattcagaagaaagactattggaataagaaaactcctccattctcagaagtcttcaagcctctcaaaatcaaacagaataagaatttcttcttttatagggtaaaggaaggataattagaaataaacagaatatttcagatatttccagagaaagctggacaagcaagagaaaacgacgaggtaygataggattagaatttcactgtgtcaagctgattttcagagaaaaa

SEQ ID NO: 174207 - DNA, 693 bp, Homo sapiens
taataccatcgactttctcaatcagggtactggcagaaaaggtgaaccacacaattcacaattcgtatttatgtgttattttaaggaagggctacttatagagatgyaggaaaatttggaggtaacatataacaatgtgtatgttgacatacagagacttgtaacatttataactgttactatccctagacataaattaccaaagagaatgaaagcatggaattatgaaaacatcagccactcactgaaagtgcaacagggataatgagagaggaaaaaagaaaaagctttgttttctccctccatcctccagattcctttctctgtccacttctgtatgattcttaaaagaagccagagtacaagggatactgaaagatgtagccacaggcacaagcctcctggagcataaagcagggcacgggagggcagaaaattgatctgggtagttggtagtagagaataccagcataatggaaaaactcttcatgtctaacttgtcattttttgcctgacatattattatgaaacattttcaaacacaaaagagtttggaagtattgtggtgtgaacaccatcatgcccaacatctagatcctacaataaacattttgagatttgcaatttctcacatatccacacatccattcatattattattatttacatctcaaagaatattgcaaatgtcag

SEQ ID NO: 174208 - DNA, 612 bp, Homo sapiens
atctactttagtgaagaaatatctgttctytagaatgaaaacaagcagcttggtgcttgcagtccagagaagaagggcatgtagagaaaaggaacctgtctaaatacttgaggtatttttttgctgttctgtgtgaccctctgtgaccttcccttctccctcctcttacggccccaaactcagctatttgactaaatgtttcacttctcaacaagttatgctggtgttacgtagagacagacttaattaaagtttgcatgtggtgagtgagaaagagaagggcatttaaactgagtcaggacctgttagaaaaaacaaaacaaaacaaaacaaaaaaaaacagctgtgacagaatgacacaaggaaaagaaggaggtgcaaaaagccatttggttcgagctctgttaattcaggccagggaagaggtaatgcagaggcccgagggggtgagttaaggacagggtttctgccttaactctcaacatgcttggttttattagtttaggccaggcggctgctaacattattttagtatctattttgtgagtgattatgttgtatgcatgggcaggaggtcaggcgggtcgggcctttctgctccagaccatctct

SEQ ID NO: 174209 - DNA, 443 bp, Homo sapiens
tgctgaaacttgccacctgtaaaagcagacaacctaatgggaaaaagagcagcacttaaaatgctgttttttctccactgctctctagtgtaaagaacgttgtaaaaatatttcaaactggattttttgttttgattgcgttaactctttgttggaccrtcgtcacacttttcccacaaaatttactttcggtaaccagagatgttttggagaaactgaatattatgtctgcaaacagagggaagcagtcagagaaacccaaagggaggcttgctaatgttctgatcacttaaactcgtctgtcctatcatacacaatgaccacagctttggaaagctaacaaaccagtttcttttttaggaactctctttcatttgtgtttgaacgaaacgtccatgaaacatggaccagctccaaccacaatgtttttgagagccaacacc

SEQ ID NO: 174210 - DNA, 494 bp, Homo sapiens
aataagtcccttacatgactgaaaaaggcaaccgaagaccttactattctccctgaatcctctaaggttagctctttcctactttctcttttataccagttgcacaacacttctcccataaacagcatgaatggcctggttaccttcgttccacgcagaagtggctcctccttatgtgttgtggaaacttctcccttgctctccagtgttctgtattagcaagcgctctccataacaacaacttytacttcacaaccaagatataagactgttttcttcttcaaagggatcaaatcccctttcttagtgcaatttcaaatttatcaggacatgattttaacctacagggttgctgtttcaccaatccaaatatctggcaaaactgagcaaacttaatgttgtttagttttacatgtacattatataccacatgtttgtgtagcctgggataagaagtgaagagtatgttttcaaaaacaccctaaaattttaat

SEQ ID NO: 174211 - DNA, 587 bp, Homo sapiens
tacccacatgggactaaaggataggagttggggatggatggcaaggaaaacatattcatcataaaccaaccttatgtacaaggcaacgaaatttggttgataattttagaaataaaaaaatttccttcttagggggacataaaacttcattggaaaaaataggacctgtttcaggtaacagcataaataattcccacaaagataatgttgaacagaaarggatacaaagaatatatacaaaattctaatcatatcaggttcaaatctaatctctggtgttagaggtcaggatagtgattaaagggtgtattgactgcaagaggacatgagagagcctgaagggagaatggaaatgtcttttgtcttgacctggtgttaattccgcaggtatgtgcatatgtgaaaattcctcaagctgtacatgtaagatttgtgcacttcaatgtatgtaaattatgctttaacaaaaaaatcaaattaatacagcagttcctgcttatccacagttttgctttctatagtttcagctacctgaggtcaactctggtctgaaaatattaaatggaaaattccagaaataaacaatt

SEQ ID NO: 174212 - DNA, 587 bp, Homo sapiens
tacccacatgggactaaaggataggagttggggatggatggcaaggaaaacatattcatcataaaccaaccttatgtacaaggcaacgaaatttggttgataattttagaaataaaaaaatttccttcttagggggacataaaacttcattggaaaaaataggacctgtttcaggtaacagcataaataattcccacaaagataatgttgaacagaaagggatacaaagaatatatacaaaattctaatcatatcaggttcaaatctaatctctggtgttagaggtcaggatagtgattaaagggtgtattgactgcaagaggacatgagagagcytgaagggagaatggaaatgtcttttgtcttgacctggtgttaattccgcaggtatgtgcatatgtgaaaattcctcaagctgtacatgtaagatttgtgcacttcaatgtatgtaaattatgctttaacaaaaaaatcaaattaatacagcagttcctgcttatccacagttttgctttctatagtttcagctacctgaggtcaactctggtctgaaaatattaaatggaaaattccagaaataaacaatt

SEQ ID NO: 174213 - DNA, 587 bp, Homo sapiens
tacccacatgggactaaaggataggagttggggatggatggcaaggaaaacatattcatcataaaccaaccttatgtacaaggcaacgaaatttggttgataattttagaaataaaaaaatttccttcttagggggacataaaacttcattggaaaaaataggacctgtttcaggtaacagcataaataattcccacaaagataatgttgaacagaaagggatacaaagaatatatacaaaattctaatcatatcaggttcaaatctaatctctggtgttagaggtcaggatagtgattaaagggtgtattgactgcaagaggacatgagagagcctgmagggagaatggaaatgtcttttgtcttgacctggtgttaattccgcaggtatgtgcatatgtgaaaattcctcaagctgtacatgtaagatttgtgcacttcaatgtatgtaaattatgctttaacaaaaaaatcaaattaatacagcagttcctgcttatccacagttttgctttctatagtttcagctacctgaggtcaactctggtctgaaaatattaaatggaaaattccagaaataaacaatt

SEQ ID NO: 174214 - DNA, 249 bp, Homo sapiens
aacctgtttcccttaaataccttcaaagttggaggcctcactacctcctgagacagctgttattagttagagtcctttgaactgaaaacracaaaaacaaacaaacaaaaaaagcacaaaccaacctgactctagtttaattaagagagaccaccctttggaatgatactaaggtatttcatactcttcaagaaagagctgagtgactgacagggttgtgggagaataagaggatcgtgagattcagga

SEQ ID NO: 174215 - DNA, 546 bp, Homo sapiens
ataaagatgggggcattctctccagtttcaaccgaaagtagcacatgggtctggaaccctgagcatgctgagagtggaggtgctgtgttcagcctatgagagactgctctgggagcaccaagagagaatatctccgacaggagactggcttccaagagcagtggcagcaggcagtgtgttgcagaaacataaaaaccctcttaagaaactggcatacaggcattcctccctaaagcaagtcacatggccattgcaacgtcaggaggagaggaaatacactctacctctttagcagcactgggacatgtagtcatatggcaaaaggcatggatttaggaaasggtaaaggattgagatcattattgcaatctatcacacctgcattttctcatattttggacaataatcccataacacttatgtatttatgcccattaaaataggtgatatgttagattgttacactaatggttcccaaaaaaccatgttgcccagtgtttgggcctgtattggtttcctaaggctgttgtaactaagtaccacaaa

SEQ ID NO: 174216 - DNA, 546 bp, Homo sapiens
ataaagatgggggcattctctccagtttcaaccgaaagtagcacatgggtctggaaccctgagcatgctgagagtggaggtgctgtgttcagcctatgagagactgctctgggagcaccaagagagaatatctccgacaggagactggcttccaagagcagtggcagcaggcagtgtgttgcagaaacataaaaaccctcttaagaaactggcatacaggcattcctccctaaagcaagtcacatggccattgcaacgtcaggaggagaggaaatacactctacctctttagcagcactgggacatgtagtcatatggcaaaaggcatggatttaggaaagggtaaaggattgagatcattattgcaatctatcacacctgcattttctcatattttggacaataatcccataacacttatgtatttatgcccattaaaataggtgatatgttagattgttacactaatggttcccaaaraaccatgttgcccagtgtttgggcctgtattggtttcctaaggctgttgtaactaagtaccacaaa

SEQ ID NO: 174217 - DNA, 567 bp, Homo sapiens
caatatcatttacattagcaccctacaaaatgaaatacttaggtataaatctaacaaaatatattaagatatatatgaaaaaacctacataactccaatgaacaaaattaaagaactaagcaaatgaaaagatattccatgttcatggacaggaagactcaatattgtcaagatgtgaggccttcccaatttgatctgcagatccaatgcaatcccaatcaaaatccaaggaagttattttgtgaatatttacaaactgattctaaagtttatatgaagaggtaaaagacctagaataaacaacacaatattgaaagggaagaacaaaatttagaggaccaacactagctgatattaagacttaccataaagttacactaatcaagacttaccataaagctacactaatcaaggcagcatggtattggcaaaagaacagacaaataaatcaatggaacagaawagagatcccaaaaatagactcacataattagccaactggtctttgacaaaagagcaaaagcaatacaatgaagccaagagtcttttcacaaatgatgttggaac

SEQ ID NO: 174218 - DNA, 351 bp, Homo sapiens
agacaaataaaatgcgcgtaacacgatcatggaattaaacccaatcatattaataattaatttaaaaaacatacamtaatgataaaacggtctattcaacaaatggacataataatcctaagtatgtaatgcctaaaacaaagctttgatatatactatgccaaaacagaactaaatagacaaatccatgattatcactggaagttttaacacttctttcccaataattgataaaacaacatagaaaaaatttagtgatgatatacaagatatgcattacactatcaagcaactttatctattttatgtgtatagaatatttcatccactaataatataatacatatactc

SEQ ID NO: 174219 - DNA, 351 bp, Homo sapiens
agacaaataaaatgcgcgtaacacgatcatggaattaaacccaatcatattaataattaatttaaaaaacatacactaatgataaaacggtctattcaacaaatggacataataatcctaagtatgtaatgcctaaaacaaagctttgatatatactawgccaaaacagaactaaatagacaaatccatgattatcactggaagttttaacacttctttcccaataattgataaaacaacatagaaaaaatttagtgatgatatacaagatatgcattacactatcaagcaactttatctattttatgtgtatagaatatttcatccactaataatataatacatatactc

SEQ ID NO: 174220 - DNA, 400 bp, Homo sapiens
ggcaccagtaatctcctccttcatctccctctcactgagcatcttctatgcaatttataayctccaaaggattggactagtcggggaaatctggccacatggaatttgagtagttataaaacaatcatattgaaatttctcattcaaaggggtactaatttcacccctcggttcagttgaaactttcagctcttgcacttctgagccagctggtcatttaacacacattccacacacagacaatgttcccataccagaaacctcactaaataactatgacaataagctcaagaatgttatggcaaaggcacaaatggagcaggaggatttcaggagttcttccagggagaaccacaatacgatccctggtatttcatggtgcagaataactggaaaagta

SEQ ID NO: 174221 - DNA, 598 bp, Homo sapiens
actgtagtttcaaccttcatcactgagtttacaaccaaacatgttctcatttctctcattcagtggacattttcagaacacagaaccatacacatgtgcctattaaattgtgccacatttatctcatcatgttagtttttttatgatacttacaaaattcatgcaaagttaagatgtttccttggcttctattcattacacttgtgatcagcgtgccattaatttagtgggatatggttgaggaaaagaccctactgcatkccatgagaagcatccctgaagggaaatagcaaaagcagtcattaaacaagttaataaatccatctaaccattcacatttcttgttttgtctcgaaggacgccttgagacactgttgagaagctcactaaaatccagaggcactatgctgtttgtttccttgatctgttgctctagaaaccctatgacaaaatgaagtgaggcttttccaaaaaggcttaccctaacaaaactcattctacttcttttaattatgtcttataaaaccttgcctcatactggcatgaaactcactgatgtatgctttgtacaatcaatattttttttatcactttgaaa

SEQ ID NO: 174222 - DNA, 593 bp, Homo sapiens
aagtgaggcttttccaaaaaggcttaccctaacaaaactcattctacttcttttaattatgtcttataaaaccttgcctcatactggcatgaaactcactgatgtatgctttgtacaatcaatattttttttatcactttgaaatatttgaattctccccgttagtgatgccacagagataactgatagaagttagctgattgccttgtagtctccaggatgcaattctcwttagggtccctgaactcaattagaacacttagttttgttcttacaagctccaggcttgcactgagcttcagtttcactgtctttatccaatatctgtctcatcctttccagttgaaagacgaattgttttggtagagaagatggatacctcataatttttactacctttctgtcatctatacaattccagttctatcctttctttattattcttgtcctcaacactaaaaaattatttcagagttctttttacatttgcaagtttcagcttattcccagcatgaatcttctggacaccattcttgctgcattcttttgttgatccttgggtatgtgtctttatttctatcttttgtacattc

SEQ ID NO: 174223 - DNA, 612 bp, Homo sapiens
agaaatagaaggtattgagtttctgctggggaagaatgaagtaggaagccaataaactgtaatgagttttctctaccaacaccaacctatatcccctgaacagtggttttcaaaccttgctgcccatcacctggtcaggatataaaaattactgttccttaggctgctctggagatcaactaaatctggwtctctgggactggctcctgatatatgtatttttaaagctcgctaggtgtattggttttgtagggctgccataacaaagtaccactgactgggtggcttaaacaacaaaaatttattgctttacagttccagaggctagaagtccaagatcaaggtgttggcagggttggtaccctctgaaagctgtgagagagaatgtattccatgcctctctcctagcttctggtagcctcaggcattgtcctggatacagatgatattctccccctgtcttcccatggtcttccctctatgcatgtttccgtgtccaaatttctcctttttgtaaggataccagtcatgttggattgaccatcttaatgaccttgtcttaacttgatcgtctacaaagaccctattttcaaagacggtcaaaatcacagg

SEQ ID NO: 174224 - DNA, 553 bp, Homo sapiens
agaagtagggaaactataagaatcaaaggatatgctagaaatctgaagatgagtgacaaataaagaatgcctttgacaggctcatcagtacactcaatacagatgttagaagaatcagtgaacctgaagataaatcaatagaaatcacccaaactgaaatatgaagagaaaacaaacaaacaaacacagaacagaatatccaaagctatggggcaatatgaaatggtatagcatatgtatgattgaggtaccagagattaaggaggaacagaaactaataacggcagaaaattttccaaaattactgagaaataacaaacaatggattaaaaatcttagagaacaccaagcagaataaataccaaacacacacacacacacacacacacacacacacacacacacacacacagagtcatataatattccagctgcagaaaatcaaagacaaacagaaaatcttgagggcaacctgargggtatagaaaacttcttatttacagaggaatgaggttaagaattataaaaattaaaatgtgatctaaggtaaaag

SEQ ID NO: 174225 - DNA, 287 bp, Homo sapiens
aggccttacattgctagaagattaatacaacaggatagaaatcaatacattctaatggtaaggattcctattgggtttgatgaggctagaagaaggtcagagactttattaaaacmaattagaatgtgcagttctgggctagatgtaccagcaaagcagtgaatcaaataaaatctgctgtgaagtctgctcatctactgaccctaaaataaactggtccaagagagaaaacatagccatcttgaaatgctgactagggcacacaatatggattgaattcataatat

SEQ ID NO: 174226 - DNA, 597 bp, Homo sapiens
acaggtaacaaataaaccacctactgattgatatcttctccactttcytcccatgatgctctttcaaagattttggctaacgaaggctctgcagaatcatgaagcaaatgagaaagatgatagagctaccttggcggtgaagcagatatattgagaaggtaaggaatttactgtatagaaaaaagagtagttcatccaaaggcagacaggagaaaagaacaagaagctgggaaagaaagggtatgtgaggggtgataatacatcactttgaatgacataaatgttatgtcagcattgtagaatagttttaataataatcatttcccttagtgatatcatcacaacattttggcaaaaaagtcataactccatctcatcaatgagcattttcagtatcaaagaggttaagaaacttgctcaagtatatagatagctaacaagggacagcttagattcaatcacagcctaaccccaaagtctgtagacttaacaacttgttatgctgtcaacataaacacatgttcccaagctttctaacctccaaccactagattctcacatatgcacacagagttcaatgataatgatgtatctttc

SEQ ID NO: 174227 - DNA, 363 bp, Homo sapiens
gctcctagaattgataaatgactttastgaagtttcaggatacaaagtcaatgtacgaaaatcagtagcatttctatacatcaacaacatccaggttgagtgtgaaatcaagaacataataccacttacagtagccacaaagaaaatgaaatacctaggaatataagtgaaatacctaggaatataggtgaaagatctctacaaggagaactacaaaacactgctgaaagaaatcaaagatgatacaaataaatggaaaaaatattccatgcccattgataggaagaatcaatattataaaaattgccatgctgtccaaagcaacttacagattcaatgctattaatatcaaactaccaacat

SEQ ID NO: 174228 - DNA, 363 bp, Homo sapiens
gctcctagaattgataaatgactttactgaagtttcaggatacaaagtcaatgtacraaaatcagtagcatttctatacatcaacaacatccaggttgagtgtgaaatcaagaacataataccacttacagtagccacaaagaaaatgaaatacctaggaatataagtgaaatacctaggaatataggtgaaagatctctacaaggagaactacaaaacactgctgaaagaaatcaaagatgatacaaataaatggaaaaaatattccatgcccattgataggaagaatcaatattataaaaattgccatgctgtccaaagcaacttacagattcaatgctattaatatcaaactaccaacat

SEQ ID NO: 174229 - DNA, 613 bp, Homo sapiens
actataaagccacagtaatcagaacagcttggcactggtacaaaaagagacacatagaccaatggaacaaaatagaaaactcacacctacaaccatctaatctttgacaaagccaacaaaaacaagcaatggagaaaggactcactatttaatacatggtgctaggataactggctagccatatrcagaagattgaagctggacccctgcctttcaccatattaaaaaaaatcaactcaaaatggattaaagacttaaatgtaagacctcaaaccataaaaatcctggaaaacaacctaggaaatactctgttcagcatcggttttggcaaagaatttttggctaaatccccaaaagcaattgcaaacaaaaacaaaaatagacaagtgggacctaattaaactgaagagcttctactatgttgatagcaaaagaaactatcaccagagcaaacagacaacctacagaacgggaaaaatatattcgcaaactgtgcatctgttaaaggcttaatatccagaatctgtagggaacttaaacaaagtaacaagcaaagaacaaataaccccatttaaaaatgggacatgaacagatacttctcaaaagaagatat

SEQ ID NO: 174230 - DNA, 313 bp, Homo sapiens
ggagggggaagtactctattatactactgaggaaacatctgtggctcatacaaattggtttagaagactgagtagtggtagagtcccttaggaacagattgatctcacaagcratatatttattttaaaaagaaaatgtttactaaagtttccaacttctgccactttacaaggcatagccctaaaggtggcaggtacaagtggaacagacacaaatagaacaactcacataacttcaaatgggaggataagcaaaactccaaaagaacaaggtgtgctgtggtttggctgcctttcctaagagattattccc

SEQ ID NO: 174231 - DNA, 659 bp, Homo sapiens
atatctttaaaatgctgaaagcaaaaagaaactgtcaccttaaaaatttatagccagtaaaaatatctttcagaaatcaaaataaattaatgacagctttagattaaaggaagctgagaaaattcatttccagttctgtagatagaagggaataatacctggtagaaattttggatctatgggaggaaatgaaaagcactaaaaatagcatatatgcaaatataaaagacctgttatttctcacgtggtatttttagaaagatgattggttaaggcaaaaataatgacagtgtactgttgaggttatagaacagtaatagcacgaaggatggaagggtgttaaattatattgttttaagggtcttacattataaatacagkgacttaatattaatttaatgtagacttcatattaaggattcatgttttaatctctatctacagcaatcacacacatacacacacacaaatattcagagttatccttaaaaagaaagtaaaggaagttaaatgatactaaaatatatttgattaattgaaaagaagacaagaaagaaagaaccaagaaataacaggaaagacaaataaaatgcaagtaacaagatcatggaattaaacccaatcatattaataattaatttaaaaaacatacaataatg

SEQ ID NO: 174232 - DNA, 659 bp, Homo sapiens
atatctttaaaatgctgaaagcaaaaagaaactgtcaccttaaaaatttatagccagtaaaaatatctttcagaaatcaaaataaattaatgacagctttagattaaaggaagctgagaaaattcatttccagttctgtagatagaagggaataatacctggtagaaattttggatctatgggaggaaatgaaaagcactaaaaatagcatatatgcaaatataaaagacctgttatttctcacgtggtatttttagaaagatgattggttaaggcaaaaataatgacagtgtactgttgaggttatagaacagtaatagcacgaaggatggaagggtgttaaattatattgttttaagggtcttacattataaatacagggacttaatattaatttaatgtagacttcatattaaggattcatgttttaatctctatctacagcaatcacacacatacacacacacaaatattcagagttatccttaaaaagaaagtaarggaagttaaatgatactaaaatatatttgattaattgaaaagaagacaagaaagaaagaaccaagaaataacaggaaagacaaataaaatgcaagtaacaagatcatggaattaaacccaatcatattaataattaatttaaaaaacatacaataatg

SEQ ID NO: 174233 - DNA, 600 bp, Homo sapiens
taaaagaaaaactgatagattggacttacttaaaattaaaaactcttatttacaggagacttgttaataaaatgaaaaggcaggtacacaaactgggagaaagtatttgtaatgcatgtaactgacaatgtatgtgaatccagaaaatgtaaagaatgtttaccacttctaaaaaacatgaaggaattttgagtgcatattaccamgtgaaagaatccagtctgaaatgactacaaactctatgatttcaactatctgacatcctagcaaaggcaaaactagagagacagtgaaaaggtcaatggtcgccaggcatttagggcgaaggggaaagggatggactgggatggactggtagggcacaaggcatttttagggcggtgtgaaattcttcttcctgatactggaatggtggctacatgacatggtacatttgttaaaatccatagaactgtacacacagagagtgaaccctaatgtaaactatgcaccttaatgaataacaatgtatcaatattggttcatgaattataacagatgtaccacaataatgcaagatgttaatattagaagaaactgtgtactgtggaaaagagggta

SEQ ID NO: 174234 - DNA, 600 bp, Homo sapiens
taaaagaaaaactgatagattggacttacttaaaattaaaaactcttatttacaggagacttgttaataaaatgaaaaggcaggtacacaaactgggagaaagtatttgtaatgcatgtaactgacaatgtatgtgaatccagaaaatgtaaagaatgtttaccacttctaaaaaacatgaaggaattttgagtgcatattaccaagtgaaagaatccagtctgaaatgactacaaactctatgatttcaactatctgacatcctagcaaaggcaaaactagagagacagtgaaaaggtcaatggtcgccaggcatttagggcgaaggggaaagggatggactgggatggactggtagggcacaaggcatttttagggcggtgtgaaattcttcttcctgatactggaatggtggctacatgacatggtacatttgttaaaatccatagaactgtacacacagasagtgaaccctaatgtaaactatgcaccttaatgaataacaatgtatcaatattggttcatgaattataacagatgtaccacaataatgcaagatgttaatattagaagaaactgtgtactgtggaaaagagggta

SEQ ID NO: 174235 - DNA, 582 bp, Homo sapiens
aagcttgtagattccccaatgttccccttggaatggaaagctgccaatgacatcatgtgcacagagtgaaggtcctgccaggctcaaggaccttgcacataggtattcttcagggatctcatgagtaaggaggatattttaaaaaataatgaatatgtcatggatactgtccaatcacagcacatgctggccatggcctgggatagggttgtggaagccccttgtgttctgggcttttagctcttggtgggagagctcatagaagggatcaaggtggcagggccagtggctaatcaccatccagtaggcaagtggttcaatatttatgaaactgttctagctatacaggtacatgtaggtttaaagtacatatacagttcttttcctgatacctcccaactgtggtaaattgggtatcaacctatctatatccaagatgtgaataacctgtactttcctgtgtgtccactcatataatakatgcacattgaaggtgaatatctcatgtgtaatatcctttggcagtatcacgcacagcttgtctaagtctgttcttgcactgccttccccttatccagtgcc

SEQ ID NO: 174236 - DNA, 517 bp, Homo sapiens
aatatagatcttgtccaggtcagttcttttagaagacctctggagggcaatgtctcatttaaattataactgaaggcactctaaggttttattggcagtgtaccttagcaagtgaatcctattgaattaaagcgccagataagtacccactgcgtatataacttggcttttagcagactgaaaaaaaaaawatatacctaaccagcaaagtcagaatgaaatgcttcctttgagcctacattgaacccctttgatggtttacacaccttcaacaaattctcaaagtcattggtttaaccactcttggacgcacccggctgagttggatgaaaacttcagttttgtgttcttttcacttgaaagctgtatgtctattctcagcatcatgcatgttatttttttttttccattcttaacagtattcctcatttacaaaacaacaaacgataataatcagaaatagtcctataaaaatgttaattttgtttagccattgactgatctttctctaacctta

SEQ ID NO: 174237 - DNA, 592 bp, Homo sapiens
tcctggtctcttgcaatcctgctggctcagcctgcttcttcattgtaatatagtatgtgactsttaagtaaaaagctaagtcctccctcatcccctttctctttccatcccaaggaatatttcttaaataatagctatattttataggtggataaagtcaaattttattataccacgaaatgaaaacataaaacaacttgatttctagaatcaagtggtagatttttctttacaatcctaccatatcaatattacttttaacctggttgctaaccgagaaatcaataggagatcctgacattataattacaggggatctaattttcattcattcattaattcacttcacaaatatttcaggaaatcctttttaatgtcagacatcgtgctcagtactggagattcaaacatgaaaatacaaggaatttatacactagtggagagggcaaacatgtaagcaatcaatcaaccattatgatgcgaatatcaataagttaccatgggaacataagagtgttatgttgaattttcctaagtaataaaatgtggcttctcagaagaggagcacttgagtacttcagcaagacataaa

SEQ ID NO: 174238 - DNA, 573 bp, Homo sapiens
tctgggcaaaggaggcaaaaacaaaaacaaagcaaaagaaaaaccccaayttctccaattgcctgctcttgtttgcttccctgcttccacagagactagaagaagattacaacacacaccaaaactcataaagcccataagcctcctggtgatagcaacaccaagtattttacgtccaggtaatgagatgggtaagatgtaaccttggaaaaaacagagccagagatcaatgaaggggaaaattctatacaaagacattttctttttaaaatcctttttcagatactgtcttctgtcttttgcctcctcagtgttatgtctctctgcctttcaattcacacagtggtggtagttttaaaatcagggattgcagagattgaacattcctttttaatgatgcccttagagtcacacaggggcctctttgctatttccagctaagctcacccctcctcttttcctggaacttctgaaagggccccagaatcagcctatgtgatctgctgcagcattagattgagaggagggtttgctttttccacagatactgattaatgcaggaccaaagaattc

SEQ ID NO: 174239 - DNA, 577 bp, Homo sapiens
gaattcttttctcacacaactctgtttagagtctgggcaaaggaggcaaaaacaaaaacaaagcaaaagaaaaaccccaatttctccaattgcctgcycttgtttgcttccctgcttccacagagactagaagaagattacaacacacaccaaaactcataaagcccataagcctcctggtgatagcaacaccaagtattttacgtccaggtaatgagatgggtaagatgtaaccttggaaaaaacagagccagagatcaatgaaggggaaaattctatacaaagacattttctttttaaaatcctttttcagatactgtcttctgtcttttgcctcctcagtgttatgtctctctgcctttcaattcacacagtggtggtagttttaaaatcagggattgcagagattgaacattcctttttaatgatgcccttagagtcacacaggggcctctttgctatttccagctaagctcacccctcctcttttcctggaacttctgaaagggccccagaatcagcctatgtgatctgctgcagcattagattgagaggagggtttgctttttccacagat

SEQ ID NO: 174240 - DNA, 577 bp, Homo sapiens
aattcttttctcacacaactctgtttagagtctgggcaaaggaggcaaaaacaaaaacaaagcaaaagaaaaaccccaatttctccaattgcctgctcttgtttgcttccctgcttccacagagactagaagaagattacaacacacaccaaaactcataaagcccataagcctcctggtgatagcaacaccaagtattttacgtccaggtaatgagatgggtaagatgtaaccttggaaaaaacagagccagagatcaatgaaggggaaaattctatacaaagacattttctttttaaaatcctttttcagatactrtcttctgtcttttgcctcctcagtgttatgtctctctgcctttcaattcacacagtggtggtagttttaaaatcagggattgcagagattgaacattcctttttaatgatgcccttagagtcacacaggggcctctttgctatttccagctaagctcacccctcctcttttcctggaacttctgaaagggccccagaatcagcctatgtgatctgctgcagcattagattgagaggagggtttgctttttccacagata

SEQ ID NO: 174241 - DNA, 372 bp, Homo sapiens
tttaggaaggactaatatctcatatctaactgaagtaaaccacagtcataaaccacagtacccgaagttcagtgagttttcaaaaatacatcacccaccaaagattaatctccaagatcaacaagcactatttgcaacatatgagagtgagtccgctgacaaatggctcggagaaaggaagcatttgaaggtgaagatcactgacaagtgaggctccatggggattaaaatatgaagaccattttgattcactattttttgtatttccaatgctggaatggaagcaaccagtaaaaatgatgaaggttgcaaawgtgaataaacaaaacacatcacataccgggaggatgggacaaattaagggaacagaac

SEQ ID NO: 174242 - DNA, 438 bp, Homo sapiens
gcatcagacaaatatggattcaaatttgtgaaaccttaagctaattacttaaactctctaggtttggtttcctcattattaaaatgagaataacatctaactcaaaatagttgtggtggaaattaatgagatgatgcagtaaagcagtaagcacagtgtctgacacagtcaaagctaaatggcagctactatgacatctcattctgattttargtgtgagccctgacaaattgccacccaagaactaatctaacgtaataccttgaaatactcttctcttctctccttcatttcagctgttcctttgcagtctacatatattcttcaggagccacctagagtttttctgttgaagaattttccaaatttcaggatcaatttgagttgtccattccctttgctccaaactctattgatccttctattacagccttgatg

SEQ ID NO: 174243 - DNA, 471 bp, Homo sapiens
ttgtacccagacaccaatataagagctttatatgaattatttcaagctaattctcaaagaactctgagtgctgatgtaacacacccttctctgcctgagattttaaccactagagaaataaaaagagtaataaacaaggacccttattactgataaaggctatgttagtggatgtagcttaggatcataaacagtctttctaatttactatctagaccttggaaaaacctatcrgaaggaaagtttgaatctgcagagcaaacactgttagccaggttattgcctcccctggaacggagagaaggagaaagagagaaaatttcctgtgtttagacctttgggagatgagctccactggtgaagaattgtggaatgatagctgtggctactgactgggtgtcactggccaggtatttcacaccatctccatggggaggaggagaagggaggccaggaatgactagagaaatc

SEQ ID NO: 174244 - DNA, 599 bp, Homo sapiens
aatcctttcctgctcaaaggttataagaaaatgttccctcttatagaacttttatggttgcagtgtttatatttaaaatacttattattttatctttgtataatctattttgagtaatgtatgtgatgtaaatccactgttttttgtttgtttttagagatgggtacctctgacttccctggccatttacttaatttttccctacaaaactgagatatcctctttggcaaaaactaaattcctctatagatttgtatttatttctttgctttctaytgtggtgcagtaacctattcaagtgccagtatgacactgttttaattcttgatcctataatataaactttattataataatgtttttttcttctgtaatacatccttattacttttctttttcagagtttttctgtctattcttgcttgtttatttcactgcataaactttggaatcaccttgtctggttccagaaaaaaaaatgtgtcgatagttttattgggattatgttgtatttataaattaatctagcagaaactggcatttttatgatgttggagtcttcccctccaagaacatggtattacttgtcatttgttcaa

SEQ ID NO: 174245 - DNA, 599 bp, Homo sapiens
aatcctttcctgctcaaaggttataagaaaatgttccctcttatagaacttttatggttgcagtgtttatatttaaaatacttattattttatctttgtataatctattttgagtaatgtatgtgatgtaaatccactgttttttgtttgtttttagagatgggtacctctgacttccctggccatttacttaatttttccctacaaaactgagatatcctctttggcaaaaactaaattcctctatagatttgtatttatttctttgctttctactgtggtgcagtaayctattcaagtgccagtatgacactgttttaattcttgatcctataatataaactttattataataatgtttttttcttctgtaatacatccttattacttttctttttcagagtttttctgtctattcttgcttgtttatttcactgcataaactttggaatcaccttgtctggttccagaaaaaaaaatgtgtcgatagttttattgggattatgttgtatttataaattaatctagcagaaactggcatttttatgatgttggagtcttcccctccaagaacatggtattacttgtcatttgttcaa

SEQ ID NO: 174246 - DNA, 579 bp, Homo sapiens
tggccatggacatttgtaaggtagctgtgaagtgcaaaaagcaagagccaaagggctggatgaccatgctgcagatgggtgctcaggaggcacctatcttatcctcacataagggtcactgtttttcacagaatcatcaaacgttaattctggaaaagaccttmgtctaattcacttgttttagagatgcataaactgatgtctgtcaaaccaaagggacttgtccaaggtcacacagccctttattgtcagaggctaggcagtggaactactaaattttgttactctttcactagttttcccttagaatacgtggagacccaatattacttaataaatgcctttgcataacaatatcaagttgagataaatcatcttgtatagccacacaaaacaaactcctaattacaaaaaatgtcatgccccctaaaaaatagaaaatacatttattttgttaatagaggcataatataattatgtgagattgaagcaataagataatttaaaatatttgaacacatagaaaaggtcaaactgttcagtaaaataacaaacatacaatcaaaagaaatatcataa

SEQ ID NO: 174247 - DNA, 579 bp, Homo sapiens
tggccatggacatttgtaaggtagctgtgaagtgcaaaaagcaagagccaaagggctggatgaccatgctgcagatgggtgctcaggaggcacctatcttatcctcacataagggtcactgtttttcacagaatcatcaaacgttaattctggaaaagaccttagtctaattcacttgttttagagatgcataaactgatgtctgtcaaaccaaagggacttgtccaaggtcacacagccctttattgtcagaggctaggcagtggaactactamattttgttactctttcactagttttcccttagaatacgtggagacccaatattacttaataaatgcctttgcataacaatatcaagttgagataaatcatcttgtatagccacacaaaacaaactcctaattacaaaaaatgtcatgccccctaaaaaatagaaaatacatttattttgttaatagaggcataatataattatgtgagattgaagcaataagataatttaaaatatttgaacacatagaaaaggtcaaactgttcagtaaaataacaaacatacaatcaaaagaaatatcataa

SEQ ID NO: 174248 - DNA, 518 bp, Homo sapiens
tctcttttatttttagttgacatgtaataatcatacatatttatggaatacagagtgatattttgttacctacatatctgcaaattttcagccaaccacgttctatgggtttcaaaggaaatgtacaaagaatactggacagacaaatgaacattttctatggtagctcatattaacctggtgactcacgtagttcagtctcaaaacattgtgtccggaaataaatttaaagccaagagtaaatgaaaaagggattctggtctttgtgctgcaatgaacattaaaggggatccacaggaacacttgctggagcccctttcctctcccatccatttttcttatacctacagctgctacagggcctcccctcyagccactcttctccttgccttcattcctgcttctcccctggagtgtacctcgttaagtaggtcaacttagccttgctcccaaagagaaagaagcctccctctttaagagtagacaggaggctttggacattcaactgacaagtaaaa

SEQ ID NO: 174249 - DNA, 508 bp, Homo sapiens
gaattctctcttgcttcagagaggcttctctttttgttctatttaagcctccaatggattggatggagcccacccaaattatggaaggcaatctgctggctcaaagttcactatcttaaatgttaatctcatccaaaaacacccttccagttgacagataaaactggccatcatacctttggcagttccagacaaaaagagcatcccagagggaagtaagtgtcagccagagatggctgtggtgtctagctggctttggcaggcatccagggtggagtgggagagtgaggcatggagacagaacaatgtgtgcaagtacacacatgctcaaggccactgtagtactgtggacatccttagcttcaaccttgcaggcagacctggaaastagtcattgagtagcccaaacaccacagcttcttcccgattaagaaaatgaggctgcatttggctactgctttgttttgggttcctgaggagtttgtgaggatattagacgtagatctca

SEQ ID NO: 174250 - DNA, 381 bp, Homo sapiens
cttcttgtttctgtaagtttcatcccaacttaatggttctcacctgggtagcaacagtwagttccagttggcaggttttataaattatcctttcagagataaaagctttaatcggtgcccactcctcagaggtatgaatcccagcaaggtctcccctctaagctccagagccaccaatattggctgaacaatgctcctttccccagggttctggatctcagcttggcaggaacccctctctgagccttcctaattgttcctttattttctcagtcctattagtagcatctgtttcctgtactccctttctctgtgataccttacgttttgccttttttagtttacttaaaattcactatatgagatcttccctgttaaaat

SEQ ID NO: 174251 - DNA, 608 bp, Homo sapiens
tgacatagctaggaagatagacttkttaaaaatgtggactggtaaaagtatcagcagatgcatagaatacttttaaaagttggcatttgttagcctgcttgctgaaaaaggtgctaagacttggtattctgaagtcatctcattttcaaggctcatgtccttaaattcctctggaagctgaagcatatctaaaacaaattcaggtgagtgggaaaaggttatttatagatttaactggaaaacagaaacatgctggcctcaatttcaaactgtttgattttagcatccaacaacatttattaattaatgagacatttgcattctttttactgttctcaattcacatctggaatgtttcctttgagaacaagtgtcctacagaatgccgtgatctattaggaccacatttcagggactagtctcttctgattagactgttctgggaggttagtggaagggaggcaacaaggagagtactgctagccccacagagcaagagattaatcatatcaataaaacaatctcattcttgggagctgttggaaattgaagccttagtatacattcttcataaacaatttgtgagactgaacttcagggaaggaatt

SEQ ID NO: 174252 - DNA, 608 bp, Homo sapiens
tgacatagctaggaagatagacttgttaaaaatgtggactggtaaaagtatcrgcagatgcatagaatacttttaaaagttggcatttgttagcctgcttgctgaaaaaggtgctaagacttggtattctgaagtcatctcattttcaaggctcatgtccttaaattcctctggaagctgaagcatatctaaaacaaattcaggtgagtgggaaaaggttatttatagatttaactggaaaacagaaacatgctggcctcaatttcaaactgtttgattttagcatccaacaacatttattaattaatgagacatttgcattctttttactgttctcaattcacatctggaatgtttcctttgagaacaagtgtcctacagaatgccgtgatctattaggaccacatttcagggactagtctcttctgattagactgttctgggaggttagtggaagggaggcaacaaggagagtactgctagccccacagagcaagagattaatcatatcaataaaacaatctcattcttgggagctgttggaaattgaagccttagtatacattcttcataaacaatttgtgagactgaacttcagggaaggaatt

SEQ ID NO: 174253 - DNA, 521 bp, Homo sapiens
ggcactattctggacactggagataaatwagggaacaaaataaacaacaccctgcctgtataatgattttattctgctggggagagtagaaaaaagcaatgaataatataaatgaatgaatcaaaaggaaatacaaaaaaaaaagaaaatagtaaaagggatgtggagggtgggtacaggtagcagtataaacatttgttgtcagagaaggccttatggaaaaggtgacatttacacaaagacttaaaggagataagcaagccaaggaatatctggagaagagttcctgagctacagaatacttgaacaaaggacctaaggcaggaatacgcctagagcatttcaggaaaggggaaaggccacagtgcttccagggcagtgagtgaaaagaaaggaggaagaagagcaagtcatataggtccagagtcagcagatcaggatgagcattttggtcattgaaagaactttgccttttatctgagtaaaacgatgttttgagtagaggagtggcattacccgac

SEQ ID NO: 174254 - DNA, 521 bp, Homo sapiens
ggcactattctggacactggagataaattagggaacaaaataaacaacaccctgcctgtataatgattttattctgctggggagagtagaaaaaagcaatgaataatataaatgaatgaatcaaaaggaaatacaaaaaaaaaagaaaatagtaaaagggatgtggagggtgggtacaggtagcagtataaacatttgttgtcagagaaggccttatggaaaaggtgacatttacacaaagacttaaaggagatwagcaagccaaggaatatctggagaagagttcctgagctacagaatacttgaacaaaggacctaaggcaggaatacgcctagagcatttcaggaaaggggaaaggccacagtgcttccagggcagtgagtgaaaagaaaggaggaagaagagcaagtcatataggtccagagtcagcagatcaggatgagcattttggtcattgaaagaactttgccttttatctgagtaaaacgatgttttgagtagaggagtggcattacccgac

SEQ ID NO: 174255 - DNA, 391 bp, Homo sapiens
aagaattacccagccccaaataccaatagtcctgctgttgagatattaatacagagagatgcctgctgggaattggattggtgagtgcacaattgaagtggagctattgtttttctttcatggtctatccggaatagtcccagaaactcaccttgatcatgcctgagagtcctttgaggcactctatcaactctacttatcttgccatgtaggtagggagtattgacttttcaggtgactgtgcaycttaggagggtggacacatgggtctgttttccttttgtaggctttaaagtgagatagcagagacacaaaggaggggtggggtggacaaagatattttaggctttgagttcatgaggtggaagatcccaccttatagaatggaatt

SEQ ID NO: 174256 - DNA, 630 bp, Homo sapiens
tgatgttaggttgttaaattgagacctttctaactttttgatgtgggcatttagtgctataaattttccttttaacactgctttatctgtgtcccagagattctggtatgtagtatctctgttctcattagtttcaaagagcttctttatttctgccgtgaattcattatttacctaaaagttattcagtagcacattacttgagttccataaaattgtggttttgagtgaatttcatagtcttgatttctaatttgattgcactatggtctgaaagagtggttgttatggtttcagttattttgcattggctgaggagtgttttatgtctgattatgtgattgattttagagtatgtgctatgtggcaatgagaagaatgtatattctgtttttggttggagagttctgtagatgtctatcagattcatttgatccagtgctgagtttaggtcctgaatatatgtgttaattttctgccttgctgatctaatactgtcagtaggttattaaagtctcccactattattgtgtaggagtctaagtttctttgacgttctctaagaacttgttttatgaatctggatgctcttgtgttggktacatatatatttaggatagttaggtcttc

SEQ ID NO: 174257 - DNA, 404 bp, Homo sapiens
ccccctacttatagtttctacagatgcttggagtcatatgatctactctaagcaaattctgaytgaggtacgacaggagggatccaggttctgtgaggcctgaaaacaatacggttattgtaaggattaagagagacaatatatgtaatctttggcttgatgctttgcacaatgtaaggactcaataaacaacagttacctaagggataggtcatgaagcaaggagtccagtgaggatattccctcaacagtgtgggccagagatgagaaagcttacactggcactgttgtttggcagcaaagatggagatggagaaggtggaacagtgctggaagaaattaagaggacaggaatagtagggtgtgcttgatgattggattcagaggatgatttgagaagtggg

SEQ ID NO: 174258 - DNA, 621 bp, Homo sapiens
attcagaggatgatttgagaagtgggaagagggaagtgccagccaaaaaactgaggaagaacaaacagagcaccaagcatcaagtagtgatcactgaatgactcaatactgcccagcatggacacacctaggaaatgttagccaaagaaatgttataattgtctaagtgtataaatgtcaaatgaagggggcaatgtataaattttattttaaaaataaatatttttattcatagttatagtctcatatgaattaaagtactgaaaaatgacttaattacccaaaagtgtcatcatygtgtaataaaaataaactagaaaagaacgttacgatggctagtaaattattagaaatatagacaaaagacagaattaaatcaccactttatatttttttcaggaaaaaaacattttttcaagtagagaatctcatatgcttacctgttaataaacaacaatccagttgggaaaggatatttgattggaagtcagtgtactagtctcagttccttaacttaccctatgaccgctagggaattacttactcagtttcatgctatgttgaaattctaacactagttacgctgatgcatatagcagaggcaacaaggagtcaagcaga

SEQ ID NO: 174259 - DNA, 621 bp, Homo sapiens
attcagaggatgatttgagaagtgggaagagggaagtgccagccaaaaaactgaggaagaacaaacagagcaccaagcatcaagtagtgatcactgaatgactcaatactgcccagcatggacacacctaggaaatgttagccaaagaaatgttataattgtctaagtgtataaatgtcaaatgaagggggcaatgtataaattttattttaaaaataaatatttttattcatagttatagtctcatatgaattaaagtactgaaaaatgacttaattacccaaaagtgtcatcattgtgtaataaaaataaactagaaaagaaygttacgatggctagtaaattattagaaatatagacaaaagacagaattaaatcaccactttatatttttttcaggaaaaaaacattttttcaagtagagaatctcatatgcttacctgttaataaacaacaatccagttgggaaaggatatttgattggaagtcagtgtactagtctcagttccttaacttaccctatgaccgctagggaattacttactcagtttcatgctatgttgaaattctaacactagttacgctgatgcatatagcagaggcaacaaggagtcaagcaga

SEQ ID NO: 174260 - DNA, 596 bp, Homo sapiens
cattcagttcccatattccttactgagcatgctgttaagcctcagacttaaaaataagaagtgtctaataaaaaaaagtgcatgacctcctgtgactaaaagaagggaaaaaaaaatctaactctaaacttttaaaagaaagtgcatttttataataacamtaaaatcctcccaatcaagcctttaagaggcagtctgcatccccatctttgcctggggcccataactatccttagctaatctttctctgacagataaagagctgctatatccgctcttatagctccattttaaactttattcacagaagtggggagaagaaaccctgggtgagaataatagaatgagtgtttgagagtgggcaacggggaagagcaagatgggattacttatttgcagcaatatatgctcgtggaaaaagcaaatctaagatccaaagccctgtggtttgttcagcgacactctatacacatctttgagactgcgcgatcacatctatgtcagttgtctccagaattccctattcactccactccagccttgctggaggtgtgccatcatggagggttattccgacagatataatgggtgcccac

SEQ ID NO: 174261 - DNA, 596 bp, Homo sapiens
cattcagttcccatattccttactgagcatgctgttaagcctcagacttaaaaataagaagtgtctaataaaaaaaagtgcatgacctcctgtgactaaaagaagggaaaaaaaaatctaactctaaacttttaaaagaaagtgcatttttataataacactaaaatcctcccaatcaagcctttaagaggcagtctgcatccccatctttgcctggggcccataactatccttagctaatctttctctgacagataaagagctgctatatccgytcttatagctccattttaaactttattcacagaagtggggagaagaaaccctgggtgagaataatagaatgagtgtttgagagtgggcaacggggaagagcaagatgggattacttatttgcagcaatatatgctcgtggaaaaagcaaatctaagatccaaagccctgtggtttgttcagcgacactctatacacatctttgagactgcgcgatcacatctatgtcagttgtctccagaattccctattcactccactccagccttgctggaggtgtgccatcatggagggttattccgacagatataatgggtgcccac

SEQ ID NO: 174262 - DNA, 596 bp, Homo sapiens
cattcagttcccatattccttactgagcatgctgttaagcctcagacttaaaaataagaagtgtctaataaaaaaaagtgcatgacctcctgtgactaaaagaagggaaaaaaaaatctaactctaaacttttaaaagaaagtgcatttttataataacactaaaatcctcccaatcaagcctttaagaggcagtctgcatccccatctttgcctggggcccataactatccttagctaatctttctctgacagataaagagctgctatatccgctcttatagctccattttaaactttattcacagaagtggggagaagaaaccctgggtgagaataatagaatgagtgtttgagagtgggcaacggggaagagcaagatgggattacttatttgcagcaatatatgctcgtggaaaaagcaaatctaagatccaaagccctgtggtttgttcagcgacactctatacacatctttgagactgcgcgatcacatctatgtcagttgtctccagaattccctattcactccastccagccttgctggaggtgtgccatcatggagggttattccgacagatataatgggtgcccac

SEQ ID NO: 174263 - DNA, 596 bp, Homo sapiens
cattcagttcccatattccttactgagcatgctgttaagcctcagacttaaaaataagaagtgtctaataaaaaaaagtgcatgacctcctgtgactaaaagaagggaaaaaaaaatctaactctaaacttttaaaagaaagtgcatttttataataacactaaaatcctcccaatcaagcctttaagaggcagtctgcatccccatctttgcctggggcccataactatccttagctaatctttctctgacagataaagagctgctatatccgctcttatagctccattttaaactttattcacagaagtggggagaagaaaccctgggtgagaataatagaatgagtgtttgagagtgggcaacggggaagagcaagatgggattacttatttgcagcaatatatgctcgtggaaaaagcaaatctaagatccaaagccctgtggtttgttcagcgacactctatacacatctttgagactgcgcgatcacatctatgtcagttgtctccagaattccctattcactccactccagccttgctggaggtgtrccatcatggagggttattccgacagatataatgggtgcccac

SEQ ID NO: 174264 - DNA, 538 bp, Homo sapiens
aacaaaataataataaataaaattagaaaattgcccaagaataaggagttgcccaaacacttagaaaaacccagaaacattcccataacttgcagaataacctagcaatggattttgtcaaaaatcagagctaccaaaacggttctgaaagtctgcctcatagacaatttgcattgaggccagcatgtctcatctttccccattccagaaaatgcccagatttctcctagagaaatcggaaactctaatatttctagcaatattcgcatgtcatggaggggaagtgactacccccagaaataatacaactgcttacccactccatgaagtgaaagatttgaaagacatttctctgttccaaaggcctgtgggcagaattaaaagtaattgccagaaaagccagtttcaaaacagtctctacacttgcatttattgaatgagcttattggatatmttggttgcaagcaggaagcaacctgctgacctgagctccctgtggccctggtcctctccactctgaaaacatccaggcagatct

SEQ ID NO: 174265 - DNA, 597 bp, Homo sapiens
actaaactccctttatggcacaccaaaacacggcttttcagtaatttttatgtagcaaattagagagttgtctgaagtcagggggtactgtaatttggaagctggtccttcatctaaacacggccctgggggttaatcagcaggtgcagataactcggcaccttccaggatttggcgatcaatggtaaaaatggacaaacacagacatgtacttcaacttaccccaccaggaacaccgcatagcctcctggcctcagaggctagcacctggaaaccacttcttgttgtcttcccacaactgaaagtaagagtgacactatggaatctgtagcagaaccaagcaacacagtccagtttggaccactgatggggtctgtacaaaatgagatcygattttccttgtcaaggagtagttactctgggacagccttggctgttctgcccacttcatccattgtgagctattcccagatttccttcctcagaggcggctgcaaatttggagtgcacagatatacactcacatcttagattacttttgccaatgcacattaccttatgtttatttgagttaagtttcatctgccttcaggctgc

SEQ ID NO: 174266 - DNA, 562 bp, Homo sapiens
agttggttctatcattgtttgtcaaatctccataaataattcatccctaattcaggctgtgattgcctacagccagagcaaaactttccctctaccttttttggatatctcattgcaatgattcttattcttgggttcctaactgccctgggcaaggttctaccaatagacactcatgtttccaggcagtggctacccagagccctaaggagaaacaataggtagcttctatagggttgtcaggaaggaaacatagacgtttttagaaattatgtcacattggggttgagcagcctgaccctattgtagcctagagagccatgtgttctctcctcttagaaggaaagctggaagcagagaratcatgggtatctacctgattaagcctggcaggagacaggaaacaggagattctggccctgccatagcttaggccaaatatccatcccagaaaagcagatgcctggagactcagcctggagaagccatcacagggagaggtagagatggaggtccactccatctgtagtggtgtaggcagcaggatggatgggcacacacc

SEQ ID NO: 174267 - DNA, 507 bp, Homo sapiens
agttcctctgtccctgcttccacagtctctgcagctcctgaagaaaactgatcctacctttgtgtgtgtatatatatatatatttaattttttttttttttttttttttaracagagttttactctgtcgccaggctggagtgtagtggtgcgatctcagctcacctcaacctccacctcctgggttcaagtgattctcctgccttagtttcctgagtagctgggactataggcatgcaccaccatgtccagctaatttttgtatttttagtagagacagggtttcaccatgttggccaggatggtctgtatattctttactctctgtctctctttttaagagacagagtctcactctgtcacccaggctggagctgagtggcttgatcatagctcactgcagcctcaaactcctgggctcaagtgatcctcctgcctcagcctctcaaagcactggggttacaggtgtgagctactgcacctggcccctttgtatattttgagttc

SEQ ID NO: 174268 - DNA, 552 bp, Homo sapiens
ttctcattctcagaccaatgggccagagggccagctaaggggtttctcccgtccttaccccatccctaggtgccctccccacaggtgacatgctccatcctaggtcctggggtgaactactttggagtctcttaatttcttcactgtctatactcttctaggactgtctgtctaaggctttgataccatccatmcttctggccaatttcctcccctaagggccgaattctgcccttgagccccaggctagagtcctgtccaacatggacagattttctggaagtaagcccacagcttgcctgaatatttgattgacatctgaattccttgctgctgtgcaaggaatcctattgggatgcacaggataactgggagtacgatgccatctgagatgcctgctgtcctctctggaggtgatctctgtggccccattcatttccccacactctttctcgcccaggcctggcttcctcttgtgcccacttgccctgttgttgagagtctagcctgcctctcacctggcccattcaaccagcaacttgggacagcctg

SEQ ID NO: 174269 - DNA, 348 bp, Homo sapiens
aaataccactctaccaccactaccaccaccaccatcaccatgggtgtcccagaactactgaatcataatctccaggggtggcaattaaacatccatattttttcaactccccacgtaattctgaggcagcccatgtttgggattcactgctgtaaaattagatacacttatctctacagttccttctaattctaagtttctatcattcaatgcacactctggacgtttaaaatcatcctttgtgtscatacaaagtttctgaggcataatttcttcttcccacagaagaggtgctgagaaaattcttctaagtatggggacctctaggtgctgattccaaacagcaac

SEQ ID NO: 174270 - DNA, 610 bp, Homo sapiens
ttttttttttttttttggaacactcacaaactgcatgaacttgagaaggtcagtttctttcctaagcatcagtttctccatttattaaaaaaaaaaatcagcccaataattcctgttcttcctacttcgcagggattttatgacaatcaaatgagctcatacttgggagarcacttcactcggtgctagacaagaacaagctatcatcattaatttgctggtgacagggaaagctgctacttcctttccctaccttcttttttcttttcttttcttttctttttttttttttaaacagaggtagttatttatgcaccagaaagaacagttaaattcctaggctgtgtgcttctcttagtgaaatgatttagagccatgtgtaaatagcacataaatttattatgactcgggtccaaactggggaatgtgtctgtatatacacacacatgcaatcacctctcaacatctaacagtgaaaaatattgcagccttgtaaaaaacaaagccaccttcttcctaactcctgacagctaaaatgtccttaaaataaatgggaaagaaagttcactctacataactgtgcaatggagtttttatgaatcagacaaat

SEQ ID NO: 174271 - DNA, 610 bp, Homo sapiens
ttttttttttttttttggaacactcacaaactgcatgaacttgagaaggtcagtttctttcctaagcatcagtttctccatttattaaaaaaaaaaatcagcccaataattcctgttcttcctacttcgcagggattttatgacaatcaaatgagctcatacttgggagaacacttcactcggtgctagacaagaacaagctatcatcattaatttgctggtgacagggaaagctgctacttcctttccctaccttcttttttcttttcttttcttttctttttttttttttaaacagaggtagttatttatgcaccagaaagaacagttaaattcctaggctgtgtgcttctcttagtgaaatgatttaragccatgtgtaaatagcacataaatttattatgactcgggtccaaactggggaatgtgtctgtatatacacacacatgcaatcacctctcaacatctaacagtgaaaaatattgcagccttgtaaaaaacaaagccaccttcttcctaactcctgacagctaaaatgtccttaaaataaatgggaaagaaagttcactctacataactgtgcaatggagtttttatgaatcagacaaat

SEQ ID NO: 174272 - DNA, 515 bp, Homo sapiens
cctgttggtcccctccaagccacttttaaggtagggcccatcacaaccaagggcagccagctgctgttcctctggcttgtgctgtgcccatgtgtaggatgggtctttggtgcttcccctcctaagctgcatccaggggacacattggcttaatgctctactgtcaccatcttgaaattcataatcattttatctttaaactcgtcttttgtgaagtagtgcacccacctgagcacaggagaggtgtgcataatgcatgctgccatttctttctatcccatttgcacatagcattagtgttaattccttgtgtcgaccaaccacttaagtgaaaatggtgacatakaaagaaagggaaagagagagcaccccatattttcttttgtcttcagtccttccttaactcatcagtaagtcaaaggtggagaatgtcactagaatgtgtgtatgtcacacagggaaataaagacagcgtctccccttttctggagaggacaaaatacgtgtgcacgtac

SEQ ID NO: 174273 - DNA, 384 bp, Homo sapiens
cttaaattgtaaatgtttgaacattttgattgacaaggatggattttcaaatggtttgaccgaaaacctctctctaccacacaaaaatcaaagtgggaaaaggtagccatgacccacggtgacctgagtctgttttataggaccaraaagagccccaggctgttttttctcttctgccccacacgtttccatgctacacccacccacttttggatgtactctgcacagttgcctttttattcaggaatctttagagggcaccatctgttcaccaggccctgtgtgacgcgctggagttaccaacctgagtacaacttagtccctgaccttgagaagtccgcattattaccctttagggaacacagcacgagtatataaattgca

SEQ ID NO: 174274 - DNA, 516 bp, Homo sapiens
tgtacgtgcatacgtattttgtcctttccagaaaaggggagatgctgtctttatttccctttgtgacatacacacattctactgacattctctacctttgacttactgatgagttaaggaaggactgaagacaaaagaaactatgggctgctctctctttccctttctttctatgtcaccattttcacttaagtggttggtcgatacaaggaattaacactaatgctatgtgcaaatgggataggaagaaatggcagcatgcattatgcacacctctcctctgctcaggtgggtgcactacttcacaaaagacaagtttaaagataaaatgattatgaatttcaagatggtgacagtagagcattaaaccaatctgtcccctggatgcagcttatgaggggaagcaccaaagacccatcctacacatgggcacagcacaagccasaggaacaccagctggctgcccttggttgtgatgggccctaccttaaaagtggcttggaggggaccaacagg

SEQ ID NO: 174275 - DNA, 311 bp, Homo sapiens
ggtaaacagagagatctatttcattcaaggtcatcctgggttggcatgaccaacttcaatttcatctgattctccttgggtagaagtatttttgagaygaagagctgagatcggctaatttgtcaacattacaaagcaggagacttatccttgtaactcttctccctcactgaaccttcccagcagcagctgctgacatatgaacctcgcagatgaagatgccatagcatggctatttctcgactgcactgctgaaggtaagatagtgagaaaatgctttttcgtagcaatttctttgtcatttttaacag

SEQ ID NO: 174276 - DNA, 585 bp, Homo sapiens
aagccttccatgtacagtattattgtaccacttcttgtattctttagtgtgtaatttctaactaaagtttgatactatatgattgacaaaaactgaattattaacctttattttccgttttgagtacttcctgcagaaaagtttgagtttaacttgagtcactgatttaaaaaaaaaagttagacctagtatagaaatattattttagggtgtaactaatatagaaaaacactatcttgtgaggcaaataaaatggagttagaaaagtatgacaggagttagatgcattgattaccttgtccaataacttcagtgctctgtccttcgggtagtttttctggcttggtccaagttgtatgtttagacatacacagattagattaatagtaggtttatagtctccagaatctcctctcttcaccttactttactccctggcaaagaaatggaagataaacasacattttaggagggaagtgaactttgaaaaaacgtgacaaccaggtctggctttaggagggagtaagagagaggccatggctcttcccctaaagcctagctttaaaaacaaaacaaaacaaaatc

SEQ ID NO: 174277 - DNA, 492 bp, Homo sapiens
acccaattaaatcataggcaaaggaattaagtaaacatttctcaaatgaatacatagaaatggccaaaagttacatgaaaagatgctcaacatcactaatcatcaaacacatgcaaatcaaaaccacaatgagatcccacacttcacgcatatcagaattgttactattaaaaatcaaatgaggagagagggagaccaagatagcagaacagaaagctccacagatcatccccgcttcaaggacaccaagttaacaactatctacacggaagaagaagaaaaaaaaaacaccmtatgaagcaaaaattaggtgagcactcatagtatctggttttaacttcttatcgctgaaagaggcattgaagagatagaaaaagcagtactgaatcaccgatgtgaccttgcccccaggcctggccacagcagcagggtgctgagagcatctctgagcaatgtgcacagagagagaacacagcaattgtgaggcggtga

SEQ ID NO: 174278 - DNA, 492 bp, Homo sapiens
acccaattaaatcataggcaaaggaattaagtaaacatttctcaaatgaatacatagaaatggccaaaagttacatgaaaagatgctcaacatcactaatcatcaaacacatgcaaatcaaaaccacaatgagatcccacacttcacgcatatcagaattgttactattaaaaatcaaatgaggagagagggagaccaagatagcagaacagaaagctccacagatcatccccgcttcaaggacaccaagttaacaactatctacacggaagaagaagaaaaaaaaaacaccctawgaagcaaaaattaggtgagcactcatagtatctggttttaacttcttatcgctgaaagaggcattgaagagatagaaaaagcagtactgaatcaccgatgtgaccttgcccccaggcctggccacagcagcagggtgctgagagcatctctgagcaatgtgcacagagagagaacacagcaattgtgaggcggtga

SEQ ID NO: 174279 - DNA, 618 bp, Homo sapiens
gtcttgcaacctggataccagtgcagccacagcaggatagggcaccagtcagagtcatgaggcccccgttccaggccctagctcccaaatgacatttctagacatatcctgggctagaaggaagcctgctgccttgaagraaagaacccattcctgccagcattcatcacctgctaactgaagagtccttgggccctgaataagcagcaatcatacccaggtactacatcaagggccttgggcaagcctctgagacttgctggcttcaggtgagattcagaacattaccagctgtgctggctatgggacactcctgcttgagaaaagcagaggggaaagtaaaggagactttgtcttgcacattatgtaccagcatggctgcaggggtgtagagcaataagcaggctcttgaggtccctgatgccaggacctgatggttggatgacatttctggacctgcccttggccagaagggagcccactgttctgaagggtgagacccagaccaggcagcatttaccagaaactgacttaagagaccatgagccctaaggggacattggtgggtctgacagtactcctcatggccaggggtagtggtggccacagggtgaagat

SEQ ID NO: 174280 - DNA, 560 bp, Homo sapiens
tcttccaaaacatttacaagaagaacaatggaatctgttgagatcacagagtttagtgcttgatatcttataagctacatttaaatcaatttccttcataattgagaaccctcaactggacatttaaattactaaacaactgaccctttttacattgtaaagcacctttatactttttattagataaaaacaaactaatcttcttagacttaaccaagataatctatgagaactgcatttttattaaacgtgaaaattccatagcacttctcatggctcttctagaacacaacagcttatgcatattatggccaagttgagttgttccttaaataaagcaagcttctagatgccacacagtcttatctcttctaaggccaaaacactagaatggsaaatagccataaaggaaactctttggacataaagctacctatctttatcattactccttagtctcaagaaaaaattagagccaagcaaagtcaaaatactgatatcacctcccgtaattggtgcaggattgctaagggcagcttataagtgtgccaagatttaaa

SEQ ID NO: 174281 - DNA, 563 bp, Homo sapiens
agttgtatcttctagggttacttgagagctatgacagtgtctgagtcttaaccctttcaaacaggacctatactacccatatggtacctttgtgtagattakaaaaagatgccctgtccactgggtgatgcaagccccatgacagggcctgaagcttactgagcatacagcaggctggctgtagcctccagtcatcattctggctaggcaactttatgtagtgagccacctgaacaatcacacagaatagcagcccagccttcacatggtacatgaggattgaccatgattagcatattttggcaaatctcaacacatgagagtgtcaaatacctctacagaaagtgtttgtttgactaattaatgcaaatagaattaagaagctttactttctgactaatcctaaatgcaacattactatgtactaggatcctcagtttgttctcacattatcatgtaaaatcactgattttaacttgttttattccaactttttcagctttctatattaaaaggagtgtgcaaaaaaggtttacttacattctagcaaagcaacattttac

SEQ ID NO: 174282 - DNA, 562 bp, Homo sapiens
gaacacagataaccgctgccatcacccagctgatgatacagtggtgaaggactacagatcagtaaatgtggccaagcgcagtgactgttaggagaggagaaaggatcctgcttttcctcaccttcttgtccctctgcaaytcagagggagaatcaaaattcacattttttagagaacatggatctttcagaatatgagagtttcatgagtgtttttttttttaatttaacacttaagtatagcactctgaaaaataaacactctagagttttagtgtcttagaggtcatttagtttgcctccttgtaaccaaaccgatgaaaatctccttttctgacctcctgagaaatagatgctagaatctctgggcagcagtccttgtggtactcgtactcagtgcctagcaaagaggtccataatgagatattctgtgcgtctctgactcagaacattcctgtttcatcttccacctggattccttctaatgcttttcaataacagatcagtgtagttgagttttgtttagctatttctgtatgtaagcatttttaaaaaaggaaaaa

SEQ ID NO: 174283 - DNA, 479 bp, Homo sapiens
ttcatttcatgatggttgtttgatgtctttttttcacagtttgttgaactgttcaggacagtgatcaagtgataccacgcagtggtccaaaaccagtctgaatatggccttaggctctgggttttaacaccgctagtctgtgaaagatcagttgccacagtttttggtttccacatatgtaaagwttcgtcataattagcaagttcacccttagtaggctgtatcacctcttgttccccacatcccagatttcagtccgtccttggctctcggatgggaggccactctgattgcagccacagttcatgccccacacagacattcactgagcctctgcccagcgttctgacacagacttccacaaggcccacatctggattctttgtccacgctaacaccatcacatttaattaattaatatctttgtgaagctgggtttgaaacaagaaaggtttggactgtttcagtggatgttttgt

SEQ ID NO: 174284 - DNA, 240 bp, Homo sapiens
cttaattttttccttcttcttcacaccaaccagttcaagctgcataaaacctgccctacttagcgcttctatggaaggttgggcctttgcacagggtaaatcaaattcagcagtgcttggggactcatcacccaagtacctaatgaagataatccatcagcactgcagcaactttattgygccattcctgcccaaggaaacagcaaaaacagccagggggttgggggatagccaccagga

SEQ ID NO: 174285 - DNA, 599 bp, Homo sapiens
caatttaagttgaaagttaggttttgtcttaagagatgtattttggtgagattccattgtctaatgccctggcaattaaaaactattttctcctgacctggaatgagatctgttttcacttctctgcacagttgctcagaggctttggcaatgaggatttttgcaaatgtgaggtgaccctccttttcccattatcccaatgtcctctactttgcaaagtttttgactcctccaggcagcaactaagcaatttggttaagtatctcattaccgctttcctcctctgggctggatgtgtggatggtttgttgtttcttgtgctggcctctgaagcttaattttctgtcgcagaggactacttactggcaaattttaaatccccatgaatctcgwaattcattgaaattcaaaattctttccttctctattcacgtaatttctacaaagatctcagaagaaattgaaaatgggcagaggagttgttctacggaagctttaagctttttttcacctaatgaaatgtgttaattttgtgatgatttcagttttgtggtgttcaatttcttgtcaaatgtgataaacaacggaatgaataggtt

SEQ ID NO: 174286 - DNA, 599 bp, Homo sapiens
caatttaagttgaaagttaggttttgtcttaagagatgtattttggtgagattccattgtctaatgccctggcaattaaaaactattttctcctgacctggaatgagatctgttttcacttctctgcacagttgctcagaggctttggcaatgaggatttttgcaaatgtgaggtgaccctccttttcccattatcccaatgtcctctactttgcaaagtttttgactcctccaggcagcaactaagcaatttggttaagtatctcattaccgctttcctcctctgggctggatgtgtggatggtttgttgtttcttgtgctggcctctgaagcttaattttctgtcgcagaggactacttactggcaaattttaaatccccatgaatctcgaaattcattgaaattcaaaattctttccttctctattcacrtaatttctacaaagatctcagaagaaattgaaaatgggcagaggagttgttctacggaagctttaagctttttttcacctaatgaaatgtgttaattttgtgatgatttcagttttgtggtgttcaatttcttgtcaaatgtgataaacaacggaatgaataggtt

SEQ ID NO: 174287 - DNA, 426 bp, Homo sapiens
ccatgtgaagcagagtaaaactgtcctgagtcccctagatccatcagccaacagccaagaccaagtgcacaggagactgaggccatcttactttatccaacctcagttgagcttctgggtgatggcctctacatgaatgaccccaacagaagaaccactcagctgagtccagctcaaattactgactcayaggatcatagcaaattggcttatttacttcattaagatttggcatgacatttgaaagaagacatttaaaacttggaccctgagattcagttgaccctttttagccattgataattgataatttggtgcaggcatttgggatattagcatctagagatgctaacagcagtacttaactgatataaagcagcacataactgataaaggtgtcgacctgacatgcagtacagatggttt

SEQ ID NO: 174288 - DNA, 426 bp, Homo sapiens
ccatgtgaagcagagtaaaactgtcctgagtcccctagatccatcagccaacagccaagaccaagtgcacaggagactgaggccatcttactttatccaacctcagttgagcttctgggtgatggcctctacatgaatgaccccaacagaagaaccactcagctgagtccagctcaaattactgactcacaggatcatagcaaattggcttatttacttcattaagatttggcatgacatttgaaagaagacatttaaaacttggaccctgagattcagttgaccctttttagccattgataattgataatttggtgcaggcatttgggatattagcatctagagatgctaacagcagtacttaactgatataaagcagcacataactgataaaggtgtcracctgacatgcagtacagatggttt

SEQ ID NO: 174289 - DNA, 488 bp, Homo sapiens
ctatcataacagaaagcagatctgtggttgcctggagaaggaagtagtataaatcaagtagatgaaggggaggagggattgcagagaagcatgaggacaccctggggtratctaagtgtttatttttgtgattgtggtgatgttctcaggggtatgtacatatgcaaagatttagcaaatatgcactttaaccatgtgcaatttgttgtatgtcaacatacctccttaaagctgttaacattttcttagccaaacattcaatgacataaacgtttacagcatctttatttgtaaaagacaaaaactggaaaccactcagatgtccttcccagggtggttaaacaagctggtgcatctacaccgtgggacactactcagtgataaaagaacaaggtacggatgagtaaagcacatggacaaagccagagagttatgctcagtgaaaacctcagtcccaaaagattgcatgtcatgtgactccatttata

SEQ ID NO: 174290 - DNA, 504 bp, Homo sapiens
aaactatcataacagaaagcagatctgtggttgcctggagaaggaagtagtataaatcaagtagatgaaggggaggagggattgcagagaagcatgaggacaccctggggtgatctaagtgtttatttttgtgattgtggtgatgttctcaggggtatgtacatatgcaaagatttagcaaatatgcactttaaccatgtgcaatttgttgtatgtcaacatacctccttaaagctgttaacattttcttagccaaacattcaatgacataaacgtttacagcatctttatttgtaaaagacaaaaactggaaaccactcagatgtccttcccagggtggttaaacaagctggtgcatctacaccgtgggacactactcagtgataaaagaacaaggtacggatgwgtaaagcacatggacaaagccagagagttatgctcagtgaaaacctcagtcccaaaagattgcatgtcatgtgactccatttatataacattctttaa

SEQ ID NO: 174291 - DNA, 461 bp, Homo sapiens
tggagaaggaagtagtataaatcaagtagatgaaggggaggagggattgcagagaagcatgaggacaccctggggtgatctaagtgtttatttttgtgattgtggtgatgttctcaggggtatgtacatatgcaaagatttagcaaatatgcactttaaccatgtgcaatttgttgtatgtcaacatacctccttaaagctgttaacattttcttagccaaacattcaatgacataaacgtttacagcatctttatttgtaaaagacaaaaactggaaaccactcagatgtccttcccagggtggttaaacaagctggtgcatctacaccgtgggacactactcagtgataaaagaacaaggtacggatgagtaaagcacatggacaaagccagagagttatgctcagtgaaaacctcagtcccaaaagattgcatgycatgtgactccatttatataaca

SEQ ID NO: 174292 - DNA, 514 bp, Homo sapiens
tgaagtgggcgtaactcactgggtgatagcaccccccatgtggagaataaaccagtgagtcagacagtaaaaaggcaggcagatgaagggcctgccaatgtaggtggcaataaaaaggcttttttcgctctttgccataaaactgacactgtgcttaacaacatgacctcggagccagcctgtcatcctatggttgttcccgtcctgctcgagaggacttgtgttgagagcaatgatgagggaaaggcagagagctggactgcaggtgacacaggacgtcctgctcttctgcacccaggcgagacctgctgacctagggccacacacaccatgtgctctgcaatcccaaggcagccatcagccacgtggcatcctcacaaygagctatggttccttctaagcaacatttaggcatcagtcctagagttaattttcttacacctgcagaggagcagggaggcaccctgcacccggactgacttcatgctcttctctcagtatgatcaaaagcatt

SEQ ID NO: 174293 - DNA, 536 bp, Homo sapiens
tgagcccccagcattgtcacagccacagtcaggagcaaagctgctgcaggggagggtcgacttagcctccatcccctgctgggatcacacggacagagaggcctctaggccagacatgctcctagacatgctcctagcctagacatacaaacccgaagttcctctaccgacccaatctgcgtggtccrttgtgacagccacgaggcacatgtggccactatatttaaatgtattaaaatggagtaaaattaaagatccagttcctcaaatgcaccagccacgtttccctttcttatttttttatttttatattattttattattattattatactttaagttttagggtacatgtgcacaatgtgcaggtttgttacgtatgtatacatgtgcgtttccctttcttaaaagccccaggcagcagtggctgccaattctggacaccaccaatggaggacatttctgccattgtggaaagctctgcctggccgtgctgcacaaaatagcttgtgcttattatctgaaaggagccagtt

SEQ ID NO: 174294 - DNA, 534 bp, Homo sapiens
gatagggaaactgagcccccagcattgtcacagccacagtcaggagcaaagctgctgcaggggagggtcgacttagcctccatcccctgctgggatcacacggacagagaggcctctaggccagacatgctcctagacatgctcctagcctagacatacaaacccgaagttcctctaccgacccaatctgcgtggtccattgtgacagccacgaggcacatgtggccactatatttaaatgtattaaaatggagtaaaattaaagatccagttcctcaaatgcaccagccacgtttccctttcttatttttttatttttatattattttattattattattayactttaagttttagggtacatgtgcacaatgtgcaggtttgttacgtatgtatacatgtgcgtttccctttcttaaaagccccaggcagcagtggctgccaattctggacaccaccaatggaggacatttctgccattgtggaaagctctgcctggccgtgctgcacaaaatagcttgtgcttattatctg

SEQ ID NO: 174295 - DNA, 548 bp, Homo sapiens
agcccccagcattgtcacagccacagtcaggagcaaagctgctgcaggggagggtcgacttagcctccatcccctgctgggatcacacggacagagaggcctctaggccagacatgctcctagacatgctcctagcctagacatacaaacccgaagttcctctaccgacccaatctgcgtggtccattgtgacagccacgaggcacatgtggccactatatttaaatgtattaaaatggagtaaaattaaagatccagttcctcaaatgcaccagccacgtttccctttcttatttttttatttttatattattttattattattattatactttaagttttagggtacatgtgcacaatgtgcaggtttgttacrtatgtatacatgtgcgtttccctttcttaaaagccccaggcagcagtggctgccaattctggacaccaccaatggaggacatttctgccattgtggaaagctctgcctggccgtgctgcacaaaatagcttgtgcttattatctgaaaggagccagttgtttttaaaagatc

SEQ ID NO: 174296 - DNA, 377 bp, Homo sapiens
tattctgtttcattggttgctatggttttatgccaataccatgctattttgattactaaatccttgtgatattttttgatgtcaatttctgtgaaaaatgtaattggattttgaattttgataagaatttcattaaatctatagatgtctttgagtaacatggacattttaacaatattaatccttctaattcatgaactcagaacagctttccatttttttgtgttttcttctatttctttcatcaatgttttatacttttatgtayacagatctttcatttccttggttaaatttattcctaagtattttttaatgctgttgtaaattggattgtttcttaatttgctttttgggtagtttgctgttagtgtaca

SEQ ID NO: 174297 - DNA, 602 bp, Homo sapiens
gaattcctaaggactgcccattgaaactgacaaaattgcccttgtttgatgagaggaatgagcagagcattgatgtggtgaacaaggatctagtgagactttsccagcatgtttctaccaaagctttatctaagcttctcagaacactctcctaataagcagatgtttggcctttcagaaagtcaacaagcaaaatgccttgagtgtcccaaaacactgatgccatgatgtgggctcctgactggcctccttttcctttgactggaccactgccacctcttggtagccatcgctttcatgatgctttgccttggagatcatattggtgaagccatgttccaactgccgcttacaatttgtcagagggatgcgtcaggatcgtgatccctcctgtttaaaatttccactgatagctctcgtcgtaactgcagctgatctgggcacagtggttttcacagccactgcaggattcatcttccacatcttctcacctcttcttgaaacaagctatacattcgtaaagagttcatttctttggggtagtgtccttacaagcttttcttaaaacgtcaatgatttcttcaatcttccacccaagcttc

SEQ ID NO: 174298 - DNA, 602 bp, Homo sapiens
gaattcctaaggactgcccattgaaactgacaaaattgcccttgtttgatgagaggaatgagcagagcattgatgtggtgaacaaggatctagtgagactttcccagcatgtttctaccaaagctttayctaagcttctcagaacactctcctaataagcagatgtttggcctttcagaaagtcaacaagcaaaatgccttgagtgtcccaaaacactgatgccatgatgtgggctcctgactggcctccttttcctttgactggaccactgccacctcttggtagccatcgctttcatgatgctttgccttggagatcatattggtgaagccatgttccaactgccgcttacaatttgtcagagggatgcgtcaggatcgtgatccctcctgtttaaaatttccactgatagctctcgtcgtaactgcagctgatctgggcacagtggttttcacagccactgcaggattcatcttccacatcttctcacctcttcttgaaacaagctatacattcgtaaagagttcatttctttggggtagtgtccttacaagcttttcttaaaacgtcaatgatttcttcaatcttccacccaagcttc

SEQ ID NO: 174299 - DNA, 602 bp, Homo sapiens
gaattcctaaggactgcccattgaaactgacaaaattgcccttgtttgatgagaggaatgagcagagcattgatgtggtgaacaaggatctagtgagactttcccagcatgtttctaccaaagctttatctaagcttctcagaacactctcctaataagcagatgtttggcctttcagaaagtcaacaagcaraatgccttgagtgtcccaaaacactgatgccatgatgtgggctcctgactggcctccttttcctttgactggaccactgccacctcttggtagccatcgctttcatgatgctttgccttggagatcatattggtgaagccatgttccaactgccgcttacaatttgtcagagggatgcgtcaggatcgtgatccctcctgtttaaaatttccactgatagctctcgtcgtaactgcagctgatctgggcacagtggttttcacagccactgcaggattcatcttccacatcttctcacctcttcttgaaacaagctatacattcgtaaagagttcatttctttggggtagtgtccttacaagcttttcttaaaacgtcaatgatttcttcaatcttccacccaagcttc

SEQ ID NO: 174300 - DNA, 602 bp, Homo sapiens
gaattcctaaggactgcccattgaaactgacaaaattgcccttgtttgatgagaggaatgagcagagcattgatgtggtgaacaaggatctagtgagactttcccagcatgtttctaccaaagctttatctaagcttctcagaacactctcctaataagcagatgtttggcctttcagaaagtcaacaagcaaaatgccttgagtgtcccaaaacactgatgccatgatgtgggctcctgactggcctccttttcctttgactggaccactgccacctcttggtagccatygctttcatgatgctttgccttggagatcatattggtgaagccatgttccaactgccgcttacaatttgtcagagggatgcgtcaggatcgtgatccctcctgtttaaaatttccactgatagctctcgtcgtaactgcagctgatctgggcacagtggttttcacagccactgcaggattcatcttccacatcttctcacctcttcttgaaacaagctatacattcgtaaagagttcatttctttggggtagtgtccttacaagcttttcttaaaacgtcaatgatttcttcaatcttccacccaagcttc

SEQ ID NO: 174301 - DNA, 603 bp, Homo sapiens
tgaattcctaaggactgcccattgaaactgacaaaattgcccttgtttgatgagaggaatgagcagagcattgatgtggtgaacaaggatctagtgagactttcccagcatgtttctaccaaagctttatctaagcttctcagaacactctcctaataagcagatgtttggcctttcagaaagtcaacaagcaaaatgccttgagtgtcccaaaacactgatgccatgatgtgggctcctgactggcctccttttcctttgactggaccactgccacctcttggtagccatcgctttcatgatgctttgccwtggagatcatattggtgaagccatgttccaactgccgcttacaatttgtcagagggatgcgtcaggatcgtgatccctcctgtttaaaatttccactgatagctctcgtcgtaactgcagctgatctgggcacagtggttttcacagccactgcaggattcatcttccacatcttctcacctcttcttgaaacaagctatacattcgtaaagagttcatttctttggggtagtgtccttacaagcttttcttaaaacgtcaatgatttcttcaatcttccacccaagcttc

SEQ ID NO: 174302 - DNA, 485 bp, Homo sapiens
gaattcctaaggactgcccattgaaactgacaaaattgcccttgtttgatgagaggaatgagcagagcattgatgtggtgaacaaggatctagtgagactttcccagcatgtttctaccaaagctttatctaagcttctcagaacactctcctaataagcagatgtttggcctttcagaaagtcaacaagcaaaatgccttgagtgtcccaaaacactgatgccatgatgtgggctcctgactggcctccttttcctttgactggaccactgccacctcttggtagccatcgctttcatgatgctttgccttsgagatcatattggtgaagccatgttccaactgccgcttacaatttgtcagagggatgcgtcaggatcgtgatccctcctgtttaaaatttccactgatagctctcgtcgtaactgcagctgatctgggcacagtggttttcacagccactgcaggattcatcttccacatct

SEQ ID NO: 174303 - DNA, 602 bp, Homo sapiens
gaattcctaaggactgcccattgaaactgacaaaattgcccttgtttgatgagaggaatgagcagagcattgatgtggtgaacaaggatctagtgagactttcccagcatgtttctaccaaagctttatctaagcttctcagaacactctcctaataagcagatgtttggcctttcagaaagtcaacaagcaaaatgccttgagtgtcccaaaacactgatgccatgatgtgggctcctgactggcctccttttcctttgactggaccactgccacctcttggtagccatcgctttcatgatgctttgccttggmgatcatattggtgaagccatgttccaactgccgcttacaatttgtcagagggatgcgtcaggatcgtgatccctcctgtttaaaatttccactgatagctctcgtcgtaactgcagctgatctgggcacagtggttttcacagccactgcaggattcatcttccacatcttctcacctcttcttgaaacaagctatacattcgtaaagagttcatttctttggggtagtgtccttacaagcttttcttaaaacgtcaatgatttcttcaatcttccacccaagcttc

SEQ ID NO: 174304 - DNA, 602 bp, Homo sapiens
gaattcctaaggactgcccattgaaactgacaaaattgcccttgtttgatgagaggaatgagcagagcattgatgtggtgaacaaggatctagtgagactttcccagcatgtttctaccaaagctttatctaagcttctcagaacactctcctaataagcagatgtttggcctttcagaaagtcaacaagcaaaatgccttgagtgtcccaaaacactgatgccatgatgtgggctcctgactggcctccttttcctttgactggaccactgccacctcttggtagccatcgctttcatgatgctttgccttggagatcatattggtgaagccatgytccaactgccgcttacaatttgtcagagggatgcgtcaggatcgtgatccctcctgtttaaaatttccactgatagctctcgtcgtaactgcagctgatctgggcacagtggttttcacagccactgcaggattcatcttccacatcttctcacctcttcttgaaacaagctatacattcgtaaagagttcatttctttggggtagtgtccttacaagcttttcttaaaacgtcaatgatttcttcaatcttccacccaagcttc

SEQ ID NO: 174305 - DNA, 516 bp, Homo sapiens
acaaggatctagtgagactttcccagcatgtttctaccaaagctttatctaagcttctcagaacactctcctaataagcagatgtttggcctttcagaaagtcaacaagcaaaatgccttgagtgtcccaaaacactgatgccatgatgtgggctcctgactggcctccttttcctttgactggaccactgccacctcttggtagccatcgctttcatgatgctttgccttggagatcatattggtgaagccatgtyccaactgccgcttacaatttgtcagagggatgcgtcaggatcgtgatccctcctgtttaaaatttccactgatagctctcgtcgtaactgcagctgatctgggcacagtggttttcacagccactgcaggattcatcttccacatcttctcacctcttcttgaaacaagctatacattcgtaaagagttcatttctttggggtagtgtccttacaagcttttcttaaaacgtcaatgatttcttcaatcttccacccaa

SEQ ID NO: 174306 - DNA, 546 bp, Homo sapiens
aatgagcagagcattgatgtggtgaacaaggatctagtgagactttcccagcatgtttctaccaaagctttatctaagcttctcagaacactctcctaataagcagatgtttggcctttcagaaagtcaacaagcaaaatgccttgagtgtcccaaaacactgatgccatgatgtgggctcctgactggcctccttttcctttgactggaccactgccacctcttggtagccatcgctttcatgatgctttgccttggagatcatattggtgaagccatgttccaactkccgcttacaatttgtcagagggatgcgtcaggatcgtgatccctcctgtttaaaatttccactgatagctctcgtcgtaactgcagctgatctgggcacagtggttttcacagccactgcaggattcatcttccacatcttctcacctcttcttgaaacaagctatacattcgtaaagagttcatttctttggggtagtgtccttacaagcttttcttaaaacgtcaatgatttcttcaatcttccacccaagcttc

SEQ ID NO: 174307 - DNA, 603 bp, Homo sapiens
tgaattcctaaggactgcccattgaaactgacaaaattgcccttgtttgatgagaggaatgagcagagcattgatgtggtgaacaaggatctagtgagactttcccagcatgtttctaccaaagctttatctaagcttctcagaacactctcctaataagcagatgtttggcctttcagaaagtcaacaagcaaaatgccttgagtgtcccaaaacactgatgccatgatgtgggctcctgactggcctccttttcctttgactggaccactgccacctcttggtagccatcgctttcatgatgctttgccttggagatcatattggtgaagccatgttccaactgccgcttacaatttgtcagagggatgcrtcaggatcgtgatccctcctgtttaaaatttccactgatagctctcgtcgtaactgcagctgatctgggcacagtggttttcacagccactgcaggattcatcttccacatcttctcacctcttcttgaaacaagctatacattcgtaaagagttcatttctttggggtagtgtccttacaagcttttcttaaaacgtcaatgatttcttcaatcttccacccaagcttc

SEQ ID NO: 174308 - DNA, 603 bp, Homo sapiens
tgaattcctaaggactgcccattgaaactgacaaaattgcccttgtttgatgagaggaatgagcagagcattgatgtggtgaacaaggatctagtgagactttcccagcatgtttctaccaaagctttatctaagcttctcagaacactctcctaataagcagatgtttggcctttcagaaagtcaacaagcaaaatgccttgagtgtcccaaaacactgatgccatgatgtgggctcctgactggcctccttttcctttgactggaccactgccacctcttggtagccatcgctttcatgatgctttgccttggagatcatattggtgaagccatgttccaactgccgcttacaatttgtcagagggatgcgtcaggatcgtgatccctsctgtttaaaatttccactgatagctctcgtcgtaactgcagctgatctgggcacagtggttttcacagccactgcaggattcatcttccacatcttctcacctcttcttgaaacaagctatacattcgtaaagagttcatttctttggggtagtgtccttacaagcttttcttaaaacgtcaatgatttcttcaatcttccacccaagcttc

SEQ ID NO: 174309 - DNA, 432 bp, Homo sapiens
tgcccattgaaactgacaaaattgcccttgtttgatgagaggaatgagcagagcattgatgtggtgaacaaggatctagtgagactttcccagcatgtttctaccaaagctttatctaagcttctcagaacactctcctaataagcagatgtttggcctttcagaaagtcaacaagcaaaatgccttgagtgtcccaaaacactgatgccatgatgtgggctcctgactggcctccttttcctttgactggaccactgccacctcttggtagccatcgctttcatgatgctttgccttggagatcatattggtgaagccatgttccaactgccgcttacaatttgtcagagggatgcgtcaggatcgtgatccctcctgttkaaaatttccactgatagctctcgtcgtaactgcagctgatctgggcacag

SEQ ID NO: 174310 - DNA, 602 bp, Homo sapiens
gaattcctaaggactgcccattgaaactgacaaaattgcccttgtttgatgagaggaatgagcagagcattgatgtggtgaacaaggatctagtgagactttcccagcatgtttctaccaaagctttatctaagcttctcagaacactctcctaataagcagatgtttggcctttcagaaagtcaacaagcaaaatgccttgagtgtcccaaaacactgatgccatgatgtgggctcctgactggcctccttttcctttgactggaccactgccacctcttggtagccatcgctttcatgatgctttgccttggagatcatattggtgaagccatgttccaactgccgcttacaatttgtcagagggatgcgtcaggatcgtgatccctcctgtttaaaatttccactgatagctctcgtcgtaactscagctgatctgggcacagtggttttcacagccactgcaggattcatcttccacatcttctcacctcttcttgaaacaagctatacattcgtaaagagttcatttctttggggtagtgtccttacaagcttttcttaaaacgtcaatgatttcttcaatcttccacccaagcttc

SEQ ID NO: 174311 - DNA, 602 bp, Homo sapiens
gaattcctaaggactgcccattgaaactgacaaaattgcccttgtttgatgagaggaatgagcagagcattgatgtggtgaacaaggatctagtgagactttcccagcatgtttctaccaaagctttatctaagcttctcagaacactctcctaataagcagatgtttggcctttcagaaagtcaacaagcaaaatgccttgagtgtcccaaaacactgatgccatgatgtgggctcctgactggcctccttttcctttgactggaccactgccacctcttggtagccatcgctttcatgatgctttgccttggagatcatattggtgaagccatgttccaactgccgcttacaatttgtcagagggatgcgtcaggatcgtgatccctcctgtttaaaatttccactgatagctctcgtcgtaactgcagctsatctgggcacagtggttttcacagccactgcaggattcatcttccacatcttctcacctcttcttgaaacaagctatacattcgtaaagagttcatttctttggggtagtgtccttacaagcttttcttaaaacgtcaatgatttcttcaatcttccacccaagcttc

SEQ ID NO: 174312 - DNA, 602 bp, Homo sapiens
gaattcctaaggactgcccattgaaactgacaaaattgcccttgtttgatgagaggaatgagcagagcattgatgtggtgaacaaggatctagtgagactttcccagcatgtttctaccaaagctttatctaagcttctcagaacactctcctaataagcagatgtttggcctttcagaaagtcaacaagcaaaatgccttgagtgtcccaaaacactgatgccatgatgtgggctcctgactggcctccttttcctttgactggaccactgccacctcttggtagccatcgctttcatgatgctttgccttggagatcatattggtgaagccatgttccaactgccgcttacaatttgtcagagggatgcgtcaggatcgtgatccctcctgtttaaaatttccactgatagctctcgtcgtaactgcagctgatctgggcacagtggttttcrcagccactgcaggattcatcttccacatcttctcacctcttcttgaaacaagctatacattcgtaaagagttcatttctttggggtagtgtccttacaagcttttcttaaaacgtcaatgatttcttcaatcttccacccaagcttc

SEQ ID NO: 174313 - DNA, 440 bp, Homo sapiens
gatgtggtgaacaaggatctagtgagactttcccagcatgtttctaccaaagctttatctaagcttctcagaacactctcctaataagcagatgtttggcctttcagaaagtcaacaagcaaaatgccttgagtgtcccaaaacactgatgccatgatgtgggctcctgactggcctccttttcctttgactggaccactgccacctcttggtagccatcgctttcatgatgctttgccttggagatcatattggtgaagccatgttccaactgccgcttacaatttgtcagagggatgcgtcaggatcgtgatccctcctgtttaaaatttccactgatagctctcgtcgtaactgcagctgatctgggcacagtggttttcacagccactgcaggattcatcttccwcatcttctcacctcttcttgaaacaagctat

SEQ ID NO: 174314 - DNA, 446 bp, Homo sapiens
ggagctaggttgcttttcctgagttaagtaactgtccctgcagggcagtcctataatggctactggaattgggctacctaggattaaattaaggttcagggaggttggtcaacttgcttgggcccacacagcaccccttggagccaggactgggccaccagtctgctgcatgctggagggcgggatcccwctggggctgcctttccctgctctgtgcactccgccgctgcgggcaaattgaggacaggaagcggaccgcacccacttctctcccaggacttgggcaatgttcaacacaggtggtcttccaaaggttcatagaaaatgcacatggtgaagaaacgatgcatggatttccactggtttgcactaaaataaacttgtcctaacttctgataacctttctgaactagatctagtttgaggcactaagaaggatgagacat

SEQ ID NO: 174315 - DNA, 620 bp, Homo sapiens
tgaattccacgaaaattgcagcaagrggaaacatcaaatttatggtgaagcttgggtggaagattgaagaaatcattgacgttttaagaaaagcttgtaaggacactaccccaaagaaatgaactctttacgaatgtatagcttgtttcaagaagaggtgagaagatgtggaagatgaatcctgcagtggctgcgaaaaccactgtgcccagatcagctgcagttacgacgagagctatcagtggaaattttaaacaggagggatcacgatcctgacgcatccctctgacaaattgtaagcggcagttggaacatggcttcaccaatatgatcgccaaggcaaagcatcatgaaagcgatggctaccaagaggtggcagtggtccagtcaaaggaaaaggaggccagtcaggagcccacatcatggcatcagtgttttgggacactcaaagcattttgcttgttgactttctgaaagccaaacatctgcttattaggagagtgttctgagaagcttagataaagctttggtagacacatgctgggagagtctcaatagatctgtgttccccacatcaatgctgtgctcattcctctcatcaaacaagggcaattttgtca

SEQ ID NO: 174316 - DNA, 620 bp, Homo sapiens
tgaattccacgaaaattgcagcaagaggaaacatcaaatttatrgtgaagcttgggtggaagattgaagaaatcattgacgttttaagaaaagcttgtaaggacactaccccaaagaaatgaactctttacgaatgtatagcttgtttcaagaagaggtgagaagatgtggaagatgaatcctgcagtggctgcgaaaaccactgtgcccagatcagctgcagttacgacgagagctatcagtggaaattttaaacaggagggatcacgatcctgacgcatccctctgacaaattgtaagcggcagttggaacatggcttcaccaatatgatcgccaaggcaaagcatcatgaaagcgatggctaccaagaggtggcagtggtccagtcaaaggaaaaggaggccagtcaggagcccacatcatggcatcagtgttttgggacactcaaagcattttgcttgttgactttctgaaagccaaacatctgcttattaggagagtgttctgagaagcttagataaagctttggtagacacatgctgggagagtctcaatagatctgtgttccccacatcaatgctgtgctcattcctctcatcaaacaagggcaattttgtca

SEQ ID NO: 174317 - DNA, 620 bp, Homo sapiens
tgaattccacgaaaattgcagcaagaggaaacatcaaatttatggtgaagcttgggtggaagatkgaagaaatcattgacgttttaagaaaagcttgtaaggacactaccccaaagaaatgaactctttacgaatgtatagcttgtttcaagaagaggtgagaagatgtggaagatgaatcctgcagtggctgcgaaaaccactgtgcccagatcagctgcagttacgacgagagctatcagtggaaattttaaacaggagggatcacgatcctgacgcatccctctgacaaattgtaagcggcagttggaacatggcttcaccaatatgatcgccaaggcaaagcatcatgaaagcgatggctaccaagaggtggcagtggtccagtcaaaggaaaaggaggccagtcaggagcccacatcatggcatcagtgttttgggacactcaaagcattttgcttgttgactttctgaaagccaaacatctgcttattaggagagtgttctgagaagcttagataaagctttggtagacacatgctgggagagtctcaatagatctgtgttccccacatcaatgctgtgctcattcctctcatcaaacaagggcaattttgtca

SEQ ID NO: 174318 - DNA, 619 bp, Homo sapiens
tgaattccacgaaaattgcagcaagaggaaacatcaaatttatggtgaagcttgggtggaagattgaagamatcattgacgttttaagaaaagcttgtaaggacactaccccaaagaaatgaactctttacgaatgtatagcttgtttcaagaagaggtgagaagatgtggaagatgaatcctgcagtggctgcgaaaaccactgtgcccagatcagctgcagttacgacgagagctatcagtggaaattttaaacaggagggatcacgatcctgacgcatccctctgacaaattgtaagcggcagttggaacatggcttcaccaatatgatcgccaaggcaaagcatcatgaaagcgatggctaccaagaggtggcagtggtccagtcaaaggaaaaggaggccagtcaggagcccacatcatggcatcagtgttttgggacactcaaagcattttgcttgttgactttctgaaagccaaacatctgcttattaggagagtgttctgagaagcttagataaagctttggtagacacatgctgggagagtctcaatagatctgtgttccccacatcaatgctgtgctcattcctctcatcaaacaagggcaattttgtc

SEQ ID NO: 174319 - DNA, 255 bp, Homo sapiens
gaattccacgaaaattgcagcaagaggaaacatcaaatttatggtgaagcttgggtggaagattgaagaaatcattgacgttttaagaaaagcttgtaaggacactaccccaaagaaatgaactctttacgaatgtatagcttgtttcaagaagaggtgagaagatgtggaagatgartcctgcagtggctgcgaaaaccactgtgcccagatcagctgcagttacgacgagagctatcagtggaaattttaaac

SEQ ID NO: 174320 - DNA, 607 bp, Homo sapiens
tgaattccacgaaaattgcagcaagaggaaacatcaaatttatggtgaagcttgggtggaagattgaagaaatcattgacgttttaagaaaagcttgtaaggacactaccccaaagaaatgaactctttacgaatgtatagcttgtttcaagaagaggtgagaagatgtggaagatgaatcctkcagtggctgcgaaaaccactgtgcccagatcagctgcagttacgacgagagctatcagtggaaattttaaacaggagggatcacgatcctgacgcatccctctgacaaattgtaagcggcagttggaacatggcttcaccaatatgatcgccaaggcaaagcatcatgaaagcgatggctaccaagaggtggcagtggtccagtcaaaggaaaaggaggccagtcaggagcccacatcatggcatcagtgttttgggacactcaaagcattttgcttgttgactttctgaaagccaaacatctgcttattaggagagtgttctgagaagcttagataaagctttggtagacacatgctgggagagtctcaatagatctgtgttccccacatcaatgctgtgctcattcctctcatcaaacaag

SEQ ID NO: 174321 - DNA, 621 bp, Homo sapiens
atgaattccacgaaaattgcagcaagaggaaacatcaaatttatggtgaagcttgggtggaagattgaagaaatcattgacgttttaagaaaagcttgtaaggacactaccccaaagaaatgaactctttacgaatgtatagcttgtttcaagaagaggtgagaagatgtggaagatgaatcctgcagtggctgcgaaaaccactgtgcccagatsagctgcagttacgacgagagctatcagtggaaattttaaacaggagggatcacgatcctgacgcatccctctgacaaattgtaagcggcagttggaacatggcttcaccaatatgatcgccaaggcaaagcatcatgaaagcgatggctaccaagaggtggcagtggtccagtcaaaggaaaaggaggccagtcaggagcccacatcatggcatcagtgttttgggacactcaaagcattttgcttgttgactttctgaaagccaaacatctgcttattaggagagtgttctgagaagcttagataaagctttggtagacacatgctgggagagtctcaatagatctgtgttccccacatcaatgctgtgctcattcctctcatcaaacaagggcaattttgtca

SEQ ID NO: 174322 - DNA, 607 bp, Homo sapiens
tgaattccacgaaaattgcagcaagaggaaacatcaaatttatggtgaagcttgggtggaagattgaagaaatcattgacgttttaagaaaagcttgtaaggacactaccccaaagaaatgaactctttacgaatgtatagcttgtttcaagaagaggtgagaagatgtggaagatgaatcctgcagtggctgcgaaaaccactgtgcccagatcagctgcagttacgacgagagctatcagtggaaattttaaacaggagggatcacratcctgacgcatccctctgacaaattgtaagcggcagttggaacatggcttcaccaatatgatcgccaaggcaaagcatcatgaaagcgatggctaccaagaggtggcagtggtccagtcaaaggaaaaggaggccagtcaggagcccacatcatggcatcagtgttttgggacactcaaagcattttgcttgttgactttctgaaagccaaacatctgcttattaggagagtgttctgagaagcttagataaagctttggtagacacatgctgggagagtctcaatagatctgtgttccccacatcaatgctgtgctcattcctctcatcaaacaag

SEQ ID NO: 174323 - DNA, 621 bp, Homo sapiens
atgaattccacgaaaattgcagcaagaggaaacatcaaatttatggtgaagcttgggtggaagattgaagaaatcattgacgttttaagaaaagcttgtaaggacactaccccaaagaaatgaactctttacgaatgtatagcttgtttcaagaagaggtgagaagatgtggaagatgaatcctgcagtggctgcgaaaaccactgtgcccagatcagctgcagttacgacgagagctatcagtggaaattttaaacaggagggatcacgatcctgackcatccctctgacaaattgtaagcggcagttggaacatggcttcaccaatatgatcgccaaggcaaagcatcatgaaagcgatggctaccaagaggtggcagtggtccagtcaaaggaaaaggaggccagtcaggagcccacatcatggcatcagtgttttgggacactcaaagcattttgcttgttgactttctgaaagccaaacatctgcttattaggagagtgttctgagaagcttagataaagctttggtagacacatgctgggagagtctcaatagatctgtgttccccacatcaatgctgtgctcattcctctcatcaaacaagggcaattttgtca

SEQ ID NO: 174324 - DNA, 620 bp, Homo sapiens
tgaattccacgaaaattgcagcaagaggaaacatcaaatttatggtgaagcttgggtggaagattgaagaaatcattgacgttttaagaaaagcttgtaaggacactaccccaaagaaatgaactctttacgaatgtatagcttgtttcaagaagaggtgagaagatgtggaagatgaatcctgcagtggctgcgaaaaccactgtgcccagatcagctgcagttacgacgagagctatcagtggaaattttaaacaggagggatcacgatcctgacgcatccctctgacaaattgtaagcggmagttggaacatggcttcaccaatatgatcgccaaggcaaagcatcatgaaagcgatggctaccaagaggtggcagtggtccagtcaaaggaaaaggaggccagtcaggagcccacatcatggcatcagtgttttgggacactcaaagcattttgcttgttgactttctgaaagccaaacatctgcttattaggagagtgttctgagaagcttagataaagctttggtagacacatgctgggagagtctcaatagatctgtgttccccacatcaatgctgtgctcattcctctcatcaaacaagggcaattttgtca

SEQ ID NO: 174325 - DNA, 621 bp, Homo sapiens
atgaattccacgaaaattgcagcaagaggaaacatcaaatttatggtgaagcttgggtggaagattgaagaaatcattgacgttttaagaaaagcttgtaaggacactaccccaaagaaatgaactctttacgaatgtatagcttgtttcaagaagaggtgagaagatgtggaagatgaatcctgcagtggctgcgaaaaccactgtgcccagatcagctgcagttacgacgagagctatcagtggaaattttaaacaggagggatcacgatcctgacgcatccctctgacaaattgtaagcggcagttggarcatggcttcaccaatatgatcgccaaggcaaagcatcatgaaagcgatggctaccaagaggtggcagtggtccagtcaaaggaaaaggaggccagtcaggagcccacatcatggcatcagtgttttgggacactcaaagcattttgcttgttgactttctgaaagccaaacatctgcttattaggagagtgttctgagaagcttagataaagctttggtagacacatgctgggagagtctcaatagatctgtgttccccacatcaatgctgtgctcattcctctcatcaaacaagggcaattttgtca

SEQ ID NO: 174326 - DNA, 621 bp, Homo sapiens
atgaattccacgaaaattgcagcaagaggaaacatcaaatttatggtgaagcttgggtggaagattgaagaaatcattgacgttttaagaaaagcttgtaaggacactaccccaaagaaatgaactctttacgaatgtatagcttgtttcaagaagaggtgagaagatgtggaagatgaatcctgcagtggctgcgaaaaccactgtgcccagatcagctgcagttacgacgagagctatcagtggaaattttaaacaggagggatcacgatcctgacgcatccctctgacaaattgtaagcggcagttggaacatrgcttcaccaatatgatcgccaaggcaaagcatcatgaaagcgatggctaccaagaggtggcagtggtccagtcaaaggaaaaggaggccagtcaggagcccacatcatggcatcagtgttttgggacactcaaagcattttgcttgttgactttctgaaagccaaacatctgcttattaggagagtgttctgagaagcttagataaagctttggtagacacatgctgggagagtctcaatagatctgtgttccccacatcaatgctgtgctcattcctctcatcaaacaagggcaattttgtca

SEQ ID NO: 174327 - DNA, 619 bp, Homo sapiens
tgaattccacgaaaattgcagcaagaggaaacatcaaatttatggtgaagcttgggtggaagattgaagaaatcattgacgttttaagaaaagcttgtaaggacactaccccaaagaaatgaactctttacgaatgtatagcttgtttcaagaagaggtgagaagatgtggaagatgaatcctgcagtggctgcgaaaaccactgtgcccagatcagctgcagttacgacgagagctatcagtggaaattttaaacaggagggatcacgatcctgacgcatccctctgacaaattgtaagcggcagttggaacatggcttcaccaatatgatygccaaggcaaagcatcatgaaagcgatggctaccaagaggtggcagtggtccagtcaaaggaaaaggaggccagtcaggagcccacatcatggcatcagtgttttgggacactcaaagcattttgcttgttgactttctgaaagccaaacatctgcttattaggagagtgttctgagaagcttagataaagctttggtagacacatgctgggagagtctcaatagatctgtgttccccacatcaatgctgtgctcattcctctcatcaaacaagggcaattttgtc

SEQ ID NO: 174328 - DNA, 606 bp, Homo sapiens
attgcagcaagaggaaacatcaaatttatggtgaagcttgggtggaagattgaagaaatcattgacgttttaagaaaagcttgtaaggacactaccccaaagaaatgaactctttacgaatgtatagcttgtttcaagaagaggtgagaagatgtggaagatgaatcctgcagtggctgcgaaaaccactgtgcccagatcagctgcagttacgacgagagctatcagtggaaattttaaacaggagggatcacgatcctgacgcatccctctgacaaattgtaagcggcagttggaacatggcttcaccaatatgatcgccaagkcaaagcatcatgaaagcgatggctaccaagaggtggcagtggtccagtcaaaggaaaaggaggccagtcaggagcccacatcatggcatcagtgttttgggacactcaaagcattttgcttgttgactttctgaaagccaaacatctgcttattaggagagtgttctgagaagcttagataaagctttggtagacacatgctgggagagtctcaatagatctgtgttccccacatcaatgctgtgctcattcctctcatcaaacaagggcaattttgtca

SEQ ID NO: 174329 - DNA, 620 bp, Homo sapiens
tgaattccacgaaaattgcagcaagaggaaacatcaaatttatggtgaagcttgggtggaagattgaagaaatcattgacgttttaagaaaagcttgtaaggacactaccccaaagaaatgaactctttacgaatgtatagcttgtttcaagaagaggtgagaagatgtggaagatgaatcctgcagtggctgcgaaaaccactgtgcccagatcagctgcagttacgacgagagctatcagtggaaattttaaacaggagggatcacgatcctgacgcatccctctgacaaattgtaagcggcagttggaacatggcttcaccaatatgatcgccaaggcaaagcatcatgaaagcgatggctaccaagaggtggcagtggtccagtcaaaggaaaaggargccagtcaggagcccacatcatggcatcagtgttttgggacactcaaagcattttgcttgttgactttctgaaagccaaacatctgcttattaggagagtgttctgagaagcttagataaagctttggtagacacatgctgggagagtctcaatagatctgtgttccccacatcaatgctgtgctcattcctctcatcaaacaagggcaattttgtca

SEQ ID NO: 174330 - DNA, 620 bp, Homo sapiens
tgaattccacgaaaattgcagcaagaggaaacatcaaatttatggtgaagcttgggtggaagattgaagaaatcattgacgttttaagaaaagcttgtaaggacactaccccaaagaaatgaactctttacgaatgtatagcttgtttcaagaagaggtgagaagatgtggaagatgaatcctgcagtggctgcgaaaaccactgtgcccagatcagctgcagttacgacgagagctatcagtggaaattttaaacaggagggatcacgatcctgacgcatccctctgacaaattgtaagcggcagttggaacatggcttcaccaatatgatcgccaaggcaaagcatcatgaaagcgatggctaccaagaggtggcagtggtccagtcaaaggaaaaggaggccagtcaggagcccacatcatrgcatcagtgttttgggacactcaaagcattttgcttgttgactttctgaaagccaaacatctgcttattaggagagtgttctgagaagcttagataaagctttggtagacacatgctgggagagtctcaatagatctgtgttccccacatcaatgctgtgctcattcctctcatcaaacaagggcaattttgtca

SEQ ID NO: 174331 - DNA, 589 bp, Homo sapiens
atgaattccacgaaaattgcagcaagaggaaacatcaaatttatggtgaagcttgggtggaagattgaagaaatcattgacgttttaagaaaagcttgtaaggacactaccccaaagaaatgaactctttacgaatgtatagcttgtttcaagaagaggtgagaagatgtggaagatgaatcctgcagtggctgygaaaaccactgtgcccagatgagctgcagttacgacgagagctatcagtggaaattttcaacaggagggatcacgatcctgacgcatccctctgacaaattgtaagcggcagttggaacatggcttcaccaatatgatcgccaaggcaaagcatcatgaaagcgatggctaccaagaggtggcagtggtccagtcaaaggaaaaggaagccagtcaggagcccacatcatggcatcagtgttttgggacactcaaggcattttgcttgttgactttctgaaaggccaaacatctgcttattaggagagtgttctgagaagcttagataaagctttggtagaaacatgctgggagagtctcactagatccttgttcaccacatcaatgctctgct

SEQ ID NO: 174332 - DNA, 604 bp, Homo sapiens
acatgaattccacgaaaattgcagcaagaggaaacatcaaatttatggtgaagcttgggtggaagattgaagaaatcattgacgttttaagaaaagcttgtaaggacactaccccaaagaaatgaactctttacgaatgtatagcttgtttcaagaagaggtgagaagatgtggaagatgaatcctgcagtggctgtgaaaaccactgtgcccagatsagctgcagttacgacgagagctatcagtggaaattttcaacaggagggatcacgatcctgacgcatccctctgacaaattgtaagcggcagttggaacatggcttcaccaatatgatcgccaaggcaaagcatcatgaaagcgatggctaccaagaggtggcagtggtccagtcaaaggaaaaggaagccagtcaggagcccacatcatggcatcagtgttttgggacactcaaggcattttgcttgttgactttctgaaaggccaaacatctgcttattaggagagtgttctgagaagcttagataaagctttggtagaaacatgctgggagagtctcactagatccttgttcaccacatcaatgctctgctcattcctctcatc

SEQ ID NO: 174333 - DNA, 597 bp, Homo sapiens
acatcaaatttatggtgaagcttgggtggaagattgaagaaatcattgacgttttaagaaaagcttgtaaggacactaccccaaagaaatgaactctttacgaatgtatagcttgtttcaagaagaggtgagaagatgtggaagatgaatcctgcagtggctgtgaaaaccactgtgcccagatgagctgcagttacgacgagagctatcagtggaaattttmaacaggagggatcacgatcctgacgcatccctctgacaaattgtaagcggcagttggaacatggcttcaccaatatgatcgccaaggcaaagcatcatgaaagcgatggctaccaagaggtggcagtggtccagtcaaaggaaaaggaagccagtcaggagcccacatcatggcatcagtgttttgggacactcaaggcattttgcttgttgactttctgaaaggccaaacatctgcttattaggagagtgttctgagaagcttagataaagctttggtagaaacatgctgggagagtctcactagatccttgttcaccacatcaatgctctgctcattcctctcatcaaacaagggcaattttgtcagtttca

SEQ ID NO: 174334 - DNA, 534 bp, Homo sapiens
ggtggaagattgaagaaatcattgacgttttaagaaaagcttgtaaggacactaccccaaagaaatgaactctttacgaatgtatagcttgtttcaagaagaggtgagaagatgtggaagatgaatcctgcagtggctgtgaaaaccactgtgcccagatgagctgcagttacgacgagagctatcagtggaaattttcaacaggagggatcacgatcctgacgcatccctctgacaaattgtaagcggcagttggaacatggcttcaccaatatgatckccaaggcaaagcatcatgaaagcgatggctaccaagaggtggcagtggtccagtcaaaggaaaaggaagccagtcaggagcccacatcatggcatcagtgttttgggacactcaaggcattttgcttgttgactttctgaaaggccaaacatctgcttattaggagagtgttctgagaagcttagataaagctttggtagaaacatgctgggagagtctcactagatccttgttcaccacatcaatgctctgct

SEQ ID NO: 174335 - DNA, 597 bp, Homo sapiens
acatcaaatttatggtgaagcttgggtggaagattgaagaaatcattgacgttttaagaaaagcttgtaaggacactaccccaaagaaatgaactctttacgaatgtatagcttgtttcaagaagaggtgagaagatgtggaagatgaatcctgcagtggctgtgaaaaccactgtgcccagatgagctgcagttacgacgagagctatcagtggaaattttcaacaggagggatcacgatcctgacgcatccctctgacaaattgtaagcggcagttggaacatggcttcaccaatatgatcgccaaggcaaagcatcatgaaagcgatggctaccaagaggtggcagtggtccagtcaaaggaaaaggargccagtcaggagcccacatcatggcatcagtgttttgggacactcaaggcattttgcttgttgactttctgaaaggccaaacatctgcttattaggagagtgttctgagaagcttagataaagctttggtagaaacatgctgggagagtctcactagatccttgttcaccacatcaatgctctgctcattcctctcatcaaacaagggcaattttgtcagtttca

SEQ ID NO: 174336 - DNA, 317 bp, Homo sapiens
tggcttcaccaatatgatcgccaaggcaaagcatcatgaaagcgatggctaccaagaggtggcagtggtccagtcaaaggaaaaggaagccagtcaggagcccacatcatggcatcagtgttttgggacactcaaggcattttgcttgttgactttctgaaaggccaaacatctgcttattaggagagtgttctgagaagcttagataaagctttggtagaaacatgctgggaragtctcactagatccttgttcaccacatcaatgctctgctcattcctctcatcaaacaagggcaattttgtcagtttcaatgg

SEQ ID NO: 174337 - DNA, 532 bp, Homo sapiens
tgctggccctgaagctcatccacagcaccgtggtggacacggccgtgctcttcccgcactacctgggtttcccctacaagcgctccctcaggaatctcgcggccgactacctggcacagatcatccaggacagccaggacggccacaactccagcgaggacgcaaacgcctgcctgcagctggtgatgtggaaggtccgacagcgcgcccagatccagccacgccaccggtccgcctctcccgccgccctggcctgtccttagccccaggcctcttccaaaaccgccatcagtcccgagagctcaccctgcccacctcgccgcaaagcgaaagaaactggagcagccggcggcaggagagggcaaaaagccaagagtaaccccaacccccsactcccggtcccccggaatccctgccgcggcccctcgggcctgtccacatccctctgcccctcccagacctctgtccttccaccaatcgcctcccgcagcccgagccgccactcccagtcccccgagtccctgccgcgcgc

SEQ ID NO: 174338 - DNA, 619 bp, Homo sapiens
gaattccacgaaaattgcagcaagaggaaacatcaaatttatggtgaagcttgggtggaagatkgaagaaatcattgacgttttaagaaaagcttgtaaggacactaccccaaagaaatgaactctttacgaatgtatagcttgtttcaagaagaggtgagaagatgtggaagatgaatcctgcagtggctgtgaaaacctctgtgcccagatcagctgcagttacgacgagagctatcagtggaaattttaaacaggagggatcacgatcctgacgcatccctctgacaaattgtaagcggcagttggaacatggcttcaccaatatgatctccaaggcaaagcatcatgaaagcgatggctaccaagaggtggcagtggtccagtcaaaggaaaaggaggccagtcaggagcccacatcatggcatcagtgttttgggacactcaaggcattttgcttgttgactttctgaaaggccaaacatctgcttattaggagagtgttctgagaagcttagataaagctttggtagaaacatgctgggaaagtctcactagatccttgttcaccacatcaatgctctgctcattccactcatcaaacaagggcaattttgtc

SEQ ID NO: 174339 - DNA, 619 bp, Homo sapiens
gaattccacgaaaattgcagcaagaggaaacatcaaatttatggtgaagcttgggtggaagatggaagaaatcattgacgttttaagaaaagcttgtaaggacactaccccaaagaaatgaactctttacgaatgtatagcttgtttcaagaagaggtgagaagatgtggaagatgaatcctgcagtggctgtgaaaaccwctgtgcccagatcagctgcagttacgacgagagctatcagtggaaattttaaacaggagggatcacgatcctgacgcatccctctgacaaattgtaagcggcagttggaacatggcttcaccaatatgatctccaaggcaaagcatcatgaaagcgatggctaccaagaggtggcagtggtccagtcaaaggaaaaggaggccagtcaggagcccacatcatggcatcagtgttttgggacactcaaggcattttgcttgttgactttctgaaaggccaaacatctgcttattaggagagtgttctgagaagcttagataaagctttggtagaaacatgctgggaaagtctcactagatccttgttcaccacatcaatgctctgctcattccactcatcaaacaagggcaattttgtc

SEQ ID NO: 174340 - DNA, 589 bp, Homo sapiens
ctgcttattaggagagtgttctgagaagcttagataaagctttggtagaaacatgctgggaragtctcactagatccttgttcaccacatcaatgctctgctcattccactcatcaaacaagggcaattttgtcagtttcaatgggcagtccttaggaattcaccttacgggctgctttcattccttctaaattctttttgtttcctaatgataaaaagtctccttgccttgcttggaaagatgagagaaagtctccttgccttgtttggacagatgagagatgagatcctcctcttctctcccaggacagaatggtgagacttgagtttcctttctcctcactcttctcctccttgagggagctgctgtgccggacagacctgcccccgtgtctagacactggtagactcgtttaagttcctcacaggcaatcctccatggggtcaaagtggaaggacttatttcttcagggctcagtaatccacatcctggcgcgcaccttcaccagcccagggcggggtagaggagggtgaaagggcgtggctcagagcccgcttcttccgctcgggcgtatcctgggaggaaccc

SEQ ID NO: 174341 - DNA, 589 bp, Homo sapiens
ctgcttattaggagagtgttctgagaagcttagataaagctttggtagaaacatgctgggaaagtctcactagatccttgttcaccacatcaatgctctgctcattccwctcatcaaacaagggcaattttgtcagtttcaatgggcagtccttaggaattcaccttacgggctgctttcattccttctaaattctttttgtttcctaatgataaaaagtctccttgccttgcttggaaagatgagagaaagtctccttgccttgtttggacagatgagagatgagatcctcctcttctctcccaggacagaatggtgagacttgagtttcctttctcctcactcttctcctccttgagggagctgctgtgccggacagacctgcccccgtgtctagacactggtagactcgtttaagttcctcacaggcaatcctccatggggtcaaagtggaaggacttatttcttcagggctcagtaatccacatcctggcgcgcaccttcaccagcccagggcggggtagaggagggtgaaagggcgtggctcagagcccgcttcttccgctcgggcgtatcctgggaggaaccc

SEQ ID NO: 174342 - DNA, 542 bp, Homo sapiens
agagcgacctgctggccctgaagctcatccacagcaccgtggtggacacggccgtgctcttcccgcactacctgggtttcccctacaagcgctccctcaggaatctcgcggccgactacctggcacagatcatccaggacagccaggacggccacaactccagcgaggacgcaaacgcctgcctgcagctggtgatgtggaaggtccgacagcgcgcccagatccagccacgccaccggtccgcctctcccgccgccctggcctgtccttagccccaggcctcttccaaaaccgccatcagtcccgagagctcaccctgcccacctcgccgcaaagcgaaagaaactggagcagccggcggcaggagagggcaaaaagccaagagtaaccccaacccccgactcccggtmccccggaatccctgccgcggcccctcgggcctgtccacatacctctgcccctcccagacctctgtccttccaccaatcgcctcccgcagccccgagccgccactcccagtcccccgagtccctgccgcgcgc

SEQ ID NO: 174343 - DNA, 589 bp, Homo sapiens
gtgtttattaggagagtgttctgagaagcttagataaagctttggtagaaacatgctgggagagtctcactagatccttgttcaccacatcaatgctctgctcattcctctcatcaaacaagggcaattttgtcagtttcaatgggcagtccttaggaattcaccttacgggctgctttcattccttytaaattctttttgtttcctaatgataaaaagtctccttgccttgcttggaaagatgagagaaagtctccttgccttgtttggacagatgagagatgagatcctcctcttctctcccaggacagaatggtgagacttgagtttcctttctcctcactcttctcctccttgagggagctgctgtgccggacagacctgcccccgtgtctagacactggtagactcgtttaagttcctcacaggcaatcctccatggggtcaaagtggaaggacttatttcttcagggctcagtagtccacatcctggcgcgcaccttcaccagcccagggcggggtagaggagggtgaaagggcgtggctcagagcccgcttcttccgctcgggcgtatcctgggaggaaccc

SEQ ID NO: 174344 - DNA, 583 bp, Homo sapiens
ccattgaaactgacaaaattgcccttgtttgatgagaggaatgagcagagcattgatgtggtgaacaaggatctagtgagactytcccagcatgtttctaccaaagctttatctaagcttctcagaacactctcctaataagcagatgtttggcctttcagaaagtcaacaagcaaaatgccttgagtgtcccaaaacactgatgccatgatgtgggctcctgactggcctccttttcctttgactggaccactgccacctcttggtagccatcgctttcatgatgctttgccttggcgatcatattggtgaagccatgctccaactgccgcttacaatttgtcagagggatgcgtcaggatcgtgatccctcctgtttaaaatttccactgatagctctcgtcgtaactgcagctgatctgggcacagtggttttcgcagccactgcaggattcatcttccacatcttctcacctcttcttgaaacaagctatacattcgtaaagagttcatttctttggggtagtgtccttacaagcttttcttaaaacgtcaatgatttcttcaatcttccacccaagct

SEQ ID NO: 174345 - DNA, 587 bp, Homo sapiens
gaattcctaaggactgcccattgaaactgacaaaattgcccttgtttgatgagaggaatgagcagagcattgatgtggtgaacaaggatctagtgagactttcccagcatgtttctaccaaagctttayctaagcttctcagaacactctcctaataagcagatgtttggcctttcagaaagtcaacaagcaaaatgccttgagtgtcccaaaacactgatgccatgatgtgggctcctgactggcctccttttcctttgactggaccactgccacctcttggtagccatcgctttcatgatgctttgccttggcgatcatattggtgaagccatgctccaactgccgcttacaatttgtcagagggatgcgtcaggatcgtgatccctcctgtttaaaatttccactgatagctctcgtcgtaactgcagctgatctgggcacagtggttttcgcagccactgcaggattcatcttccacatcttctcacctcttcttgaaacaagctatacattcgtaaagagttcatttctttggggtagtgtccttacaagcttttcttaaaacgtcaatgatttcttcaatc

SEQ ID NO: 174346 - DNA, 533 bp, Homo sapiens
ggaatgagcagagcattgatgtggtgaacaaggatctagtgagactttcccagcatgtttctaccaaagctttatctaagcttctcagaacactctcctaataagcagatgtttggcctttcagaaagtcaacaagcaaaatgccttgagtgtcccaaaacactgatgccatgatgtgggctcctgactggcctccttttcctttgactggaccactgccacctcttggtagccatcgctttcatgatgctttgccwtggcgatcatattggtgaagccatgctccaactgccgcttacaatttgtcagagggatgcgtcaggatcgtgatccctcctgtttaaaatttccactgatagctctcgtcgtaactgcagctgatctgggcacagtggttttcgcagccactgcaggattcatcttccacatcttctcacctcttcttgaaacaagctatacattcgtaaagagttcatttctttggggtagtgtccttacaagcttttcttaaaacgtcaatgatttcttcaatc

SEQ ID NO: 174347 - DNA, 600 bp, Homo sapiens
gaattcctaaggactgcccattgaaactgacaaaattgcccttgtttgatgagaggaatgagcagagcattgatgtggtgaacaaggatctagtgagactttcccagcatgtttctaccaaagctttatctaagcttctcagaacactctcctaataagcagatgtttggcctttcagaaagtcaacaagcaaaatgccttgagtgtcccaaaacactgatgccatgatgtgggctcctgactggcctccttttcctttgactggaccactgccacctcttggtagccatcgctttcatgatgctttgccttggmgatcatattggtgaagccatgctccaactgccgcttacaatttgtcagagggatgcgtcaggatcgtgatccctcctgtttaaaatttccactgatagctctcgtcgtaactgcagctgatctgggcacagtggttttcgcagccactgcaggattcatcttccacatcttctcacctcttcttgaaacaagctatacattcgtaaagagttcatttctttggggtagtgtccttacaagcttttcttaaaacgtcaatgatttcttcaatcttccacccaagct

SEQ ID NO: 174348 - DNA, 600 bp, Homo sapiens
gaattcctaaggactgcccattgaaactgacaaaattgcccttgtttgatgagaggaatgagcagagcattgatgtggtgaacaaggatctagtgagactttcccagcatgtttctaccaaagctttatctaagcttctcagaacactctcctaataagcagatgtttggcctttcagaaagtcaacaagcaaaatgccttgagtgtcccaaaacactgatgccatgatgtgggctcctgactggcctccttttcctttgactggaccactgccacctcttggtagccatcgctttcatgatgctttgccttggcgatcatattggtgaagccatgytccaactgccgcttacaatttgtcagagggatgcgtcaggatcgtgatccctcctgtttaaaatttccactgatagctctcgtcgtaactgcagctgatctgggcacagtggttttcgcagccactgcaggattcatcttccacatcttctcacctcttcttgaaacaagctatacattcgtaaagagttcatttctttggggtagtgtccttacaagcttttcttaaaacgtcaatgatttcttcaatcttccacccaagct

SEQ ID NO: 174349 - DNA, 600 bp, Homo sapiens
gaattcctaaggactgcccattgaaactgacaaaattgcccttgtttgatgagaggaatgagcagagcattgatgtggtgaacaaggatctagtgagactttcccagcatgtttctaccaaagctttatctaagcttctcagaacactctcctaataagcagatgtttggcctttcagaaagtcaacaagcaaaatgccttgagtgtcccaaaacactgatgccatgatgtgggctcctgactggcctccttttcctttgactggaccactgccacctcttggtagccatcgctttcatgatgctttgccttggcgatcatattggtgaagccatgctccaactgccgcttacaatttgtcagagggatgcgtcaggatcgtgatccctcctgtttaaaatttccactgatagctctcgtcgtaactgcagctgatctgggcacagtggttttcrcagccactgcaggattcatcttccacatcttctcacctcttcttgaaacaagctatacattcgtaaagagttcatttctttggggtagtgtccttacaagcttttcttaaaacgtcaatgatttcttcaatcttccacccaagct

SEQ ID NO: 174350 - DNA, 586 bp, Homo sapiens
tttaataaataaacgtcttttgtagtgtatgttatttcattttatttttataatttatatgaattttaattttaacttgacaaataaaaattatatatatttatggcatacaacatgatgtttcatacgtgtatacattgtggaatgacaaaatcaagctaattaacacactcgtttcctcacatactgattttaatgtgatgaggacatgtctaaaatctactcttatagcaattttcaagtatacaatacatacttatacactgtagatgccaggctgttcaatagatctctagaaccattcctctctgaaattttgtatcatgagactatcatctctccagtccctccctgacccctgcctcgggtaaccaccgttctgctctctacagctatgagttgcattgtttgagattgcacatataagtgagatcatgcagtatttgtctttttgtgcttgctttttaaatctttattatgtaattatttattttttgagacagggtctcagtctgtcacccaggctggagwacagtgacacaaacacggctcactcaccacggcctccacctcccggggtcgagag

SEQ ID NO: 174351 - DNA, 557 bp, Homo sapiens
gagactttttatcattaggaaacaaaaagaatttagaaggaatgaaagcagcccgtaaggtgaattcctaaggactgcccattgaaactgacaaaattgcccttgtttgatgagaggaatgagcagagcattgatgtggtgaacaaggatctagtgagactytcccagcatgtttctaccaaagctttatctaagcttctcagaacactctcctaataagcagatgtttggcctttcagaaagtcaacaagcaaaatgccttgagtgtcccaaaacactgatgccatgatgtgggctcctgactggcctccttttcctttgactggaccactgccacctcttggtagccatcgctttcatgatgctttgccttggcgatcatattggtgaagccatgttccaactgccgcttacaatttgtcagagggatgcgtcaggatcgtgatccctcctgtttaaaatttccactgatagctctcgtcgtaactgcagctgatctgggcacagtggttttcgcagccactgcaggattcatcttccacatcttctcacctctt

SEQ ID NO: 174352 - DNA, 590 bp, Homo sapiens
gaattcctaaggactgcccattgaaactgacaaaattgcccttgtttgatgagaggaatgagcagagcattgatgtggtgaacaaggatctagtgagactttcccagcatgtttctaccaaagctttayctaagcttctcagaacactctcctaataagcagatgtttggcctttcagaaagtcaacaagcaaaatgccttgagtgtcccaaaacactgatgccatgatgtgggctcctgactggcctccttttcctttgactggaccactgccacctcttggtagccatcgctttcatgatgctttgccttggcgatcatattggtgaagccatgttccaactgccgcttacaatttgtcagagggatgcgtcaggatcgtgatccctcctgtttaaaatttccactgatagctctcgtcgtaactgcagctgatctgggcacagtggttttcgcagccactgcaggattcatcttccacatcttctcacctcttcttgaaacaagctatacattcgtaaagagttcatttctttggggtagtgtccttacaagcttttcttaaaacgtcaatgatgtcttcaatcttc

SEQ ID NO: 174353 - DNA, 557 bp, Homo sapiens
gagactttttatcattaggaaacaaaaagaatttagaaggaatgaaagcagcccgtaaggtgaattcctaaggactgcccattgaaactgacaaaattgcccttgtttgatgagaggaatgagcagagcattgatgtggtgaacaaggatctagtgagactttcccagcatgtttctaccaaagctttatctaagcttctcagaacactctcctaataagcagatgtttggcctttcagaaagtcaacaagcaaaatgccttgagtgtcccaaaacactgatgccatgatgtgggctcctgactggcctccttttcctttgactggaccactgccacctcttggtagccatcgctttcatgatgctttgccwtggcgatcatattggtgaagccatgttccaactgccgcttacaatttgtcagagggatgcgtcaggatcgtgatccctcctgtttaaaatttccactgatagctctcgtcgtaactgcagctgatctgggcacagtggttttcgcagccactgcaggattcatcttccacatcttctcacctctt

SEQ ID NO: 174354 - DNA, 590 bp, Homo sapiens
gaattcctaaggactgcccattgaaactgacaaaattgcccttgtttgatgagaggaatgagcagagcattgatgtggtgaacaaggatctagtgagactttcccagcatgtttctaccaaagctttatctaagcttctcagaacactctcctaataagcagatgtttggcctttcagaaagtcaacaagcaaaatgccttgagtgtcccaaaacactgatgccatgatgtgggctcctgactggcctccttttcctttgactggaccactgccacctcttggtagccatcgctttcatgatgctttgccttsgcgatcatattggtgaagccatgttccaactgccgcttacaatttgtcagagggatgcgtcaggatcgtgatccctcctgtttaaaatttccactgatagctctcgtcgtaactgcagctgatctgggcacagtggttttcgcagccactgcaggattcatcttccacatcttctcacctcttcttgaaacaagctatacattcgtaaagagttcatttctttggggtagtgtccttacaagcttttcttaaaacgtcaatgatgtcttcaatcttc

SEQ ID NO: 174355 - DNA, 590 bp, Homo sapiens
gaattcctaaggactgcccattgaaactgacaaaattgcccttgtttgatgagaggaatgagcagagcattgatgtggtgaacaaggatctagtgagactttcccagcatgtttctaccaaagctttatctaagcttctcagaacactctcctaataagcagatgtttggcctttcagaaagtcaacaagcaaaatgccttgagtgtcccaaaacactgatgccatgatgtgggctcctgactggcctccttttcctttgactggaccactgccacctcttggtagccatcgctttcatgatgctttgccttggmgatcatattggtgaagccatgttccaactgccgcttacaatttgtcagagggatgcgtcaggatcgtgatccctcctgtttaaaatttccactgatagctctcgtcgtaactgcagctgatctgggcacagtggttttcgcagccactgcaggattcatcttccacatcttctcacctcttcttgaaacaagctatacattcgtaaagagttcatttctttggggtagtgtccttacaagcttttcttaaaacgtcaatgatgtcttcaatcttc

SEQ ID NO: 174356 - DNA, 590 bp, Homo sapiens
gaattcctaaggactgcccattgaaactgacaaaattgcccttgtttgatgagaggaatgagcagagcattgatgtggtgaacaaggatctagtgagactttcccagcatgtttctaccaaagctttatctaagcttctcagaacactctcctaataagcagatgtttggcctttcagaaagtcaacaagcaaaatgccttgagtgtcccaaaacactgatgccatgatgtgggctcctgactggcctccttttcctttgactggaccactgccacctcttggtagccatcgctttcatgatgctttgccttggcgatcatattggtgaasccatgttccaactgccgcttacaatttgtcagagggatgcgtcaggatcgtgatccctcctgtttaaaatttccactgatagctctcgtcgtaactgcagctgatctgggcacagtggttttcgcagccactgcaggattcatcttccacatcttctcacctcttcttgaaacaagctatacattcgtaaagagttcatttctttggggtagtgtccttacaagcttttcttaaaacgtcaatgatgtcttcaatcttc

SEQ ID NO: 174357 - DNA, 590 bp, Homo sapiens
gaattcctaaggactgcccattgaaactgacaaaattgcccttgtttgatgagaggaatgagcagagcattgatgtggtgaacaaggatctagtgagactttcccagcatgtttctaccaaagctttatctaagcttctcagaacactctcctaataagcagatgtttggcctttcagaaagtcaacaagcaaaatgccttgagtgtcccaaaacactgatgccatgatgtgggctcctgactggcctccttttcctttgactggaccactgccacctcttggtagccatcgctttcatgatgctttgccttggcgatcatattggtgaagccatgytccaactgccgcttacaatttgtcagagggatgcgtcaggatcgtgatccctcctgtttaaaatttccactgatagctctcgtcgtaactgcagctgatctgggcacagtggttttcgcagccactgcaggattcatcttccacatcttctcacctcttcttgaaacaagctatacattcgtaaagagttcatttctttggggtagtgtccttacaagcttttcttaaaacgtcaatgatgtcttcaatcttc

SEQ ID NO: 174358 - DNA, 589 bp, Homo sapiens
gaattcctaaggactgcccattgaaactgacaaaattgcccttgtttgatgagaggaatgagcagagcattgatgtggtgaacaaggatctagtgagactttcccagcatgtttctaccaaagctttatctaagcttctcagaacactctcctaataagcagatgtttggcctttcagaaagtcaacaagcaaaatgccttgagtgtcccaaaacactgatgccatgatgtgggctcctgactggcctccttttcctttgactggaccactgccacctcttggtagccatcgctttcatgatgctttgccttggcgatcatattggtgaagccatgttccaactkccgcttacaatttgtcagagggatgcgtcaggatcgtgatccctcctgtttaaaatttccactgatagctctcgtcgtaactgcagctgatctgggcacagtggttttcgcagccactgcaggattcatcttccacatcttctcacctcttcttgaaacaagctatacattcgtaaagagttcatttctttggggtagtgtccttacaagcttttcttaaaacgtcaatgatgtcttcaatctt

SEQ ID NO: 174359 - DNA, 590 bp, Homo sapiens
gaattcctaaggactgcccattgaaactgacaaaattgcccttgtttgatgagaggaatgagcagagcattgatgtggtgaacaaggatctagtgagactttcccagcatgtttctaccaaagctttatctaagcttctcagaacactctcctaataagcagatgtttggcctttcagaaagtcaacaagcaaaatgccttgagtgtcccaaaacactgatgccatgatgtgggctcctgactggcctccttttcctttgactggaccactgccacctcttggtagccatcgctttcatgatgctttgccttggcgatcatattggtgaagccatgttccaactgccgcttacaatttgtcagarggatgcgtcaggatcgtgatccctcctgtttaaaatttccactgatagctctcgtcgtaactgcagctgatctgggcacagtggttttcgcagccactgcaggattcatcttccacatcttctcacctcttcttgaaacaagctatacattcgtaaagagttcatttctttggggtagtgtccttacaagcttttcttaaaacgtcaatgatgtcttcaatcttc

SEQ ID NO: 174360 - DNA, 590 bp, Homo sapiens
gaattcctaaggactgcccattgaaactgacaaaattgcccttgtttgatgagaggaatgagcagagcattgatgtggtgaacaaggatctagtgagactttcccagcatgtttctaccaaagctttatctaagcttctcagaacactctcctaataagcagatgtttggcctttcagaaagtcaacaagcaaaatgccttgagtgtcccaaaacactgatgccatgatgtgggctcctgactggcctccttttcctttgactggaccactgccacctcttggtagccatcgctttcatgatgctttgccttggcgatcatattggtgaagccatgttccaactgccgcttacaatttgtcagagggatgcgtcaggatcgtgatccctcctgtttaaaatttccactgatagctctcgtcgtaactgcagctkatctgggcacagtggttttcgcagccactgcaggattcatcttccacatcttctcacctcttcttgaaacaagctatacattcgtaaagagttcatttctttggggtagtgtccttacaagcttttcttaaaacgtcaatgatgtcttcaatcttc

SEQ ID NO: 174361 - DNA, 590 bp, Homo sapiens
gaattcctaaggactgcccattgaaactgacaaaattgcccttgtttgatgagaggaatgagcagagcattgatgtggtgaacaaggatctagtgagactttcccagcatgtttctaccaaagctttatctaagcttctcagaacactctcctaataagcagatgtttggcctttcagaaagtcaacaagcaaaatgccttgagtgtcccaaaacactgatgccatgatgtgggctcctgactggcctccttttcctttgactggaccactgccacctcttggtagccatcgctttcatgatgctttgccttggcgatcatattggtgaagccatgttccaactgccgcttacaatttgtcagagggatgcgtcaggatcgtgatccctcctgtttaaaatttccactgatagctctcgtcgtaactgcagctgatctgggcacagtggttttcrcagccactgcaggattcatcttccacatcttctcacctcttcttgaaacaagctatacattcgtaaagagttcatttctttggggtagtgtccttacaagcttttcttaaaacgtcaatgatgtcttcaatcttc

SEQ ID NO: 174362 - DNA, 603 bp, Homo sapiens
gaattcctaaggactgcccattgaaactgacaaaattgcccttgtttgatgagaggaatgagcagagcattgatgtggtgaacaaggatctagtgagactttcccagcatgtttctaccaaagctttatctaagcttctcagaacactctcctaataagcagatgtttggcctttcagaaagtcaacaagcaaaatgccttgagtgtcccaaaacactgatgccatgatgtgggctcctgactggcctccttttcctttgactggaccactgccacctcttggtagccatcgctttcatgatgctttgccttggcgatcatattggtgaagccatgttccaactgccgcttacaatttgtcagagggatgcgtcaggatcgtgatccctcctgtttaaaatttccactgatagctctcgtcgtaactgcagctgatctgggcacagtggttttcgcagccactgcaggattcatcttccacatcttctcacctcttcttgaaacaagctatacattcgtaaagagttcatttctttggggtagtgtccttacaagcttttcttaaaacgtcaatgatktcttcaatcttccacccaagcttca

SEQ ID NO: 174363 - DNA, 578 bp, Homo sapiens
aatttactgagataaagatggtgagaggatcttgagacacagcttcaggggtctttgtgaatgaagttctttggtagtttaaaggttgttatcactaactgcctcacagtatttcagatcagtgaacatattagctttattccatatccaagtaaacataagttatccaagagtttatagataaaacatgcctacataaaggaatcttacattttgtacattcacacatacacaagatctattttcaaggcaaatataactttaattctgttgttcactatagagttaygtgaagtttatgttccttagatatgtatatgtgtcatacatacacacacacacacacacacacacacacacacacacaaaagctctgcgtaagagttgtcaatacttacagttcctggtctcttgatatccttccccttggactttgcctctgataatcagccaaaatggcttgtcaagctcactgatgagttcaccttgctaaaccccatagtcagtcctcacttcttatcttactgtgaccacttaagtcatttccacagtgaatccttgatcttacaacattaagc

SEQ ID NO: 174364 - DNA, 598 bp, Homo sapiens
aagcttccacataagaagaatatagccatgatttccaggagaatggaggaaaaaatagattaaagactataagatgattgttaggcaccactaagggaccacttgaggtacaggtcactcaacaaatattggtagaataaattaaaggtgattgaataaatgaattaatgaatggggtcacttcatagtggataatcrtatctttaaatttgaatagaagttctttgagaatgaaaggaaatttaaataattaatgataaattcctaaatagcacatttaagacatgacaagttaatgaatcttaagttatgtaatggccattttagaaatttaggtaattctaaaactatttaaaattttcctactgaaaaggaaaaaagtcaatttgctgtgaacagaagagaatgatttttgaatcaagatcaccatcattctataaatatttgttttatgaatgaataactcatttttatttaataggcactatgagttaagccttgtaagaagagtattttcatgcatcatacacctaaatgatagatattatttaaaaatctattacataattaagaaaatgaagttagaaaaagtgtattc

SEQ ID NO: 174365 - DNA, 548 bp, Homo sapiens
aagtgacaaagttgatctatgttaaattaggaatcaattttgtacttgtaggtgaaaatcctaggtactccttttggaaacagatacaaaaaaatcatttctagtcttatcattmttatttagttatttaaaaaatttaaattgttagaataagatgtgggaaaaccaatgagaataaatattcaaagaagaatttgaataatacaatatagcaaattaatgtaaaagaataagctaaaatgtactgggtctagcataaatttagcatattagaaggtttaaagatacgtacctcaaagcaataatttgctaggaaaagaaataagaaaactgatatttccttcacattagtaacaaaaatgtaaaatacatgaaagtagctttaataagagatggataagaactctatacataaaactgtagaataaaattgcaagtaaaccatgatccaaattactggagcagtcatgttatttaatgtaaaaatggagaatatctttgtattttgcctgaaatcctttatgaacttatgaggctgagaactctta

SEQ ID NO: 174366 - DNA, 385 bp, Homo sapiens
gaatcagggcacaggagcttatatattagggagaaaattagagagtttaaaacaatgcaaataaattacatgtgtgtacaacatactttcagtaatcatgaaatctcaagggatttcaggaaacrtatagttgaatcttctccttttgctaaggaataacgtgaggcttacacagaggaagcgatttgtcatggagtataacctaatttgacctagttagaggaagattcctgaccaccaatgaatttgatatttccattacccaagtcaggtatttttatcgcataagaagaatatgataactgttttcttacaatatcttttctgggcttctttgtatcttaaaacaacatatttgttttcctaaatgcaattctatttggca

SEQ ID NO: 174367 - DNA, 385 bp, Homo sapiens
gaatcagggcacaggagcttatatattagggagaaaattagagagtttaaaacaatgcaaataaattacatgtgtgtacaacatactttcagtaatcatgaaatctcaagggatttcaggaaacgtatagttgaatcttctccttttgctaaggaataaygtgaggcttacacagaggaagcgatttgtcatggagtataacctaatttgacctagttagaggaagattcctgaccaccaatgaatttgatatttccattacccaagtcaggtatttttatcgcataagaagaatatgataactgttttcttacaatatcttttctgggcttctttgtatcttaaaacaacatatttgttttcctaaatgcaattctatttggca

SEQ ID NO: 174368 - DNA, 626 bp, Homo sapiens
tgcctgtttctattttttaaccttttcagttctttttatttgttgtttatcttatcatacggcaatagatctttataataacacaataatgtattaacataatcactgcttgagttgatatgtgttgtaaatacatttaatatttttcaatttcgttttaatgattttttaaacttgaagtgttaagaagtgttgctctgttatgtcttattttacttattttctgcaccctaaatattatagaaatactcattcttatattagtaatccatttttattaattgattcgttcatttttacatttacatatccctccagctagaaatttgygtgtgaataaagtgtgaggtagggatgttattttatttctttttataaacaatcagctgtttgtgtcaatgataatcattgaaagatccaccgttttctatttgaaatagctctttaccatattacttccaatactaaaacaccacaatgcattttaaatacatgttgcaacaaatttcggtatactacagactttacttttaaaaaatgatgttggatattgtttcttcctctttcttcttgatgacatttttaatcactttattatctcccaatattaaattaagtagagtttt

SEQ ID NO: 174369 - DNA, 548 bp, Homo sapiens
catctatacattgtattttgtatataagtttatgtcttttgcccatttttatttgtcttttttattactgagttgtagatctatcatggttctttttcactattgtttggctcttctagatcctttacatatttacataaattttagaattagcctgcaaatttccacacactgacatacagactcctgcagagactttgattggaatggcacaaaatctatggctaaaactgaggagtattcacatcttaacaatatcaagtcttccaaaccatgaacgtgttaaaagtttttccatgtatgtatgtattctttaatttgaaggagaagtagtaacatcctatccctgtttttgtttctgatactggcctttgggygtgttaatttactgttatacagtattttaccatttcattaatttcttttcccatatttgttatttccttctttctactttctttgaacattattcactattataagatggactgttagagcactgatgcctctcttttctgcttttctaatagatgtatttataaccataa

SEQ ID NO: 174370 - DNA, 378 bp, Homo sapiens
atttcagtgagttataatctttttgctggtggagggtcttgccttgatgttgatatttgctggctgatcagggtggtggttgctaaagattggggtagctgtggcaatttttaaaaataagacaacagtgaggtatgttgcatcgatggactctttctttcataaaagatttctctgtagcatatraggctatttgatagcatttaacccacagtagaacttctttcaaaagtggagtcagtcctctcaaactgctgctgtttggtcaactaaggttatataatattcaaaatcctttgttgtcatttcagtgttcacaggatctttatcaggagtaaatttgatctcaacaaaccacttttttagctcatccatgga

SEQ ID NO: 174371 - DNA, 604 bp, Homo sapiens
ttctctgcctgtcttctcactggtgtttgctcactagtcacttggaagtttattcctacttgctcagcaactgtgggcaaggttgggctaggaaaaccagccagcttctccatccagtagtctacaaccacaccttccttaaggagatgtgaactgcagcattaggaaggcatctgcctttcaatttactctttccttgaacactcccaccagctctagggtacccttgagagttctttttacattattacagttattctatccatagcttactaattatttatattaagctgccctatttaaattatcatttggtttctgtttcctgattgtacctggactgatacaaaagccaaggaagctgagtactacgtattatgacagacatgaagtacatgtgaaggagaacatcctttactcagtgcaggaaatgctggaaaaagttgtatsgagttctctctctctctctttctgtgtgtgtgtgtgcatgtgtgtgtttctatgtggatttttcagttaagagtagagattatacttacatattctaatgatgaatctctgtcccagcaagagaaaaatgaagaacaaagttcccacaaattta

SEQ ID NO: 174372 - DNA, 521 bp, Homo sapiens
aaatgagtcaggtttaatgagtcagattaaaaggcagggtccttaccagcagtagaaccagccacagtgtcccgtstaaaccagctacctgccagctcacccctatagccacacaggtttccttctgatttctcaaacttccaggcacattccagccttggggcttaatttgcactttctgttccttcaggctgggatcattttctctgagttatctacatggctgcttcctcctttcctgcagatctctgtttaaatatcaccttcccagagagacttgtgatgaccagcctgtgtctggcgacatccaccacacgtgcactgtctttctcttcagcctgcttcatttcccttcttggcattaatccttgcccaacatgttgttcattttcctttattatctctctcccctccctggaatttggcttcataagcataggagaggcttatgggctccctaagtacttttaccattgtgtctactattgtatccacttacctagaaagaacctctaatgtcc

SEQ ID NO: 174373 - DNA, 521 bp, Homo sapiens
aaatgagtcaggtttaatgagtcagattaaaaggcagggtccttaccagcagtagaaccagccacagtgtcccgtctaaaccagctacctgccagctcacccctatagccacacaggtttccttctgatttctcaaacttccaggcacattccagccttggggcttaatttgcactttctgttcctycaggctgggatcattttctctgagttatctacatggctgcttcctcctttcctgcagatctctgtttaaatatcaccttcccagagagacttgtgatgaccagcctgtgtctggcgacatccaccacacgtgcactgtctttctcttcagcctgcttcatttcccttcttggcattaatccttgcccaacatgttgttcattttcctttattatctctctcccctccctggaatttggcttcataagcataggagaggcttatgggctccctaagtacttttaccattgtgtctactattgtatccacttacctagaaagaacctctaatgtcc

SEQ ID NO: 174374 - DNA, 561 bp, Homo sapiens
tggcaaaaatgatggtatgcctgtttcatgctgaagccttaagacctggaaactgccaccttggggttctgggggaatccagcttccatattaggaattcaagtaccctgagaccactatatggtgagcagccccacctagccatgtggagcagctgtggagaactgaggcctctgccagccagcccagctgagttytcaggtgatagttagcatcaatttgctggccacatgtgtgaggtcatctgagcagtggggtcttcaaattctgccaagacactctagctgatgccccatgaaacagagacggactatccttgctgaactccacccagattgcagaaatgtaagaaactgaaaaaaattattgcttatgatccaataagttttttgggatagtttattgtgtagcaatatataactaaagcaacaaataactagccacagtcatccaaataagcagaatagataaacctgctgaaaaaaaaaaaaagaattaaaaacaaaagctgttgtcattcattgtactggattcctggcccattccacctgtctggccgct

SEQ ID NO: 174375 - DNA, 448 bp, Homo sapiens
cttgttttcaggaacaaactagtttgatgttatttcttcttcgatttttccaggacatcacattcaattctcaactgtcctgtttttgaagaaagataagactttggttttgattgaattttccttgagatcagttattgccgagtccagtttattaaagaactaacgtggyatcagttctgaattctctgaggtcatactcaagttcatctttgaattaaagaatttttttttaagtgtgaatcccaaggtatacttgtttcttatgcaaggggagagagaataagtaagcggtaaaataggaagattattcttccagtttggtatttcatgccatttccttaaatttgcacagatgttgatgcaaaatgtgtacttgttaagctactgttttgttcatttgtttttgttatggacatgttacaaacttctcaagttttatttaaaa

SEQ ID NO: 174376 - DNA, 617 bp, Homo sapiens
gctactatttacaggtccatagtataaaacctatcattctaataaagatataaggactttgaggggtggggagagtatatcttttctgctttgcatattttgcccaaatcatttaacaagggattgtgaatatatttattttacctcttcttggtaaggagaaaaagaatgatctacaaaaatatctattggtgaatatttgattcaaaattattatgtattctgcagttcatgtggtagatatgaactgaacacattgggtacctcccaatttccttttttaaactaaatttcaatctttgggagtggttgctttgccattatgcatatcttttatgttatgtttttaaattgagtaaaaaaatatggaagggtaaatgacatagtcttaggatttgaatgtgatacttgaacaaaagctgtgatattcacaagatgcaatggagcgtgcatctacttatctgrctgtgcaaacttatgagccagattacaatggcaatgaggtattttttgcatgagtgattcttcagggattcttctaatagccatggtaggagacatgcactttgggatcagagtttttgctctgaataaaattatgcaattttagtgtctcc

SEQ ID NO: 174377 - DNA, 514 bp, Homo sapiens
cagctgtcttagttcatttgtgccgctatgacaaaatacctaagactaagtaatgtgtgtgtgtgtgtgtgtgtgtgtgtgwgtatatatatatatatatatatatatatatatatatatatatatatatatactgaagtttattttatcacacttctagagtctgagatgtccaagctcaaggtgccagcaggtttgattgtcacgtgagggctgctcttggattccaagatggtaccttgttgctgcctcctctgaaggggaggaaccctatgtcctcacagggtggaagagcagtggggagccaaatgctgcatgaaacctcttttgtaaggagacttaatcttctttatgagggagccctcacaaactaattgccttttaaatgctccacctcttaatactatcacattggtcattaagtttcagtagctgagttttagagaggacacgttgaaaccatagcagcagacctccattttcccaagtatgaaatatgtgtagcccaaagcat

SEQ ID NO: 174378 - DNA, 430 bp, Homo sapiens
ggagaatgaaacagggaaggaagaaaagctaatacaggagttgatgttgggttgagagctacctcaggggtcacccagggcactgtatatctgaggactctgaggaacagtgaacaatgcatctcagaattagttctctctcccactccctacaggggttgcggtggaggaagctggaacttctccacrtactcccatcttccccaggggcatgaacctcctttccctttacctataagagtagtgagcagtatacacaaagatccagcttttgaggagcttatagtcttgaggagaaagcaatacattagtaagcaacatagtatccaaaaccaatgcatgctctgagaagacagaacgaaggttgtgtgacaggagtgcttggggaactccttagatggggtggccaggatgagggatgagctgagac

SEQ ID NO: 174379 - DNA, 430 bp, Homo sapiens
ggagaatgaaacagggaaggaagaaaagctaatacaggagttgatgttgggttgagagctacctcaggggtcacccagggcactgtatatctgaggactctgaggaacagtgaacaatgcatctcagaattagttctctctcccactccctacaggggttgcggtggaggaagctggaacttctccacgtactcccatcttccccaggggcatgaaccycctttccctttacctataagagtagtgagcagtatacacaaagatccagcttttgaggagcttatagtcttgaggagaaagcaatacattagtaagcaacatagtatccaaaaccaatgcatgctctgagaagacagaacgaaggttgtgtgacaggagtgcttggggaactccttagatggggtggccaggatgagggatgagctgagac

SEQ ID NO: 174380 - DNA, 430 bp, Homo sapiens
ggagaatgaaacagggaaggaagaaaagctaatacaggagttgatgttgggttgagagctacctcaggggtcacccagggcactgtatatctgaggactctgaggaacagtgaacaatgcatctcagaattagttctctctcccactccctacaggggttgcggtggaggaagctggaacttctccacgtactcccatcttccccaggggcatgaacctcctttccctttacctataagagtagtgagcagtatacacaaagatccagcttttgaggagcttmtagtcttgaggagaaagcaatacattagtaagcaacatagtatccaaaaccaatgcatgctctgagaagacagaacgaaggttgtgtgacaggagtgcttggggaactccttagatggggtggccaggatgagggatgagctgagac

SEQ ID NO: 174381 - DNA, 610 bp, Homo sapiens
ttaaaagtgtggcacattccctcttgctctcactctcaccaccatgtaagacatgccttgcttcccctccaccttctaccatgattgtaacttttttgaggcctcctcagctatgtggaactgtgagtcaattaaatctcttctttataaattatccagtctcaagtagttctttatagcagtatgaaaatagactaaaactactagtgattcctaaccttttgagaatgatatcaccccagccatgtttcattttgcaatgttccttcttcaagaagctaaatatccatagccattcattcaacccatcttcaccccatgaccactctatttaaaataccactgcattatggaaatgtcccttcactattttctccacctaagacaggctttttcattcaccctttgtttggtcatgcaacatttatacaggcaacygtatttgggattatttaaaaataaaccttaagtcatgaaatcatagaggtgggcaaattaataaaatataagccctccaaattcataaaatacaaatttcttcattcaatcgggtaaacttgcaaactagtgatttctgatcattttgtagtaactcaggctgttttaattc

SEQ ID NO: 174382 - DNA, 610 bp, Homo sapiens
ttaaaagtgtggcacattccctcttgctctcactctcaccaccatgtaagacatgccttgcttcccctccaccttctaccatgattgtaacttttttgaggcctcctcagctatgtggaactgtgagtcaattaaatctcttctttataaattatccagtctcaagtagttctttatagcagtatgaaaatagactaaaactactagtgattcctaaccttttgagaatgatatcaccccagccatgtttcattttgcaatgttccttcttcaagaagctaaatatccatagccattcattcaacccatcttcaccccatgaccactctatttaaaataccactgcattatggaaatgtcccttcactattttctccacctaagacaggctttttcattcaccctttgtttggtcatgcaacatttatacaggcaaccgtatttgggattatttaaaaataaaccttaagtcatgaaatcatagaggtgggcaaattaataaaatataagccctccaaattcataaaatacaaatttcttcattcaatcrggtaaacttgcaaactagtgatttctgatcattttgtagtaactcaggctgttttaattc

SEQ ID NO: 174383 - DNA, 401 bp, Homo sapiens
tttatgtttactctttgtaaaktttgaaatcctatttaactggttataaaggttatcatagaaacattcataaatggtcaaggaatagcatttgcattgctttaactgtttaagatgaaaatttcatcatcatttttatatttaaactatataatcaggtttattcttaaagtataagagtgattaaatcataaaaactctatgccattatttacagcaatctttagccttgtggattctgcatattttgtcatattaataaacattttctgtataagatattggaacagtaatagaataaccaacagcattttttcattttctctatttattcttttttcaaatatatattttaaaaaggatttttttctgcttttctcttcctgattctaaaagaattc

SEQ ID NO: 174384 - DNA, 424 bp, Homo sapiens
aattctaggcatccaatagttctttgaagttcatagaaagagttagaatatgaacaatgtttgaggataacaggacaaaccctggattattctggaaccaagtacagggtaagaggcakagaagctacacataaactgtgaattacatatttcaatgaattaataaaataattgctgagaataagaaaattatgaattaatggtaaattttcatctaaaaatgagatgaatatacaattgacccctgaaaaacataggggttaggagaaccaccaccgacacagccaaaaatctgtgtataactttggatcgctcaaaacttaactactaatatcctactgttgaccagaagccttactgataacacaattattctattaacacataaacagtctaatatcttcatatattttaggcatttaat

SEQ ID NO: 174385 - DNA, 372 bp, Homo sapiens
tactcagaactacgtggagaaggaggagggtaggaagaaagaaaaaagtaatgtttgctaagcctaaagatttttagcatgaggaaaactgagattttgttttcatttatttccatgttgatattatctgcactgtataaaagcaccataggtattttttaaacatctttatctatttcaaacagcaaaatttcagatatctcgtcttaacacccatgcatcctatcatgatgaattaatgaacataaaaattgcagaccatactgcttaggttcatgccatctgttgctatacatcattttacttttagaatctaatggttttgcctcaatatgktatatatattctccacattaagataaaatttaaaaa

SEQ ID NO: 174386 - DNA, 584 bp, Homo sapiens
tgttagcatttatattgaaatataaaatctaaagcagcttaaaataagctaagctaaacaaactgcaagaagctaaatgatttaaacatgttaaagttttaaagcactagctgtaaatattaatcttcagattttcaatttaacatgtattcacttacaaactgttctaataataacactaattattttccaagtcaccatttaaagttttatttacagttgacctaatccaattgaagttgatgaaagcttcaacttattttttaactctttctggtccacgatgcctggaggcaagtgaaatatatatgacaaataatagataaaccaatttattttctgttagtgtatgtttattttttaattattaataatgtatattgtgtgtatatatgacggtgtatgaaagttggcaatgaaagctaatacaatcatgttagtcggctggatataataaagaacaagaaaggaataatagcatttgcattttaaatgtaattgaaaytatttcagaagagtgggataagcccttaagaaaaatgggagatgtttaaggctgtgatttggccgacattgtaacgtat

SEQ ID NO: 174387 - DNA, 489 bp, Homo sapiens
tatttgctgtcatattaaaaagttactaaacttcatgaaatatagrctacattccaaatatattttgcaagaatactgtgtatttttcaggatacacatatgaacaatggttttcagaatagttcgtttttgttttttctcttagcagtttttaggaaaccatttatgaatgatttaattcaaacatcttttgctaagtaaaatttccatatattttggaacaataattcaaagaatatggtatacgaaatggagcctataaataagcatgccctaaaatttgtcatctttccatatttgagtgttaaaattagttgataagtagagacacttgcatagtaggtgatatgttttgattctgtccccatccaaatctcatgttgagttgtagctcccataatccccacatgttgtgggagggagccggtaggaggaaattgaataatgggggtgggttttttcccatgcagttctcatggtagtgaataa

SEQ ID NO: 174388 - DNA, 582 bp, Homo sapiens
ttaatcaaagcttttttacactgaaatcacattaacgactttcatttacagaacaagctcttatgattcatttacctaattcccaccaactgatcactgttttcctggcatggtgctacaatgtccctgtggtattccaagtatgagagacaaaataaatttattttcaagaaaaatcacacagtaagycctgactgtgaacttcaacctgagctctgatgctgcgttttattaaacattacggggttgtcagttgttctccattactgacagcatcagaacttaaaagtttcatactgcttgcttctccaatcattcaacaatcaaattctttctcttctattacctacccatgccccagccgtgccccaccccacccccacgcacacatcctgtttcagaagtcctaaactttactattcttcccatcgctgacaattttctcccagctggtaccatcactaggcttctaaccactgccaaaattcacaagcagaaaattgcttggagtctaaactcagtgtctttgcaaagttactgtaagcatctgtggttaaaattgaccaactttgaattgttaaa

SEQ ID NO: 174389 - DNA, 355 bp, Homo sapiens
tgcttgttttagacaagtcatggttctctaataatcagtttcataaaacttgtcagatacaacatactggattcagccaaattgtaatttaaatgtacggctttgcaagtggattgtcgcaataagttaaccaaacttctagttaactaaaaatcaatccaaaagtcattaattgaactgcagttgccacagataccataaaagaacaaaagttcaatttcctrattattatttatttattcatctgcctattataaacatcttcctctggaagggagttttaatggcttacaaggactccaagtataatgtaacacataaatgaacaagggtaaaaaatgtggagacacagaaa

SEQ ID NO: 174390 - DNA, 545 bp, Homo sapiens
ctgcaattttagtttacgtatggttttatttccacataccactccctgccacaaaaggacagtacagtgtacatgaaatggtggtctagataagctatctggatgttgggtaaagtataaaaaagacctaacattcacaatcgtgttatgttctggccagttactggggtttgggtttttttaatctttccatctatgatgactacacttgtaaacgtcaagaatgaccaggttccaatagtcatataggtgccccagtctttctctaaggaaaaagcagattcatagagaagagttatgcatagcctttgggtggtacttcagtaaagtaggtagaaattttaaaatgctgtgcaaggcagggatcatgtaggaagacaatatcaayttcgccttgctgggggcaactaaatgtatatttttctagaattctaatttattgcctcatatatcagaaaatactacaaacataaatgacatatgctagatttcagtattatacaacagagaatgtcaataaattcaaaactaatcatcccattggc

SEQ ID NO: 174391 - DNA, 572 bp, Homo sapiens
cagtccccatttaggccacatggggatgaaaaggaagtgtaggcagaggaaggaaaccaaatcacagaattctcaataaaaagtgagtgggaaaattagttgaaaggaaaaaacacaccagcagtaatcaaaaaagacatgacttcctgatgaagagtacagtttaattcataagcaaatcctggagaaactcctgatcccagctgggtcatccagttagtagctgcctcattaatttatcccaattgcggaaactgtattctggggtagctttgtctttctgctgctgtgtgtttgtgtgtaagtgacaatagcctttgggtggaattcataaaacgatgaaggagaamtagggggctggctctctctgcctgaatcagagatgagagggttttttgctggtgtgagggaaccacctgaatcctgagatgtctccccatgggctacagcacatatcctgcccgccctctcgacgttaaaggaacaatagtgtagcacagttcacattttaaaccattctacttggccatcttaaataaccccaacttgttagttcatgagaaacaaaacgg

SEQ ID NO: 174392 - DNA, 534 bp, Homo sapiens
tcagcccctaaatgactgattggaccccctcttggccacagggaccccagaaatgccttagaagctgaatttccagccatgacaggatggaggtcagacacaccttattatacccactccctcaaaaactgccattagggtctcttccctaaggggaaacagaagctagacttttcaaaagatttcacattgataatgtcagttaccagcttatcttcccaggcacagaacaaagacaagatgagattaattgttccttcacccttagctgagacacctgcctcttctattctctttttcttcaaatgttcacatatgtaaaatacasatttgttggggactaactaaagtctcactagtatgtaacaatttgtctcactttccttttaatgaaaatgcataaatactatactttctaaaaaactctttggagaaaacagccacagagggcatctgtgactcatgcttttcctatacacaccctcaagctggttcaataaacctcaattgattgagaaacctgccttcatcagc

SEQ ID NO: 174393 - DNA, 534 bp, Homo sapiens
tcagcccctaaatgactgattggaccccctcttggccacagggaccccagaaatgccttagaagctgaatttccagccatgacaggatggaggtcagacacaccttattatacccactccctcaaaaactgccattagggtctcttccctaaggggaaacagaagctagacttttcaaaagatttcacattgataatgtcagttaccagcttatcttcccaggcacagaacaaagacaagatgagattaattgttccttcacccttagctgagacacctgcctcttctattctctttttcttcaaatgttcacatatgtaaaatacacatttgttggggactaactaaagtctcactagtatgtaacaatttgtctcactttccttttaatgaaaatgcataaatactakactttctaaaaaactctttggagaaaacagccacagagggcatctgtgactcatgcttttcctatacacaccctcaagctggttcaataaacctcaattgattgagaaacctgccttcatcagc

SEQ ID NO: 174394 - DNA, 545 bp, Homo sapiens
aattctcagcccctaaatgagtgattggaccccctcttggccacagggaccccagaaatgctttagaagctgaatttccagccatgacaggatggaggtcagacacaccttattatacccactccctcaaaaactgccattagggtcttttccmtaaggggaaacagaagatagacttttcaaaagatttcacattgataatgtcagttaccagcttatcttcccaggcacagaacaaagacaagatgagattaagtgctccttcacccttagctgagacacctgcctcttatattctctttttcttcaaatgttcacatatgtaaaatacagatttgttggggactaactaaagtctcactagtatgtaacaatttgtctcacttcccttttaatgaaaatgcataaatactacactttctaagaagctctttggagacaaacagccacagagggcatgtgtgactcatgcttttcctatacacaccctcaagctggttcaataaacctcaattgattgagaaacctgccttcatcagccattt

SEQ ID NO: 174395 - DNA, 545 bp, Homo sapiens
aattctcagcccctaaatgagtgattggaccccctcttggccacagggaccccagaaatgctttagaagctgaatttccagccatgacaggatggaggtcagacacaccttattatacccactccctcaaaaactgccattagggtcttttccataaggggaaacagaagmtagacttttcaaaagatttcacattgataatgtcagttaccagcttatcttcccaggcacagaacaaagacaagatgagattaagtgctccttcacccttagctgagacacctgcctcttatattctctttttcttcaaatgttcacatatgtaaaatacagatttgttggggactaactaaagtctcactagtatgtaacaatttgtctcacttcccttttaatgaaaatgcataaatactacactttctaagaagctctttggagacaaacagccacagagggcatgtgtgactcatgcttttcctatacacaccctcaagctggttcaataaacctcaattgattgagaaacctgccttcatcagccattt

SEQ ID NO: 174396 - DNA, 545 bp, Homo sapiens
aattctcagcccctaaatgagtgattggaccccctcttggccacagggaccccagaaatgctttagaagctgaatttccagccatgacaggatggaggtcagacacaccttattatacccactccctcaaaaactgccattagggtcttttccataaggggaaacagaagatagacttttcaaaagatttcacattgataatgtcagttaccagcttatcttcccaggcacagaacaaagacaagatgagattaagtgctccttcacccttagctgagacacctgcctcttmtattctctttttcttcaaatgttcacatatgtaaaatacagatttgttggggactaactaaagtctcactagtatgtaacaatttgtctcacttcccttttaatgaaaatgcataaatactacactttctaagaagctctttggagacaaacagccacagagggcatgtgtgactcatgcttttcctatacacaccctcaagctggttcaataaacctcaattgattgagaaacctgccttcatcagccattt

SEQ ID NO: 174397 - DNA, 545 bp, Homo sapiens
aattctcagcccctaaatgagtgattggaccccctcttggccacagggaccccagaaatgctttagaagctgaatttccagccatgacaggatggaggtcagacacaccttattatacccactccctcaaaaactgccattagggtcttttccataaggggaaacagaagatagacttttcaaaagatttcacattgataatgtcagttaccagcttatcttcccaggcacagaacaaagacaagatgagattaagtgctccttcacccttagctgagacacctgcctcttatattctctttttcttcaaatgttcacrtatgtaaaatacagatttgttggggactaactaaagtctcactagtatgtaacaatttgtctcacttcccttttaatgaaaatgcataaatactacactttctaagaagctctttggagacaaacagccacagagggcatgtgtgactcatgcttttcctatacacaccctcaagctggttcaataaacctcaattgattgagaaacctgccttcatcagccattt

SEQ ID NO: 174398 - DNA, 530 bp, Homo sapiens
taaatgagtgattggaccccctcttggccacagggaccccagaaatgctttagaagctgaatttccagccatgacaggatggaggtcagacacaccttattatacccactccctcaaaaactgccattagggtcttttccataaggggaaacagaagatagacttttcaaaagatttcacattgataatgtcagttaccagcttatcttcccaggcacagaacaaagacaagatgagattaagtgctccttcacccttagctgagacacctgcctcttatattctctttttcttcaaatgttcacatatgtaaaatacagatttgttggggactaactaaagtctcactagtatgtaacaatttgtctcacttcccttttaatgaaaatgcataaatactacactttctaagaagctctttggagacaaacagccacagagggcatstgtgactcatgcttttcctatacacaccctcaagctggttcaataaacctcaattgattgagaaacctgccttcatcagccat

SEQ ID NO: 174399 - DNA, 573 bp, Homo sapiens
tcctaataactcacagataggccagttgcttaaatgacataattaaaaactttacgtaaaacttccaattctggccatgaaataataacaaggacatctcctgtccttccccagaaatcaactagaaagtggcatagtgtcattgcaggactgtgatgccagagagaaggaaaataagcaatgagagtcctactatacctgaaaacaattactgtacagcaaacacaggcaagagaaatccaaagagtctgacagtctcgatgactttaggagatgaagatgcctgtggaagctgacatggttaggaattgtgggagagctatgcaaagaaagaatttcagagacctaaacaagtttccacccagaccatgctgagattaggtggcttagattataggtagatactctgtaaatacaggccaaagatgattactgagatttaaattgaacaactcccagggctcacacaagacaataaaactcagtcttcaaccasgcagagtagacagtcatcaatcatcactttggacattcaatagaggtcccaaaggatcacatctcaggagcagagtt

SEQ ID NO: 174400 - DNA, 517 bp, Homo sapiens
tatccagaatatgtaaagaactcttacaactcaaaaataagaaggcaacctacagcctgggaaacacagtaagaccccatctctgtaaaaaataaaagaattagatgggtgtggcagagcaaacctgtagtcccagctactcaggaggctgaggtgggaggatcacttgaactgaacccaggagattaagactgcagtgagccatgttcacaccactgcactcaagcctgggcaacattgtaagaccctgtctcaaaaaaataaaagtacaaaaatacaaaagacagctcaattttaaaatgggcaaaggatctaagtagtcgtttcatcaaagaagctacataaatggccaayacacacataaaaaaggtgttcagcattattggtcatcaaggaaaagcaaatccaaagccagaacgagatatcaattcatacctactagaacagctatagtcagaaataagggaaataacattattgatgaggatttggagaaacttcaagtttccaatttgga

SEQ ID NO: 174401 - DNA, 610 bp, Homo sapiens
cttcacgatttagaatgtagacttttgctttgtgacagttctccccatccccgactactaaatgacgaaccctctttaactgtgaaatgtacctgcaaagtcaagcagtgtctttggatacccaagttcagatatgaacaagcaagctacaaaagcggggtgggcgggtatgagtgagcagaagagagaaaccgggctgcaaaaaaggaaaataaaggcgggacgtgggggtatgatttgctgaatggtaccaaagttgattttttgcaccgtgcacagtgatcgagctgagcaaattattttttttttaattataagcagcggtaagaacaacaacaaaattacatttggaaaatgatttgcattttctcggtctgatcatttcackttccctgggaaagggatgtcaaggcaggtaaagtgggccctcggtatccctaggtaattggttccaggacccccgcagatacccaaatccacccatgcttaagtctcttttataaaatggtgtagtatttgcatataacctacacacatcctcctatatgctttaaatcatctctagattgcttacaatacctaatacactgtaaatgctatgtaaatagtt

SEQ ID NO: 174402 - DNA, 221 bp, Homo sapiens
acagcacaatctatatgcacgggtgggcacasagcgatctggcctccacgagggagaatggagagcgattcacagcaggacctttccagaacacaagaagaaggaggaaatttgggctaagcacactgactacaaagaccaaacaggcagcctgataaagcatcaagccagccaaagaaatttaagcccttttcttggcaagaactatctatgttttagta

SEQ ID NO: 174403 - DNA, 221 bp, Homo sapiens
acagcacaatctatatgcacgggtgggcacacmgcgatctggcctccacgagggagaatggagagcgattcacagcaggacctttccagaacacaagaagaaggaggaaatttgggctaagcacactgactacaaagaccaaacaggcagcctgataaagcatcaagccagccaaagaaatttaagcccttttcttggcaagaactatctatgttttagta

SEQ ID NO: 174404 - DNA, 221 bp, Homo sapiens
acagcacaatctatatgcacgggtgggcacacagcgatctggcctccasgagggagaatggagagcgattcacagcaggacctttccagaacacaagaagaaggaggaaatttgggctaagcacactgactacaaagaccaaacaggcagcctgataaagcatcaagccagccaaagaaatttaagcccttttcttggcaagaactatctatgttttagta

SEQ ID NO: 174405 - DNA, 221 bp, Homo sapiens
acagcacaatctatatgcacgggtgggcacacagcgatctggcctccacgagggagaatggagagcgattcacagcaggacctttccagaacacaagaagaaggargaaatttgggctaagcacactgactacaaagaccaaacaggcagcctgataaagcatcaagccagccaaagaaatttaagcccttttcttggcaagaactatctatgttttagta

SEQ ID NO: 174406 - DNA, 501 bp, Homo sapiens
gggtatccgtttaattctagggtttgttattaggaaaaccacttgcctgcaaatattagactacattctccaaaaccagctttattagcagctaagctgatattttggtctccacctgcctttctgtttktgtcttatttcttaatgggttcaaaactgaaatgaagagatgaatagtactgtattagtagagccatcttgaatctgttaatacccagcacaatgctgatgcatagtagataatgaaatgaaatgaatatacaagttcaaatatacaagccattcctatgtaggttgatacttgtataaaatgcactgaacagttttacaacttcgaatatggaagatttaatctacataaacaggatttttttcaagtagattatttcattatttttcttttctccaattattcacaggaaaagggaggattttgccaattgccactcttcgaaattctcatttagctaagcaccttggaaagacactatgttcatttcc

SEQ ID NO: 174407 - DNA, 394 bp, Homo sapiens
cagctactcaggaggctgaggtggaagaatcacttgaacccaggaggtcaaggttgcagtgatgtgatcacacggctgcactccagcctgagcaagagagcaagaccttgtctcaaaaaaaaaaaaaagaaatgtcacggtgaaagggatgatggggcttggacaggatgctagcaaggaagtgacaagaagccctcagtttctacatagygtttgaaaacaaagcaacagggttggatgagagattggatgtagtggatgagaaaaggcgaggaaaagaagacctctaggtttgcaccatattagaattctaagcaggggtgttgttaggcagtgcatatatgggtttgtagttgagagacgagctatgggcaagagataaagacttaagagt

SEQ ID NO: 174408 - DNA, 394 bp, Homo sapiens
cagctactcaggaggctgaggtggaagaatcacttgaacccaggaggtcaaggttgcagtgatgtgatcacacggctgcactccagcctgagcaagagagcaagaccttgtctcaaaaaaaaaaaaaagaaatgtcacggtgaaagggatgatggggcttggacaggatgctagcaaggaagtgacaagaagccctcagtttctacatagcgtttgaaaacaaagcaacaggrttggatgagagattggatgtagtggatgagaaaaggcgaggaaaagaagacctctaggtttgcaccatattagaattctaagcaggggtgttgttaggcagtgcatatatgggtttgtagttgagagacgagctatgggcaagagataaagacttaagagt

SEQ ID NO: 174409 - DNA, 394 bp, Homo sapiens
cagctactcaggaggctgaggtggaagaatcacttgaacccaggaggtcaaggttgcagtgatgtgatcacacggctgcactccagcctgagcaagagagcaagaccttgtctcaaaaaaaaaaaaaagaaatgtcacggtgaaagggatgatggggcttggacaggatgctagcaaggaagtgacaagaagccctcagtttctacatagcgtttgaaaacaaagcaacagggttggatgagagattggatgtagtggatgagaaaaggcgaggaaaagaagacctctaggtttgcaccatattagaattctaagcaggggtgttgttaggcagtgcatatatgggtttgtagttgagagaygagctatgggcaagagataaagacttaagagt

SEQ ID NO: 174410 - DNA, 509 bp, Homo sapiens
caaatggcaggatcttgctgtagctgaaataataactttaaaatgcataagctgaaaattgaattcttaagatttgccttagaaaaaaatgcaactcaagcaatgtaaagtatcaacgagtgttttataaaataaattggtgtcttggctctgaaatatattactttatctatcatggacctgttcttacatatttcattgtaatcccagggtaaataaacataaacataaacacacacacacacacacacacacacacacacacatgcgatacacagatttacttatgagtatgtactatatacttacacaaatccagggtttcatatgcttaaatgaaaactgaaaatggctrttttttttacccaatattactatggtgatcataacaactgtatataaaagaaaatgttatattccagtgaaataaaatattttatcctagagttcagtagttcttgataaactattgtaacagtttaggcatcttattttgtcattatcaattc

SEQ ID NO: 174411 - DNA, 400 bp, Homo sapiens
caacatgttacagggcttttagaaattaactggtgtattatattctaaggtatagcttaattgctgcgagacatatatttaaatgctgcacaagaaatgtaagatttctgtatcaaagggaatctctatgtgccccctattccctgcagaagaatgtagtacttcccaagaaaatggagttatggtaacttycataaccatgaacgcagctgcatccattcaacactacatagcaatgaatcccaggggaggggggcaagcaggacagacactcaatttatgcctgaattttgttgagctaattgaagggaagcacagggatagtaatcaaggatggtattttgaaaaaagtgcgcaagcaaagatttcagtttagtaactcaggatccaaagcaagacg

SEQ ID NO: 174412 - DNA, 466 bp, Homo sapiens
atttaactcagtttcttcaggtatctgatatttgggttgcacatttcattgctaagtatctcattaaggtaattatcttaaataaagaatcagttatcttcttaaaggaattttgccatgttgtgagaactttcaggtcaaactgcaaccagatttttttttaatttctgtattatgtttgcatctcaaatatcataactaccattgtaataaatttaaccctaaatcctaattccaataaatgatacaaaaaggaaatcatgactatgagtaaacaataggataataastgttatgctcctcaaaagtcatttctatgttcgattatttctttccactgagtagtggtaattgacacatgcaaagaagaccttacatgttccctgacttttcaagtttgaatgttgtctttctaacagcgatgaatagattcgtagtatcttttctctaacttttaagggtagac

SEQ ID NO: 174413 - DNA, 336 bp, Homo sapiens
atatattgaaaaggagctgaagtaacgcckgagataaacttcttttaaaagacaacataattcaaaataatggcaatatttttcaattgtctgagtaaagaaaacacattttccaatatgagaaggaggaaagtgattaaataccattgaaacctgtcagatgaacaactctttcaatacccactttggagaagaagttcatattctcaaacttcacagaatttgcagaatgtggttcagtgctctggaatttattcccagctaaaataatagcacacgcacaggaaaggaaaatgaagtttttcaagattaaaatagagtttagggaagtaatag

SEQ ID NO: 174414 - DNA, 336 bp, Homo sapiens
atatattgaaaaggagctgaagtaacgcctgagataaacttcttttaaaagacaacataattcaaaataatggcaatatttttcaattgtctgagtaaagaaaacacattttccaatatgagaaggaggaaagtgattmaataccattgaaacctgtcagatgaacaactctttcaatacccactttggagaagaagttcatattctcaaacttcacagaatttgcagaatgtggttcagtgctctggaatttattcccagctaaaataatagcacacgcacaggaaaggaaaatgaagtttttcaagattaaaatagagtttagggaagtaatag

SEQ ID NO: 174415 - DNA, 478 bp, Homo sapiens
gattatcattagaggatggtacatgtgtatgggatgcctaggttatacttgacttttttttactttcatcatatttacagagaatactaacaggtcaaatcartgtagtataggacacccaatttccccccccctttcctagtttatacctacttatatcctcttttattaatataggttttttttgtaccattatgagtccaaactagtatttcttttaatagtcaatttgcgtaagttcgtaggaactgaaagttccccatgcagtgttagtgaggaatatgcctacacatttttctcattaaaaagccacgcctgaccccactttttgcttttgcttttggccgaagcttgagatgtgaggctgcttcctgataaccagaactgttagcatcttcatctaatgtaggggtttggagtcaaacactttggtgctatgtggaaaatgatttgagtataaatcaatcagtcaagaatt

SEQ ID NO: 174416 - DNA, 545 bp, Homo sapiens
atcttttctttcttttctgtcacctttaggttgctattccagtttgcttagttaagacacttcactactttttcttttagasagaatacttggatggagtgctgttgtatttttctttaaccttgagatgtaatagaatcttagctgggtctacaattcataaactgcaccattttcctcacagtggttggtagctgctctttcactgtcttcaggcttccactgtttcagatgaggattctgactttttttttttcctttgctttttctaccttgaatcttgtcatatttttccccttccttagaattcaggaggtttacagaatgtcctaggtgtctatgttatttcttatcagtctgacctggacctcacagaaaccatttaatctgggatatgagctttttcattgagaaaaaaataaattctattattttattttcattggcaatcctccatctgtctttttctcttactggtacatcttttactatctcctgttatatcctccaagattcattttcccccccttattgtttgtatttct

SEQ ID NO: 174417 - DNA, 388 bp, Homo sapiens
aactttgtaacttcacttcagcctctgattgtgggccaccacttcatttgcatggggtgtatgccaagtggccaatgagaaacctctagagggtatttggaccccagaagattctgtaaaccaggcccttgagccgctactcgggctgctcccaccctgtggaatgtactttcattttcaataaatctctgctttccttccttgctttgctgtgcgttttgtccaattctttgtttaaaactccaagaacccagaaaacttgcagtcaagaccctccctgccccggtaaccccatgctgagggaagagttgggaagaaatccmacatttggtgtttccaaattcagctagcctgtgctcttccccacaatgctttgttctgtctcagc

SEQ ID NO: 174418 - DNA, 596 bp, Homo sapiens
actgtgttgcctaggctggagtggagtggcatgatcttgattcaccgcaacctccgcctcccaggttcaaggtgatctaaagacatccacccacctcggcctccgaaagtgatgggattacaggtgtgagccaccatgccaggctgcattatattctttttatataaattttaaaaaatcttttttacagtatttatcaagcaaataagactaagtggaatgaagaaaataccaatgctaaaaatgacaattatacttgtttgtcaattttatttcttgttttcattaaaaatataagattttaaaattatgaacattaatttatatttccttaaaaattacaatttttggccaggcacagtggcttacatctgtaatcctagcactttgaaaggccaaggcaggtggatcacctgaggtcaggaatttgagatcagcatagctaatatggtgaaacctcatgtctactaaaaatayaaaaatcagatgggtatggtggcaggaccctgtaaccccggctacttgggaggctgaggcagaagaatctcttgaatttgagaggtggaggttgcactgagttgagatcacaccactgc

SEQ ID NO: 174419 - DNA, 603 bp, Homo sapiens
tacatagttaataattcacagagatattttctcaagattgtggttgctcataatgacataatgagatgtttcaatcttgcatctcatctctctctcagtgtgtttttcaattatgacagttttcctttatctcccattcaccccaacctcactttggttccatcactgccattcaaaatttctcagagtcaaacattaaatgtttcattctctataaatgctttcttgattttaaaatattttttctcatttatctgagctattagctctttgtaccattcataaaatacttaatatcttaaactttgcattacaatagttttcacaactcttttactcctctcttcccacagactgctagctctttgagggtactgaatcttcctcagtcatactaggttctgaaaaattattttccgaattgaatatttaattcatttcatttgcttagtrttagaaggaaggaaatgggaggaaaaaccagcatgtataaacacagggccactgctagcctatgtttatgttgcaaaaactaaagaaaaaaattccatcatgtgttgaaaatggcaccacttctgtgtgcaagggctagaacatagtgcc

SEQ ID NO: 174420 - DNA, 581 bp, Homo sapiens
caacttaaatcataagctctataaaggtagggatcgtgtctgtttcatccatccttgcatactatgggcctagcaaaatgcgtgacatatcataggccctcaaaaatgtttgctgaataaataagtagtgttttagttttgctctttakaacacttaccactatatgtaattacatcagtaagctttcaaaaaaatgtccagttattccctaaaaagcatatgttccaggaagactgtgtctgttttattcctcattcaatacagtgtctgacacacaggtactcaatcaatatctgttggtgaaaggaagggagtagaagtgatgatacgactgatggagagaacagaacctaaaggagactgttttacactaatgctctgagactatggcaacaattcaaataaatgctaaaaacattctgtccatcattcagttgttttgcccacataatgtaaacatctgtacctttagaaatagctagatcagtttttcacttgtaaagcagatgttcagttattttagatacagctgaaattattgttttttttttttcgattagtgcagcaaatttgggtagac

SEQ ID NO: 174421 - DNA, 608 bp, Homo sapiens
caggcatgttggctcacgtttgtagtcccagcactttgggagcctgagacaggcagatcactggagcccaggagtttgagagcagcctgtgccaacatgacgaaaccctgcccctataaaaaatacaaaagcttgccaggcacagtggctcatgcctgcagttccaagtacttggggctgaggcaggagaattgcttaagcctgggaggacragactgcagtgacctgtgatcacaccacggcactccagcataggtgaaagagtgagaccctatcttaaaataataacaataacaataataataataataataatataattcttgcttttttttttcagctgctactaaatatgaacctggatcctatatagcttctcctctaggatttacacacaaggaaaatctgaatcaagatccagttttggaagtaacaaaagagtatgcacagattttaagaagaaaatacatactctgaaagataaggcaattttatttgggctattcacatgatattttgtttcccattaaatatatgatgtgaacatttttactaaagggaaatattctatattatacatgtctgatgaaaatttatgtagtatttta

SEQ ID NO: 174422 - DNA, 584 bp, Homo sapiens
ctgcttatttcctagcattgagcttagtgatagagaaagttaacgtagaaatctgggcctgcccaggtgtggtggctcacacctgtaatcccagcactttagaaggctgaggcagraggatcgcttgagcccaggagtttgagaccagcctgggccccatctctacaaataattttaaaatggagcgaggtatggtggcattgcctgtggtcccagctacttggaaggctgaggcagaaggatcacctgaacccaggaggccaagtctttagagagttgtgatcacttgactgcaccccagcctgggtgatagagcaagcccctgtctcaaaataataataataatagtaattacattataaaatgattgtttatccacacaagacttggagcttatgacttttgtattttgctttttgcttattttggttttagagaaagttagagggttctaaaatattttctcacctactgatcatttacatgatcactgttctcctgctcagatcctagtgctataccctggccatagtacagttaactactaacatacatccactctcttatctcttacagtgccattc

SEQ ID NO: 174423 - DNA, 584 bp, Homo sapiens
ctgcttatttcctagcattgagcttagtgatagagaaagttaacgtagaaatctgggcctgcccaggtgtggtggctcacacctgtaatcccagcactttagaaggctgaggcaggaggatcgcttgagcccaggagtttgagaccagcctgggccccatctctacaaataattttaaaatggagcgaggtatggtggcattgcctgtggtcccagctacttggaaggctgaggcagaaggatcacctgarcccaggaggccaagtctttagagagttgtgatcacttgactgcaccccagcctgggtgatagagcaagcccctgtctcaaaataataataataatagtaattacattataaaatgattgtttatccacacaagacttggagcttatgacttttgtattttgctttttgcttattttggttttagagaaagttagagggttctaaaatattttctcacctactgatcatttacatgatcactgttctcctgctcagatcctagtgctataccctggccatagtacagttaactactaacatacatccactctcttatctcttacagtgccattc

SEQ ID NO: 174424 - DNA, 584 bp, Homo sapiens
ctgcttatttcctagcattgagcttagtgatagagaaagttaacgtagaaatctgggcctgcccaggtgtggtggctcacacctgtaatcccagcactttagaaggctgaggcaggaggatcgcttgagcccaggagtttgagaccagcctgggccccatctctacaaataattttaaaatggagcgaggtatggtggcattgcctgtggtcccagctacttggaaggctgaggcagaaggatcacctgaacccaggaggccaagtctttagagagttgtgatcactygactgcaccccagcctgggtgatagagcaagcccctgtctcaaaataataataataatagtaattacattataaaatgattgtttatccacacaagacttggagcttatgacttttgtattttgctttttgcttattttggttttagagaaagttagagggttctaaaatattttctcacctactgatcatttacatgatcactgttctcctgctcagatcctagtgctataccctggccatagtacagttaactactaacatacatccactctcttatctcttacagtgccattc

SEQ ID NO: 174425 - DNA, 559 bp, Homo sapiens
tgtcctcttcagcgccagcggcttccggctccccgaggacccctcccatcctygtgtcctcatcgggcctggcacaggcatcgctcccttcctcagtttctggcagcagcggctccatgactcccagcaaaagggtgtggctggaggcttcccaggtgggagggtaccagaggccagcgcctgcctaggagcagaaccgtagccccacaaacggttcctggacctctctggagggaaggcctcccaagtttgtctccctgtgtggggcctatgtgggtgagaacggccgccttcctgtctccggcattggaaccggggctccctctctcgggagtggaggtaacgggaaagtccctgcttttgacctccgatgggctgagggaatcctgcatctgcactttcagttgtgtgactatgtatgagtgattggaatgccctgggcctcagtttcttcatctgtaaagtggggataatgctattaactagctaggatacttgtgggagtgaagtgagaattccagttcggctttgagccatagcgccctgctggccaacatgg

SEQ ID NO: 174426 - DNA, 559 bp, Homo sapiens
tgtcctcttcagcgccagcggcttccggctccccgaggacccctcccatcctcgtgtcctcatcgggcctggcacaggcatcgctcccttcctcagtttctggcagcagcggctccatgactcccagcaaaagggtgtggctggaggcttcccmggtgggagggtaccagaggccagcgcctgcctaggagcagaaccgtagccccacaaacggttcctggacctctctggagggaaggcctcccaagtttgtctccctgtgtggggcctatgtgggtgagaacggccgccttcctgtctccggcattggaaccggggctccctctctcgggagtggaggtaacgggaaagtccctgcttttgacctccgatgggctgagggaatcctgcatctgcactttcagttgtgtgactatgtatgagtgattggaatgccctgggcctcagtttcttcatctgtaaagtggggataatgctattaactagctaggatacttgtgggagtgaagtgagaattccagttcggctttgagccatagcgccctgctggccaacatgg

SEQ ID NO: 174427 - DNA, 585 bp, Homo sapiens
aacagtgcctgacacactgtaggtgctttgggagtgtttcatgttattgggagtctgggtgcascagggaaggcctcccgaggaggtgtctgtgctctgaagggtgaggcggagttaaccaggcatatgcatgtcagggcatctgtagacggacagtctcagaggtgacggaggcagggactgtccctgcagtgtggggtcagagggctgcaggtgccttgctgaaactctgtgaggtgtatgagtccccttcattcacggaaaatccaaggttcagggaggcaaaggccagttgccaaatgcccccagatgggagtggcagccccacgagcccacgagccttcaggggtgactgtgtcctgggctgggttctgtcacaggatctcaccctgccttggcaaagagctttcccaggggctggagtgggtgggctgatgggcccttcctgagtggggaggcacaatggggagggtgggcacaggcacggtgctgagggcacggaaactgtcacgggccacctcagcagaggccacggttgggcttgggtgccctctggtgatactgagtccacaatgaggctgccta

SEQ ID NO: 174428 - DNA, 549 bp, Homo sapiens
tgctttgggagtgtttcatgttattgggagtctgggtgcaccagggaaggcctcccgaggaggtgtctgtgctctgaagggtgaggcggagttaaccaggcatakgcatgtcagggcatctgtagacggacagtctcagaggtgacggaggcagggactgtccctgcagtgtggggtcagagggctgcaggtgccttgctgaaactctgtgaggtgtatgagtccccttcattcacggaaaatccaaggttcagggaggcaaaggccagttgccaaatgcccccagatgggagtggcagccccacgagcccacgagccttcaggggtgactgtgtcctgggctgggttctgtcacaggatctcaccctgccttggcaaagagctttcccaggggctggagtgggtgggctgatgggcccttcctgagtggggaggcacaatggggagggtgggcacaggcacggtgctgagggcacggaaactgtcacgggccacctcagcagaggccacggttgggcttgggtgccctctggtgatactgagtccaca

SEQ ID NO: 174429 - DNA, 576 bp, Homo sapiens
tgacacactgtaggtgctttgggagtgtttcatgttattgggagtctgggtgcaccagggaaggcctcccgaggaggtgtctgtgctctgaagggtgaggcggagttaaccaggcatatgcatgtcagggcatctgtagacggacagtctcagaggtgacggaggcagggactgtccctgcagtgtggggtcagagggctgcaggtgccttgctgaaactctgtgaggtgtatgagtccccttcattcacggaaaatccaaggttcagggaggcaaaggccagttgccaaatgcccccagatgggagtggcagccccacgagcccasgagccttcaggggtgactgtgtcctgggctgggttctgtcacaggatctcaccctgccttggcaaagagctttcccaggggctggagtgggtgggctgatgggcccttcctgagtggggaggcacaatggggagggtgggcacaggcacggtgctgagggcacggaaactgtcacgggccacctcagcagaggccacggttgggcttgggtgccctctggtgatactgagtccacaatgaggctgccta

SEQ ID NO: 174430 - DNA, 540 bp, Homo sapiens
gcctgacacactgtaggtgctttgggagtgtttcatgttattgggagtctgggtgcaccagggaaggcctcccgaggaggtgtctgtgctctgaagggtgaggcggagttaaccaggcatatgcatgtcagggcatctgtagacggacagtctcagaggtgacggaggcagggactgtccctgcagtgtggggtcagagggctgcaggtgccttgctgaaactctgtgaggtgtatgagtccccttcattcacggaaaatccaaggttcagggaggcaaaggccagttgccaaatgcccccagatgggagtggcagccccacgagcccacgagccttcaggggtgactgtgtcctgggctgggtyctgtcacaggatctcaccctgccttggcaaagagctttcccaggggctggagtgggtgggctgatgggcccttcctgagtggggaggcacaatggggagggtgggcacaggcacggtgctgagggcacggaaactgtcacgggccacctcagcagaggccacggttgggcttggg

SEQ ID NO: 174431 - DNA, 540 bp, Homo sapiens
gcctgacacactgtaggtgctttgggagtgtttcatgttattgggagtctgggtgcaccagggaaggcctcccgaggaggtgtctgtgctctgaagggtgaggcggagttaaccaggcatatgcatgtcagggcatctgtagacggacagtctcagaggtgacggaggcagggactgtccctgcagtgtggggtcagagggctgcaggtgccttgctgaaactctgtgaggtgtatgagtccccttcattcacggaaaatccaaggttcagggaggcaaaggccagttgccaaatgcccccagatgggagtggcagccccacgagcccacgagccttcaggggtgactgtgtcctgggctgggttctgtcacaggatctcaccctgccttggcaaagagctttccsaggggctggagtgggtgggctgatgggcccttcctgagtggggaggcacaatggggagggtgggcacaggcacggtgctgagggcacggaaactgtcacgggccacctcagcagaggccacggttgggcttggg

SEQ ID NO: 174432 - DNA, 585 bp, Homo sapiens
aacagtgcctgacacactgtaggtgctttgggagtgtttcatgttattgggagtctgggtgcaccagggaaggcctcccgaggaggtgtctgtgctctgaagggtgaggcggagttaaccaggcatatgcatgtcagggcatctgtagacggacagtctcagaggtgacggaggcagggactgtccctgcagtgtggggtcagagggctgcaggtgccttgctgaaactctgtgaggtgtatgagtccccttcattcacggaaaatccaaggttcagggaggcaaaggccagttgccaaatgcccccagatgggagtggcagccccacgagcccacgagccttcaggggtgactgtgtcctgggctgggttctgtcacaggatctcaccctgccttggcaaagagctttcccaggggctggagtgggtgggctgatgggcccttcctgagtggggaggcasaatggggagggtgggcacaggcacggtgctgagggcacggaaactgtcacgggccacctcagcagaggccacggttgggcttgggtgccctctggtgatactgagtccacaatgaggctgccta

SEQ ID NO: 174433 - DNA, 565 bp, Homo sapiens
cacactgtaggtgctttgggagtgtttcatgttattgggagtctgggtgcaccagggaaggcctcccgaggaggtgtctgtgctctgaagggtgaggcggagttaaccaggcatatgcatgtcagggcatctgtagacggacagtctcagaggtgacggaggcagggactgtccctgcagtgtggggtcagagggctgcaggtgccttgctgaaactctgtgaggtgtatgagtccccttcattcacggaaaatccaaggttcagggaggcaaaggccagttgccaaatgcccccagatgggagtggcagccccacgagcccacgagccttcaggggtgactgtgtcctgggctgggttctgtcacaggatctcaccctgccttggcaaagagctttcccaggggctggagtgggtgggctgatgggcccttcctgagtggggaggcacaatggggagggtgggcacaggcacggtgctgagggcasggaaactgtcacgggccacctcagcagaggccacggttgggcttgggtgccctctggtgatactgagtccacaatgag

SEQ ID NO: 174434 - DNA, 435 bp, Homo sapiens
atggaaattgacggatgaagagaaaggggcagctgaggagtctgggagaccaaggcaggtgttccagacagagacagtgacacagaaggaggggcagagtgacagaggagaaggggcgggcaggtactgggacagggaagcagaggttgtccccagagtgacctgggtaggagattggcttgggtccccccarctgggcctaagcacagctacgctgggccctgcatcccagcccctgggaccggtgccaggtggacagtctgacctggaagctgatgtaggacagctgcacagagccattgacggagatggtgtccacacggtggaagggcacgcggtggaagtactgcacgaagaggctcccgttcaccatcacctgccagaggagagcacgtatttcgggggaggtgccccaggccgggatggggaccaccc

SEQ ID NO: 174435 - DNA, 435 bp, Homo sapiens
atggaaattgacggatgaagagaaaggggcagctgaggagtctgggagaccaaggcaggtgttccagacagagacagtgacacagaaggaggggcagagtgacagaggagaaggggcgggcaggtactgggacagggaagcagaggttgtccccagagtgacctgggtaggagattggcttgggtccccccagctgggcctaagcacagctacgctgggccctgcatcccagcccctgggaccggtgccaggtggacagtctgacctggaagctgatgtaggacagctgcacagagccattgacggagatggtgtccacacggtggaagggcaygcggtggaagtactgcacgaagaggctcccgttcaccatcacctgccagaggagagcacgtatttcgggggaggtgccccaggccgggatggggaccaccc

SEQ ID NO: 174436 - DNA, 435 bp, Homo sapiens
atggaaattgacggatgaagagaaaggggcagctgaggagtctgggagaccaaggcaggtgttccagacagagacagtgacacagaaggaggggcagagtgacagaggagaaggggcgggcaggtactgggacagggaagcagaggttgtccccagagtgacctgggtaggagattggcttgggtccccccagctgggcctaagcacagctacgctgggccctgcatcccagcccctgggaccggtgccaggtggacagtctgacctggaagctgatgtaggacagctgcacagagccattgacggagatggtgtccacacggtggaagggcacgcggtggaartactgcacgaagaggctcccgttcaccatcacctgccagaggagagcacgtatttcgggggaggtgccccaggccgggatggggaccaccc

SEQ ID NO: 174437 - DNA, 551 bp, Homo sapiens
tttcctctgcctcccaggttctgtaagcattgggagcatgacccagcccacagcagatgggatcattggccttgagtgtatggttaccttgcctgtgatcagaggaaggtcagcccagcacgttcaaggggagtttctaaaggctgtggtcagyagtggccagtgatgatgactgccctttggccaggttggaggagtggagcacacacgttaaacttggcttcctcgctgggtgtggtagctcacgcttgtaatcccagcactttgggaggcaaaggcaggattaaaaacttaaatctaaaatgaaaacatattaaaaccttggacgataacctaggaaataccattgcggacataggacctggaaatgatcttcatgacaaagatgccaaaagtaattgcaagaaaaacaaaaattggcaaatgggacctaattaaactaaagagcttctttacggcaaaagaaactatcaacagagtgaacagctcacagaaagggagaaaatatttgcaacctagccatctgacaaacgtctaatatccagcatctg

SEQ ID NO: 174438 - DNA, 551 bp, Homo sapiens
tttcctctgcctcccaggttctgtaagcattgggagcatgacccagcccacagcagatgggatcattggccttgagtgtatggttaccttgcctgtgatcagaggaaggtcagcccagcacgttcaaggggagtttctaaaggctgtggtcagcagtggccagtgatgatgactgccctttggccaggttggaggagtggagcacacacgttaaacttggcttcctcgctgggtgtggtagctcacgcttgtaatcccagcactttgggaggcaaaggcaggattaaaaacttaaatctaaaatgaaaacatattaaaaccttggacgataacctaggaaataccattgcggacrtaggacctggaaatgatcttcatgacaaagatgccaaaagtaattgcaagaaaaacaaaaattggcaaatgggacctaattaaactaaagagcttctttacggcaaaagaaactatcaacagagtgaacagctcacagaaagggagaaaatatttgcaacctagccatctgacaaacgtctaatatccagcatctg

SEQ ID NO: 174439 - DNA, 573 bp, Homo sapiens
cctcctttctccattcttcctctctggagtctagaaagcagagctgagctctgcagaccagaacataggcagcctcattctggactcagtatcaccagagggcacccaagcccraccctggcctctgctgaggtggcccctggcagcttccctgccctcagcaccctgcctctgcccaccctccccattctgcctccccactcaggaagggcccatcagcccacccactccagcccctcgggaagctctttgccaaggcagggtgagatcctgtgacagaacccagcccaggacacagtcacccctgaaggctcctgggctcctggggctgccactcccatctgggggcatttggcaactggcctttgcctccctgaaccttggattttccgtgaatgaaggggactcataaacctcacagagtttcagcaaggcacctgcagccctctgaccccacactgcagggacagtccctgcctccgtcacctctgagactgtccgtctacagatgccctgacatgcctatgcctggttaactccgcctcacccttcagagcacagacacctcctcgg

SEQ ID NO: 174440 - DNA, 573 bp, Homo sapiens
cctcctttctccattcttcctctctggagtctagaaagcagagctgagctctgcagaccagaacataggcagcctcattctggactcagtatcaccagagggcacccaagcccaaccctggcctctgctgaggtggcccctggcagcttccctgccctcagcaccctgcctctgcccaccctccccattctgyctccccactcaggaagggcccatcagcccacccactccagcccctcgggaagctctttgccaaggcagggtgagatcctgtgacagaacccagcccaggacacagtcacccctgaaggctcctgggctcctggggctgccactcccatctgggggcatttggcaactggcctttgcctccctgaaccttggattttccgtgaatgaaggggactcataaacctcacagagtttcagcaaggcacctgcagccctctgaccccacactgcagggacagtccctgcctccgtcacctctgagactgtccgtctacagatgccctgacatgcctatgcctggttaactccgcctcacccttcagagcacagacacctcctcgg

SEQ ID NO: 174441 - DNA, 592 bp, Homo sapiens
agctctgcagaccagaacataggcagcctcattctggactcagtatcaccagagggcacccaagcccaaccctggcctctgctgaggtggcccctggcagcttccctgccctcagcaccctgcctctgcccaccctccccattctgcctccccactcaggaagggcccatcagcccacccactccagcccctcgggaagctctttgccaaggcagggtgagatcctgtgacagracccagcccaggacacagtcacccctgaaggctcctgggctcctggggctgccactcccatctgggggcatttggcaactggcctttgcctccctgaaccttggattttccgtgaatgaaggggactcataaacctcacagagtttcagcaaggcacctgcagccctctgaccccacactgcagggacagtccctgcctccgtcacctctgagactgtccgtctacagatgccctgacatgcctatgcctggttaactccgcctcacccttcagagcacagacacctcctcgggaggccttccctgctgcacccagactcccaataacatgaaacactcccaaagcacctacagtgtg

SEQ ID NO: 174442 - DNA, 574 bp, Homo sapiens
ataggcagcctcattctggactcagtatcaccagagggcacccaagcccaaccctggcctctgctgaggtggcccctggcagcttccctgccctcagcaccctgcctctgcccaccctccccattctgcctccccactcaggaagggcccatcagcccacccactccagcccctcgggaagctctttgccaaggcagggtgagatcctgtgacagaacccagcccaggacacagtcacccctgaaggctcctgggctcctggggctgccactcccatctgggggcatttggcaactggcctttgcctccctgaaccttggattttccgtgaatgaaggggactcataaacctcacagagtttcagcaaggcacctgcagccctctgaccccacactgcagggacagtccctgcctccgtcacctctgagactgtccgtctacagatgccctgacatgcctatgcctggttaactccgcctcacccttcagagcacagacacctcctcgggaggccttccctgctgcmcccagactcccaataacatgaaacactcccaaagcacctacagtgtg

SEQ ID NO: 174443 - DNA, 438 bp, Homo sapiens
cagctcctgtgacccatggcgggtacctgaactgaaagcagcctccttaggaggatgcatagaattgcacagctcacctaagaggtaacagcaaatagcacaactcctacctaatcaatgcatggggtggggatcaagaaaatgactaatcagaccaatgacttaaacaaagtaaaggggaaatggataacagcacacattttcctgttgatatcccatagctgctggattaagaatgayggacaggagaactaccttctgccaattaattccagagcataatttgtagcctgggcccatcctggacgatcccgggctgctaacaaaccatgacactgctttaatttctcctttgcccccacactctattaaaacctagagtgggttccatcaaatatcccttcaaggaaaaaaaacagagagtgagagagaaatgga

SEQ ID NO: 174444 - DNA, 584 bp, Homo sapiens
ctttcctttgtttccttgtaaaggcaccctgttctgttayggtttttcattatataaaattattatatctatatatgacatatgctaaaatttcttggagagtgttaatcttttctgtgactaaatagcaataataagtggaaaattagaaattatttccaggtattatatttgtcacaggccattgtaaataccaagtatattgtgtctgccataatttttaaaaatacattcattgtcttcagtcatacagcaagacacatgagacatagattagaaaacatgttgtacaattttaatttacaactgttggaaataaaaatcacttaatttttttccagtgcttctccctcatctggttattcaagaaaacaaaacagtctctgagatatttagcttttcaaactgtaaatagatgctctagtgttatttatttttttaatcccacttgtattattttacctctagagcatcttgtattaggacatgttatatttatgccagtgggaaataagttatggccaagttttgcaaaaacaggaagcagtgagatacttgtttttttctcctcactaaatatcagt

SEQ ID NO: 174445 - DNA, 385 bp, Homo sapiens
tattcatcacctactcaaattcttgattctgcaattgtagttcctcttctcctatgctaagaagtctagatttctaacaaaataaatgatcacttatttgtctggaaaaattagttctaaaataatattacaacattaatgcaaattttccaattatcaaatacagctcaacttttctaatagttcttttttgtttatttttagacggcattccactaaggatttgctaaaaatctctttgctctaaactcattcataacctctgactctttggctctgtatagagctttggctcatctgttctcstttgtttgcagtttgaggccctggcatcagaacagctgacagaccaaagctctagaggggggtgactggcagccaccag

SEQ ID NO: 174446 - DNA, 517 bp, Homo sapiens
atctcacaccatgtggctatgcagggacttatctgacaggtagttctgggtccattgtttccatccactttcattttgaagaggctgcaacctgcccccagcccccgttttctgctctactttttcattttaccgtgacttacaaactcccaatatactaaataattcactgaataataatactgtkattgtgttattatttctcccttaccccattggaatgtgagcctcatggagcagggattttattcactggaccctggcagttgcaccctaaaggcaggactaagaaagctgggcttgattctgggggctcaggggactctactgggttggcctgcaagagacagtcttcagtgaaacagcagaagccactctaggctgctcccaaatacttatccccccacaacacacacacacaagtacttcccccaattcccacaggactcaatgagaaactgtgaaaacaaagcaagccagtagtgctgagcctgagcccctggactcagtgactggg

SEQ ID NO: 174447 - DNA, 549 bp, Homo sapiens
aggcagaaagtccattcattcattcattcatttgatgaatatgtattgagctccatattagcagcagcaaatccatacaggcctgcagcaaccccagttcttgcctcctcagagaaagaattagacagaggaggtataaggcagagtgagaaactgaggcaagttttagagcaggagtgaaagtgtattaacaactatcagggcaggaatgaaatggagtgaagcacgcttgtaagagagcccggtgggaggcctgtgagagagtcaagtgtacggtttgacctttgacctggggtcttatgttggcatcttcctgttgcgttatttcctcctgattcttccctttgggtgggctgtccacatgcacagtggcctgccagcacttgggaagggcaaatgctgtacmtgcaccgtgggtttactgaagttgtgtgcatgctcatttgaggaattctccacttacctgtctcgttcctagaggaaggtaatataccagttataccattttgcctcttagtgcgcatgcttgaacccacacacccaactgct

SEQ ID NO: 174448 - DNA, 549 bp, Homo sapiens
aggcagaaagtccattcattcattcattcatttgatgaatatgtattgagctccatattagcagcagcaaatccatacaggcctgcagcaaccccagttcttgcctcctcagagaaagaattagacagaggaggtataaggcagagtgagaaactgaggcaagttttagagcaggagtgaaagtgtattaacaactatcagggcaggaatgaaatggagtgaagcacgcttgtaagagagcccggtgggaggcctgtgagagagtcaagtgtacggtttgacctttgacctggggtcttatgttggcatcttcctgttgcgttatttcctcctgattcttccctttgggtgggctgtccacatgcacagtggcctgccagcacttgggaagggcaaatgctgtacctgcaccgtgggtttactgaagttgtgtgcatgctcatttgaggaattctccacttacstgtctcgttcctagaggaaggtaatataccagttataccattttgcctcttagtgcgcatgcttgaacccacacacccaactgct

SEQ ID NO: 174449 - DNA, 393 bp, Homo sapiens
tgatgtaacctgctcctcaaacaggatggtaagctagtcagttgattttcagcataggtgccatgacatttaataagggaaagaayagtgttttcagcaaatggtgctggggcaactagatatccacgtgccaaaaaataaaaatggatttggacccccaccacacaccataccaaaaaaaaaaaagaaagaaaaactcaaaatagtagatttagatgtatgagctaaaactgtaaaactcttagaaggaaacaggtaaaatatttatgaccttggtttaggcaatgatttcttagatatctgaaaaaagatatcagaatattcagaatatataaagaactcttacaagtaaataataaaaggacaaataactcaattaaaaagtaggcaaag

SEQ ID NO: 174450 - DNA, 544 bp, Homo sapiens
actggagtgcagttttaaactactgcaatgtkgaatttccacagtcatggcacttaattggtccttggcatctgggtttggtgctcttcttcctcctgtctcaagagggcagtctggccacagctctttccatggaaggggtagggtaggagtgtgaagacaggtcctgatgatcacacgatgcccttctttctcttaatttaggtttgggagcagagagaacaaaagatcccacatgggtcttcaattctaagccacatgttcctgatttggagtctacagggcttgcaaaactgacagtcatgccattggtgtgtacatgctctcttgaagacctcatggagagcacaaatgatttgctgggtaagattaggcattcctgggtcctcagtcaccagatgtcaacatctatttgtttccaatgaactgttgatttaatctctctctctgcagctcagcctccttagcagaggccttttataatctgttcccaactgaccaggccattttcatcttctctgccattgctgctggccatacagaa

SEQ ID NO: 174451 - DNA, 427 bp, Homo sapiens
tttatcagactcatgcacatatctgagaataggagataaccagggtgatcatgatgtttctgttggtctatttggcctaatcagaagaaaaggaatcgtttccttggggtgttgtgaaatactggaatgaggctgaagacagccttcattactggccagagctggtctggagccagtatagcctctggggacagayggactctccgcctgcagcttctcccactattaccacctgtgcgactttgaacaacttttgtgatatctctaagcctcagtttcttcattcataaaacaggaactagaatgttctctcacaccccaaaacgccgaaaggtggaatgagattatggagctcacctgtctggcttcggtctgaaacagtatgtgttcagtaaatggcatctaagtcaatatatcagaagaattc

SEQ ID NO: 174452 - DNA, 420 bp, Homo sapiens
caaatgaatgattcatgtcccgtggcaagacggactggatggcatgagatctcatcacgttactcagtatgcatgcaatttaaaattctacaagtygtttatttctgaaatttcctatttaatattattttacctcaggtaactaaaaccttagcaagtgaaactgtggataagggcaggcaaggggctgaaggctaccagttgtatttactgaaatgtagtcttttacaccttattcttgctaatatttcttcacagcaaacaccctgaaagatatacaaaaccaagaaaatacttctaaaataaacatttttaaatattataaaaacgttaactctggaacttctctggcacaaaataccatataatttcacatttgaaaagtatatattcattaattttagatatctataataaccc

SEQ ID NO: 174453 - DNA, 584 bp, Homo sapiens
tatatacatacaaatacataattacatttaccttattgcattattttgaagtacaatgaaaatgttgatttacatatacagatccttagttcaggtagtgtaggatgaatagttgaaattcagatataaaaccctccatgtgataraattagatttgctgatgtgaatattgcctattttgtgactgtaaaaggtcccctaggctatactattttttttcagtatttttctctctactgtttccaatgggtcagttctgtggacctgtcatctagctcaccgtctctgtcatctcagctccaaaactgagcccatgtagcttgctgtatttatttctgttactttacttttcatttccattacttgcacttttttttttttttttttttttttttttgagatggagtctcgctctgttgccaagctggagtgcagtggccatctgggctcactgcaacctccgactcctgggttcaagcgattctcctgcctcagcctccaaagtagctgggattacaggtgcatgccaccatgcccagctaatttttgtattttcagtaatgacggggtttcatcgtgttggc

SEQ ID NO: 174454 - DNA, 584 bp, Homo sapiens
tatatacatacaaatacataattacatttaccttattgcattattttgaagtacaatgaaaatgttgatttacatatacagatccttagttcaggtagtgtaggatgaatagttgaaattcagatataaaaccctccatgtgataaaattagatttgctgatgtgaatattgsctattttgtgactgtaaaaggtcccctaggctatactattttttttcagtatttttctctctactgtttccaatgggtcagttctgtggacctgtcatctagctcaccgtctctgtcatctcagctccaaaactgagcccatgtagcttgctgtatttatttctgttactttacttttcatttccattacttgcacttttttttttttttttttttttttttttgagatggagtctcgctctgttgccaagctggagtgcagtggccatctgggctcactgcaacctccgactcctgggttcaagcgattctcctgcctcagcctccaaagtagctgggattacaggtgcatgccaccatgcccagctaatttttgtattttcagtaatgacggggtttcatcgtgttggc

SEQ ID NO: 174455 - DNA, 584 bp, Homo sapiens
tatatacatacaaatacataattacatttaccttattgcattattttgaagtacaatgaaaatgttgatttacatatacagatccttagttcaggtagtgtaggatgaatagttgaaattcagatataaaaccctccatgtgataaaattagatttgctgatgtgaatattgcctattttgtgactgtaaaaggtcccctaggctatactattttttttcagtatttttctctctactgtttccaatgggtcagttctgtggacctgtcatctagctcaccgtctctgtcatctcagctccaaaactgagcccatgtagcttgctgtatttatttctgttactttacttttcatttccattacttgcacttttttttttttttttttttttttttttgagatggagtctcgctctgttgccaagctggagtgcagtggccatctgggctcactgcaacctccgactcctgggttcaagcgattctcctgcctcagcctccaaagtagctgggattacaggtgcatgccaccaygcccagctaatttttgtattttcagtaatgacggggtttcatcgtgttggc

SEQ ID NO: 174456 - DNA, 498 bp, Homo sapiens
gcctgtctggctttggagtctgtcctcttagcatgcagaaagcctgttctcagggagcttacagtctgttctcaggatggtgttttgtcacatgtgacacagccatttgtttcatcttgttttatctattataaaatctacttctgtagacatgagactgtgaacttttctgtattgtttactttctgctttggtagatacatttgctcattgcacatacgtggtgatgcaagtttttcatctgataaaatcttcacttttcattgatttttgttctcaatttttattaatttattrtaatatataaactttgttttaattcgaattggttaatttggacaggaaaaaaagttcagtaaatataatttttagccttttctcaacctgccttcaccataagagtgccaggtgtctgagttcaaccctttctctgaaatagctttttcatttgtagtgagaattgataagtgttaattatcactgaaagtgagattaaag

SEQ ID NO: 174457 - DNA, 553 bp, Homo sapiens
ttttggttttaactcttctcctgtttttctccataaatgtactgataaatgtaatgattcgtgtctactttattaattactgctatttcctgctktggtagatattccacctgaaatatatggaaattcaactgaaagaattgtttaaggccctttttcttaggtctcatgaatcatatttcaagcaatatatgcatattactacataccattctaccgaataactcaaagatatcccaccttgtttttaggagatattgtcaaaaacactgacaaataccaaagatttcctagtcatgcttacgaatggataaaattgtttggagaactaaacaattctactatgtataattcaatgttgggattttgttaaaaaataaaattccttcaaatcttacccaatctttatttctgtgaaacatttttgggaggggaaaatatggataaaataggcctaatagtagaataatcaattaaatgaagcctagaaattatttacattatttttataagcatataaagtcttcaatagcctattttcttctgaggagaa

SEQ ID NO: 174458 - DNA, 577 bp, Homo sapiens
aggattgaaatccttggtatgtgtatatatcccaccaccatacacgtatctcccagagttttcaagattttattcacggtctcattgtagcctaaattagagagaatgtatattgaactattatgtctacaaagttatttacaatattttatccagttatagtaacggacttttatatgcttaagagtatgaaataattttgacaaaagtagccaggagtcagatttacatgaacaacaacagaaaaagaatgctgacagtaactcaaaaacggtacagctggaaaagataaacctttaggaaagtacttcctacatttataaatacataatagatagatgatatagatacatagatgatagatagagatgctggactagagaggtcattggcaaaaaataggggcttttgagtcacttagatccaagtttgcttcctggttttcctagttagtaaaacctacagagcaaggtatttaatctttctgattgtcagttactttatttgcaaamagaagatgcttataatgacctgctttcatacagcgatgacgtttaaggagaaggatattgtgaat

SEQ ID NO: 174459 - DNA, 559 bp, Homo sapiens
ttttcaaatgtttggacttcaggaagtcctacgaaccacatgaattgcatgttgaattgctggataaaatgcatgcatcattctccgtgaaagtgttcacaattcttatgagtttctaaagtacccatgccacacaaggtaacaaaatatgttattcagcttgggagaaaaggaagcctgtgttctgaagaatagctgtcgaatatgtccagtaatttatttagaacatgggaaatagacaagtgttcatgtgtggaagataggaattttatgagaacacgtcatttctttgtggtggtggtagtgtcatttttagaccaagaacttctgtggggagaaaagagctgttatgatctcctccccaacacactgaacatctttgctaaatagcttttgaggaatagatttttgtctttccctttgtttccatcttctgaaacagcacatccattaagaggggcagttctgagaataatggaagagcrcttaaaaggcagagcagccttggcattgctcctaagaagcacttcccacagctcaggtaacagccgtcagagca

SEQ ID NO: 174460 - DNA, 593 bp, Homo sapiens
ctggacccactgatcatccttcatataaataaaagtaggaaaacaaagaaaaaaaatgggactttaagaaccatggtaaataatatattaacttagataagcatgggtaattcagtctctctcttttttaaagattttctttcccctcctccagctttatttcagccagatatagaaagacaaatactgcatgttattgtttatatgtggaatgtaagaactcatagaaacagagagcagaaaggtgttttgccaggggataggagggtgagggaaatggagggactttggttaaagggtatgaaattttagttacaagatgagtaagttaattcagtcttttaagacagcatgctaaaaagctctaacaaaagtagcatagtcagtaacctaacccagttctagaagcacakcattaagatggtgcttctgcacccctaactggtgttcatgtggggatcctgaagaactgtatgggtcttgtctcattctcacagtttccagcagacagccatgttttgtaaaaaagattgggaagagcaacatcagcaaaatgccattcccctgagctaattttagctatgacagtccta

SEQ ID NO: 174461 - DNA, 597 bp, Homo sapiens
gacccacattcttcctgaaacaaaattttcaatattgtcttttttgttgctgttgaaggtctgtgtttgcaatgattaccttgctaaataaaaacttctgagtatttctacatcactgctaagaataatattttagtggaattccttagaataagactttctrctatacattattgcacgagaatatgcctgatatacttaaaagagaacaatggtagctaacattgattgaaagcatctgcggaggcagctatttgttgaaatgccctctctacatcagatcacatggctcacatttacctcgtaaatttggaactcctgtcacccttttctaatggagaaggacacagacttgggagaattcaatgacttgttgaaaccacacaattaagtactatcaagtcacctcttgagtgtccatccaagtatagaaaaaatagcgtcttttctactggctttacaaaagggatttgtaattgactttcagggagtttgagaatggcaagaaaagccatgtcaatggcagccggacaaacattctccagcttcccctctgctcccagggcctccctggggctcagattagtaggttgccct

SEQ ID NO: 174462 - DNA, 597 bp, Homo sapiens
gacccacattcttcctgaaacaaaattttcaatattgtcttttttgttgctgttgaaggtctgtgtttgcaatgattaccttgctaaataaaaacttctgagtatttctacatcactgctaagaataatattttagtggaattccttagaataagactttctactatacattattgcacgagaatatgcctgatatacttaaaagagaacaatggtagctaacattgattgaaagcatctgcggaggcagctatttgttgaaatgccctctctacatcagatcacatggctcacatttacctcgtaaatttggaactcctgtcacccttttctaatggagaaggacacagacttgggagaattcaatgacttgttgaaaccacacaattaagtactatcaagtcacctcttgagtgtccatccaagtatagaaaaaatagcgtcttttctactggctttacaaaagggatttgtaattgactttsagggagtttgagaatggcaagaaaagccatgtcaatggcagccggacaaacattctccagcttcccctctgctcccagggcctccctggggctcagattagtaggttgccct

SEQ ID NO: 174463 - DNA, 635 bp, Homo sapiens
cacacaaataggtatataaagagagaggagactgtgactaattaacttggttgtttggaaaaggaatcatggaaatgcgatatttgaattctgcataagatattgtgttagttagttattgcaatgaaacaaattaccccaaaacttagtgtcatgaatgttggtcatctactctcagacaggcttgcacatatawccttgtaagctggagggattgctgaggaatggctgggctaggatagagtcagctgagaagactcagctgttctctgtatcatttctcatcctctagcagtcatgaccttttcatcgtgatggggaaaaaggcccacatgatagctaaagcgttcaagagttctcaaggcccagacttgggactaacatcacatcactcctgccacatcctattactaaatgcaactcttcaggctactctgactcaaggggtgagaaaatagattccaactctttatgaaaactgcctagactcatcgcactgtgtggcttgacagaggtaattaattaaatgtgttatttcaatcaatccatttgataagtaggtaaatatttaagtaggtagataggagcacagacaggcagactggtagatatgtgtctgaacaacagactgttac

SEQ ID NO: 174464 - DNA, 611 bp, Homo sapiens
taaaaaaatctccacagctgcagtgagagtcattttcagggaaggattccaattggctcagcctgaactatgtgccttcccacccttgaaccaatccctttcccatcctgggtcacatgctcagccctgggggtccacatgacaggcctattgctaaaaggaggtgagagaaactgcatagacaaaaacagaagatgttgatgaccattactaaaggtcatcacaaaagtgtgtttttgtgcactacaagtgcatagcattcagttttggattttccctgttagtccatggtccttttgtccatcttggtatttatgtcatgtgtgtgttcactggaggtctgctgagatgttgtacctgatgttgggaatgtaaatataaatagaacacaggtacttcccccaaataactcataacttgtaggcaagaacaattgtamacattcaattaaaacacaacatggtaattactctcattgggatctgggaaaagcactgtttgcagaaagaaataactacccaagcctggaatgggttaagattgacaaatgaaagaagcatggagtaagccttacaggcataaataaaaagtgggatgtgaaaaggcacagg

SEQ ID NO: 174465 - DNA, 589 bp, Homo sapiens
gtgtgtgttcactggaggtctgctgagatgttgtacctgatgttgggaatgtaaatataaatagaacacaggtacttcccccaaataactcataacttgtaggcaagaacaattgtacacattcaattaaaacayaacatggtaattactctcattgggatctgggaaaagcactgtttgcagaaagaaataactacccaagcctggaatgggttaagattgacaaatgaaagaagcatggagtaagccttacaggcataaataaaaagtgggatgtgaaaaggcacaggcttttgaaggagtactgcatactttcagaccagtttagggtagttagatcagtttaggatgtgtggtggaggggagagtatgaaatggggccagaggttacagagtgaaagccttatatgacttggattgcatcttttaacaagcctcttaaatgtctttgtggtgagtggattttcttttcttcagtcctgaaagttgttatccaattattattcttaatgcttgttttggtcatgttatctttttgttgaaaaactgacatagactgctatgacctaaaacatatagtctaggcttg

SEQ ID NO: 174466 - DNA, 589 bp, Homo sapiens
gtgtgtgttcactggaggtctgctgagatgttgtacctgatgttgggaatgtaaatataaatagaacacaggtacttcccccaaataactcataacttgtaggcaagaacaattgtacacattcaattaaaacacaacatggtaattactctcattgggatctgggaaaagcactgtttgcagaaagaaataactamccaagcctggaatgggttaagattgacaaatgaaagaagcatggagtaagccttacaggcataaataaaaagtgggatgtgaaaaggcacaggcttttgaaggagtactgcatactttcagaccagtttagggtagttagatcagtttaggatgtgtggtggaggggagagtatgaaatggggccagaggttacagagtgaaagccttatatgacttggattgcatcttttaacaagcctcttaaatgtctttgtggtgagtggattttcttttcttcagtcctgaaagttgttatccaattattattcttaatgcttgttttggtcatgttatctttttgttgaaaaactgacatagactgctatgacctaaaacatatagtctaggcttg

SEQ ID NO: 174467 - DNA, 589 bp, Homo sapiens
gagttccaaactttcccacatctttctgtctttttctgagccctccaaactgttccaacctctgcctgttacccaattccaaagttgctttcacattttcaggtatctttacagcagtaccccatttctggtactaatgtctgcattagcccattctcatgctgctaaaaaagacacacccaagactggtaatttaaaaaggaaagaagtttaatggactcacagtttcatacaggtggggaggcctcacactcatatcasaagatgaaggaagagaaaaggcgtgtcttacatggtagcaggcaaaagtgagcttgtgcacgggaactcccctttttaaaaccatcagatctcatgagacttattcactatcacgagaacaacatgggaaagacctcccctccatgattcacttacctcctacaaggtcccactcatgatgtgggaattgtgggagctacactccacgatgagatttgggtgaggacacagccaaaccactatcactatgcatccacagagtagtaaaagcctgggtgataagcagcatgggctgatacacaacacatcatgtcagacattgaattgc

SEQ ID NO: 174468 - DNA, 589 bp, Homo sapiens
gagttccaaactttcccacatctttctgtctttttctgagccctccaaactgttccaacctctgcctgttacccaattccaaagttgctttcacattttcaggtatctttacagcagtaccccatttctggtactaatgtctgcattagcccattctcatgctgctaaaaaagacacacccaagactggtaatttaaaaaggaaagaagtttaatggactcacagtttcatacaggtggggaggcctcacactcatatcacaagatgaaggaagagaaaaggcrtgtcttacatggtagcaggcaaaagtgagcttgtgcacgggaactcccctttttaaaaccatcagatctcatgagacttattcactatcacgagaacaacatgggaaagacctcccctccatgattcacttacctcctacaaggtcccactcatgatgtgggaattgtgggagctacactccacgatgagatttgggtgaggacacagccaaaccactatcactatgcatccacagagtagtaaaagcctgggtgataagcagcatgggctgatacacaacacatcatgtcagacattgaattgc

SEQ ID NO: 174469 - DNA, 589 bp, Homo sapiens
gagttccaaactttcccacatctttctgtctttttctgagccctccaaactgttccaacctctgcctgttacccaattccaaagttgctttcacattttcaggtatctttacagcagtaccccatttctggtactaatgtctgcattagcccattctcatgctgctaaaaaagacacacccaagactggtaatttaaaaaggaaagaagtttaatggactcacagtttcatacaggtggggaggcctcacactcatatcacaagatgaaggaagagaaaaggcgtgtcttacatggtagcaggcaaaagtgagcttgtgcasgggaactcccctttttaaaaccatcagatctcatgagacttattcactatcacgagaacaacatgggaaagacctcccctccatgattcacttacctcctacaaggtcccactcatgatgtgggaattgtgggagctacactccacgatgagatttgggtgaggacacagccaaaccactatcactatgcatccacagagtagtaaaagcctgggtgataagcagcatgggctgatacacaacacatcatgtcagacattgaattgc

SEQ ID NO: 174470 - DNA, 589 bp, Homo sapiens
gagttccaaactttcccacatctttctgtctttttctgagccctccaaactgttccaacctctgcctgttacccaattccaaagttgctttcacattttcaggtatctttacagcagtaccccatttctggtactaatgtctgcattagcccattctcatgctgctaaaaaagacacacccaagactggtaatttaaaaaggaaagaagtttaatggactcacagtttcatacaggtggggaggcctcacactcatatcacaagatgaaggaagagaaaaggcgtgtcttacatggtagcaggcaaaagtgagcttgtgcacgggaactcccctttttaaaaccatcagatctcatgagacttattcactatcacgagaacaacatgggaaagacctcccctccatgattcacttacctcctacaaggtcccactcatgatgtgggaattgtgggagctacamtccacgatgagatttgggtgaggacacagccaaaccactatcactatgcatccacagagtagtaaaagcctgggtgataagcagcatgggctgatacacaacacatcatgtcagacattgaattgc

SEQ ID NO: 174471 - DNA, 446 bp, Homo sapiens
atagaatcgaacacaaaatctacccagtctttccttggttatccttattcactagatttctggaaagtataaagctcgctaacactcaaatgccttctaagtctttgtatagtctaatttaatcactatgacaaactagagtgataaattttcctatctacatcttacaaatgaagaaaaggactcacattgactaacttgcctaatgtcatttagtagaatagaagagatgacatgtaaacccagctttgtcttgttacaataccccaactttttccaactaaatctatagcccatccaaatttttccttttggcgaaartgcatattcagaagtaaaatattaacataaccacaatcctcttccatattcaaaggtagctgcttcgtttccaaattgtcagactccaaccctttctgagcgccaaccacccccatcccaggaat

SEQ ID NO: 174472 - DNA, 446 bp, Homo sapiens
atagaatcgaacacaaaatctacccagtctttccttggttatccttattcactagatttctggaaagtataaagctcgctaacactcaaatgccttctaagtctttgtatagtctaatttaatcactatgacaaactagagtgataaattttcctatctacatcttacaaatgaagaaaaggactcacattgactaacttgcctaatgtcatttagtagaatagaagagatgacatgtaaacccagctttgtcttgttacaataccccaactttttccaactaaatctatagcccatccaaatttttccttttggcgaaagtgcatattcagaagtaaaatattaacataaycacaatcctcttccatattcaaaggtagctgcttcgtttccaaattgtcagactccaaccctttctgagcgccaaccacccccatcccaggaat

SEQ ID NO: 174473 - DNA, 582 bp, Homo sapiens
tttccttttggcgaaagtgcatattcagaagtaaaatattaacataaccacaatcctcttccatattcaaaggtagctgcttcgtttccaaattgtcagactccaaccctttctgagcgccaaccacccccatcccaggaattcaggtgtcactgccgccatccagtgaattacaaggcattgatatgccatgggcacatttccatctgtccttttaaactcctgctgaagacaccaaacaaagctgcctcatgagcccaaatttatctaaatcataataagccttgaaaacaaagctgtgggatcccaaactacactattgccatgacaatttgrtaagggtagctgaagatgagcaaacagttgttgaatgaagtggcagaaaagtgtataatgaattaagaacctaagctggctctaacccatgtgcttcccatcactggcaagtaggtcatggatagggtgcactgtcaggcctctgagcccaagccaagccatcgcatcccctgtgacctgcacatatacgcccagatggcctgaagtaactgaagaatcacaaaagaagtgaatatgccctgcccc

SEQ ID NO: 174474 - DNA, 554 bp, Homo sapiens
catacatacacataaacttcaaggaagccttggggaggctaatatggtgagtttccatggtgagaggagaggagtgtgctaaagaagttctgaggtttggaaactgataatacatgtaagttgtgactttaaaagaatcattaactgtagagtatttttagtacctttcttccagcaatagtcacctgttttgactcttaagctcctctcccattcttagtacatgcattttggatggaaccaagactccgtgggaaagcacatgcccctakactacaccaaacatcacattgcactccgttagcctcagagaactgtttgcatgcactctaagtcttgggacttttctgggagctaaagaaatgatgctctctgcttctaagggatttcagcctgaaaggatgctctagtcgcttttgcttccacacacgaagacctgtctgcgtatggagacaacacatatgaagcaggtcccacagacacgaagagagaaactagatcctgattgtactgtgtgagtttctccatccactcgtgtttgaaaacagagctcc

SEQ ID NO: 174475 - DNA, 554 bp, Homo sapiens
catacatacacataaacttcaaggaagccttggggaggctaatatggtgagtttccatggtgagaggagaggagtgtgctaaagaagttctgaggtttggaaactgataatacatgtaagttgtgactttaaaagaatcattaactgtagagtatttttagtacctttcttccagcaatagtcacctgttttgactcttaagctcctctcccattcttagtacatgcattttggatggaaccaagactccgtgggaaagcacatgcccctatactacaccaaacatcacattgcactccgttagcctcagagaactgtttgcatgcactctaagtcttgggacttttctgggagctaaagaaatgatgctctctgcttctaagggatttcagcctgaaaggatgctctagtcgcttttgcttccacacasgaagacctgtctgcgtatggagacaacacatatgaagcaggtcccacagacacgaagagagaaactagatcctgattgtactgtgtgagtttctccatccactcgtgtttgaaaacagagctcc

SEQ ID NO: 174476 - DNA, 567 bp, Homo sapiens
aggaaatcagattatcaatagaaccagtgttcctgctctctgaaatggactactgcgttgtttcaatcacatctgaaacatgagttaacgttcaacagccagaaaacattttttctcttaaagagggactccagtaactaaagtgtrcctcagattcctcacaggggacatggaattatagctggtaatgacaagcaccgactggcgaagttgacttggtcaattaccctctgctgaactagagtctatacgacacatttcacaaacatagattgcctgagagtgacaggaaaagagacatacttgtacttgccaacttaatagggcatggttctcatttgagcacatcggaattgtactctatttttcatcatttcctcccattaaaacaataacacaaatctttacttggccatttaggctcgtttacaaaacaacagtttctgctagagttatagatcactatttctttcctctgtctatattgaaacaactctgctcaatgtaaaatctcctacccacagttcatatggaataaatcattgtagaacagcaatcatggcatca

SEQ ID NO: 174477 - DNA, 599 bp, Homo sapiens
gcatttattattatgtgtcttttgtataaaagacattttacctgaggtgagatgatgtctggtagttttggtttgcatttctctgataatcaatgatgttgaacaccttttcatacacttgtttgccatttatatgtcttttttaaaaaaattttacttcaagttctaggatacatgtgcagaatgtgcwggtttgttacataggtatacatgtgccatagtggtttgctgcacctatcaacctgtcatctaggttttaagctctgcatgcattaggtatttgtcctaatgcactccctccctttcccccacttaccctctgacaggccccagtgtgtgatgttcccctttctgtgtccatgtgttctcattgttaactcccacttatgagtgagaacatttggtgtttggttttctgttactgtgttagtttgctgagaatgatggtttccagcttcatccatgtccctgcaaagggcatgaactcattcatttttatggctgcatagtattccatggtgtatatgtgccacattttctttatcaagtctatcattgatggacatttgggttggttccaagtctttgctattataaat

SEQ ID NO: 174478 - DNA, 569 bp, Homo sapiens
aggtttgttgattttgtttatcttttaaaaaaaccagctttttgatgtgttgatcttttgtattgttttactcatttcaatttcatttatttctgttctgatctttatttattttttctactaattttggctttagtttgctcttgctttactagttcctttagatacaccattaggttatctatttgaaatttttcttctgttatgacataggcacttacgactttaaatttccctcttagtactgcttttgccgtatcccatatgttttggtatgttgtgttttcattatcatttgtttcaagaaatttttcaatttccttaatttcttcatttactcactggtcactcaggagcatattatttaatttccatgtgtttgtattatttccaaaaattcctcttgttatcgatttctagcattattacattttggtcatagaagatgctttatactatttsaattttttgaatgttttaaaacttgttttgtggcctaacatatggtctatctttgagaattatccatgtgctgaggagaagaatgtatattctgcaactgttggatg

SEQ ID NO: 174479 - DNA, 531 bp, Homo sapiens
gatgatatataaaatatataacaattagtatgacatgggtaccagtcagcatggataaaagccatacccctgggtttgggaatgggggccagctgtgccaacctttaacccttggttgctggatcatgcggcaatgttgtttggtacatctagggcatctggaggccttataggctgggggaaagtccttggaagaaatggctgttgattatgacatttggcttccatcacatatggaagtatttaaatagttaaataggaggacagccatactaatgcttcttagccttgtctgtagagaaactggtcatgaaaatactgctacctgggtgcttcaggatcacatgatatgtgctgtgtacacacagctccatacagtagggcttatgaagggcagggccagagctccattmacctggggacatctacataggactctctgctcagaatgaggccagcctcagattcagatctgattctgccttactgttaagtaaaactagacctttcccaggtgtatgattcctttat

SEQ ID NO: 174480 - DNA, 414 bp, Homo sapiens
acaatccttgtatctcaaggaggtaaaaaaacccacaccaaaatagcagccagatgtccccagtgccactctctttaagaaagattaccaaatgacggacaatcagacattattcattctgcaaataaatattaatgacckgctctacggcggcctaggtgctgggaaaaaaaaagaccaaatagtctctacacttaacaagtatgattagctccttaacaacatgctcaaattcgctaatggcctcctatgagcaaagttcattgtgctttacagatgttattgtctattcaatatatgtctattaagccccaagcatgcacacggcactgtggcactgttgcaggcactagggttaccaaaaacagacaaaagtcccctgttatgcatctcattttaagctcaatttatcac

SEQ ID NO: 174481 - DNA, 559 bp, Homo sapiens
taaaattctatgtacagatgtcatccttccttacagaaaaccttatttttcttcactttatagtatctagcactccccagtgtgatggctactcactgattgatcacttcaccctgatacccagaactttaaattgatattaaatttcaatcattagatagttgagaaaagggttccatattctcaaaaactagagaagataaataaaataaaaaaagaaatgaccctggggaaaacagataatgcagagaacaaaagagaattttaaaagcaaattcttgttaacgtttctgtgagatttgaaacttagaatattaataaaacatgcacaaaatttgtttaagttcctaatatatgctagatattagacctttgtcagaagcagtttgcaaaaatgttctcccattctgtatgttgtccatttaatctattggtagtttctcttgctgtgcaggtgctctttattttaattcgaccscatttgtcaatttttgcttttgttttaattgcttttgttgtctttgtcatgaaatttttgtatgtaacagacctgcacttg

SEQ ID NO: 174482 - DNA, 559 bp, Homo sapiens
taaaattctatgtacagatgtcatccttccttacagaaaaccttatttttcttcactttatagtatctagcactccccagtgtgatggctactcactgattgatcacttcaccctgatacccagaactttaaattgatattaaatttcaatcattagatagttgagaaaagggttccatattctcaaaaactagagaagataaataaaataaaaaaagaaatgaccctggggaaaacagataatgcagagaacaaaagagaattttaaaagcaaattcttgttaacgtttctgtgagatttgaaacttagaatattaataaaacatgcacaaaatttgtttaagttcctaatatatgctagatattagacctttgtcagaagcagtttgcaaaaatgttctcccattctgtatgttgtccatttaatctattggtagtttctcttgctgtgcaggtgctctttattttaattcgaccccatttgtcaatttttgcttttgttttaattgcttttgktgtctttgtcatgaaatttttgtatgtaacagacctgcacttg

SEQ ID NO: 174483 - DNA, 550 bp, Homo sapiens
tgaattctggtaaaatctttttggtggaaatctttagagagatcttgcgttcttcctccctgcccgcctcttcagaatcgtctcgyaccaacttttgccttattttttgtattccttgattttttttgtcctgtccttttcctccacagaacattgggacatgctgtcctctgggtctggaataatttctctgcatcctttgaccacacccctcacctagctaatgccagtatgccagttcctcctcctggtgtgtgtcccagcaggacttagaatggctgtttcaattatccagcaggtttctatgttacaagctcttggataatcatgctcctctctttcagggcactcttgttggtttataatatatcctcaaggaaatcacggcctcgttccatccaccaggttcatcacacccattgaactgtaggctccaggagaacagagtcctcactgggttttgctccgtgtaccccctgcccctggcatgctaagcagtgtaactgttagtcctcggcttttgttagagtagcaaatgaggtatgcttac

SEQ ID NO: 174484 - DNA, 550 bp, Homo sapiens
tgaattctggtaaaatctttttggtggaaatctttagagagatcttgcgttcttcctccctgcccgcctcttcagaatcgtctcgtaccaacttttgccttattttttgtattccttgattttttttgtcctgtccttttcctccacagaacattgggacatgctgtcctctgggtctggaataatttctctgcatcctttgaccacacccctcacctagctaatgccagtatgccagttcctcctcctggtrtgtgtcccagcaggacttagaatggctgtttcaattatccagcaggtttctatgttacaagctcttggataatcatgctcctctctttcagggcactcttgttggtttataatatatcctcaaggaaatcacggcctcgttccatccaccaggttcatcacacccattgaactgtaggctccaggagaacagagtcctcactgggttttgctccgtgtaccccctgcccctggcatgctaagcagtgtaactgttagtcctcggcttttgttagagtagcaaatgaggtatgcttac

SEQ ID NO: 174485 - DNA, 578 bp, Homo sapiens
cagttgctcaagtaccatctctagagtttttttccccaaagttcaactttgctctctatctctaactgtatctgtaagataagctcccccaggacaaaaggagaagaatcttgcaataattgtctggttaagctagtacaagagcgctactaaatctgctacaaatagaaattctgataactagtgaagggttttgttttatggcagaaaaagagaatccatggctcggatgaatcatccctctyggccagatatggcatataagagttcatcttatataataatactgattggatggggttgcttagagcactgtatggaatgggtgctgaggctgcattagggttcagtatcaaacatgtgcagtgattaacactgtctgccatgggtgcaagaggggtgtattagacttttctaatgctgctcataaagacatagctgagactgggtaatttataaaagaggtttaatggactcacagttgcacatggttggggaggtctcacaatcatggtggaaggcaaaggggaaggaagacatgtcttacatggcagcaggcaagagagcttgtgcagggg

SEQ ID NO: 174486 - DNA, 590 bp, Homo sapiens
tcactgccacctctgtctcctgggttcaagcgattctcccacctcagcctcccaagtagctgggactacaggcacccatcaacatacccagctaatttttgtatttttagtggagacggggtttcaccatgttggcaagggtggtctggaactcctgacctcaagtgattcacctgcctcagccctctcaaagtactgggattataggcatgagctactgtgccyggcctattatctcacagtttctatggataaggaatccagcatagcttggctgggcccttgggtataggatctcacaaggttgcaatcaaggtgccatggttgggttctcatctgaaagtttgactggagaagcactggtgtccaagccatgtggttgtttttcagaattcagtccctggaggattattagactgagagtctcagttcttagccagctgttgaccagagatggccctcagttccttgctagatgacctctccattaagacaactcacaatatggcagcttgcatcatcagagcatgaaaacaagaagaatccaagaaagagaagaatttcaagacagaagtcacaatctttttttt

SEQ ID NO: 174487 - DNA, 590 bp, Homo sapiens
tcactgccacctctgtctcctgggttcaagcgattctcccacctcagcctcccaagtagctgggactacaggcacccatcaacatacccagctaatttttgtatttttagtggagacggggtttcaccatgttggcaagggtggtctggaactcctgacctcaagtgattcacctgcctcagccctctcaaagtactgggattataggcatgagctactgtgcccggcctattatctcacagtttctatggataaggaatccagcatagcttggctgggcccttgggtataggatctcacaaggttgcaatcaaggtgccatggttgggttctcatctgaaagtttgactggagaagcactggtgtccaagccatgtggttgtttttcagaattcagtccctggargattattagactgagagtctcagttcttagccagctgttgaccagagatggccctcagttccttgctagatgacctctccattaagacaactcacaatatggcagcttgcatcatcagagcatgaaaacaagaagaatccaagaaagagaagaatttcaagacagaagtcacaatctttttttt

SEQ ID NO: 174488 - DNA, 494 bp, Homo sapiens
gagcagcctttaataaaagcaaaattttctctctaaaaattactgagctaactgcaaaagcatcactaatttgccaggactaaaggtagagctggtttaatgacaggcatagtaacaaagcttgcacacactgtcacagaagatgcaaaatttcacagttaactaactagattgaaccttaaaacaattagtgaacaaaagagtgttgtgatttctggagcagtggggttaggagtcttcggcaagtaccaaattatccacacagtttacatattttagaacatctgaagagtaagtgaaaccatcatggtatttactaggcacaaactgacttatcaattaaatgcaatgtcctactaagaagaaatacasgaaatgcagagactgcctctgtgcgtaatcttctataaatttcccaggagtttttagtaagctattctcctattaaggaagctgtcaaacagctataataatgaaggggaatggaaaggaaa

SEQ ID NO: 174489 - DNA, 494 bp, Homo sapiens
gagcagcctttaataaaagcaaaattttctctctaaaaattactgagctaactgcaaaagcatcactaatttgccaggactaaaggtagagctggtttaatgacaggcatagtaacaaagcttgcacacactgtcacagaagatgcaaaatttcacagttaactaactagattgaaccttaaaacaattagtgaacaaaagagtgttgtgatttctggagcagtggggttaggagtcttcggcaagtaccaaattatccacacagtttacatattttagaacatctgaagagtaagtgaaaccatcatggtatttactaggcacaaactgacttatcaattaaatgcaatgtcctactaagaagaaatacacgaaatgcagagactgcctctgtgcgtaatcttctataaatttcccaggagtttttagtaagctattctcctattaaggaagctgtcaaacagctakaataatgaaggggaatggaaaggaaa

SEQ ID NO: 174490 - DNA, 575 bp, Homo sapiens
aacaaaaaatgaatacatccccacagagggcttacaatccagtagaagatatggtctgcttaactcaaagaaatagaaattgtagagatgcaaattgttataggaatatagagggaggagagatgaaatctaactggaggtgtcagggaagacttcattcagcaagcagtatttgaatttgggccttgaaaaaataaaacatcatttgattaaaatcaaacattataagacaatcatagaattcactattatgtcamtctcataggtcaagaaactgaggctgaaagaggctaagaggactctcctactcatggtcttacaactggtaaatgtcaagaggcctgaaccaagtttttttattcctttatttagtgctcatttactatatcactctataagagttgtcttaatctgggcaagagagcagatgttctttcagtatagtaaaaaactttttaaaaagactactcatttctgctataataaacttggttgtcctttgtaaaccatatgaaaataaatgttcttatcctctaaatgttaatgttattccctactgtaagtacagaaaattc

SEQ ID NO: 174491 - DNA, 575 bp, Homo sapiens
agtggttgtactaatttgcatttctgccaacagtgtacaagggttccccattctccacatcctcaccagcatccgttattgccctgtcttttttataaaagccattttaactgcagtgagctcaaagaggaggacagataagggatagccttagaggctattggaaagattttactatgagcgaaatrgaaaccgttggaaagttttgagcatatgaatgagttgatctgagcttcccaaaaggcatacagaatatcctgttgttagaaattagaaataatttacttttgcctggatctgttgaactcattattagtttccacaggcttcgttattatagctatatatttagtatatattaaggttgataggaagaacaatgggatcattattttgaatctcatggagtccctacagtgtgccacccaatgattccttttctccttgaaagaaaatcagatgggcttctgaagcaaaactttgatgtgattttaatagcatgtaagtttaaaagacctggaggtaaaggttttagacttttcttgtctggaaagaaagtgacatcgacttgtttg

SEQ ID NO: 174492 - DNA, 575 bp, Homo sapiens
agtggttgtactaatttgcatttctgccaacagtgtacaagggttccccattctccacatcctcaccagcatccgttattgccctgtcttttttataaaagccattttaactgcagtgagctcaaagaggaggacagataagggatagccttagaggctattggaaagattttactatgagcgaaatggaaaccgttggaaagttttgagcatatgaatgagttgatctgagcttcccaaaaggcatacagaatatcctgttgttagaaattagaaatawtttacttttgcctggatctgttgaactcattattagtttccacaggcttcgttattatagctatatatttagtatatattaaggttgataggaagaacaatgggatcattattttgaatctcatggagtccctacagtgtgccacccaatgattccttttctccttgaaagaaaatcagatgggcttctgaagcaaaactttgatgtgattttaatagcatgtaagtttaaaagacctggaggtaaaggttttagacttttcttgtctggaaagaaagtgacatcgacttgtttg

SEQ ID NO: 174493 - DNA, 597 bp, Homo sapiens
taccttctttcctccctccctcccttccttccttccttttattattattattattatttttggacagggtcttgctctgttgcccaggctggagtactgtggcacaatcatagctcactgcaaccttgaactcctgggctcaagtgatcctcctgcctcagcctcccgagtagctactgcacaccaccgtgtctggctagttcttttggtattttttgtagagacagggacttgctatgttgcccaggatggtctcaaacctggcctcaaatgatcctcccaccttagcctcaaagtgctaggattacaggtgtgagccactgcacctggcctaaatccaaacttgaacaatatatacatgtmtgtatttggctaaaaataaagattggaagggaatatgacaaaatatttacagtgattacttttgagtaaccagactgccagtgatctgtaatttctgctttttatttactcttctgtgtttcccaaatagtctagaataaacatatataacttgttgtggggaaaagccagccacagagcagccaggccactatgaaagctgctgtttataaaggtagcagtgcaactgacaac

SEQ ID NO: 174494 - DNA, 547 bp, Homo sapiens
cacgacttttctcaatttatctcccttaacagatcttccacaagaatgaacaagagatgctctcatttaaaagaaaagaaacagaaaaggttatcagctagtagagaggaaattctgctcttaacataatgtagcttaaaagaaaatgctrcattttgtcaaagagtcagcgatgagcctcttatcacatatttgctcataaaggcagaaaggaagaatgctagcatgccagtgtcccatcgttaacgggtggaggagaagagcaggcggaggaggagaacgatttctatgggattctcaaagtaaatgggcaattttcatgcacatggagaatctacttctgcagactgagttcaggccagacctgctctgtcaaagcccgacagagagacccgagatggtgagggcgggagagggacagcggagaaccgtgctatggcttgagtgtgtttcccaaagttccttgtgttggaaacgtaatccctcatgcaacagtgtggagatgtgtgatctttcagtgattaatggatgaatgtgaaatgaattc

SEQ ID NO: 174495 - DNA, 547 bp, Homo sapiens
cacgacttttctcaatttatctcccttaacagatcttccacaagaatgaacaagagatgctctcatttaaaagaaaagaaacagaaaaggttatcagctagtagagaggaaattctgctcttaacataatgtagcttaaaagaaaatgctacattttgtcaaagagtcagcgatgagcctcttatcacatatttgctcataaaggcagaaaggaagaatgctagcatgccagtgtcccatcgttaacgggtggaggagaagagcaggcggaggaggagaacgatttctatgggattctcaaagtaaatgggcaattttcatgcacatggagaatctacttctgcagactgagttcaggccagacctgctctgtcaaagcccgacagagagacccgagatggtgagggcgggagagggacagcggagraccgtgctatggcttgagtgtgtttcccaaagttccttgtgttggaaacgtaatccctcatgcaacagtgtggagatgtgtgatctttcagtgattaatggatgaatgtgaaatgaattc

SEQ ID NO: 174496 - DNA, 622 bp, Homo sapiens
gcgtggtgtgtgtgtgtgtgtgtgtgtgtgtgtttctcactccctgggtgggtgcctccatcacactcatttttagagcctttcccaaaggttctctttctcgtccatgtgtgttcgtgtgcacacacgtgtatgtgttttgtgttttttttaatgtattttgctgcctctgttatcctcttggtgtcttgttcyccttggttttgttcccccctctctgtgtgactctctcctctctccactcttctctctctgcagctggcctctcttaccccatccctcttgtgtttgctccctctctccatggtgggctggcttttctctctccccagcctcatatttactgctgatataaacagggaagcctgggaacctctgattggatggccagttccaaaggagagttggtcatggtttggggcaggcagggagggggatcttggcagttattctggaaagaacaccttgccaacccaaggggggcggggggtgagtcaccttgtctggtgcaatgggaaaaaaaatcaaagcacaagtcctgtcctttccacttcttgtgggaccttggccaagtcaccaaacctctctgaacaattaataagatggggccattgtaaaaatg

SEQ ID NO: 174497 - DNA, 494 bp, Homo sapiens
gctggtgagccccccaccccacctgtccctgagcatggggacccgtgggagccctgtctactgagcacctctgtgcggggactcactgaacatggggcaaggctgtggtcacctgaggyacagaagaggagccaggtcacaggggcaaaccaggacccagggccccagaaagcaggtagtagggccaagcgagggccggggcaggctagctccaagcccactgcaggcctcagctctgctggtgggtgggggtgaggaaaatgccaggtggaaacttccaggcaggaaggctaaactgccctcttggggtcgggcagcaagcaggctcttgacacccttcatctccagcctcccaccttccccgtgagatagcatcatcctgttctccacatgaggaaactggggctctgaaggcgcccaaggccacatgggagggggagaggacaggagacacgcgaaagggcggacaggccaggccaacctctgaggcccct

SEQ ID NO: 174498 - DNA, 624 bp, Homo sapiens
tcagaagactcagatttctctcctgactctgcccatcctcagccatgtgtcttgggcaggtgatcatcaaagcaattcagggttgaaagaagcctcagggaacctcagattgaaccaactcactggtggctactccaagatcagactgcaaaagagcaacacattttcagtaaaactcacttttcctaaccataaaatgaggccatgatttctaagggcctcattgattaaatatatatataaaataatagacccctacaatgtgccagtactgcacttggccatgggacctgacaatgagctggacttgatccctgccctccactctgtgtggaaggagagacatctgttttctcttgacctttaagcctcagtccatgagcaaagattggtctagaagggccttttgttggtggattctggctgttacagcaggaggatcccatagcacccggaggtctccccacacttgcactggttcaaacaaatttcagaccaaactccgaggaagttggtggagaygaggccacttctccagctgggagctctattcatgactcacctgctgctctggggaatgatacttgtcaaggcttatgtggagccgttagcctcccacagacc

SEQ ID NO: 174499 - DNA, 501 bp, Homo sapiens
acacaatctgctgggaatgaggagatacgtggacaaataaccatgatttcacaccaggatggtaggaaaggttcraggtgttgagttcagaggtggctggagaggcccaatgggtgaaaggtcgaggtgggccccaggaggctgcagcagctgcgatgggacctgaaagatggggtgggaagtcacggtcagtggagttccctttgtgccaggccttagagatccactccagctaacctataccagagtgggactccggacctgggtggcctcaccaaatccaaaggcaggactgcaagtggagcccagaacagagaaggctatggtgtgagcagcactggggtcctctcacatcaggattcctctctctttccttgactctcccacttccccctcccacccccatctctctctgcagacccgatttctcctcatgtccaggcacaaaagcgagctctatcatgagcacctgttaaagtttacctgttaaagttcgaattc

SEQ ID NO: 174500 - DNA, 501 bp, Homo sapiens
acacaatctgctgggaatgaggagatacgtggacaaataaccatgatttcacaccaggatggtaggaaaggttcgaggtgttgagttcagaggtggctggagaggcccaatgggtgaaaggtcgaggtgggccccaggaggctgcagcagctgcgatgggacctgaaagatggggtgggaagtcacggtcagtggagttccctttgtgccaggccttagagatccactccagctaacctataccagagtgggactccggaccygggtggcctcaccaaatccaaaggcaggactgcaagtggagcccagaacagagaaggctatggtgtgagcagcactggggtcctctcacatcaggattcctctctctttccttgactctcccacttccccctcccacccccatctctctctgcagacccgatttctcctcatgtccaggcacaaaagcgagctctatcatgagcacctgttaaagtttacctgttaaagttcgaattc

SEQ ID NO: 174501 - DNA, 580 bp, Homo sapiens
aagcacagttgagggagcaggagagatttatgagaaattctgctgggtctgaaataaacacaaacagctcrggctaaaaaaaaggcacactcacaggagatgctggccagatatcctctgggcacaggaccttggaaggtgcccaggcctcccctctccatccagcagggacctagaccccctccaattacacacctcgagcagtgaaatcatcattacccaatgggcagttcactccattagtccaaactaataaagagaaggtgctgatcctctgataatttctcttcatcaaggaaatggggtggggcaaggaacaagccacagaatttggaaccatccatcccagcaccccatgaattgtgtgacaagtgacttgaagcaaggtaccttgctgggcctcaggttcacttctttgtaaagtaaacaaggaccgggcgcggtggctcatgcctgtaatcccagcactttgggaggccgaggcaggcagatcacgaggtcaggagtttgagaccagcctggccaacatggtgaaaccccgtctctactaaagataaaaaaaattagcagggcattgtgg

SEQ ID NO: 174502 - DNA, 601 bp, Homo sapiens
gtgctgtgcaatccctggggaaatctttttcatgactgttttagtaagtaataaagggcattttttcctgaacttatagtaaagttaacatccaagaaggtgtccccatctgacactttaattccttgtctccttggggaatacacagcagcgagccatggagcaggcacggagcatcttcccagagtgtcatctttctccaagatcagagaaatgcccattacttaatatttaaaacaccatggataaatcatagagaggaaaatgtgcatagatttgaagtactaaattagaaagctccaagaagaagtgtgccagtggctggttgcttcagctcctgcctctaggcaccctggggatatagaagccctaccttgatataaggggtgcatagtggatgccttttggaatccttgaatttcaggaaatgastgtcagagaaggacacagagcagggccaccacttgctcttattggggttttagaaaactgtctctgcagagcagctagaggtgggggagcatagaggcctgtgaggaacgtttgaaataatacaggtgaggggtgagcggaggcttggagcaggacagggcaaagggaa

SEQ ID NO: 174503 - DNA, 568 bp, Homo sapiens
cttctccttccccactggatggctggagtagtcatgtgcccctgcctggccaatgggatgcaaggatgagatgtgtgccctaatgggcactgcagtcacccagggagagatgacggtgcctggactgagctgtatgcaatggcagtgcggagaggcagtcagattctgggtgtattttgaagacagagttagcatagtctgctccaggatttgacatggggggtgaaagaaggagagaagtaaaggtggcctcaaagtgtggtctgggcagccaagagaaagagttggctttagctgagctggggacactcctggggaggaagatgtggagttcactttgggccatggtggatctctgatgtttgatagacacccagctagagagaggaataggaatccaggcacccagagtcggaggagatgtaaatttgagagttgtcagtgtatagacggttttygaaaccacaagactggatggcatccccaagggcacaagtgtagacagtagatgaataaagtccaatcctcaacattaagaggttagagactgagacagccagggaggttt

SEQ ID NO: 174504 - DNA, 451 bp, Homo sapiens
ctagaacagtgcttattaatactcatttggtggcataaattggctgcatggtgagcatctttcttgagcccccaccatctggcacgccctgagctaggcactgagggtgtggcrttgaatcaggcctggtccctgcccttaggagcttgcggcatgggaaggaggtgaacgtacaaaaatcattgtcacttccacagcaatgtggtccctgccgtctactgagccgcttccgtgcacagagtgctttgcctttgtcactgcctcgcagcctccactggccacatagggtcctgatggtcatggctacttcactggtgagaaactcaaagctcagagaggcaagatgacttgccacgctcacccagctggtgtggagcagaggtgggatttgaactcagggcttttggccccaagtacgtcagctctgcctcacgttaacaactcaaacacg

SEQ ID NO: 174505 - DNA, 451 bp, Homo sapiens
ctagaacagtgcttattaatactcatttggtggcataaattggctgcatggtgagcatctttcttgagcccccaccatctggcacgccctgagctaggcactgagggtgtggcgttgaatcaggcctggtccctgcccttaggagcttgcggcatgggaaggaggtgaacgtacaaaaatcattgtcacttccacagcaatgtggtccctgccgtctactgagccgcttccgtgcacagagtgctttgcctttgtcactgcctcgcagcctccactggccacatagkgtcctgatggtcatggctacttcactggtgagaaactcaaagctcagagaggcaagatgacttgccacgctcacccagctggtgtggagcagaggtgggatttgaactcagggcttttggccccaagtacgtcagctctgcctcacgttaacaactcaaacacg

SEQ ID NO: 174506 - DNA, 434 bp, Homo sapiens
ctcatttggtggcataaattggctgcatggtgagcatctttcttgagcccccaccatctggcacgccctgagctaggcactgagggtgtggcgttgaatcaggcctggtccctgcccttaggagcttgcggcatgggaaggaggtgaacgtacaaaaatcattgtcacttccacagcaatgtggtccctgccgtctactgagccgcttccgtgcacagagtgctttgcctttgtcactgcctcgcagcctccactggccacatagggtcctgatggtcatggctacttcactggtgagaaactcaaagctcagagaggcaagatgacttgccacgctcacccagctggtgtggagcagaggtgggatttgaactcagggcttttggccccaagtacgtcagctctgcctcacrttaacaactcaaacacgagag

SEQ ID NO: 174507 - DNA, 370 bp, Homo sapiens
ttgccctaggtcatgaagatttttcctacattttcttctaaaaagttttatggttttgtgctttacatttatcatttatgtatgttattcatttttakttatatagaaagtgtgctgagattcctcttttgcttatggatgtgtaattgctctagcaccatttggtgaataagattaacttcccccatagaatggcctttgtacctttgtcaaaaatcaattgaacatgtttgtgtgggtctatttcttcgttttctatggatgtatgtatccctcttttagtaccacggtgtcttgattaatgtcgttgaatagtaagccttaatgccagctagagtgattccttccatattctttgtcaaaattgatt

SEQ ID NO: 174508 - DNA, 593 bp, Homo sapiens
ggaatagcccaggctctgttcctgtccctcctagagcaggatatcctacaatgctgtggcccagtgagtcatattctccctggggtacagaacccagagcagactgctttcaggatctcttggttgccrtgcaagtggagcacatgcaggcaagactctgcctaccttgggcagttttcctgagccttggaggactctccattaatcaaagacttcttttgtcctttgctgactttctatgaataataaagttgcttcacttaacttgtgtgagtgtcctgtctcaccagactcataaaatggattgatactggtgcatagtattgggcaaatgtttagagtcttcctctgagattgataagggcacacagtgagcctgcttcacaagcagtgcagtggcaaagccagagtagtcactgcagatctacagtgatgtgttcctcagggtggggctacccactccaccctgctgaccatggggacaggagaatgaacaagcttgttcatggagaggagcagaagggctcgcccaagctgacaaagacctgaaggatagattcccagaccacacaggtgacagattgcatttacct

SEQ ID NO: 174509 - DNA, 478 bp, Homo sapiens
cttgcaatatagatcttgaatccattagttttagtatccattgatgattcttacctgaatcagttatcaccatgatgcttgcaacaatatggttttctaaatcatcattccatctagatgtattagctgttattagttagcatgtaagaaagagctttttctttatctaccagtctgttaatctawccatccatccattcattcatccatcagtatggacttacatccatcagtatggacttactttttattttattcagtgggttatagttcattgctgccattatatattttaatgttaaattgtcccatatttggccagtggaatccccttcaggctacttctgtgtacttttgacataccccattattttctgaatactttcttactttctgatacacacagaaaataatgcttcaggctcatcctgtactttctatgtgctagccctggaatcggctgtttgttcaaggatcc

SEQ ID NO: 174510 - DNA, 594 bp, Homo sapiens
tcctagtgaaaaagatttcagtggaataaaratagacaaaaatggaaatgtttcaaatgagtgtcatggaaagatgaccaaagaattcaactgactgtgtgagtttgttccagaaaacatgttctttaaaacaaaacgttctttagttccctacagggactcctagtgaccaccgccatctcattaataagtggctttgattcttggactcagtaaacaaaatggcttgaggcgtgtggaactgagtgtctttactcttttgaaaattgtactaaatgcttgtccctaagaggtttagcccttagacaatgcatggagggaaattatttgcaaaactccccactctctggaaaatcatttgttctggtcagattcctggaattcatatacagatactggggtctctcacagttttttctgccactttgggttaacttttcctccgggcgtttcagttctaagaatgctccctttgacagggaaaaacagaagcaaaatacacattgaggagttctgctttctcttgtcacccaccaacatgacaacactgaccgcaaacagcgtatccccttttttgctttgaatatgacttta

SEQ ID NO: 174511 - DNA, 594 bp, Homo sapiens
tcctagtgaaaaagatttcagtggaataaagatagacaaaaatggaaatgtttcaaatgagtgtcatggaaagatgaccaaagaattcaactgactgtgtgagtttgttccagaaaacatgttctttaraacaaaacgttctttagttccctacagggactcctagtgaccaccgccatctcattaataagtggctttgattcttggactcagtaaacaaaatggcttgaggcgtgtggaactgagtgtctttactcttttgaaaattgtactaaatgcttgtccctaagaggtttagcccttagacaatgcatggagggaaattatttgcaaaactccccactctctggaaaatcatttgttctggtcagattcctggaattcatatacagatactggggtctctcacagttttttctgccactttgggttaacttttcctccgggcgtttcagttctaagaatgctccctttgacagggaaaaacagaagcaaaatacacattgaggagttctgctttctcttgtcacccaccaacatgacaacactgaccgcaaacagcgtatccccttttttgctttgaatatgacttta

SEQ ID NO: 174512 - DNA, 594 bp, Homo sapiens
tcctagtgaaaaagatttcagtggaataaagatagacaaaaatggaaatgtttcaaatgagtgtcatggaaagatgaccaaagaattcaactgactgtgtgagtttgttccagaaaacatgttctttaaaacaaaacgttctttagttccctacagggactcctagtgaccaccgccatctcattaataagtggctttgattcttggactcagtaaacaaaatggcttgaggcgtgtggaactgagtgtctttactcttttgaaaattgtactaaatgcttgtccctaagaggtttagcccttagacaatgcatggagggaaattatttgcaaaaytccccactctctggaaaatcatttgttctggtcagattcctggaattcatatacagatactggggtctctcacagttttttctgccactttgggttaacttttcctccgggcgtttcagttctaagaatgctccctttgacagggaaaaacagaagcaaaatacacattgaggagttctgctttctcttgtcacccaccaacatgacaacactgaccgcaaacagcgtatccccttttttgctttgaatatgacttta

SEQ ID NO: 174513 - DNA, 615 bp, Homo sapiens
atcagggcatttgggggtctgcaaaactaagccccaactcatcgatttcacaacttcatccagagccagcctgaacagtagttgcccatgatttctatgccttaatacgagaagagaacataggggctgggtgccaagtaggtagacagggagggcagggaactctaagacagagcttgaggggctcgttcctcttgcaaaatgaaacaaaaaccacagcactgaatatgtaaatctcggtggctgaacccctcctaggatagtaagccctgayacaattgctgctatcttctctttctctcaaggaagtcaaaaaacacctgcagccttactgtccccttggaaacaagatgaacatctacattttctagagtgggacaagaatctctgttcatatttatgtcccatgcatttgcacgtggccggacaaaggactttgcttctgccagcacatctgtcttcagatatgagaggaaacagacacaacctggaggcggcaaagaagcagctctttctcaagtgacctcctctatctccctacttcctggctaatggggcagccttgatccttgggaatccaggacagatatccactcgtgacaaactagctggaag

SEQ ID NO: 174514 - DNA, 616 bp, Homo sapiens
atctcttattgtaatggtggaaaggtggttattcccaaaagctcaatctcaaagaaatgtgtttaaatgaaaaaaagtaaataattgcattttttaatgaccgtgggtctgtgaaaaaaataggaaatattttaaagagtatgttctttcattatcctctgttattacttgtctacatttttattctgccaagaaggccgtggcaccgcgagctgtagacagagccgcggtctttctcgattgagtggctttggtggccatgccaccgcgctcttggggcagccgccttgccgctagtggccgtggccaccctgtgtctgcccgattratgctgccgtagccagctttcctgatgcacagtgatacaaataatgccactaagggaaagagaacagaaacgtaatgggcgctgagctgggaaaaccagggagaagactgatttattagagatttcagaaataaaattcacattcattatgatatctcattagtgaaaatttccattaggggattgtaaataatttaaagctttttttttttcagtgctatttaattatttcaatatcctctcatcaaatgtatttaaataacaaaagctcaaccaaaaagaaagaaa

SEQ ID NO: 174515 - DNA, 361 bp, Homo sapiens
aatctaattggacagtcaagcaatggataaggaaattgaacttgccccatgaaatartagcatcaagcaggaaaacagtttggggatatgggaaacactgaccagtcatctgtaaacctcaatcacaatttagtcttttttttttttttttttgagatggagttttgctcttgttgtccacgctggagtgcaatggtgcaatctcagctcactgcaacctctgcctcccaggttcaagtgattctcctgcctcagcctcctgagtagctgggattacaagcatgtgccactatgcccggttaattttgtatttttagtggagacagggtttcaccatgttcgtcaggctggcctcaaactc

SEQ ID NO: 174516 - DNA, 614 bp, Homo sapiens
atctctcagttctaactttgacttgctggaaaaaaggaatgtttctaagctgatatagcagatatatttatcatatgtatcttttttatattcaactagatccaacattcagctgtaaccaaatattactttaaattttacttcaggaagtttgaaaaatacttatttttcttgatacttacttctctttctgcttgctttttttcatattggcgttctttttctttcaaatgattcaattcatttaccaaccttttactgtcttctagtaaaagacggcgctttctgcactcagcttgaaggttttgtactctagcatcacatctggcttgaatattaagtattgccttttcttgattgtcagctttgttgcgagcatcatccagttgctgttgaagcaacatattttgtttttttagttgacraaatctttccttttaagagacagcaggaaaagatacataggcagagcacagaggatttttagggaagtcaaaataatttatataacatggatacacatcattgtacatttgtccaaatccatacatgtacagtaccaagagtgaaccccaatgcaaattatgggctttgggtgattgtgatgtgtcaat

SEQ ID NO: 174517 - DNA, 622 bp, Homo sapiens
aaacatactatttattattcttactaatgtctgctccagacattaaggggagcgattacattactcaagaaagaagcttaagtgaggactaaaagcttacaaacacgaatgtttctgttccctcttatagggtagtcactaatattgacatcaccttaatattctgttgaccatatttatcaatgtatgtccttggaagyggaaaagagattagagtagaaaaaaagagagctgtaagagaaaaaacgagattccagaatcagattctttgatgtctgctcttatagaaagtgggagaaatctccgaaattgagccttccaaagaacttaacatatgaaatcatgtttttgattatcattcatctaccctgccctccagggttccagcccagttcagtgacagtaaaactaagacagaaattgctcttaactacgagctcatcattgtgcatattattactggttgcaatggcctttgttggtcttcaccatgcaataaccacaaagccctcatttctatgatccaattatttccttccttggtaatattatttcagccactccttatttgatggctattaaatactaacctgagaagtcagttaagtttgcagagttaggg

SEQ ID NO: 174518 - DNA, 588 bp, Homo sapiens
ttgttctctaaccacttgaggttacaaacatgcaccactggaggagccaaggtgttcctggcctgatagccacaacactccaatgggttgtgccggctgaagtgctttgttggggcagtagcagcaaaatatgtgcttgctcatgcatgccaatagctttggctgtgtggctggttacatgcacatcaactggtgtgtagtaccagtggaagcgtggctgtggtacttgtgtcagcagtgctagttgtggggcacagcagggagagtattgctagtgtctgtgcacacycttgtgccagcggtggcagtggtgggggcagggcactctcaggcataggactgtcatcctccgtgcagggtttggtggggttaccagcatctgtgtacacatttgtcctggcagcagtgttgatatgggggcagctggttcgacagtgttcatgtgtggacatagcgcattcacagcattggtggttgtgatgcaggggtgtggcatgtctagcatctgtgcatgtgttcatgctggttgcagcggtggtggaggggaagtcagcaggttgtgcttatgtctgcagcagtggtacagca

SEQ ID NO: 174519 - DNA, 588 bp, Homo sapiens
ttgttctctaaccacttgaggttacaaacatgcaccactggaggagccaaggtgttcctggcctgatagccacaacactccaatgggttgtgccggctgaagtgctttgttggggcagtagcagcaaaatatgtgcttgctcatgcatgccaatagctttggctgtgtggctggttacatgcacatcaactggtgtgtagtaccagtggaagcgtggctgtggtacttgtgtcagcagtgctagttgtggggcacagcagggagagtattgctagtgtctgtgcacacccttgtgccagcggtggcagtggtgggggcagggcactctcaggcataggactgtcatcctccgtgcagggtttggtggggttaccagcatctgtgtacacatttgtcctggcagcagtgttgatatgggggcagcwggttcgacagtgttcatgtgtggacatagcgcattcacagcattggtggttgtgatgcaggggtgtggcatgtctagcatctgtgcatgtgttcatgctggttgcagcggtggtggaggggaagtcagcaggttgtgcttatgtctgcagcagtggtacagca

SEQ ID NO: 174520 - DNA, 570 bp, Homo sapiens
agatctattataatttgctttatgtagctatatatatctcatcaacattggaccatataactatataaagcaaattgtaatatcatcttgaataatagactgttttatcattatataataacctcctttgtctcttgtgggccttattttttacttcaactatatyttgcctaagtatagccacctctgttactttttgatgctgcaatttgcatggaatatatttttctatctctttattgtattctgcacctctagaatttcttttcctttctcttttatttaattgtttgtatctctttgttgtacttctcattttgtttgtgtatcattttcctgaattcatttagttgtctctatgagttttcttgtagctcgctgagattctttaaagtgattattttgaattctttgtcaggcaatttgtagttctatatttctttggggtcagtcactggggctttattttggtccttcaattctttcatatttccttgatcctttatgttccttggaggcttggattgttgtcttcacagttgaaaaagcagttatcttctctactgttta

SEQ ID NO: 174521 - DNA, 488 bp, Homo sapiens
aagtctcactgaagaggaactcaaatttttgacaaaattgaagcaatgtaccatgaacaaaaatcagcaaactaacaacagcattagaccctataaagttcagttactagaacaatccaataaagaacataaaataaatttaactttgggaggccaacgcgggtggatcacaagatcaggagttcaagaccagcctggccaagatggtgaaaccctgtctctactaaaaatacaaaaattagckgggtgtggtggcacgcatctgtaatcccagctactcgcgaggctaaggtagagaactgcttaaacctgggaggcggaggttgcagtgagccgagatcatgccactgcactccagcctgggcaacaagaagactcggtctcaaaaaattaattaattaattaaaattgcttaaaggcacaataggatcaaaagtatcaaaaaataacactatgaaaataagcagccagttttattaataaaagat

SEQ ID NO: 174522 - DNA, 599 bp, Homo sapiens
gaatcacttctttagttggaatttataacataaatcagattatgctctttcttgctgtgacataataaaaaaatacgtatttggtaaaaaaaaaaaaaaaaaaaattacagagaagttgcaaagataatatagagaattcctatatacccctcacctagttttccctaatgttaacatatgagattaccatggtatatttgggaaaattaaaaaaccaatattggtatgttactattcactaaactccagacctcattcaaatttcatcagtttttctactcatgccccttttctgttccaagatccaatccaggacaccatattgcatttattcatcctgtccctttagtctcctctggtctgkgatagtttcccagtcttgttttgttttcatagccctgacggttttgaggagtactatccagcattttgtagaatgtttctcagtttgcatttgtctggtatgtttctcaggactagactgggcttatgggatttcgagaagaatagcacaagtaatatactcttattactgataatgttaaccatgatcacttggttaaggtggtatttccaggtttctccatcacacagttac

SEQ ID NO: 174523 - DNA, 647 bp, Homo sapiens
tattgtaactcttatttggagaagtgttcgcattgactttgtttctggtaccggaagaagccagcttttaattcagcttcttgggaccagtggaaccttctcccaactggggtgtcaactgtgggtcctggagaaatagcaatgtgggaagaaatagggcatacacaaggagacacaggtttcccattgtttatccattttccctacctgcagtctttttctcactcagctgaggttgctgattattttctcccaacacctggaccaagggacatatttaaactgggggctaatgtttagttttgtcctgggcctgaggtggctaggatgtgctgatgtgagggaagtcaaagagtttattcctgggtaggtcacttagctttctagtccccagcagcatgacacaatggcacgccggccagccagtcccaaagtgtcagtggargtctgaaagtgggccaggggagtgaggatgggtgaggaaatgtccttccttcatacagaagagtgtctaaggcatggttcaggagatgtcatctttgaagacaagtgtctgtgatctcacaattaaacccacatcaacatggacaatgaattaaacattgttgagtgagatggaaaatcctaggcagaaacttaaacaccct

SEQ ID NO: 174524 - DNA, 616 bp, Homo sapiens
taagcagaaggaactttactaaagatgttggcctaataaggcccttaatatttgagtagcatttagcgaaggcaggaaaagagagagtggccttcaggggagagacttaaggataagcyaagagaagcatggcttgttttaggggctgcaaacagcctgtgatcagactagaaggtgtgtgctgtgagtcatggcctgtgaatctagcccccacttatgtccacaaggaaagcactgtttctttatgtttgcataaggcatcagaactgatagcatcttctgacattcccttcctcatgttgtatgatacaatgaccagacatggagcccctactgcccctaccaaaggactcaccatcaaataaagtacaagtaagaaaaatactatattatcaaagacaagatgcaactatgaatcctatgccatttaaaatagcaaaattatgctctacgttcaataatatgggcaatatgaactagaatgcattgggatttcctatataaagtaggattcaagtaataactataataacagtctatataactatataacatgttatatatataactacataacattctaataactatacaacattcaagtaataactatata

SEQ ID NO: 174525 - DNA, 562 bp, Homo sapiens
caaattcaagcttttaaataattgaaaatatttgaattattgtgaatttcaagatggtgactgtagagccctgtttatacagggccatatgcaaattgcacttgttgcaggtccatgaagccaaccctgagtcaattttatgaccatcctcatttgagggaactcatgctctgtattctgcccagggtcataatgcagtgaagtaggataggatgggaggggggaccaagactcaaactcagtcatctgcctccagagcctcatccttaccacttccctaggctgtcccttattccaccaaacctgactgcctcccctcaggatgatcagtgctgcaccacatggtatggtggaaaaacaaaagagaatgcrcggcccaacctacagcttcattctaactggctaccaactggcttcatgaccttggcaagtcactttacttttctgagctttatcctaacttaccacatggaggtgctgcagagaaaaacccatggggtcataaaggtacaattctaacaaagcctttagtgtctagtgggagaaccttactaagcagatc

SEQ ID NO: 174526 - DNA, 608 bp, Homo sapiens
tcagagctataatattttctgggtctgtgtacaactactttgactttgtcatcttaattccaatggggtttttctttcccctctatcttttcagtccaactggctagtgctctccattcatgacccagaaggaatctcccagctgagcctaaccaatgttttctaaatgaacatcattgaggaaaattctgacaatgcttttttctgaaatcaattgatcagactggcccattaataagcattgacttgaagggactccaagtctgtagcatgatgaagcaacaccatggtgatcctcaatctttaagtcttttcagctgaactatggtgacttacacttccttggacaagattgcaagcattttctttggtcttatccaggaagcatctgcttaggcaggactggctgaaagatgtgaatggtcagagcctttggcattggccattctgtcgggtgagggcatgtacggttgtgcatgatgcccaggggtctccttctttctgggatccaagtcccactctaggartactcattcacttcccagattaagccaaaaatatgcaaactccaccagaccttcagttctaaacctcagtcaaagaagctt

SEQ ID NO: 174527 - DNA, 358 bp, Homo sapiens
actgaactaaaaggaacccctgtctcctgrtaggtttcagctcttgtcaatagaccagcaggaggcatatgttgggaatggtaggctttgcaaaactctgtaattccaacaccccatggaattccagactggtctagtgtggccacacacatccattgatggtcttctttcacctagaggtttgttttgctctaaccctggtcttccccaacacccacagatcaccaatgaggtggcagcatcaccacctactacctgtcagtcttccaccaagtcaggataaaagcatgacttagggtcttcttgtacagaaaatgtgtgctgaaagccagttttaaaggagtgtaggtttactgcc

SEQ ID NO: 174528 - DNA, 416 bp, Homo sapiens
gcactttaaaatggcagatcttaaatcatctttccagtttcttccataattgacatagtcaagttttctgcttcatcttgagtcaagcttgagcatttgctaagatataatcaattttctttagctttaaatgtttgtggccatagagttacttataatgttctcataraacaatttcagtctctcctgtatgcatggttttatccccttctcatttctactcttacataattttgttatctcttttctttaatcaggtttgcaaggagttcgttaattttattgactttttcaaagaagcgattttggatttatttgtcctttctacttgttttggtttgttttctattgatttatttttcctgttttcttaaggtttaaatgttattttctaatgttttaaaattgatgtagaa

SEQ ID NO: 174529 - DNA, 591 bp, Homo sapiens
cagtgttactttcattgtgtgtttgctacttcttcaccatgtaacagtgtcattttaaactgtcaccattgagctgggtgtgatggctcacacttctaatcccagcactttgggaggctgaagcagggggatcccttgagtttgaaaccagcctgggccacaaagcaagaccctatctctgcaaaaagtaaaaaaatttagccaggcatggtggcatatacctgtggtcccagctactcaggaggctgaggtgggaggatagcttgagcccaggaggtctaggctgcaatgagctatgatcacatcaccgcactccagcctgggtgacagagaccctgtctcattaaataaattaaaaaaaaactgatcaccatccacacattagcctagtctatacatttcaggggtctctaatctgccctgcttcctcttccacttcccacatgtcatcatttacaagtctctgctgtgggtcttctctgttgcttcrtacgtcctcacccaacctctgccactgctcactcgccttgctccgtctcctctgcttcatctttcccgctgccatcattggtctctttctcacaatgggaa

SEQ ID NO: 174530 - DNA, 560 bp, Homo sapiens
acatcagggaaactgtccaggacattggtctgggcaaaaatttctagagtaacacccaacaagcacaggcaaccaaagcaaaaacggaaaaatgggatgacgttaagttaaaaggcttcaggtcrggcacagtggctcacgcctgtaatcttagcactttgtgaggctgaggtgggcagatcacttgaggtcaggagttcaagaccagcctggccaacatggtgaaaccccgtctctactaaaaatacaaaaattaaacgggagtggtggcaggtgcctgtagtcccagctactcgggaggctgaagcaagagaatcactggaacccaggaggcaggtgttgcagtgacctgagatagcaccaccgcactccagcctgggtgacagagtgagactccatctcaaaaaaaaaaaaaaaaaaaaaaagccttttgtgcagcaaaggaaacaatcaacaaagtaaagagataatccacagaatgagagagaatatttacaaactgtccatctggcaagggattaataaccagaatctataaggacctcaaacaactctatagg

SEQ ID NO: 174531 - DNA, 564 bp, Homo sapiens
ggtctgggcaaaaatttctagagtaacacccaacaagcacaggcaaccaaagcaaaaacggaaaaatgggatgacgttaagttaaaaggcttcaggtcgggcacagtggctcacgcctgtaatcttagcactttgtgaggctgaggtgggcagatcacttgaggtcaggagttcaagaccagcctggccaacatggtgaaaccccgtctctactaaaaatacaaaaattaaacgggagtggtggcaggtgcctgtagtcccagctactcgggaggctgaagcaagagaatcactggaacccaggaggcaggtgttgcagtgacctgagatagcaccaccgcactccagcctgggtgacagagtgagactccatctcaaaaaaaaaaaaaaaaaaaaaaagccttttgtgcagcaaaggaaacaatcaacaaagtaaagagataatccacagaatgagagaraatatttacaaactgtccatctggcaagggattaataaccagaatctataaggacctcaaacaactctataggaaaaaatagaataatccgattcaaaaatgg

SEQ ID NO: 174532 - DNA, 584 bp, Homo sapiens
ggttctctgcatactgcttgttatacgaacaccagaaaccatatcatatgtatggtaatgtgactggcttaatgaataatagtacatccaaacattagaatactgtaaaactataaaaattaggtacttcaacatgtaccaataaacataacctggcaataagtaattgactaataaccgaaattactaaatgaaaaatgtaagttgaggaataccataaaatacgattttttttttctygagacagagtctcactctatcacccaggctggagtgcagtggcatcatctccgctcactgcaagctccgcctcccgggttcacgccattctcctgcctcagcctccggagtagctgggactacaggtgccagccaccacgcccagctaattttttgtatttttttttagtagagacggggtttcactgggttggccaggatggtctcgatctcctggccttgtgatccgcccatcttggcctcccaaagtgctgggattacaggcgtgagccactgtgcccggccggaataccatagaatatgatttttaaaaaatgtttacctgcacagttcgatatgcttat

SEQ ID NO: 174533 - DNA, 538 bp, Homo sapiens
aacaccagaaaccatatcatatgtatggtaatgtgactggcttaatgaataatagtacatccaaacattagaatactgtaaaactataaaaattaggtacttcaacatgtaccaataaacataacctggcaataagtaattgactaataaccgaaattactaaatgaaaaatgtaagttgaggaataccataaaatacgattttttttttctcgagacagagtctcactctatcacccaggctggagtgcagtggcatcatctccgctcactgcaagctccgcctcccgggttcacgccattctcctgcctcagcctccggagtagctgggactacaggtgccagccaccacgcccagctaattttttgtatttttttttagtagagacggggtttcactgggttggccaggatggtctcgatctcctggccttgtgatccgcccatcttggcctcccaaagtgctgggattacaggcgtgagccactgtgcccggccggaataccayagaatatgatttttaaaaaatgtttacctg

SEQ ID NO: 174534 - DNA, 553 bp, Homo sapiens
gtgcaatgactaactttttaactttmccccacttttttgccacttaaaatgagcaaagacatcatttttttttttggcctaaaatattttactcccatttctggatttctgagctggatttcaattccaagtcctaaaaggtatcccaaatgaccatgtgtttcaagagctaatcttctctttaacaacttcgacctcgagaatagcctcataactctggcttaatggaaagtgttctcagtaactggccttccctttctctaatgattctaagttttgttaacttaaaaaaaatcactcaattataagtttggaaaagagagaaggagactttactttttataaagggttttagcctacaaggtggccatcctgcaggctgggaagcatgcctcaggccaagaccagcaacaagcacttggaaggaggaggggaggggtaggagttttatgttgaactggttggcaaaacatacatattcaacagcttacaggaggagctatgaatattcatgaagacaatcttggcacatgtatattgaacaaacatgtat

SEQ ID NO: 174535 - DNA, 553 bp, Homo sapiens
gtgcaatgactaactttttaactttcccccacttttttgccacttaaaatgagcaaagacatcatttttttttttggcctaaaatattttactcccatttctggatttctgagctggatttcaattccaagtcctaaaaggtatcccaaatgaccatgtgtttcaagagctaatcttctctttaacaacttcgacctcgagaatagcctcataactctggcttaatrgaaagtgttctcagtaactggccttccctttctctaatgattctaagttttgttaacttaaaaaaaatcactcaattataagtttggaaaagagagaaggagactttactttttataaagggttttagcctacaaggtggccatcctgcaggctgggaagcatgcctcaggccaagaccagcaacaagcacttggaaggaggaggggaggggtaggagttttatgttgaactggttggcaaaacatacatattcaacagcttacaggaggagctatgaatattcatgaagacaatcttggcacatgtatattgaacaaacatgtat

SEQ ID NO: 174536 - DNA, 432 bp, Homo sapiens
aaaaaaacacttgagactgggtaatttataagaaaaaagctttaattggcttatggttctgcaggctgtacaggaagcataacactggtatctgcttccagggaagcctcagggagtttacaatcatggcagaaagtgaagcaggagctttcacatcacatggcgaaagccagagcaagagagagagagaaggtgccacacacttttaaacaaccaaatcacgcaagaattcacttactatcatgaagacagcaccagagggatagtgctaaacttctcgtgagaagtccaaccccacgatccaaacacctcccaccaggccctacctccaacattggggattacattgcaacatgaagtttgggctggagcacacmtccaaactatatcagtgtaattgtgcataggtgggtttttaataggtttttattt

SEQ ID NO: 174537 - DNA, 432 bp, Homo sapiens
aaaaaaacacttgagactgggtaatttataagaaaaaagctttaattggcttatggttctgcaggctgtacaggaagcataacactggtatctgcttccagggaagcctcagggagtttacaatcatggcagaaagtgaagcaggagctttcacatcacatggcgaaagccagagcaagagagagagagaaggtgccacacacttttaaacaaccaaatcacgcaagaattcacttactatcatgaagacagcaccagagggatagtgctaaacttctcgtgagaagtccaaccccacgatccaaacacctcccaccaggccctacctccaacattggggattacattgcaacatgaagtttgggctggagcacacatccmaactatatcagtgtaattgtgcataggtgggtttttaataggtttttattt

SEQ ID NO: 174538 - DNA, 420 bp, Homo sapiens
gccttctaaattagaaagcaattcatcaatcaattgtatcctctcccctggggtgcttaaacggcagaaatacagagggtgtggtctgtgtatrgagagaggaagatgaagaaatgtagagtagaaaggtaaatagaaggcatgacttggagagccaggtttgggcaatccattagaaagaaaaagcgaaagaaagagaatccaagtactgaatccaagaaaagtgacttttaaatctggggttgatcaccagaatgactaccagactatttgacctgccactgcattctgaatggtagtaaatgaggcttctattgtccttaggtgcaggagattagattttcttttcccttgactttctttctccatcaagtccttcaataaacccccattgattgaggtcattgtactgctgctccc

SEQ ID NO: 174539 - DNA, 443 bp, Homo sapiens
agcaattcatcaatcaattgtatcctctcccctggggtgcttaaacggcagaaatacagagggtgtggtctgtgtatagagagaggaagatgaagaaatgtagagtagaaaggtaaatagaaggcatgacttggagagccaggtttgggcaatccattagaaagaaaaagcgaaagaaagagaatccaagtactgaatccaagaaaagtgacttttaaatctggggttgatcaccagaatgactaccagactatttgacctgccactgcattctgaatggtagtaaatgaggcttctattgtccttaggtgcaggagattagattttcttttcccttgactttctttctccatcaagtccttcaataaacccccattgattgaggtcattgtactgctgytcccagtaactgggaagaaattgatacaatgataggtgaattc

SEQ ID NO: 174540 - DNA, 487 bp, Homo sapiens
ttaaactacatgaagcttattggtattagcaataccagcactataattttaaaatgattttatgtatacagtgggagaaagcaaataagtttattattttttttggagacagggtctcactctgtcatccaggctgaagtgcagtggggtatgaacatggctcactgcagcctcaacctcctgggctcaagtgatccacctgcttcagcctcctgagcagctgggaacacaggcacacaccaccacgcctgkctaatttttttattttttatagagatggggtctcatcatgttgcccaggctggccttgaactcctgggctcaagcaatccttccacctcggcctttcaacgtcctgggattacaggcatgagccactgtgcttggccagtttattaactgtattaaaaaccaagattttcatttaagacaagagacaaatatagagtcaaggaagaaaaagtctgcttgttaaataggaattgga

SEQ ID NO: 174541 - DNA, 432 bp, Homo sapiens
ggttaattttgtatgtcaacttggctaggttatggtgcccatttttttggtcaaacactagtctagatgtcgctgtaaagttttttttaaagatgtgattcattctttttttttttcttttttttagagacaggatctcattctattgcccagactggagtacagtagcacaattatggctcaccataacctcgaactccagggctcaagttatcctcctgtctcagcctcccaaattgctgggattacaggtatgagccattggcctataatctttttttttttttytgactttgactaaactagcttacccccgataatgtgggtgggccttatccacctagttgaaggcctgaagggcaaagactgaggtttctcaaagaagcagaaattctgcctcaagactgcaatatacctgtaatctcagtgctt

SEQ ID NO: 174542 - DNA, 432 bp, Homo sapiens
ggttaattttgtatgtcaacttggctaggttatggtgcccatttttttggtcaaacactagtctagatgtcgctgtaaagttttttttaaagatgtgattcattctttttttttttcttttttttagagacaggatctcattctattgcccagactggagtacagtagcacaattatggctcaccataacctcgaactccagggctcaagttatcctcctgtctcagcctcccaaattgctgggattacaggtatgagccattggcctataatctttttttttttttctgactttgactaaactagcttacccccgataatgtgggtgggccttatccacctagttgaaggcctgaagggcaaagactgaggtttctcaaagaagcagaaattytgcctcaagactgcaatatacctgtaatctcagtgctt

SEQ ID NO: 174543 - DNA, 598 bp, Homo sapiens
tctgtaaatcgcttaaggatatgaaccacattttaatgattttctaaatcacctctataccatgtatacagattaatagtagatattcagtccatatatattgacttgccctaaaagttattcttcagatgaatcagtgggcctatgaaattttgtgagatttactcaagatttaacttgatggatgaaaacgcctattgtttataaaatgttaattttgacataaagaattgtagggacattcaaaatgttatgacatttagtaccaaaacaaaactaatatatctrtattgttattcacattttgtgaatgagaaaaaaagggctgaatgaaatttaataatttagccaatgttatgcagatagtatatgacaatataagtgttttcccactataaaccactatttctttagagaattatggacttacattttctgaatttctagaaatctggttttgcaagttttagctgcagcaagacccatagcatatgatttttttgtgtgtgacttcttttgttgttgttttgagacagggtctcactctgttgcccaggctgcagtgcagtgctgtgatcatagctcactgcagcttcca

SEQ ID NO: 174544 - DNA, 612 bp, Homo sapiens
acttgccctaaaagttattcttcagatgaatcagtgggcctatgaaattttgtgagatttactcaagatttaacttgatggatgaaaacgcctattgtttataaaatgttaattttgacataaagaattgtagggacattcaaaatgttatgacatttagtaccaaaacaaaactaatatatctgtattgttattcacattttgtgaatgagaaaaaaagggctgaatgaaatttaataatttagccaatgttatgcagatagtatatgacaatataagtgttttcccactataaaccactatttctttagagaattatggacttacattttctgaatttctagaaatctggttttgcaagttttagctgcagcaagacccatagcatatgatttttttgtgtgtgacttcttttgttgttgttttgagacagggtctcactctgttgcccaggctgcagtgcagtgctgtgatcatagctcactgcagcttccaaccctcttgccttagccttccaagtacgtgggactacaggcttgagccactgtttccagctagcatatggttttctaaccaatrtttaacttcagtttaatgttgtaaaccatacta

SEQ ID NO: 174545 - DNA, 485 bp, Homo sapiens
tggtgtttagagaaagcatactgcttcttttgcttcttatgacaaagaaatgaactatggttgcagagtgtgtaatttaaaaaagaaactttgtcactttctaggaagaaattgcctaaaaatagaaaaatcttacctctcctacctcttctaccttttgagaaactcctttttatagttcaaacttcctttctaaagacctaatttccaatgctaccactttaatcttcagtggatttttgtgttatttcagagaacaatgaatgtatatgtaacatttaaactatcagtaattcattgtgtaagagcaatycaatggaaacaccacgctgaaactattgattaagatgtgaaatttccaaaatattacagaaaaacttcaacttttttgtacttccagaggaatctgtatgagcataattattgagtagagtagccagatagaacctgattagctattacactttaatttttaaaatacacat

SEQ ID NO: 174546 - DNA, 599 bp, Homo sapiens
agctattacactttaatttttaaaatacacattccagaagaaaattactctgaactttatttctttattccagtcggaggaaaattaagactttttttatactcttcagtcgaaatagacaattatacaggtatatgaacattggcatatagtctgttctacttgttcattaaaaatatcctacataagcttaactctcaaaataattgagtttcctttaatatatgtgacagaagaggtaaataatatatgattttaattataacattgtaaaaataagttttcttttggcattaacagctgctaaaaaaatacaatggagagcaagtgtgtttcatccattaccgacatggaaaaggatgtttatataaatattttaatcatttaaawtgttgatgtagtttgatggcagactgtctttccaaaacatatgtttttcattgtcataatcatattttttcaatctcaggagggaattaacttgagctgatactactataataacagcaagatttactgatattcatttctcaataaacagatgttgatttttatcagtagaaggtatctgaaagataaattgcaagtaatctctgcta

SEQ ID NO: 174547 - DNA, 589 bp, Homo sapiens
agtcctcgggctttcagtgaacataagcaatagccaggcagtactggatgtgggcatggggcactggtgcccatgaggagaaactcttctgcttaaggtaaggggagggaagaggggaagaacttggtattgcagtttgtgtggcaacgcagcttcagtagaatagaccacctggtagattcttaaggttcctgactcraggctctggcttttgggtggcatctccagatgagcccaagacctacgaaaactcaccagccagaagggaaggatagaagtctgattggattcattactggctaattctagagcccttgggcaatgaatgaacatagttggtacacaggcagtgatcactgtgggccttggaaaagactcagtcctgttctggcttgggatttcatccagagcagtcccaatggtgggggccacagggctgcttgtgtcacccttcatccagttccaggcagctaagagcagaaaaaagggttctgtttgtttggggggaaagttaaaggaagagaacaagagtgtctgctttgttattcagaaaattcccccaggtcttatccaaaaccaccaaggcggc

SEQ ID NO: 174548 - DNA, 623 bp, Homo sapiens
ctgctcctgttttgccttctgcaatgagtcatagctccctgagagctccccagaagcagatgctgccatgtttcctatacagcctgcagaattctgagtcaattaaacctctttttaaacaagttatcaggctttacatatttatttatagcactgtgagaacggataatgcagaaaattggtactgagaagtgagacattgctataaagacacstgaaaatgtggaagcagcgttggaattgggtaacaggcagagtttggatgaatgtggagtgctcagaagaggatagaaacatgagggaatgcttggaacttcttgagactggttaaagtgttgtgaccaaaatgtcaatagttatatggacactgaagtccaggcttatgtggtctcagacgaaaatgaggaatttgttggaaactggagcaaatgtcgtgcatattatgccttagcaaaaaaagtggctgcattatatttatgctctaggaatctatggaagtttcaacttgagagtgatgatatagggtatttggcagaagaaatttctaagcagcaaagcatgcaagatgcagtacagctgcttttaacagcctatgctcagatatgggagtaaaagaatgactt

SEQ ID NO: 174549 - DNA, 626 bp, Homo sapiens
attcattttagtctcaaataatgtttagaaataaacacctggagattaagcatgatttctgtcactggcatgccattgcttttaggacttttctgaggacaaaactagatattaaattatgcattcacattgctatttcaaaaatcaaaattagctttagcttttctctcaacttttatgatttatattcttatctcttttcttttatagtaacagtgatggtaatacaactattttttgatttaccctataatatgcataaaatagtcttaaaactataatacttggccgagcacggtggctcacacctgtaatcccggcattttgggaggctgaggcgggcagatcatgaggtcaggagatctacaccatcctggctaacatggtgaaaccccgtytctactacaaatacaaaaatttagccaggtgtggtggcaggctcctgtagtcccagctacttgggaggctgaggcaggagaatggtgtgaacgtgggaggcggagcttgcagtgagccgagatcgcgccactgcactccagcctgggcgacagagcaagactccatctcaaaacaaaaacaaaaacaaaaacaaaaaccctataatacttattccacaaaaaataaaa

SEQ ID NO: 174550 - DNA, 568 bp, Homo sapiens
tgatagtccttggcatgacctktttaaagagttatgcaaaataagtgaatttgacactcgtttcactgctctttttttctttatttttgtctcactgggttgattcaaaggaatggtctttgagatctgaaattctttcctcaggttggactagtgtgttattactgcttacaactgtatttttaatttcctgtagtaaatttttcaattccaggcattcagtgttttcctttcttcaaatggctgtgtcatcattcaactcttagatcattttactggcttctttgcattgcgcttcaattttctcttaaatatcgttgatcttccttgccatccgtccagttcattgtgtggcttattgaaatctggagtcttatttaaatcttgtaatttctggcccccttctttctattacttgactgaagtaattctttctatctcctcaccatgtttcgtttgtccatccttacctgtctctcgttgataagtataaaatacaaccttcttcctaaatctttacttcattactggaagtatttactagaaatttttttgttctctgatttac

SEQ ID NO: 174551 - DNA, 549 bp, Homo sapiens
ccctcaaaatattttcagtcaaaacagttgactgtgggtaactgaaactatagaaaatgaaaccgcggataagtggggctactgtatgtataaacagaggacaagattcccatcaacggtgtctttgccagcactgaggaaatgtttaatgaaacactgctgggctggagatttataaggagcagatggcaagagagaggagcttttgaaatgcaattgaactggataagttcaagcagggaggacagtagamatgctttaaagatgaacaaaatcacagtttcaagtaatgcaccctagatgtggattgctgggaaactgtgaaaaacagagtcattctttttgatcaatgcttaaggttgactgagtctaaattgtagacctaattgtagacttaaattgcaaacctaacagcaaggtagaactgtgtgaatttagacacgtattatagaatacatgaataatttaaatagtgctgatctgacgtctttttctgaattacctgtgaataaaaactccgtgctaaatcaattgcaaagtaaacacttg

SEQ ID NO: 174552 - DNA, 601 bp, Homo sapiens
cactggactaaggacttcatatgtatttttttcacttaatataaaaatcgccttattaaatatgttctgtatgcactctcattttgtaactcaggaaactgagagtaagtgaatgtaagtaactttatcaagctcacactactggygaatggtaaagctaggactaaaccctacatctttttatctcccagaatagtcatctaatatttcatataacacataaagggacccaaatcatgatttaccaatcccaggagcttgaaaactcttagttgattcttttctactttataaatttgcaatgcaaacagacttttttaaatcattgatcaatcaacatgaaattattgttgcaactgattttagcacctttaatagacattgtggttgagtccgcaatatcgattttattccagttgataatttgaacaagtcatggcaatcttaaacttcttgcttggtcattgaagagagacagggatcttggccatttcagggaaagatgaatacagaagcatgaggccatcctactctcttatgagcaactaggcttagggtgaggccagcattgtggatgagagaaagagctggggtcatttat

SEQ ID NO: 174553 - DNA, 621 bp, Homo sapiens
agaaaacgtagcagtgctggctataatgtaagcagttggctattgtgcttgtgaagtgcattgtgactgctcttaccagcatgtcctggcactctgacttttttttttaatagattcagtatttgcctgcattaattacaaaggattttatgcccacggaaaattctttatacaattgttgaggccaaaattggggttcaggaggggagatttcaggtaaatagttgaggaaaatgaacttcatggaggaatgaacagtagttagaaatccaaattgagcctaatcacttcacagtggaaatggataacagcactacaaaatctttctccatatctatccaaatggaaaactgcttctttactaactctatgaaaacctgtgaaagtcagagattccacacaagggtcaagaaaatggaggcaatacttttttgtgtcagtagatgggacctggacgcacctggtttaattaatcatatttctcatacactgtgcatgattttcattgtcttagacaaggattttgtcctgwatacttaacatattgatacaattttctgttccctttattaccaatctctatagccattcccttcccacctcataggcaaccattccaat

SEQ ID NO: 174554 - DNA, 505 bp, Homo sapiens
atttacaattgtttgttaaagtatttttatgggagcttcattaaaacttttgtgggataattctgcactttgttttatctcagaattagcatctgttgattgtattttttcacatgagttgagattgttctggttctcaacttgctaagtgattttgattacaccctgacacttacgtattatctttcaagtctttgagccttgcttaaatcctggggagaatcatgattatttgtaaaggaaattgacacagttggtttaaggttataagttccaacctgccttctgtgggctgtgggtccaatgtcaatgtagttttcaaatctgtttggatttgtcccaagtatcggccatctgctggtcagyctgagacttgggctctggtctaactgttagttgactctcacatattttgttatgctcactggaataaaactacttgtgcacagcttggagctcatcccaggaacttataaacaactttgtaggattgctttgctttcat

SEQ ID NO: 174555 - DNA, 545 bp, Homo sapiens
aaataagtagcccaatgtcacataatcagcatgcatagagatccaactgaaaagtagatttatttttgaaatttaaaaccaattcacttaaccactacttcctcacattctggaagttttctaatttctactaggtgcaaaaataagaagtttaaattaagcaatatagataacgtaaagcacttttgaattgggaaacagaaatcaagactctaggcctgattttgctgttagttagatgtgagaataaagaaatcactctaaatttcctgacatcaacttcrccttaaaattaggcattactctgagatgaccactgaagcctttttcaattctaagtagtgaagatgctcaactacctaaaaaaaaagaaaacaaaatcctgtttctaaataataaacttaatataatcttaataaagtttgttttaactaatctatatgagagtagtttcatgacaagaagaaatattaactacacttgaaatggtcctgatttgtgtgttatttggcaacttagctgtataaaaactagtccaaaaaact

SEQ ID NO: 174556 - DNA, 527 bp, Homo sapiens
gtagatgcaaaaccaccaggttgtatctacaaactgtagatcttatgaatgctgctgggttttaaactctagattgagtcaatttaacagcaataatacaaaagtaaacaagcaaaccaaaaaatgagaagaaatagatctcttatgataggcattttacgtaaagtcaatgtccagagagtggatttttattttttaattttgtcatgaatgtttggacttacataaatatgacaatggtctataacatatatmtcttattcagttcatcttttttttaactgtttcttaacttgtccattctttacctcagctatgagctaacacctaaagaatgtaaatagtaaaaatcaataataaggcaaaatctagttctaatattcatttgaactccagaattcattcattcattcatccataaactttcaaaatcaaatatttatctagcacctagaatacaaaagaacatatgtgatacaaaataccttgatataccaaatgcataaacgtttttattctcaagcagt

SEQ ID NO: 174557 - DNA, 527 bp, Homo sapiens
gtagatgcaaaaccaccaggttgtatctacaaactgtagatcttatgaatgctgctgggttttaaactctagattgagtcaatttaacagcaataatacaaaagtaaacaagcaaaccaaaaaatgagaagaaatagatctcttatgataggcattttacgtaaagtcaatgtccagagagtggatttttattttttaattttgtcatgaatgtttggacttacataaatatgacaatggtctataacatatatctcttattcagttcatcttttttttaactgtttcttaacttgtccattctttacctcagctatgagctaacacctaaagaatgtaaatagtaaaaatcaataataaggcaaaatctagttctaatattcatttgaamtccagaattcattcattcattcatccataaactttcaaaatcaaatatttatctagcacctagaatacaaaagaacatatgtgatacaaaataccttgatataccaaatgcataaacgtttttattctcaagcagt

SEQ ID NO: 174558 - DNA, 452 bp, Homo sapiens
agatctcaattactagtaggggctatgggtaaaggaaagatgtcaagaaggtagcatttgcattgtgcatgaaagaattagagttttgttttgttaaaaaaaatcaggcagagagaaagacattaatgaaagtgagaagaccaatgatctccattggggagcccaaggaatccagtttaactgatgtggaagaatgttgtatrgaagaatgaaaggcaaagttgataggaagattgaactcatttgtcaaaggccttgaattaatttgactagatattccatctcgcccatgattatcccattttatacctgctttcccagcatcctatctgatttgccatttgaaaatattattcccttaatagttttaaatagaaccacgtatgtctaccaaatatagaaattaattttaatgaattaatatttataaaattataattttatacctttag

SEQ ID NO: 174559 - DNA, 386 bp, Homo sapiens
gaattcttaataataaccaacttttaccacagacacgccagaataaagtatgcaacacacctttttgttttaaaactccatccttttgtgttttgctgttttcygtgccaagaatgccctttcctgcctttttcaggttaatgatactcatgctgtaaggctttgtttaaatgacaattaagttacatgttttttcatgcccaccaggcacagttgttcactccttctgtgctatttcatgtttgtgctgacttcttttattcatattataaccttgaagcataattacatattcacctgcattttcccccactacattgtgacagtgcttgggacagaatatgcttaaatcattaaatctagtaaatgaaaactgatacaggtaa

SEQ ID NO: 174560 - DNA, 386 bp, Homo sapiens
gaattcttaataataaccaacttttaccacagacacgccagaataaagtatgcaacacacctttttgttttaaaactccatccttttgtgttttgctgttttccgtgccaagaatgccctttcctgcctttttcaggttaatgatactcatgctgtaaggctttgtttaaatgacaattaagttacatgttttttcatgcccaccaggcacagttgttcactccttctgtgctatttcatgtttgtgctgacttcttttattcatattataaccttgaagcataattacatattcacctgcattttcccccactacattgtgacagtgcttgggacagaatatgcttaaatcattaaatctrgtaaatgaaaactgatacaggtaa

SEQ ID NO: 174561 - DNA, 587 bp, Homo sapiens
tcaaaatggacttaaaaaaagaaaatcagagaaagaaataacttccaattgcctgtttgcatgtattagtatggagatttgtcttttaacatttagagaaaaaattacwtggaaaaaaaagaggtgaaagcctttaatgtttctagacattctacttccatgcaacgtcctcagacagatgatggtgcttcccttttccacacagaaattgtaaactaaagagaaaactatttgggtataaagatcttcatgatgacctcttgctcttcttctcctcaaaatgctctcctcctcaaaaagttcaacttacacagtattgtgaaaatggggtgcccacccctctactttgttcatttttataatttatttaattatgctttattttctcatacccttcaggtcttcctcattccattataactcacctttgtagcacccacaagtagtgaaacgaatgtgacaaggaatgaacagatgtttagtccaactccacaaattccatttatgaatggggcctattatgctggtgatatgcagttacaaaatattctataaaatttcttgatttatttactctccagtacaac

SEQ ID NO: 174562 - DNA, 587 bp, Homo sapiens
tcaaaatggacttaaaaaaagaaaatcagagaaagaaataacttccaattgcctgtttgcatgtattagtatggagatttgtcttttaacatttagagaaaaaattacttggaaaaaaaagaggtgaaagcctttaatgtttctagacattctacttccatgcaacgtcctcagacagatgatggtgcttcccttttccacacagaaattgtaaactaaagagaaaactatttgggtataaagatcttcatgatgacctcttgctcttcttctcctcaaaatgctctcctcctcaaaaagttcaacttacacagtattgtgaaaatggggtgcccacccctctactttgttcatttttataatttatttaattatgctttattttctcatacccttcaggtcttcctcattccattataactcacctttgtagcacccacaagtagtgaaacgaatgtgacaaggaaygaacagatgtttagtccaactccacaaattccatttatgaatggggcctattatgctggtgatatgcagttacaaaatattctataaaatttcttgatttatttactctccagtacaac

SEQ ID NO: 174563 - DNA, 526 bp, Homo sapiens
ttctatttaaggttacctggcatagatagctctgccagatgtagttttgctattggataatttgatttactgacaatgtgcactgccttaaaataggaagtgcctaggtgactggtgtccaaatcacacatattctttttgttaaaatgaaatgtgagtctgaatttagcctttaattacatttccttctctacctccaacaaacaaatttttayaacctccccaataaaaaaaaagtcatattttgtgaattactattttggaagcagcccaggacaaaacattatttaggaaattttctattatttgtattaatcaaagatgtacatcctctgtgtttttaatagttttatcaaatcgctaacgcctgacttggagacccagttggccacagtatttcaggcctttatcttaactgttaactggtaaattgaaattaccctggtaagaccataatgcaaaataaaacaagctattgtatgtgcaaagtaacataagagagcttctgcagtatttcaggcacttg

SEQ ID NO: 174564 - DNA, 541 bp, Homo sapiens
cacacattcaaattactgaatatgggtgaaatctaagagattctttgggctaagcctgttctttctaaataaagtaatggatgccctgggatcttaattaatttgtttagttttaaatatttagaaaatgtagagctagtctagggcccttcttcccctcttcttgtatgatgactattctgcttctgtacttgtctcctctggtgtttcttcctgatggtaaagataagtctacctcctctgactttaattatggttttcctctagggttagtgacttctgtgcattctggcttgagcatgactgaaccacagcatttataccctatctataattgtttacagatcaagtcaacaartaggtacagaaaaataaaggagaataaaatagatatatttaagaagcataacgaggagtgaattgatttctgttactgggtattttattaattataatttaatatataatgacaatcacaattacatagtgatgtctatttgaagtgactttacagattacgttttgaaggtatattatgggc

SEQ ID NO: 174565 - DNA, 623 bp, Homo sapiens
aattcattttgcaaaagatggtgcacgaaatataaaatttaagcagaacaagaggaatatggagtgctgggaagggatatgggttgcagttttaaagagggtagaatatcatcttgattgaaaagctaacatctgagtaacaactagaaggaagtaagagactgaactatattgatattggggaaagttcttctgaacaaaatctctaagcayctctggtccccaaattaatgggactgccagcgggcttacaagcgatatatgggggttaattatacatggtaaactctacttgtcaatatccccacaataacactttctccttaatatgcacacacacattcacaaaaacacacagagagagtgaaagtgtcgcaggctataatatatatccaggcaaacaactaaatatttatctttgaaatgaataagacaagaattccagggatagccaaaaaatgctctactccatttcaatgccttaaaataaagccccttttattttgacagatgttggattgcagccccaaagcctgcacaaaagaccactgctgaacacaaagcaaaaaagggagagtgaatccattcatggcttccactcagaatcactaccaagagaagag

SEQ ID NO: 174566 - DNA, 623 bp, Homo sapiens
aattcattttgcaaaagatggtgcacgaaatataaaatttaagcagaacaagaggaatatggagtgctgggaagggatatgggttgcagttttaaagagggtagaatatcatcttgattgaaaagctaacatctgagtaacaactagaaggaagtaagagactgaactatattgatattggggaaagttcttctgaacaaaatctctaagcacctctggtccccaaattaatgggactgccagcgggcttacaagygatatatgggggttaattatacatggtaaactctacttgtcaatatccccacaataacactttctccttaatatgcacacacacattcacaaaaacacacagagagagtgaaagtgtcgcaggctataatatatatccaggcaaacaactaaatatttatctttgaaatgaataagacaagaattccagggatagccaaaaaatgctctactccatttcaatgccttaaaataaagccccttttattttgacagatgttggattgcagccccaaagcctgcacaaaagaccactgctgaacacaaagcaaaaaagggagagtgaatccattcatggcttccactcagaatcactaccaagagaagag

SEQ ID NO: 174567 - DNA, 585 bp, Homo sapiens
ttcaatgtattcatctgtaaataagataattgcacacttgaatcatttcaaaggtcctcagtattttgaaaagtattcagtgtgttagtcatttttacattggttatttcagttctttattawctgggtgagtcaaggatgttttcttttcttacatcacagaatacttttatgccaagcaattcttaaaaattcattccctgtagattattttttactctcttttaaatgcacttctctctctctctctctctatgtatatatatatagatagatagatatagatatacacatgtatacatatagatatagatatatacatatatagatggatagatatcattgtaggtaaacttcctttgtttcaatgattttaatttttatattttagaactggatatttgctaccattttttaaagaaaacatttcagttgtatagaggtaccaagatttttctctagcacggtagattagatattgcatgagcaacaatctcagactttaaaatgatcatatttacttacctacttttaatacataaaatatttactacaaaacaaaaagacaaagaagagattctgaat

SEQ ID NO: 174568 - DNA, 599 bp, Homo sapiens
atttgtttctaaactcaaattagtatcttagtgacaagtccatgattgcttagtaaatagagtatgaatgagactttaggattatgttcctttggcaaacagcatttccaggggagacaagaaaggtaacaagttgtcacaaatcttaaatgtcagagtagcaatgggcagaaagctttttggagtagttaatggcatttccagacccttgtgctcctgtgcagcacctggaagagtgctgatggccacaaagcacttttactccatcaggtcacacttgtccatttccacccactaggtctgattgggagagttctccttaaggtaacctgttattcacataaccctgataggaaactgcatggcttcgagagaaaacaaacacccaagccaccaatcaaccagacytgatatctagaattgacaataatggagagttcaagtaccagctccatggatgaatatccctatgttcctgaattagatgcttactgtctctctagtttgaatcttcaccggtaatggaatgatatttttaccctttagagagcttcgagaaattaatgaagtgcctaaaatatctagcacacattaagcaa

SEQ ID NO: 174569 - DNA, 343 bp, Homo sapiens
tataatcgtagtcataatgttcagtcatagtaaaagaatagtaaatcaaaataaaatcaaaacttagttatcaatttatattcataaagctgacaaaaattaaagtgtctgattgtcaagtaaggatatggagaaatgagaattctcatggtgttgatataggagttaaaaagaaattagttaggcagatagtgagggtaagagagtccgtrgtaaggttttccttttactaaacagtagtctcaaaatcatttcttttctaacaaagagcagcctgtgaaattgagctgcagacatagataagcaatctggaagcttgcactggtgaatggtggcagttgtg

SEQ ID NO: 174570 - DNA, 454 bp, Homo sapiens
atttacctgaaaaaaatttcaggaggttagttattaagctaatcagggaggcaccagagaaagtcaaagcccatgtaaggaaatacaraaaatgctacaagaagtgaagggacaaatattcaaggatatagataacataaattaaaaaaatcaaaactccaggaaacaatggacacacttatagaaatgcaaatgctcaggaatgtcacaacaatagaattgaacaagtagaagaaagaaattcagagctcaaagacaaggtcttcaaattaacccaatccaccaaagataaagaaaaaagaataaaaatatatgaataaatctccagtaaatctgggattatgttagacaaccaaacctaagaatgatcagcattcctagggaagaagagaaatctaaaaatttggcaaatatatttggaggaataaccaaggaaaacttccctggccttgca

SEQ ID NO: 174571 - DNA, 585 bp, Homo sapiens
tgggtgcagcaaaccaccatggcacatgtttacccatgtaacaaaactgcatgttctgcacatgtatcccagaacttacagtattaaaaaaaaaaaaaagcaactgctaaaargagccctaaaccttgaaacaaatccaggaaaaacatcaaaacagaatgtctttaaagcataaatctaacagggtctataaaacaaaaatacaacttaaaaaacaagacaaaaaccaaggtatacaagcaaatagcacgatgaatggaatggcacatcacatctcaatactaacattgaatttaaactgcctaaatgctccgcttaaaagatacaggattgcagaatggataagaattcaccaacccactatctgctgctttcaagagatatacctaacacataaggactcacacaaacttaaggtaaagacttggaaatagatatttcatgcaaatagacaccaaaagtgagtgggagtagctattcttatatcagacaaaacaaactttaaagcaacagcagttaaaaaagacaaagggggacattatataatgatgaacagccttgtccaacaggaaaatatcacaatcc

SEQ ID NO: 174572 - DNA, 602 bp, Homo sapiens
tttcaccatcaccttcagaattaagtctcagctgctgcacatcaacatttaaatcattaaatcatttaaatctctaagcttatttttccctcttgactttcatattcaaatagccaagtgtctattcaatatcctatttggattcattccacagacacctcatttgcagaatgtggaaaactgatctatcatctttttctgtaaacctgttcttccatctgtgttattttatgttggcaccactattcattcatattcaaatatctggttgttttccttcattattgtttccaaggataatcctactataacagcaaactccaaagtgtatcatcactcagacatgaaagaaagaagttggtttcctactcaatacaaagtcttgaatgatggtctggatagtcagaattatctattccaagaggggattaagaaaaatcagtcactgtccatctcagagtttcattatcttcaaataccaagggagaaaaatgtatgaaggatcaggaatgggggtagtttacaggccaggcccagaaaagatatatcacctcctcatgttcygtttagtaagatggctccaccaaagccatatagtgctg

SEQ ID NO: 174573 - DNA, 397 bp, Homo sapiens
taaatttatacattaatgtttatgtaagtaaatatcttataatctctcataatttcttcttatatgtttaatactctaaaactyaagtattcatgtcaaaattagaaataatatgcccacattttaagggttgtcatttgtttttttttgaaaattagtgaaagttacgtgatgaattgtctacattatataagaaacaaacagcacattgaaaacattaaaaagttaggtggttcaaaacttattaatccaatatttgtaacaaagttagtcttaattttggtgagaaaaacctacttttgaataagttcctcatagtaatttgacaattctaccataatagaaccattatattatcatttttcttattcagttttttaaggatttgaaagcggta

SEQ ID NO: 174574 - DNA, 551 bp, Homo sapiens
aaattaaaggtgttatttaaacttgttaagtaagttggtgtgaaaacacaagctcttaaaaactcaaaaatttcacgtaatatttttatacttttgagagaaagcaactgatgcaaaagcaagggccaaaagagaatcaagcataatatcagtattattaggctgcctctaaaatagtcttcattaacaagacaaaattatgaaattggatttactttgtttcaaaakttctgccatgagataaagatattttcattgttttgaagtgtcttttctcttctatcagtttagattaagttatctgagaagcttctattattgagaaaaaaattgaagaatgggtattaaaagaaaattctaccatatttggctcttttgtcacacacctgctcatgcacactctccattctatatactgggtaatctacccttttagggagacaaatctctaattccatcagagcactaaaactaactcatgaaccagaatttctatgtctatcatcccattctttgggtgtagattaggttattactgacctggtacattt

SEQ ID NO: 174575 - DNA, 461 bp, Homo sapiens
acttgaagcaaagaggaaattatagactaaagataaaaccacatgctatttttagattagacaggctatcaatggaatcggagaaattctgataagggtgggatttccaaaaggctcaaaaatcactgacttcctggactcaaacaaaagcactgaggtaataaygcaacatctaggcttatggagttcacgaggctacttcaatggagcccaagcggtgggaacaggtcatttgggggcagacacaccagaagccttctctgcccacctggatttttacgtctaaataagatactgtgcaaatgaaccctgtactagacagagacatttctagtgagtttcatttcataaatttatttttaacaaacttatgagaggctgatactggatctcataaaaagactctcttgctgtcttaaaaacttctactgtctcattcttaagtcacaggttatgaaaga

SEQ ID NO: 174576 - DNA, 590 bp, Homo sapiens
ggtttgatggtggcttttgaatggaggactgaccagatcctgcccagagatagtcacaagctgatgtggggcacaagcctcagaccctcagacagtggggtgtgagctgggtcatcagaggggaccatgcaaagaggtggtacaagaaaggggacccagggaccacctggaatgcagcgtttctgaatcagacccatccgtgccactataattgttgctatgtctgcaagtatgagtttactggggcttccctaacaaagtactgccagcttcatggctcaataccacagaaattcaatctgttctgcaggcagacacgactattctcatttacacagacaaggtaacatgcatggagatatacagccccttgcctgcattgctcatgtrggaagcaggagagcaggaatttgacccaagagagtctgctctgaagaccatgtttcttcttgtttcttctttttttcactttatatatcatttttattcattttaaaagtatacatttaaggcatacaacatgatgttttgattactactgtcaagcgtattaacatacccattatctcaaatagttacctgtttttgag

SEQ ID NO: 174577 - DNA, 343 bp, Homo sapiens
caccacagtaatagcttagcgcccttattgttagtttatacacaatccatcgcagtctctcatcccctcaatccttccattatgagtcctttggcctcctcggaattccagaccattgacctctgccccctcggacccacagtccctccgagcttttctcccagttctggggagattccatgctccgccatttcaattactttcttgtcaacaccttaaccactcccgtcccccagtctttctgtagtaagcgtgtgagcatytggaacaacgccagccctggagagtctccaggtcagctttctccatggcagccccaggcactggcgcctgctgggggacc

SEQ ID NO: 174578 - DNA, 534 bp, Homo sapiens
cctgtaactgtaaatgatataactggaaaaagcagtcaaatttacataaagcctatagtgaaattaatagtgtggtaacaattttgatttttttagttgtgataattataatatagttgttcaaggtatcaatctgaggaaaagctaggtgaagggtaaagtgcagctttttgttttatttttaactctgataactctaaaatcatttcaagttaaaaatttaaaaaactgatattgtaacatgggtttgatatgtttatatttgtttttatgatgggaagtacatttatatcagaagagaaagaggaggtgatccacatttaatacacattgtttcctgtcacctgtacactcattgcacaatatctctggaaagagagactgattgtttaaagtaccgactacaaagatcctggctgctgcattgaggcttaagggtttgaccttttaaataattaaacgcaaaattgagtgtctctctgtrcccatacaaatgtaataattgcagtcctatgaacctcacaggtttgaagt

SEQ ID NO: 174579 - DNA, 581 bp, Homo sapiens
taatttaacaatagaaagttcatataaatggcttctcaaactctgttttgaaaatgtcaaggatcactttaaacattttgtgagaagaaaggcaaccaactaaggctgtaggatttttattttatactcacagtttttagtgcccttaattctttataaactaaayaagatttatcatttattgtatgaaaaaacatatccctcccattcttagttgcataaagtagaaatttagaattgtcaaatttctctttcttcattttttgttggcagaaatgattttcatttaagaacatttaaaggaaaacttgttttagtataaattaaaaattcatattgtcaaatatgttggttttaataaatgttaaattaaatgatatttaaattgtagtgagcaacactatttcgccacttacgtatattgtgtttgttcatttcagtggtaacataatataactcattgtggagaattaaggacattatacaatttttctaatggcagaattatttataagacattcaattatgataaaaatatcagtgatccaaaatatgttttatttttatttttatcaaacaca

SEQ ID NO: 174580 - DNA, 618 bp, Homo sapiens
aagttgcccaaagtgtcacaactagacagaagaagactatccctcaccatcaccaatcttgggatcaaaattcaaaagacaatttttctgccgcagacaatctagtcaccgtggtctaggctgtgccactcaccactgtatgttcagagatgtcctaggctcagttgttggctgagtaaatagatgaaagaaaaaaataaactcaataatttaataaaattataataaatggcatattcaacttcaatcttgacaaaatgtgrcatttgataccttcaataacatataagaattcataaaatcaactacttaaatttgaaatccctattctcccttgggtccaggcttgttatctgatgtgctattaactagagttaccaagcattaatgtcaaggcaaataaaaaccctaatagaaatatctgtaaatagagttgatgaatatatgattatggaacatttaaatacagaaaaggaaaaactatatttaagcatgagaattttcaagctattttgtcaacatgacaacttgcttgaaagtttttataagaaaatgatacatggatactaccctaaaacacacatattacgcacttttgtaccatttatacaaaccaag

SEQ ID NO: 174581 - DNA, 386 bp, Homo sapiens
gcaaatattttctccgatcctctgtgctttctgtgtactctgtttatatttcctttttttgtgcagaagctttttggtttgattgggtccacttgtctattttcatttttgcagcaattgttttcagggacttcattgtgaaatatttgtcaaggcctatgtccagaatggtatttcctattttttcctttaragttttaacataattaggtattacatttaagtcattattccattttaatattcgtatatgtttcctattttgattaataaagacatgcttgagcctagatataatgatttaaaattcatgttccgaaagtgcaattacttttatacaaactaaatatatgggaataaaaaataaacagtaatttgaaagatct

SEQ ID NO: 174582 - DNA, 557 bp, Homo sapiens
ttgtgcagccagaagcttcaaactcaatgctcttaactgtctagaaaaagaagttatgtttcaatcctacaattggcatcagcattgtctcaagagtgcagactaagaacaaagartcaggaagattgctgctctgcagatagtctttgaatatttatataaattgttggactgcttaaacttcttgcaacttcttaagtaggtgaagagatttttacctgtgtgagcagtatatgtgtttcgtgcaagctaacaaggtcttgaagcagattttatgggcacttttgtgagctccctctataatgaagacattgtgttccaataaggcctttttgcccttggatagtgcaacaacatatgccctcattataggtgtaagtccaagctgacaaggatggccatgttcttatgaggattgtcaccccattcatcactgtcaggaagtggtgaaatttagggggaatctataagatttggaagaaagttaaaactagcattgtgttggtaatataaaaaaattactggctccttattttgggaagtctatcattgtcctg

SEQ ID NO: 174583 - DNA, 364 bp, Homo sapiens
cagagtcactagacatctcttttaagtctctttatgttgaattgaaagtggaaaagagaaaagaggagtggaaggaaatgaaagaacaagtcttaraggagctaatttagagattttaagcttcccagaaaggccaatgaattttacacttttgtcagcaaaaattatgccaacagaaaaagaaaaagcaaacaaaaggatcaaatatataattaaaaagtggttgtagttgatttaaaaaaaattcagaaacaggacacagaagaaaaaaaaacagaaagatatatatatatcctgaatatcatcttttcattaagctgacttctaaccatagctgacttcttataaatgtttttccaaatct

SEQ ID NO: 174584 - DNA, 499 bp, Homo sapiens
ggcttcaggagtgaagctgcaaaccttcgcagtcactgttacagctcataaaggcagtgtggacccaaagagtgagcagtagtaagatttattgcaaagagcgaaagaacaaagcttccacagtgtggaaggggacctgagcaagttgccactgctggctcaggcagcctgcttttattctcttatctgtccccacccacatcctgctgattggtccattttacagagagccgattggtctgttttacagagagctgattggtccattttgacagggcgctgattggtgcatttacaatcctgagctagacacaaaagttctccatgtccccactrgattagctagatacagagtgtcaattggtgtatttacaaaccctgagctagacacagagtgctgatcggtgcatttacaaaccttaagctagatacagagtgctgattggtgcattcacagtcccttaactagacataaagattctccaagtccccaccagat

SEQ ID NO: 174585 - DNA, 499 bp, Homo sapiens
ggcttcaggagtgaagctgcaaaccttcgcagtcactgttacagctcataaaggcagtgtggacccaaagagtgagcagtagtaagatttattgcaaagagcgaaagaacaaagcttccacagtgtggaaggggacctgagcaagttgccactgctggctcaggcagcctgcttttattctcttatctgtccccacccacatcctgctgattggtccattttacagagagccgattggtctgttttacagagagctgattggtccattttgacagggcgctgattggtgcatttacaatcctgagctagacacaaaagttctccatgtccccactggattagctagatacagagtgtcaattggtgtatttacaaaccctgagctagacacagagtgctgatcggtgcatttacaaaccttaagctagatacagagtgctgattggtkcattcacagtcccttaactagacataaagattctccaagtccccaccagat

SEQ ID NO: 174586 - DNA, 605 bp, Homo sapiens
tccattttcagtcaaattatttgtttttttgctgatgagttatttgagttcctcatatattctggatattagtcacttattggataaatagtatgcaaatattttctcccattttacaggttgtttctccactttgttgaytgtttcttttgctgtgcagaagctttttcatttactattaatcccacttgtctatttttgtttttgttgtctaagcttttgaagtcttacctataaaatttttcctagaccaatgtcctgaagtgtttcccctatgttttattctagtagttttatagtttggggtctcacatttaagtcattaatcccctttgatttgattttttctaaatggcaaatgataggggtctagctgtatttttgtgcatatgaatatccagttttcagagcaccatttattgaagatggtgtcctttctttaatatatgctcttttgctgaaaaccagttggctataaatatgtagatttatttctggatattctgttctgttccatttatctatgtgtctgtgtttatagcaatgccatgctgtttttttgtctacagttttgtagaatattttgaagtcaggcaatgtgaagc

SEQ ID NO: 174587 - DNA, 605 bp, Homo sapiens
taactcaactcacaaatgatttgccttagttataatgtgtgtcatatctaaacctaaaacataataaaatacacggtacacttacttaacctttcattagtgcacttgtatttttttttacctagtctattgatcaaaaaatttgacatatctgtggtgttatggttgggtgwttaattatgaccctgaggaactgacagtctaataatcacacttgtgctgtgccatttgcagcatgagtgctgcagaatcctaggtaggaaagtagtgacataccaagggctattatgtgcaataacgaaaggcagtagggtcgtaggccagccttatctgcattactttggatcttgttagatttcaaattcttggatctgactcaagacctactaaatcagaaactctagaagtgggacccagcagtctgttttaacaagttctccacataatttcaatatatgtttatgtttgaaaaattttattctggtgatagggaatacagacttcctcaattcagataatagctatgctattaacacctgagtgacattaggcatctatataatgatataatctatataacgaggataacattaatatctgcctta

SEQ ID NO: 174588 - DNA, 520 bp, Homo sapiens
tggaatagctgggatgcagggcatcatgtccccaggctgcacatagcagcggggccctggacctggtccacgaaatcatttttccctcctatgcctccaggcctgtgattggagaggctgtcatgcaggtctctgaaatgttccggaggtatttttttccattgtcttggctattaacatttgactgctttttacttttgcaaatttctgcagtcagcttgaattctctaaaagaaaatgggtttctctttcctcccacatggccaggctgcaaattttctaaactcttatcctctgtgtcacttttaaatataacttctagtttcagattatctttttacttataaatatgagcattcactctyagaagcagtcaggccacatctttaacactttgctccttatacatttcttctgccagataccctaaattatctctctcaagttcaaagtttcacagatttctagagcaggagcacaatgctgccagtctctttgctaaagcatagaaagaatgacc

SEQ ID NO: 174589 - DNA, 372 bp, Homo sapiens
tcttgccctcataatgggggataatgagccttagaacaatattgctatagtttaacctatcaaatataaaaagatcaaatggtttccaagccatttaacsatgtcccagaacaaaatgcaagaatatttataggaatacaaaaaatttcagcactcaacaagctagaattcaaaaatgtccagaaatgtattaaagattgctagcttaagagcaggaaaatacaaactataataaggataagaactgactaatcaaaagggacccagtaatgatgcagatattagaattagcagacatggatagtaaatagttaatacatctgagtttcagatttctgaaaagttaaatagaaccatggaagatttttaaaa

SEQ ID NO: 174590 - DNA, 559 bp, Homo sapiens
cattcaaaattaaacacagagaaaaaaaaacaagcccaaaattgagaagaccatcagtaagctgttgaaaaactttaagcaatatgtaattggaaaccccccaccaataaagaagagcaatagtgatacaacaaacatttgaagaaataatgtccaaagtttttaattttgatgaaacctctaaccaaaaaattcaagaaaattaacataacagaaaacatgaytaaaagtactcagaaacacatcataatcagattacttacaaccagtgataaagggaatatcttaaaataataagccagagcacaaaagacagagaagcaaagataatgatgagaacagacttatcaccaagaaccttgcaagtgaaaagacagtggagcaacattgttttagtccattttgtgttgctgtaaaagattacctgaggctgggtcattcataaagaaaatatgtttatttagctcacagttcttcagctgtacaagaagcatggcatcagcatctgcttctggtgagggctttaggctgcttccactcatggcggaaggcaaaggga

SEQ ID NO: 174591 - DNA, 543 bp, Homo sapiens
attatccgtagctacgtaaatcaattacagcttgaggctggacaggcaattgttgagaagatttccatgcataagtattgttttaagtaagtttgtgcaaggttacaaatcaaacctttgttcaaggttgtgatttttgtagaatttgttttattatcaggcatacaagtgtgagaaccttctcttcatggcgttccctggctctatttgtcaaagttttcttaacattagtgactccatcttgattctttcattttcacattagaaaacgttcttttgtgcagataaggttaatgaagttctgttcacttcactttatattatctcttgattatctattttggctttctcagagattaagacttgcaggaaaaccaaggcaacgggaatgttcattttctagggcaaacytagattctgagtatggtaactgtcccagggacacactgaacattattagagcaaatatcaagatattggaagcagtattgtataatcacaagactcaagctttgaggttaggcagatttgaattctaatgtt

SEQ ID NO: 174592 - DNA, 603 bp, Homo sapiens
gttcatagcctaaaatgtctaaatcaaaaagtctgaaagagcacatataggcaatctagggtcatgcctcatggaactggagaaacaagaacaatccaaacccaaacccagaagaagaaaagaaataacaaagatcagagcagaactaaatgaaattgaaacaaaaaaaatactaaagataaatgaaacaaaaagatggatctttgaaaagacaaataaaattgatcaaccattagcaagattaaccaagaaaagagagaagatcaaaaaaagctcaattaaaaatgaaacaggagatattactactggtactacagaaatataaaagattattcaaggctamcatgaacacctttacatgcataaactagaaaacttagaggagatggataaattcctggaaatatacaaccctcctagattaaaccaggaagatttggaaactctggacagaccaataataagcagtgagatttaaacagtaaataaaaaattgccaacaaaaagtctaggaccagaaggatatacagttgaattttatcagacattcaaagaatagataccaatcctattgacactattgcacaggataaagaaagaagg

SEQ ID NO: 174593 - DNA, 518 bp, Homo sapiens
tttgtttgcaacataaggtatttaactttaggctcatattttaagctctattttatacatttatttaacaggctagcagattgtagcgcaaattcaccttttgtgctttctttcatataatgagctttccaaaccatattataatgtcatctactaaaagtgctttttccctttcaaatgtagatttcaagataaatgggaacttttgccacagatgttaacatcataaatgagaaagaagaaaacatatttttctctrttttctcttgagtacggtaaaaaataaatttaaaatggcttgcctaaggaccacatcaataaacaatattgccaggcagcctggatttaaagcccttcctagctgtgtgatcttgatcaaactatttaatctttctagactagttttctacctggatagtggggattataatagtcctagcttacagaatctttggaaattttaaatgatttcatatagagaaaaattttataaagcaattttaaatataactacccat

SEQ ID NO: 174594 - DNA, 582 bp, Homo sapiens
taagaaaaagttgtagcaaaaagcaaatgctgttcactgtttgaaacattcaaaagctggagagatacaactgagaagcataagcagaaatgtcggtcctccggaggactctagcttccaaggcaacaacagcagtttggaaactccctagcaaacagctttcttaggcttaactgattatagcaagaggcacaaactgctggcacaggtataaaatgtgcactcacaaaagaatctgcagacgcttctgccaggtagaggctccctcaatttaccatggaggtgccagaaatatggggaccaaagagaaagtggaagtcaagagatttttaatattctgaatgagaataaacagtagctcaaaaagtagctgccacttttgcgaatgttaagggctaataaagtataattctcttgaaggtcactctgcatgaagagatactatatataattggaattttcccctagacaaatggcaaacaaatggcaataaactacttataggagatttctccctgttgaaaataaccycaaggccatagtctccagggagacttaagttgactggcattttagaaaacc

SEQ ID NO: 174595 - DNA, 425 bp, Homo sapiens
gttacaggagctgatgaaaaggttgaagaagagagttagcaccccaaccaagcaaaaagatacatgatttcaagagaagaaaaagaagacaataatgtataatttgcaaattacatgcagtaaagtagaacaaaagttgaatttctgagatacatgtgagaaatttcaaaaagaaacatttccaaattaaaaattaatacctcgtgcaatataactaaaagtaaatcaatgctttaaggaaaccttgttctaacattargtacccatttttttttagtttggtatgaatgtgtttttaatataaaaaatctatcattagaaagactactataaataatcaccttttaattctagccaacttgatcacacacataactcctttcataagtttctttttcatgaatcttattatgacttacacagac

SEQ ID NO: 174596 - DNA, 425 bp, Homo sapiens
gttacaggagctgatgaaaaggttgaagaagagagttagcaccccaaccaagcaaaaagatacatgatttcaagagaagaaaaagaagacaataatgtataatttgcaaattacatgcagtaaagtagaacaaaagttgaatttctgagatacatgtgagaaatttcaaaaagaaacatttccaaattaaaaattaatacctcgtgcaatataactaaaagtaaatcaatgctttaaggaaaccttgttctaacattaggtacccatttttttttagtttggtatkaatgtgtttttaatataaaaaatctatcattagaaagactactataaataatcaccttttaattctagccaacttgatcacacacataactcctttcataagtttctttttcatgaatcttattatgacttacacagac

SEQ ID NO: 174597 - DNA, 398 bp, Homo sapiens
tcagcagattcaaagtagacagaaaaagagagagagagacagagagagagaaacagaaaaattagaagacaccatatgtttcccctacagctgcaggttttttaaataatgaccatctccgaatggtcattgataatatgaacagttctgaattatccttsatgtagtttgtctatcagtttaaaaatacgcacaagtataggccataatatgtagctgactggagttcaagaaaatttggcatgccttaagtttaagaatttcatttcatttcttattaatcccttgggaacaaagaaaatcctataaatcctgtcagaaaatgtcagaatttaagaccagtgttttagatgatagcaactaccctagtggcttttatttcagccattctgaattcc

SEQ ID NO: 174598 - DNA, 340 bp, Homo sapiens
ttccattacattacattccattccactccattccattccattcctttccgctcatgttgattccattccattccattccaatccattccattccattcgggttcattccattccattccattccattcctctcgtgttgattccacaccattccattccattcattmctttccattccgttccattccactcgggttgatttcattccattccattccattcccttccattccatttcattccaacccatttcattcccctggtgctttattccattccactccattctgttccattccactccattccattccattccattccattccattccattcca

SEQ ID NO: 174599 - DNA, 340 bp, Homo sapiens
ttccattacattacattccattccactccattccattccattcctttccgctcatgttgattccattccattccattccaatccattccattccattcgggttcattccattccattccattccattcctctcgtgttgattccacaccattccattccattcattcctktccattccgttccattccactcgggttgatttcattccattccattccattcccttccattccatttcattccaacccatttcattcccctggtgctttattccattccactccattctgttccattccactccattccattccattccattccattccattccattcca

SEQ ID NO: 174600 - DNA, 587 bp, Homo sapiens
aagagaaaagccttgttggctttgccatctgctgactgtagagcgctgaggtttgaacaaacatagatgttggccaagcaatggttataatgggctctggatgagactcagggctgtgctcgcttcagatctgacacagtgcagtcccagttgtggtggccacagcagtccttttattgcccctcccatagctccaggcagctcagcaaagagaaaaagacatcattagtttgggggaatgtaagagaagggaacaagaattctctgataatctagagaattcttctgggtcttataaaagactaccaaggcagtacctctgagtctgcaagakccaagcattactgggctaaaggtgccctgtagtgcagatacagttggagtgactgaagttaccacttcacccaaatccctttaaatacctggaaagccttcccaagaaggatgggtacaaatcagcccagacaatgaagactacaaaaattcctgactcttcaatgcccagacactgacaaatatccaaaagcatcaaggccatctaggaaaacatgatctcaccaaataagctaaataaagcaccagggacc

SEQ ID NO: 174601 - DNA, 522 bp, Homo sapiens
tacatggcattaattctgggctctttattttgtttcattttgttctatttwtagtctgtttttacatcaataccaggctgttatagatactatagtgttttagtatattttgaagtcaggtagagtggtacctcctgctttgttctttttgctcaaaattactttgggtatatggggtcttttatggttctatatgaattttaggataacttttcctatttttgttaagagtttcattggtattttgataggtattccactgaatttatagataactttgggtagtaagaacattttaacaatattattttttttcaatccatgacacaaaatatttttctacttatttatttcacagatttttttgtagttttcattgtagagatcttttatcttctcagttaaattaattcctaggtattttatatttttggccactattgtaaatagggttgctttcttatttctttttcattatcagcatgtacaaatggtattgatttttgtatgttaattttgtat

SEQ ID NO: 174602 - DNA, 655 bp, Homo sapiens
cgggctgaactaggtcaacccggcaaccttctaggtaatgatcatatctataatgttatcgtcacggcccacgcattcgtcataatatttttcatagtaatacccatcataattggaggctttggcaattgactggtccccctaataattggtgcccccgacatagcatttcccctcataaataatatcatctctccctgtggtcatagaacattgctatcatgggtccaattgtacacagtattgtaccaaatcagaatgaaagaagttagggacctctctttgcttctcctcrcctttcttctgtcttcttttctgttttttttttccttctttcctctcctcttataattcttctcctctccttcctcctctttatctctctgtcgctctctctctctcacacacacagacacaaacacatgataatggaaaacttttgactcccagaaaatcgttctcttatatttttatatttccgcttataaattgccttctaatatgtggacaaatgatgggaggttagtaagttaactaagatgaagtgggtattagttgttagatagcaaacctttattatctccctcgtcgtttttagtttccaaagggaaaagtatttacttgaaaatgtgatcaagaacacaacactttagat

SEQ ID NO: 174603 - DNA, 377 bp, Homo sapiens
tgaatgactggttatgacatcaagcaagtaattgaacatttagcaccatgttgttgttttacgtactctacaaaaagggaaacagtcaagatcaatttaaggcagttgaggtgcaaagaagaggctgaaccaaaagagaatgcaaacagaaaccaggaaatcaaactgtgtttcaaaatgaatggaattatcgtcattgaaaggttggggcaggtgggaaagaactgaacacaatactttgaatatttattctaagtgaaaagttaaaagtaattgcaaacaattcctgaactatagctattagatttgatttcaaagaagtattggttacyaattttataatctactttccatgtactgtggaattcagcaaagga

SEQ ID NO: 174604 - DNA, 515 bp, Homo sapiens
ttccccatctcttgcatcatatgctgaatttgagggctatataattgttctggaattaacacttgtgctctccattgctgtaataaatctcttccccataaatttataggtacagaagttacaattggttgaatagtcccagattgtccatcggacccttcacaatgcaaaatataactactgtgatatacttcaggggctttaccaactccaactctgttaaattgagagggttgaattggccacgtggacggccagtgctgtagagaaatgattgaaatgtccgctcctgtatgtaccaaacctttaaatttctttccctgaatagttatttcacaggtaggatgtttatcaggaatttgattcacccaataagctgctttacctkctttatttgtgcttccaaatcctcctgttcatttaatttcacttttccccatttccacatacggcacaatcaggagctgcactatgcgatctcctggctctgctttccagggaacagaagtagatat

SEQ ID NO: 174605 - DNA, 537 bp, Homo sapiens
agtctaaggaaaggagggtcaggaaaggatggcaacgaaccaacaaacctcaataaagcagcaatgcccctagaaccctgcaggatgtggcacgcacaggtgccacccttacaaaggcccagcccaaaggagcaaagcaggcaacctgaaggrccagcctggcagaaacctgcaccccaggctgcagaacaaagaggggcagagagaaagtcttttccagagcacaaggaggcagcctgagttgctgcacaaaaagctctttcccttcctggctgatttccaagtatagcatggcagaaacagaggtgcacatttctttcttgttctattttttttaaatagttttcaatttttatttttgtaaaaacggggatctcactatgttgcccaggctggtcttgaactcctggtctcgagtgatcctcccaccctggccccccaaaatgctagggttccaggtgtgagccaccacacctaacccctctattatttttaagaatgaaaatataaggtagaactttgtcatgggttgaattc

SEQ ID NO: 174606 - DNA, 461 bp, Homo sapiens
tgagaatgggttggggtggagtccctgcttgttgcctgacaccacacctgccagggcaggtgagccatggccccatcctgctgatatcatacagtcacatccactatctgctcagccaactcgggcctcttctggtgaaagtgtttcgagccctctgaagagggcatcagattaagtstggagtgggacacctgtgtgccctcctcagtttgtcacctacacacaggtagtaagttgatttacacaggcagagcgattcccaggcacagtgagccctctgcaatgagtgtgcacctatccacacccctccaccgctccccaagtaaaaggcgaatgatctgtgcataagggcaggcggtcacaggtgggtaacttcgaggggactccagggccctcctgtagtcgttctcttgggaaactgctggggtctctgaacttcctgaaccttaacctgcccagtg

SEQ ID NO: 174607 - DNA, 443 bp, Homo sapiens
gagtccctgcttgttgcctgacaccacacctgccagggcaggtgagccatggccccatcctgctgatatcatacagtcacatccactatctgctcagccaactcgggcctcttctggtgaaagtgtttcgagccctctgaagagggcatcagattaagtgtggagtgggacacctstgtgccctcctcagtttgtcacctacacacaggtagtaagttgatttacacaggcagagcgattcccaggcacagtgagccctctgcaatgagtgtgcacctatccacacccctccaccgctccccaagtaaaaggcgaatgatctgtgcataagggcaggcggtcacaggtgggtaacttcgaggggactccagggccctcctgtagtcgttctcttgggaaactgctggggtctctgaacttcctgaaccttaacctgcccagtg

SEQ ID NO: 174608 - DNA, 461 bp, Homo sapiens
tgagaatgggttggggtggagtccctgcttgttgcctgacaccacacctgccagggcaggtgagccatggccccatcctgctgatatcatacagtcacatccactatctgctcagccaactcgggcctcttctggtgaaagtgtttcgagccctctgaagagggcatcagattaagtgtggagtgggacacctgtgtgccctcctcagtttgtcacctacacacaggtagtaagttgatttacacaggcagagcgattcccaggcacagtgagccctctgcaatgagtstgcacctatccacacccctccaccgctccccaagtaaaaggcgaatgatctgtgcataagggcaggcggtcacaggtgggtaacttcgaggggactccagggccctcctgtagtcgttctcttgggaaactgctggggtctctgaacttcctgaaccttaacctgcccagtg

SEQ ID NO: 174609 - DNA, 622 bp, Homo sapiens
gaattcctgggctcacccataacaaagcctttgagaggcaaactctgcaacagactgccacccaagttccaaggtgacctctggagggcaaaaatgcaagactaggtcttataaacacatctgcctttgaaaccaacacccagagctcacagcccaaaccccacagggttgatcacctgcttaaaaaaaatccacattctccatagaaattaaaaatggccagtgtcataacataatattcgaaatgcccatgatacaatccaaaacttcttagcatacaaagaaccaggaaaatcttaactctgtggaaaaagacaatccacagaagccaatgtcaagatgacacagatactgacattatcgacaaagaaagacgaaaacagccattatccaaaagttccaagaagtaagattgaacatgctggaaatgaacagagagacagacagtcttggccaaaaagaaggaagatatttcagagaaccaaatagaaatttgtgacagaaatacattaactgaaataaaaagctcactggattytaaatcatctatgtagatactctgccctcaaggagaaaactataactccacactccttaactgtgagctgtgcacagtgacttc

SEQ ID NO: 174610 - DNA, 458 bp, Homo sapiens
ctttttacacactgatataaattttagaatcaatttgtcaaggtscacaaaaaactcttttggaactttgattgggttttcatttaatgtataaattagttcaggaggaaatgaaatctttataacgttttgttttaaaactcacaaacacagcatctctctatttatttaaatcatttttactgcctctcaataaagtttcaaaattttcccatagtattttaaaacacattttattaaattattactggctacttactagtgtatgattttgctgttaatggcagttttttaaaagtacttttaaattatgtcttgttaacatatagaaatacaattcatttttatttttactcaatatacaccaacctcatagaactcgattaatactaacattttatgtgatttttccatacataatcatattatatctataatgtgtcatatatatgtgtcta

SEQ ID NO: 174611 - DNA, 566 bp, Homo sapiens
tcccaatgacacaggtcaaaatgtactatcataaatagtcacacaaagggaggagatgctatgaatctagtttctacagctgccactaagtcactatggggcacactcctttcctttgtgaaacagaycaaaattctgatgcccatagtaagctatgcctactgaaagatgcaaaggcccataaacaaagcgggaaggggcaaacagcggaggtcctggagtgggcagcatggggtgggcagaggagtgtcaaggaatacattactgggaggtatgtctggaaacaccttggaaagatgaacggccatcaggtggacaaaggagagaaggatgttatgggagacgaaacacttgaaactttcctttgttcttgtctgaccacttccagatagcaagctccttgaaagcaagatttcattagtttacttgccccttccttggtccctaaagtatgaagacacagttcatatgaagacacagtccctactaaataaagacttattatgaggaagaaaagaaggacaaaacataaggaaagaccattcagtttggggacatggaaaatc

SEQ ID NO: 174612 - DNA, 428 bp, Homo sapiens
acattatagtttgttggagatcattgatttgattagctagtttctggtctatattagtttgggaattccacagcagagtagaaattttctgccaattatttacatagtctgctgtttgtactgtggaatgcaaagcaactccagctgccgtggcagtagctgtgacagcaatcatcccataatgactaaaattaaagcagcaatttaacgccaagagtgcctcaaaatcttttgaagaatttcagtaataatatgcacagaargagaggctttccaaggacgggaaagccttacaggtatccatactccttctcgggctcttaccactaaaatagaatgatcaggattatacagggaagaattcacacaagaaaacaatctacattcttgacaaatcacatcaaaaagctcctctttttgagctgaag

SEQ ID NO: 174613 - DNA, 545 bp, Homo sapiens
ggaggccccagacacacctcgcggctggccctggatggacttttcctcctacccaagactgctcacagaggcaaatcttgagtctgtggggatggcaagacccaaactctctgtgtcctcattcatacttagaaatgtctcctctagaaattaactttctctgaaaactcagcaacataagttggtgtttctcaaagtctccatactgcctgagaaaggagaagaaaaatgagataataatacacggccacactaggctaatttcaaactgtgataacctttcaaacctcttctccctaccctgctccattcctgcccctggagactctagcctgctgcttggcaaattaaacagatgggaaagacagctgccatcttgagcctgcagccttcccctcagctgcccggtgtctgtctrcacttccgagtcatcgcctctttgaactggaagagagcagcccctcatggcatgggccataggcctgaggctgcagaggtgactgggctgatccagagtccccagcaagctgtgcagagctgaagaa

SEQ ID NO: 174614 - DNA, 542 bp, Homo sapiens
cttttagtaaagctcataaatgtccatggtgtggtgagcctcatctaatcagttgaaggccataagagcaaaatctgattcctcaaagaagaaggaattttgcctgaatttgcagcctgcaggcctaccctgtggatttaggacatgccagtctccacagtactgtggtgtgtgtgttgccatatatgtatctgtgtgtgtgtgtgtgtgtgcacatctgtatggagaaccctaatacagcaccttacacagcacacagtacctggtctgtaagaacaagacaataaattttagctgaatctgcatcagctttctgtttatactgctttagaagtatccactcattatttgaagaagtgtgtgttagatgcttgccttaggcagaacattatawgttctccaaaggtataaaattgttttctttccttaagtagtttccaactttttgtttccaaggcaacaaaaaacattgtctcattcagttttgtgttgctataatggaataccagagactgggtaatttacaaagaatagaagtttac

SEQ ID NO: 174615 - DNA, 588 bp, Homo sapiens
tgggaattacatttcaacatgagatttgggtgggaatacagatccaaactatatcacaatggacacctcattcctacagttttggtgaaaaccttagatacaggcaaatgagggtgcatccatagccagtccctgggcatcttccctctctcatacgtagtaagaaggttgtattagtccgagttctctagagggccaggactaataagatagatgtatatatgaaggggagtttattaaggagatttgactcacacaatcacaaagtgaagtcccacaataggctgtctgcaagctgaggagcaaggaagcccgtctgagtcccaaaacctcaaaagtagggaagctgaaagtgcagccttcagtctgtggctgaaggcccragagccccctggcaaaccagtggtttattaggtccaagagcctaaaagctgaagaacttggagtctgatgtttcagggcaggaagcatccagcacaggagatagatggaggccacaagacttaaccagtctaatccttccatgttcttctgcctgcttttattctagctgtactggcagctgatttgattgtgcacaccaagatt

SEQ ID NO: 174616 - DNA, 481 bp, Homo sapiens
gtctaatccttccatgttcttctgcctgcttttattctarctgtactggcagctgatttgattgtgcacaccaagattgcaggtgggtctgcctctcccagtccactgacccaaatgttaatctcctttgacaacatcctcacagacacacccaggaataatacttgcatctttcaatccaattaagttgacattcaatattagccatcacagacatgcaaaaaggatgttaactagcttgtttcatcttctaatggtcttatctttccctattggaatattttctgcaaccagatattaagattttatagaatgaaaaaacaggggctgctttttagaattggacatagaatttgttgcattattttctgctggtagattggatcttactggtgatttttgatgtgttttacagcttaaaacctcttttgtaggtgttatttttcagctgttcaacaatatttgaataacctaagctatt

SEQ ID NO: 174617 - DNA, 456 bp, Homo sapiens
gtatagattatgccttgttaactacttgatctcagtgtctgtcccagaatagcwgctccatacacattgtcaatggaaggaagaaataaatgaataaatggccatagattgtcacatttttgccttgcagctaattataaaaatgacctcttagtttcccaattcacttgtacccttctcagaaataaatttcatgtatgagaaccaagccaccaaactaaatgagtagacaattattccatgactgcattttaaatattcctgaaatagtattcttccaaatggtgtatgcttcagccaaaatagttcaaaagtgacttctactttttcaaaattaacaaaaagccattagagatggaaaacattagaagacaaataaacctcaccttttcaagtattttattttccaaatagacaatctagaggcatcatttttcaatttacggtagacctcat

SEQ ID NO: 174618 - DNA, 562 bp, Homo sapiens
gagccaagatcataccactacactccagcctggaagacagagtgagacttcgtctcaaaaagaaaaaaaccttgcttcactatattgaagatatcctttccagtctatttttcttactaaaataaaagctatgtgaaggcagggatagactcatttatctttgtattccttgcttctaacaaaatgccctgcaaattgaaaggtcttcataatacagttttgaaataaatattattctttattattcttaaaaagaggcaaattatttgagaccatgctgtgaactactcaatacttttagaaaaagataattcagcagagcttctcaatggtttataatgcctccaatttttatttgtatacaaaaatataccttcttgccacatsatttccataaattgctaaaacattaaaattatctaagcatttgaaaacctcttaccctgttaagcaaacatataaatcctgtaaaaagttggatttgcatttaaatactgtgaacatgtcatataaggctggtgttctacactaatgttccagggatgataagaaaggaaaacat

SEQ ID NO: 174619 - DNA, 516 bp, Homo sapiens
gactttggtgccaaggaatccccctcacttgttcctcttacactctattcttcaataagaccaaatgactcaatgtgactggttggcccgtggcatgagctatctgtagcttgaccaattttgcaattattaatagtgccactttaactctaaaattgcttgccatggtttggatgtttgaccccttcaaagctcatattaaaatttgacccccagtgttggaggtgtggcctagcaggaggtgttttggttatggtggtagatcccttgtgaaygtcttggtgccacccccacagtaatgaatgagttctcattctattagttccctggatgtttaaaagagcctggcactccccccccactctctcttgcttcccctcttgccatgtgacctctgcacaaaccagctcccctttgccttctgtcatgagtagaagcagcatgagacccttactagggactgagtagatgctagcaccacacttctcatacaatctgcagaactgtgagccaaaa

SEQ ID NO: 174620 - DNA, 415 bp, Homo sapiens
gcccaggtattcaagcaaatattaatggggttccagaggcactctccccaaatatggctcattggcattttaaaaaatagcagaagcaagaatgtcactctgaccttccctattttcccctgaagtagatcataagacctggaaatgaattgctgatcttctcctgaastaggtcatcagaccttcaggtgagaggtgctcactctatacccagaggaaaggaacaaatttacctttgaagacacagggacacagagaagaatctgaacaaacaggccttgctaagtttcctccaaactagtaccattagatcataccccatttgtctaattagactctctgcaactatccacttcatcaaacttaggcttaaaatacacacgtttgtttgtttcataggatctttatttctgag

SEQ ID NO: 174621 - DNA, 596 bp, Homo sapiens
caaatttacctttgaagacacagggacacagagaagaatctgaacaaacaggccttgctaagtttcctccaaactagtaccattagatcataccccatttgtctaattagactctctgcaactatccacttcatcaaacttaggcttaaaatacacacgtttgtttgtttcataggatctttatttctgarggctgtcatctcacataaagcttattttaaataaattgcatgcttttctcttgttaatctgtcttatgttataggggccttagccatgaacataagatgggaagaagatatgtctccttccctacagagagaatgtgttggcagaggctgaagagattgcaaagtgagaatttttttacttggttttcagaaacctgtggttgctattatcttcttgccatttcaagtcaagtaagtggaggccttaaaagaaccaaatagctttataggcatttcctggagtttgaaagacagagaacctagcattttacttttgtctgaaaacttaaaggtaggaagctgtggctaaaacatccttgtctggaaataaaacagaagggcttgctttgaaaatggaatgaaaag

SEQ ID NO: 174622 - DNA, 596 bp, Homo sapiens
caaatttacctttgaagacacagggacacagagaagaatctgaacaaacaggccttgctaagtttcctccaaactagtaccattagatcataccccatttgtctaattagactctctgcaactatccacttcatcaaacttaggcttaaaatacacacgtttgtttgtttcataggatctttatttctgagggctgtcatctcacataaagcttattttaaataaattgcatgcttttctcttgttaatctgtcttatgttataggggccttagccatgaacataagatgggaagaagatatgtctccttccctacagagagaatgtgttggcagaggctgaagagattgcaaagtgagaatttttttactyggttttcagaaacctgtggttgctattatcttcttgccatttcaagtcaagtaagtggaggccttaaaagaaccaaatagctttataggcatttcctggagtttgaaagacagagaacctagcattttacttttgtctgaaaacttaaaggtaggaagctgtggctaaaacatccttgtctggaaataaaacagaagggcttgctttgaaaatggaatgaaaag

SEQ ID NO: 174623 - DNA, 525 bp, Homo sapiens
aagactttaaagtgggcagacaagattgcagcacttccttttaatagaatgctgggcattgtctagaaaacaacgtacgaattttctgattctatagtgatctttgccttggattatttcacttggttaatttgtagctctgtagagatgaaagttaactagtagaaaactgatggtaatgcaagtatttcctgcctatgtctttgcaaatgattcccgttcatagaaatgcaaaatattttttacaagtagacaatacaaatttctatcaatcaaatcctcagttgagcagtttgaaacatcttaccaatgccctcattaattcatgagttatctatatttgtgtgagagggatgacttaacttactttttaaaaatttctcttttargaaaaggcagagagagctggtaaaaggtattaatcactcagagctctggattttctgaaagataaccaaagtaatgaaggctatctggttgggatctgagtagagaaacaatgttgattaagtgattcaccaaatg

SEQ ID NO: 174624 - DNA, 669 bp, Homo sapiens
gatgttgtgtgcctttactggttgcaattttattcactcgtatcgaattgggcttgcagtttttattctgtgttgccccctttcattagaaacactatgactaaggtttaactaaagtagcttcaggctgcaccagcaaagttgaattgactytgcacagcttgacttcttcaagtctttggataattagctatgaacagctagttcctggggcttgtggtccatcaggctatttttaaaggtgcttatgtttcaaaggaaaacaccatggggtatagcccatgcattgccttctaccattttgtgtttccccagatttttaaaataaactccaaatccgtcttctgtagaaatgcttcctaaagaaacttctgctccccatggcattttgtgtaccttacatgtaactaatcttttaatatatagttacaggttatgttttcttttattgttgctgttgttatatttattttgctcttcctatcactcccttttactctagattcttcagttagccatttgtttctctattgtgagcactcaagttgagagttttggttaaataaaaatggtattggagcaaagaccactgacttcaaaattacttacatttacaatggagatcctcatttacatcatatcaaatgagtaaatatttgcaaaaagaat

SEQ ID NO: 174625 - DNA, 544 bp, Homo sapiens
ataagtttcagattgtgtactgttgtgagtaccatggtgaaatcttgtatagttatgtcccrgacgtaaatcattcctttgtccagtatatccatgccgtatatgctatctgctcattggtgtgttagtagccatcttggttatcaggtggagtgtcatggtatcacagtgcttgtgttcacataacctttattttatttaatggtcccaaagcacaagaagagtgatgctagcaatttggatatgccaaacagaagttgtaaagtgcttcctttaaatgaaagcgtgaaagttctcaacttactaaggaaaggaaagatattttatgctgaggttactgaaatcagtggtaagaatgtattttatatgtgtgacagtgtgaagaaggaaatatatatgtgtacaatgtatgtagtcatccctcagtatctgtggaggattggtttcagggcgctcttgaagatacaaaaattcatggttgctcaaatcccatgtataaaatgatatagtatttgcatataacttacgcacatcctcctgtata

SEQ ID NO: 174626 - DNA, 544 bp, Homo sapiens
ataagtttcagattgtgtactgttgtgagtaccatggtgaaatcttgtatagttatgtcccagacgtaaatcattcctttgtccagtatatccatgccgtatatgctatctgctcattggtgtgttagtagccatcttggttatcaggtggagtgtcatggtatcacagtgcttgtgttcacataacctttattttatttaatggtcccaaagcacaagaagagtgatgctagcaatttggatatgccaaacagaagttgtaaagtgcttcctttaaatgaaagcgtgaaagttctcaacttactaaggaaaggaaagawattttatgctgaggttactgaaatcagtggtaagaatgtattttatatgtgtgacagtgtgaagaaggaaatatatatgtgtacaatgtatgtagtcatccctcagtatctgtggaggattggtttcagggcgctcttgaagatacaaaaattcatggttgctcaaatcccatgtataaaatgatatagtatttgcatataacttacgcacatcctcctgtata

SEQ ID NO: 174627 - DNA, 544 bp, Homo sapiens
ataagtttcagattgtgtactgttgtgagtaccatggtgaaatcttgtatagttatgtcccagacgtaaatcattcctttgtccagtatatccatgccgtatatgctatctgctcattggtgtgttagtagccatcttggttatcaggtggagtgtcatggtatcacagtgcttgtgttcacataacctttattttatttaatggtcccaaagcacaagaagagtgatgctagcaatttggatatgccaaacagaagttgtaaagtgcttcctttaaatgaaagcgtgaaagttctcaacttactaaggaaaggaaagatatyttatgctgaggttactgaaatcagtggtaagaatgtattttatatgtgtgacagtgtgaagaaggaaatatatatgtgtacaatgtatgtagtcatccctcagtatctgtggaggattggtttcagggcgctcttgaagatacaaaaattcatggttgctcaaatcccatgtataaaatgatatagtatttgcatataacttacgcacatcctcctgtata

SEQ ID NO: 174628 - DNA, 574 bp, Homo sapiens
gttcaacagcagactagatcaagcagaagaaagaaccttgaaggtttctgaaatgactcagaagagaagaaaaagaaaaaagaatgaagagagcctatgggacaccactaagcaaacaaatattcacattgtaggaatcccaaagggggaagaaacagaaaagctttatataaataaaataattggtaaaaacttcctaaatcttgggacttaggaagagagagagatctacatacaagtcaatgaagctcaaagatctcagataaactttagaaggttctctccaaggtacattataatcaaactggcaaaagtgaaaagacaatgaaatagttttaaaaacagcaagagaaaactgtctagtcacatataaggggatgtccatcagagtatcattggacttttctgcagaaaccttacaagcctggagaatgggatgacatattcaaaatgatgaaagggaaaaaaaaaaaaaaaaacctgccggctaagaatactataccaaggaaaactatccttcaraaatgaaggagaaataaagtcttccccagacaaataaaagttgaaggaattc

SEQ ID NO: 174629 - DNA, 574 bp, Homo sapiens
gagaaagccttagagatcatctgatccatcctccacacttttcagatgagaaaagtgaggcccgtggtgcttaattgacaggaccatagccaaatagagccaccacaaagcaggagtaagctcacgtttcttgaacctgaccatgtggaactttcaaattgccttttttctgtgcggaactagagcctcactgaaaataccagtggtttacaataagaacagctgtttagtttggggaacatttttccaaatagaatcttctttttctctctttctcaattctttttttttttttgagatggagtcttgctctgtcactcaggctggagtgcagtggcacgatctcagctcactgcaagctccgcctcctgggttcacgccattctcctgcctaagcctcccgagtaggtgggactacagacacccgccaccaygcctggctaattttttgtatttttagtagacggggtttcaccgtgttagccaggatggtcttgatctcctgacttcgtgatccacccacctcggcttcccaaagtgctgggattacaggcgtgagccaccacgcctggct

SEQ ID NO: 174630 - DNA, 597 bp, Homo sapiens
agattatttcttcacccaggtagtaagcatagtacccaagaggtcgtttttcgatcctcttcctcctccctttctccaccctcaaggagggcccagtgtctgttgtttctttctttgtgtccatgtatactcagtgtttaccccccatttataagtgagaacatggggtatttggttttctgttcccgttagttcacttaggataatagcctccagcaccatccatgttgttgcaaaggacatgaccttgttctttttcatggctgtgtagtatccatggtgtatatgtaccacattttctttatccatttgatgggcatttaggttggtcccatgtctttgctattgttaatagtgctgcagtgagcatacacatgcatgtgtctttatgataaaattatttctatttctttggatatataaccaatgatgggattcctgggttggatggtatttctgttttaagttctttgagaaatcactacattgttttccacagwggctgaactaatttccattcccaccagcggtgttaagtgttcccttttctgtgcaaccttgacagcatgttattttttgaatttttaatagtagcca

SEQ ID NO: 174631 - DNA, 553 bp, Homo sapiens
tataacccaatacaacatgtctagctttccaaagaaaattataaggcatgacaaaaggcaagaaaaaatcacagtggcagtgacaggcattcattagaaccagactcagctatgacacagatgttagaattatcagacttggggtggggtgggaacaaggaattagtcaaaggacacaaaattttagttagataggaggaataaattcaagagctttattgtacaacatagtgactatagttaataatatattgcattcttgaaaaatgctgagagtggatgtaaagtgttctcaccacaaaaataataactatgtaacataatgcatatatgttaattagctagatttagtcatttcacaatgtatatataatttaaaacatcatgttgtatgtggtagatacattcaactttgtctgtcaattttaaagctttttttaaaaggaattatcagggaattgaaaattacaattaatttatgttcaagaacttaatatattcaggacactaatttaaaaaagtagacamtatgtaagaggcttagttatcaccc

SEQ ID NO: 174632 - DNA, 344 bp, Homo sapiens
ccctacctccaacattggagattacaatttaacatgagatttagaggggacaaataaacaaaccataacasggttggaattaacttcttccaaactcctgttaatgttgatattttgacatcctcccatgagtcatgaatgttcttaatggcatctagaatggtgaactctttccagaaagttttcatcttactttgcccagatacatcagaattcctatctatggcagctgtagccttacaaaatatatgtcttatgtaatataacttgaaagtcaaaatgactccttgatccatgggctgcagaatgaatgtagtgttaacaggcataaaaacaatattaat

SEQ ID NO: 174633 - DNA, 445 bp, Homo sapiens
ctatagagagtttttttgttgtktgtttataatgagacaggctctcactctttcacccaggctggagtacagtggcatgatcatggctcactggagcttcaaactcctgggctcaagaaatcctcccacctcagcctcctgagtagctgggactacaggtgcatgccaccgtgcctgactaatttatttttcgtagagacaggggctcgctatgttgcccaagctggtcttgaactcctggcctcaagtaatcctcccaaagtattgggattacaggtatgagccaccgcacccatccagggagtttgattcttgcaagatatcttctaaagctctcaaaatagtcttgaaaaactgcagtgcagttgttctccattaaatacacaatagagcatttttttgcctagaattaccataaaaataattcaatatataaattgaattc

SEQ ID NO: 174634 - DNA, 445 bp, Homo sapiens
ctatagagagtttttttgttgtgtgtttwtaatgagacaggctctcactctttcacccaggctggagtacagtggcatgatcatggctcactggagcttcaaactcctgggctcaagaaatcctcccacctcagcctcctgagtagctgggactacaggtgcatgccaccgtgcctgactaatttatttttcgtagagacaggggctcgctatgttgcccaagctggtcttgaactcctggcctcaagtaatcctcccaaagtattgggattacaggtatgagccaccgcacccatccagggagtttgattcttgcaagatatcttctaaagctctcaaaatagtcttgaaaaactgcagtgcagttgttctccattaaatacacaatagagcatttttttgcctagaattaccataaaaataattcaatatataaattgaattc

SEQ ID NO: 174635 - DNA, 445 bp, Homo sapiens
ctatagagagtttttttgttgtgtgtttataatgagacaggctctcactcyttcacccaggctggagtacagtggcatgatcatggctcactggagcttcaaactcctgggctcaagaaatcctcccacctcagcctcctgagtagctgggactacaggtgcatgccaccgtgcctgactaatttatttttcgtagagacaggggctcgctatgttgcccaagctggtcttgaactcctggcctcaagtaatcctcccaaagtattgggattacaggtatgagccaccgcacccatccagggagtttgattcttgcaagatatcttctaaagctctcaaaatagtcttgaaaaactgcagtgcagttgttctccattaaatacacaatagagcatttttttgcctagaattaccataaaaataattcaatatataaattgaattc

SEQ ID NO: 174636 - DNA, 563 bp, Homo sapiens
aagagtaaaaaagggatagattcaacttcataggtttagtgtagtgtttagtgtaaagattaagtgaaaaagagcatgaataatataacacagtccatggacagcacctacctaacatttgcttccattcttctacattttctctaggcactcatatagattccttggcctgtctttctctctgcccccattttgatggtatttttgtcattttgtccacaattctatatattaattgttcctttgagctgattcacctaaatctcaatgtttcttgcttatggagctactgtttctgacacagatgtcaccatcctaccttacagtctatcttgctgagggttgtctttttgccctgctgcttaatcctctcattttccccaaagataaaagcaaaataaacaaacaaaaatctgatgcatgctgcaagccttatctgaatttaggcataaataaggtcttggaagaatgattcactctgttatctcaccttagmtagtgactaactagcactgagatcaggttgctactaatagagactggcaagacccctgggtcaggat

SEQ ID NO: 174637 - DNA, 608 bp, Homo sapiens
ctctaagttttttttttccaggacaacctagaaaaaaatatctctttagtttctacagtggcagaaggtaatgtgatttaccaatttaattacttcatattacaatatagtgaccatttatatcagtgtatagtacaaatatgtatactgtggtcttactactgattatcttattcttatttattgcctctccaacaagatgttatcacccatagacaagaatcatattttatatatctttataacccaaagtgcctttttaaaattaatgtatcatgtttgttttcctggaacaggaactgaaatagagagtatgaattcatttgtaactgagtctttgctgtaatagttatccccagcatccttgctaatacagagaatgaggccttaatacctaaagcagccactgtrtgtgattaattaacttctctcctatgcatcttgacaggtagtgggtatgtgccattcttgggagaactgggaaaatggtcactgaaatcatttttgttgtgtctagttccaatgagaaatgccagccgggaaaggctgctacagtatgtagcaaggtgcttttgctgaaataataaaagtatttgcaaggaaatact

SEQ ID NO: 174638 - DNA, 618 bp, Homo sapiens
gaaacacggagaggaatgttaagtgataaatctgcacacaaggacagggatcggaaatttaaaaaaaaagcattgcgtgctcttaaaaccaggttgcttttcctttatgtgtctgaaagctagacagatttttaagtagagaacacaagaaagtctgtgttttgaaaatatgtgtatctactgtttgtatggaaggagaaggatagcatcaaggattaaaaacagaacatcaagtagaagaccatakcccttggataaattgggcttaacctaagggaatttcagtgaggattagaaggaagggggatcatttaaggcctctttcagagacagagtcaataaggcttcagtgccaaactggggagatcttgaggacaatgtgcactgggaatatgactgtatgaagcctaacctgcaacaaataattaatcacattttcaaaactgtcttttcctaaagtggaaaacagcttcattgtgttacagatgctctttatatttgtaaaataattagaagagaaagagatggccctgtgtatatattaatgcagcaatagaaacctaattttgagcctggcacagtggcttatacctgtaatcccagcagtttgggaggcca

SEQ ID NO: 174639 - DNA, 426 bp, Homo sapiens
atacttaccagaacagttactacacgtagaaccactccacgcatgttattctccaatttcttgtcagtcagtgacccattcagacctgtgacaggattccagcamccaagctgaaagataagacaactttggtcatttttctgcctgaagaacagtcccatcacctctgtatagtctttatggagaactatgtgatagctcttagaataattggtatggaaagagtactgcacaggttttctttttaaataggaaatgaagttattagatatgccatttcttgctcttaaatatcattatatggcacatgacagtacccaatgtgctttaggaggctcattgaggacattttacttaatgaggacttatgtatacaccaatcactcagtcccagtaatgtactaattggaaaaataatagcacata

SEQ ID NO: 174640 - DNA, 441 bp, Homo sapiens
gcacttcatcaacttctaaaacttttgttctatgatgaaccctataaagaggatgaaaatacaagctacagcactatgagaaaatatttgcaaaccacctatatgacaaagcctttgtgtctggactatgtgaagaactcttaatagtaaacaacccacttagaaaataggcaaaaagcatgaaaacacctttcatggaagaggataaggattacaaatgagcccatgaacacatgttcaataccactacacactattaaaatagaaattaaaaccacaatgagacatcmccacatacctatcagcaaggctaaaaaaaaaaaaatgataccaccaaatgctgacacagatgcacacacccttgatctctcatacaatgcaggtggaaacacaaaatggtacagccactctggaaattagtagggcagtttcttaaaaaac

SEQ ID NO: 174641 - DNA, 347 bp, Homo sapiens
acactttaatatggcttcgttgccctccattatctgtttgcagtttacatatttttatccttatttgatatcgcaatataacatgtatacagaaaaaagcatgamacattaattaataagtagtaaagtaacatccagaaaacactactcagagcaaaaagcagacgattgtcattaccacagaaaccacctccccagtgcatctttctgatcagacccttcccagcatcccagagtctaaccacccagagataatcacttcctctattttctttagattgtctccagctacgtgtgaattcttaaataatatggtcaatttacccatttttgaatgttatgtaaat

SEQ ID NO: 174642 - DNA, 521 bp, Homo sapiens
ggcacataaaccagtccctaaaactgacttcatgttttttttaataagatacttcagtgacttggaaaacttaacacaagggagtccttacttgtacatagccccaaaatctcctgtttcacagaaaacactattttgttctcaatgaaaatggacaatacctgcataccacctstggtacaatatttctctatgtaataaaacacttctttttcattttcctcctttagccttctctttgtcaaattaaatactaaattattttagttgttatctataagatatattacttccatttttagactgttattaactaaaccatttttttttctcttgtattttagtttttgcataatttgtgaaccttctaagtaggtcatggtagtctttacaaggcttgaacaacttacatgctgctaggttactctggtcattttaaaaataaacactaatgccacatttcagatttataattgacagatggtttatactgaaattatcataggtatacacaaatatac

SEQ ID NO: 174643 - DNA, 509 bp, Homo sapiens
  misc_feature (1)...(509): n = A,T,C or G
nnnnnnnnnnnnnttttgattttacttcttacaacagaaaaattcaaatctcaaactccttttggcattcaatggaactaatttgtattcaatgtttcatttacattaaatgtattttatagttattttctattgaatgcaatgacattccttttaagttgcattagtgaatattaccattattaagaataatataaacccttctgtaatctgaatttcaagcattccaatctcctatgccatcttcaatcttttgaccttcctccctccatcaagcctgcaatccctctgggatctaagatgcactgaccctgcctcatttttgctgtccctctccaccctcctagaaacacttccttcttaaatttagtaattgaaacagaaccataaaaatgagattctgagattggattgctcccatatctctgtagcacatattgatgggaaatggaactgtgacaatttacagcctgtggttacattayaattgtttaaataaccaccagagt

SEQ ID NO: 174644 - DNA, 595 bp, Homo sapiens
actctagtctattgattgaaagctctagttcatctaatagaattattatgacacatcactccaactacaaaatcagtcaaggacagtcccagaagttaatactcttccaaagactgatgcctccactgagcacctctaggaagtatgagatggkgttgcatcacttctcactaagttcttataaccccacatccaatatatcaacaaatttcatcagctctaccttcaaaaattacctagaatccaattatgtcttattaaatccattttactgccaagtcacttctgatttattgcaaaaggctcctaattgatctcccagcttcttcacttgcctcttccagtctattgtcaatagtaactgtcaactgtgtagtaaactgtgaaaatatatctgatcatgtctctcctctgctcagagcccatctggcttcctatcttagtcaaagtaacagctgacatcatcatagtggcctaaagactctagtgaagctctgccccatccaaatacattgcctctcagatatttcctaatatgtggctctagcttccttggtcctagccacgctagtgtctcttctgtctcttaaacaag

SEQ ID NO: 174645 - DNA, 595 bp, Homo sapiens
actctagtctattgattgaaagctctagttcatctaatagaattattatgacacatcactccaactacaaaatcagtcaaggacagtcccagaagttaatactcttccaaagactgatgcctccactgagcacctctaggaagtatgagatggggttgcatcacttctcactaagttcttataaccccacatccaatatatcaacaaatttcatcagctctaccttcaaaaattacctagaatccaattatgtcttattaaatccattttactgccaagtcacttctgatttattgcaaaaggctcctaattgatctcccagcttcttcacttgcctcttccagtctattgtcaatagtaactgtcaactgtstagtaaactgtgaaaatatatctgatcatgtctctcctctgctcagagcccatctggcttcctatcttagtcaaagtaacagctgacatcatcatagtggcctaaagactctagtgaagctctgccccatccaaatacattgcctctcagatatttcctaatatgtggctctagcttccttggtcctagccacgctagtgtctcttctgtctcttaaacaag

SEQ ID NO: 174646 - DNA, 595 bp, Homo sapiens
actctagtctattgattgaaagctctagttcatctaatagaattattatgacacatcactccaactacaaaatcagtcaaggacagtcccagaagttaatactcttccaaagactgatgcctccactgagcacctctaggaagtatgagatggggttgcatcacttctcactaagttcttataaccccacatccaatatatcaacaaatttcatcagctctaccttcaaaaattacctagaatccaattatgtcttattaaatccattttactgccaagtcacttctgatttattgcaaaaggctcctaattgatctcccagcttcttcacttgcctcttccagtctattgtcaatagtaactgtcaactgtgtagtaaactgtgaaaatatatctgatcatgtctctcctctgctcagagcccatctggcttcctatcttagtcaaagtaacagctgacatcatcatagtggcctaaagactctagtgaagctctgccccatccaaatacattgcctctcagatatttcctaatatstggctctagcttccttggtcctagccacgctagtgtctcttctgtctcttaaacaag

SEQ ID NO: 174647 - DNA, 521 bp, Homo sapiens
ctactgtcgattatagctttaaggaatatggcacttttaaaaggtaactagtttatagtctgtatctgagacagccttgggaacaggaaatgagaaccgactgtggctgagtcaaaacactggcctcctctacccaaggcacagctcagaggggtcactcagactacagcctcataagccagagacattcagtgttcgtttcctagggctgtcataacaaattaccacaaacctggtggtttaaaacaacagaaatttcttctctcacagttctggaggccagaaattcaaaatcaaggtgtcggctgagttgcttccttctggaggctgtggggaggattactgtctcatccccagctcctggtggctggcagcaatccttgctgttcyttgttttgcaggcactgcacaccaatctctgctccatctctacgtagccttattttttttaggctctcatctcaatccttgttagttacatatgcaaatatcctgcttctgacgttccaggcaaacatgca

SEQ ID NO: 174648 - DNA, 596 bp, Homo sapiens
tagaaatatcaatgctgggggcttggtgagattttataaagtctgatccacatatctgagcctgactttcagcagcaaaattcaggaggctctactttcatgcttttctacccagttccatttttaaataattgataggtaaaaggaaaagaaaggaaaatctaataggaggctgctctatgccmagttacatgctaggtgttcaattatgttttatctcatactcataacaaccctatgaggtagcacaattatctcttatttacaaatgagtaaactgaggcttaaagtggctaattcaatttgttcttctaaggtacagaacagaattcagtccaacatttttgaagctgcgaagctcatgccttttcaccatgccatgtggctttatgatatttgaatacaaaaatggcctaatgtaaataagccaaaataccataattactactagttaaaaatactcattttttaatttatgtacaagctaaaaatgtttctttggatctcctgaagaactcactgggggtgtatattgtttgaatttggtttcctgcaatatgcttagtggtttcataaggttttaactagtgcccatc

SEQ ID NO: 174649 - DNA, 441 bp, Homo sapiens
aaacagaaaacaaaacaaaattacataatctgagcatcaaaaaatgtgcacacccagatggaatagaggttcaaaggaattctgtaaaaatcaggacagccctaatgtgcttacctgttccgtttggcttctaggagcatttgtctttgtggtaccatttctgcattcctcttgtctatctcactctggtaagcaagaaaaccaaaagtayagaaacattcttttcaggtgcttaagagagcaagagtctatgtattccaaatgttgactgccacagagataaagcgtgccaaaacaccagctatacatgatcttgcttccaagtctctggggatgaaaaccttccagattaagactgaatcagccagaaagcagagaagatagattctgagcagtacttgttatgggagaaaaatacatttttttattttttagacttac

SEQ ID NO: 174650 - DNA, 202 bp, Homo sapiens
gaattccagaaggaactactgagatgcaaagaagcacagcagcttttgcacacatgcgtgggattagatggaaaacaagtggattgagggtctgccaatgaaagcgacccrtactgaagtccactggctctggttgagacccagaagagtcatgcatcagaataaaggtggacaggaaataccctggcctttgtagggactg

SEQ ID NO: 174651 - DNA, 202 bp, Homo sapiens
gaattccagaaggaactactgagatgcaaagaagcacagcagcttttgcacacatgcgtgggattagatggaaaacaagtggattgagggtctgccaatgaaagcgacccatactgaagtccactggctctggttgagacccagaagagtcatgcatcagaataraggtggacaggaaataccctggcctttgtagggactg

SEQ ID NO: 174652 - DNA, 569 bp, Homo sapiens
atgcacagttttcacaaccttcttcctactgggatagagttaagaggttatagggattttatttgtctgtttgctaggtatcaaataatcacaagcttttacaggttagggccatgaccactaattgaaatgactatcctttctcatttgaattactttggcacctcatctgaaatcaactgactatacatgtatgaatctatttttggactctgtatcttattctatctatctatctatctatctatctatctatcttctatctacttacctatccatctattcattcatccatccatccgttcatccatcaatccatccatccatccatccatgcatttatcttctctgtctctactcatgctaataccacactgtcttaattatcgtagttttataataaggtttcaaataagttggtgcaaagtcttgcaattaaaaaagtatagtttgggataatmaagttcttttgaatccaaaatcaattggccatacatgtgtgaatctatttttgaactctgtatcttattctatctatctatctatctatccatccatccatctgtcat

SEQ ID NO: 174653 - DNA, 655 bp, Homo sapiens
cttgagagaacatcaacatcctcaccaaaggtactattccatgcttctcaagtccccgtctctcaacagggtttccactccctgccacacttgtcacctggactccaacgtatcactagttctgaatctcaaaaagactagcatacagtcagttccctcagctactttgctccactcattttttgcacaaaaaactatgtaaaaacaaagcaaaataaaaacataacactcaactccaaagatttagcccccatcctggacaagtgtcttttctgtatgtagggatcctgggtggagacccttgagttttgagcctccaaaacatctgcatttaggtgaatgcggtggttgggcacttgctttatatttgcataaaaatgaggcattcctatagttctcataaacaaagaaacacctttatccaaagggaagagggaagaatgaggtcagattctggaactgacctggattctggtgttcctgagttaatatttatttagcctgagaggtgactgtgcattcacaatgatttatctccaagacatgtactgtaagccctcacttatcatcatcwataggttcttggaaactgtaactttaagtgaaatgatgtataacgaaactaactttgccataatctaattgatataaacaa

SEQ ID NO: 174654 - DNA, 590 bp, Homo sapiens
ggctgttgagactctgcacggttccagggttgggactctaggccctggtggcgtgggctcacaagcaggatcttctgatccgttggttgcacagttccatggaagaagcatggtttccccggctgggtagcatgctcactcaccacctccattggctgggggtgggggttcccctgcaccatgtggcttcaggtggaggctgcaccacactgctcttctttcctctccgtgggtcacgccagctgcctagtcagttctgatgagagaacctggataccttggttgctagtgaagaattcacaggctaattatggttctttttgaygggagcctccaattgccgctgtttctaattggccatctttgccctgccctccttcagttttcttcattgtagaggtcttgcatgtaaagtttcttaagctcaatttcactgcacagggcaagcagaatacatatttcagaagcttataaatttcccagaacagcaaacaagttcagcacactcggtgtgatatttagttctacataactttgtgttctgttaagaaacatcgtgaaagataagcaagtccgattacaaaatgcaa

SEQ ID NO: 174655 - DNA, 548 bp, Homo sapiens
aattagccataaaggagcttgtttgggtagtaggcaatcgatagaattgctgaagggttcatctgataggatctctaaaattaccaacctgataaggccaaagttttgatatccaagtaccttggtcattttggctattaaatcatactgtcaaaaaatgattctagtccattgctgtgaaattatcctaaaagtaactgaactgagaagactcaaccccgaagtgtggtgatracagaactgtctacttgaccaaagtgagcatgcctccacctatctcatgctttaaggctcagctcctggaacccactgcttaaactcgacaagtgttcagaagagagaaacatcactaacaggctatgaaaaataattctctgagttcaatgtcctgtttgagttcttggtaggctcctagggaaaccaggacagagcggcagccgggacaccaggaagctaagcagcaatacttgatgggaactctgagagaaaggtagagaaattctaaagacaatcttttcccattttgcatttttctggggactagttca

SEQ ID NO: 174656 - DNA, 437 bp, Homo sapiens
gaaattcacatcttctgggtagcccttagacatgacaaatgacaactgtagcttacactccagagttccccctaagagtcaggccaggcagaagccacccttctcaggacgctgcctgaagtcacacccttgtttgcctcctttgccttccctgtcctgcttcccaagttcccaatgagtttcttccgggctcagtttcttaataaatcaaggtctgctttggggccttcaacccacgaaaattgctgaccctactaccccygggtaatgttcagcaatttggacagctttatgttctgctctctatcactggggtttcttaagctcccacaaccaagaatttatgggaagccacggattttgctcaggggaaaaaaacaccatatatacacaatattctacatcatttcaaagagtttctgggtcccctgaaaccc

SEQ ID NO: 174657 - DNA, 437 bp, Homo sapiens
gaaattcacatcttctgggtagcccttagacatgacaaatgacaactgtagcttacactccagagttccccctaagagtcaggccaggcagaagccacccttctcaggacgctgcctgaagtcacacccttgtttgcctcctttgccttccctgtcctgcttcccaagttcccaatgagtttcttccgggctcagtttcttaataaatcaaggtctgctttggggccttcaacccacgaaaattgctgaccctactacccctgggtaatgttcagcaatttggacagctttatgttctgctctctatcactkgggtttcttaagctcccacaaccaagaatttatgggaagccacggattttgctcaggggaaaaaaacaccatatatacacaatattctacatcatttcaaagagtttctgggtcccctgaaaccc

SEQ ID NO: 174658 - DNA, 437 bp, Homo sapiens
gaaattcacatcttctgggtagcccttagacatgacaaatgacaactgtagcttacactccagagttccccctaagagtcaggccaggcagaagccacccttctcaggacgctgcctgaagtcacacccttgtttgcctcctttgccttccctgtcctgcttcccaagttcccaatgagtttcttccgggctcagtttcttaataaatcaaggtctgctttggggccttcaacccacgaaaattgctgaccctactacccctgggtaatgttcagcaatttggacagctttatgttctgctctctatcactggggtttcttaagctcccacaaccaagaatttatgggaagccacggattttgctcaggggaaaaaaacaccatatatacacaatattytacatcatttcaaagagtttctgggtcccctgaaaccc

SEQ ID NO: 174659 - DNA, 396 bp, Homo sapiens
aagtttgaactattctaaatgctcaaattgttactcaactcagatatggcaaaggaagcctaggtactgaccaatcctttttagcaaaagagttaggcatggaggacagggcctctcatcattgaagaggaagatgagactttcctgtgacccaaagtgtgattgaattgacgatattratgagttgatgctttcatgcaaattagactgtatgtactagatattgtgccactgagaccaattttggcccattcattagcagtgtctatatttcttctgtcattcactgagagtgctggctaatattttttcaggaaatattgaacactgtgtcaagggtaccatcaattcgagccttaataatcattatgtaagactgcttgtcattttagaaac

SEQ ID NO: 174660 - DNA, 568 bp, Homo sapiens
ctctcaacttttcaagacacagcccaagaggttgcatggggtaaccaaagtaacattttccattctggccagagcaaaatacatgtgatgtgacaaaacatagacattagccacttagtacccaatatcttactggcaaggctcaaacttgcccctggacaggccctgtcatctttaatccaacctccaatgaggagttccaacatgtggtctctgggcaagatggttgccctgaaaaacagaaaagagaaaagagagaaaaggagaaaagcattgcctgcgacagggtagagaaggcaaggagctcagggaggccagagaaagacctacccattggagcgacactgaatcaaaagtttaggcaaccacttgttggtygtgaagggattttttccagcagtcccatcagctctcaagtttcccctctggggagaaaaaagctctccatgtcccatggtcctgtacatgcctaatcctctcacccacagctgtcagcaaagagtgcaaggtagattaatgcaaacaaaatggcagttaacatcccatagtgccaaatccacccttagac

SEQ ID NO: 174661 - DNA, 535 bp, Homo sapiens
attttttaaactttcatgaaatttttcctatttgatttcaactatcctatgacatggattcttattcttaaatcattttgtcgatgcttccagggcaaagggatctttgtcttgcrcattctttaatgaaggttatttggaaggggctacgtgcatgccactgccttcaaatgaagttctgcagatggaaggagggttcacagggggaagagagaaatgagaagctggatcacactgtgtatttcattagtattttgtagaaagattatggttcagtgggttgagaatatcacatacatctatttttctaactggtgaataaattcaaagcctgtgcttaaactaacttcaattttgaagatataatttgaaagccttcagtgtacacatggctgcatgtacttgcactgccctggattgaatatgtaaagtcataactcattgtgagaggcagtgcagggtaaagaatataacactggccttacagaaaggaaaccagaaccctaaacgatgtctgccaccagctggttttgtg

SEQ ID NO: 174662 - DNA, 594 bp, Homo sapiens
tctgatgatggacatttaggttgttcctatcttttaggtgttatgaatgaatagtgctgttatgaacattgctgttcaagtatccttggtgttttcaagttttgggggtatatacctagaagtgaaattgttgggtcatatagtaattctagtttaactttctgaggaaccaccaaactatttccactgtgggtatatcattacacattcccaccaacaatgcccaagtctttcaatttctacacatctgcaccaacactagttcttttctttttttttttaataatagccagcctaatgctggtaaagtggtatcttattttggttttgatttgcatttttctaatgtctagtggtgtttaatacctttttatgtgcttattggctgtttatatatcttctttggagaaatgcctattcaagtcctttgcccatttttaaattggactgttttttcattgatcagttttatatattctgagtattaatctcttatcagatatataatttacaaatatttccttccattctaycagttgccttttcactctgttgatagtgtcttttgatgtgcaaaagctttaaattttgata

SEQ ID NO: 174663 - DNA, 576 bp, Homo sapiens
gtaaatgttttctctccatctctagcttacatttttatcctcttaatagggtcttttgcagagcaaaagtttttaattgtcatgaagtacaatctatctatttccccttttatgaattgcattactgatttcaagtctgaacactttgcctagctctggatcttgaagatgttttcctatgttttttcataaaagttttatagttttacacttcatatttaagtttgtgatctattttgtgttatttttttaaggtatcaaatttaagtggagcttccttcttttttctttttcttttttctctgctgtggatgttcaatgttgcaatactgtttgttgaaaagcctgccctccctccattgaattgcttttgcacttttgttaaaaatcacttggatatacatctgtggatcatttctgcttctctgttctgttccattgatccaygtgtctttccctccaccagtgccaactgtcttgattactgcagttatgcaatgagcctcagcattgggtagagtgactcctttaactttattcacctttttcaaaattgttttagctattctagatttt

SEQ ID NO: 174664 - DNA, 540 bp, Homo sapiens
ctgttagagaaagcccttaaacatttttcttaaaagaaataatcagaaacaaatatggtattagcgggtgatgaaaaaaagagaagatgaagagcataggagggagagagaaaagaaggaagacaagaaggaaagaaaaatatttaaagagtctaaaactctagatcaaatcattggtattttaactttctatacagtcatttaatttaaaaatatatcaatawtaacaatctattcagtcattataatttatgtgtaagtaaaatgaatgacagaaatgttataaaggattaaagggaagaactgggaatactctgttacaggatacttgaactacctgtgaagcagtatagcatcaaagaatttgaaagtggacttgaaagaattgtaaatgtatattgcaaactctagggcaaccactaaaaaagttaaacgaagtgtaatttatatgcaaagacaggagagaaaaaagaacaatattaaatactcatttaaaactagagaggggagaagaagagaagaaaatgaagtaaagaacaa

SEQ ID NO: 174665 - DNA, 592 bp, Homo sapiens
ctctgttacaggatacttgaactacctgtgaagcagtatagcatcaaagaatttgaaagtggacttgaaagaattgtaaatgtatattgcaaactctagggcaaccactaaaaaagttaaacgaagtgtaatttatatgcaaagacaggagagaaaaaagaacaatattaaatactcatttaaaactagagaggggagaagaagagaagaaaatgragtaaagaacaagggctatgaatagaaaacagttccaagtatggtaaatattaatccaactatatgaataattacttaaatgtgaacagtctaaatacgccaaaaattgtattgtgtttttaatctatcagtaataaaatgtccagatcctcccttcaaaaacaaaacaaacaaaacagattaaaggagaaattttcagactttttgaaatccttatattatgaacaagtggggctggatttgatatgattttttaaaattcactattaattggaatgaggtaaatttgagtaaattaaacaaatccagaaattttaataacttgaaagcgtgcaattgtaaaatactctgtatctacagctgtttacattcatat

SEQ ID NO: 174666 - DNA, 560 bp, Homo sapiens
tattggaatcctctccactgtatttctggataattggataaatatccaattaggtatccaatgaatccttcagtcctttctaccatatccctgtcttctgggtcaactcagaacactattagagaacatgaagaaaccatgcaactttgtgtcctagggcttggtgtsagtccaagttcccacagaattcttcatactgagggcccaggagcttggtttattctcaaatatgaagctacccatggcagtcttgttataccatggctcaatttcctccccgccaaaagctggagtctagcaatagagctggaccatcccgtttttgttgcaaatctcatttccctgtaaatttcccttcttcagcagtactttgagcaggtcttcagtgcactcctcaaacacacttctgcttcgtgcttttggatacctcatctagagtgtgtgcgggtgtggggatggggatttgtagaagtggaaactgaaatccacaagcccagatgcattggcctggagtcagaacatctagattcacatctcagctcagacttgctggtggcctg

SEQ ID NO: 174667 - DNA, 592 bp, Homo sapiens
ctctgttacaggatacttgaactacctgtgaagcagtatagcatcaaagaatttgaaagtggacttgaaagaattgtaaatgtatattgcaaactctagggcaaccactaaaaaagttaaacgaagtgtaatttatatgcaaagacaggagagaaaaaagaacaatattaaatactcatttaaaactagagaggggagaagaagagaagaaaatgaagtaaagaacaagggctatgaatagaaaacagttccaagtatggtaaatattaatccaactatatgaataattacttaaatgtgaacagtctaaatacrccaaaaattgtattgtgtttttaatctatcagtaataaaatgtccagatcctcccttcaaaaacaaaacaaacaaaacagattaaaggagaaattttcagactttttgaaatccttatattatgaacaagtggggctggatttgatatgattttttaaaattcactattaattggaatgaggtaaatttgagtaaattaaacaaatccagaaattttaataacttgaaagcgtgcaattgtaaaatactctgtatctacagctgtttacattcatat

SEQ ID NO: 174668 - DNA, 594 bp, Homo sapiens
actatgagtgaatgaatgaatggctgaataaaaacatatcagaaagcaatgttaaatacatacttaaactctctttctaaagggagctctctaactgccgccctctggagaaaaggcatcttaattttccacttcctatatttatggtagaaaaatataggaagtatgtggaggtgagacaccaaatgggaggatggcttcacaagtaaatattggccctcagaactgatgaggtccctggcctggtgtactgaactcagaataaagcactggagtgagcagttggactcatttcccaggctgctgtagcaagttctcacaaacatgggaacttaaagcaacagaaatgtattttctcacagttctggrggccacaagtcaaaaatcaaagtgttgtcagggttggggagactctgagggagaataccttccatgcctctctcatggttcctgggtggctgttggcaatctttgccattccttggtttgtagacacgttgctgcaatttctacctccatcatcatgtggccttcccctgtgtttctctgagtctcaaatctttctctcatttctcttacaagaaaaccagacac

SEQ ID NO: 174669 - DNA, 442 bp, Homo sapiens
ggctgtggcaattacttaaaattagacaataataaagtttgccacattgattgactcttcctttcatgaaagatttctctgtaacatgtaatgctgtttgatagcattttacccacagkaaaacttctttcaaaactggagctgatcctcaaagccctgccactgctttatcaactgtctataatattctaaattttttgttgtcatttcaacaatgttcaccacatcttcaccaggcatatattccatcttaagaaaccactttgtttgctcattcgttagaagtaactcctcatctgttaaagtttcatcatgacgttgcagcaatccagtcacatcttcgggctccacttctaattccagttatcttgctttttccaccacatctacagttactttctccactgaaacccctcaaagtcgtccatgaagcttggaatta

SEQ ID NO: 174670 - DNA, 442 bp, Homo sapiens
ggctgtggcaattacttaaaattagacaataataaagtttgccacattgattgactcttcctttcatgaaagatttctctgtaacatgtaatgctgtttgatagcattttacccacaggaaaacttctttcaaaactggagctgatcctcaaagccctgccactgctttatcaactgtctataatattctaaattttttgttgtcatttcaacaatgttcaccacatcttcaccaggcatatattccatcttaagaaaccactttgtttgctcattcrttagaagtaactcctcatctgttaaagtttcatcatgacgttgcagcaatccagtcacatcttcgggctccacttctaattccagttatcttgctttttccaccacatctacagttactttctccactgaaacccctcaaagtcgtccatgaagcttggaatta

SEQ ID NO: 174671 - DNA, 442 bp, Homo sapiens
ggctgtggcaattacttaaaattagacaataataaagtttgccacattgattgactcttcctttcatgaaagatttctctgtaacatgtaatgctgtttgatagcattttacccacaggaaaacttctttcaaaactggagctgatcctcaaagccctgccactgctttatcaactgtctataatattctaaattttttgttgtcatttcaacaatgttcaccacatcttcaccaggcatatattccatcttaagaaaccactttgtttgctcattcgttagaagtaactcctcatctgttaaagtttcatcatgacgttgcagcaatccagtcacatcttcgggctccacttctaattccagttatcttgctttttccaccacatctacagttactttctccaytgaaacccctcaaagtcgtccatgaagcttggaatta

SEQ ID NO: 174672 - DNA, 332 bp, Homo sapiens
cctggatggaattgttgttaatgctcctttgagattggcctcctgcaagttttctctcagatgtattgtcatcagctgcatttactttaacagacataaagcaggaaaatatttcagaaaaatattgtaaatgcattattaatcaatagtgaccagaggtttttctcctagcaaattatcataaagctttcygaggcagattgaaaagccactggtgagcagccttatttatttctgcctatagatattttgtgatcaattataataacattacatccctcatttctgctacaatatattcaattacatagttaacatttcctgctaacctt

SEQ ID NO: 174673 - DNA, 558 bp, Homo sapiens
ggttgtataggctctgacatagttgactttttaactgcaaaggaaggaagttcctttaagcctaaaaaagcaaaaccatctggtattgcacagctgtggaaatattgtgtatctaattatttatggagatacctatgatttggccttgatatatcccaaaagactttggaaaagcagagtttcattgcgggttcagatcaatagcttctaaatggttattctggttcaagatttttctcatcagaatgaagaatggaaagatcctgttttcattaaagaaccacagaactgtcatcctggtttatgtcaagacatcagagaagacatgcctatgtagtcctgtaggaaaaatcattctgacagtcattctataactttggcctttaaacttcatcggtcagaacaggtgacagaaatatatttaacaacaaatgtagtatctaaacccctagttatttattgccatatatgctctacagattaactactaagaaakgataatctaccctttataaataaaatcacaaaaaaatgtagaactttagagtttaacactta

SEQ ID NO: 174674 - DNA, 580 bp, Homo sapiens
tacacatgtcaccacacctggctaatttttgtattttttgtagaggggaggttttgccatgttgcccaggctggtctcaaactcctgggctcaagcaatctgcctgccttggcctcccaaaatgttgggattacaggtgtgagccaccacacctggcctgaagtttactttaattaggtactggatatttctgcattcctaaaaatatctctgggttttgttcttggatgcagctaagtcacttggcaacagtgcgatccttgtgggtcttgcttttcagctttctaaagataagaccacagtagcatttaatctatggataattgtgtcacaccactgaggtagtaaacgtttgagtacrctacctaatgctccaagaatcatgaggtgttccactctggctgatgggaacatgtcctgtcccgttcctggccctctgtcacttgtcaagactgtcttgcttgttctctccctggagactatcctgtggcatatacacaaatattaactcttcagcctgagctccaggacagaaactgctagtactcagagaagatatgttaaaagcccccaaactgaa

SEQ ID NO: 174675 - DNA, 591 bp, Homo sapiens
ttgaatagctaagttaattgattgaacatgtttaaattttattcacatccatttattatcaattgattaaggcttataattaattctagagataccaaaacatttgcatgtttttttaaaaaaaaccaattgctcaaaatatgtttcacttcaaagtgtcaacttgccatattaaattatttcaacttcaaaatacagccaaaacaaacacattttaaaagcagggcaatttaagtacagagttggtgatattttaggttrtcattacaagttctcctaggcagtttattggcaaatatgctctcaaagacaaagcttctgaacagtaaagaaaacacttggtttaaaaactacattcagcctagacagtcttgagaatcctaacttctttggagtgcaaatagctagatttcaaagagaatgagaaagctgaatacacacactccagagacgtcctcagagcccacagtcaacaggagacgtgctgggaaagtgagctctcttacctgcctccatcacttcttcataaaagaagatgaatactttccagacaatgctctgagcagaattactcccaaagcactgggggag

SEQ ID NO: 174676 - DNA, 566 bp, Homo sapiens
ataagcaagaagattatttgctaattaagtaaatgaataaagagtcgatgccataatccaaacctgtaagcatatcattgccatggcaataaaaaattggcttaggcagcccagcacagtrgctcgcacctgtaatcccagcactttgggaggcccaggcaggtggatcacctgaggtcaggggttcgaggccatcctgggcaacatagagaagtcccatctctgctaaaattacaaaaattagccaggcgtgttagcacgcacctgtaatcccagctacttgggaggctgaggcaggagaattgcttgaacccaggaggcagaggttgcagtgagccgagatcacaccactgcacaacagcctgggtaacagagcaagactccgtctgggaaaaaaaaagaaaaaaaattggcttaggagcaagagagacagccatttctaaggccaccatcaacttttatgttcttgttggcatgactaaaagagatggaggagctgatctattatttagccagttgtgtattgcctaagcagttgattcaactcattagggcataagtcacat

SEQ ID NO: 174677 - DNA, 566 bp, Homo sapiens
ataagcaagaagattatttgctaattaagtaaatgaataaagagtcgatgccataatccaaacctgtaagcatatcattgccatggcaataaaaaattggcttaggcagcccagcacagtggctcgcacctgtaatcccagcactttgggaggcccaggcaggtggatcacctgakgtcaggggttcgaggccatcctgggcaacatagagaagtcccatctctgctaaaattacaaaaattagccaggcgtgttagcacgcacctgtaatcccagctacttgggaggctgaggcaggagaattgcttgaacccaggaggcagaggttgcagtgagccgagatcacaccactgcacaacagcctgggtaacagagcaagactccgtctgggaaaaaaaaagaaaaaaaattggcttaggagcaagagagacagccatttctaaggccaccatcaacttttatgttcttgttggcatgactaaaagagatggaggagctgatctattatttagccagttgtgtattgcctaagcagttgattcaactcattagggcataagtcacat

SEQ ID NO: 174678 - DNA, 535 bp, Homo sapiens
agatctggcaacactgggtccaaagtctcatgyggtggccaaaggaaaattcctcctgtgtcctccaaaggtttgctgaaaaccaattcacaaaaagcagatgaataggagaaagggcatacaaatttattttaatgtgcatacatgggagaattgtagattgattacctaataacccaacggggtccagattgttatatacccttcttcttaggggaaagggagatggagcagtgtagatgacgttaatgggttagtaaatgatctttaggagaattcaatgggcttgaagaatatacaatggcctgggacagagtctgttggaccctcagagcgaacagtggtttgtgataaaaatctgtccaggtgtgttgacagactttagtcttccttcctgcaacatagttcagttaatgaaaactcatggaagggaccagaagtcatcctttccttttttggagggtccagattttaggcagatgagagtacttataagagtaacttaatcctgtactttgggagagacaggactgag

SEQ ID NO: 174679 - DNA, 563 bp, Homo sapiens
aagggaataggttgctaaatgaggggctactggggcctagtggtcctatgcagcccactgccctccctctgaatttaaggctgcttctcaaatatgcccagatattaacactgaacgactataaactggagaacatttccattaacactctgctagttaatgaagtagataatataaattgtaaaatggtattctaagaagcaataataaagggctgagggctatcttcttaacagaaatattggaagacagaagacaataaagttgtatstttaaaaggctttatgacaataattgccaacatggaattctatactttgtgaagatgtttcaaaaatctagatgaaataaagactttcccatcaagcaaaagctttgaagatttgttgccagcacagcacatctaaatgaaaagaaatactaaataaaattcttcaggcagaggaaaaacagttccagaagcaatggtggaaatgacaaaaggaatgaagagcacgagaaaagggaaattcatgaactcaacgtaaaaacaaatgaagtttggctatgcaaaacaataggtc

SEQ ID NO: 174680 - DNA, 613 bp, Homo sapiens
taaaatagttaaaaaaaatagtagagtaaacagtatttgagcaaaaatccttttctggggacagcatagtacagccccttttgctcattgcctgagccatcagctgttatggtcagaatgtttgtgttctcacaaaatttgtatgttgaaatcctaacccccaaagtgatggtattaagagatggggcctttgggagctgattaggtcrtgagggtggagccctcatgaatggaattagtatccttaaaaaaggcccagagagcttgttttccccttccgccatgtgaggacacaggtagaaggcaccatctacaaaggggaaggccctcacaagtcaccaaatctgccagcaccttgatcttggacgcctcagcctctttgtatgtgtgaatattttacagtaaaaatttaaatcaaagtaaatatatctaataaagaaaggcaaatgttaactctattaaaatgtttatacaagaaagaatatagtttaaaataaattttgtcatagtactataatcaaaatattttgattatgagcaatacatttctctataagaaatttaagcaataaagttgtctattaagtttactcagtctaaaggattttgtgat

SEQ ID NO: 174681 - DNA, 613 bp, Homo sapiens
taaaatagttaaaaaaaatagtagagtaaacagtatttgagcaaaaatccttttctggggacagcatagtacagccccttttgctcattgcctgagccatcagctgttatggtcagaatgtttgtgttctcacaaaatttgtatgttgaaatcctaacccccaaagtgatggtattaagagatggggcctttgggagctgattaggtcgtgagggtggagccctcatgaatggaattagtatccttaaaaamggcccagagagcttgttttccccttccgccatgtgaggacacaggtagaaggcaccatctacaaaggggaaggccctcacaagtcaccaaatctgccagcaccttgatcttggacgcctcagcctctttgtatgtgtgaatattttacagtaaaaatttaaatcaaagtaaatatatctaataaagaaaggcaaatgttaactctattaaaatgtttatacaagaaagaatatagtttaaaataaattttgtcatagtactataatcaaaatattttgattatgagcaatacatttctctataagaaatttaagcaataaagttgtctattaagtttactcagtctaaaggattttgtgat

SEQ ID NO: 174682 - DNA, 622 bp, Homo sapiens
agattttctgactgttaggagtctgtattaagctgggtgtggtggctcacgcctgtaatcccagcactttgggaggccggggtgggcagatcacctgaggtcgggagttcgagaccagcctgaccaacatggagaaaccccgtctctactaaaaacacaaaaagtagccgggtatggtggtgcatgcctgtaatcccagctactagggaggctgaggcaggagaatcgcttgaacctgggaggcggaggttgcagtgagccgagaccctgccgtcgcactctagcctgggcaacaagagtgaagctctgtctcaaaaaaaaataaaaataagaaaaggagtctggattaacttgacccaaattccaattttagtatctgtggcaattcaaggcttccccgcatattagccctttatgtcttcactatgctttatctgtgtgcaaggtatattccattcccccttcagtgttttcctccaaaaagccaatcatacgccarattcaaaatgtctctgaaggaaggagaagtcataataaatgatatcattccttctcactcctcacttggtcttctgccatctcattggctccacttctccagctctattacttgccaacgtcc

SEQ ID NO: 174683 - DNA, 497 bp, Homo sapiens
caactgaatggcatagaaacagatgcaagatcctaaaacaatcttctcaagaggaaaataaatattgctctcaaaatcagagaatcagcagcaaggttctatgctgattcacttggctctaatgtcttactcctacagattgccggaaataaaacattttaagaactctgacgttatgagaaattatcagaagcatctagctgtaaatgcacaaatcttatttccttgccttgggcctttgaaactgtcttcaatatttgstaaaaacaactacttaagcagtttgtcttctacctaatgtggcaattcgattcctcaattagattgttgctactgttggctgattaaaacagaatggcatgcaatggcagtttaagtattgggctttctcctttgcattcaggtggacaattctgtcatagtccctagcaccatacttattccttccatatttctcccttgcataaatttctgcctggcttaaaggaaaagaagcc

SEQ ID NO: 174684 - DNA, 572 bp, Homo sapiens
ccttgttaagtggataagtggaagcttgtacaacaaaataggaataaagataactgagaaagggaaatgtgcaggagatcaccctaaattatttcacaattttgcttaagaatctccctcacactacatataagctctggcaagcaaagactattgctgctttaagttaatgatgacatggccacagagaggaacttatggcttcagtcaaagcaaaccacatgggtaattcactggcctcttgcactrttaagaactgtgacatcccttcactgtgacgtgacatttgtcgtctgacctcattctcttaaaatggttgctttcccattggctttctggcttcactccctctcagtttggtatcaatatacatggacagctttctgactcaatcagggcttgtttctagtgttttctttcagaaatctctttggttgataacctaattctgggaatagtagcagtgattctaggacccaagagacaaagcacactcgagattctagctcctaggaatcataatagtcaatcattagattaagatcctattttcataattcctttgacagagt

SEQ ID NO: 174685 - DNA, 572 bp, Homo sapiens
ccttgttaagtggataagtggaagcttgtacaacaaaataggaataaagataactgagaaagggaaatgtgcaggagatcaccctaaattatttcacaattttgcttaagaatctccctcacactacatataagctctggcaagcaaagactattgctgctttaagttaatgatgacatggccacagagaggaacttatggcttcagtcaaagcaaaccacatgggtaattcactggcctcttgcactgttaagaactgtgacatcccttcactgtgacgtgacatttgtcgtctgacctcattctcttaaaatggttgctttcccattggctttctggcttcactccctctcagtttggtatcaatatacatggacagctttctgactcaatcagggcttgtttctagtgttttctttcagaaatctctttggttgataacctaattctgggaatagtagcagtgattctaggacccaagagacaaagcacactcgagattctagctcctaggaatcataatartcaatcattagattaagatcctattttcataattcctttgacagagt

SEQ ID NO: 174686 - DNA, 572 bp, Homo sapiens
ccttgttaagtggataagtggaagcttgtacaacaaaataggaataaagataactgagaaagggaaatgtgcaggagatcaccctaaattatttcacaattttgcttaagaatctccctcacactacatataagctctggcaagcaaagactattgctgctttaagttaatgatgacatggccacagagaggaacttatggcttcagtcaaagcaaaccacatgggtaattcactggcctcttgcactgttaagaactgtgacatcccttcactgtgacgtgacatttgtcgtctgacctcattctcttaaaatggttgctttcccattggctttctggcttcactccctctcagtttggtatcaatatacatggacagctttctgactcaatcagggcttgtttctagtgttttctttcagaaatctctttggttgataacctaattctgggaatagtagcagtgattctaggacccaagagacaaagcacactcgagattctagctcctaggaatcataatagtcaatcrttagattaagatcctattttcataattcctttgacagagt

SEQ ID NO: 174687 - DNA, 576 bp, Homo sapiens
cctgatttagccattccatagtgtttatggatttcaaaacatcatgtctaaaccacaaatatatagaatttttgtcaattaaaagttaaaaaataaaataatttggagcatattttttaaaaagtgagggctttgggatcatacagatctgggattgagtctttcaggtatcagctgagtgatcccccagggccttgtcttcttcctctgtgaagtggagatgataatagtaccagcctatggtgttgttgtgagaactcagggagatgaacagcctggaagtgcccagtaaagagagggaggcccatgaggattccaagggctgggtttctgctgctgagataatgcaagagaatccactcmccttttttaaaacttaatttttttaatttgagagagtgcattttattgattaaaaaagagagttggtaatgctactttttgtagaaatacgaagacaacatgaagttaggactaatgagtcttgggaacttggtactttttttttctaatcttattttatttaagttccaggatatatgtgcaggacatatgcaccatggaatactatgcaac

SEQ ID NO: 174688 - DNA, 508 bp, Homo sapiens
atgaggggttttgttactgcagaagagggagaatagagtcatggtctctgtgctgtggtgggatggagaccacctgctgggctgttcccagctccagtcctgcccctcaacacctttcttctcttccttctcaacccagcccagggatagtgccctgaaacrtggatcccacatgggtcagtgtttagttagattattttaggccccacacacgggctaattttcacagctaatgatacaccacttgcacttgtacaaaaattataactttagctcttcatggaaataccactgcattgttaaaataccattacccccttgaagaaatgccactgttttcttgtgaaaacatgactctacctatttagaatttggttgcttaaaacagaaagttttcccctacatttactatttctgttagaatgttctagaacaacacctccaacagtggcaaaaattgtgaggaggccacatgtgtccagggtggcctttcttctttagatatgca

SEQ ID NO: 174689 - DNA, 609 bp, Homo sapiens
tcattgcctgcctgccactgtataaaatgcagcccttcagagaagcacagctctctgggcacagkggtaacttctcattatgagagatgaaacagatgagttaatcaggaagtcccttcatctcctcagaggctcatcattcctatttcaggagttcagacaagcagttaatctgctggaaagatggaaaatgaagtggctgtagcaatctattcatgccagagggggccttatattaaaaagaggatgctcatgtattatcattaaggacatctaggttgttcattcaaggatttatattttaatactctgtttattgagcctgctggctctttttcttctaggtagggcaaagccactacgaaatcatcatatgactgtatactactttttattttgtgagggctttaatggataatgtcttttcttaaacctcagagtaatctggttaaacaggaagtgttctcccattttgcagataaagaaagcgaagttcacagagatgacaggctttcaggagttcacacagtaaggtggtgacttctctggaacctaaattcaggactttcaactattcattccatgacctgactccacgagaagttggag

SEQ ID NO: 174690 - DNA, 609 bp, Homo sapiens
tcattgcctgcctgccactgtataaaatgcagcccttcagagaagcacagctctctgggcacaggggtaacttctcattatgagagatgaaacagatgagttaatcaggaagtcccttcatctcctcagaggctcatcattcctattkcaggagttcagacaagcagttaatctgctggaaagatggaaaatgaagtggctgtagcaatctattcatgccagagggggccttatattaaaaagaggatgctcatgtattatcattaaggacatctaggttgttcattcaaggatttatattttaatactctgtttattgagcctgctggctctttttcttctaggtagggcaaagccactacgaaatcatcatatgactgtatactactttttattttgtgagggctttaatggataatgtcttttcttaaacctcagagtaatctggttaaacaggaagtgttctcccattttgcagataaagaaagcgaagttcacagagatgacaggctttcaggagttcacacagtaaggtggtgacttctctggaacctaaattcaggactttcaactattcattccatgacctgactccacgagaagttggag

SEQ ID NO: 174691 - DNA, 453 bp, Homo sapiens
gggccagtgaattgggagtgctgattggttggctctgggatgaaatcatagggagttgaagctgttcttttatgctgagtcagttcctgggtgggggccacacaactggttggcaggtccaggtgaggccatccagttgttagaaatgcaaaaatttgaaaagacatctcaaaaggcccactttaggtccacaacagtgatgttacctttaagaataattggcaaagttgcaaatgttatgacctscggaataacggctggtaatatttagaattccagctcctctcattctaacttggtggctggaggcctttcattaattttacaattaacagtttagcttttgggaagggctattatttaaactataaactaaattccttcccaagcctagttcggcctacatccaggaatggacaaggacagtttagaggttagaagcaaggtgaagtt

SEQ ID NO: 174692 - DNA, 532 bp, Homo sapiens
cctaaaacatcattttatagacatgagaatggtttggcagggagatattgttagcatggtgatgttgggtatttctacaatctcctgcctctgtgtggaatttgattggatggggtagggaggggtgatcgtgctgtcttagttcagattcccagaggcagattctgaaatagagaattttgtgcaagtggatttttgatgatgtgcttaagagaaagggaatgaatgaaaaaattaggcaaaaatatgacttcaaaataagtctagtcttagctgagtcccccagagagctgtgaatgtgaattaccctacagagctggcccaccttgartccagggatttagcctttgtatcgtcaaactagtggaattcatgagtgactgcaggctagtggagagcggtggaccatctccaagatgagatggtcctactttttataatgttcttttcgaggtgaagtttggctctgtctcccaggctggagtgcgatggtgcaatctcggctcactacaacctctgcctccagagttca

SEQ ID NO: 174693 - DNA, 542 bp, Homo sapiens
gggagaactggaagtacaaagcaaayctttgctcttattgtttttattgtactgatgtcacaatgccttctagagttggaccaagacagagtcaattttgccacatacaaggctacacattcttgtcaattctttctcttaaacgtcttgggtttgttggcaaagtctattacttcaaattgcataggtgttatgtggggcccttattagtatacgctttgctcttctagcctgatgacctacagggatacccagagaacttcttgagccattgaggtaaaaacatagtgaaattatgtccttgataagacatttcaatattgtaaaaatggggattaggtctctacctcttatatatgtgaaaaaatacaaaagaaactgttaaaagtagttcctggccaggcacagtggctcaggcctgtaatctcaacactttgggaggctgaggcagaaggattgcttgaggctgggggttcaagaccacctgggcaacatagcaagaaccagtgtctacaaaaaattaaaaataaaaaaattagcaa

SEQ ID NO: 174694 - DNA, 542 bp, Homo sapiens
gggagaactggaagtacaaagcaaacctttgctcttattgtttttattgtactgatgtcacartgccttctagagttggaccaagacagagtcaattttgccacatacaaggctacacattcttgtcaattctttctcttaaacgtcttgggtttgttggcaaagtctattacttcaaattgcataggtgttatgtggggcccttattagtatacgctttgctcttctagcctgatgacctacagggatacccagagaacttcttgagccattgaggtaaaaacatagtgaaattatgtccttgataagacatttcaatattgtaaaaatggggattaggtctctacctcttatatatgtgaaaaaatacaaaagaaactgttaaaagtagttcctggccaggcacagtggctcaggcctgtaatctcaacactttgggaggctgaggcagaaggattgcttgaggctgggggttcaagaccacctgggcaacatagcaagaaccagtgtctacaaaaaattaaaaataaaaaaattagcaa

SEQ ID NO: 174695 - DNA, 542 bp, Homo sapiens
gggagaactggaagtacaaagcaaacctttgctcttattgtttttattgtactgatgtcacaatgccttctagagttggaccaagacagagtcaattttgccacatacaaggctacacattcttgtcaattctttctcttaaacrtcttgggtttgttggcaaagtctattacttcaaattgcataggtgttatgtggggcccttattagtatacgctttgctcttctagcctgatgacctacagggatacccagagaacttcttgagccattgaggtaaaaacatagtgaaattatgtccttgataagacatttcaatattgtaaaaatggggattaggtctctacctcttatatatgtgaaaaaatacaaaagaaactgttaaaagtagttcctggccaggcacagtggctcaggcctgtaatctcaacactttgggaggctgaggcagaaggattgcttgaggctgggggttcaagaccacctgggcaacatagcaagaaccagtgtctacaaaaaattaaaaataaaaaaattagcaa

SEQ ID NO: 174696 - DNA, 477 bp, Homo sapiens
atttacttataatataaagggtcagtttataaaaaggacataaaagtctttagtgtatatgcacckaacaatttcaaaacactgacaaaactaagaggaaaaatagatctatctacaattatagttggagattaatactcttctcaaaaattgagagaaaaaatagaaacattagtaatcattgaataactggacaacattatcaaacaacttgatctagctgacatgtatagaacattacaacacatgtcagactgcatattttatttcaactgcacacggatcattcaccaaaataatggctaagaaaaaaaaaacaacaacatgaaatttccaatcctggaagcacaaggagttctgagaaagtaaatcacaaatcaatagctagaaatatgtagtgaaactatagaacactaaagaaaatgatcttaaaagcagctaaaacatattcatttatgaaaggagtaataattagaa

SEQ ID NO: 174697 - DNA, 392 bp, Homo sapiens
cagaaaactatgttgagagactacccatacttaccctcaaagtcttgaaattttataaagtcctctatttttctcaaagtcctatttcctggaatccttcttctccccatccccgcatttccrtatctgtccttaatccccactatatcccgatccacctatatgctaatgcaacagtgaccatgccagtcacaaaggcaaaatttgatgactagcttttctaaaacggtctctgttgagatcttgaagatttcctcccctttattaatggcttttcttgatgatatcattgtcaggaaagtacatcccttgtagtcttcccagatttgctcgtttccctcaaatttaaatgatgcataccttaaaacagcacatttattatttaagtgcta

SEQ ID NO: 174698 - DNA, 271 bp, Homo sapiens
tggtttcaaggattaattagggacataggggagaggaaataggcaatttcactaaggaaaaaaatttttctgtatatcaattgccccttctccttttctgatctttttgttgaaaggcacaatgtgagacaaatgatgatagtaccttatcatggagtcatgggagaatataagaatgcggtaagttggagaaaaaggaaaagaaacgtgaatgtctctgttagytccgcctgctgtaataaaataccatagactaaatacaatagaaatt

SEQ ID NO: 174699 - DNA, 527 bp, Homo sapiens
tttaaatgtattgcagggtgtgcagcaaggatgtgaaaactagagttgccttcacaatgaagtgtcatactatgtatgagctgacagaagcatttctgatgccccactcaggaaaatacacaagttggatgatctccctcagggaaatgggatctattttaaatgggaatctgaatgctacaattacagctcagttgtctgtgtaacaacattatgagtcttaaacaagggcacagtrtgaatcaggctccaggaaacctgtcttctataccctgatccaccttacaaaataaaagggaaataaatagtagaatgtgaacttgtgttagagtcagttctgagttttaggtattttatcatgatgaacaaaattaaaagtcccatggtggtgtttttttttttatttttttcaggtctagagagtcatttgaatttagaacataaagaatccagaatataggagaattaaatgatgcaagaaagaccagaagttaggagaattaataagggcaagatgggacttttat

SEQ ID NO: 174700 - DNA, 271 bp, Homo sapiens
ggaaatgctgccaaggccttcctagttgaagacattgaagccgcttgctgaaaaaggaatcacaccacagctgtgctctcttggggcttgtgctcttttgggaactaaagccccacagttcttacaagagaggtccaggagccatgcctrtgagctttgactgtctgagaaatgaattatcctcaccgtagtggatagaagcaggagtggaatctcagctgactgcagccaccccaaccaagtcctcttttatgacaaaatgagtgaaaca

SEQ ID NO: 174701 - DNA, 576 bp, Homo sapiens
tttcaggtttttaaatgaatgcataaattatacctgtgaccttattgaaaagatccatartcatgactagaaatgaaaaatgaaatggtagagacatatattgtcaaataggcattgcaatcagactcatctataaaaccattataattatttttcctttttatgttccccaagaataaacttacgggaaaggttttaatgtcttcaacctgttgcatgaggtattgagttgttttaataacaaaataattattatctccataggcttttaagatactcatcattccctataaaaagttcaatagttatcaacttacgagcacatatttggggattttttttttcttctctctattgtattttaccactctaactcatattttactattcccttggcccaggaatacacagaagaaataaaatgatattcaagttggtttcacagacagtaaacatagattatgaaattgaaacatgctatgcttattgagcgtatattttagaagaactttctctaaaatactttatgactaaaaccataatctggaaccattcattctccttggttttagaatt

SEQ ID NO: 174702 - DNA, 397 bp, Homo sapiens
gcaaccccagcctagtaagcagggagtcaccagtgtatcttctcgggacaggaggggacgccccccagggactccaggctggtggcgtctggtgcaggcttttctgctctggcatctgatgcatccagatagagacagattctctgggacctgttgctgtcactttttcttcttggccaggggagatattttcttaggccaattccaccctaagacagatcaccatctgctccattagggcaggaagaagtcagggataggaagcagaaggaaaagtcatgaggctgagcacaagttagaagaggcttctgcagaatwtcccagagtgcttcttttgttggtttggtgatgccggcccccactaaagtctattgtaggggtatagaatacatgattt

SEQ ID NO: 174703 - DNA, 488 bp, Homo sapiens
attcatccatttcctttrgattttctactttgtatggataaaaattttcacagtagtctctgagggatcttttgaatttctgtgggataggctgcaatgccacctttgtcatttctgattgtgcttatttgaatcttttctctttttttctggtctattaattttgcttatcctttcaaataaccaactttttgtcttgtttttggagtctcaatttcatttagttctgctctgattttaggtatttcttttcttctgctcactttgagtttagtttttaacttgtttttctagttaccttaggtgtgagattaggttgttattttgagatttttctatcttctcgatgtaggcgttgagcactataaactttcctcttagcactgttttaccatatcccaaagcttttggtatgttttgtctctatttttatttgtttcaaataattttttgatttctgctttaatttcattgtctacacaaaagtt

SEQ ID NO: 174704 - DNA, 552 bp, Homo sapiens
acaccttttctttttgaatgattccccaaagtcctaatttaggatagtggttctttagaacttggaaaagatatttaatcatgatgtggatgtttccagaagctaaaaaaaaaaaaaaaaaaaaaaaagaaaatttaatccattaatcatttactgggtacctactatgtaccaagctctatgcaaccacatggagatacaagatgaagaagcagcttttaggtgacacagctaagttaakacatagcaggtttcagcagagaatgagaagaaacttcactctgtgatcctgttgctgagtgagcttttgctacttagaggtagctgagctttgcacaaaggaaaccaccttagagtttcctaagaaggctataatccttggagtctatggatagggacaatgagtcttcttgtcaattccatgtatgcaaaaggggagcttagagtgccctaggtgggccaggctaaaatgagatgtcttaatgaacaatgtatccttgctgatgggagataaataggccaatagctgaggatatagatcctcctatatga

SEQ ID NO: 174705 - DNA, 605 bp, Homo sapiens
gctcttcttgcatttgctcctctattatgattctttgctccaaaggaatccctactagtaatttggtggaaaataatgtaccagtcatgctacctgcatggccagaatatataaattcctataacttaataaaattgacatccaggtctacacagtaatcactgggaactagttaatattcatatgggagcttagatatattaaagatttgttgccaaatgacatttttgagcctacaatgcaggttttactgtggactatagtaaatgaaccaggaaaattctgtctgctaaaaacctgctctagaaagattggcagccaatgactcctggtgccacccttaccccaaatgtgcttttcttacaaatgtaaacaccaaattgagttggttccaatatatgcctactgaaaataataaataattcatcatctcagtctcacacrgaaatattaactttcttaaattttcagtgcttagccaaccctaaggtgctctgaggcttcaactcaccatggggctatctaaaaatcttataccagctcatctcaattttggccacttaaagtcataggccttcattaattcctgactcctaagcaagctt

SEQ ID NO: 174706 - DNA, 593 bp, Homo sapiens
aagcataaagaaatatctatgaaatttactaagcaacagggttggtgccaagtggttcctaacccaragggtccatggcttggtgcctataagttcacaaattcctcgcatggaaagcaagattctttgcatttatgcatatatctagctttcaccaaattctcaaaggaatcatgatccacaaaatataaagaatctcagtataaagatagataagaaagatctacactctccagaagcttatatagacctgtagcttcacatcactaaaggaacaagtccatgctgctttccagaacagatgtgtttctaaaattcagagataagccacataatatttaaactgtgatggtacttttataaactaaataatacttcagtaagatgaccataatgtattttatgcattctacataaactcaaattttgtaggtagtatcaaattacacgttaaaattcataggaaacacacataaaccacacacacacacattttttgtgttcccaaacttacaggtcacagaggtcatacaatgtgctccctgcatcatgctttcctatttcttctacgtctatgccattcccttaaacta

SEQ ID NO: 174707 - DNA, 598 bp, Homo sapiens
ttagccattcgcctaatcttttttcaaggtttttagcttccttgcgatggtctagagcatgctcctttagcttggagaagttttgttattaccgatcttctgaagcctgcttctttcaactcatcaaagtcattctccayccagctttgttctgttgctggtgaggagctgcgagcctttggaggagaagaggccctctggtttttagaattttcagcttttctgctctggtttctccccatctttgtggttttatctacctttggtctttgatgttggtgacctacagatggggttttggtgtagatgacctttttgttgatgttgatgctattccattctgtttgttagttttccttctaacattcaggttcctcagttgcaggtctgttagagttttctggaggtccactccagaccctttttcctgggtatcaccagcagaggctgcagaacagcaaatactgctgcctgatccttcctctggaagcttcgtctcagagggggaaccgcctatatgaggtgtctgttggcccctactgggaggtgtctcccagttaggctacacgggggtcagggacccacttgaggaagcagt

SEQ ID NO: 174708 - DNA, 598 bp, Homo sapiens
ttagccattcgcctaatcttttttcaaggtttttagcttccttgcgatggtctagagcatgctcctttagcttggagaagttttgttattaccgatcttctgaagcctgcttctttcaactcatcaaagtcattctccatccagctttgttctgttgctggtgaggagctgcgagcctttggaggagaagargccctctggtttttagaattttcagcttttctgctctggtttctccccatctttgtggttttatctacctttggtctttgatgttggtgacctacagatggggttttggtgtagatgacctttttgttgatgttgatgctattccattctgtttgttagttttccttctaacattcaggttcctcagttgcaggtctgttagagttttctggaggtccactccagaccctttttcctgggtatcaccagcagaggctgcagaacagcaaatactgctgcctgatccttcctctggaagcttcgtctcagagggggaaccgcctatatgaggtgtctgttggcccctactgggaggtgtctcccagttaggctacacgggggtcagggacccacttgaggaagcagt

SEQ ID NO: 174709 - DNA, 188 bp, Homo sapiens
gggtataacaaatgctgtattactattctatggtgacatttaatttatcacaaacatatagattgtttcctcaaccacttcatatgtttattagccacatgggccatatctgtgaatatttttgtctccactccagtgtgtgcacatatgcttacatagrcagaactcacacaaactgctgaagccaa

SEQ ID NO: 174710 - DNA, 402 bp, Homo sapiens
taaactaacgtgttttctatcattcctcctctatctcagggtataacattttattttcactggccaaatgaaagccayatcccggccttatcatctaaaataaatgcatcccataggaccttccagggtagcaggtgcatgggtgggtataattcagacagaagataaggaaagaagtttaatctccacaaattgccaagaatgtttcccttataattaggaaagtgcattctgaaactctgcataatttaaaatacactttatgggctaatggaaaaggactgagaacagacataaatcttgcctataaataatcaatgctatcaaaatgccatggcaaaaacattcctctgatagaaacaaagacagatagtttttaggattttatctagagaatgtcag

SEQ ID NO: 174711 - DNA, 402 bp, Homo sapiens
taaactaacgtgttttctatcattcctcctctatctcagggtataacattttattttcactggccaaatgaaagccacatccyggccttatcatctaaaataaatgcatcccataggaccttccagggtagcaggtgcatgggtgggtataattcagacagaagataaggaaagaagtttaatctccacaaattgccaagaatgtttcccttataattaggaaagtgcattctgaaactctgcataatttaaaatacactttatgggctaatggaaaaggactgagaacagacataaatcttgcctataaataatcaatgctatcaaaatgccatggcaaaaacattcctctgatagaaacaaagacagatagtttttaggattttatctagagaatgtcag

SEQ ID NO: 174712 - DNA, 637 bp, Homo sapiens
aatctgagggaaaatcaatctataataagccattatttcattacttgaatgagttaatgaatgaatgaacaaatacagtaaaaagggagtgagtctacagccactgaagtccttctaagcaatccaaaatttagtgcctacaatgaaatgctgagattgattctgggattgtaaagctgaggaaaaactccatcacttacaataatttcagggatggttctcaatctttagctgcacatttaaattacctgaagacatttttagatactttgtccagctattcttttccccagagccattaaatcagaacctctgggggttgggacccatccaagcatgagtagcttttaaaacttcccaagtggttccaattgcagtcaaggttgagaaccactggcttctagtggagtggagaaaagtcatcaaacaaagttcactgaacaaatgtctgtaggttacctagagtaaaggaatgaatgggaattaacttcaattcagcatctactgcatactaagyaaggtgttattgtttaaatttgttgtctcattttattctcatgacatcactgtgaggtaaagattgttatccacagttgaaagaagaggaaattaagtcatggatgacagaaacacagtc

SEQ ID NO: 174713 - DNA, 613 bp, Homo sapiens
gttccttaaatccaggctctgcatatagaaagtaaattttggccactagaaattgctctggatatgcattttaaaaatttcaaaatgaccctgtttcttcctctgcaaaaaaaaaaaaaaaacaacagatgcatggaaaccttcaaatttcaaatttatttcctattggagttattcacatgcaaaaataatcttaaatggtgtttatggcatargcttttttcttcttcttcattggcccaagttccagaaacagctgaatagatgtttctgtcaacattcaacaaccaaataactcacctttggggtgaaatcaactacgaaaatttaaaaccctaaggataatttttcagcaagtgaaacaagttagggagacaatgacttcaaaaatctcaggtataagatctctcttggtaaagaaactactgatcaagccagattaagtcactgtttactccgtatgcacagtgtatatgtgataagaagacatggttcctgccctcaagtggcttgcttcctaataattaattcaagcaacaatatcaactaatgaaacaaattcagttatgtcttacttttttattatatatgcttttgaaaactggatgcaaat

SEQ ID NO: 174714 - DNA, 613 bp, Homo sapiens
gttccttaaatccaggctctgcatatagaaagtaaattttggccactagaaattgctctggatatgcattttaaaaatttcaaaatgaccctgtttcttcctctgcaaaaaaaaaaaaaaaacaacagatgcatggaaaccttcaaatttcaaatttatttcctattggagttattcacatgcaaaaataatcttaaatggtgtttatggcataggcttttttcttcttcttcattggcccaagttccagaaacagctgaatagatgtttctgtcaacattcaacaaccaaataactcacctttggggtgaaatcaactacgaaaatttaaaaccctaaggataatttttcagcaagtgaaacaagttagggagacaatgacttcaaaaatctcaggtataagatctctcttggtaaagaaactactgatcragccagattaagtcactgtttactccgtatgcacagtgtatatgtgataagaagacatggttcctgccctcaagtggcttgcttcctaataattaattcaagcaacaatatcaactaatgaaacaaattcagttatgtcttacttttttattatatatgcttttgaaaactggatgcaaat

SEQ ID NO: 174715 - DNA, 544 bp, Homo sapiens
atgtagcagatattccgttgataatttaattctttggggggcattatctgaacccaaattcaggatactcattttgatgttgtctttgacgatttctattcccacagcaaccctgacgattttcttgacttttmcatcacttgaatgatctccatttaaaaggccacacttttgagaattataaaaaatattttgatactcagcgtttctcgtattgccccatgaatttcaattaatataatttgttattgtttctactttgttgagagtactgtgcagaatatatttaatataacagtcaggacctctgtttctatgaagcttatcatgacagagcttctaatacatcaaacagcaagcattcattaaaggttgtcctaatcagaattcctgatgactgtaaccccaagaccttcattatctttcagagtttgatgaatttcactgaaactatctttgtttctccaagatcttcatgtatcatttaaatccatggtacatgtgagaagcttgcctttaatttattttattttgagttattggg

SEQ ID NO: 174716 - DNA, 544 bp, Homo sapiens
atgtagcagatattccgttgataatttaattctttggggggcattatctgaacccaaattcaggatactcattttgatgttgtctttgacgatttctattcccacagcaaccctgacgattttcttgacttttccatcacttgaatgatctccatttaaaaggccacacttttgagaattataaaaaatattttgatactcagcgtttctcgtattgccccatgaatttcaattaatataatttgttattgtttctactttgttgagagtactgtgcagaatatatttaatatarcagtcaggacctctgtttctatgaagcttatcatgacagagcttctaatacatcaaacagcaagcattcattaaaggttgtcctaatcagaattcctgatgactgtaaccccaagaccttcattatctttcagagtttgatgaatttcactgaaactatctttgtttctccaagatcttcatgtatcatttaaatccatggtacatgtgagaagcttgcctttaatttattttattttgagttattggg

SEQ ID NO: 174717 - DNA, 544 bp, Homo sapiens
atgtagcagatattccgttgataatttaattctttggggggcattatctgaacccaaattcaggatactcattttgatgttgtctttgacgatttctattcccacagcaaccctgacgattttcttgacttttccatcacttgaatgatctccatttaaaaggccacacttttgagaattataaaaaatattttgatactcagcgtttctcgtattgccccatgaatttcaattaatataatttgttattgtttctactttgttgagagtactgtgcagaatatatttaatataacagtcaggacctctgtttctatgaagcttatcatgacagagcttctaatacatcaaacagcaagcattcattaaaggttgtcctaatcagaattcctgatkactgtaaccccaagaccttcattatctttcagagtttgatgaatttcactgaaactatctttgtttctccaagatcttcatgtatcatttaaatccatggtacatgtgagaagcttgcctttaatttattttattttgagttattggg

SEQ ID NO: 174718 - DNA, 544 bp, Homo sapiens
atgtagcagatattccgttgataatttaattctttggggggcattatctgaacccaaattcaggatactcattttgatgttgtctttgacgatttctattcccacagcaaccctgacgattttcttgacttttccatcacttgaatgatctccatttaaaaggccacacttttgagaattataaaaaatattttgatactcagcgtttctcgtattgccccatgaatttcaattaatataatttgttattgtttctactttgttgagagtactgtgcagaatatatttaatataacagtcaggacctctgtttctatgaagcttatcatgacagagcttctaatacatcaaacagcaagcattcattaaaggttgtcctaatcagaattcctgatgactrtaaccccaagaccttcattatctttcagagtttgatgaatttcactgaaactatctttgtttctccaagatcttcatgtatcatttaaatccatggtacatgtgagaagcttgcctttaatttattttattttgagttattggg

SEQ ID NO: 174719 - DNA, 600 bp, Homo sapiens
attgtcctcttgcatgagttgtttgggttcatattcctttmttcctgttggttttagcttccttgtatctgtttccttctctagctgcaactactttcagcaggtagtgaaaaaattttcctttcctcggatcttctgtgtaattcaaaatggaattttctgaagcatttgggtcaacaagttactcataagaatatataagtcattgtttaagcagttcatgttgattatttactccccaagatcatacttgagaaaatccttagatatggatatattagtttcctagagctgctatacaaaagtaccacaaatagagtggcttaaacaacagaaacatatcatctcactgttctggaggctacaattcttgaaatcagagtgtgagcagggacatattccttttaaaggcactagggaaggacctattccaggcctctctcctagtttctggtatagttccttggcttgtggcagtgtaattccaatatttacacggcattcactctgtgtgtgtactgttaaaaaaattgggggtgggggaagtcattaggctggggcgggctccagtgctttaaattcctgggtaagcaaactgaa

SEQ ID NO: 174720 - DNA, 622 bp, Homo sapiens
atagcttacaaatgcaaatgactaactcactttggaaactcaatctgctggtgttattcatacttgctaatgaayaattcactgctcaaaagattggagggcctgacaaatgaagtctgttgagtccagatataaacaaatggcttacaacaggactttgagggtctttttttaatcacttattatgaaatacagctgtccttttgctctaataagggagtgtgggtgtgacggagagaacaggccctcttttcttacctgccgccttgtctgacaacccaggtagcctttctttttgctgtagatggggaaccgctggcaggaagaggagtcagcatgcactgaacagtgctgtaaaacctgacttgactaacatttcccctttcagattatgaaagccacagactcttttcctggaaaaatgcatatgtgcacatgtaggaaatgctgcctaccatttcaggaggtttaagacccctgagatagccaggaatcacaggataagaagccctgcactggaagcggaagtggcaaacacacttgcatggatatttttatggcatgcagtatataggatatagctccaaaagctgaagaagccagttcctgctcctttctatat

SEQ ID NO: 174721 - DNA, 622 bp, Homo sapiens
atagcttacaaatgcaaatgactaactcactttggaaactcaatctgctggtgttattcatacttgctaatgaataattcactgctcaaaagattggagggcctgacaaatgaagtctgttgagtccagatataaacaaatggcttacaacaggactttgagggtctttttttaatcacttattatgaaatacagctgtccttttgctctaataagggagtgtgggtgtgacggagagaacaggccctcttttcttacctgccgccttgtctgacaacccaggtagcctttctttttgctgtagatggggaaccgctggcaggaagaggagtcagcatgcactgaacagtgctgtaaaacctgacttgactaacatttcccctttcagattatgaaagccacagactcttttcctggaaaaatgcatatgtgcacatgtaggaaatgctgcctaycatttcaggaggtttaagacccctgagatagccaggaatcacaggataagaagccctgcactggaagcggaagtggcaaacacacttgcatggatatttttatggcatgcagtatataggatatagctccaaaagctgaagaagccagttcctgctcctttctatat

SEQ ID NO: 174722 - DNA, 547 bp, Homo sapiens
attataaaatgttaatcaattaaacattttattttttccaaatattccaatccaaaaatttaagtcttaaagccagtaagaccaataagtaggtttgtaataaacacatgaactcagaattaataatcagtttgcaaaaaaaatttttttttttgagacaagagtttcgctcttgttgcccaggctggaatgcaatggtgtgatctcggctcactgtaacctttgcctccaacaattctcctgcctcagcctcccgagtagctgggatcacaggcatgcgccaccacaccaggctgattttgtatttttggtagagacagsgtttctccatgttggtcaggctggtctcgaactctggtgggcagtgcagtaggtgggaaaatatactggactaggagtcataagtgggttctagttttaacctggccactaactagttacatggcctcagggaaaacacttttaatgagagagataagcttactcacttctaaaatctcttccagctaaacaaatttagaagtgcacaagtaagaaattaacatac

SEQ ID NO: 174723 - DNA, 390 bp, Homo sapiens
attgttgttgttgttgttgtatggatgggggctcccataaaaatatttttaagggaatactatgaacaactttatgccaatgaattagataaatgaaatggaaaaactcctaaaaagacacaaactaataacactgactcaagaagaaacagaaaatctgaagagacttataatgtgtagagagattaaattagtaatcaaaaaacaacccaaagacaagcccaggtccagatggcttcactggtaaatactaccttaagaattaacaccaattattcacaacctcttccaaaaacagagaagaggacaraacataccccaacagattccatgaagttagcattaccaaaaccagatgaagacataacaagaaaacaaaactacagacca

SEQ ID NO: 174724 - DNA, 509 bp, Homo sapiens
atcaaacaattcaactttttattggaatgtcgtgactttttctctgctttytgggagcacttccagcatcactagtggcatttcatatgagtccttttggtgttattctaggtttacggtatggcgctaaacacggggaaatatacctaaggaatttttattgcaataaacaatttactggagagaggaactgctcaagcagagatgattagcgtcacattgtgttttaagtagatacgtgcaacacttgagctcagcagaacagcaacaggaggtagctacaaaattgttacagtagtacagtatggactacagttaattttatgcatttatgatttaatactgtatctttatgtttgtttacgtttctctcaactgtgaatattgccatgtaaggtcttgtgtttgtatgccaaagttttgttaaattttaactttttataatagatttgtatatattttatggtattaaatgataaaacattagtatctacatatattttgtgcat

SEQ ID NO: 174725 - DNA, 543 bp, Homo sapiens
atgtccagtctactaatgagctcatgaaaggcattcttcatttctattacagtgtttttgatatctagcatttattttttatttttttcttagaattccatctctctgcatacattaatcatctatccttgcatgttgtctatttttttccactagmactcttagcatattaatcacaattttaaaaaatttttagttcagagtatctgccatatctgaatttggatctgatgtttcctctgtctcttcagactttactttttaatatatcttgtaatttttttgttgaaaattggacatgatgcactggagaaaagaaactgttgaataggcctttaatgatatggtaataaggtgtaggcatcagggaagtattattctgtagttctataattaagttgcacacatttagtgagcctgtttccttgcactgtaatcttcacaagtgctactcggtcccttttcctccccttacgtagggcagataggatgcctagagggagttggagttggatatcccttcctcatataattgttttgtag

SEQ ID NO: 174726 - DNA, 558 bp, Homo sapiens
attggcagccactttctgtctctttgcagaaaaagtgcccctagagtaggacagaataagactgacacatagacaggagaaagcccagacaactttgtgtgaacccttaatcccattgtgcctaaagtccctgattagccgttgacttctcagttatgtgaacattttttctttgcycaagctagttctatatggtttgtgcacttaaaactaaagaatcatgactaatacacaagtaagcccccatccccctacaaatgatatctcatagagcacctctaacatataagacagataaaagtaggtctgctctgaatgaggaagaaatagaagtcctaaaatcttaccatgtggctcttccggggtgtgatagttaattttatatgacaacattactaggttaaaagatacccagatagctgataaaatatcatttctgggtgtgtctatgaggatgattgatccaggcaatcaaagggaaattggataaccactccataatggaggtaaagaagcatatgtctagaatacaggatatcccatggggcatatcttagt

SEQ ID NO: 174727 - DNA, 558 bp, Homo sapiens
attggcagccactttctgtctctttgcagaaaaagtgcccctagagtaggacagaataagactgacacatagacaggagaaagcccagacaactttgtgtgaacccttaatcccattgtgcctaaagtccctgattagccgttgacttctcagttatgtgaacattttttctttgcccaagctagttctatwtggtttgtgcacttaaaactaaagaatcatgactaatacacaagtaagcccccatccccctacaaatgatatctcatagagcacctctaacatataagacagataaaagtaggtctgctctgaatgaggaagaaatagaagtcctaaaatcttaccatgtggctcttccggggtgtgatagttaattttatatgacaacattactaggttaaaagatacccagatagctgataaaatatcatttctgggtgtgtctatgaggatgattgatccaggcaatcaaagggaaattggataaccactccataatggaggtaaagaagcatatgtctagaatacaggatatcccatggggcatatcttagt

SEQ ID NO: 174728 - DNA, 558 bp, Homo sapiens
attggcagccactttctgtctctttgcagaaaaagtgcccctagagtaggacagaataagactgacacatagacaggagaaagcccagacaactttgtgtgaacccttaatcccattgtgcctaaagtccctgattagccgttgacttctcagttatgtgaacattttttctttgcccaagctagttctatatggtttgtgcacttaaaactaaagaatcatgactaatacacaagtaagcccccatccccctacaaatgatatctcatagagcacctctaacatataagacagataaawgtaggtctgctctgaatgaggaagaaatagaagtcctaaaatcttaccatgtggctcttccggggtgtgatagttaattttatatgacaacattactaggttaaaagatacccagatagctgataaaatatcatttctgggtgtgtctatgaggatgattgatccaggcaatcaaagggaaattggataaccactccataatggaggtaaagaagcatatgtctagaatacaggatatcccatggggcatatcttagt

SEQ ID NO: 174729 - DNA, 633 bp, Homo sapiens
taggtctgctctgaatgaggaagaaatagaagtcctaaaatcttaccatgtggctcttccggggtgtgatagttaattttatatgacaacattactaggttaaaagatacccagatagctgataaaatatcatttctgggtgtgtctatgaggatgattgatccaggcaatcaaagggaaattggataaccactccataatggaggtaaagaagcatatgtctagaatacaggatatcccatggggcatatcttagtattaccataccctgtaattaaggtcaatggaaaactacaattcaatccaggcaggactacaaatggcctagacccttcaggaatgatgktttggatcaccttgctaggtaaagagccaagaccgaatgagatgtttgctgaaggcaaaggaaacacagaatgggtagtataagaaggtagttataaataccagctacaaccacatgaccagttagaaaaacaaggactataatcatcatgaatatttcctccctaatttttataagtaaatttgtgtgtatatatacatatatgaaggaaatacctttgttttcttccctttactgacttatgtaagtatgtataagtattttcctcatagtatttaagttatggg

SEQ ID NO: 174730 - DNA, 605 bp, Homo sapiens
tctgctctgaatgaggaagaaatagaagtcctaaaatcttaccatgtggctcttccggggtgtgatagttaattttatatgacaacattactaggttaaaagatacccagatagctgataaaatatcatttctgggtgtgtctatgaggatgattgatccaggcaatcaaagggaaattggataaccactccataatggaggtaaagaagcatatgtctagaatacaggatatcccatggggcatatcttagtattaccataccctgtaattaaggtcaatggaaaactacaattcaatccaggcaggactacaaatggcctagacccttcaggaatgatggtttggrtcaccttgctaggtaaagagccaagaccgaatgagatgtttgctgaaggcaaaggaaacacagaatgggtagtataagaaggtagttataaataccagctacaaccacatgaccagttagaaaaacaaggactataatcatcatgaatatttcctccctaatttttataagtaaatttgtgtgtatatatacatatatgaaggaaatacctttgttttcttccctttactgacttatgtaagtatgtataagtattt

SEQ ID NO: 174731 - DNA, 633 bp, Homo sapiens
taggtctgctctgaatgaggaagaaatagaagtcctaaaatcttaccatgtggctcttccggggtgtgatagttaattttatatgacaacattactaggttaaaagatacccagatagctgataaaatatcatttctgggtgtgtctatgaggatgattgatccaggcaatcaaagggaaattggataaccactccataatggaggtaaagaagcatatgtctagaatacaggatatcccatggggcatatcttagtattaccataccctgtaattaaggtcaatggaaaactacaattcaatccaggcaggactacaaatggcctagacccttcaggaatgatggtttggatcaccttgctaggtaaagagccaagaccgaatgagatgtttgctgaaggcaraggaaacacagaatgggtagtataagaaggtagttataaataccagctacaaccacatgaccagttagaaaaacaaggactataatcatcatgaatatttcctccctaatttttataagtaaatttgtgtgtatatatacatatatgaaggaaatacctttgttttcttccctttactgacttatgtaagtatgtataagtattttcctcatagtatttaagttatggg

SEQ ID NO: 174732 - DNA, 633 bp, Homo sapiens
taggtctgctctgaatgaggaagaaatagaagtcctaaaatcttaccatgtggctcttccggggtgtgatagttaattttatatgacaacattactaggttaaaagatacccagatagctgataaaatatcatttctgggtgtgtctatgaggatgattgatccaggcaatcaaagggaaattggataaccactccataatggaggtaaagaagcatatgtctagaatacaggatatcccatggggcatatcttagtattaccataccctgtaattaaggtcaatggaaaactacaattcaatccaggcaggactacaaatggcctagacccttcaggaatgatggtttggatcaccttgctaggtaaagagccaagaccgaatgagatgtttgctgaaggcaaaggaaacacagaatgggtagtataagaaggtagttataaataccagctacaaccacatgaccagttagaaaaacaaggactataatcatcatgaatatttcctccctawtttttataagtaaatttgtgtgtatatatacatatatgaaggaaatacctttgttttcttccctttactgacttatgtaagtatgtataagtattttcctcatagtatttaagttatggg

SEQ ID NO: 174733 - DNA, 553 bp, Homo sapiens
atcagtgactacaggaaattacttaatagttttgagcctcaatttacacatctatagaatggggaaggaaggaagggtttrtaaggatttataagctggtttttgccctctggatgacattgtgtctctctagtacagaagatcatgagctctgctctctgcaggatatcaacttgagagacagagggaatcatagacatgctaatactctggcaatttcaccaacagttaagctacattagtactgctcaatactgcatcatttcaaagatagcatccagtgctaatatctttggaatcagcaacattttccaaaagtagtgatgcatcatagatcttatcaatatcactaaaaatggactcatatctaggcacatggaaagttaaagcttaattatggatcattgctgtgcagtaaatataggctgtgttcaagtagcaaatagtctcaaataactgaaaccattattttgaagagaatagtctgaactgaaatctacatttattattaatgttcctgatgttgtcagaaaagcttaatattttcttttat

SEQ ID NO: 174734 - DNA, 553 bp, Homo sapiens
atcagtgactacaggaaattacttaatagttttgagcctcaatttacacatctatagaatggggaaggaaggaagggtttgtaaggatttataagctggtttttgccctctggatgacattgtgtctctctagtacagaagatcatgagctctgctctctgcaggatatcaacttgagagacagagggaatcatagacatgctaatactctggcaatttcaccaacagttaagctacattagtactgctcaatrctgcatcatttcaaagatagcatccagtgctaatatctttggaatcagcaacattttccaaaagtagtgatgcatcatagatcttatcaatatcactaaaaatggactcatatctaggcacatggaaagttaaagcttaattatggatcattgctgtgcagtaaatataggctgtgttcaagtagcaaatagtctcaaataactgaaaccattattttgaagagaatagtctgaactgaaatctacatttattattaatgttcctgatgttgtcagaaaagcttaatattttcttttat

SEQ ID NO: 174735 - DNA, 553 bp, Homo sapiens
atcagtgactacaggaaattacttaatagttttgagcctcaatttacacatctatagaatggggaaggaaggaagggtttgtaaggatttataagctggtttttgccctctggatgacattgtgtctctctagtacagaagatcatgagctctgctctctgcaggatatcaacttgagagacagagggaatcatagacatgctaatactctggcaatttcaccaacagttaagctacattagtactgctcaatactgcatcatttcaaagatagcatccagtgctaatatctttggaatcagcaacattttccaaaagtagtgatgcatcatagatcttatcaatatcactaaaaatggactcatatctaggcacatggaaagttaaagcttaattatggatcattgctgtgcagtaaatatrggctgtgttcaagtagcaaatagtctcaaataactgaaaccattattttgaagagaatagtctgaactgaaatctacatttattattaatgttcctgatgttgtcagaaaagcttaatattttcttttat

SEQ ID NO: 174736 - DNA, 612 bp, Homo sapiens
catagttttttcataacacacattttctatgaacttgtgaagagccctcatacacctctcacttactttgtataatttactttcaagctgcaaccacactcaaggtgtggrtcacagctatcctggccacgtgcaaggaacaaaacaaaaaacgactttaagatggaagatatattaaaaattagggctgacttagaagtgtagagcagctgtgtttaataaaaaatcatgaaactaggaaataaaagacctaggttcaagttctacctctgctactcagttgtggtaggaccttggtcaagctatttaagatttctaagcctagtttccatatgtataatttaagaaccattcactcattctcatggtttttatggtatagagggagagttaagtattaaataatcatacaacaaatgaatgaggatttgaagacaactaatatggtcctttcagagaatagaacaaaagtacctgacctccttcgtagcaggtgatgcttcaacttggatttgacagatgagtggtcattaattcactgaaaggaggaaggagttaagaggaagtatattctaggagaaggtaccaccatgttcaaaggctccgtagtgg

SEQ ID NO: 174737 - DNA, 585 bp, Homo sapiens
ggtaaagggaatgggtagttgaggatggttttctccattgtgtttttccttgaatgactggatatgtgctagtgacatttattgagacgaagaaggctgggagaagagacgacatgggggcataagattaaaagtgggaagagttgtggaggaatttatgggttaggccagtggaaacttccatctttatcccactggctaaaactcaacctcacagccagatctaactgcaagggagactggggcaggtaatctaggtgtgtgacctcaaagagaagaaaagtttggtgatcatctctcccatggtgcaccactggccacttgattcttaggtacgaaagcttctcaacctaagagtcattcaactcacgacttgggccaggggtcctttcttctcagtcatgacctcactcagccacttgggagctgagccagcccacatttaggtaagacctgagctagaatttggagtaggttcccctcctttctccccctgagttcagttaacttrtttttatcctgtagctctaactctggactcaatctttttttttcttttttaagagacaagctcttgctgtgtcc

SEQ ID NO: 174738 - DNA, 490 bp, Homo sapiens
ctataatttgtgcaataacatcaaggttgctttgatgtaaaggcgggatttatagcaagtacatgttctcacattgaggacagtaaatagagtgggaatcagaaagcattcctgggactgaggttaataagtcaacatagctattaacatttaatatggagtcactttgtctgcacacagtccatgccacttggactggccctatttcagtgctcaatagctgtgtgagacctgtggtaacttygttggtcagtgtagcatcagagccaacatgaagatcccagccaataaagatcccagggcttgctggcattctccaggactgacctctggaaacaactggttctcttaatacaattaggaagaacaaatactaactaagcaaaaaccagaataattgttttgaggtagattttactgagtactcagtgtatttatccattcagctctctgggagttgcacaggaggttaacatattattatagatct

SEQ ID NO: 174739 - DNA, 532 bp, Homo sapiens
actgagaattattagatgatgactgtgaaataggttctcccagtacaayactacttctgtcattcaaagttctgacaacagttgtagctgaagactgaagcactttatgagaaagcctcattcttccatcagctgggtcacatccaaagtatttcacctgaatttcttggccaacttctaatcctagggcagtaggatgtttaatatttcattgatcaagttgtgtgttataaagcagtaccaaaatcatatttggatataattttaccattacaccagtatctctgctttcagttattgtggcagtacacactgctccaaattctaattgctgctcctgatcatccttgcggatttcagcaatgaagtctcttgcctcatgcatagcaccgggtgttggtgcaaatatagaaaacgtttcttcatccacctgactaatagttacaactgtttcagcctgaagttttttaagttatatccacctggtccaacaaatttttctcattttgataatggaacctgaacagtttct

SEQ ID NO: 174740 - DNA, 537 bp, Homo sapiens
atcactgagaattattagatgatgactgtgaaataggttctcccagtacaatactacttctgtcattcaaagttctgacaacagttgtagctgaagactgaagcactttatgagaaagcctcattcttccatcagctgggtcacatccaaagtatttcacctgaatttcttggccaacttctaatcctagggcagtaggatgtttaatatttcrttgatcaagttgtgtgttataaagcagtaccaaaatcatatttggatataattttaccattacaccagtatctctgctttcagttattgtggcagtacacactgctccaaattctaattgctgctcctgatcatccttgcggatttcagcaatgaagtctcttgcctcatgcatagcaccgggtgttggtgcaaatatagaaaacgtttcttcatccacctgactaatagttacaactgtttcagcctgaagttttttaagttatatccacctggtccaacaaatttttctcattttgataatggaacctgaacagtttctac

SEQ ID NO: 174741 - DNA, 556 bp, Homo sapiens
tctagaattctctttaaaaagatcactgagaattattagatgatgactgtgaaataggttctcccagtacaatactacttctgtcattcaaagttctgacaacagttgtagctgaagactgaagcactttatgagaaagcctcattcttccatcagctgggtcacatccaaagtatttcacctgaatttcttggccaacttctaatcctagggcagtaggatgtttaatatttcattgatcaagttgtgtgttataaagcagtaccaaaatcatatttggatataattttaccattacaccagtatctctgctttcagttattgtggcagtacacactgctccaaattctaattgctgctcctgatcatccttgcggatttcagcaatgaagtctcttgcctcatgcatagcaccgggtgttggtgcaaatayagaaaacgtttcttcatccacctgactaatagttacaactgtttcagcctgaagttttttaagttatatccacctggtccaacaaatttttctcattttgataatggaacctgaacagtttct

SEQ ID NO: 174742 - DNA, 567 bp, Homo sapiens
aacaatgtcccatccatcaagggtgaattagatttgtccctggcttgaggacagaataagatgacttcacccgactccttataaacttataattttatgaaaaatccatragctctcatctttccagcactctgataacgaggtaattacccttttaatgaaaaaggaagcctttttatatctatccccattgaattatggacctcaaaattgaaatgaagtctaatagacatcaagcacaactacctgccagttcctaacaaggatgaggaaaaaaaaatagtgatatctggggagccaacgggcagtatgacagggtgtccttcctgccttctctgatgacactttgctatcaacaccagttcttccttttgtgccttactcagtttgtaagccagtctgcaacagtagaaaagtcattagtcacccttccctatctgttccatgggctttgaaatgaagccctggttcaggttcccatttaggtgtgactttctccattcctactatgttgactgtaatcaaagggctgggctcagtcctgacaacacgttcagatcccacact

SEQ ID NO: 174743 - DNA, 525 bp, Homo sapiens
gctatatgcttgcactttttaaaatmcgtacattacttttgtgcatatgttacctgtgattaccacaaataaagattctacacaaatatacatctgcacaaatatttgcataaagacagaaaataattctaaacactatactgaattcacagctaaaattttaaaaaacttgttaaattaaccagatccatgatataaataagtgaacaacactataaaagatgactttagaagattccttttatgtctgtgtattataaactgtccatcttatgattcatccctggtttcttgaataaaatcattaaaatagttgtcagctcttatagacctgaagcaatgtgatcaactttccgaaggtataggaaagagaaatgaaaagagccaaaggctgtttccattttgaaaacataggctttgggtataaaaaacaaaagtaatacttggcttagattggtacctatgttaacttaattacaaactgatcttttattgtttttaattaaatgctactgttttcaattt

SEQ ID NO: 174744 - DNA, 316 bp, Homo sapiens
tctgggagagaggaaagggacactccagcttgaatccaaactttgaccaygtctggtatgtctggccaactgctgccagatgttgaggtgggcacagccagaagtccaagggaatgacagggtgagaaacctcctgggaagaggacgttccaacaggaatcaggcatattcctgttggacctcagcctcagagtctagtggtcagagtggcaggttgtgcccaaattgaagcaggctgtctctccactctgacgtgtcccaagtttagccccatggactcacagctatacaccctggacgaggggcacactggaag

SEQ ID NO: 174745 - DNA, 316 bp, Homo sapiens
tctgggagagaggaaagggacactccagcttgaatccaaactttgaccatgtctggtatgtctggccaactgctgccagatgttgaggtgggcacagccagaagtccaagggaatgacagggtgagaaacctcctgggaagaggacgttccaacaggaatcaggcatattcctgttggacctcagcctcagagyctagtggtcagagtggcaggttgtgcccaaattgaagcaggctgtctctccactctgacgtgtcccaagtttagccccatggactcacagctatacaccctggacgaggggcacactggaag

SEQ ID NO: 174746 - DNA, 487 bp, Homo sapiens
agataagcaagtcatggtacatctacacaatagaatacaacagtaataaaaagtaatgaactactgttatacactaaatgtgaataaacctcacaataatcactttgaaagaaagcaatccaaaaagaggagggcatgatgtataatttcgtttacataaaattctaggaaataaaaagtagcttatagtgccagaaagcagaccagtgattgctggggatagggtcagggcagatgggrggaagaattatgaaaggagcaaggaaacttttgtaggtcatgtgcatgttcattatctttattttggttatcatttcacatgtatataacattgtactttttaaatgcatgcattgtattatacgccatcctattttaatttgtttgctttaaaaacaaaacaaacaaaaacagtacaacaacaaaaacaaaaaagaccagaaaaaaaaaaaaaaaaaaggctgggagatgtgaaaaaggacccaaa

SEQ ID NO: 174747 - DNA, 329 bp, Homo sapiens
aagttaataaagtctttaccattgcaattaggaattaaattgcattcgtttgatttcaagatttcatgatttggataatggctttgctcaaaactacctttaattttttctatgaaagaagggtaaataatatttgcccttgtgtaaataagattaagggggatggttgccatgctcaggaggagacaggtttcgtgccatcttcacagaagrccataaatctgatgattgctcatttttcccatctctgttggatacaaagttccacgaagaaaaaaatctcagttgcagcttcagcacctggacagcatttggtacagaatggggtt

SEQ ID NO: 174748 - DNA, 403 bp, Homo sapiens
agaaggaggaacaagtgacatcagtactgacagcagaaggaagagaaaagtttgttaggtgaaaagaaagaacagaacattccagaaaaagaagaagtatatgctgatgccctgatgtggaagggaattgcccccattaggagcagaaagaaggtcagagagttctggagagtggtggggggaaggtgggagatgggtggagacaggcgggggctttcctatcaggttagatatatccagggaggccattgaaggttataggttggatagttatgatcagacttgggttctgaaagactacaaggctgacatttgggtaccratgggtggtctggaaggggtacaagagggctgaaagagaaatgatgattggatgtggttgatttccatggagatggagaga

SEQ ID NO: 174749 - DNA, 558 bp, Homo sapiens
ttgatgctggaatgagtaaggctatctggggctgttggggtgggataagtgtatttgcggtatrtatttggaaggtctggggaagaatgctatgaactgaatgtctgtgtcctggcaaaattcgtaatttgttatagcagtctgagctgaataagatgtagaccacactgcctttctttcagggatgagttcatcaccacaatgaaatacttcagaaatgtgtgtaacagcaataagagagttttctcgatgttacactagattcagaacagagccagaccaccagaattttcataggactaggagggtttaaggtaggctctgtcatataacagctccatgacacaggctatctgcccagccccattttctcacctgtgaactactgcccaagacactgtgacatatcatgggataatacccactttgggctacctttgaggatttttataagaatagaaatgagacattaaaagtaataataatgccatcagacacactgcttcttggccaattgactgattttaagaatgtgaaattctcagccatttacatagc

SEQ ID NO: 174750 - DNA, 597 bp, Homo sapiens
tgtacttctatgcattcatctatgtttctttcaagaccattttatagagctctccctctctcactacaaagcaccttttcaatttgtcctggagttctacttgggagatgcctggactatcacttaaggctcctggcccctgctctgtattcttacattgctctatgctttcttatgttatgtgttccactcagcacacccctgatctcatttttgaatgagcctgaagaagcttgttaatccttgaaaacccaattaactgttgcttcctcacttaaaccttctcaacatgactgtttccttttcatattttcctaaagtacttgataaatagtctgtagtggagtaaaaaaaaaaatctcattaccaggtaacagaattattcttaggaaagaaatcacctttgtttgggaaaaggtcttcataatccccaaaataagtaacatattagcaaaagttccggcaacaaaataaatggtccaatgattgtgaatgagaaatgaatagaaattagcgggtagaggagactgggcaaaaatagttgactaacasggcagagcagcttaaagacttacaacagggatgtcaatacttaat

SEQ ID NO: 174751 - DNA, 604 bp, Homo sapiens
tacagaaaagaatttctattgtttaaaaattgttcagtataacaaccagcactgaacctgaatcaatgggcagtaataatccaacacacacataaatggcgtttgttatatatgattccttctgtgcctcctatttgtactcttacctgtaaaaagcaatttatacaagtatcttttttaaagtatgcactgcatgtaactcttgttctttcaagcaaacatacmcaggcatacacacagaaatccacacctacatcacacaaaaagatttagaaagagcgcagaaaaacattctatggaattaatgtccctgtgttaaggactcagatatattcttaactgcaaagcataattagatcttatgccattagttaaaagagagaatgcatattcttagcaattatactcctattacaatttccatcactttaaaatgtgaaatttttaaaaatgctattaaaataaaatcatcaggagatgagacacatttaaaattagaagacacttttataaaagcaaactttctgaagttgaaataaattttaatactttaaatcaatttttccaagaatgctagagtctctcttaactgacaaaattcaac

SEQ ID NO: 174752 - DNA, 547 bp, Homo sapiens
gagggtctttgctttgactttctgtgtccctaggtctatctgactctctctggattcagaagtttcacaacactgttctctagttcctgggcactctgatatctctcaccattctccagaagtgtggtttgcaaaattctgcctgtctgccttctgattttcacaaggccttgatcctaactatgattttaattctgagacaatagaaatgcagagaagttagttatttgctcagtgcaatgaattagcaacagggctgaaataaaagcagagttctacattcttgggaataggatgaaatgttatcctatcacgcttctagcaaaatgccaagaaatgcttaaggcatttttcacatcatgaataaactttgagagtagcataagatgttcaaatacataaggaaggcttttcttggtacaggcatcaaaaaggcaactgtaaataatgaataactgtgtcaacagattcasagtgcatacgtcccactgctatgttctttcagatttagcattgctacagagtaattatggggttcttactattt

SEQ ID NO: 174753 - DNA, 622 bp, Homo sapiens
tctagttcctgggcactctgatatctctcaccattctccagaagtgtggtttgcaaaattctgcctgtctgccttctgattttcacaaggccttgatcctaactatgattttaattctgagacaatagaaatgcagagaagttagttatttgctcagtgcaatgaattagcaacagggctgaaataaaagcagagttctacattcttgggaataggatgaaatgttatcctatcacgcttctagcaaaatgccaagaaatgcttaaggcatttttcacatcatgaataaactttgagagtagcataagatgttcaaatacataaggaaggcttttcttggtacaggcatcaaaaaggcaactgtaaataatgaataactgtgtcaacagattcagagtgcatacgtcccactgctatgttctttcagatttagcattgctacagagtaattatgggrttcttactattttgttatctaattttgcatgtgagatacctttaggccaaaatatttccttatgtcctgatttaattgccaaaatcccagccatattgtcaaatgcaaattacattctatcccatccaggatgtctttaccatgataggaaaggaaattctcctc

SEQ ID NO: 174754 - DNA, 622 bp, Homo sapiens
tctagttcctgggcactctgatatctctcaccattctccagaagtgtggtttgcaaaattctgcctgtctgccttctgattttcacaaggccttgatcctaactatgattttaattctgagacaatagaaatgcagagaagttagttatttgctcagtgcaatgaattagcaacagggctgaaataaaagcagagttctacattcttgggaataggatgaaatgttatcctatcacgcttctagcaaaatgccaagaaatgcttaaggcatttttcacatcatgaataaactttgagagtagcataagatgttcaaatacataaggaaggcttttcttggtacaggcatcaaaaaggcaactgtaaataatgaataactgtgtcaacagattcagagtgcatacgtcccactgctatgttctttcagatttagcattgctacagagtaattatggggttcttactattttgttatctaattttgcatgtgagatacctttaggccaaaatatttccttatgtcctgmtttaattgccaaaatcccagccatattgtcaaatgcaaattacattctatcccatccaggatgtctttaccatgataggaaaggaaattctcctc

SEQ ID NO: 174755 - DNA, 408 bp, Homo sapiens
tgtaaatgttgcaaataaaagtaaaaactagtagttaggcaatgtgttttaaactatagtgtcacctactgttcttctggtgcctaactgtattcttcaacatcttcttttcccttttgattagaaatcctggtctacctcaaaggttttgcattgttttctagggacatcagcaaactggtagaccatatgagaaacagaaataaacagtaatattatctttagaaattaagcattatgtacacagtgagaaatgattgacttgatagaccttagacccccttcctccctccacaccctttctagracaacctaatgttatctgtattgtgatggtgccctctctgttaatcaccctcaagtcagtacagtgacccctagggcccattttctttcgattagagaatt

SEQ ID NO: 174756 - DNA, 468 bp, Homo sapiens
ccttttttttttttttgccaagagaatcctatgccttaaatcttacctttttcagccattattcctgttggtgggtggctaggtcaggccacgcttacctctttcttttgttatccagygtctctttgaactttaaatagagagaaatctgaagattgcggcagctgcccgtctcctggctgccaattgtctgcagagtgatgtaagtcatgggaaagcagaactcctctggctctttattctattattatggaggaaacgaggggctacatgacctaaacaattaggtaagctgaattatcctaatgcagatattcgcaggtttttaatttgcaccatgcctttaggtaacatgaagaaaatgttctataaagaaggtgtacagaggaaaaacaacattccacctatacaagtgctatcaaggagaagggtgatatattagaaagaaaggattttgatgttggagag

SEQ ID NO: 174757 - DNA, 468 bp, Homo sapiens
ccttttttttttttttgccaagagaatcctatgccttaaatcttacctttttcagccattattcctgttggtgggtggctaggtcaggccacgcttacctctttcttttgttatccagcgtctctttgaactttaaatagagagaaatctgaagattgmggcagctgcccgtctcctggctgccaattgtctgcagagtgatgtaagtcatgggaaagcagaactcctctggctctttattctattattatggaggaaacgaggggctacatgacctaaacaattaggtaagctgaattatcctaatgcagatattcgcaggtttttaatttgcaccatgcctttaggtaacatgaagaaaatgttctataaagaaggtgtacagaggaaaaacaacattccacctatacaagtgctatcaaggagaagggtgatatattagaaagaaaggattttgatgttggagag
